United States Patent Application Publication US 2020/0109395 A1 - sequence listing, part 10

SEQ ID NO: 42631 - DNA, 3432 bp, Xylella fastidiosa EB92.1
atgcgtgagacctccacacttggcctaaatttcgttgccgatgacaagcgtgtcggcttccggctacagcacctagaagtagtgaactggggcaccttcaacacccgtgtgtggtgctacaccctgggcgggcgcagcggcctgctcaccggcgacatcggttcgggcaagtccacactgattgacgcaatcaccaccctgttggtgccagcgcagcgcgtggcctacaacaaggccgctggggccgatgcccgcgaacgctcgttgcgctcctacgtgttgggctactacaagagcgaacgcaacgatgccaccggcaccgctaagcccgtagcattgcgcggcacgtcggactactccgtcatcctcggcgtcttccacaacgtcggctatgacaaggtcatcaccctggcccaggtcttctggctgaaggactcccaaagccagcctgcccgactgttcgtggtggcagaacgcgcccttggcatcgccacggacttcaacaacttgggcggcgacatcaagaccctacgtaagaagcttcgcggtgcagggtgcgagctgttcgacagcttcccaccctacggggcgtggtttcgccgacgcttcggcatccaacacgagcaagcgttggagctgttccaccaaaccgtctcaatgaagtccgtgggcaatctcaccgacttcgtgtgcagccacatgctagaaccctgtgatatgggcagccgcattgaggcgttgatctgccacttcgacgacctggaccgggcgcatcaagccgtgctcacagccaagcagcaggtgaagttgctcgcccccctggtcgaggacggcaagaagcaccagacgcagctaggcaatattcaaaccttggaggctggacgtgacacactgcggccctacttcgcacagctcaaaggggaactgctgaagcaccgcctggaggcactggcagccgaagcggcccagctaactgtggagatccagcacctggaagaacagcgcaaggccgcagacagtaaagtcacccaactgaaacaggatatgcgagacaacggcggcgaccgcctggaagcgctggcggcagagattgagcaactggagcaaaccaaggcacaacgccaaaagaagtccgaccgctaccaaacgctactgaccaagattgacgagacagcgccagccgatgcaataggcttctccacccagcaacagcgctttgcgcaacataccgaggaattaaacgcagccattgcgacgttgcataacgacaagagcgaaaaggatcgtgctctctacgatgctcgggaaaagcacaccaaactattggcagaaatcaacagtctgcaacagcgccagagcaacatcagcgccgcccagatcggcatccgtcatgatctgtgtatggcattgtccattgatgcggaggcattgcctttcgcgggcgaactcatccaggtgcgtgaggacgcacgcgattgggaaggcgccgccgagcggttgctacacagctttggcctcaccctgctggttccggacgcgtactacaaggctgtggccgagtgggtgaaccgcgagcagttgcagcgccgtctggtgtatttccatatgcgtccacgcaatacgacgcaggatgcagcgttacatgcgcagtcgctggtacacaaactcatcatcaaaccggagtcaccacactacacgtggctgcaacaggaacttcagcggcgctgcaacgtcgtctgctgtgacaccatggagcagttccatcgtgaggtccgcgccatcacgcaggcgggccagatcaaagaccccagtggccgccatgagaaggacgaccgccatcgcattgacgaccgcagccgctacgtcctcggctggagcaatgccgacaagctgcacactttgaacgcgcaacggcaacacctggaagacagcatgggcatgttgggacaagacctcggcaccattcagcgggaatgccagaaacaacaggaacggctggatgcactcaacaagctgggggagtacccggactttgtggacatcgactggatgagcctggtccgccagattgccggactcaaagaggaacacgcggagctccaaaccacatctaacattttgcaaaccctgcaacagcaactcacagaggcgcagacgcgagtcaaggtgctggaggacaagtgcaagaacgcgtggcacgaacagggcgaggtcaagagcaaacaaaaaacggcgcagcagatgtggaatcaggcccatagcgcttgggatgatgcgccgctgagccaagcgcagatcgcgctattggctggctggcgccagcaagcgctgggggagcacgtgctatcggtcgaatcttgcgacaaccacgagcagcaagttcgccaatggctacaaaaacgtattgatgcggagaacgctcacctgagacaactgaatgaccgtattacaggcgccatgcaccgcttcaaagatcagttcaaggctgagaccgtggagatggacgcagacttggcggcgctgccagagtatgaacggatgctcaacggcttgcagaaggacgacctgccccgattcgaggcgcgcttcaaagcactgctgaacgtcaacaccatcaacgagatcgccagctttaacgcccaactcaaccgtgagcgggagacgatcaccgagcgcatcaaggacatcaatcaatcgctgcacggcattgactacaaccaggatcactacatcaaccaatcactgcacggcattgactacaaaagggggcgctacatcacgctgctggcacaacccagcccggacgctgagatacgcgacttccagcaggatctacgggcatgtaccgaaggtacgttgaccggttcggacgatgaacagtattcggacgccaaattcctccaggtcaagcacatcattgaccgcttccggggccgtgaagggctgtcggatgccgaccggcgctggacggccaaggtcaccgacgtgcgcaactggtttgtgttttcggccagcgagcgctggcgcgccgatgagagcgagtacgagcactacgccgactcgggcggtaaatctggcggccagaaagaaaagctggcctacaccgtgttggcggcaagcctggcctaccagtttgggctgaagtgggatgaggtgcgttcagaatcgttccgcttcgtgattattgatgaggcgttcgggcgcggctcggacgagtcagccgagtacgggctgcgcctattccaaaagctcaacctgcaattgttgatcgtgacgccgctgcagaagattcacatcattgagccgttcgtctccagcgtgggattcgtgcacaacaagggcgggtgcgactcgcagctacgctgcctgtcgattgaggagtaccaggcggagaaaaccaatggaagcggaccgagaggcgacgcccgatga

SEQ ID NO: 42632 - DNA, 1206 bp, Xylella fastidiosa EB92.1; identical to SEQ ID NO: 41644

SEQ ID NO: 42633 - DNA, 1632 bp, Bifidobacterium longum subsp. longum KACC 91563; identical to SEQ ID NO: 42278

SEQ ID NO: 42634 - DNA, 675 bp, Bifidobacterium longum subsp. longum KACC 91563; identical to SEQ ID NO: 42279

SEQ ID NO: 42635 - DNA, 3549 bp, Bifidobacterium longum subsp. longum KACC 91563
atgatgcaggcgacagacgtgcagatgatcgcggaccggtggatgctggaatcccgccgactcatcaactggggctcctatgagggctaccacgaattccgcccctccacggaccacaagctgccggtgaccctgctcgccggcgccagcgaatccggcaaatccacgctggtcgacgcgcagatctccctgctgtacccaaccggcacgccgttcaacaaggcctcgaactccggccgctccgaacgcagcgactacacctacctgcgcggcatggtcggcgtgggcagcaccgaaaccggcgacgagccgctctacctgcgcggccgcgacgagaacggcgcaccgcaacccgtgtggggcgccatcgtggacacctatcgcaaccagaccaccggccaggtgctctcctgcgccaaattcctctacctgatgcccggcgacggccgcggcgacgtgcgccgacagtacgtggtctggggcaagcccgtggaccccaggcgcatggaccaataccgtgacgccccgttcacgccggcccagctcaaagccacctaccccgactgcctcacattccccagcgccgaagcgttccacacacacatctggagcgcaatgggcctgagcgaggccgcctgccgactgctgcacaagatccagtccgccgacgcgccctcccggctcgacgacatcttcaaacaaggcgtgctcggcgtgcccgaagccctggacctggcccgcaccacggtcgaggactacgaacgttacgacgagaacttccacgccatggacgagaagacccgccgcatggacacgctgcgcggcatccaacaggcctacggcgaatacgccgccgcacgcggcaaggcccgcgccttcgaaccggtcaagccggccgtcgacggcacggtgccggccgtgctgcgcgactgggcattggcccgcatgcgcggcgaagtcgccgtccaactgcccgccgatcgcgccgaacaacagaacagcgaggcggaagccaagctgctgcgccgccgaaccgaagacctgcgcacccgtctcgacatgatccgaggccagatgcagggtctggacggcggcgacctgacccgactcgaactcgaactcgaccaggcccgccgcaccctcgaagacgtgcaagccaaccgaacacgaatcaaacaaacgttcgcatccatcggcgagacgctgcccggcgacgaacaggcctggaacgaacgccgcatcaacgccgtgaacttcaaacgcgaatacaacaaacgagacggcgaatgcgaggaagccctcaccgccgccatcaacgcgcgggccggcgcacgcggcgacctcgaacgactgcaacgcgacttcgaccggcaacgctcccagcgcacccgcatctcccagcagatggacgaaacccgcgccatgctctgccgcgccaccggactcacccccgccgaactgccgtacgtggccgaactcatggacgtgaacgaacacgaggaagactggcgtctcgccatgaacgtcgcctacgcgcccatcgcccagaccatcctcgtcgacaagcgccacgaacagggcttcgccgccaaagtcagcaccatcgacccgcgcaccatgccccgacgcacctggcagttcgtggacaccgcacgccactacgacgacaccggcgcgcacgcgaacatactcaccggagaacaggacggcgactggctgtccggcaaactgcgctaccgcgacgactcgcccttcgccgactggctgcgctcgcagacccaggacgaacgattcgacgccctatgcgtcaccgccatcgacgacaccgaccgcaccaaccgtcaggtgcaggccgacggtcagatcaaatccggcgcacgcggccagcacggcaccaaagaccgcgcccaggtcatcggattcgtcaacgaaacctacctcaacgcgctcgcagcgcaggtcgacgccgcccgcaacgcgctcagccaagccgacaccgactacacggccgccaaaacacagtccgataacctccaccgcgaactcgaactggccaaccagctcgcctacacgtcctgggagcgcatcgacatcgccggcgcgcaacggaccatcacggacacgcaggacgccatcgcatccatcaaaaacgatcccaagctcgccgaactcgccaaacagcgcgacgaactgaacgccgaactcgaccgtgtggaacgccagcgcatcgaatccgaccaggccgcggcccgcgccggcagcgccgtcgaagcggcgctcatctggctgcgcgaccatgccgacaccggcacgacggacgccgccggtgccaccgccgacaatgacgatgacgccgcgtccggcccgctgccggacgaagtcacggcggcgctcgccgaatcctacgacaaccgattcgccggactggcggacgccgccatgcgcgcgcacatgatcatcggcgcgggcgcggcaggaacgcaggcaccgggggagagcttccccgaacgcaccatcgccggcatcggcaaggacatggcctcccgcatcaacctgctgaacggccaggccgatgccgcacgcaccggcgtcgaatcgaaaatgagcacctacatcgcgctctacgcggccgacgatgattcgctgaccgccagcgtggaggactaccggtactatctcgacgaactcgccagcctcacccagctggccgcggtcgccgccaccgacgccgaataccggcgctgcctcgaacagctgctcaggagcttcctgaccatcaaacgcgccatcgacacggatgccagcgacatccacgaccagcttgaccgcatcaacgccatgctcaaaggccagcagttcggtcccaagcacggcagcctgtccctgcacgcggacgtgcgccgtcccgagcgcaccttctgggcgcagctcatccgcgtcatcggcaccctgaacgattggaaatccgccgacgtcaacgattccgacgcctcgcgcaaggctttcgcggcctgcgcgccgatggtcgggctgctgcgcgccgaactcgcgcaggtcaaggacgcgaacggcgtgaaaagctacggcgcccgcaacctcgacccgcgttgccgctcgtccttctacgccatcgtgcatcatgccgacggcccggatgaacgcatcacctccaccggcggccgttcgggcggcgccttgcaggagcttacctcattcgtatacggcgcggcgctcatctacctgctcggcggcggcctgaccagcgagccctcgtacaccacgctgttcctcgacgaggcgctcatcaaggccgacggccgttacacgcagcgcgccctcacggtgctgccgcgcctcggattccaggtcatcgtctccgccccggaaagcaagaccggcgaaatcctcgaggtctccaccaaggcctacgtgacctacaaggaccccgacaccggcctcacctccctgcgcgaggccgtgctgcatcagaatgacatggacgatgaatcatcgtcggatatattgaaggatgacggggttgccgaatga

SEQ ID NO: 42636 - DNA, 1185 bp, Bifidobacterium longum subsp. longum KACC 91563; identical to SEQ ID NO: 42483

SEQ ID NO: 42637 - DNA, 1353 bp, Pseudomonas stutzeri ATCC 17588 = LMG 11199
atggaggatgcgctgcaagcgctgtccgaaatgctggctgcttatgccagccaggagctttacgagatcgacccggatgcaacgcatctccaagcaggtcgtgaacttcgtgaatggatcaagcggcgcctggtcgtagaacgagagggccgtatctacgccaccgacgcgttggagtccgccatccagttcgtcgattcgctggatagtcggatcatgacttccacggcatctcgcctttcggtggttcagcgcgagatcgagaaccttgaaacgggtctgaaccctagccctactggccgtattgccagcctgcgccgccgaatccaggatttgcagcacgagctagcgcaggtagaagctggccacgtcgtcgtgctggatgaagcgcaggcgatagaaggcatacgcgagatatataacctggccaccagcctgcgcgcagactttcgacgggttgaagactcttggcgcgaggctgatcgcgcccttcgacagtccatcatcagcgagcagtctcaccgtggagagatcgtcgatcggttgttggatgggcaagatgctctactcaacacaccggaagggcgtgtcttcgaaagcttccagcagcaactgaggcagtccgctgagctggaagccatgcgtgagcgcttgcgcaccatccttcgtcatccagcggttccagaggcactgaatcgtccccagcaacgtgagctgcgttggctggcgttacgcctggttcgggagtcgcaggctgtgctccaggcgcgtgctcgaagcgagcgcgatgttcgcggcttcatgaagacggggctggccgccgagcatcatcgcgtcggccagttactcaacgacttcttcaatctagcgctcagcgtcgactggcagcgccagtcagaacgccgtaagcctgtctgtttaccaccggttggcgtagccattaccggcgtcccggcaatcgagcgtcttcgtttcaagaccctggatgacgatgatgcgggcgagctggatctgagtttgaagcctgcggggctggagcagattgatgacgacttctgggatgccttcgacgggctggatcgtgaagcgctgattcatgacaccctggctgtgctggtggagcagggtcgccctgtgactctcggggagcttgcgtctttgcttccacctgctcacgacctggaaacctttgcgctctggctggcgatggcgcgcgaggcaggtatcgaggtgctgacagaggagcgtcagctcatggagctagttgacgaggatgagcaacgctggcgcttcaatctgccttatgtcggactcgaccacgaggcactcaaggacatcgattgggagttgtga

SEQ ID NO: 42638 - DNA, 750 bp, Pseudomonas stutzeri ATCC 17588 = LMG 11199
atggcagggatcttcgatcgaattgcaggcgcttctggcgccgacgaaacggagctggcggtggagcccatggcgttggatgacggcatggaggatgaccagcctgtcatgagcgccgctgtacaggtcgatgagcgccggacaccgcaacgggtacgcgaggccgtacaggagatgctcaagtacgggctgctggaagagagtcacaagcccaatctgtatcgctcagcgctttccaatatcgaggcggtcgacagaatcctggagccgctcgaccttgccatgggggtcgacgaggttcgcgggctggtattcgtcaccgttcgccagggcgaggtggccgagcaggatgactggtcgcaccccctcgtgcgtcggcaaaggctgaatctggagcagtctctgctgatcgccattctgcgacagcacttcatcgcgtacgaacaggaaagcggtacgggcgccagtcaggcgctggtggcggttgatgagctgattccccaattgcaggtttacctgggcgaactgggcagtgaggcgaaggagcgcaaccgcatcatcacgctgctggatcagctcaaggggcatggcctggtgtcggctctggacgcccatgatcgcgtcatcatccgccccatcattacccacctggccaacccggagaacctgcatgcactggtggcatggctgcgagagcaggtggagggtgcggctactccggccgccggtgatgaggaggacgaggcgtga

SEQ ID NO: 42639 - DNA, 1929 bp, Pseudomonas stutzeri ATCC 17588 = LMG 11199
gtgaagcaagcactactctggcgtaacagcgagaccttcattctcaccagcatcgaactctataactggggcggctttcacggctatcaccgtgccgagatcgatccttctggcaccgccgtgatcggcccgacggggagcggtaaaacgacgctggtggacgctctgatgaccttgctgtgcgccaatccgcgctacaacctggcctccaccggtgggcatgaaagcgaccgtgatctggtgtcctatgtgcggggagttaccggccccggggacggaggtgtggagcaatctcatatcgctcgccagggtaagacggtcaccgccattgccgccacgctcgagcgtgacggtacgcaggttcgactgggcgccgtgctctggttcgagggcacaagctcctcggcatcggatctgaaaaaactttggctgttaagcgactcccccgagcagactctgcagcattggctcagccagcatcacgcaggcggcatgcgggcgctgcgtcagatggagaaggatgggacgggtatctggccttatcccagcaagaaagccttcctggccaggctgagggattacttcgaggtcggtgaaaacgcattcaccttgctcaaccgcgctgccggcctgaagcagctcaatagcattgacgagatctttcgagagatggtgctggatgaccgctccgccttcgcgcgggcttccgaggtcgccagcagtttcgatgatctgacagacattcaccgagagctggaaaccgccagaaagcagcagcgctcattgcaaccggtcgccgatggctgggagcgttatagggccttgcaagaacagctgcaggataaacaaactctcgaaggcatcctcccggtctggttcgccgaacaggggtatcgcctgtggttggctgaaaccagcaggctccagaaggaatacgaacaggccgaactggatcaggagcaatgcaggagccagcttgagatccagaagggcgtggtcgatcaacatcgtcagcgctacctgcgagttgggggcgcagggatagatcaattacgcgagcgcatcgctgactgggtcagggagtgcgataagcgcagcctgaaagccgagcaataccaacgcctggccaaggggcttggactagcggatgagttatcggccgttgctctcgaggagaatcagcagcagatcgcggcacgcctggaaatactgacccagcaaactactgaggcacggaaaaaggcgttcaatgcaggtctcgtccagcaggaactcaatggccgcctgcagaccttacagcaggagcgtgctgaggttgagcgacggccaggctcgaacctgcccgggcattttcatgcttttcgaggtgatctggcgcaggcgcttggcgtcgatgagtcgtccctgcctttcgttgccgagctggtgcaggtcaagcccgaggagctggcctggcggggtgcaatcgagcgggcaatcggcagccaccggctacggattctggtgccgcagggctcatcccaggccgcactgcgttgggtgaaccaacggcacaaccgcttgcatgtgcgcttgttcgaggtaaaggagccgtcgtcgcgccccgttttcttcgacgatggttttacccgcaagctgaccttcaaggagcatccgtaccgagaagccttgaaggcactactggcggacaatgaccgacattgcgtcgaaagcacggagcaattgcgtcataccccgcatgccatgacggcccaggggctgatgtcgggcaaagaacgcttcttcgacaagcaggatcagaagcgcctggatgaagactggctgaccggcttcgataaccgcgaccgtctggcctttctggctgagcagattcgcgaggtcaatgaacagctcgcgcctgccaagctgggcttggattgttggcgctga

SEQ ID NO: 42640 - DNA, 1383 bp, Bradyrhizobiaceae bacterium SG-6C
atgagctttcttgatgtcattccccacacgttgtttcgcctgctgtcgtcgccggcgcatattcgcaacgtcgctatccttgaagccatctttgaacagttcttcgatgattttgctttcgcgccgaagaaatccgaagtgctgcaggtcattcgccaggtcctcgagaatcccgatttccggggtgtttctgacgacgacgagccaagctcaaccacggagaccgccgagtacgtgatctatgggcgattgcgggatgacggctggatcatggaggtggcgaaccgaaaagccgccgaggtctacatgccccgcgaggctcacgctctgctttcctcgctgatcacgctcaaggaggaactcaaggtcgatatctcggcggaggccagtctgatcgacagcggcattttcaccgcctatcaggatcccgtcggcaaggtcataaacattgccagtgcgcgccgccaagcggtgcagttgcggcgttcgatcgacggcgtcttgacgtccctccatcggatcgaagaagacctgatgcggtccgaaggcctcgccgacctgctggccagattcatggaacgctttgtcgagaagatactgctggagaactaccgggcgctgaaggcgtccgcctacaatccgatgcgctttcagcgcagtatcctgacgaacaccgacctattcatcaacgatgagggccagattgcgcgagccgcagttgcgcttgcggatcaggggatggtcgccgacatcgccgcggccgaaacccagatcatccaggatctcatgcgcatccgcgctgtattcgccggtctcggagaaaagctggacgtgatcgaccgcttttcgcatcggctcgagcgccggattgccacgaccgtgcgataccaggaaacagcacgtaacgtccgcgaagagagactgcgggatgcgatccgcctcgcgtttacccactggagcgccggtaacgacgaatgcgtcacgccacttgttgaaatcccggttccttatgcgaacgccactcttgctctagcgaagaaagcgcgcgaaccggtcgaaccgcagacgcgagagccgaagatagtcgatccggcggacgtcaagcgcgagcagatgatcgacgcctatgtcgccgcgatggacgttacctcccgtgccgtcgccgaacgtatgcggaagctggtgccggatgacggcaccttcttcgatctcgaccagttcgagccggaatcggcacgggacatcgccatcctctacgaagcacggtccggtgcgctcgcatcgaaccccgaattcgaagtgcgcactagcgccgccaaggccacaaacagatttgtttccggacccggcgtgctcgtgcgccgcagacagggcaaagcatga

SEQ ID NO: 42641 - DNA, 675 bp, Bradyrhizobiaceae bacterium SG-6C
atgacctacttctcgcgctgggcgacgaggcaagccgcccaggatcccaacttcagcgctgaacagctcaccgagaccgcaaaccggctcctgcatcggcagttcgtctcccggggcgatttcggcggagccgcgcatttcgaccgcatcgcgagcaacctcgactatttcaaagacctgttcgcgggcttcgggttcagcttcgtgttcaatgacacttggggctatgccggattcgtcagcccggttgcctatggcaatgcgcgggtaccgacacaggaaaccatcgttcttctttgtcttcgtatgctttacaacgaaggcgccgagaagggctatttcgtcgactcgagcgcgcagatcctcgtcgaagaagaggagatacagaccgtcttctcctccatggggtcccgaactctcaagccgggcgaattgcgatcgatcctgacgacgttcaagcgcaaggggttggtcacgttcgaccagaaccattcgctccaagtgtccgccgacatccacatccgccccaccatcaccgaggtggtagacggttctttcttggcccgtatcgaagtatgggccggtcagccagcgcgggctgctgaagctgtcgagaacgaggatgatgccgcagacgatgcctccgatcgcgcgccggagagctcaccatcatga

SEQ ID NO: 42642 - DNA, 3522 bp, Bradyrhizobiaceae bacterium SG-6C
atgattccggccttcgtattgcggaacatcgccgccgtcaatttctatctctacgcccaggacttccccatttccggtcgcggcaatgcggtctttctcggtggcaacggatcgggcaaatccgttctgctcgatgcgatccagatcgtcatgacgggcatgaaccgacgttaccttgatctcaacagccgcgtttccgagggagggcgcagcaccagaaccgtgcgcgaggcctgtcttggcttgctcgatgatggtgaaggttatcagcgcgacgcctgcctgacatatatcgctctcggcttcgaggctgtcgacggatcgcgtcgctgcaccgccggcgtctgtctcgaggccaaggcatctctcagtgaagagaacgttctcggcctcttcatcctggagggcgagatactgggtttcgcagacttcgtccatccgaaactcaggggctttgaggagaaggcgtggcagactttcctggatgaacagcgccgtaagggacgagaggtcaagacattccagcgacagaaaaatcaggcctttttgcgggagctctacgcgatcattaacgcgaatgcccgcgggacccaactcgatcccgatcgtgcgcgcgccgcgctgcgccaagcgctgtcctttgacatcgaacagatcacgagtgttaccgacttcgtcaagcgcttcctgcttgacgacctcccgattgagatcgagaccttccaggcgcgttacaacacctggcgcgacatgcagaagaccatcgagcgcgtcgaggcggaaatcaggacggtcgagacaatccgcgcggcatgcgagcgcgtcatggacgatcaatttaacgcgcgcatgtggaactacggtgctcagcgcgcggaatacgaccgatatggtgccttcattgccaagcagcgccaagagatcgccgagatgcaggagaagctcgatagcaccaggtcctatcagcagacgctcgtcgaagggatcgagcagatccggcgccgactggacgccatcaaggaccagatcgacggaacgccggcctttgagcagatcaagaaggcgcaggccgagaggaacacccaggacgccatccgcaaggcgggcgtcatcgaggctaagccgatcttcgatgcgctcaagtccctgcgcgaagctacgaacagccccgcctttcccagcggtcttgccaaaatcgcagattttgcttcgaggttgacgtccgacctggtcggcgtccacgatgccgtttggcccaaatctcccaagcagattgcggcgctcgtgtccgccgtgccgcagctatccgacgtccgggccgtgctcgacgagcgccatcagaccgccgcctcgattaaggcgggtttgacgaaggaatttgacgagggcgatcgcatattgaagaagctgcgctcgggcggcacctacatgtcgaacgacacgcaggacttcctggccgatatggcaaagatgcatgtgccggcgcaaagtctttcggaagtagccgatatcgcacctgcgtttgccgaatggcgcgccatcatcgaatcaatcctcggcgactgggccgatgccctcatcatcgagccgcgcttcatggaccaagcctaccgccatttcgacagccactataaggcgaccagggccaagctgatccagtcggagaatgtgctggcccaggaccagagtgtccgatctggcacgttggccgaggcggtagttaccgacaattcatatgctcgcgcgttcctcaacgtgcggctcggccggatcattcgggcgcgctcggccaatgatattcgtaagggcgatctggccgcatcagccgacggaaaatacgcccacggccgcggcatcgaatatcgccagctcaagcagattccgcgcctgggacaatcggtccgcgagcaacagatcgcccagctcagcgaacagcaacgcgagctcgagacaaagttgcagaccgcgcgggacaatgaacgccgatcattcgccgttcttgaggccatcaaacgcgcagaaacggctctcgtgatcaatcgcggcgcggcgacccaactgcttgagacaatcgagtccgcggatcgcgagggcgagcgccaggccgcgctcattcgcgagctcgagaccgagttgccgcaaggggtgatggaggaaaagcgcgaagtcgagcaaatgctcgttcaatacaaaaaggaaagggacgaagagagggaaaaggaagacgagctcatcgatgccatcggacaacgaaagggcgcgatgaatacgaacgcagacgaacgcaagaaagccgccgaacgcgcctgcgaggcatttccgccattcgaccggcgccatcagagacacgatcccgcgattggtctggaggcatttgcccggcgcgctcgtgcggcctatgtgcaggagcgcgccgcacgcgggcatcccgcgcatgtccgcaatcattttgacggtcttctcaaggacagggcgcccgcccagcgggtggcgaggctgaacgccgcgatccaggactatgttcaggcgaatccagaccagcatccgcacttcgagtggacgcagtttgtcgccaccgagcagacgaccactctttatgactggatcgactcgagacatcgcgagctcacccaaaccattttgcgtaacttcaaggggcagattgacaaagccgtcactgccttggtcgagacgatggtgcatgacttcctgagccgccttagcggcaacatcgacgcggtcgaccgcatcaaggacgatctgaaccgggcgttgcgcggcagcgtcttcatgggagaagtctatcagatccgccaggagcgtgatcaggacaaggagaccatccgctacctcatcgatcggctcgacatcgtggcgccgaaagccaccgcgctgatgcagagcaatccggatccgaacgatcccgatcaggtaaaaatcaaagagttgatcgacatgctcacaatcgagaatggcgacgatgcccagaatcgccgccgcattcgtgagctggcggactatcggagttactttcgtttcagcatcgatatctgcgatccggagcagggctaccgccggatctccgacctcgagcagcgccgcggcaaggcaagcggcggacagaagttcgtcccgttctatatctgccttggtgtcgcggccgcatcagcttacttcaatcaccttgggcgcagtcgcgaggccccaccccaatcggcccttatgctgatggatgaggccttcgagaaactcgaccccgataatatctacaagatcatccggttctacgagcaactcggcctgcagctcatcatggccgcgccgaaaacgcatcaggccctctatcaggagacattcgatacgttgatttcgatcatccgggtcggccgcgcgatccaggcgatcccgcaacatttccatcaagaagcgcacattctcttgcgcaaagagaatccgatgcatcagccgcgaagtttcttcgaagagcgtgtccgcgaggagcggaggcatgccgcggaataa

SEQ ID NO: 42643 - DNA, 1248 bp, Bradyrhizobiaceae bacterium SG-6C
gtgtccgcgaggagcggaggcatgccgcggaataatcaatataccgcggagacactgctgaatcggctgctcgaccgctttgaagcgccgctggctcgcactcgcgacatcacgcagacgatcgaatacaccctggtcgggggtccagccgcgcaggacgagtttcatcgtgtgctgcgggatgcggaacgagcgggcggtatcgcgctcgagcaggatcgacttggtcgattcaccggcgagttcgcgcgggtgcgcctcgtcgatcctgacaagctttatcgtttcctggtcagagcgcccgcaagagcgaccgctgagaccgcgcaccaggcgatactggccgctatcccggaaattctagccgatgccttctttcgagacatcgagcaggaggcgatcgcagcctggaaaagcaacaagacctttctcggactctcggtgggcgagatcaacaccttcctcacaattatccgtttggtgcatggcatcgcgaacctgtcgggccgcgatatcgatcaccggacgttttctcgccgaatcgtaaaagacagcaaggccctggagcggatggagggacgcgtcgcccaactgctccgtcgtcgcgatccgagcctggccggtgaagagccgcgcgaggttctggaagcgagcggcatcgtgcgtcgggcccatctcctacaggtcaagggtccgcttcggctctcttccgacgcgctgaacatccatggtaccggagacgcgtttatcggccttccgtggctctcggttcggcaggcttctttggctcacggcgtcgactacgtgatgactgtcgagaatccgacaagcttttggcgttacagcacagaaatcgatggaaactatctcgcactcctgaccgacggatttccggcgcgcgatgtgctgtcgagcatggtgcatctcgtccgacacgctcttctcctggcgccgaaaacgccggtgtaccattggggtgatatcgatgccggcggcttgaggatcgccgcgcatctcgaagatgcgttcggaattcatgttcaactgcatcagatggagctaaaactcgcacgggccttcgggtcaccgctgcaatcgcagaaaggtctcgagagactcgctttgcgctcaggcgaaatcggacaattggcgctctggcttcgcagtgtggaagcaaaaatgttggagcaggaggaactcgatccaatgccgccaattctcgcggccgggagacctctttcgtcatga

SEQ ID NO: 42644 - DNA, 591 bp, Treponema caldarium DSM 7334
atgggaaacctggaagacctggcagacatagaccggctggaccgggaggatgcaagccttttttcccggctattgcgggaattggtgagtcgctgctttattctgcggagtgaagaggagcgactgtacaattttggcatccggaactttcatctcctagaagtctattttgcctgtatggatgcccaggtacggaaggatgaagggttaggggtcatcgcctggcggggcaccacggaaaatcgggtccggctgaaccaggaagagagtatcgccgtttttatactcaggcttttttatgaggaaaagcggaatagtctgcggctttctgaatatcctatcatcactgtcctggacctgacccagcgttttaaggcgatgaccggcgcggaactaaaaaagacccatctgaaggaccttctgaagcggttttcccggtttcgcctgatccgggcccaggatggcattaatcccgatgggaccattatcctgtaccctaccctggcttttgctattgaccaggaaaccatagaaaaactgcgagaaaacctgaagtccgacctatcccgggaagaggagatgctgccatga

SEQ ID NO: 42645 - DNA, 3216 bp, Treponema caldarium DSM 7334
atgattaccctgaaaaaggtgcggcttatccagtggcacagtttccgggatgttaccatccctatcggagaacggaccctctttgtgggtgaaaatggctccggcaaatcgaccattatcgatgcaatccagtatgccctggtggcccagcttcacaagatccgctttaatgcagcggccaatgaaaaacgatcgggccgcagtctcgatgggtatgtactggctaaaaccggttatgaaggggaggaatatcagcgcacagaagggataagccatgtaatgctggaattcgagaagggtgaagcatcattttctgcggggatctgcgcggaaattaccaaagatacaacccaggtcagggaactcccctggattgcccagggggttcaggtaaaggatattcccctctttctcgatagcacccaccttttgggatcccagcagtttaaacagcggatgcgagacctgggcgccctggtctttgattccaaaaaagaataccagaaggaacttacccaccttttgggggtattccggcgtaatgtggaattcaatccctctctggatgccctggtccgctcgattggctttgtacccatggattcggtaaaccgttttgtctgcgattatatcctggaagagcggatggtagacatctctgtgatgaagagcaacctccagagctataaggatgcggaggccgaagctgagcttgccataaaaaatattgcagctttggaggatatcctcgccatagccagggtttggcagcagcataatagaaccatcctgaaccaggaatatctgcaaaagcgactccagatggaactggaacaggaacggctagaggaaaaccacaaagaaagccagcggctcgaagcggaagaacagcgaaaagccgaagaaatccgacgcctccaggaagagctcgaagccctgcgggaccaggtgaaccagctgagcctatccatacagacccaccaggtgtatcagcttatccaggatctggagcgccgcaagaatcagctcttaaaggagctggaacaggcccgctcaaaccgggaacggtaccaaaccctgctaagccagcttgaagccctattaaatcgggagctcgaacgggacagggaaggcaatgtggatatggaccgctctgcagaaagcctggaaacggaaaaagaaaccctctaccggagtctgagcaagagccaggaagaacgggaaaacctgcgcaaagacctgggcgacctggcacgagaactggaggaactggaacggggcctggtccgctatcctgaggggcctgcagaactggtatcggccttaagagaagagggtattcaggcatggatatttgcagacctggtagaagtagccgatccggcctggcagaacgccctggagggctggcttaatacccagcgttttgcggtgctggtggaacaggaacagtttcagcgggccatcgccatctatgatcggcttccccggcagatcggaggggttcctctgccaaacctggagcggatggcccaaagcgaggtacgcccccactcactggcagagcttgtagtgaccgattcaccctttgcccggcgctatgcggactacatcctgggccgggttatccgaaccgaccaggaacacttaaaggactttgaccagagtgttacccaaacctgtctcacctactctgcccatacggtaaaccggatccgggaggcggtgtacagccgctggtatctgggcaaaggggcccgggagcgccgtaaggcagaactccttgcccggcgaaaggaactgcaggaagcgctcagccggctcgaactatccatcaaactgatggaacaacaaacggaacttttaaagcgggccctgccggccctcaccgaaatgcggtacctttcatcgtccatcgctaccattcccgaactggagcgcagtattaccgaaatctctgaacagattcgccgggtagacacctctgacctggaagtacttcggaatgagcttgatgaacggaagcggacattagggagccgggaggcggctctttcccaagcccagattgccctgggaagcattcagggaagggcaaagaccctggcagaagcaaggcctccgctggaggcgtccgccgaaacccgaagagcccagtttcaagcctttgtggcgaaccgagagcagttccttgaggaatgggaagcctactacaaagaacgggtccactcccgggaggatcggcagagcatcctggccaattatgaggggagtctgcaggggacccggaacaaactacagaaagccctggaaaactaccagagggctattcagaaatacaaccttgactggaacgccctcctttctctcctgccagaggaggcatccgagatcgaagcccttaagaaacggctcgaagcttcggaacttcccctctataaagaaaagatttcccgtgcccgagctatggctgaaaagcagttcaaggaacactttgtgacccggctcaacgaatatatcgaagaagcccgggagagtttccgggagatcaacgctattttacggagccttacctttggcaaggaccagtatcactttaccctggaagaacggaacgaccggaaggcccagctggaggttatccggaaggccgcggagatccatgaaaatcaggggagcctctttgatgcattgatcagtgagggtgagcgggaggccgtagaggaactatttaacaggatccttaaaaacgaactggactcctttgaggtccgccagctttgcgactaccggacctactttacctatgatattcgggttcgggacacctctgccatggatccaaaaacgggcaaggtccccgaactatccctatcccgggcgcttaaggaaaagtctggcggcgaatcccagacgccctactatgtggctatagcagcgagtatttaccgatattacaaggacgatcctgaaaacacggtgcgcctcgtagtttttgatgaagcctttaacaaaatggatgaacggcgcattggggttaccctagaactgttccaggaactgggaatgcagatcatcacggcggtcccctcagaaaagctcgagatcatccaaccctatatggatacggtgaacctggtgctccgctatggcaatgaaggctgggttcgggattatagggcggtgactgttgcggcaactacaggatcagagtga

SEQ ID NO: 42646 - DNA, 1245 bp, Treponema caldarium DSM 7334
atgaaatacgatgagctcatcttgcatgtatttgccgcttcctatcctcgttctgccatgcgccagggcggccggccgctcaggcttcgccattgggagcagctcctgccagaagcctatgccagtgccatggaacaggaaggctttctccaggccatggaatggctggaggctcaaggactactccgtttgggctgggcccaccggcgaaaacgggataggctcctttgggcggaactggttgatccccggcgtctctatgcaaacctggggcagccctatccggatacggtagaagaagttctccgggaaaccgcccggggccttgcccaaagggcccgggatgcggagcaaggcgatacggagcagttatttactgccctggccagctacccatcctttttagatagcctggtttcgatccgggatatggaggacctgtatatcctcctcactaaacggaaggaaggagcatacaaaggacctattcgcagtctttcggttaccctctttcgggactccaaacggctcgaggccctgctgggcattctgaagcgtcttactaccctatgtaatacaccggacctgctcttgggcctcccccggcgcaatttccccgtggtgtggcttgcggggcccttccggctgagcgcagaggggcccgatacagaagaccatagcgcaggggcccgacttcttctagatctgggccagaggtcccctttaatcggagtaggcgcccccttcggtctttctctggaacttctggccggtgccacaaaactggaaatcgccggtgccacagggcgggaaagggacatcaatatacttactatagaaaataaggaaacctttttttccctgtggcagatggaaaacccctttacggcctatgtgtataccaacggctggcccaacagtgcggtccgacgggtattggaactgctccatcggcaggggtaccggctgtaccatgcgggagacttagacccggaggggcttgcgatctgccagtacctgcaggatcactacggcagtcggccctttggaatggatatggcaacctttgagcgctaccgaccctatggcaggcccctctccgacccggagctccgttcccgccgttttgaaaaatacctttcccgactaaacccaccattgcaagacctggcccggcgcatccaggaaagccgcatcggcatagagcaggaagttatcgattataaggagtgtgagattttgtaa

SEQ ID NO: 42647 - DNA, 1473 bp, Achromobacter insuavis AXX-A
atgagcacacaggacacattcgccttgtatgaggacttgcgtgctcgcaaggaggagccggcttggcgtcttctggcgactccgcagtcgcctgcaatctgcacgtgcctgcacgtgctttttctgtccgagcgtattttgccgtcgtcggcatttcacgaacgactgcaccggcaactcgaaatcgttcggcgcgctggcgccgacctgcccaagccggcagccgactacgccagcgactggattgcggaaggttggttgcggcgggattttcctcatggcgcgactgaagagatgtttgagctgacggcgcctgccgttgacgccatccgctatctcatgcggctgagccgcccgcgtgccaccgccaccgagagccgactcgcttccgtcgtccaactgctacagacgctggctgaggagacggatagcaaccccgcgacccgcctggctggtttgctggctgaccgcgatgccttgaacgcacaaatccaggctgtgcgttccggcaaagtcacccagttgccccctgaacgtgcaatcgagcgcgcccgtgaggtactgacgcaatccagcgagttgctagaggacttcgtccgagtgcaggagtcgctcgccgccattaacctgcagttgcggcgtgagctggtggaaaacgacggcgcgcgggccaatactctcgagcgcattttcgacggcatcgacgtcatcaagcagaccgaggctggccgcgcgttcgacgccttttggcggatgttggtcgacccagtagcatccaccagattcgaggcggcgctgacccaagttatcacccgcccgttcctgggttccctggatgccgctgagcgtcgctcactgacgaagctcaagagtcggatggtggagcgtgcagcggacgtgcacacggtgcaggcaaccttcgcttcaggcctgcagtcgttcgtccgcagccgagaattccgtgagcaacgccgcctggtcgctcttctccgttccgcaacagtcgcagccatggccgccgcagcggacactagacccactcagaaggtcgatgcattcctttttcggacaagcgccgccatacggtctgcgtcgcagtggatgctccacgatccgactgcgcatgtcgtggacgccacaatgaccgaaatcgagagcagcgacgctcgccttgaggacatcgaggaactggtgcaacgttcggaaatcgacatgcgctccttgaaacgcaacctcgttgtggtgctcggcctggccgatggtcccgtcagcattgcccatgtcctcgagcgtttccctgctgagcaaggcctgggctcggtcgtcggctacatgcacttggcaactcgtcatgccgaacccacggagagacgcgagcgcgtccgctgggaaggcggcgacggcatttggcgaagcgcagatgcgccgcttttctacttctccagggaatgcatcgatgagcttcgagagtga

SEQ ID NO: 42648 - DNA, 570 bp, Achromobacter insuavis AXX-A
ttgtggtcagtgctgttgcgagaccgtgaagtcatccagatctacctccataacatcttcttggatctggtcgttgacatcgcccagcaggtcgccttcatccgccaggtgccggacgagagcgagacggacatccccatcctgcttcgtcgccatcagttgacactggtcgagtcggctcttgttctcttcctgcgacaacgcctgaccgaggcggactcggccaacgaacgtgcggtggtatccgctgaggagatggtcgagcacctctcgctctttgaccgggctcgcaataccgacttggcgcgcttcgaccgccagtgcgacggcgccatcaagaagtgcaaggcgctcaaccttatccgtcccatccgatcaagcgccgcgcgcttcgaggtttcaccgacgctgaaactgctgttcaacgccgaggacatccaggcgctgaccaccgcctatgaggcgctcaaaagtgcacccgtcggcactagtgggatgaccatggaccaagccatcgccaacgacatcgccgaaggcgagcgtgaggccgacgaaggcgacgaggagtga

SEQ ID NO: 42649 - DNA, 3420 bp, Achromobacter insuavis AXX-A
gtgatcgtgacgacaacttcgcaagcaaagctgctcccggataccgacccgccgcctactccgccagacggcccggaaggcgggcgcttaaagcgggagcgcgaggaacagttccggctggttggagtccagagctacaactggggcacgttccacggcctgctgaagttggacgtctccgagaaggggatgctgttcatcggcccgtcgggctcgggaaaatcgaccatcttcgacgcacacgcagcgcttctcacgccgccccgctgggtacacttcaatgtcgccgcgcgggaaagtgaatcgaagcaagaccgctctgacctgacgtatctgcgcggtgtgtggggcgagcagacggccaacaccggcgagattgcgcaacagcagttgcgtcccggcccaacctggtcggcgatttccgaggtctaccgaaacggactgggccaggtaatcacgctcgtccatgtgtactggatcaagggaacgtccaatcagcgaaaggacgtgcacaagcgctacatggtcgcggagcgtctgctcgacctcacagagctcttgttctttcccgactctggctttaacgcgcggcgcttcaagtcggacctgcccgatgtctgggacacagattccttcccggagtatcaggagcgcatgcgctcccgtctgggcatcgagactgagaacgcactaaagctcctgcataagacgcagtcggcaaagaacctcggcagcttgaccgacttcctacgggacttcatgttggatgagcccaagactcaggagatggcagaccaacttgtcacccagttcgagcgcctggaaaatgcgcacaacgaggtggtgtctgcagcgcggcagattgcaacgctgttgccagctcgcgagctaaatctggaacggcagaaaaggctctccgataaaggtcgcttggatgaggctcgcatgggcatcgaccacgtcgccaaggagatgctccaatcgctgcgtgttgagcgtagggacgccctcgaagccaagctggctggcgaacaagctcaggagcaggcactcgaacaagcgctcttggctgccaggacgacagtccaggggttgaagcaaaggcgtgatggcctgggtggccagcaactggcgggtctagaggcatccaagatcagcgccgagcgtgacgagagtgagcggcgccagcgatacggcaaggtcgctgaggcctgcaaggcccttggtatgaccgtacccgcgaaagcggagggctatgccgagctggtcaatcaagggcggcgagagcttccctcggccgcttcgggcgcggacgacagcgcgcagaggcaaaacgcacttgcggtacagaggcatgagcttgacaaggagcgttcgaccatcctcggcgagttggccgtccttgcgcggatgcctggctccaagatgggagccaacctcatcactatgcgaaagctcatcacggacggcctcggttacgacgagggggcgctgccattcgctggcgaactcatcgaggtagagccatctgagaaggggtggactggcccgatcgagcgggtgctcaggaacttctcccggacgatgcttgtacccgatgacctgcatgcttcggttgccaagttcatcaacagcacgaacctccgaggacgcctggtctacctgagaatgatgcggcagtcgccgagggcgcccgctcccaaggtcaatggcgtctatcggaagaccaaagtctccgaaggtccgtttcgggactgggttgagacggagttacttcagaactatgacgccgaatgcgtggagaccgagcgcgagctagaagatgtggtcttcggcattactcgcgccgggctgctcaagacgggggcgcgcagacacgagaaggacgaccgctcggacatcaacaattccggcaactgggtgctcggcggtgatacccgttcgaaagcccaagggttgcaagaccgcgaacgcgagctgaccaaggtcatcgacggaattgaagatcagctcgagcagctccgcaagaaggagctggcacgcctgaatcgctcgctgcactggcagacgctggtcaatttcaactggaatgagattgaccaccatggagcggcgcttcgtgtggcccaggtcgatacccagattcgagagctacgcgcggcgacgcccgatctggacatcctcgaggccaggattgcggcagcgaaggagaacgaagcaacggccgagaagaatcacaagacccagttccaggcggccatggctgtccaaatcaagttggacgagctgaaacaggaactggagagcatttccgaattggctcttacgcctcccactcctttgcagcgtgagacgtttctccagaagctagagggagctggacgcaagccgaccatcgagtcgatgcccgacgatgtcaggttcgtggaccgcgagatcggcaaggacatcggcacccttgagagcgaggccgccaagctgctggccggcatcgaagccaagttcgtggattacatacgcacctgggaagcggaatcggaaggcctggacccgacgatggccagctacgatgagtttgacgccaagctcacgcggcttcaggttgacgacctgccgcgatttgaggagaagttcaaggaattgctcaatgagcagagcaatcagcacatcgcattgctctcagaccggctggagcaggagcgccgggacatttcggatcggatggacgttgtcaacgagagcctcaggcaggccgagtacaacgagggcacgcacttggccattgaggtcgaagagataacgccgcccgaagcacaggagctgaaggcggagctccgcgccgccttgagtcactccctgagcatggacgacagggtggccgagacccgcttccagaacatgaagcgactcatcaagcgcctggccagccaggagccgcagcatatgaactggaagaagctggcgctcgatgtccgactccacgttgagtttgtggctcgagagctcgatgaggaggggcgagaggttcagacccaccgtagcggtgccggaaaatctggtggccagcgccagaagctgacggccacctgcttggcggcggcactccggtatcagctcggcggccctggtcgtgtcctcccgactttcagcaccgtgttcctggacgaggcgttcgacaaggcagacgcagactttacggacgcggcgatgaagattttcaagtcgttcggctttcagctcatcatcgccacgcccatcaagtcggtcatgaccatcgagccgtacgtgggcggcgccgtctatatccacatcaaggaccgcatgcattcgcgtgcgctcgtgctgccctatgacgacgagacgcagagcatcgactacaggcagattgacggctcgagcgccaacgatgaaaagtcctga

SEQ ID NO: 42650 - DNA, 1038 bp, Achromobacter insuavis AXX-A
atgggcgagcagactttgccccgcgccttggtcttctcttctccggaatgtgtggccgactactgcgaagacggcaaggtctggcgccgcatcgtctcccgacgggtcacgatgctggcccggtggcccgccctgcatgcttcagggtttgggcccagctataccgctctgggcgaattcacggacgaggacttcgagcgactgctcgccgtgttggagtggctggttgccaacccgaagtcaggcatctacttgcgccaattgccagtccccaacatcgacaccaagtggattgacctccaacgacgaggtgtggtcgccgacctgttcagccgcatcatcaagccgcaagccgccctccaggctgcccagtcgttcgtggagggtgaaggcacagaaatcgacgtcaccggcctggcatgctccattgaagaggagagttcgaacttctatgacatctgcgggttgttgcgtcctcccgtgaagctacgaatcctggtcttgtgtccaaagttgagaacgcaagtcggggggctgcgagacatcgaggcgaccatcgaggactgggcgcaattgcagctcaaaccgcgtcagcttctggtcgtcgagaacaaggacacatgtctggctatgccagacgtcgagggtgtcgtcgcggtcatcaagcttgggaacgccgtcgcattggtgaccagaatcgcctggctcgtgggggtgccggtgctgtattggggtgacatcgacacctatggatattcaatactggttcaggcccgcaagaagttgcatgacgtgcgctctgtgctcatggatcgcagaaccgtcgaaacccaccttgatcgcctcgtcgaagaagggcagcaaacgaagtccatcgaccggtcgctcctgactgtggccgaactcgatgtctacaacgcgcttctggcgcacgaatggggtgcatcaaggcgccttgagcaggaacgcctggagtggccgagtgtgcttcgcattgtcttgtccgctcttcaccaaagcgaatcgaaaagtgcatga

SEQ ID NO: 42651 - DNA, 1476 bp, Actinomyces sp. oral taxon 448 str. F0400
atgggaaccaacggcgttgtcgcggacgcgctcagactcgcgcgtcgggtgcgtgaggacgccggtctggctctgctgcgcgccgacctgggcccgatggcggcggccgtcctcaacgagcatctaggcggtgaggtgcgccgccggcccgtggccgagctccatgaactcgtcgatgaggatctcgccgcgctgcgtgcggcaggggtggatgcttcgcgcaccgcccgggcctactgcgaccagtggcgcagggacggcgtgctcgtgcgcgctccggcgcccggcgccagggcggagacttacgagctgtccgcctcggcggaggccgccatccgcttcctgatgcatggcgatcacccccgcgccaccgttacccggccgcgcctggacaccgtctccacccagatcagccgcctcgctcgggactgcgacccgaccgctgcgggacgcctgcacgccctgcgcgccgagcgcgccgcccttgacgaggagatcgctcgtgccgaggccggggacttcgtcccggtcgacgggcccgaggccgccgagcgcctgaccgagatcgtctccctggccgaggaggttcccggggacttcgcccgcgtccgcgccgagatcctcgcgctcagccgctccctgcgcgaacgcgtcgtcaccctggactcctcccgcggcgaggtgctcgacgacatcttccgcggcgtcgaccgcattgagagttccgaggccggccgttccttcctcagcttccatcagctgctcacggacccggactcctgcgcccgtctcgacgaggatctggagtcgatcctcgaccgcgacttcgccacccggctggaggacgccgacctgcgtttcctgcgctgctggcgtcccgccctcacccgggaatcgaccgcggtgcgccgtaccatgacgggcctgtcccgctccctggaccgcttcgtgaggtcgcgcgccttcgaggcgcaccgccggctgggcgccgagctcgccgaggctcagggcctcgccgcccgtctcgccgcccaggccgcgccgcaggcgcgactcgacctcgacctggagctcaccagcgtcccgctgacctccatcggcgcctggcgcctgcgcaaccccgccgacaccgccgtcgtcgaggagatcaccgtccacgagcccaccgccctcgacttggaggaggtgcgtcggatcgtacgagccagtgagatcgacctggtcgagctcacggacgccgtcggcgcggtcctcgccgagcggggggccgccaccgtgggggagatcctcggcgagcaccccgccacccaggggctggccagcgtcgtgggactgctgctcctggcccggcgtcagggtcaggaggtggccgggaacgaaaccgtcgcctggacgacctccggcggagccgagcgctccgcccgtatcccccgattcctgttcaccgaccgcaccacgaagtcaggagatgcatga

SEQ ID NO: 42652 - DNA, 774 bp, Actinomyces sp. oral taxon 448 str. F0400
atgagcgccgaggccgcaccagttcaggcaccggctcaggacggagccgccaatccgggcgcgctgtgggacggggatcccggcacccttcccagggacacccgacgcgccctcgtgcgcctcctccagggcccctacctcacccttgagctccaccccgacctgtggaacgcgctactgaccgacgaggtcgccattcgtcgccacctgggggatctcttcctcgagctcgttgtggaccgcgaggccggtctcgccttcacccgcaacgccccggaccccaccggggccgcgccctccgtcatgcgcactatgccgctgaccctggtcgactccgtcctcctgctccacctgcgcaccctcctgctgcgcacgacgacgccgggtgagcgcgtcttcgtcgaccgcgacgagatcgacgagcagctcgacgtctaccgcccgcacgcctctaccgaccatgccggtttcctgcgccgcgtgagctcctcggtcgacaagctcaaacgggcctccctcctgcgcgagaccgatgtgcccgagcgctacgagatctctccggtcctcgccctggtcttcaccgctgacgaagtcgccgccgtcgccgctgagtaccgccgcctgctgggggagggcgatgaggatgaccaggccgccccgagggccgatgatccgagcaccgatcaggtggacggcgctgacggcgcgagcggtgccagcagcgccgacggcgcagcggatgatgagacatcggagcgggagaacgaatcatga

SEQ ID NO: 42653 - DNA, 3843 bp, Actinomyces sp. oral taxon 448 str. F0400
atgagcagctcggcaacagcatcgcagaccgactcccagcaccgtctggcccgcatccaggtctacaactggggaactttctccggataccacgatctccccgtcccccgggacggccttctgctcaccgggccgtcgggctcggggaagtcctcgctcctggacgccctgtccgccgtcctcgtgccgccgaggaatctgcgtttcaacgccgccgctcaggactccaccacgggcgaccactcccgctccgtgctgagctatgtgcgcggcgcataccggcgcagcgccgatgagatcaccggcgaggtcgtcaccgactaccttcgctcgggcgccacccgcagcggcgtcgccctgaccttcacgcgattggatcccggcgagacgatcaccctcgtcaaactcttccacgccaggcagggctcgacttccgccaactcggtctcccagacgcagctgctcgtcgagggggacatcgccctgaccgggctcatggagtacctgaccaacggcatcgacaggcaggccctgagccgcgacctcgaggggcgcgccgcccgcttcgagcgctacgaggccttcgccgcccgcttccgccgccggctgggcctgtccggcgaggtcgcccagcgcctgctccaccggacccagtcggccaagaacctcaccagcctcgacgccctcctgcgcgacttcatgctcgatgagccggacaccttcgcgatggcggacgccgccgtcgagcagttcgccgaactgcgcgaggcccacgccgccgtcgtcgaggcccgcaaccaggaggctctgctctccccgctgcgtcagctcgatgagcgcatcaccgaggcgcgtcaggcccaggagcgagccgaggggctgcgcgccgccatcgacccctacctcgaccggctcaagacgtcgctccacgagcagaccgtggatacggcgcgccgcgcgctggaccgtctcgccgatgaactcaccgccgcccgcagggccgagcaggacgcccgccgggagcgggaggccgcgcacctggccctggccggggggctcggtcaggacctgccggccctcgacgctcgtctggaggccgcccatcaggccaccgagcgtgccgccggggcgcgtcgattcctcgacgcccagctggacatcctgggagccaccgccccgagcgagggcgcggccttcgccgaacttcagcgcaccgcggcgcaggagatcaggcgcgccgagagcgtcgagagcgagcaggacggcgcccgcaacgccctgcgcgccgaacaggtcgccctggccgagcagcagcgcgagcttcgtcagcgggccgatcagatcacccgctcgcactcggccatgagcgccgaactgctgcgcgcccgggatgtcgtcgcccgcgccgtcgggcaggcgcccgccgccctgcccttcgccggggaggttctcgaggtcgtccccggccaggaggagtggcgcgtcgccatcgagaccgtcgtcggccccttcgcccgcaccatgctcgtccccgagcacctctatcgcaaggtcgccgaggccgtcgacgccgagcacctgggcgctcgcctggggtacgagcgcatgtcccccggtcgccgctccactcgcgccctgcccgccgacgcgttggcccgtcgggtccggtcccgggccggctctgaatacggcgggtggctcgacgccgagatcatgcgccgcttcgatcacgcctgcgtcgaaagcgcccgcgacctggtcgccgtggatcgcggggtcacccgcgccgggcaggtgaagtcctcgcgcaccagccacctcaaggacgaccgtcaggacctgaccgaccccggtagctggaccgtcggcgtcgaccccgccgagcgtctggagcaggtcgtcgctgaaagtcggcgggtcgccgcccggctggaggccgtcgacggcgagatcaccacgctggatcgtgtgcgcgccgtcggccgggaacgtcgcgacgcctgccggcgcatcctggagaccacgtgggaggaggtcgacgtcgacggtgccaggtcccgcgaggccgatctgaccgcgcagcgcgctcgcgccgccacggctctcccgggcctgggcgagctcgaatcgcgcgccgcggccgcgggtctggctgaggacaaggcgcggagcacggtcctgcgcctcgcgggcgaggagcaggtccagcgcgcacgactcgaggacgcccgggccgccctggccgagctcgcgcaacgacgtcgggagcgggaggaggaccgcgcgcaccccgatgcgggcggttccgacggcgccggccggggcgacacgaacgatcggaccgggggcaccgacaccgacaggacggacaggggggccggctccggcgcgtccggctcccgccgacccgccttcacccggacggagcgggaggccctcttcggcgagctcgagcagcgattccggtcccggcgtcgccacgccggactggcggaggccgacgccaccgctcgcgaggtcgagcaggagatcgcccgggaccaccagcgcgccgcgcaggccgagagtcgcggggtgggggaagcccgcgccatcatggtgcgcttctccgagcgctggcccgtgcacggccgcgaagtgcgtccggaggcggccttcctcggcgactacctcgagctgctggaccatcttcaggccgacggtctgccccgattcgagcgtcgtttcgccgaactcctgcacagccagaccgagcagaacatcgggcagctcgccagcgaggtgcgccgcgccgtcagccaggtgcgaggtcgcatcggccccgtcaacgacgctctgcgcgccaccgagtactcgcccggccaccacctgcacatcgaggtggccgagcggcgcctgcccatcgtccacgacttcctggtggatctggccaccatcgctgcgagtaacctcgacctcgccgaggagaccgccgaggaggccgaggcgcgcttcgccgtcctcgattccgtcatgacgcgtttgggctcctccgatcctcgtgacgagacgtggaggcgccagtgcctggacacccgcctgcacgtctccttcaccgccgtcgagcgcgacgaatcgggcacggccgtcgactactacgagggggccgcgggcctgtcgggggggcagcgtcagaagctcgtcgtcttctgcctggcggccgctctgcgctaccagctcaccgagcccggacgggcggttcccggatacgcgctggtggttctcgatgaggccttcgacaagaccgatgcggagttcacccgggccggtctggacgtcttccgcgggttcggtttccagctgctactggccacgcccatgaagatgcttcagactctggaggatcacgtcggcggcgccgccatggtcactaacaccccggagggagacgactcgcgtctggccgtcgtcatcttcgaagaacgcgacgggggtgcggcgccgccccgagcgcacgaggccgctgacgcctccgggtccagggctcgcgggggcgctgaagccgtcgatgctcccaggacggtcagggcgtccgggaggagagcggccgcggcggctgccagaccccgcgccgccgacgtcgcgccgcccgccccctcggatgccgcctcgcccgccgatgctgacgagcccgccggtaccaccgggatcgtcagcaccgccaccggagtcgcgggggctgccggagcccggcacgcggccggggcgaccgctcccgacggcgccccggacgggagcgaaaccgtcgacgcgccgaatgacgccgaagcgggcgacgccccggcatctgccggaacgccctga

SEQ ID NO: 42654 - DNA, 1575 bp, Bifidobacterium animalis subsp. lactis CNCM I-2494; identical to SEQ ID NO: 41902

SEQ ID NO: 42655 - DNA, 810 bp, Bifidobacterium animalis subsp. lactis CNCM I-2494; identical to SEQ ID NO: 41925

SEQ ID NO: 42656 - DNA, 3498 bp, Bifidobacterium animalis subsp. lactis CNCM I-2494; identical to SEQ ID NO: 41904

SEQ ID NO: 42657 - DNA, 1221 bp, Bifidobacterium animalis subsp. lactis CNCM I-2494; identical to SEQ ID NO: 41905

SEQ ID NO: 42658 - DNA, 1455 bp, Acidithiobacillus caldus SM-1; identical to SEQ ID NO: 42359

SEQ ID NO: 42659 - DNA, 639 bp, Acidithiobacillus caldus SM-1
atgaccactgctgcagccgagccggatctgtcgtcgttactgatcgggctgctcaagggggtgcagtaccgggagcaggacgagcgccagtgggcggcattgctaaacctgcaggcccgcgtgcgggactacgtggcggtactcaatctggaactggtgctggatgaggcggaagggtatgccttcctgaaaagccgcccggaacctgctgaggatgatccgtcgccacgcttgccccgtctggttgcacgccgccccctgtcgtttccggtgagtctgttactggccttgctgcgcaagaaactggccgaattcgatgctggcggtggcgacacgcgtctggtgctatcgcgagacgagatcgtcgaactggtccgggttttcctgccggacgggcccaacgaggccaaactgatcgaccagattgaaaccaccatcaacaaggtggtggaactgggctttctacacaagctcaagcctgcgagtggtagcttggcagggcaggccaatttcgaggttcggcgcatccttaaggcctttgtcgacgcgcagtggctggccgagcttgatgcccgcctggcggcctaccaatccgccctgtctggcgcggcgtcgagcaaggaggcgcgcgatgagtga

SEQ ID NO: 42660 - DNA, 3393 bp, Acidithiobacillus caldus SM-1; identical to SEQ ID NO: 42361

SEQ ID NO: 42661 - DNA, 1194 bp, Acidithiobacillus caldus SM-1
gtgacttggactggcccaaaagaattgaaagcgcagttggtgcggctttgggagcgcggtgaactgctgcgagatactgtgacaggccagacgcgttttcctttgcgcatgtctctcaggtccccaacctctgcggacattacaaatcgttttgatgaagttcgccaatgggccgccgaattggacgcgacgaatgcagtgcgcgtggagtggcaggagcgcaagcaccgcgtccagggcgcgcaaaagctgccaacttgcgtgtgggtcgagacgattgaggatgcgttgacctggttaggcaaacgcaaagattgggaacgcttttccgccctgatttccgccacccgacaaacgcacccagtcttgctgccctggctagagaagcacccactgcaggcattggcgctatccgaagaatggtcacgattacttgctgtagtaacatggcttgccgagcatccgcgtcccggcatttacttgcggcaagtggatttgccaggcattcacagcaaattcatcgaaacccatcgcggtgtactgaccgaattactggatctggccttgcctgtcgctgcggtggagaccagcaaatccggtctgcgtcagtttccagcccgttacggatttttcgaaaaaccgatccgtattcgcttccgcgtacttgatccgtcgattcatgtcgtacccggctcagcatcccccgacataactctggatgccgatagcttcagtcgcttggcgctcgacgtgcagcgtgtattcatcaccgagaacgaaaccaacttcctggcctttccgcaggtagcgaatgccatcgtgatttttggtgctggttatggttgggatgcacttgcccgcagtcattggctcaaaagcagtgccatgtattattggggtgatatcgatacgcacggttttggcattctggatcagcttcgcggccactttgaccacgtggtttcgttcttgatggatagagccacgctccatgcgcacgcggttttttggggcagtgaggacaaacccctccgagtggacttgcaccgactcacgatcgaggagagagccctctacgacgacctgcgcaataaccgcattcgccccggactacggctcgagcaagagcacatcggctttcactggctcgcccaccgccttcatgtccctgatagcacgtgcacatccaattga

SEQ ID NO: 42662 - DNA, 1470 bp, Xanthomonas campestris pv. raphani 756C
atgaagcatcaggcacggattgccggctaccgccacttgcgcgaccagccggcgtggaaattgctcgccgccgatcacgcaccggagctgattggcctgctgcagaccctgttgatggacggcgaacgccggctgccatcggcggtgctgcatgcgcgcctgcagcgccagctggatgccttgcgcggcgacgaactctcccgcgagctgccgcgcaccgcgcaggcctacctggcgcactggctggcgcagggctggctggaacgccggctgcccgaaggcgcggccgaagaagaatacgaactctcgcgtgccgccacccaggccatccgtttcatcgccggcctgcgcgagagcggcagcagcgccaccgaaagccggctgtcgctggtgatccagcagctggtgcaactggccggccagaccgaagccgacccggacgcgcgtctggctgcactgcgcgcagaacgcgagcgtatcgatgccgagatcgagcgggtggccgccggccgcgtcggcgcgctggacggcaagcgcgcgctggaacgcacccgcgacctgatccatctctccgatgaactggccgaagatttccatcgcgtgcgcgatgacttcgaacaactcaaccggcaatttcgcgaacgcatcatcgacgacgaaggcgcgcgcggcgatgtgctggagcagttgttcaacggcgtggacgtgattgccgacagcgaggccggacgcaccttcgaggcattctggagcctgctcaacgacacccagcagagcagccagctggaccaggcgctggacgcactgctggcgcgcggcttcgcacgcaagctcgaccgccgcgaacgcgccttcctgcgcgggctcaccggtaccttgctggagcgcggcggcgaggtgcacacggtgatgcagcacttcgcgcgcagcctgcgcgggttcgtgcagagccgcgggtatctggaacagcgccggctcaaccaattgctcaagcaggcacagggcgaagccttgcacctgcgcgagagcctgcatgccaccaccgccaccggctacacgcagacattgagcggcagccgcctgcgctcgttgtcgcagtggcgcctgcacgacccgcgcctcacccaggtcgatggccgcgtgtacgcggccgacgcggcagagatctcgctggacagcgtgggcgatttggtcgcgcaatcggagatcgacgtgcgcagcctgcgccgcgatctgcacgcgctgctgggcgagcgcccgcggctcaccatcggcgatgcgttgcagcagcggccggcggtgcaggggctgggcagtgtgatcggctatctgtcgctgggcacgcgccacggcctggtgatcgatggccacatggaaacggtgcaatgggaaggcggcgacggcacgttgcggcgcgcgcgcattcccttggtgtggtttacccgggagaaacgcaatgaactggtctga

SEQ ID NO: 42663 - DNA, 708 bp, Xanthomonas campestris pv. raphani 756C
atgaactggtctgagcaggcagcgctggatgcgcacgacgccgatgacgccgacgcacactccagcgcgctgaggctgccggccagcgatgccgccagcgccgcgcagggcggcgcgttgttcctcggcgacaccggcacgctgccattcgatgcgcgccgcgcgctgtgccagctgttggccggccccagcatcgacgcgcagcggcacggcgccttgtggccggccttgctgcgcaacgagccggccgtgcggcaggtgctgtgcgaactgtttctggagctggtgctggaccgcgaaggcggagtggcgttcacccgccaggccgacaccgccgagctggaatcgcccaccttgctgcgcagcgcgccgctgaccttcatcgagtcggtgctgctgctgttcctgcgtcagcaactggccgaggccgatacgcgcggcgagcgcgcggtggtggacgaggcgcagttggtggaggcgttgtcggtgtacgaaaagaacgtgtccaccgacagggccgggtttacgcggcgggtgatgacggccatcggcaagatgcgcgagaaccagttgctgtcgcggttgcgcggcagcgaggagcgttacgaggtgtcgccggtgttgaagttgttgttctcggccgaggatgtgcaggcgttggtggaggcgtatcgggagttgcgcgagggggaggttgctgcggactga

SEQ ID NO: 42664 - DNA, 4008 bp, Xanthomonas campestris pv. raphani 756C
atgaattcccagtccaacctgtcgccggcgtcgccgggtgcttccttgtttgccgagacgctggctgagcagcgtgcgcagcagtttcgtatgcggcgtttgcaggtacacaactgggggacgttcaacgggttgaccgaggtgccgatcgcggagaagggcttcctgttcgtggggcggtccggctcgggcaaatcgacgctgctcgatgcgatgtcggcactgctgacgccgccgagcatcgtcgacttcaacgccgccgcgcgcgaggccgagcgcagtgggcgcgaccgtagcctggtgtcgtatgtgcgcggtgcctgggccgatcagcaggacagcgcgtccggtgagatcgccacgcagtacctgcgcaagggcgcgacctggacggcgttggtattggagtaccgcaacgcgcaaggcgaggcggtgagcctggtgcggctgttctggatcgccggcagcggcaatgccgccgcggatgtgcgccggcattacatggtggtgccgcgcgcgttcgatgtggccagcgagctggagggtttcgatctggatctgcgcaagctcaaggcgcggctgggcgaggacgtggcgcattttgacgggttcgccggctatgccgagcgcttccggcatgcgttgggcatcggcaacgacatggcactgcggctgctgcacaagacccagtcagcgaagaatctcggcgatctcaacgccttcctgcgtggcttcatgctcgatgagccgcgcaccttcgaagcggccgaccggctggtcgaagacttcgccgagctcgatggtgcgcaccatgcagtggtcaccgcgcgacggcaggtggaaacgctcagcccggcgcgcgagcaccatgccgcgctgatggccttgcgccgcagcgttggcgaattgcgtgaattgcagctgggcgtggacagctaccgcgagcaacaacggctggccttgctggaggcgcgcctgcaggaggtcgacagccaggaccgcggcctggccggcgaagaaggccagcgccgtgagtcgttggacaaccacgaacagaaactggccgggctggagcgcgaacagcgcgccgccggcggtgagcagatcgaagaactcgaacgcgagcgcgtgcgggtggaacgcgagcgcgatgagcgcctgcgtcgccgtgcgcagatcgagcaggcctgccgccagctcggcaccgccttggcggccggtgccagtgggttcgccgcccaagtggcgcatgcgcagggcgtgctcgatggcggcaagcagcatgccagcgcactggacgaggccatcgccgagcgcatgggcgaacgccgcgacgatgagcgccgctttgcggagatccgtgcagaactggacgcgctaaagaaagcaccgtcgagcatgcccgcaccgatgcaggtgctgcgtgcgcggctgtgcgacgacaccggcattgccgaatcggcgctgccttttgtcggcgagctgttgcaagtgcgcgaggaccaggtggcctggcgtggcgcgatcgagcgcgtgctgcacggctttgcgcagtcgctgctggtggatgagcggcattacgcgcaggtcagcgaatgggtcaaccgcacccacatcggcacgcggctggtgtacttccgcgtgcgccgcaatgacgagctgcattcgcgccgtgtcgatcccaacgcgctgcccggcaagctgcaactgcgcgagcatgccttcaccgagtggctgcgcaacgagctcacccgtcgcttcgattacgcctgcgtggacaacgccgcagcgctgcgcaatgccgaccgcgccatcacccgcgaagggcaggtcaagcatcccggcgaccgctacgaaaaggacgaccgccacgccgtcaacgaccgcaagcgctggctgctcggtcacgacaaccgcgacaagctcaaggtcttcgaacgcgaagcgcaggcgctggcccagcgcattgccagttgcgacgccgacgtggccgcgctgcgcaagcaacgcgagcaggaccaggaaaaacagctggccgcgcacaccttagtggagcgcgactgggacgagatcgacgtcggccccaagctgcaacgcctgagcgacatcgacgaacaactgcaacagctgcgcgaaggcgatagcggcctgcgtgcactgggccaggcgatcgacaccgcgcgcacgctgcgcgatcaggccaagcgcacgtatgaagacgtacggcttgagcgcgcgcagctggcacgcgagcgcgtgcggctggaacagcagcaggccgcctgcgccggccgtgctggcaccgctgcgcttacacccacgcagatgcagggcctgcaggagcgcctggccgcgttggcaccgctgtcgctagataatctggaagcgcatttccgcgtggtcgaacgtggcttggccgagcagctggccgaaagccagggccgcgacagccggctcagcgcgcagctgctcgaatgcttccgccggtattgccagcaatggccggaagacagcggcgacttcaccgtgagcctggccagcgccgacgatttcctcgcgcggctggaccggctggaaagcgatggcttgccgcgtcacgagcaccgcttcttcgacctgctgcagacccagagcaagaacaatctgcttgccttgcagcgccacactgccgaagcccacaagggcatcaagcagcgcatggacgaggtcaacgccagcctggagcaggtgccgttcaaccgcgacaccatcctgaccatcgaggtgagcgaccgtcgcctggccgaggtgcaggaattccagcagcagctacgcgccgtgttgtcgcatcagcagaccgaagaccgcgcgctggccgaagcgcagttcgctaccttgcgcacgctggtggcgcggcttggtgcgcaggagccggaggcgcggcgctggcgcgagcaggtgctggatgtgcgcctgcatgtggaatttatcggcgtggagctggatgcacagagccgcgcgcaggtggagatctaccgcagtggcgctggcaagtccggcggccagcgccagaagctggccaccacctgcctggcggccgcgctgcggtatcagctgggcggcgaagacggcgaattgccgcgctattgcgccgtggtgctggacgaagccttcgacaaggccgacaacgaattcaccgcgctggcgatgaacatcttcgagaatttcggcttccagatggtggtggccacgccgctgaagtcggtgatgacgctggagcccttcatcggcggtgcgtgcttcgtggaaatcagcggccgccacaattccggcgtgttgttgatcgagtacgacgaacaggcgcagcgcttgaaactgccggagcgttcgcgtggggaagaagtggcggcgccgccggccgaacaagggggtgctgttgcactaggcgatcgcgcacaacgtgctccggtgatcgctgtggagtctggccacgcggcaagcgtgcacctagcggagagcacggcagagtctgcgcagggcgatgcagccacggacgggcagtcgcgcggcagcaagcgcacacgcgcggcggccaccgcgtcgacggcggcgccagggcccgcgcccgctggcaagcgcagcacgtctgcagctgcaacatcagcgacggccgcgccagccacgcgcacggcggacgcgtcgaacgggcagcgcaaacaggctgcaaggcctgccacaccgccgaagccggcgagcacgcggactgcgtcgtccggcaagcccgcggccaagcgcacaaccaccgcgaaagccgcggccgtgccgaaggcctccaaggccgtgccggccgtcgcggccaagcgcacgggcaaggcgccgaaacgcgtgagcaagccagcatcagctcagaaggtggccaagccggtatcgaaatccaagcccacggccaagcccgcgacggcggcttccgccacgagccgcgctgcgtctacgcgcggctctgctcccaaggcgcgcagcaaacgctga

SEQ ID NO: 42665 - DNA, 1479 bp, Mycobacterium colombiense CECT 3035
gtgctggacgacgacaccacgctgtcgcctgccgacctgctcgaactcaatcgtggcctccagggctcaccgacggtccgcctgctggccacgctgaacctcaacctctatgccacgctgatggaacgccagctcagcggcggcgtggtccccgagaccgacctcgtcgtacgcctcgagcgcgacctcgccgaactcgatcaggccggcgaacagtccggcctggccctgatcaagtcctgggccagccaggggtggctgcaccgcgtcgccgaccagcgctccggcgtcgaacgcaacctgtgttacctgacccaggaggcgcgccgggcgctcgacttcctgcgcggcatgcgccggcaggacaccatcgccaccggcggctcgatcaacggcatcgcggcccgcctcaagcaggtcgcgctgcgcgtcggcaatgaccccgaacggatccgcgccggcatagcggccgaaatcgccgcgctacaaaccgaactcgatgccctcgaccacgacgccggtccgggtgagcacagccaggacgtcgacctcaccgacgcctacgacgaagcccacgccatcgccttgcagatggaacgcctgatcaccgacatcggccagtacggggtcatgatcgaacgggccaccgccgcgctcgacgagccgatcgagagcaacgtcgaataccgcgaccggcagcgacgcatgtacgccgattacgaggccgcctgggattcccagggccgcgactcgcaccgcgccttcctgcgcatgatcaacgatcccgaccagcgcgccgagttcgaagccgacgtcgccgccgtcgccgaagccctccccgccctcgaccccgccctgcgcaaggtgatggccggtttcttcgaactggtcggccatcagatcgacgaagtggaacgcatccagcagcgctgcgcgcagcgcgtcaaacggttcaccgcgttcggcaccctcgaacagagccgtggcgtggcccgtcagctcaacgaggcgatcggcgccgcccgcaacctgctcaaagcgtcgctgatcgactcccggctggacatcgaactccccctggcccgccacgcgttcagttcggttggcgcgctgagcttccggatcggcgacctgtccaacccgaagcccgccgaggttgccgagggcgaggtcgatctgaccagtttcgcctcgctgaccactcaggtcgacgcccccgcgatgtcggagatgatcaacaccgcaatcagttccggggcgccactgtccctcccggatgcggtcgcgatgctcgattcggcctacctcggccacgtcatcgtgctgtggtcctgggcgctcaagcagccggaatccgcacagggttccgagtcggtgacggtccgcttccagtccctggacgggcgggaccgcgaaatggaggtgccgcacttgatgttcaccgaaccggtttccaccctgctgggggctaccgcgtga

SEQ ID NO: 42666 - DNA, 708 bp, Mycobacterium colombiense CECT 3035
gtgaccgtcgaagagaccgtcgactacagcgggttctccgcgctcccccaggtcgaccagacggcccgcgtcccgcagcagcgccgtccccggttcgacggcgacgtgtccgagctgcccgaccgcgcctgctgggcattgcaacagctgctgacgcgccgctacatcagtgccgaagccgatcgcgacgtctacacctgggtgctggagtaccgcgcgcaactgtcggtcaggctgtccgaattggacctgctgcttcgcatcgtcgagggcgctgacgtcgcgttcgtcgaacaggcccgctacgaatccgcccggggcgtcaagcttttgcgtcgtgaaccgctgggcacctacgactcgatcctggcgttgcacctggcgcagatgatgcgcgcctcgggtgatcaggccgtcgtgatcagccgcgacgaaatgcacgggctgttctccggtgtgctcaacgacgtcgaccgcgacgccgtcacgttcaccgcccgcatcgacggggccatcgcgcgcctgacatcgctggagatcctgcgcaagacccgcgacgacgaggacagctacaccgtcagcccggtcatcaacgccgtgatgacggcctcggtgatcaccgaactgcagcagcagttcgagatcctgctgcgcggcggcgtccccgacgagcggggccacgacgacgaggagggtgacgatgactga

SEQ ID NO: 42667 - DNA, 3363 bp, Mycobacterium colombiense CECT 3035
atgactgaacagttccacctgttgcgcctgcaggtcatcaactggggtgtcttcgacggctatcactccatcgggttcagcgagggtggcgcgctgatcgccggcgcttccggcagcggcaaatcctcactgctggacgccatttcgctgggcttcctgccgttcaaccggcgcaacttcaatgcctccggcgacaacacggccgccggatcgagcgcgggcaggcggaccgtcgacaaatacgtccgcggcgcctggggtcagcgcagcgacgccggcaccagcaaggtcatgtacctgcgcggcgatggcaccgcgtggtcggcgatcgccgtcacctaccgcagcaacaccggccgcaccgtcaccggcttggtgctcaagtggctcaccggcgactctcggtctgactcttcgagccggttcgtgctggccgacggtgaccgcgacatcgagaacgtctgcaaccgctgggccgcgggccgattcgacgcctcggtgttcaaggacgactggcggttctccaccaaggtggaatcgcagtacctcgcccagctgtacgccaccatcggcatccgcgcctcagacgccgcgcagcagctgctcggcaaggccaaatcactgaaaagtgttggcggccttgagcagttcgttcgcgagttcatgctcgacgagcccagcagcctgagccggctgcccgaagcgctcaagcagatcgaccccttggtcgacgcccgtgaactgctggccgtcgcgcaacgcaaacgcaagatcctcggcgacatcgaaaagatccagcagcgctacgcctcggagtcgtccgacctggggatcatcgacctcgtcgacctgccgatggtccgcgcctacaccgatcatgtccggctcgcgcagtgccccgcgcagatcgaatcgctcgacgccaccatcgaccagctcggcaacgaatacgaagacgtcacccgccagctcaatcttgccaaggccgaaggtgattcgctgcacgcgcagatcagcggatccagcaccagcctcgggccgctgcagtcgcaggtggccgccgcagaggcgcaggccgagcaggtctcgcgccggcgcaccgcctacgaatcgatgctcaccacgcatggtctcgacatcccggacaccgccgacgaattctggaatctgcgcgaggaactcagcacgcgggccaccgagctgttggccaaactggatcgcggccgggaagcctcgaccgatgccgagtacgcccagaaggtcgcccgcatcgcccgcgatgacgccgccagggaactcaaacgcgtcgagcgtgtcggctcggcgcttccggaattcgcgctcaccatgcgcgaacacatctgcgccgctgtgggtatcgatcccggtgagctgccctatatcgccgagttgatggatctgcggcccgagcagagccgctggcgcgtcgcggtcgaaaaggtgctgcgcggtgtgggcctgcggctgctcgtccccgacagccactacgcggcggtgctgcggttcgtcaacgagaccaacatgggtgggcgactgcagctgcatcacgtccgcgcccggttcgtcggcgcggaggtcgccgaggccgagccgaacacgttggcgggcaagctgttcgtggtcgacccgacccacgcctgcgccgccgaggcagccgacgtcatcgccgcagccggtgatcacatctgcgtcgacacccccgatgtgttcgcccgcttccggcgcgcggtcaccgacaccggcctttacaaggactccgagcgtctcgccatcaaggacgaccgccggccgctcaagcaggccgactacatctaccagggcgatgtggccgccaaggtcgacgcgctgaccgtggatctcgccaacgccgaagaggcgtttcgccgcgcccgcggcgtcgccgaccagatcgccgccgagcgtcagcagtggcgggaccgggccgcggcgttcaaggcgatctgcgatcaattcgagcagtggacccacgtcgacaccgagaccgccgacgggcacgccgatcggctgcgcgagcagttcgaactgctgctcgccgacaatcccgatatcgaggccctcacggcccgcgccgaggagtgctgggagcagatccaggctttgatgacccgccgcggcgccatccagacccgccgcgacgacctcgacggtcgccgcacccagctgctcgagttgcaggaacggctcgctccggcgttcgtgtccgagcccttgaccgacctgctgaaccgctacgccgtcgacgtgccggttgccctggacctgctcaacccggaaccgcaccgcgacgcggtcttcaccgcgatccggcgcgaacgcgaacaactgcgcgaaagccgcaggcgctcatacgatgagctcgcgcgcatcctcaacaccttcgacaccgcgttccccgacgcgatccccaacgacagcgacgtgttcgacgaacgcgtgcacgattacgtcgcgctgtgccgccacatcgacgagcgggaactgcccgaggcctacgagcgcatgatgcgactggtcaccgagcaggcgcccgacgccatcctgaccctgcaccgggtcgccgagcaggaggcccggcggatcagcgaacagatcgaacgcgtcaacaccggtctgggggcggtcgagttcaaccgcggcacccgcctcaccctgcgcgccacctcgcgcagcctgaccgccgtcgccgaactcaccgagatcgtgcgggccatctcgcggcgcatcgccgaggtcggcctcggcgacaagcaggccatcctggatcagtacgccgacatcttgcggctgcgcaaccgattggcatcgaccgcgccggaagacaaggcctggacgcgcgacgccctcgacgtccgcaaccggttcaccttcgactgcgccgagtgggatgtcagcaccgacgagctgatccgcacccacagcaacgccggcgacaactcgggcggcgagcaggagaagctgatggccttctgcctggccggtgcgctgagcttcaacctggccaatcccgaaagtgcggacaacaaaccggttttcgcccagctgatgctcgacgaagcgttctccaagtccgacccgcagttcgcgcagcaggcgctgcaggccttccgcaagttcggcttccagctggtaatcgtggcgaccgtgcagaacgccaccaccatccagccctacatcgacagcgtggtgatggtgtccaagcgcgaagccaccgggcgcaacgcccgtccggtggcgacggtcagcaccaagacgatcaccgacttcaccgcgctgcggcacgagatgcgaacgtcggcggcgctggtcccggccggggtgtga

SEQ ID NO: 42668 - DNA, 1470 bp, Stenotrophomonas maltophilia JV3
atgaagcatcgcgaacgcatctcccgttaccgccatctgcgcgaacagccccagtggaagctgctcgccgccgaccacgctccggaaatcatcggcctgctgcaggggctgctgatggacggcgagcgcacgctgtcctcgtcggtgctcaacgagcgcctgcagcgggcgctggaccagctcaacggcgacgaactgtcgcgcgacctgccgcgtaccgcgcaggcctacatcgcgcactggctggcccagggttggctggaacgccgcctgcccgagggcgccgaccaggagcagtacgaactgtcgaccgcggcgctgcaggccatccgcttcgccgatggcctcgagcaggcccgcgtggccgccaccgaaagccgcctggcgctggtcatcgaacagctctcgcagctggccgcgcagaccgagtccgatccggatgcacgcctgtcagcactgcgcgacgagcgcgaccgcatcgacgccgagatcgcccgcgtcggtgccggccgtgtgatcgcgctggatggcaagcgcgcgctggaacgtgcacgccagatcatcggcctggccgacgagctgaccgaagacttccgccgcgtgcgcgacgacttcgagcagctcaaccgcgatttccgcgaacgcatcatcgacgatgagggcgagcgcggcgatgtgctgtcgcagctgttcgaaggcgtggacgtgatcggcgagagcgatgccggccgcagcttccaggcgttctggcgactgctcaacgacgccgaacagagcgcccagcttgatgctgcgctggaagcggtgctggcgcgtggcttcgcccgccgcctggaccgcaacgagcgcaacttcctgcgcggcttcaccagcaccatgctcgagcgcggtggccaggtgcatgacgtgttgcagaacttcgcgcgcagcctgcgcggcttcgtgcagagccgtggctacctggaacagcgccgcctcaaccagctgctgaagcaggcgcagtccgaagcgctggcgctgcgcgacgagttccctgcgcagcgtggcatcggccgcgacctgcagctgaccaccagccgcctgcgttcgtggtcgcagtggaagctgcacgatccacgcagtgcccaggtcgatggcaacgtcgagtacaacgacgcggccgcgatcagcctggagagcgtgggcgacctggttgcttcgtccgaaatcgacttccgcaccctgcgtcgcgacctgcacgacctgctcgatgcacagccgcggctcagcatcgcccaggccctgtcgcagcgcgaggcgccgcagggtcttggcagcgtcatcggctacctgtcgctgggcacgcgcttcggcaacgtggttgccggcgagcaggagcttgcgcaatggcgtggtggcgacggccaggtccgtcgcgcccgcatcccgctggtttggttcacccaggagagacgccatgagctggcatga

SEQ ID NO: 42669 - DNA, 702 bp, Stenotrophomonas maltophilia JV3
atgagctggcatgaagaccccatcgaagcaccgctggccgacgtggcggaagacgcctacgaggccgagccggtggcgaccgtggcgcagccccgccgtggcaacgacgtgtactacctcggcgataccgggcgcctgccgctggatgcgcgccgcgcgctatgccagctgctgatcggccccagcatcgaccagctgcgccacgccaagctgtggccggcgctgatccgcagcgaggcggccatccgttcgtcactggcggacctgttcctggaactggtgctcgaccgcgacagcggcgtggccttcacccgccaggccgacacggaagacgttgatgcgccggtgctgctgcgtacctcgccgctgaccttcatcgattcggtgctgctgctgtacctgcgccagcagctggccgaggccgatgcgcgcggcaaccgagcggtggtcgccgacgccgagatggccgaagcgctggccatctacgagaagaacctgtccaccgaccgcgccggcttcaaccgccgcgtcgcttcggcggtgcagaagatgaaggacaaccacatcctgacccgcctcagcggccaggaagaccgccacgaagtctcgccggcgctgaagctgctgttctccgccgaagacgtgtcccagctttcggcggtctaccgccagctgcgcgaaaccccggccgccgaggcctga

SEQ ID NO: 42670 - DNA, 3381 bp, Stenotrophomonas maltophilia JV3
atggctatctccaagcacactcccgccctgttcaacgaaggcctgccggacccgcgcctgcagcagttccgcatgcgccgcctgcaggtgcacaactggggcaccttcaacggactgaccgaagtaccgatcgccgagcgcggcttcctgttcgtcggccgttccggctcgggcaagtcgaccctgctcgatgccatgtccgcgctgctgacgccgccggccatcgtcgacttcaatgccgccgcgcgtgaagccgagcgcagtggccgcgaccgcaacctggtgtcctatgtgcgtggcgcgtgggccgaccagcaggacagcggcaccggcgaaatcgccacccagtacctgcgcaagggcgcgacctggaccgcactggtgctggagtaccgcgccggcgatggccgcgtggtcagcctggtgcgcctgctgtggatctccggcaatggcacctcggccggcgacgtgcgcaagcactacatgatcgccgagcgcccgttcgacatcgccaaggacctcggcggcttcgatcttgacctgcgcaagctcaagcagaagctgtccgacctgcaccacttcgacaccttctccggctacgccgagcgcttccgcgacctgctcggcatcgacaacgagatggcgctgcgcctgctgcacaagacgcagtcggcgaagaacctgggcgacctcaacgtcttcctgcgcgacttcatgctcgacacgccgaagaccttcgacgccgccgagcgcctggtcagcgacttcgccgaactcgatggcgcgcaccaggccgtggtcaccgcccgtcggcaggtggaaaccctgctgccggcacgcgcttactacaacgacctgaaggaaatgcaccgccagcgcggcgacgacgaagcgctgaagctcggcgtcgacagcttccgcgaaagccgccgccaggcgctgatcgaagcgcgcctgcgcgagatggacgtgcgtgaccgtggcctgctcggcgaagaggcccagcgccgcgccgcactcgacaaccacaccgagcgcctggccgaactggaactgcagcgccgccagcagggcggtgaacgcatcgaggaactggaacgcgagcagggccgcgccgaagccgagcgcgaccgccgcaaggccaagcgtgaccaggcccaggaagcggcgcagcagctgcaggccgaactgcccgacgatgcccatggtttcgccgagctggtcgagcgcgcgcagaacgaactgcaggaccgccagcgtgcctcggcggcactggacgatgcgatcagcgatcgcctcggcggcaagcgcgatgacgagcgccgcttcggtgaagtgcgcagcgaactcgaagcgatgcagcgcaccccctccaacatacctgcgccgatgcagaagctgcgcgcgcgcctggctgaggaaaccggcatcgccgaagcggcgctgccgttcgtcggcgaactgatccaggtccgctcggaagagcagggctggcagggcgccatcgagcgcgtgctgggcggcttcgcgctgtcgttgctggtcgatgacaagcactacaacgacgtcgctgagtgggtgaaccgtacccacctgggcatgcgcttcacctactaccgtgtgcgccgcaacgatgatgcattcgcgcgcgagccgtcggccaagtcgctgctgcacaagctggagctgcgcgagcacgtgttcgaaagctggctgcgccgcgagctcggcaagcgcttcgactacgagtgcgtggatgccaagcagctgcgcaacgtcgaccgcggcatcacccgcgaaggccaggtcaagcatccgggcgaccgtttcgagaaggacgaccgcagtgcggtgggcgaccgtcgccgctggatcctcggcttcaacaaccacgacaaggtgggcgctttcgagcgcgaagcgcaggaactggccaagcgcatcgccagctgcgagaccgacatcgcgcgcctgcgcggccagcgtgaccgcgacaacgaacgtcgcctggcctgccacgagctggtcagcatcagctggaacgagatcgacatcgccgccccgcagcagcgcctgaccgatatcgaggccaccctgcgcgacctgcgcgaaggcaacgccgatctcgccaagctggccaagcagatcgacgccgtgcgcgccgacatcgaacaatcccgccgcacctatgaagacgtccgcgtcgaacgtggccagctggtcaaggagcgcgatcgcctggaccgcgcccgccagcagagccgtgcgctggtgctgccgagcctggcccaggagcaggaagccggcctggccgagcgcctgcaggaacagggcccgctcagcctggaaacgctggaagcgcacatgcgccaggtcagcaacgcgttgaacgagcagctgtcgtcctcgcagcaggacctcaaccgcatcgagaaccagctgatcggctgcttccgtcgcttcatccagcagtggccggaggaatcgggcgacttcaccgtttcggtggcctcggccgaggacttcctcgcccgcctcgaacgcctggagcgcgacggcctgccgcagcacgaagagcgcttcttcgatctgctgcagaaccagagcaagaacaacctgctggccctgcagcgccacagtgcagaggcccgcaagtcgatcggccagcgcctggacgaagtgaacgccagtctggagcaggtgccgttcaaccgtggcacgctgctgaccatcgaactgagcgaccgccgcctgccggaagtcggcgagttccacctgcagctgcgcgaggtgctgtcgcagcagcagaccgagcagcgcgagctggccgaatcgcagttcaccgtgctgcgccagctggtcaaccgcctgggttcgcaggaaggcgaggacaagcgttggcgcgagctggtgctggacgtgcgcatgcacgtggagttcatcggcgtcgagctggatgcggaaacgcgccagcaggtcgagatctaccgcagcggtgccggcaagtccggtggccagcgccagaaactggccaccacctgcctggcggcggcactgcgctaccagctcggcggcgccgacagccagctgcccagctacgccgcggtcgtgctcgacgaagccttcgacaaggccgacaacgagttcaccgcactggcgatgaacatcttcgacaacttcggcttccagatggtggtcgccaccccgctgaagtcggtgatgacgctggaaccgttcatcggtggcgcctgcttcgtcgaaatcagcggccgccacgactccggcgtgctgctgatcgagtacgacgaagaaggcaagcgcttgaagctgcccgagcgcagccgccagcaggccagcgaaccggaagaagcggaggcctga

SEQ ID NO: 42671 - DNA, 1455 bp, Thiocapsa marina 5811
atggacttcgccaccctcgacaccctgcgcacccatcaccccgcatggcggctgctgcgctcggatcatgccccgctggtggcgagctttctgaaccgcgtcttcgttcagcccaacgtccgggtgatggcggcggcggatctggccgaggcgctcgaagacgagttgtatgcactgcgcgagcgtctcggcgagggcagcttccccaaaccggcgttggactatctcaacgattgggcgggcccggagaagggctggctccgtaagttctacgcccgtgactcggacgagccgcagttcgatctgacaccgtcgaccgagaaggcgatcgcctggctcgacaccctctccgagcgcagcttcgtggggacggagtcgcggctcttgaccctgttcgagctgctcaagcagatgagcgagggcagcgaggccgatcccgagaagcgcatcgcggagctcgtcaagcggcgcgacgagatcgatgccgagatcgcgcgggtgctgggcggcgacgtgccgctgttggacgacacggcgctgaaggatcgcttccagcagttcatgcagttggcacgtgagctgttgaccgactttcgcgaggtcgagcataacttccgtctgctcgatcggcgggtgcgcgagcggatcgcgctctgggagggtgcgaagggcgcgctcttggaagagatcatgggcgagcgcgacgccatcgccgactccgaccagggacgcagcttcagggccttttgggatttcctcatgtccagccgtcggcaggaggagctgaccgagctgttggaccgggtgctcgccctgcccccggtcgcggagctgaagccggatgcgcgcacccgccgggtgcattacgactggctcgaggccggcgagcacacccaacgcacggtcgcgcagctctcgcagcagctgcggcgctttctcgacgatcaggcgtggctcgagaaccggcgcatcatggacatcctgcacgggatcgaggccaaggcgctggccctgcgcgagcatcagccgacgggcgaggtgatgcgcattgccgagtccgccgccgctatcgagctgccgatggagcgcccgctctacaccccgcccctgaagccggtgatcgcggatctagagctgcaggcaggcgacgccgatctggacgccgatgcgctctatgcgcaggtcgtggtcgaccgcgcgcagcttgcccgacacatccgccatgccttgcaggatcgctcccaggtcacgctgcgcgagctgaccgagctgcagcccttgacgcagggcctcgcggagctggtggcctatcttcagttgggtagcggcgcctttaagacgaccctggacgagaatgccccggaggtgattgtctgggagacgcgcaccggcgacggcatggcggtccaaaaggccgcccgactgccccgcgtcatctttgtcagagagaggtga

SEQ ID NO: 42672 - DNA, 651 bp, Thiocapsa marina 5811
atggacgacgaccaaggacaggcccgggacgccccggcgctcgcggccggggcggagctgtccgcgctggtgatcggcctgctcaaaggggtcatctatcgcgagggcgacgagcgactctggggcacgctggtcgacctgcaggcgcgggttcgggactatgtgtcggtgctcggactggagctggtgctcgacgaggcggaaggctacgccttcctcaagagccgcgccgagaccgccgaggacgaggccgcgcccaagctgccgcgtctggtcgcgcgtcggccactgtcgtttccggtcagcctcttgctggccttgctgcgcaagaagctcgccgagttcgatgccggcggagccgagacgcgactcgtgctctcgcgcgacgagatcgtcgagctggtgcgggtctttctgccgcagagcagcaacgaggcgagactcatcgaccagatcgagacccacatcaacaaggtcgtcgagctgggcttcctgcgccggctcaagacagccggcggctccgcccgcggcccggacagctacgaggtgcggcggatcctgaaggccttcgtcgatgcccaatggttggcggacttcgacgcacggctggcggtctatcgggcgcaggtcgatccggacaagggcgcttga

SEQ ID NO: 42673 - DNA, 3435 bp, Thiocapsa marina 5811
atgcagccgcttgaatcgctcgacctggacttcatcgccgacgaccgcctgtccggctttcgtctgtcgcgtctggaggtcttcaactggggcaccttcaacggtcgcgtctggaccctgttgctcgacggcaagaacgggctgctgaccggcgatatcggctcgggcaagtcgaccctggtggatgccgtgacgaccctgttggtcccggcccagcgcatcgcctacaacaaggccgcgggtgcggacagcaaggaacgcacgctgcgctcctacgtgctcgggcattacaagtccgagcgcaacgaggtgaccggggcggccaagcccgtgagtctgcgcgatcacaacaattactccgtcatcctcggcgtcttccacaacgccggctacgaccagaccgtcacactcgcgcaggtcttctggatgaaggaggcgcagggtcagccggcacgcttcttcgtctgcgccgagcgtgatctcgcgatcgcgaccgatttctcccgcttcggaaccgacatcgctcaactgcgcaagaagctgcgcgggctcggtgccgagatcgaggacgccttccccaaatacggcgcctggttccggcgccgactgggcatcgacagcgaacaggcgctcgagctcttccatcagacggtctcgatgaagtccgtcggcaacctcaccgatttcgtgcgcggacatatgctggagcccttcgcggtggagccccgcatcaaggcgctgatcgcgcacttcgacgacctcaaccgcgcgcacgaggcggtgctcaaggccaagcgccaggtcgagatgctcacgcccttggtggcggactgcgaacgtcatgccggcctgacgcgcgaggtcgaggatctcagaggctgccgtgacggattacgtgtctacttcgcgggcttgaaactggcgctgctcgagaaacgtctcgcgcacctgcaagaagaccgggagcgcgtcgatgccttggtcaagcgccttgagggccgccgcgaggagcaaggcaaccaggtctacgagctcaaacgcgcggtggccgaaaacggcggggaccgtctcgaacgcctggccgccgagatcaagaagctggaggcgctgcgcgacgcccggcagaacaaggcacgacgttacgccgagctgacggccggtctcgacgagagtccggccgcggacgaaacggccttccttgcgcaacggcgtcggctcgcggagatgcgtgagggtttgcaggcgcgcgacagcgatctgcagaacgcggtgaccgagcacagcgtgaccctgcgccaaggccagctcgaacgcgacgcccttcaggccgagatcgagagcctgaagcgtcgccgcagcaatatcgacgaccagcagatccggatccgtgccgcgctctgcgaggcgctgggtcttacggaggagtcgatgcccttcgcgggcgagctgctgcaggtgcgtgatgacgaacgcgactgggaaggtgcggccgagcgactgatgcgcggcttcggcctgtccctcttggtgccggacacggcctacaaggcggtcgccgagtgggtcgacggcgcccagctgcgcggtcggctggtctatttccatgtgcgcgcccgggtgcgtgcccagttgcacacagggggacggggcgacctgcccgagctgcaccgtgattcgctggtgcgcaagatcgccgtcaaaccggactcgcctttctacgactggctcgagcgcgagctggcgcaccgtttcgacgtagcctgttgcatcacgcaggagcagttcaggcgcgagacccgtgccatcacacgcgccggccagatcaaggacccgaccggacgtcacgagaaggacgaccgtcaccgcatcgacgaccgcagtcgctatgtcctgggctggaccaacgcggccaagatcgaaacgctggaggccaagcgtcgccggctcgaggcacatctcgccgagatcgccgcaaccacgggcaagctcttgtccgagcgacaggcgctcggtgaccgcctgaacgcactgacgcgcctggaagagtttgtcgacttcaacgagctggactgggcttcggtcgcgaccgaggtcgccgcactgatcgacgagcggcaacgcttggaatcggcatccgatctgctcaaacagctcaatgagcgcctgggcgaggccgtccaagcgcttgcggtgatcgagggcgagctggaagaggcgagatcgaaacgcgccaagatcgagcaaaagcaggaggatgccgaggcactccaagtgcagacccgcgcgatcctcgcgccgagcggtgacgcggagcggcccgcggcgccagccgagctgaccgagcggctcgagaccatgcgcagcgaggcgctcggcgagcatcaactgaccgtggagtcctgcgacaaccgcgagcaggatatgcgcgcctggctccagaaccggatcaacaacgaaagcggcaagatcaataccctgctcaaccggatcatcaccgcaatggtggcctacaagaacgccttcgagctcgaaacccgggagctcgacgccaacgtcgaggcggccttcgagtaccgacaacagctcgatcagctgggacgcgacgacctgccccgcttcgaggagcgcttcaaggagctgttgaacgtcaacaccatcaacgagatcgccaacttcaatgcccagctcgcccgcgagcgcgagaccatcaaagagcgcatcggccgcatcaatgagtcgctcacccagatcgactacaacccgggacgttatatcgcgctcgaatcccagatcagcccggacgccgagatccgcgatttccagtccgagctgcgtgcctgcaccgagggtgccctgaccggctccgaggatgcgcagtattccgaggccaagttcctgcaggtgaagaccatcatcgagcgcttccgcgggcgcgagggccagaccgattcggacaggcgttggacggccaaggtcaccgatgtgcgcaactggttcctgttcgccgcaagcgagcgctggcgcgaggacgggaccgagcatgagcactactcggactcgggcggcaaatccggcggccagaaggaaaagctcgcctacaccatcctggccgccagcctcgcctatcaattcgggctggaatggggcgccgtgcgctcgcgctccttccgcttcgtcgtgatcgacgaggccttcgggcgcggctcggacgagtcagcccagtacggtctacggctctttcaacagctcaacctgcaactgctgatcgtcacgccgctgcagaagatccacatcatcgaacccttcgtctccgccgtgggcttcgtgcacaacgaaggcggtcgggagtccaagctgcgcaatctgacgatcgaggaatatcgcgaggagtccagagcgcgcaaggccgagccgagcgcaagcgtgccggcatga

SEQ ID NO: 42674 - DNA, 1266 bp, Thiocapsa marina 5811
atgagctggacgacagcggcggatctcaaggcgcaactgaaccgactctgggagcgtggcgagctgctgcgcccgctggtcacggacgacgtggccagcgcgagcggattcccgctgcgtctgaggctgaagggaccaggctccgcggatctggccgatcggttcgaggcggtgcgcgcctggattgccgagctgacgactatcccgcgtctgcggatcgaatggcgcgcggtcaatcatcgcgtgctcggtcctcagcgtctgcccgagaccctctgggtcgaccgactcgacgacgcgctcgcactgatcggccgacggggcgatgcggcccggttcacgcgttgcctggagatgacgcgatcgcggcaaccggcgctgctcgagtggctcggccaacgtcccttgcaggcgatcgcgctggccgacgactgggagcgcctactggccgtcgtggactggctgagccgccacccgcgtcccggaatctacatccggcaggtcgacatcccgggtatccacagcaagttcatcgaggcgcatcgtggggtgctctcggagctgttggatcttgtcttgccggcggaggcggtcgctgcggatcgcgtcggcgtcggtcggttcgccgcgcgctacggctttctcgacaagcccaaccgggtccggtttcgcctgctcgatgacgctgttcgcttgctgcccagtcccgcgcgcgcggacgtcaccctggatgcggagagcttcgcccggctcgcgatcccgattcgacgggttttcatcacggagaacgaggtcaactttctcgccttcccggacgcgaccgcctcgctggtcgtcttcggctcgggctacggctgggatgcactggcccgcgccgagtggctcggggcctgcaccctgcactactggggcgacatcgacacccacggcttcgccatcctcgaccagctccgcggccgattcggtcaagtggcctccttcttgatggatcgcgccaccctgatggcacacgagaccttctggggcgaggagcccgatcaggtcatgcacgatctgccccggctcacggcgtcggaacgagccttgttcgacgacctgcgcgacaaccgcatccgcaaaggcttgcgtctggagcaggaacggatcgggttcggatgggtggagacggcacttgcggatgcgctgctcgagaacagcggccgggccgtggaggggatcgactcgatcgccgcaccgatcaggcgtcgttcatcatcccggctgtag

SEQ ID NO: 42675 - DNA, 1575 bp, Bifidobacterium animalis subsp. lactis BLC1; identical to SEQ ID NO: 41902

SEQ ID NO: 42676 - DNA, 810 bp, Bifidobacterium animalis subsp. lactis BLC1; identical to SEQ ID NO: 41925

SEQ ID NO: 42677 - DNA, 3498 bp, Bifidobacterium animalis subsp. lactis BLC1; identical to SEQ ID NO: 41904

SEQ ID NO: 42678 - DNA, 1221 bp, Bifidobacterium animalis subsp. lactis BLC1; identical to SEQ ID NO: 41905

SEQ ID NO: 42679 - DNA, 1440 bp, Ectothiorhodospira sp. PHS-1
atgaaccacgacgacctgcaaaacctgcgtcgaatgcatcccgcctggcggctgctggtggcggacaacgcccccatgatcatcagcttcctccacggcagcttcgtcgcccccaatgtccgggtgctggcggccaccgacctggaaaaccggctggaagatttcctgtttcacctgcgcggccaactgggcgaggacgcctatccccgggccgcccgcgcctacctgtccgactggtccgccgatgaacggggctggctgcggcgctattacccggaacacagcgacgagccccattacgacctgacgccggccacggaacaggccatccaatggctgaaaagtctggagcagcctcacttcatcggggcggaatcccgtctgaccctggtcttcgacctgctgcaacagattctccagggcgcggagagcgaccccgaggcccgtatccgggatctggaggcgcgcagggacgtcatcgaccgggagatccagcagatccgtgccggtcacatcaatctgatggacccgacccagttgcgggagcgattcctgcagatggcgggcacggcccggggcctgctggcggactttcgtcaagtggaggagaacttccgcgccctggatcgacaggtgcgggaaaaggtggccacctgggaaggcggcaagggggaagtgctggacgaggtgttcggcgaacaggatcgcatcaccgattccgaccaggggcgcagctttcgtgccttctgggatctgctcatgtcaccggcacgccaggaggcgctgtcggaacaactggagcgggtactggcgctggtagaggtggccgaactggagccagaccccaggcttcggcgcatccattacgactggctcgccgccggtgaatacacccagcgcatggtggcccgtctgtcggagcagctgcgccgttatctggatgatcaggcctggctggaaaaccgccgcatcatgaccctgatccgggaactggaacaacacgccctggccctgcgtgagcacccgcccgagctgacactgtccctggacgaaccctccccctgcatcgaactgcccatggagcgacccctgttcagcccgccggtccggccccatatccgtcagcagcagctggaagccggagagagccatgccacccccgacgccctgttcgagcagacctgggtggaccggaccctgctgcagggtcgtatccgccaggccctgcagacccgggatcagatcaccctggcgaccctgctggacgagcatcccctggaacacggactggcggaactggtggcttacctgagcctggccgccgaggatcaccgcagcgtgatcgatgaagcccatccccagaccgtgcactggcaggatgcccggggtatcctgcgtcgcgccaccctgccgcagatcatcttcacccgcgcacactga

SEQ ID NO: 42680 - DNA, 597 bp, Ectothiorhodospira sp. PHS-1
atgaccgatatcgacaccgactcgaccttttccgccatgctgatcacgctctttaagggcgtactgtacaaggatcagcagccgcgccactggcaggcactgcaggaccaccaggcccgggtgcgcgaccatgtggccgtgctgggtctggaactgatgctggacgacgccgaaggccatgcctgcctccggcaacgcccaacccaggacgacgaaacggaactgccccggctggtgcagcgccgccagctcagttatccggtaagcctgctgctggccctgctgcgcaagaaactggtggaacacgatgccggcggcggtgacccgcgcctgatcctgtcccgggaacaaatggtggagatgctgcgggttttcctgccccccaccgccaacgaggcccggctggtggaccgcatccagaccgacatcaacaaggtggtggaactgggattcctgcgccgactgcgtggccaggaggaccagtacgaggtgcgccgcatcatcaagaccttcatcgacgcccagtggctggcggagtttgaccagcgcctgaccgagtaccgcaaccatgccggggaggccgacgatggcgcttga

SEQ ID NO: 42681 - DNA, 3366 bp, Ectothiorhodospira sp. PHS-1
atggcgcttgaactggagtttgccgcatccgacgaacgcaccggttttcgcctgcagcatcttgaagtctacaactggggcaccttccacaaccgggtctggtccctgcgcccggagggtgacaatgccctgctcaccggggatatcggctcgggcaagtccaccctggtggacgccatcaccaccctgctggtgccggcccagcgcatcacctacaacaaggcggccggcgccgaggccaaggaacgcagcctgcgttcctatgtgctgggctattacaagtcagagcgcagtgacgcggggctgagcagccgtgccgtgggcctgcgggatcacaacagctattccgtgatcctggggcatttttacaacgaaggcttcgatcagcatgtcaccctggcccaggtgttctggatcaaggatcaacaggggcaaccggcccggttctttgtggtggccgacggcgccttgcgcattgcggaccactttgccgacttcggcagtgaccttacccggctgcgcaagcgcctgagggatacccccggggtggaactgttcgacaacttcccgccctacagcggtgccttccggcgacgcttcggcatcgaaaacgaccaggccctggaactgttcaatcagaccgtgtccatgaaatccgtgggcaacctcaccgaattcgtgcgcagtcatatgctcgaagccttcccggtggaggatcgcattcaggccctgatcacccatttcgacgacctcaaccgggcccatgaatcggtactcaaggccaaggcccagatcgcccatctggaaccgctggtggcccgcgccgacacctatgccgaacgctgccgggaggccgaagccctgcgcgcctgccgggaggcactcaggccctggtttgcttccctcaaggccggactgctggaccggagactgggccatctgcacaaggatctggcccgtctggagcatcgcatcgagcagctccatcgccagcagcgggaacagcgggcacggcgcgatgaactcaagcaggccattgccgagaatgggggcgatcggctggcgcgtatcaagatcgagctggaacaaaagcgcgagatccgcgaccagcggcggcaacgggcggagcggtatcgagatctggcccagcaactgtcactgcccgatgccgccgacctggccgtctttcaggacaatttccaggccctgacccaggccctggaagacgctcagcgagagcgggatgacctgcagaaccggatcaccgaggcgggagtggcgttgcaccagcagcggacacatcaccaggaactggaaagcgagctgacgtccctgcgccagcgtcgctccaacatccccgccgccatgctgggcatccgcgacgccctctgtcagtccctggatctgccggtggacgacctgcccttcgtgggcgagctgttgcaggtgcacgagcaggaaaccgactgggaaggggccatcgaacgggtcctgcacaacttcggcctctccctgctggtgcccgacacccactatgcccgggtggccgagtgggtggatcgcacccatctgcgggggcgcctggtgtacttccgggtgcgggagacgcgccggagccagccccaggatctgcatccggattccctggtgcgcaagctctccatccgccccgactcggtcttctacggctggctggaacaggaactggcccggcgtttcgactatgcctgctgcgccggcatggatcagtttcgccgcgagcaaagggccatcacccgggccgggcagatcaaggccgggggcgagcgtcatgaaaaggacgatcgtcaccgtctggatgaccgcacccgtttcatcctgggctggagcaacgaggccaagatcgccgccctggaggcacaggcccagaccctggcccggcagatgcaggctctgggtgaccggatcggcggctgggaacaggcccgcaagacctgcgaggcccggcgggacctgatcgtcgagctgtcccatttccgggacttccacgacatcgactggcgccccctgtccacggagatggcggccctggaggcggagtatgcacagctcgcccgggagtcggacatgctgcgcaccctggagacccagttgcgtgaactggaacaggccatggaggacaacgacaaggccctgggcgaggcccagggggattgcagccagacacgactcaggcaggagcaggcccaggcccagcgggacgagtgtgccaccctgcttgatgccacccctcaagaggcccgggacgcctacttcccccgtctggagacgatgcgggacgaggccctgggcgagcataccctgagcgtggaatcctgcgacaaccgggagcgggagatgcgggaatggctgacccggcgcatcgacaacgccgacaggagcgccgccggtctgcgggaccgcatcatcgatgccatgcgtggctatcagaacgcctggcccctggacagccgggaggtggacgtgagcatcgaggcggtgggggaataccgggccatgctcgaagccctcaagtccgatgacctgccccgtttcgaggcccgtttccggcaattgctgcaggaaaatgccatcaacgaggtggcggcgttccagagccgactgcacgggcagcggcagaccatcaccgagcgcatcgaaagcatcaaccgctccctgcgggagatcgactacaaccccaaccgctacatcaccctgctggcggagaccgccgcggacccggaaatccgggaattccagcaaaacctgcgggcctgcaccgaaggggcggtgaccggctcccaggatgaacaatattccgaggccaagtttctgcaggtcaaggccatcatcgagcgtttccgtggccgggaaggcaccaccgacctggaccggcgctggacccgcaaggtcaccgacgtgcgcaactggtttgtgttttccgcctcggagcgctggcgggaagacgaccgggaacacgagcattacaccgactccggcggcaagtccggcggtcagaaggagaaactggcctacacggtgctggccgccagcctggcctaccagttcggtctggaatggggcgagacccgttcccgctcgttccgcttcgtggtcatcgacgaggccttcggtcggggctccgatgactcggcccgctacggcctggacctgttccggcgcctgcacctgcaactgctgatcgtcaccccgttgcagaagatccacatcatcgaacccttcgtggccagtgtgggctttgtccatagcgtggagggccgggaatccatggtgcgcaatctcaccattgagcaatatcaggccgagaaggcggcccggcaggcatga

SEQ ID NO: 42682 - DNA, 1257 bp, Ectothiorhodospira sp. PHS-1
ttgagcaatatcaggccgagaaggcggcccggcaggcatgagctggacccccccgccgaactgcgtgcccagctacaaaaacgctgggacagcggccagatactggccgccaccctgacgggcgaggcactctttcccctccccttgcgactgcgccgccccgggtcccgggagttggcggaggattttgcgggagtgagcgactgggtgagagccctccgtgctgatagcagggaacaacgggggcatgggtacgagatccgctgggaacgggtgaatcaccgcgtccacggcgccaatgacctgcccgccggcgtggtggtgcccagcgaggcggacgccctgcaatggctggggaagacccgggaggcgcaacgcttccatgccctggccgaggagaccctggcgcgcttcccggcactgcgggactggctgatccgacaccccctcacaccactggaacaggccggtgactggccccggatcctggcggtgctggcctggttccaggcgcaccccaggcccggtatctatctacggcagatggatctgccgggggtggataccaagtttgtggaaagtcgccgcaagctgctgtcggaactgctggatgccgtgctgcctcccgatgcagtggacacgcggcacagcggcggacggggctttgagctgcgttacgggctgatgcccaagccgcccctgatccgtttccggatgctggacccgggactgtacctgcacgggctgtcggacctgtcggttccgccgacgcagtttgccgccctggcgcccgccgtggcgcgggtattcatcaccgagaacgagatcaatggcctggcctttcccgacacccccggtagcctggtgatcttcggcctgggctatggtctggaaagactggcggacatcccctggctgacagaggtggagatccactactggggcgacatcgacacccatggctttgccatcctggaccggcttcgcgcccgcctgccccagacgcgttccctgctcatggatcgggcgacccttgaggcccaccgcgatctgtggggacaggagcatccgcagcagcgtttcaccggcaccctcacccgactgacaccgccggagcaatccctgttcgaggatctgcgggaaaatcggctgggagagtgcatccggctggaacaggaacgcatcggttacggggggctgctcaaagcgatcagcaggcccgccaaggtcaatgaccgaggtgacctgcccatctag

SEQ ID NO: 42683 - DNA, 1443 bp, Gordonia alkanivorans NBRC 16433
atggacttccacgcgttcaccggcttgtgggaacgacatcccgcatggcggctgctgcgtgctcaccattccccgctcatcctgacgttcctcgggaactacttcgtcgagggtaaccggggtgcgagttcggccaacgacctcgccgcggcgttggacgacctcctctacgacctgaacaccgcagccgcagcggaagacggacaggctcgattcccgaaggaacctcgtgcgtacctcgaggactgggccgcaacggaggcgggctttctccgtcgcttctacccgccgggggacgacgaagtccactacgaggtgacgccggccttcgagaaggcatactcctgggtcgtctccctccagggcagagccttcgtcggaaccgagtcgcggttgcacaccgtcgtcgaactgctccggcagatcgtgcacggcgtcgaatccgacccgggggtccgactcgcggagttgcggcggcgtcgtgccgagatcgacgccgagatcgacgccgtcgagtccggccacatcgcggttctcgaccagacaggggtccgagaccgttaccagcagctgtcgtcgaccgcgcgtgagctgctctccgatttccgcgaggtcgaggacaactttcgcctcctcgaccgcgccgcccgcgagaagatcgccgcctgggacggcccgaagggcgaactcctcgccgagttggtgggaagtcggtcggagatcgcctcgtccgaccaggggcgcagcttccagtcgttcttcgagttcctgctctccgactctcggcagaccgaactgtccgccctgctcgacaaggtgtcctcgctcgacttcgtggaagtcgaccaccgcatccgcggcatccaccacgactggtcggaggcagccgaccgcacccagcgcaccgtccgccagatctccgaacaacttcgccgcttcctcgacgaccaggtgtggctcgagaaccgccgagtcttcgacctcgtccgtgccgtggagagcaccgcgctcgagctccgcggcgacacactggatttcggtctcgacgtcgaccagcccgggatcgagatcgccttgcccttcgaacggccgctctaccagcagcccgcctcggcgaccgtcgagagccacatcgagcacgccaccgaggacctcgacgccgagctgctgttcacccaaaccttcgtcgaccaggcccgtctggctgccaacatccgcgcgatcctgcccgagcggtcgtccgcgctgctgtccgatgtggtcggcatgtacccgatcgagcagggcgcagccgagatcgtcggctatctcgcgctcgacgacgatgacgtcagcatcgacatcgacgcctccgacgagaccctgttggaataccccgatcccaacgatccggacaccatccggcgtgcccggcttccgagagtcacggtgaggcgacgatga

SEQ ID NO: 42684 - DNA, 588 bp, Gordonia alkanivorans NBRC 16433
atgaccgacgaacgcgccgtcgcgagcaccatcatccggctgatgcagggcgtggtctaccgcgaatccgacgcggatgcctgggccacgctcgagcgatccggggccggcgtacgcgaccatttcgccacgatcggagtcgacgtcgtcgtcgacgactccgagggctacgcctacctccgctcacggccggaacaagaagaacaggaaccacttccgcggctggtccgacgccgcgcactgacctacaacgtcagcctgctactggtactcctccgcaaacgcctgctggagttcgagatcaccggcggcgagggtcgactcgtcctgtcgaccgaccagatcgtcgagatgctgcgcctgttccaggccgagtcgaccaacgaggcacgcctcgtcgaccaggccgagagcaccatcaagaagactgtcgaactcggattcctgcgccaactgcggggccacaccgaccagtgggaggtccggcgcatcatcaaggcctacatcgacgcgcagacactgtcggatttcgcgggcaagctccgcgagtacgccggacggccggccgatgacggaggaagccgatga

SEQ ID NO: 42685 - DNA, 3399 bp, Gordonia alkanivorans NBRC 16433
atgaccgagggactcttctcatcggtcgaactcggcgggcccgcccagggggcgggattccgtctgcagtacgtcgaggtcctcaactggggcacgttcgatcgacaggtgtggcgactcacccctggcacggagacggcactgctcaccggagacatcggatcgggcaagtcgaccctggtcgacgcggtcaccaccctgcttatgcccgctcacaagatcgcctacaacaaggccgccggtgcggaggtcaaggaacgcacacttcgttcctacgtcgaaggccactacaagtccgaacgacaggaatcgacagggcgatcccgcgcgaaaggcctccggcagaaccgcaacacctactcggtcatcctcggtgtgttcggaaacggcggctacgacgagaccgtgaccctcgctcaagtgttccagcaacgcgacaccgtcgggcagccctaccggttctatgtgaccgcgaccaaacaactcaccatcgccaccgacttcgcggacttcggttccgacctccgcgacctgcgcaagcgactccggtccggcggtgccgaggtggtcgacgaattcccgaaatactccacctcgatgcgacggctgctcggcatacggtccgagcaagcgctcgaactgctccaccagacggtgtcgatgaagtcggtcggcaacctcaacgagttcgtgcgcggacacatgctcgaacccagcgacgcttccgagcgtgtccgcgacatcatcagccacttcgacgacctcaccaaggcgttcgacgccgtcaagcgagcccgcgagcagctcgaggcactcgatcccatcgtcgccaccagccgcaagtacgacgccgcactggccgaacgtgatgagctggacctgcagcgcgcggccgttcggctgttcatcgccgagcaccgttccggattgctcgccggcgagatcgtcacgtacaccgccgaaggtgaaagcctattacgccgccaggacgaagccaccgcacgccagcgcgacctggctcgcgaacgcgagtcgctcatcgaggagcgggcgcgggccggcggtgaccgcgtcggcgaactcgaacggctcaccgccgcggcgcgcgacgatctgcagaaacgccggcacggccgggcactgttcgacgccacaatcgccgatgccggattcgatccggtgacctccgccgagcagttcagcgctctgcgcggcctcatcgacgacgaacgttcccggctactggcgaccaaacgcgcattggacaccacgatcgccgacgccatcggacacgagaaagacgcggtccgacgggcggatgcgatccgcgacgaactcgacgacctccgcaaccgcaccagcaatctgccgcccgaccaggtacaactgcgcgatcagctcaccaccgacctcgggctcacccacaccgatcttccttatgccggcgaacttctcgatgtcgccgcggagcacggtgagtggcgcggcgcggccgagcgggttctgcgcggcttcgcgctctcgctgttggtgccgcagcaacactacgattcggtcgcggagtgggtcaacggccgacgattgacctttcgaggcgccggcggccggaacgtcggtgcgcgcctggtatatgagcgcgtgccggggcgacagattccgttacagcgccagccttccgacgttcccgtgctcgccgagtgcctggagatcaaggacgggcccttcgaggactacctgcgtgccgaggtgttcaaacgagccgaccaccggcgcacggagaacatcgccgagttccgagcggccacgcgcgccgtcacacgcgaaggccaggtgcgctccggtggtcgtcatgagaaggacgaccggcaccgcgtcgacgatccccggcgatgggtcctcggctgggccaacgaacgcaagatcgccgcgctgcgtgacgatctcgatgagttcgagcgtctgcagtcggccgccgccacggagatcaccacgatgtcggaacagcgagacgtcgtgcagaagcgcagcgaagcactcgcccggctagagggattccattcctggaccgaactcgacgtcgacgaggcccgtcatcgcgtcgaggcgcacgacgcagagcgggcccgtctcgaatcgggttcctcacggctgcaggagatcacggtggcgctggaacgcaatgccgagcacgccgaggccctcaacgcgacgatcaacgagctgaccggcaaactggcaaccactgcggcggcccgacaccaggccgagcaacttcgtgccgggaccgacgcgttcatcgcacagcacgccgaggccgacctcacgaccgcacgggcgtcgtatgacgctctggcacaacgcctcgacgtcatgccgaccacggcagatgactgccccgcggcggaatcgacactctcgtccgtgctgcatcagcggatcgaacgactcacccgtgagctcggtggtcacggccagaacctcgctcagtacatggccgaggtcctgcgacgatggcccgacctgcgcgccgacatggacgccgacgtcgggtcccgagcagacttcgtcgccttccgcgagcgcgtcgccaccgacgacctcccacgtttcgaggccgagttcaaggaccagctgaacaagaacgccatccaggagctcgccgggttcaacaactggctcaaccggcaggccgcgtcgatcgacgagcgcatcgcccggatcaacgaggcgctgggcgcggtgccgtacaacccgggccgctgtatccggctggagcgagaagccaccacgaatcaggaagtggtgcagttccgatccgatctgcggaacctgaccaacgacagccttgcggtcgacggtgaccagtactcggagcagcggttcctggacgtcaagcggatcatcgaacgattccgcggtcgggacgggcacgccgactcggacaagaactggacgcgccgggtcaccgatgtgcggaactggttcgtgttctccgcctctgagcgggacgtggagaccgacatcgagtgggagcactacagcgattccgacggcaagtccggcggtcagaaggagaagctcgcctacacgattctcgccgcctcgctggcatatcagttcggtttggaatggggcgtgcagaagtctcgtgattttcggttcgcggtgatcgacgaggcgttcgggcggggatcggacgtgtccactcgttacgcgctggacctgttcgccaagctcgggctgcagttgctgatcgtcacgccgctgcagaaggtgcatgtgatcgagccgtatgtgaaggcgatcggcttcgtggacaaccccaccggcacgttctcacggttgcagacgatgacgatcgaggagtaccggtcccgccgagacggacagttgcggtga

SEQ ID NO: 42686 - DNA, 1197 bp, Gordonia alkanivorans NBRC 16433
gtgagcggtcgctggacctcgcccgacgacatcgttgcccgggtccgacgccggtggatcgacggaaccctgttgcgcgcgtatgcaagtggcggcccgttcgatccaatcgaagtaccgctgcgcggccccaccgcgccgcagatcggtgatgacctcggtgcggcccgcgaatgggtgtccacgctcgatcgggggcggcgcgacgatcggcactacacgctgctctggcggtcgatcggtgggcggcaggtcgggcggaacgagcttccggtgcgagcagtcatcgactcgttcgagcaggcatggtcgctgctcggcgtggcgagcgacgtcgcacagttcgacgaggtgctgcgcctatccgccggcacgcccacagtgcgcgcctgggtactccgacatcctcaccgggccgtcgatctgagctcggagttcccgcggttgattgtggcctacgaatggctcgacgcacaacgcggatcgggccgctacctacgcgagatcaccgcccccggcgtcgacaccaagttcgccgaacgctaccggtcggtactggcgtcgatgctcggtgtgtcctcgaccgccgccggtttcctcgccgggctgggcttgcgcgcgaagcctgagttcgtgcggttgcggccgtcgtcgacgttggggttgcccgagcggctgaccgagatcagcgtccgggccgacgaactcgcgcaggtgacgttgagaccgcgacgtgtgctcgtcgtcgagaacgagatcacctatctcagtgtcgacgtccccgaggacggcatggtgttgtggggcaaggggttcgaagtggatcgcatcggccggctcccctggctcaccgatgttccggtctggtactggggcgacatcgacacgcacggctttgccattctcgaccgactacggacctggctcccccagaccgagtcgatcctgatggaccgcgaaaccctcttcgcgcaccgggatcggtgggtcaccgaggatcgtccggcgacgtctgcgctcacccggctcacacccgccgagcgagccctctacaccgacctcgtggaagactcactcggcacacgtgtgcgcctcgaacaggagcgagtcgcttgggaatgggttctcgcacggttctcgtcgacgtcgttgcggtgcgctgagcgtgccggacgagcctcgggccggttccgctga

SEQ ID NO: 42687 - DNA, 1521 bp, Gordonia alkanivorans NBRC 16433
atggagagttctgccttcccggctcagcgcgaggccgggcgacccgtcgtaccgtcggaatcggtgcaggtcacactgggtgacgccctggaggccaaccgcgcgctgcagaagtcggcggcggtcaagctgttcgccgcgaacaattcggctctctacgtcaccttgatggagcgtcacctcgactacggcaccaagatgtcggaggtcgagctgacgatgcggctcgaacgcgacctcgccgaactcgacctcaccgacgaccagcccaccggcctggagctggtcaagctgtgggcccgtcagggctggctgcaccgcgtcaccgacaccaccgaccccgacgcccccaacctctgccatctgaccagcgaggcccgctcggtcctggacttcatgcgccgtcagcgccgcgaggactccatcgccaccggtggctcgatcaccggtatcgccgccgaactccgacgcgtcgccggacaggtcagcaacgaccccgagaccatccgcctggagctcgaggcgcagatgtccgacctcgacgccgagctcgccgacctcgaagccggccgccgaccgccggtcgacctccgcgtcgccgaggactccgcccgcgcgatcggctaccagatggagcagatcatctccgacatcggccagtacggcacgatgctcgaccgcatcaccaccgcgctgctcgacgacccgggggactccgacctcgcctaccgcgaccgtcagcgccagctcttcgacgactacgaggcgctactgcagtcgtcgcagtcggcgtcgtaccaggcgttttcccagatgatccaggacccggagcgtcgcgcccgcctcaaggtcgacatcgacaccatcatcgagaacttccccggcatggacgccggtctgcggtcggtgatggacaacttcttcggtctggtcacccagcagatggccgaggtcggccgcacccgtcagcgttgcgcccgtcggattcgacgcttcgtcgcgtcgggcaccctcgagcagagccgcggtctggcacgtcagctcaacgacgccctggccaccgccaacgacctcctcaagacctccctcgcggaccgtcgcctcggctacgagctgccgctggccgccccgaccctcaactcgatcggccgcctcgccttcgagatccgcgaacacgtcccgcccgccccggctctgcccgccggtggcgccgacgccgatctggccgccttcgcctcgatgaccggccaggtcgacaccgtcgaactcaccgagaccgtgaacaacgccgtcgccgccggaccggtcgcgctcaccgacgtcatcgaaggactcgacgaggcgtacctcgcgcacgtcatcgtgctgtggtcctgggcccagaagcaggccgcagcaggggagaacgtgccgatgaccaccgtgcgtttccggtccctcctcggggaggaccacgccatcgaagtccccgacctgaccttcaccgaaccgattccgactgcggaggtcgacgccgaatga

SEQ ID NO: 42688 - DNA, 843 bp, Gordonia alkanivorans NBRC 16433
atgaccaattcttcgctccctgagacggaaccctcgctcgctgagaccgacccctcgctccctgaggtgcgagcgcagcgagccacgaagggccccgacctccccgacgaactcgccggattcgacgatctccccaccgtcgcgaaccgagccgcctcgcacgcacccagcgcaccccgcttcgacggcgacgtcagcgagatgcccgaccgcgcctgctgggcgctgcagaacctgctggcccgccgctacgtcagcggtgaccggcagccgcagctgtggtcgtgggtctccgagtaccaggacgtcctgcggatccggctgtccgaactcgacctccgtctgcgcctcgtcgacgaactgcaggtcgccttcgtcgagcaggcgggctacgactctcgttggggccgacgcattctcaagcgcgagaccgtccacacctacgacgccatcctggcgttgcacctcgccaagtacatccgcgccgcccgcgacgaggatgcactgatcacccgcgaggagatccacgaactcttcgccggcgtcaccaacaccatcgaccgcgacctcgcgctcttcgacaagcgcatcgagcgggccatcgacaagatggaagaactcgagttcctccgcaagcagcgcgacgacgccgacaccttcaccgtcagcccggtgatctccgcggtgatgacggcgtcggtgatcaccgacctgcagcgacagttcgagcagttcatcggttccggcgacacgggggaggagccaccggagggcgcggccgccgatgcgaccgacctcgatgccgaggacgcctacagcgacgacgaaggagacgactggtga

SEQ ID NO: 42689 - DNA, 3345 bp, Gordonia alkanivorans NBRC 16433
gtgagcgggcaggtcgaccagtaccacctgtcccggttgcagttgatcaactggggcgtgttcgacgggtatcactcgatcccgttcagctccaacggttctctgatcaccgggtcgtcgggttcgggtaagtcgtcgttgctcgacgccatctcgctggcgttcctgcccgaccatcggcgcaacttcaacgcctcgggcgacgccaccgccgccggctcgtcgagcggtaagcgcaccgtcggcaagtacgtgcgcggcgcgtggggtgagcggcgcgacggcaccaacgcgcaccgcgagatcatgtacctgcgcggcaccggcccggcgtgggcggccatcgcggtcacctacacctccacctcgggcaccgccatcaccggtctggtcctcaagtggctggccgcgggcaagatgaccgacgcgcacagctcgtacttcatctacgacggcgacgccgacatcgtcgacgcctgcaacgagtgggccgcggccaactacaactcggccaagttccgcgaccgcggctggcgcggcggacccggcgagggcaagtacctctcgacgttgtactcgctcatcgggatccgcggctccgacgccgcgcagcagctcctcggaaaggccaagtcgctcaagagcgtcggcggtctcgcgcagttcgtgcgggagttcatgctcgacgccccgacttccatcgtcggcatcaccgacgccctcgagcagatcgacccgctcgtcgaggcccgcgagctgctcgacgtcgcgcgccgcaagcgcaccatcctcggcaacatcgaagaggtccacgagcgctacgccgcagaatcggcgaccttcagcgtcctcgacaccatcgacagcaccaccatccgcagctacgtcaacaacttgcggatccgcaacgcgcagcccgaggtcgccgacctcgacgaccagatcacccgcatggacagtgatctcgccgcactgaccacccagcacgaccagctgcgccaggaccacagcctgctgctggcccgcatcgccacctccaccggcgacctcgccccgctgcgcgaacagctcggcggcgcacagaaactcagcaccgaggtcaccgcacgacgaaactcctacgaggacaaggtctccgcactcggcttttccccgccgaccaacgccgagggcttctggtcgctgcgcgaggagctcatcgaggaggccactaagatcgacggccagctcgaggccggccgcgcccactacgcggaggcgctggcccgcgaggtcgccgcccgcagccgccgcgacaccgcgcaggaagaactcggccgcgtcgaacaggccgggtccgcgctgccgcgcaccgaacacgagatgcgccgcgtcatcgcgcacgcgctgcagatcgacgagtccgagctgaagtacgtcgccgaactcgtcgaactcgatcccgacgaggaacgctggcgcctgtccgtcgagaaggtcttgcgcaacgccggtctgcgactcctcgtgccggacaagcacttccgttccgcgctgcgattcgtcaactcgcacgacatgcgcggccggatccagctgcaccaggccgagacccgcccgatgcccgacgtcgagccgggcaccctggcgtccaagctgcgtcccgtcgatcccggccacccgtgtgccgccgaggcgatgaccatcctcgcgcgcctgggcaaccacatgtgcgtcgacaacccgggcgagttctcgcagtacgccaaggccgtcaccgaccagggcctgcgcaaggactcggcgaagctcgccgtcaaggacgaccgccagcagctgcgccggtcgcaatacatcttcgtcggcgacgtcgaatccaagatcaccgcgctgcgcgacgaacttgcctacgaggaacgcgctttcgaggacgcccgcgaggactgcgccgaactcgaccgcgaacgttccgccaaggaacgacgccgcgacgcctaccgccgcgtgtgcgagcagttcacgcagtggaacgagatcgacgtcgactccgtcgatgatcgcgtcgaccagctcaccgaccagtacgacctcctcatggaggagcaccccgacgtcgaagccctgcagcgcaaggccgaagacctctgggagcaggtccgcaacgcgatctcgcaggccgcgctggtcaaggacaagatcgcccgccaggacgagcgccgcacccagctgctcgacctgatcgaccggctgaagcccgaagacgttcccgcgcaggcggaaaagaccctcgacggcttccgcgaagatctctcggcgaccctcgacgtgctcaaccccgagccgtaccgccaggagatcgtcaaggccgccggccgcgagcgcgaccgcatgcgctccgacgcccgacgctcccgtgatgagctggcccggatcctcgacacctacgacgaggaattccccgacgccatccccaacgacagcgacgacttcgacgagcgcatccacgactacgtcgccgtctgccgccgcatcgacgaacgggaactgccgtccgcctacgagcggatgcgccgcctgatcaccgagcaggcgccgggcgcgatccttggcctgcacatggctgccgacgccgaggaacgacggatcgtcgagcagatcgagcgcgtcaacactggtctcggcgcggtggcgttcaaccgcggcacccgcctgcgactggtcccaggccgcaagaagctcgccgcggtcgaggaactgaccgagaaggcccgccagatctccacccgcgcaacggcggtcagcttcggcgacgaacaggccatcctcgagcagtactccgacatcctgttgctgcgcgaacgtctcgccggcaacaccccggaggaccgccagtggacgcgtgacgctctcgacgtgcgcaaccgcttcgacttctactgcgaggagcacgacgccgagagcggcgagaccatccgcacctactccaacgccggtgacaactccggtggcgagcaggaaaagctgatggccttctgtctcgccggtgcgctgagcttcaacctggccagcccgcacggcaacgacaaccgaccgatcttcgcgcagctgatgctcgacgaggcgttctccaagtccgacccgcagttcgcccagcaggcgctgagtgcgttccgcaagttcgggttccagctgatcatcgtggcgacggtgcagaacacgagcacgatccagccgtacgtggacaacgtggtgatggtgtcgaaggttgaggcaggatcggatctgcggccgatcgcgaccgcgacgtcgacgacgatcaaggcgttctcggagttgcggcggtcggggagtcagttgtcggtgtag

SEQ ID NO: 42690 - DNA, 1425 bp, Erysipelotrichaceae bacterium 2_2_44A
atgtccttatttgagaaaatggatccatccttctttaccatactggtatcgaagaaccgggatatttatgtggatctgcttctgcagattcatgactgcatttatcgcaatcagaccatgagcatggagcgtgccctgcttcaggatttactggaagattatgtgcaggataaaaaatatgaaatcgactttcaggaggaagcggaatacagcgatatcgagaatgagctgcgcagtgagaaggatgtttatgaccgggatatccagtttctgttacggctgtttgagaagcatacctggatcaatgtcgatctgcatatggatacgatgaaaaaaatggtgtctctgccctatcacagccgggtgttcatctcctttgtgaatgatattatcaaggagcgggaacagatcggctatctgattcgcatccatgcctccctaaaggatatggatgatcccgtgaaaatagaagacagctatcagcatatccgcaatgcctatgccgatttcaaggagctgattctgacactggaacagaccaatgccagaatacgggattattatgcgattcaggtgaaaaaggcatcgacgaaaatctatcatgatttctttgatgtttattatggtgatattgtggagggctatgtttttccaactcttgtggaggacagcttaaaacggtttaaaaacccggtcgcaggtattttggaaacccttctgcaggaggaagcagtcaaggagaaaattgtagacagtgcggtaagtcactatcgtgttgccagccgtgatacggcaaaaaagcatatcgaggaaatgctgtatgccatgtacaatgatttgaatatcgtggaaacgctgactgcccagctggtggacagcgacgcgggttaccgcagactggcaaagcagaaaattatgtatctgtgcaacagtgatcaggggttaaagggaaagctggtggaactgatccatcatatgaaggaagagccgcagagagtgtgtgagcagatcagtgaatccatcaatatccagcagacccgctacatggagcgtgatgaggtgtacacctttgaacgacgcaggcgtagggatgagcgggaagtgatgaccttcacctttgaagagagcacccagaatcaggaggagcttgaaaagcgcattggctttgaccgctatgcccgctttacccgtgaaagcatatcggcttactatgcagagaagctgcatggggaagcggtaggaaagctgaaggatatcggggtaaaggatatggatgactatatccgctccattctggtgtatgtatatggaagagaccgcaaaatggatgtgcaggcaaccctgattccgaatcagacggaagggattacagaaggggatttccattaccccaatctgttgattaaaaggaaggtaacaaaatga

SEQ ID NO: 42691 - DNA, 669 bp, Erysipelotrichaceae bacterium 2_2_44A
atgaaggtagaacaactggatctgaaggaccgcgaggaattcggacggatcgtcaatatattactggcagaaaactgcatttaccagtatgcgaaaatcaggcagtttgagaaaaaggaacgaaatgcagactatgtgtttatccatgatcactgggactgcttcgaggaatatctccgctatgcgggatggctgctgtgcagggagcgttcatcttatatggggatgatttatctggtcaatgagcgggaggactgcagctgccgctatcgtctgacaaagctggaaacgcagcttctgctgattctgcgtaattattatgaggagaaaatgctggagctggatgcatctctcaccatacgtatttctgtcaatgagctgctgcagctgctggttgatgtgcatgcgatggtaagcgtaaggccttcgatgcaatacatccatgcggcattacagtccctgcaaagactgaatattcttcagaaatacacacagggggatgaggagctgatctgggtactgccttatatcacctgtgttctcacaccgaagcgggtggaggaaattctgaggaagctgcgtaatgaggaaggagaggaagacgatgaagctgaagaaaatgctgctggtcaactggctgtattacgagaagacgatcctgagctttga

SEQ ID NO: 42692 - DNA, 3282 bp, Erysipelotrichaceae bacterium 2_2_44A
atgctgctggtcaactggctgtattacgagaagacgatcctgagctttgaggatatcgtctttctgagcggtaaaaccggtgaggggaagtcagcgctgattgatgccatgcagctggtcattctcggtcgaaccgacaattccattttcaataaatccgcaaatgataaaacaacccgtgatctgatgggatatctgaagggcaaatacaaggatggtacctttaagcgtgataaagggatgttcagctcacatctgtgtatggaatttgaggatgaacagcataggatttactgctttggtatcgtatttgacgtaaacgggcctacgcggggggacatggagcattgctactatatgatgaatcagccgattcccgagcattgctttacggatgagggaacggtattcaatatccgtcgtatgaagaagctgctggccagctttcaggatcgcagctgccgttcctttaccacacatatggattacaaaaactatttccgtcagcgcatgctgatcaaggaccagcggtttttcgatgtctttaaaatggcagttgcttacacaccgatgatgaatatttctgaattcatcgtaaaaaatatctgtcaggaggaagaagaccttaatctcgaagagatgcaggaggaaattcaggattaccggcagatgaaggaacagctggaaacggtacagcagaaaaaggcccagctttccctgatccatgaacagtatacggatatatgcggggaactggagcgtgttgcgaacttgcgtgtggagcaaaaggcagctgtatatcacggtatgctggtggaacatgatgaggcagccgcacaatatgaggtatatacaaggaactatcagaagctgacaaaggaatcaagggaaaccgaggagcagcgggcactgctggaacagaacatggaagccttacgggatgcacgcagggataatgcggcagatattctggaacgaaagatacaggcgcatctggagcagagaaacaccctgcaaagagatacgaccgccgttcagcagcagctggttacgaagggagaatttctgaaggaacagatagagcagctggaggaaatcgaggattatgacggcttgcagctggaggacttcgatttgtccgcaatcaagctgtctatacaaaggtccgtgcatgcggcacagcggctggctgcgtttgatctggatgcctatatggatattcagcgacagatgagagacatcgagaataccctgtccactgtgcgccaaaccatgcaaaacagcctgcagacatgcagggaggaacaggaggtgcttgcggcaaatcgccgtgcgctggaagccgggaaaaagacatatccgaaaaagctgctcgttttaaagcaggagctggaggaacggctttatcagcaggtgggaaaaccggtagaggtatgcatactcgcagacctgttcagtattcaggaggaggcgtggacaaatgcgatcgaaggctacatccataaccagaagctgaatctggtggttgaggcagaatatttcatggatgcctatcgcatttaccgctccattaaggaagaaaaaaagattcatacctattccattgtggatatcgcaaaggcaaagccggggaaacgtcccgatgcaaaaacactgtatgactgcgtgcaggtggaacgcgaggatgtgcgcccctatgtggaatatctgctgggcagagtcgtgtgctgtgaagcggaggagacactgcgaagctatccggtaagcatcaccagcgactgtatgctgtacagcggctatgcagtgtcgcatatgaatccggaattgtataaggtaccctttatcggtgccgattccatagaaaagcagctgcaggagctgattatccgccagcaaaagctcacctccacctgccgcaagctggaaacagtcacaaggacattgcaggcggtacagctgcaaaccgttatcagtgatgactttatccgtcagctggaggatggactgtgcaaggccaaagaggtggagcagctggaacaaaagatcaaagagctgcgtgccgctcagacaccggaatccctgcaggaacttctgctgctggatcaaaaactggatgaggcaaagaaaaagaaaaacgaactgtatatgctgcaggtggaacaggaaagccggcgccgtcagctggaagaggatatgaagctttgcaatgcacgtatacaggagcttcagcagcaggttaaggaagcgaaaaagcccgagcaaggcataccggacacaatcggggcaatcaccacggcagacggtatccgcaggaaacagaaacagctggaggaagcactgcgggagctgaacagccgtgttgaaatttccaagcaggagctgataacgaaaaaaactcattacaatgataccttccgcattgccctcaacccgaattttttatgcgatgattatgagcgggaatatgaaaagcattcggataatattgttgaggactatatcgataaatgccgcctcgcacagcagaaggcatatgagtgcttccagaataatttctttagtgcgctcaatagtaaaattgaaaatgtgcgaatgcagattgaccggttgaaccgctctatccgcaggcataaattcggtcgctccagctatgaatttgtgtgtacctgcaatgaggattaccgtgagtattacaatctgatcaccaacaaggaattaaacggtcacaatctgttgaacacgaaggtgtatgaggaaaatgaggagctgattcatgagctgtttaataaaatttcttccttatcctccatgcaggaccccaaaaagtatcaggagctgcaaaaagaggttcagctgctttcccgcttcaccacctatctgaaatttgatattctggaaaacggaaactcgctgcgtgccacgatcggctccagctccggtggagaaacacagacaccgttttatgtcgctgtactggtatcgctgttcagcgtatatgatgcaggaaacgacggtctgcagctggcaatctttgatgaggccttcgataaaatggataatgagcgaatcgaggaatgcatttacctgttgaaatcactcggctttcaggcaattatcgtaacaccgacggataagatatccaatctgagcaaggttgcggatgcgacgctgattgcgacaacggatgagaaaaacggccagcgggtttccaccgttcagagatggagtcagaaagaaaacatagccattcccgactcggaaatgaaacaggaagaagtataa

SEQ ID NO: 42693 - DNA, 1464 bp, Dorea formicigenerans 4_6_53AFAA
atgaatctgatcagtcggattccgaaggatttttacaaggtattcggaagtaaatatatggaattctatatgcagtttcttgtggcggtttacgaggagagcagccagtcgtattcgcttttggggttgactgagggcgagtgtcaggcgattatgaatgagcagcttgcccgtatgacgttagactggagtgaggagcgctttgatgaggaaggagagcttttgacgcggtcgaacatggcgatgataagtttacggcattttgaagactggggatggcttagacgtgactatgacgaaacactaaacagctatgtagtatctttcccggagtatagtcagttgtatgtggagttgttccgtaatctttatagtgatgaggacagcaaggggcgcgagagtgtgctggcagtgtacagtcacctttatacatatagttcggatcgggagaagaataatgatatcctgaaaagtgcactgcatacgtcaagatccctgcttcagatgttggcaaatatgcaggaagggatgcgcggatattttgatgaattatcgagccagcgaagttttttaggaatccaggaagttcttgtaaaggaaatcaacaatagtgacagccaaaaatatgcgattttgacgacaaccgacagcttttatcgttacaaggaagcggtcaaagagctgatagagaagaatcttggggaaaatgagacaaggcgcgaaggttttgtggaaaagctcatggatattcaagttcagctggcgcgagaggagcaggagaagtctgaagaacgaaatgtgcagaataagctgagcattcagcgttaccgtctggagcgggcagtgaagctctgtgacgaagcgaatgaaatgttgtaccgcatttccagagagtttgatgccattgagcgaagatacaatatgctgattgagcagaagactgtatttgcaagccgggctgctgcgagaatccggtacattttgatggaaggcgcggtcgaggaagatcagacaattgcctttgtaaatcttttgactcagagtgaaaaacgtgatgaaattttggacaagctgtcgcagaaaatgaagctgaccgaaccataccgtgtgatgaatgaaaagagtctgtatcagagacgggaccggaaaaaagaagcatttgtaccgcaggcggtgacagaggtaacagaacaggcagattcggaagaaatgaatgagtatgttctgaagccgctttacacgcagaaggaaatccgagagttccggaaacaaaacgagcaggatggaaactttattgtgacgaaagacacagtaaaatccatggaagatctggaaaagctgtttcttgtttggcaggatgctacggaagttgcggaaggaacggaagagattgaggtcggagaagagcttgagaacgagattggtctgagattctctaagcttgtgattaaaaaatctcagtaa

SEQ ID NO: 42694 - DNA, 645 bp, Dorea formicigenerans 4_6_53AFAA
atggtaaattatatggaacaattgtctgtgacggagacggagaatctgaagaaaaccatttccgcgctgtttcggcagacatgcattttacaagtaaaatacgatccggtcacgctgacgccgagggataaccttcactatgaaatctgtgtgagacaccggaaatttatagaagactatctgtccgtacttgggtgcgaactggtacacgacccgcaggaacacattttcaggctgaccggagaaggcgtggctgtggaacgtttgaatgtgacggctacgaagatcattcttcttattaaaataatctatcgggataagattctcggggaaggtctgaatgcgactgtgacgaatctggcggagatccgtgagtatggaaagaacacgaatctgatcaatgagaagctgactatggcagagtggaaagatgcgctgtatgttatgagcaagcatcagatcatcgaggtgccgggcgcgatccagaacgtagaagatcagacaaagatttacatttacagcacaattaatctgtattgcagtggtgtagatattcaggcattgataaaagaatatgttgatgaggaaggcggtgcagaagttgaagcaggcgaagaagatatttacaagaatgctgatgaataa

SEQ ID NO: 42695 - DNA, 3372 bp, Dorea formicigenerans 4_6_53AFAA
gtgcagaagttgaagcaggcgaagaagatatttacaagaatgctgatgaataattggggcggtgtcagccacaagatcatggagttccatgagtatgtgaatctgttcagtggtaagagtggctctggaaaatcaacagttatggatgccattcaagtcgttctgtacggaagtatttccgctacatttctaaataaggcggcggacgacgcgaagaaccgccgaagtgtgctcagttacctgcgaggtgcgcagaaagacggatcttacaatcgtgatggacaggacttctgctctcagatcgtactggagatatttgacaccggaacgaaggtgagcacttgtatcggtgttgcattcgaagttggaaaaaatgatactgatatccgaaagtatacatttttcagccactccgggaaaattccggaggatgaatatctgacggagaaaggtgtgccatatacaattgcaggactcagaaagcttgtggaaaagcgggtggattcttcggacaatcgtggacgaggtgatgtgaatcgcctttatccgtcaaaagaggcatatctgaaaacggtttatgatgtgatttttggatatgtggagccggggcgcatgatgaccatggaaaagagtgcgattgcccttcgcatgacaaatggaacgggtcagtttatccgtgattatatgttcccgaagagtaaggaggacacggtttcgaccatcagtgaccagcttggtgcgtaccgtgagatcaaagagcgtgtggaagacctggagaatcggatccatcttctggatgagatcagccggcagaatctggcacttcagacgacgcgtgcggataagatccatgtagaacaggtgttaaaatatattgatattgaaagcttcaagacgaagattgaggcgagaagtcaggatcttatggatatcaatgagaagattcgtgccagagaaaaacagcagaatgagaataatgagaaaaagacacagcttacgaacgcacttgttgaggtagaagcggaactaaaatccagtgattatggtcagaaggagaaggagctgaagagtcttaaggagaccatcaagcttctggcccgcaacagtgagcagtggcgagaggttgtaaaaggacttgcccgctgggaggaagatgaagagatcagtgcctatgtgagcaatccggcacttcagagaattgatgagatcaagtcgggaaatgtttcaaaggaagcaattgagaagctaaagaaacaactaagtgacgcgctggagagcattaatgaagaagttgatgaaatcggtacaagaatcagtcagaaccgcaaggatttgaaagagaaaaaggaaatggtggaggatctgaaaaacgaccgcaaaccgtaccgaaaagagttgaaacaggcaaggcaggagttacagaaccgtctgagcacacaatatggaagaaccattcacgtcaacattttcgcagacctttttgacattacagatgagaagtggaaaaatgcgattgaaggtcgtatggggcgtgtgaaacacagtcttgtgaccgcaccggagtacgcccttgatgcagcgaaagtatttcgtaagcttcaatatcttggtgggattgatgaagtagatctgttagatacggccgcaattgtgaagtccgagccaaaagttcatgacaattcaatctatgaggctgttcatgcagaagaaccatacgtggaccagtgcctgcgccgttatctcggaagaattgccaaatgcgagacagaggaagaactccgtgcctccggaaatggtgtgacagccgactgctattcctataataattacattttccgtcatctgaagaaaaatgattacgaaaaatatgcctgcattggaacgaaggtttctaaggcaaagcttcatgaaatggaagatgaggttctgaagctgagtgaagaagtattgcaagatcagcagatgcagcaaagcctgaaagcagcccagggatttgagcggctgaaccaaagcacagatcagatcctgcatctggccggggcgggagaagaactgcaggcattttacgagaaacaggatcagttggagaaggaactgcgagagcttcgcgaaggaagcagaactgcggaactcaatcagcagaagacagaattagaagtaaaaatccaggaaattgagaagatatctgaacagcttcagaaagaaatactgggctatgccaagacacagggacaggcagagcaggatatcgtgaatttccagaatcgtatggatttcctgatgcagggatttgtactgaatgaagaactgcagactgaagtccaggaagcattaaagatacaatctgagcagacataccgacgtaagaaaagtaaagaatctgaagagctgatgaagcaggaagaggaagtacgtgatcttctgacccgtgcgagaaatcagttcaatcaggcatatccatcctatggcctgacaggtgtagaacacgaaaatgtttcttatgacaggattttgaatcaatgcagacaggactttgagccgaagtataaagatgaatttcagaaacagtatgatctgatctaccatacgcttcgtgaaaatgtaatcgcgacgatccacggtgaaatcaaagcggcataccgtcacaggaaagaaatcaatcgtatgctggcaaagattaaattctctgacagtatttaccagattgatattcttccggcagaaaatgaaaatggacagttctatgagatgctgatggcaccggaattggacagcaaagtgctggacgatgatggcttcgacggacagatcacgcttggcgaagacacattttatcagaagtacgagcaacagatcctgcgcctgacagagaaattcatgcctccgaaagacgaagatgccaagtccttaagccagcatcgtcagcagatggagcagtacgtggattaccggaattatctgaccttcagtatgtatgaacgagtagaagatgaagatggaaatgtgaaaaaaaatgcggtcgatgacatggcagggcgtgattccggaggagaaggacaaaatccgaaatatgtagcacttctggctggatttgcaatgctttatatgcagcagacaaaccgcgattccaagataagactggtacttttggatgaagcattttccaaaatggacaaagaacgaagcgaagtctgcctgcactacgcaagagaactggaattacagttgattgtgtgcgtaccggacgagcggctgcagtccttgatccgaaatgtggacagtgtgtacggatttagaagatatcagaatcaggtaagtatgatgcatatcgataaaggagaatatctggatatgattgaggggaagatttga

SEQ ID NO: 42696 - DNA, 1470 bp, Xanthomonas axonopodis pv. citrumelo F1
atgaagcaccaggcacttatcgccggttatcggcaactgcgcgagcagccggtatggaaactgctcgccgccgaccacgcacccgaactgatcggcctgctgcagacggtgctgatggatggcgaacgccgcctgccttcggccgtgttgcacgaacgtttgcagcgccagctcgacgccttgcgcgccgacgagctctcgcgcgaactgccgcgcaccgcacaggcatatctggcgcattggttggcacagggctggctggaacgccgcctgcctgaaggcgcagccgaagaagaatacgaactctcgcgtgccgcgacccaggccatccgcttcatcgccggcctgcgcgaaagcagcagcagcgccaccgaaagccgcctgtcgctggtgatccagcaactggtgcagctggccggacagaccgaggccgatccagagctccggctggccgcgctgcgcgatgaacgtgcgcgcatcgatgccgaaatcgaacgcgtggcctccggccgcgtggcggcgctggacggcaaacgcgcgctggaacgcgcgcgcgacctgatccatctctccgacgagctggccgaggatttccaccgcgtgcgcgacgacttcgagcagctcaaccgccaattccgcgagcgcatcatcgacgacgaaggcgcgcgcggcgacgtgctcgaacaattgttcaacggcgtggatgtgattgcagacagcgaagccgggcgcaccttcgaggcgttctggagtctgctcaacgacacccagcaaagcagccagctcgaccaggcgctggatgcgctgcttgcccgtgggtttgcccgcaagctcgatcgccgcgaacgcgccttcttgcgcgggctgaccggcacgctgctggagcgcggcggcgaggtgcacacggtgatgcagcatttcgcacgcagcctgcgcgggttcgtgcaaagccgtgggtatctggaacagcgccggctcaatcaattgctcaagcaggcccagggcgaagccttgcaattgcgcgacagcctgcacgccaccaccgccaccggctatacgcaggcactcagcagcagccgcctgcgctcgctgtcgcaatggcggctgcacgatccacggctcacccaggtcgatggacgcgtgcaggccgccgacgcggccgagatctcgctggacagcgtgggcgatctggtcgcgcaatcggagatcgatgtacgcagcctgcgcaacgacctgcatgagctgctcggccaacgcccgcggctgaccatcggcgacgccttgcaacaacgcccggccgtgcagggcctgggcagcgtgatcggatacctgtcgctgggcacgcgccacggcatggtgatcgaaggacagatggaaacggtgcaatgggaaggcagcgacggcgccgtgcggcgcgcgcgcattcccttggtgtggtttacccgggagaaacgcaatgaactggtctga

SEQ ID NO: 42697 - DNA, 702 bp, Xanthomonas axonopodis pv. citrumelo F1
atgaactggtctgaggacgccggcccggacgccgacgagagcaccgcggtgtcggccatcgacgaccgcatgccgatgacgcaagcctccagtgccgagccgcgcggcgagctgtttttaggcgacaccggcacgctgccgttcgacgcgcggcgtgcgctgtgccagttgctggcagggcccagcatcgatgcgcaacggcacggtgcgctgtggccggcgttgttgcgcaacgaggtggcgatccgccaggtgctgtgcgagctgtttctggagctggtgctcgaccgcgagggcggggtggccttcacccgccaggccgacaccgccgagctcgaatcgcccaccttgctgcgcagcgcgccgctgacgttcatcgagtcggtgttgctgctgttcctgcgccagcaactggccgaggccgatacgcgcggcgagcgtgcggtggtggacgaagcgcagttggtggaggcgttgtcggtctacgagaagaacgtgtccaccgatcgggcgggcttcgcgcggcgggtgatgacggccatcggcaagatgcgcgacaaccagttgctgtcgcgcttgcgcggcagcgaggagcgctatgaagtctcgccggtgctgaagctgttgttctcggcggaggatgtgcaggccttggtggtcgcgtatcgcggtttgcgggaaggggatgtagctgctgagtaa

SEQ ID NO: 42698 - DNA, 4029 bp, Xanthomonas axonopodis pv. citrumelo F1
atgaattcccagtccaatctgtcgccagcgcaaccaggtgcctccctgtttgccgagacgctcgccgagcaacgtgcgcagcagttccgcatgcggcgcttgcaggtgcacaactggggcaccttcaacgggctgaccgaagtgccgatcgcggagaagggcttcctgttcgtcgggcgttcgggctcgggcaagtccaccttgctggatgcgatgtcggcactgctgacgccgccgagcatcgtcgacttcaacgccgccgcgcgcgaagccgagcgcagtgggcgcgatcggagtctggtgtcgtatgtgcgcggcgcgtgggccgatcagcaggacagcgcgtccggcgaaatcgctacccaatacctgcgcaagggcgccacctggagcgcgctggtgctggaatacgcaaatgcgcacggcgaggcggtgagcctgatccgcttgttctggattgccggcagcggtaacgcggcggccgatgtgcggcgtcactacatggtcgcgccacgccgtttcgacgtggcgaccgagctggatggcttcgatcttgacctgcgcaagctcaaggcgcgattgggtgaggacgttgcgcatttcgacggcttcgccggctacgccgaacgtttccggcacgcgctgggcatcggcaacgagatggcgctgcggctgttgcacaagacccagtcggccaagaacctgggcgatctcaatgcgtttctgcgcggcttcatgctggacgagccgcgtaccttcgaagcggccgaccggctggtggaagattttgccgaactcgatggcgcgcaccatgcggtggtcaccgcccggcgccaggtggaaaccctgacccctgcgcgcgagcaccacgcggcgctgatggcgctgcgccacagcgtcggcgagttgcgcgagctgcagctgggcgtggacagctaccgcgagcagcagcggctggccttgctggaggagcggctgcaggagctcgacaaccaggaccgtggactggccggcgaagaaggccagcgccgcgaatcgctggataaccacgaacaaaaactggtcggcctggagcgcgaacagcgcgccgccggtggcgagcagatcgaggaactggaacgcgaacgcgcacgcgtcgagcgcgagcgcgacgaacgcctacgccgccgtgcacagatcgaacaggcctgccgccagctcggcaccgccctggcggccggcgccagtggctttgccgcacagatcgcgcatgcgcagaccgtgctggataacggcaagcatgacgccagcgcgctggatgaggccatcgccgaacgcatgggcgcgcggcgcgacgacgagcgccggtttgccgaaatccgtgccgaactggaggcgctgaagcgcgcgccatcgagcatgcccgcaccgatgcaggccctgcgcgcgcgcttgtgcgaagacaccggcattgccgaggccgcgctgccgttcgttggcgagctggtgcaggtgcgcgaggaccagacggcctggcgcggtgcgatcgagcgtgtgctgcacggctttgcgcaatcgctgctggtggacgagcggcattacgcgcaggtcagcgaatgggtcaaccgcacccacatcggcacgcgcctggtgtacttccgtgtgcgccgcaacgacgagctgcattcgcggcgggtcgatcccggcgcgctgcccggcaagctgcagctgcgcgagcacgcctttaccgaatggctgcgcaacgaactgacccgtcgcttcgactacgcgtgcgtggacaatgccgcagcattgcgcaacgccgaccgcgcgatcacccgcgagggccaggtcaagcatcctggcgatcgctatgagaaggacgaccgccacgcagtcaacgatcgcaagcgttggctgctcggtcacgacaaccgcgacaagctcaaggtgttcgagcgcgaagcgcaggcgctggcccagcgcatcgccagctgcgatgccgatgtggcagcgctgcgcaagcagcgtgagcaggaccaggaacgccaactcgctgcgcacaccttggtggagcgcgactgggacgagatcgacgtcggccccaagctgcagcgcctgagcgatatcgacgaacaattggtgcagctgcgcgaaggcaacagcggcctgcgcgtgctcggccaggccatcgagaccgcacggaccctgcgcgaccaggccaagcgcacctatgaagatgtgcggctggagcgcgcgcaactggcgcgcgaacgcgtgcggctcgaacagcagcatgcggcctgcgcgggccgcgccggttccgccacgctcacgcccacccagttgcagggcttgcgggaacggcttgccgcattgacgccgctgtcgctggacaatctggaagcgcatttccgcgtggtcgaacgtggcctggccgagcagctggccgacagccagggccgcgacagccggctcagcgcgcagttgctggaatgcttccgcaagtattgccagcagtggcccgaaggcagcggcgatttcaccgtgagccttgccagcgccgacgatttcctcgcgcgtctggaccggctggaaagcgatggcctgccgcgtcacgagcatcgtttcttcgacctgttgcagactcagagcaagaacaacctgctggccttgcagcgttacaccgccgaagcccacaaaggcatcaagcagcgcatggacgaggtcaacgccagcctggagcaggtgccgttcaatcgcgacaccgtgctgaccatcgaggtcggcgaccgtcgcctggccgaggtgcaggaattccagcagcagttgcgcgcggtgctgtcgcatcaacagaccgaagaccgcgccctggccgaagcgcagttttccaccttgcgtgcgctggtggcgcgcctgggcgcgcaggaaccggaggcacgccgctggcgcgaacaggtgctggatgtgcgcctgcatgtggagttcatcggtgtggaactggacgcgcagacgcgcgcgcaggtggagatctaccgcagcggcgccggcaagtccggcggtcagcgccagaaactggcaaccacctgcctggcggccgcgctgcgctaccagcttggcggcgaagacggcgaactgccgcgctactgcgcggtggtgctggacgaagccttcgacaaggccgacaacgaattcaccgcgctggcgatgaacatcttcgagaacttcggcttccagatggtggtggccacgccgttgaagtcggtgatgaccttggagcccttcatcggcggcgcatgttttgtcgaaatcagcggccgccataactccggcgtgttgctgatcgaatacgacgagcaggcacagcgattgaagctgccggagcgctcgcgtggcgatgagccggcggctgccgatgctgctgacgcagcgccgtcgatcacggcgttgagcgagcctgcagtcgtgcagggcgctgccagcgcagatggcatggcagccgacggcgtgccgctgcacacggcatcgcctgcggcggaggagacctcgtccgcggcgccggaaacgcagactggtcagcgcaagccggccgtcgcgaccgcgaacaagcagaacaagaccgccaagaacgccaggactgcatcttccacgcgtgctgcggcacagcctcgcgcaacgcagaccaagaaaccgactttgcgtacgccagctgtggccaacacgccggcatccggcaaacgcacggcgggcgcgtcggcggtgtcttcaggagccaggtccaacgtgggcaagaccactccgtcttcaaacacgccgggcaagccgattgcggccgcaaatgcatccaacgccacatccagcaaggtcgccgccgcatctgcgccagtgaaaaacactgctgcagccaagccacgtgcaacagccgcatcgactggtcagccagcgcgtggcgccggcaagacatcttcatcacgtgcggcagcgaaaccgtcgcgggccaaaaagcgcgccgctaaggcgaacgccccgcaggcgcgcggcaagcgctga

SEQ ID NO: 42699 - DNA, 1461 bp, Neisseria shayeganii 871
atgagcttccacgcgcagcaagccaagtttaagcgcctgtttcaggaaagcgccgcttggcgtctgctgcgtgccgacaatgcgccctatatcctggcctttgtagccgaattgtttgccgagagcagcgaagtgccgtacagccgggcgcgggtattgctggacagcgaaatcgagcgcagccgcgatttgggcgtgtggcagaccgaaacggcggcgctgagttatttgaatctgtggattaaaaacggctggctgcgcgagatggacggtttgctgagcaagaccgacgccatggaaaccgccctgcgttttgcccacggcttggacgagcgcagcaccggcgccaccgcctcacatttgcgtattgtgcaggatgcggtgcgcgattttgccgtttccgtgagccgcgaccagcccgcacgcctggccatgctgcaacaaaagcaggcggaaacccaggccgaaatcgaccgggttaaggctgggctgtgggatgccctggatgaaaaccagcagcgcgagcgcatccgcgaaatccaccagctgtccatgcagctcaccggcgacttccgttattttgaagacgaaatccgccgtctcgacaaaaccctgcgtgtgcagatgatgggtcatgaggccacgcgcggcgaagttttgcagcagctgatggcgcaggaagacctgctggcgcaaaccgaggcgggcagcgcgtttaacggctttttcgagcttttgggcgatgtcaaccgtgccaccgagtttcgcgcgcaattgcgcaccgtgctggagagcggcgcggtgcaatatttgtcgcacaagcagcagcatgatttgcagcgcctggtgcccacgctggtcaccgagagcgagcgtgtgttccgtatccgccgccgtaccgagcaggaattgcgcagctatatcgaaagcggtgcggcgcaggaagagggggtcatccgccagctcatcggccgcctggagcaaagcgccatgcagttgttggaagatggggtggatttgaatacggccaccggcctgtccttgcctaccggcgcactgtattttgcttcccccgagcgcttgcgcctgaggcatccggacgatgattttcaggcagcggatacccaagagcacgccaacagccgtcaggcaggcagtgcggttttggccagtttggaaaccgtacgcacgaagcaattggcgcacgagatgcggcacatcctgcaacagcacggtcctctgaccttggcgggcattgcggaatatgcgcctttgcgcatgggggtggaagagctggtggcccgtttccgcgttgcccgtgccgtgggcgcggccgaactgcccgatcgggaaagcctgtgggtgcgggaccgccacggccaactcatccgtgcccgtctgcccgtcttattgctcaacgccaagctgtttcccgacaatatcgacacactgtccctatag

SEQ ID NO: 42700 - DNA, 690 bp, Neisseria shayeganii 871
atggatgccgatttccactctgctcacccaagcgcaccggccgaagctgtcctggcagacaacctgccgccgtccgccctgagcgacgaagcgcggcgggctttggtgtatctgttgcgtcacggagtgattctggcctcggaaaaagcgcgcctgtttgacaccgtgtgccgctatcaggcgcccatacgcgcgcatttggccgatgtgtttttgcgtttggtcctagacgatcgccaaggcgtggtctttgtagccgctgccgaggcggaggcgggcgatggggaagaaggggcggatgaaggcggcgcggtgtcgctgattaaccgccgcacgctcaccctgtacgacaccttgttgctgttggtgttgcgcaagcattatcaggaacgcgaaaacgcaggcgagcagaaaatcatcatcgatttggaacgcatcagtgcgtctctgtcgccgtttctgccgctcaccgaccatgccgcgctggacaaaaaacgcctgctggcgcgcatcggcaagatgctggaacacaaattattgcaggcagtgcgcggcgaagacgagcgctatgaaatcaccccgctgatccgctatgtgatcaatgccgaaaccttgcaccgcctgctggcggaataccggcgcctgttgcagacacagctgggcggtacggcggcagaggagaacgtatga

SEQ ID NO: 42701 - DNA, 3363 bp, Neisseria shayeganii 871
atgaaagcggcaccggaatccgtgagctacagccccatccgcctggccgaattgtcggtgtgcaactggggctctttccacggcctgcacacgggcaccattcatcccgacggcacgctgattaccggcgacaacggcagcggcaaatccacgtttatcgacggcctgatggccttgctgttgccggcgggcagggccgcgtttaatgtggccgccgcccagggcgaccgcagcgaccgttcgctgatatcctatatgcgcggcagcttcggttccgaccacgacggcagcgccacccgcaccaaaagcaagcgcgaaaaggcggtgattaccggcctgcgcgctctgtaccgtgccgaagacggcggcgaaaccacactgctggcgctgttttggaccgcgcaggcgggcaatgcgctggcggatgttaaacgcctgtatgtggtggcgcgccacaatctgagcctgaaaaccgtgctcgaccgcttcggcagcggcaatgtgcgcggcctgaagcaatggctgcgcggccagcaggacgtgtacgactgcgatgacaatttcgccaattaccaagagctctaccgccgtttcctgcatctttacaaccccaacgccccggccttgctgtcgcgggcgctggggctgaagaaaatcgacgacctcacgcggctgattcgcgaactggtattggaaccggcagacatccgcagcgatgcccgcagtctggtggccgaatttgccgatttggaaagcatttacgcgcgattgagcgatgcgcgtgcccaagtgcagcatctgcacgagctgcccgccatggcggagcgcatgcgtgcttacggcgcagcgcttgcggctttgcaggcacagcgcagcggtctggcggtgtatttcgcccgcgcccatacccgcttgtgggaagcgcgtctggtggatttgatggacggcctgaaaaccctgctggcggaaaccggggtattgcggcagcggcagcaggatgcggaggaggacgaaaaacgccgctatcgcacattttacgattgcggcggcgcgcgcattgaggagctgaaacaggaaatcgcgcgcatacggcaattggaagagcatatggccgccgtggccgccgattatcagcaggactgccgcctgttggggctgcctgcggatttggatgcggcgctgttccgcagccaccagcaggaagcgcggcgccaaacaggacaggcagaggcggccgtgggtgcacagcaagaccgtttcagccaggccgccgccgcattggggcaaacccaaagcaccttggcggcgctggaagaagaaatccgcgccgtggaagctcgtcccgattccaatatccctgcccgccagcagcaatggcgcgacgaattgcagcaggcgctgggtttggcgcacggtgaggcggtgtttgtgggcgaaatgctggatgtgcgcccggaagagcatgaatggcgcggtgccatcgagcgcgccttgggtgggttgcgtaccaccttgctggtgcccgaagacgattacccgcgcatcacccgctggctcaacagccgccatcttagcgcacacatccgcgtgcagctggcgcacacacagcaggccgccgccccggcgtttgcgccgcaagggctgatggctaagctgctctggcgcgagcacccctaccgcaactggctgcaacagcatctggccaagcgcgacctgaccgccgtcgcgtccgccgccgagctggacaaaaccccgttttcgattacccgcgagggtttgcagcattgggaacacggccgcttcgagaaaaaagaccacaaccgcatcgacgaccgccgccattggtatctgggtttttccaaccgcctgcaactggcgcagctgcaagaagaagcgggcgtcttgcaggcgcaagtgcgacaacagcagcaggccgtggccagagagcgtgaggcgctcaaccgcagcggccgggtgcaacaggcttggcacaatctgcaacgttaccgctggcaggacatcgatgtgccgcaccaacaggcgcgtttgcagcaatgtcaggccgatttgcgccaattggaagccgccgacggcgatttgcaggcagccaaacggcagtgggaggcggcacaggccgccctgaaagcggtgcagcagcagctggccgaactgggacgccgccagggcaggctggagcaggaacaggaaaatgcggaagagcgcatccgcagcctgcgcgccgtggccaagcaagacttggacgatacggtggccgcgcagctggccgaacgcaccggcaccgtcagcctggccgatgcggcgcagcagcaggccgccgagcaggcgctggagcgcgaggtggtgcaggcgcagcaacggcagaaaagcgaagaaaaccgcgccatcaatatcatcagcagctttaaagggcgggaaaaatggcagccgctcacggcggaatggggtgtcggcttggacggcttgggcgatgccatcgaacatgtggaattgctggagcgcgaaggtctgcccaaactggtggagcagtttcgcgaacggctcaacaaacacaccacccagtcgctcacccgtttgcgcaaccgcttggacaacaaatacgacgaaatccgcgagcgcatcgccaaaatcaaccgcgtgctggcgcaaaccgaattccgccccggcacttatctcaagctgggcagccgccgcgagaaattcacccatgtgcagctgtttgaacacaaagtcaaagcggtcttgggcagcggcatccacgacgaagacccggaacaccgctttatgctgctcaaggaagtcatcgacatcctcgccaaggccagcagccgcgacagcgcctacaccctagagagcctgcgcctgctcgacccgcgctaccagctggcgttttttgccgaagaaatcgaccacggcgacaagcgcgtgcgcgatgtgctcaattcttccagcggcaaatccggcggcgaaaaagaagcttttgccggcatggtggtggccgccagcctcgcctatgtgctcacccccgacgaccacgacagcacggtgtaccgcaccgtgtttctggacgaagccttttccaatactgccgagaccgtcagccgccgcgtgttgcgggtgtttaaagagctgaacatccatgtgaatctgattaccccgtttaaaaacctgaatttggcgcgcgaatcggcgcgcagcctcctgattgccgagcgcgacgccgacagccacgagagccgtctgtgcgagatgacgtgggaggaaatcgatgcccagcaggccgaacatctgcgccgacagctggcacagggagagactctgggcattgagtgggagggtgcatga

SEQ ID NO: 42702 - DNA, 1188 bp, Neisseria shayeganii 871
atgagcgcgccgcattggggcgtgctgcctgaaacactggccgccgaactctaccggcgcgagtggggcagcgccgccaagcggcaaagactgttgcgcggcgaacgtccgtttcccctgagtgtgaatttgaaaccgcccaccagcaaacaggcgttgcaaaacccgcagcattgccaggcttttgtggctgcctggaagcaggttttgccgcaacaggtggtgtgggaaacacggcaattgcagcatttcggcagcattgccctgccgcagcggctggtgctggcggatgccgacagcctgctggcgctgataggcgaacagggtacatgggcgcgctggcagacactgattgcacgcgtgaccgaagtcaccggctgccgcgatgcggtcaccgcgcaggtggaagcattggacaggctgcctgaacacgaattggccatgctgctgcgggtatggccgcaattgcagccgggcatggggcagggcgcttatctgcgcgccttgcccttggcgggcgcacacagcaaatttgtcgaacagcacgagccactgctgctgccgctgctggccgcctgttacggcgaagccgtgagcgcgcaaggtttgggcgcatggttgggctgtcaggcaccgcccaaagactggctcttggtacgccccttggatgcggccacacaggcggccttgggcggctggcaggtactgcgcctgccgaccgaacagctgcgccgccgccctctgcccggtgtacgggtgctgattgtggaaaacgagcagtcctgtctgagtctgccgcagctgccggacaccgtggccgtggccggcggcgggcgcaataccgcctggctggatgcgccgtggctggcagacaaacaggtggcctattggggcgatatcgaccgccacggcctgagcatcttgagccgggcgcgccagcgcctgcccacgataaccgccttgttgatgaacgaagcggcactggcccacggccgcaatttctgcaccacagaccccagcagcggcagcctggccgaaccggaggccctcaacaaagccgagcgccgtctgtggcaacagctgcaccgtagcgacccgccgctgcgtttggagcaggaatatgtgactgccgaggacttggctcgcgaattggccgcgtggatttcaggcagcctgaaaaatgcgtag

SEQ ID NO: 42703 - DNA, 1455 bp, Rhodanobacter denitrificans
atgaccctggacttcgccacgctcgacgcactgcggacccgccatcccgcatggacgctgctgcgctctgaccacgcggcgctggtggcgagttttctgcacaggacgtttgtggcgtccaatgtacgggtgatggcggcggccgatcttgccgaggcactggaagatgagctgtatgccctgcgtcagcagcttggcgatggcagctttcccaagccggcgcgagactatctcaacgattgggccgcttcggacaagagctggctgcgcaagttctatcaaccgggtaccgacgagccgcagttcgatctgacgccaggcaccgagaaggccattgcctggctgggccaactcgccgagcgcagtttcgtgggcacggaatcgcggctcctcacgctgttcgagttgctcaagcagatgagcgaaggcaccgagtccgatccggccaagcgcatcgccgaattgcacaggaagcgcgacgagatcgatgccgagatcgcgcaggtgatcgccggcaatgtgcctctgctcgacgatgcggcagtgaaggaccgcttccagcagttcatgcagctcgcccgcgagctgctgacggatttccgcgaagtggagtccaacttccgccaattggaccgcagggtgcgcgagcggattgccctgtgggaaggttcgaaaggggcgctgctccaagaaatcatgggcgagcgtgacgccattggcgattcggatcaggggcgcagctttcgtgctttctgggatttcctgatgtccagccgtcgacaggaggaactgaccgagctgctggaacgagtgctgtccctttcgccggtggccgatctcagacctgatgcccgcacccggcgggtgcactacgactggctggaggcgggcgaacacacgcaacgcacggtggcgctgctgtcacagcagttgcggcgctttctcgatgatcaggcctggctggagaaccgccggatcatggatattctgcacggtatcgagagcaaggcgttggccttgcgacaggcgccaccgccaggtgaagtcatggccatcgccgagcccgcggcctcgattgacctggcgatggaacgtccgttgcatgcgccggcgttcaagtcagtgatcgcggacatcgcgttgcaggaggacgatgatgacgtggatccttcggcgttgtacgagcagatcgtcatcgacaaggcgcgcctggtgcgccacattcgtcaaacgctgcaagcgcgtgggcagatcacgctgcgcgagttgatcgaaggacaggcattgcagcaaggtctggccgaattggtggcctacctgcagttgggcagcgaagcgttcaagaccgtggtggacgagagcgtcatcgagccgattgcctggcaggcggtcgcgcgcgatggttcggccttgcgtcggcaggcccggctgccgcgcatcctgtttgtgagatga

SEQ ID NO: 42704 - DNA, 657 bp, Rhodanobacter denitrificans
atgggcgacgagcaatgcctggccacggatcatgccgattccgtcgcgaccacgatccagttcgatctttcgacgctggcgatcaccctgttgaagggtgtcgtttatcgcgagggagatgagcggctctggggcagcctgctgaatctgcaggtgcgagtgcgcgactacgtgggcgtgttggggctggatctggtgctggatgaggccgagggctacgcctttctcaagagtcgcccggcaccggcggacgatgatgccagccctcagctaccccgtctggtggtgcgtcgcccgttgtcgttcccggtcagtttgctgctggcgttgctgcgcaagaagctggcggaattcgacgccggcggcggcaacacgcgactggtgctgacacgcgaggagatcgtcgagttggtgcgcgtgttcctgcccgacagcagcaacgaagcccggctggtcgaccagatcgatgcgcagatcaccaaggtggtcgagctgggctttctgcggcgtctgaagcccgccagtggcccggtgtgggaggtgcgccgcatcctcaaggcgtatgtcgatgcgcagtggctggccgagttcgacgcgcgactcgccgcctaccaggcgcaattgtctggcacgacggccatggacgacgcgaaatga

SEQ ID NO: 42705 - DNA, 3411 bp, Rhodanobacter denitrificans
atgaacgagccgctttcccccagcctgaatttcgtgggcgatgacaccttgtcgggctttcgtctgaaacggctcgaagtgctgaactggggcaccttcgacaagcgggtgtggacgttgcagctcgatcgacgcaatggtttgcttaccggtgacatcggctcgggcaagtccaccctggtcgacgcgatcacgaccttgctggtgccggcgcagcggattgcctacaacaaggccgccggtgccgacagcaaggaacgcacactgcgctcctacgtgctcgggcactacaaatccgaacgtcatgagaccaccggcaccgccaagccggtaagcctgcgcggcaacgacagttactcggtcatcctcggtgtcttccacaatgccggttacgaccagacggtgacgctggcccaagttttctggatgaaagaggcacaagggcaaccggcgcgtttcttcgtgggtgccgagcgggagttgtcgatcgccgaacacttcgcccagttcggctcggacatgacccagttgcgcagaaagctgcgcaaagcgggtgccgaaatcgaagatggctttccgaaatacggcgcgtggttccgccgccgtttcggcatcgaaagcgatcaggcgctcgaactgttccaccagaccgtgtcgatgaagtcggtcggcaacctgaccgacttcgtgcgcagccacatgcttgagccgttcgaggtggcttcccgcatccaggcattgatcacgcactttgacaacttgaaccgcgcgcaccaggcggtgctcaaggcacagcaccaggttgaactgctcacgccactggtggccgatggcgagcggcatgccacgatggtggttgaggtgacggcgctgcgtgcctgccgcgaagcgctgcggccgtatttcgccgggatcaagctcgggctgctggacaagcgcatcaccggtctgacgagcgagtggcagcggcaggatgcccaggtaaggcggctggaagcgcattgcagtggccagcgcggcgagcaacgagaacttgagcgcagcattgccgacaacggtggcgagcgtatcgcgcgtctggccaatgacattcgtcgcaaggaagccgagcaagcgaccaagcggggcaaatccacgcaatacgaagcgctggtgcttgacgtcggcgaaacactgcctgatgtcgagcaggatttcctgaccttgcgcaagcggttcgctgcgctcgatgagcggtctcgggagcgcgaggcgacgttgcagaacgagcttaccgaacatgccgtcagcctgcgccagggtcgggaagaacatgcggcgctgcgaaccgagatcaatagcctgaaggctcggcgcagcaatattcccgagcaacaagtggcgatgcgttccgccttgtgtcacgccctcgaactggccgaagaggacatgccgtttgccggcgagttgctgcaggtacgcgatgacgagcgcgactgggagggtgccgccgaacggctgctgcgcagcttcggcctgtcgctgttggtaccgaacgagcactacatccaggtcgccgattgggtcgatcgcacgcacctgaaggggcgtctggtctatttccgcatacggcaggccgcgcgcggtgcgttgccgggcctgcacaccgattcgttggcgcgcaagctggcggtcaagtccgattcgcctttctacgactggctggatcgtgaggtggcccatcgattcgacgtggcctgctgcctcacccaggaacagtttcgccgcgagacgcgcgccatcacccgcgccggccagatcaaggcaccgggcgagcgccacgagaaggacgaccgccaccggctggatgaccgcagccattacgtgctcggttggaccaatgccgccaagatcgccgcgctggagaccaaggccagggtgctggaatccagcctggccgacgtgggtgcgcaaatcgcgggacttcagacggagcaggatgcgctcaagaagcgcctcgccacactgtccaagctcgacctgttcgtcgactttcaggagatcgactggcaatcgacggcgctggaggtggcgcgtctcatgcaagagaagcaatcactggaatcgggctccgacgtgctccgacagttgaccgatcaattgaatgcattgacagctgccttgcaggtcgtcgaaaaggagctggaggatcgcaaggacaggcgttccagaaccgatcagaagaagaccgacgcgcagatcctgcgcgaacaggcgcagacggtgctgaacgaatcggatgcggccgcccatgcggtccattttgcacggctcgaagctatgcgcgagggcgcgctcggcgatcatcagctgacggtcgaaacgtgtgccaaccgcgaaagcgatatgcgcaattggctgcagaacagccttgacgccgagaacaagaagctcgaacgtctgcgcgataaaatcatcgacgccatgcgtgtctactgcaccgccttcccgcttgatacccaggaagtcgacgtcgccgtggaagcatgtggcgaataccgcacgatgctggacaaacttaaggctgatgacctgccgcgcttcgttgccagcttcaagaagctgctgaacgagaacacgatcaacgagatcgccaacttcaacgcccagctggctcgcgagcgcgaaaccatcaaggaacgtatcgcgcgcatcaacgactcgctcacccagatcgactacaaccccggccgctatatcgtgctggaatcccagctcagccccgatgcggagattcgcgatttccagacggatttacgcgcatgtaccgagggagcggtgatcggctcggacgatgcccagtattccgaagcgaagttcgtgcaggtcaagaccatcattgaccgctttcgcggtcgcgagggtctgtccgaacaggatcggcgctggacatccaaggtcaccgacgtgcgcaactggttcctgtttgccgccagcgagcgctggcgcgaggacgacaccgagttcgaccactactcggactcgggtggcaaatcgggtggccagaaggagaagttggcgtatacgatcctggccgccagtctggcgtaccagttcggcctggagtggggcgcggtgtgctctcgatccttccgcttcgtggtgatcgacgaggcttttgggcgtggttccgacgagtcggcgcactatggcctccggctctttcaacaactcaacctgcaactactgatcgtcacgccgttgcagaagatccatatcatcgagccctttgtggcccatgtcggcttcgtccacaacgaagcgggcagttcatcgaaactgcgcaacctgaccatcgaggaataccgcgcgcagaaggttgtgcatgccatggcgacagccccactggagacggagcgcgacgctgaatga

SEQ ID NO: 42706 - DNA, 1203 bp, Rhodanobacter denitrificans
atgatctggaccacaccgggtgatctgaaggctcaacttgcgcgcctgtgggaccggggcgtgctgccgcgcctgctggtcaccgcggagcccgggttcccgctgcggcttgtgctgaaagggcctgcgtcgtccgacctggccgaccgtttcgaggttgtgcgcgcgtgggccgtcgaactggcggccacgccccatgtccgtatcgaatggcgcgaagtccgtcaccgtgtccagggtgcgcaacgtttgccggaccaagtctgggtcgacaccatggatgacgccttggccctgctgggcaggcggcgtgacgccgcgggtctttcacgcgtggtggcgatgacgcatgccgcggcacccctgctgctgccctggttggccagacgtcccttgcaggccatcgagctggccgactcgtggccgcatctgatcgccgtggtgcaatggttggtcgagcatccgcgtcccggcatttatctgcgccaggtcgacgttgccggtgtccacagcaaattcatcgaggctcatcgcaccgtactgtcggagctgttcgacctgatgcttcctgcgcaggccgtggccttggaccggacgggcgccagcgcgtttgcagctcgctatgggtttgcggacaaaccggcccgcgtccgcatgcgtgttctggacgagcaggttcgatggtttccctgcgccgcgcggccggacatcaccctggatgccggcagttttgccagcctggcgttgccgatccagcgtgtattcatcaccgagaacgaaaccaacttcctcgcgttcccggcgactcgtggcgcgatcgtgatcttcggtgccggctatggctgggatgccctcgccggggccgcttggctgaagcggtgcgccatccattattggggcgacatcgacactcacggctttgccatactcgatcagttacgcagccgtttcgatcatgtctcgtcgctgctgatggatcgcactacattggatgcgcacgaggtgcactggggcgaggagcacgagcaagtgctccacgatctgccccgactcagccccgacgagcgtgcgctgttcgatgatctgcgcgacaaccgcatccggaaaaacctgcgcctcgagcaggaacggataggatttcactggctgaccgaggccattttgggcctccccggtatgccaagccgcgaagtcgaacgctga

SEQ ID NO: 42707 - DNA, 1392 bp, Clostridium sp. DL-VIII
atgaaggaaattaatatatttgaaatagttccagagaatttttttgttccactttccagtcaaggaaagactctatatattaaaattatttctttaatatataaattggttcaaaacggtttgtcttatggtattgataaagacatattagttgatgaaattgaagaatatttgggattaattaactatgatattgaaaatgaagaagatgaacagttaaataataatagagaaaaagcaaattatttgattagaaagctaattaattatggatggatttatccagaacagactaatgactataaacaaattataaattttcatgattatgcaattgttattttagaagctttcttaaaaatagtaagtaaagaatccttagaatatcaaggaaatataataagtatttattctatgctgtattcaaatgaaaaggcaggagttgttattaagcaggtttttgaaaatactaaaggaattataagtggattgaaaaacttgaattcaaatataaaaaagtatatggacagattaactaaacaaaaaacacctgaggagattatgcaagagttctttggaaactatactaaagaagtaattgacaaagcatatcatagattaaaaacttcagaaaatgtctcaaagtataggcctcaaattattgaaaagcttaatgaaagtttaattagtagtgaatttttaagtgaagctggagagttttacagaggagatgaagaattgggctcattagatgagggaatagaaaaagttaaggatatagttcataacataataaatgcatttaatgaattagacgatattatgcatgatattgatagtaagaatgctaaatacataagagcagctgtaactagggctaaatttttacttaacaattctaaagatatgacaggtatcgtaaaaggaattttggagtacataagtaatgaatataaagaacttgaattaggtttatcatcagactatctggaggaagttacagacttattcactttgtattcttatggttatatagatgaaacatctctatatattgcaaatgaaggaaaaaaatcctttaagccaggtaagattttaagcgatacactatcaaaggaagaacgtcaaagaaagattgatgaatttaagaaaaagcaggaaaaacagtattctcctaagaaggtaaatgaaatagttgatgaacttttaggagataaaaagatggttcttgcaagtgaaattgagataaatagtgtagatgattttattaagataatttatataaggttatatggtaatcatgttttagctaaatattctattaacagaaaagatattattgcttcgaataatggatttacttttaaaaactttgagatatggaggaagtaa

SEQ ID NO: 42708 - DNA, 606 bp, Clostridium sp. DL-VIII
ttgatatatgattcactgtccattaaagagaaagatgaatttaaaaaggtttgtaataaactattaagttattgtttaatttgcaagcaaaaggaagatacaaaaaaggattattattttgcagaaggtcataaagatgcaattaatgaatattttgaaccactaggatttgaacttgaaattaataaatctataaaagcggctcagcttattaataaatttggaaataataagatttcattaaaacttattgatagtattactcttttaatactaaggattttatatcaggaaaaaatgcaggaattatccttatctcaagttgtgattgtggaaatagaagaaatacaaagcaggtttatggctcttggatttaaagataggttaatggataaaacattacttaagcaggcaataagaactttaaggaaatttaatatcatcgaaacattggatagagatattactttgagtgatgcgagaatcatagtttatccaacaattcaaatgatagtaagaagcgaaaatttaactagtatctatgaaaaattagaaacttataaaagaaagggggtaaaagatgatgaagaggttaacggggattag

SEQ ID NO: 42709 - DNA, 3255 bp, Clostridium sp. DL-VIII
atgatgaagaggttaacggggattaggctagttaattggcatgcatttaaggatgaaacaattgaaattaaaaactcaactcttttatcaggagaaaatggagcaggaaagtctacaattttagatgctattcaatttgtcttaacttgttctaaaaataattttaataaggcagctaatgaaaattccaaaagaagtttatctggatatgtaagatttaaaacaggaagagaagacaatgaatttgaaagaaacggagatatttcagctcacgtagccttggaattttatgaggaaagtaagaaaaattattttataattggggccgtaattgattcagcttctgaaacttcagaaaaggttctttggtatagagcagaaaaatgcagatttgaagatgtaactttcatagttaataatgaacctactgatatatctaattttagaacatatggaaaagaagtaaatatgccattttcatcaacaaggatagtagatgctaaaaaagatttttctcacagacttggacggttaaatgaaaaatttttcgaattgcttccaaaggctttagcattcaaaccaatttctaatgttaaagagtttgtatatacttacatactagaagagaaatcagttaatattgatgaacttagagaaaatatacgaacttttaaagaatttgaagacgtcttaaatgaagtgaaagtaaaaattaaaaagcttgaagaaataaaggctaagtattccttatatgaaagtatttcaaggacaataagtctgcatgaatacatagtattaaaagcagaagaagagcttttaaaagaagaaattgaacaaaaaataaaagaaattactgctttgaatgttaatattgaagctttaaataataagaataatattatttatgatgaaataaatgacaaaacaaagattgctaataacatccgagctgatttatattcgaattctgaatacaaggcattagagactatgaagaattctttagaacaagctgaaaaagattatagacatgaaaaagaaaataaagatcgatttttaaaacaatttagtgaacaaaaatcttatattaaagaattaagcagacttctattggatacggatactataggtgacttttacaataaaatgatttcactagatgaaaataatatagaagaatataaaacaacatcaataaatactgaaaatgtaattgataaaactaaacagaataaggaaaagtatagagctgaaaaagaatatgaattaaaacagaaagaagataatagaaaggatatagagaaacaaatttctgaacttgaaaagagaaatcttcaatatcccagggaagttatgcttttaaaagaggagatcataaaggaaacaagaaaattaggaagagaaattgttccaaaaatattgtgcgaattattggaagttatagatccagtttggaaaaatgctgttgaagggtatttaaatactcagagattttatcttattgtagatgaagaagattttgactcagtacttaaaatttatgagagattaagtaaagcacaagggctacattcagttggaataataaacaccagaggtcttgaaaagtatgataagcctcttgaaaattccttagcagaggtagtagtgtctaaaagccttgatgccaaaagatatattaatatgatactcggaaatgtaattagatgcactcatgtttcagaattgaaagaacataaaacatccataactcctacatgtatgatgtataaaaataatgttgcaagagctataaatccaaagacatacaaaactccttacataggtgaagatgcttataaatatcaactagagcaggcaaaagataatcttagcatattattatctgaaattaatgttttaaaagaagatattaatatagttacaaatataattaaaacaattaataagcttaggcttgaaaacttaagggaaaagtgtgatgttttaaaaagaatagtagatataagtaataaggtttcaatacttaaggaagagattcttgaattagaaaagaataacagctatatggcccttcaaataaaacttaatgaagttcaagaggaaattaaaagtttgaatttaagtaagaagaagatagaaaatgagttgataaataaaaaaggaaacttatcttcaattaataatattattgatgacaaaagaagaattctttctataaaaaaagtgcaggtagaggaaaataaaagtaaaattggctctttagccaaagaggcagaggagagatttattaaagaaactgaaagtaaatcttttgaagtcattaaaaataattttaatgtgagtaaggaaggaaataaaactaaattatcaaaaactgaagaagatttaaaaaatcttcagggatcatataatattacttatgatttcggagcagaggttgggataaatggtattaatactttcttagatgaacttgataatcttgtgaaaagtaaagttatcgaatacgaagagcaagttaaaacttcaaggaaaaatgcagaagaagagtttaaggaacactttttatctaaaattcaagaaaatattaatactgcgaaatccgaatttaagggattaaataagggccttaaagatgtcaaatttggaaatgaagaatacgagtttaaaattgggaaaagcaaggaaaataaagaatattatgatatgataatggataatgaaaatataggtgagggtttcactttgtttagtacatcttatgaaaataaacataaggaactcctaaatgaattatttgataagttaacttttgataatgagagtaatgaagcagaacttattaaattaactgattatagaaattatatgagctatgatatagagattaaatataatgataatactacatcattattttctaaagtatgcagggagaagagtggaggagaaactcaaactccattttatgttgcaatggcagcatcatttctacagctttacaaaggggtatcttcatcttcagaatctataggaattatattatttgatgaagcctttgataaaatggatgatgcgagaattatgtctatgatggaattttatgataaatttaattctcagctgcaattattaataggagcaccaccacaaaaaattgagcctataactccttatgtaaatacagtgcttcttgcaataaaagcagataaattcagtattatagaggatatgataaatgaaaaattataa

SEQ ID NO: 42710 - DNA, 1182 bp, Clostridium sp. DL-VIII
atgaaaaattataaaaaattactattagataagttaattgattcttatgaaaatagcgtcatttataagggggatgcgttaagagatacacagatatattttaaatttaacttgaaaagtataaaggaatattttgatgaactaaattacaaatataaggaagaaattgatgtagcttgtaatcagctagaaattgaaaaacttataaaagtatataaaggaaaaggatacaaaagccatattatagaaaagattcaattaaatcttgaaaacatagaagctgcatatttatttttaaataggaaagaaaaaaagcaaaaagaagatgaagtctcattattattggaaagttataaagaaagggaagatgttctcggaaactttgcaaaatatattacagataaacttaaaagtaatggatctgtaaagaaatatttagatattgaaaattcatcagaatgtaaagatatattgaaaggtatagatgaagtgctaaaacaaaaggaagaaatttttagaaggaatttttcagttaaagtttatggagattccaaaaggtatgaagctatagagggcaaaataattaagattataaaagacttttctagtgatgaatttcttaatgattataacattttgaagaattatacttatgtttattttaagggaaatatgagtttaaaacttaaagaaagttacataaacgcaaatgattttcttggaggtatagctataagctcaaaagatatagaaaacattaaagagattaaagttttaggaaataagctagtgacaattgaaaatttaacatcatttaataattataatggagatggaggcgtaatctatttaggtgggtatcataatagtgttagacaaaacttattaattaaaatttattctgaaaatccttacataaattattatcattctggtgatattgatgctgggggctttaaaattttagttcatttaataaaaaagacaaaaataccatttaaaactctaaatatggatagtaaaaccctgcttaaaaacattgattacgccaaaccactaacagttaatgatgtaagtgagattactagattattagaaaataaggaatataaagagtatagtgatgtcttattaaggatgataaaacttgatagaaaattagaacaagaaataattttttaa

SEQ ID NO: 42711 - DNA, 1455 bp, Mycobacterium rhodesiae NBB3
gtggacaacaacgcggcgctgccagcagccgacctgctcgagtccaaccgcgacctgcagggctcccgcgccatccgcttgctcgctacgaccaacctcagcctctacgcgacgttgatggaacgtcacctcagcgacggccaactcccagagaccgagctcgtcatccgcctcgaacgcgatctgcatgacctcaacgacctccaatccggcctcgccctgatcaagacctgggccgcccagggctggctgcaccgcatcgtcgacaaacgccacgaccagaacgtctgctacctctcccaggacgcccgccgcgccctcgacttcctccgcggcatgcgccgccaggacaccatcgccaccggcggctccattaccggcatcgcctcacgcctcaagcaggtcgcactaagagtcgacaacgaccccgcccgcatccgcaagcacatcgaggccgaaatcgccgccctccacgaggaactcgaccaactcgacgccggccaacgcccccagcccgacgtcaccgactgctacgacgaagctcgcgccatcgccctgcagatggaacgcctcatcaccgacatcggccaatacggcaccatgatcgagcaggccaccgccgccctcgacgaacccatcgactccaacaccgaatatcgcgaccgccaacgccagatgtacaccgactaccaggccgcctgggactcccagggtcgcgactcccaccgcgccttcctgcgcatgatcaacgaccccgaccaacgcgccgagttcgaggccgacgtcgccgccgtcgccgaagccctgcccgccctcgaccccgccctgcgcaaggtcatggccggcttcttcgaactcgtcggccaccagatcgacgaggtcgaacgcatccagcagcgctgcgcccaacgcgtcaaacgcttcaccgccttcggcaccatggagcaaagccgcggcgtcgcccgccaactcaacgacgccatcggcgccgcccgcgctctgctcaagtccagctttaccgactcccgcctcgacatcgacgtcccactcacccgccacgccatcagttccgttggcgcccttagcttcaagatcggcgacctgtccaaccccaagcccgccgaacatgccgccagcgatgtcgacctcaccagcttcgccgccctcaccacccaggtcgacgcccccgccatgtccgacatgctcaaccgcgcgctacgtgatgggcccgtcgagctccccgacgccgtcgccatgctcgacaccgcctacctcggccacgtcatcgtgctgtggtcctgggccctcacccagcccggaacccgcacggacgagaaagacccggtgtcgaccaccgtccgcttccgctccctcgacggccgcgaccgcgaaatcgccgtcccccgtttgaccttcaccgaacccatcatcaccctcgccggagccgcttcatga

SEQ ID NO: 42712 - DNA, 696 bp, Mycobacterium rhodesiae NBB3
atgaccaccatcgacgacgccgactttgccgcactttccgagctcccccaggtcgaccaacagaccgcccgccccgtcggcgcccgccgtccccgtttcgacggcgacgtctccgaactccccgaccgcgcctgctgggccctacagcacctgctcacccgccgctatatcagcgccgaagccgacgccgacgtctacagctgggtcgtcgaataccgcaaggaactcgccgtccggctctccgaactcgacctgatcctgcgcatcgtcgacggcaccgacatcgcgttcatcgaacaggcccgctacgaatccgccaggggcatcaaggttctgcgccgcgagccgctcggcacctacgactccatcctcgcgctgcacctcgcccagatgatgcgcgccgccgccgggcagagcgtcctcatcagccgcgaggaaatgcacggcctgttctccggtgtcctcaacgacaccgaccgcgacgccgtcaccttcgccgcccgcatcgacggcgccatcgcccgactcaccggcctggagatcctgcgcaagagccgcgacgacgaggacagctacaccatctcccccgtcatcaccgccatcatgaccgcctcggtcatcaccgaactgcagcagcagttcgaacaactgctcaacggcggagcaccgcccgaggaagagatcgatctcgactga

SEQ ID NO: 42713 - DNA, 3360 bp, Mycobacterium rhodesiae NBB3
atgactgaacagttccacctgtcccggctgcaggtcatcaactggggtgtgttcgacggctaccactccatcccgttcagcagcggcggcgccctcatcgccggggcgtccggcagcggtaaatcgtcgttgctggatgccatttcgctgggcttcctgccgttcaaccgccgcaacttcaacgcctccggcgacaacacggccgccggatccagcgccggccgccgcaccgtcgacaaatacgtccgcggcgcctggggccagcgcagcgacggcggcaccagccgcgtcatgtacctgcgcggcgacggcaccgcctggtcggccgtcgcggtcacttacgccagcaactccgggcgcaccgtcaccggtctcgtgctcaagtggctgaccggtgaatcgcgcaacgactcatcgagccgattcgtcctcggcgacggcgacctcgacatcgaagacgtgtgcaaccgctgggcgtcgggccgcttcgacgccaaagtcttcaccgaacactggcgcttctccaccaaggtcgaatcgcagtacctcgcgcagctgtacgccaccatcggcatccgtgcctccgatgccgcccagcaactgctcggcaaggcgaagtcgctgaaaagtgttggcggactggaacagttcgtccgcgagttcatgctcgacgaacccgacagcctggcccggctgcccgaggcactcaagcagatcgacccgctcgtcgaagcccgcgagctgttggccgtcgcgcagaagaaacgcaagatcctcggcgacatcgagaacatccaccaccgctacacctctgagtcctccgacctcggcatcatcgacctcgtcgacgcgccgatggtgcgcgcgttcaccgaccacgtccgcctctcccagtgccctgagcagatcgccacgctggacagcaccatcgaccaactcgagaacgagtacgaggacgtcacccgcagcctcaatctggcgaaggccgaagcggattcgctcaacgcgcagatcagcgggtccagcgcgaacctcgctccgttgcaatcgcaggtgaccgccgccgagaccgaggccgagcaggtcgagcgccgccgctccgcctacgaggacatgctcaccgcccaggacatcgagcacccggacaccgccgacgagttctggaacctgcgcgaagacctgctcggccaggccaccgaactactcgccaaagtcgaacgcaaccgcgaggcctccacggacgccgagtacgcccagaagtccgcgcgcatcgcccgcgacgacgccgccaaggaactcaaacgcgtcgagcacgtcggctccgcactccccgagttcgccatcgcgatgcgcgaccacatctgcgcggcggtcggtgccgacgcgaccgagcttccttatatcgccgaacttctcgacctcaagccggaccagacccgctggcgcaccgccgtcgagaaggtcctgcgcggcgccggtctgcggctgctggtgcccgaccagcactgggagaaggtgctgcggttcgtcaacgacaccgacatgcgcggtcgcctgcagcttcaccatgtgcgcacgaagatgctcggcgccgagccggtcgagccggagccgaacacgttggcgggcaagctgttcgccgtcgacccgtcgcatccgtgcgcggccgaggcactcgacgtcatcgccaacgccggtgatcacatctgcgtcgacacccccgacgtgttcgcccgtttccgccgcgcggtcaccgacaccgggctgtacaaggactccgatcggctcgccatcaaagacgaccgcggaaaggtcaggcagtccgagtatctgtaccagggcgacgtgaccgccaagatcaacgcgctgacactggaactcgctaccgccgaagacgcgtatcagaaggcgcgccgtgtcgccgacgacatcgccgcccagcgtcagcagtggcgcgaccgggcgaccgcgtgcaaggcgatctgcgagcagtatccgcagtggagccagatcgacaccgagacggccgacgggcacgcggagcggctgcgcgaacagtatgagttgctgctcgccgacaaccccgacctcgacgcgctgaacgcgcgtgcggacgaatgctggtcgcagatccagagattcatgacgcgccgcggggcgatccagacccggcgcgacggcctcgacgagcgtcgcacccggctgatggagctggccgagcggctgtccccggcgttcgtgtccgaaccgctgactgagctgctgaaccgctacgccgcagcgctgccggtgtcattggagctgctcgacccggaaccgcaccgcgacgccctgttctcgtcgatcaagaaggatcgtgagaacttgcgcgagagccggcgccgctcctacgacgagttggcgcgcatcctcaacacgttcgacacgtcgtttcccgacgcgatccccaacgacagcgaggatttcgacgagcgggtgcacgactacgtcgcgctgtgcaagcacatcgatgagcgcgaactgcccgaggcctacgaacggatgatgcgcttggtgaccgagcaggcgccggacgcgatcctcaccttgcaccgcgtcgccgagcaggaggcgcggcgcatcgccgagcagatcgaccgcgtcaacacggggctggggtcggtcgagttcaaccgcggcacccggctcacgctgcgcgccaccccgcggcaactgcccgcggtcgccgagctcaccgagatcgtgcggtccatctcgcggcgcatcgccgaggtggggctgggcgacaagcaggcgatcctcgatcaatacgccgacatcctgcgactgcgcaaccgactggcgtcgacggcgccggaggacaaggcctggacgcgggacgcgttggatgtgcgcaaccggttcacgttcgactgtgcggagtgggcgggcgacgagttgatccgcacgcacagcaacgcgggcgacaactctggtggcgagcaggagaagctgatggcgttctgcctcgccggcgcattgagcttcaacctggccagccccgaaagtgcggacaacacaccggtgttcgcgcagctgatgctggatgaggcgttctcgaagtccgaccagcagttcgcgcagcaggcgctgtcggcgttccgaaagttcggcttccaactggtgatcgtcgcgacggtgcagaacgccacaacgatccagccctacatcgacagcgtcgtgatggtctccaagacggaagcgaccggtcgcaatgtccgccccgtcgcgacggtcgccacccgaacgatctcggagttcacgtcgatcaagcaggagatgcgcaagagcgcgacgcaaaaggttcctgccggggtctag

SEQ ID NO: 42714 - DNA, 1491 bp, Mycobacterium rhodesiae JS60
gtggacgacgacatcaccttgtcggccgctgacctcctcgaaatcaatcgcgacatccagggctcccccacgatccggctgctggccacactcaacctgggcggttacgccaccctgatggagcgccacctcagcgaaggcgtgatcggtgagaccgaactggtggtgcgcctggaacgcgacctcgacgacctgagccggcccggcggcgaacagtccggcctgggcctgatcaagagctgggcgagccagggctggctgcaccgggtggccgatcagcgcagcggcgtcgagcgcaacctctgctacctgacccaggacgcacgtcgtgccctggacttcctgcgcggcctgcgccgccaggacaccatcgccaccggcgggtcgatcaacggcatcgccgcccgcctcaagcagatcgccctgcgcgtcggcaacgacccggtccgcatccgcgccggcatccgggccgagatcgacgcgttgcaggccgaactggacgcgctggaacgcggtgaggacctcggcgaccgctccgccgacgtcgacatgaccgacatgtacgacgaagcccacgccatcgccctgcagatggaacggctgatcaccgacatcggccagtacgggacgatgatcgagcgggccaccgccgccctggacgagccgatcgactccaacgtggagtaccgcgaccggcagcggcagatgtacaccgactaccaggccgcgtgggactcgcagggccgcgactcgcaccgcgctttcctgcggatgatcaacgatcccgaccagcgcgccgagttcgaggccgacgttcttgccgtcgcccacgccctgcccgccctggaccccgcgctgcgcaaggtgatggccggcttcttcgagctcgtcggccagcagatcgacgaggtggagcgcatccagcaacgctgcgctcagcgggtcaagcggttcaccgcgttcgggaccttggagcagagccgcggcgtggcccgtcagctgggcgatgcgatcggcgcggcccgcgctctgctcaagagctcgctgaccgactcgcgcctcgacatcgaactcccgctggcccggcacaccatcagttcggttggcgcactgagcttccggatcggtgatctcacgccgcccaagccggctcaggcttctgaaggcgagctcgacctgtccagcttcgccgcgctcaccactcaggtcgacgcaccggcgatgtcggaaatgatcaacaccgcgatcgacggcggcggacggctgtcgctgcccgacgcgctggagatgttgtccgcccaagggcacggagcttatctgggtcatgtcatcgtgttgtggtcctgggcgctcaaacagccggatgcggcagcgtcggccgagtcggtcaccgtgcggttccagtcgctggacggccgcgaccgcgagatggaggttccacacctggtgttcaccgaaccgatctccagcctgttgggagccagcgcatga

SEQ ID NO: 42715 - DNA, 705 bp, Mycobacterium rhodesiae JS60
atgacggacatttccgatgtcgatctcacagccttctccgcgctgccccaggtcgatcaaaccgcccgcaccccgcaccaacgccggccgcgcttcgatggcgatgtcagcgagctgcccgaccgcgcctgctgggccttgcagcagctgctgactcgccgctacatcagcgccgaggccgaccaggacctctacagctgggtgctcgaataccgtgcgcagctgtcggtgcggctctccgagctcgacctcatgctgcgcatcgtggacggcaccgacatcgccttcatcgagcaggctcgctacgaatccgccagaggcgtcaagcttttgcgccgcgagccgctgggcacctacgactccatcctggctctgcacctggcacagatgacgcgcgcagcgggcgggcaggcggtgctgatcagccgcgacgagatccacgggctgttctccggggtgctcaacgatgtcgaccgcgacaccgtcaccttcactgcccgcatcgacgccgccatcgcgcgcctggccgggctggagatcctgcgcaagacccgcgacgacgaagacagctacaccgtcagcccggtgatcaacgccgtgatgaccgcttcggtgatcgccgagttgcagcagcagttcgaactgctgctgtccggcggcggcgcaccggagcgcgaggaccaggagaaccagcttgatggctga

SEQ ID NO: 42716 - DNA, 3372 bp, Mycobacterium rhodesiae JS60
atggctgaacagttccacttgtcgcgactgcaggtcatcaactggggtgtgttcgacgggtatcacgacatcccgttcagcgagggcggcgcactgatcgccggcgcctccggcagcgggaaatcgtcgctgctcgacgcgatctcgctcggtttcctgccgttcaaccggcggaacttcaacgcctccggcgacaacactgccgccggttccagcgccggccggcgcaccgtcgacaagtacgtccgtggagcgtgggggcagcgcagcgacggcggcaccagcaaggtgatgtacctgcgcggggagggcaccgcgtggtcggccatcgcggtcagctacacctccaacaccggacgcacggtcaccggcctggtgctgaaatggctgaccggcgagtcccgctcggattcgtcgagccgcttcgtgctggccgacggtgagcgcgacatcgaggacgtctgcaaccgttgggcggcaggacgtttcgattccagcgtattcaaggagggagagtggcggttctccaccaaggtggaatcgcagtacctggcacagctgtacgccacgattggcatccgcgcctccgacgccgcccagcagctgctcggtaaggccaagtcgctgaaaagcgttggcgggctggaacagttcgtccgggaattcatgctcgacgagccaagcagcctgacccggttgcccgacgcactcaagcagatcgaccccctggtggaggcccgcgagctgctggccgtcgcccagcgtaagcgcaagatcctcggcgacatcgagaagatccagcagcgctacgcctcggagtcttccgacctgggcatcatcgacctggtcgaccagccgatggtgcgggcctacaccgaccatgtccggctggcgcagtgcgccccgcagatcgcgtcgctggacaccaccatcgaccagctgggcaacgagtacgaggacgtcacccggcagctgaatctcgccaaggccgaaggcgattcactcaacgcgcagatcagcggatcgagcgccaacctgggcccgttgcagtcgcaggttgccggcgccgaggcgcaggccgagcaggtggagcggcggcgcgccgcctacgagtcgatgttgaacgcacaggacatcgaggtcccggacaccgccgacgagttctggaatctgcgtgaggaactcagcacgcaggtgaccgaactgctggccaaactggaccggggccgggaggcctccaccgacgccgaatacgcgcagaaggccgcacggatcgcccgtgacgatgcggccaaggaactcaaacgcgtcgaacaggtcggctcggccctgcccgagttcgcgatcaccatgcgtgaacacatttgcgccgcggtcggaatcgaccccggcgagctgccctacatcgccgaactgatggaccttcggcccgatcagagccggtggcgggtcgccgtggagaaggtgctgcggggcgtcggcttgcggctgctggtccccgacgagcagtatgcggcggtgctgcggttcgtcaacgagacgaacatgggcggccggctgcagctgcatcatgtacgggcctcgctcgtcggcgcggacccggtcgaagccgacccgaatacgttggccggcaagctgttcctggtcgatccggctcacccctgcgcggccgaggccgccgatgtcatcgccacggccggcgaccacatctgcgtggacaccccggatgtgttcgcccgcttccggcgcgcagtgaccgacgccgggctgtacaaggattccgaccggctggccatcaaggacgaccggcgtccgctgcggcagtccgactacatcttccaaggtgaggtcgccgccaagatcgacgcgctgacggtcgatctggccaatgccgaggaggcctaccagcaggcgcggcgggccgcggatgagattgcggctaaacggcagcagtggcgggatcggtccgcggcgtgcaaggcgatctgcgaccagttcccgcagtggaatcaggtcgacagcgaaaccgccgacgggcatgccgatcggctgcgcgagcagtacgaactgctgctggccgacaatcccgacatcgaggcactcaacgcccgcgccgacgaggtatgggaggacatccagaccttgatgacgcgccgcggcgcgatccagacccgccgcgacgatctggacgcccggcgcacccagctgctcgatctccaggaccggctggctcccccattcgtgtcggagccgctgaccgagctgctgaatcgctacgcagccgacgtgccggtgtcgctggaggtgctcaatcccgagccgcaccgcgaggcggtcttcaacacgatccgcagggaacgcgagcagctgcgggaaagtcgcaggcgctcttacgacgagctcgcgcgcatcctcaacaccttcgacactgcattccccgacgctatccccaacgacagcgaagttttcgacgagcgggtgcacgactatgtcgcgctgtgccggcacatcgacgagcgggagctgcccgaggcctacgagcgaatgatgcggttggtcaccgaacaggcacccgacgcgatcctcaccctgcaccgggtggccgagcaggaggcccgtcggatcagtgagcagatcgaccgggtgaacaccggtctgggtgccgtcgagttcaataacggcacccggttgaccctgcgcgcgacgccccgcagcctgaccgcggtcgccgagctgaccgagatcgtgcgcgcgatctcccggcgcattgccgaggtcggcttgggtgacaagcaggcgattctcgatcagtacgccgacattctccggctgcgcaacaggctggcgtcgaccgcaccagaggacaaggcgtggacgcgtgacgcgctggatgtccgcaaccggttcaccttcgactgcgcggagtgggacgtccgcaccgaggagctgatccgcacgcacagcaatgccggcgacaactccggtggcgaacaggagaagctgatggccttctgcctggccggggcattgagcttcaacctggccaaccccgagagttcggacaacaagccggttttcgcccagctgatgctcgacgaggcgttctccaaatccgatccgcagttcgcccagcaggcgctgcaggcgttccgcaagttcggcttccagctcgtcattgtggcgaccgtgcagaacgccaccacgatccagccctacatcgacagcgtgatcatggtgtcgaagacggaggcgacgagccgcaacgcccgcccggtggccaccgttgcggccaagacgatttcggacttcacctcgttgcgggccgagatgcgcagctcggcggcgcgggagcgggtacccgcaaccgtctaa

SEQ ID NO: 42717 - DNA, 1494 bp, Saccharomonospora azurea NA-128
atggctacacgaggcatagaaggcgcctaccagggggcactgcgcgcgttccagaacccgatgctcgcgctcctgcatcagacgcacgcgccgttcgtggtgacggcgctggcgatggtcttcaccgcggagcggccgagcgtggcggtggcggacgcgcacgcggagatcgacgacgcgctcgaccagttgcgcgccgcgggatacggggacgaggacaaccagccactgccgagcgggaacgcgcgggacctctgccggcagtgggtgcaggcgggctggttggtgcggcaggtctccgacgacgacgtcgaggtgtatcggctgtccgcgtacggcgtcggggcgctcgaagtcgcgggccgggtcggcggggtgcgcacccgggtgtcggagtcgcgggtcaggacgttgctggacgcgatcgagcggctcgcgcaggacgccgatccggacgtgatggcccgcatctcgcgcctgcacgaggagatccaacagcggcagaaggagctcacccggctcgaacggggcggcgcggtcgagaccgtcgaggacgagaagctgctggaggcggccgagaacgtgctgcacctggcgcgcgaactacccgcggacttcgcgcgcgtggcggagtcgatcaaagacatccagcgtgacgtcgtcgccgagttgcggcacgacgtgcggccgaccggcgaggtcctccgcgaatacctggaacgcggcgagcagatcctcgacgcgacgccggagggccgcgcgttcgcgggtgcgttgcggctgatcggcgacccggcgcagatccacaacctgtggagtcagctacgaacggtgctccggcaccggttcaccgacctgctgccggagcggcagcggcgggaactcaccgacatctcgcgccgggtcgagcagggggttcaggaggtgctgaccgcgcagcggcaggcttcccacgtgatcaccactcaggtgcgcgaccacgacccgatgcgcgaccgccaggtggacgacctgctgaggaacgtgatgtccggccttcacacgtgggttcccggttcccgccgcggcgaggccgtcgagccgcttcgccgcctgccggtggccgacgtcgggcatctgcggcagcgggcaagcgacctgcggccgccgcagccccccgcgccgttgcgggagtgggacgaggtcgaggacgtggcctccgcggacacccgggcctggggcggtccgcgatacggcgcgctgcaggagcacctggccgcgttcgcgggcgacgcggacgacgtggatgtcgcggcggcgttccgtgcggcgcccgaggacctccggcgtccggtcgacctgctcggcttcctggagatcgcccacgacgccgggatgaccgagacggccgaggtcgccctggtcgacacggtccggcccgacggaacccggcgacggttcgcgctcggcggtgtggtcgcggcgaacccggctgacgggaacggtgagcaatga

SEQ ID NO: 42718 - DNA, 657 bp, Saccharomonospora azurea NA-128
atgagtgagaccgagagctggtccgacacggacgccgggttcatcgacccggtgccgatggaggacgatccgaccgagctgttccccggggacgcgggcacgctggacgcggacgtgcggcgggtgttggtccagttgctgcgccgcaagttcctactggccgagaagaacccggcgcagtggcggacgttgctggagaaccagcagatcatcgagtcacggctgcacgacctgttcgtccgcctcgtggtcgatcacgaccgcggcatcgcgtacaagcagcaggtgcgctcgacggagctggacgtgccgatcctgctcagggacgagccctacaaccgggccgagacgttggtgctggtgcacctgcggaccgtcttccagcgggaacggggcacgggcgagacgtccgcacgcgtggacatcgaggaactggaacagaccgtgctgacctacttcgatcccagggaccacaaccaggcccgcagccagcaggaggttcgcggtgcggtgcagcggctgtccaccgagggcctgctcgtcgaggaatccgcgggccggtatcgcatcactccgctggtggaggtcgtgctgagtaccgcgaaactcgccgaactgcagcagtggttgcgcgaacggaacgaggccacggcgtga

SEQ ID NO: 42719 - DNA, 3342 bp, Saccharomonospora azurea NA-128
gtgagcatgatcgacacgctgttcgggttgatcccggcggcatcacggggccagcagtgggtggcccgggacctgcaactggtgaactggggcggctacgacgggtatcaccgcgtgcggttcgcgcccggcgccacgctgctcagtggcggttccgggtcgggcaagtcgacgctgatggactcctacatcgcgttgctcatgccgcacacgacgccgttcaacggcgcgtcgaacggcggcgtggtcggcaggccccgaggcaaggaccagcgcaacatcctctcctacgcgcgcggcaagctcgacgagtcccgcacggacggcgagacgaagtcgcgcgtgttgcggggtgacggccgggacacctggtcggccatcgcgatgacctgggtcgaccacaccggtgccgagttcaccgcgctccgcgcctggtatgtgccgtcgtccgcccgcgccctcgacgacgtcgtggcggtgcgcgccacctgcgaccaccactactcgctgcgggagctggaaggcccggcggccaagcggctcgcccgcgcggaggtcgaatcgaccggcctgacgtgcttcgagaccgaccgggacttcaccgcgcgactccaccacacgctcggcatcggcgctgcgggtgacgggcacaaggccgtcgcgctgctcggtcggatccaggccggccagcagatcaccaccgtcgacgccctgtacaagacgatggtgctcgaagaaccgtccaccttggccacagcggacgcggtggtgcagcagttcgacgagctgtccggcacgcgcgagcggatgatcgtcgctcgccagcaggtgaaggcgctgacgccgatccgcgagcaccggcgcgccatcgacgacgcggtggagcggctgcacctgatcgaggcgatcggctcgttcaccgagacgtcgtcgcctgccgcgttgtggtgtcacgaacgtcggctcgaccttctccgtgcggccgagcgggacctcgctcagcgataccggcgggccgaacaggaactggcggagaccaacgccctggtcgaagccaccgaagcgcagtgcgaaggggccgccgacacactccgcgcctccggtggtgaccgcctggacacagcactccgagagcggcgcagcgtcgagcagcggctgggcgacgtcgagcgaacccggcagcagctggaccgggcactcggcaccctcggcgtcacggtgtcgaccggcgcagaattcaccgcgctggtcgagacggcgcatcggtccctcgccgacacggaagcacggcgaaccgctcaagcccggttcgccgacgcgatgagcgagaaacgggacgccgacacggaactggccgcgctgcgcgccgaacgcaaggcggtcacggcgcgcaaggggaacatcccgaccgacctgcacacggctcgcgcaaccctggccgaggccgccgggctgacgccggacgacctgccgttcgtcggcgagctgatcgaggtgcgcaccgagttcgaaccgtggcgggaggcgttcaacctggcactcggcgggttcgccacgcgcatgctcatcgacatgggacggctgaacgcgttccgtgaggccatcaacacggtcccgaccgctcgacgcgtgcacttccagggtgtgcgcacgggccggcacgacgaggtcaggctcaacgcgaagacgctccccggcaggctcgactaccggccgtcgcccttcacggcgtggctcaagagcgagctcgcgagccggttcgacttcgtctgcgtcgacacgccccgattgctcccccagtacaccaaagcgctcacgatcaccggtcagacgtcgcagcccggccggggcgcgcacggcggccacggccgggccaacgtgctcggcttcaccaacaccaggctgctcgccgagctcgaccagcggatcgatgccgcgcgccaccgcctcgacgaggccgacgcgtgggtgtcgcgggcggaggacgagctcaactcgttcgaggcccggcgggcggcctaccggaccgtgaccgagttgtcgtgggaccaggtggacgtcgagtcggtgaaggcggaacgcaaccggtgggaccgcgtcgtcgaggaggtccgtgcgggcaacccgaagatcgatcagctgcagcgacaggtcgacgagctaaagaatcaggtcagggagctcacccagcgtgtcggtgagcggaggaagaccgtggaggagctcggcgcgcaatgggagtcgaccgtcgacgaggtcgaccgcgcccagtcggccctcgatgcggccacggagaccggcacggtcgtccttccggagcaccaggaatacctggagacactgttcgcggacacctcggccgacgctccggcgacggaactggcggaattcgacgcggcggtgaaacgggccgccgaacgactccacgccgaccggcagtcggcgacggagacgatcggccggtcgagaaaggcgttggaggacacgttctcggtgttcctcgaacgctggcccaacccgaacctcggtaccgatcccgacgcctcctatcgcgacttcgaccgcgtcctcaccgacctggagagcagcggcctgcacgagctggaggcggagtggcgggacagcctgctcaagctgtccggcaacgacctcaccgggctggacagcgaactcgccgcggcggtgcgggagatccgcgaccggatcgacccggtcaaccgcatcctcgccgaactcccgttcgccgacgacgaacaccggctgcgcatcgacccgcaggagagccattccaccgtgcgcgcccggttccgcaaggagctgcgcgacgtgcgcgcgttgatcgaccgggcggacacggacgccgaccgggagcgcgcgtatcaccgcatggccaaggtgatcgaccgcatccggcgcaccgcccccgacttcgccgacctcgtcgacgtccgcaaccacgtgcggatcagcgccgagaaacgcgacctcgacggcaaacacgtcgccgtgtacgaccacatcggcgagaagtccggtggcgagtcgcaggagctggtggcattcatcgtcggtgccgcgttgcggtaccagctgggcgacgcgggcgccgatcgtccccgctacgcgccgatcttcctcgacgaggcgctgatcaaggcggacgcgcgcctcaccggtcgagccatcggcgcgtggcgcggactcggtttccaactgatcatcggtgccccgaacgacaaacacagcgcgatcgagccgcacgtggacgcggagtacctgatcctcaagaactccgagggccgctcgtatgcgaagccgctggtcggggttccggacgcatga

SEQ ID NO: 42720 - DNA, 1227 bp, Saccharomonospora azurea NA-128
atgagcacgctcgtcaccccggacgacgctctgacgacggttcgccgcaaggtcgagcagaagtgggcggacgccgtgtgcgcggacttcggcgtcggcgaccgggtcaccttctccgtcccgcttcgacccggcgtgtcgacgggcaaggccgtcgaacggctggggcacgccacctggcacgagtggcacaggctctggcgggagttcgcgagcagactccccgccggagtggacctcgtccgcacagcggtgagcatccgtggcgtggtcggtgagttccccgccacgctgcgggcggatctcgacggcgccgtcgcgctcctcgccgacaccggtgtcgcaccacccactgtggacatcgggcgtgcccgtgagctggcgtcggcgctgcgctcggccgacgccgctctcaccccggccacgctccgagccgtctctcgtctgcggccgaacgacgtggacgtactgctcggcgcggtgacctggctgcggaagcatcccgacgtcagcccgtggacgctgcggcagctcccgatccccggcatgcacaccaagtggctggactctcacgggacactgctgcgtgatgtcagtggtcgcgacgtccgggccgaggtgcggccccggccgacggtcgtgcacctgacctacgtcgacccggaccacctggcatcgggccgccgcaggcacgacgcctggacgaccggggacgtgcacgacatcgcctacccgccgcgcgtggtcctcgtcgtggagaaccgcgactcccggctgtggttcccgccggtcaaggacaccgttgtggtggaaggcggcggcaaggccgcagcagccctcctgggtggtgtgccctgggtccgtgccgcggagcacgtcgtctactggggcgacatcgacgcggacgggtacgcgatcctcgaccgattccgagccacgctggccgaacccggacccgacgggacacccccgaagccggtcacctcgattctcatggacgccaccgacctgcagcgctacgccgatcacggcgtcgaccgcgacaaggacgggcgccccctcagaccgtcaccgggggttctgcggcacctcaccgacgccgaaaccaccgcgtacgacacgatcgcgaccgcaggccccacgccgttccgtcgcatcgaacaggagaccatcccactcgccgacgccgtgacccgcttgctgcgcgtcgtgaacggccagggctga

SEQ ID NO: 42721 - DNA, 1461 bp, Mycobacterium abscessus 47J26
atgaatgatctgacagtcgaagagctgttcgcgcacaacgatgacgtgcagaaatcccgtgcggtccgcctgttggccgccaagaatctggcgccctacatcacgcttatggaacgccacctggaccgcagcgccaaagtctccgaacctcagctggtggccaagctggaccgggacctgagcgccgtcgggctgggagaacagtccgggctggccctcatcaagagctgggcgagcgacgggtggctgcaccgagcgtcggacggcaccggccccgatgccgagaacgtctgctcgctgaccgaggacgcgcgcagcgcgctggcctttgtgcgccgcctgcgccgtgctgacacggtggccacgggcgggtctatcgccggtatcgcggcaggcctcaaacgggtggccacccagctggacggcgacccgtcacgcctgcgcgccgacatcgaggcccagatcgcagaactgcagacccagctgcacgccatcgacgacggataccgtccggaaccggatatcgtcgatcttgaggacgagacccgggccatcgcctatcagatggaacaggtgatcaccgacatcgtccgctacggcagcatgcagaacgagatcaccgccggactcatcgacgccgccgaggactccgactccggcttccgcgatcgcgcccgcagaatgttcgcggactatgacgccctcttcgattcccgcgaacgtgcctcttattcggccttcacgcggaccatccaagacccggatcagcgagccgcgctacggagcgatatcgcctgtgtcgcagatggtttgcccgatcttgaccccgggctgcgcgaggtcatgagaaacttcttcaagctcgtgtctcagcagatcgcggaggtctcccgcatcgaacagcgctgcgcacagcgcatccggcggttcttcgccgcgggcacgaccgaacaggcacgtggccgcgcacgacaactcaacgacgcgctggcggccgggcacgccctgctcaaggtgtcgacggccgattcgccgatcgatgccgagctgccgatgggacgctcggcagcggcggccatcggcgcactctcgttcaccatcaaggacaccgcgccgccggtgctcgcacaggacgccccgtcggggccgctggatttgagcgggttctcggcgctggccacccaggtggatatggccgcattggccgatacggtcaacagtgctattgccggtggcccagtttccttgcccgacatgatctctcatgtcgaggccccctaccttggtgatgtgatcgtgttgtggtcactggccctcaagcaggacaacactgccgaccgtgaatcggtaaaggtgaagttccggtccctcgacggacaggaccgggtgatggaggtacctcagttgatgttccgtgaaccggtgctggccaccctcgaagaggagggatcgacactgtga

SEQ ID NO: 42722 - DNA, 750 bp, Mycobacterium abscessus 47J26
gtgacgacacaggcttcagggaccgccctggggaacatcaatttcgacgacctgccgggtgtcgaacccgatgcctcggcaccgcgaacggccaaggggccgcgattcgacggcgacaccagtgagcttccggacaaggcctgctgggcgctgcagaacctggtggcccggcgttacctgagtaaggacggtcagcccgaactgtgggcgtcgatgatcgagcatcgcaaggtgctggccgcgcgcctgtccgaattggacctgcggctgcgggtgttcgacgatctcgaggttgcctacgccgaaccagctccgttggagaatcccagcgtgtacggcgccagggtgttgcgccgggaaccgttgggcacctacgcgtcgatcgtggcactgcatctggccaagatcgcgaggaccgcgcacgacgaacatgtattggtcagccgcgacgatattcacgaacttttcgccaacgtctcccacgacatcgaccgcgacgaggcgatgctgcgtgatcgcgttgacgaggcgatcaagcggctgtccaaggctgagattctgcagcgcacccgcgatgacgagcacagctacaccatcagcccagtcatcaacgcgctgatgtcggcgcagatgatcgaggcactgcagcgtcagtacgagcagttgcagcgcggcggcgccgcgcccgaagacgccgacggcgcagaccccaccgacgaagaagatggcgagaccgatgacgacgagtga

SEQ ID NO: 42723 - DNA, 3348 bp, Mycobacterium abscessus 47J26
atgacgacgagtgatgcagcgacacaacagttctggttgtcccggctgcaggtcatcaactggggcgtcttcgacggctatcacagcatcgagttcagccgtcgcggtacgctgatcaccggctcctccggtagcggtaaatcatctctgctggatgcgatctcgctggcattcttgtcttcgaaccgccgtaacttcaacgcctctagcgacaccaccgccgcgggttccagcatgggcaagcgcaccgtcgacaagtacgtgcggggcctgtggggagagctgaagaacccgggggagcgccccaagcagatgttcctgcgcggcaagggcggtgcctggtcggctatcgccgtcacctactccggcaccgacggtcgggtgatcaccggcctggtactcaagtggcttgccccgggctcggattcggactcgtccagccgctactacctgatcgatgcggacgccgacatccgtgatctctgcaatgcgtgggccagcaagggatacgccggctcggtgttcgagggcgcgggttggcgcggccacaagagcgaacgctggtacctggaacagctatacgccgccgtcggtattcagggttcctctgccgcgcagcagctgctgggcaaggccaagtcgctcaagagtgtcggcggcctggagcagttcgtacgcgagtacatgctcgatgaaccggagtcgatggcagcgatatccgaagcgctagggcagatcacgccattggtcgacgcccgtgccgccttggcgatcgcgcagcgccagcggcagaccctgggcgatatcgaacagatccaacagacgtacgccagcgatgcggcgcagttggccaccgtggacgtcgtggaccatcacaccgtgcgcgactacgtggatcagcagcgcctggcgctggcgggcccggagatcgatctgctcgacaccgagatcacccggctgggtggtgagtgtgacgaaatccagtcgcgccaggacattctcacgggagagcgggacaaattgctcggccggatcgctgccgccgacagcaatctggcgccactcaaaagcgagctggctcatgctcgtgcccgcgcagaagaggtgtcgcgccggcgtacggcctacgacagtgcgttgtgggacctgggtcacgaagacgatatcgaatccgccgaggaattcgaggccatgcgggtggagagcctgcgggcagtcacccggatcaacgctgagctcgaagccggccacgatgcatatgtcatggccgcgggtgcgctctcgacggcacgtgatcagctgcgtgctgcatccgccgaattcaagcgggtcgagcacctgggtaccccggtgccgccggatgaggaccgcatgcgcggggagatcgccgcggcgcttgggcttaccgccaaggacctgccctacgtgtgcgagctgatggatctgcgcccagggcaggaacggtggcgcaaatctgtggagaaggtgttgcgctccaccgggctctgcctgctggtgcccgatcagcaccaccgccaggtgctgcgttatgtcaacgagaacccgatgcgcggctacctgcagatggagcgggtgattccctccggtaccccgcggcgcgccgagccgggcacgctcgccgactgtttgcgcctgaccaaccccaaccacgaatgcgccagtgccgccatgaatctggtggccggtgtcggcgactacgtgttggtcgacagccccgacgaattcagcaagcaccgccgggcggtcaccgatcagggactgcgcaaggacggtgaccggcgcgcggtcaaggacgatcggcgtgaattgcgggcttcccagtacatctatcagggcaacgctggcgacaagcgcgccgcgctttccgacgatgtggtcgaagcgcagcaggcggtcagtgatgccgaaaagttcatcggcgaaatggacaccaagcgcgaagagctgcgctcggaggtggtgcggtggtccaagctgcacagccaatacgagtattggagccagatcgataccgactcggccgaagccgccgtggcgcgtctacaggaccagtacgacgcgatgctggaagccaaccccgacctgaccggattgcagcagcaggccgactcctacctcgacgagatcaagaggctctccgaacgcatcggagcattgcgcaagcaagaatccgaacatgattcgcgccggacccggttgctggatctgctggacaacctgaacccgcgtgaggtgggcgggcacacccgatcgggaatcgaggcctatgtgccccaactctcgtccagcctggatgtgttggaacccgacgcctaccgactggagctgtggcggcagatcgagaaggatcagtcggtgctgcgtgagagcgtcacccgctcgcgcaacgagctgaaccggattctcaacgcgtacgaccgggacttccccgactctatccccaacgacagtgagaacttcgacgagaagatccacgactatgtcgcactctgccgcaggatcgatgaacgcgacctgcccgccgcctacgaacggatgctgcggctgatcaccgagcaggcgcccactgccgtgttgcggctgcaccagctcgccgaggaggaggcacaccgcatcaccgaccagatcgaccgtgtcaatagcggtttgggttcggtcgagttcaaccggggtacccggctgaccctgcgtgccgagccgaaggcgctcgaagcggtgggcgagctcaacgagcgtgcccggcggatatccgggcgtgccgtcgccgtttcgatgggggacgagaaggccatccacgaccagtaccaggacatcctgcaactgcgtaacctgttggccgctgagacacctgaggcgcgccagtggacgcgcgacgcgttggatgtgcgtaaccgcttcgtgttgtactgcgaggagcgcgatgccaggaccggcgaaccgatccgtacctacagcaacgcgggtgcgaattccggtggagaacaagagaagttgatggcgttctgcctcgccggcgcgctgagcttcaacctggccaacccggagacgggggacaaccggccggtcttcgcgcagcttatgctcgacgaggcgttctcgaaatcggatccgcagttcgcccagcaggcgctgtccgcgttccgtaagttcggattccagctggtgatcgtggccaccgtgcagaacaccaccaccatccagccctatatcgacagcgtggtgatggtgtccaagccggacggcccgggggtgcgtccggttgcttcgacgcgcacggtgccgatcggtgaactcggtgacgtacgcaaggccgtgagcgcccgctag

SEQ ID NO: 42724 - DNA, 1488 bp, Corynebacterium glutamicum ATCC 14067
atgaccgttgtatcgcacgcgcttgggtttaagcgatttaggcaggaatccctagagctgtctttgttgcgcagtgacaactttccggtggtgcttgccgtggtggcgcagtattttccgcagggggctatcgctaagccagcctcagagctgtatcagctgctcagcgatgattttcgagtgctgcgggaagaaggatttgagctgccgaaaagcccgtcggattatgtcagcgattgggtgaagtcccggtggtttgtgcgtcgtcctggtagttcgcagactggtgaaaccgtagagccgagtgaagagctgttggcagtgctggattcggtacagcggtgggataacccgcatcgaagcatttcggcgtctcgaattgaatcgttgacgcaagcgcttcagactttggcgttggaatcagatcccagcacggcgaaacgtttggctgagttagagcgtgaacgcgacaggatcgaacgccagattgaagcggttcacgctggtgaatttgaggtcctcaccactgtgcagataggtgatcgggtagcggatatcttggatctggcggcttctattcccgcagattttgccagggttcggcatgagctgagcgatttgaatcggaagctgcgcaggcagttgcttgatcctgaagactcccgtggtgatgttctagaagagatcttcaggggagttgatctgattggggattccgatgcggggcgcagcttcaatagtttctttgatgttttgttggatcgcgagcgttcaagtctgattgatcgatggatcagagaagttctaggacgcgatgaggctattgatctggatgcaaaattacggacagggctgtaccgaattttccgggatatggaggatgccagcttcgaggtcaacggggaaatgacaggactggctcgaagtttgcgtcactatgtcactaccgaggagttcgcagagagccgacgcatgattcagttgcttcgcgatacccgcagtgccgcagctaaggctgccgaggctggtgaagtgacctcgctcaatcatatggacactccactcgtgcgcatcggtatggatgtgcgctccattgctggattgaagttgaaaaatccaggtgaagaacgcgtcgaggatctgccggagccagttgaagagcaagaactagacacggaagtcttgctggaacagattcgagcaagcgagattgactttgaagaattggaagaagcagttggtttagttcttgctgagcaatcgcatgccacgatcaccgaggtactggaacatttcccagcaactcaaggcctcgccagcattgttggcttgttgtacctagcgatgcgtgatggtgtttccacaggtcacgcgcaagtagtggagtgggaaagtgaatctgtcctgcatcggcgacggattacgggatggcaatttatcaggggtttaaacagtgaagatttggcagaaagcgagatgaataaatga

SEQ ID NO: 42725 - DNA, 639 bp, Corynebacterium glutamicum ATCC 14067
atgaatgatcagctgtgggaaggcgacacgggaacgctgacttttgggtccaggaaagcgctggtgcaattacttaaaggtcccatggttaatgctttgcagcacgttgaagtgtggcgggccatcaccacagatcaagatgcgctcaatgctgtccttaacaatctgttcctcgagttggttcttgatgaggatgcgggtgttgcatttactcggcctgccaatggtggacaagacgtattggttggaaataacaaaactgaagcgatgcccaaagtgctgcgcacggagacgctgtcgcattttgatacgttgatcattttgattctgcgccaagaactcaccatggcacctccgggggaacgagtcattgtggatcgtgaagaaatccgcgaacaagtgttgctctaccgcgttgatgaagaacgagatgaagccaaattagccaaacgattcgacgctgcgtttaggcgcatcgtggattattcattggctaaaaagacagagacacctgaacgttttgaggtctcaccagcactgcgccagatttttgatgccgacaccgtggcaggtgtgcgcgctgagtacgaaaaatttaacgaagcagcccatgacggaaatgaagaggaaaagaagtga

SEQ ID NO: 42726 - DNA, 3336 bp, Corynebacterium glutamicum ATCC 14067
gtgaccagcgaacaagctttagatcctatccacccaggtcagttccgtctttctcggattcagttgatcaactggggaaccttccacggaacggtggacattcctgtgaccagggaaggaatcttagttaccggtggttcgggatcaggaaaatccacgctgattgatgcgatcacggcggtattgcttccgcaaggaaagctgaggtttaactctgccgcacaagctaatactccgcggaataagggacgcagtttggttacctatatccgtggcgcttggcgtgcgcaggaggatccgctgcaggatcagattgtttctacctaccttcgccctcgtgctacttattcactggttggattgacttattccaacggtgaaggcgtcgagcacaccttggtggctattttctatctgaaatcgggacacaatttaacctccgatatctcttcatattatggtgtgtttcccgttgatcaagacatcaatgcgctgctggatttcttgaaagagggcatcgataaacgccagatcagagccgctttcaaggacgccacctttagtgagcagcattctgtattctccggcaggtttagaagccgtttggggatctccagtgaggaagctttgctgttgttgcaccgcgcgcagtcggcgaaagatcttcaaagcttggatgatctatttcgggattacatgctggtggaaccggatacgttcagcattgccaaaactgccgtggaacaattccaagaccttgaaggtgcttatgagcaggtcgaagatattaaacggcagatccacaccctggatcctttggtgcagctgaagaatcggcgagagaaagcgcaacagtccaaagatcatgccaatgcactgaagaaggcgctgccgaccgtcgggaatcgcattaagaaggaagagcaagaaacgctggttcgacaatttactgtcgagcaaacgcaggcgaagtcgaaggtggagtccgccaaaattgagacagatcgtgcccgcgaaatggaaaccctcgcgcacgacaacgtcaaacaaattgtgggggcgcagcatggaattttgagtgcgaagagggagggagccgtcgataagctaagaacaattagcgctgcgcgtgctggcctggacgcattggttaaggggctgggcggtacggcgccggaatcggcggaggagcttttggagctcaacaacgctgcgcggctgaccgtggatgagtatccggcggcgagggaagcgcttgaatctgcaggtcagaggaatgtagaggaccgaacccgtgcggttgatgagttcaaagcggcggatcaagagctgtcttctttgagtaaaggcagcagtaatattgagtaccgtttgctgcaggtgcgggaaaatttgtgtcaggatttgggcgtgagcccgcgggatatgccctttgccggtgagctgattgatccgaataatgcggaatgggaacccgttgtgcagcgcattttgggtggttttgctgcggaaatgttggttcctcatgggttgttgccacgggttcgggattgggtaaatgccaaacatttggcagcgctgctgaaattcaacggcgtggtgacaacgggggagtacaaaacctcgcgttttccggcggattccctgatccgaaaagttgatgttgtggagtcgccgtttcgagattgggtaaatcaagaattaggcaagcgttttaatattcggtgcgtgcgcactcctgaggaattgtcggcgctggggccacgcgatcagggcgtgactattttgggtgtgcgaaaattagcgcagcagacaggcgatccgacgacgcgttgggaaaaagatgatcgccgaaagctgggggatcggtccacataccgtttgggttccaccaatgatgccaaggtggaaacgcttcgggaaaccgtgaaagctggcaaagcagttgtgcaggcagctgataatcgcattgctgcaaaccgcgctgagctgcgggaacttgaacggcagtatcaggcttcgcaagaaatcttgaaggtgtcgtgggctcagattgatgtggaatcagccgacgcggcgattgctgagctggaccgattgctggaagagctgaacaacactccagaggccactgagctttccgcgcgccatgaggcagcaaagcagacgcttgcgagggtttctgacttgcttgtcgcagctcagagtgaggaaaccgtggcgtcgatgaacctgaaacgcgccgaaactgaattgaaacggctcgaaagcctgccggttacggaggtttctgaagaaatcgcgcgggaagtggagaaactatttcttgccaacacccgccgggttcacgccgccaacgtggatgagcagaccattgcgctgcgcgaggatctggacaaacaaatcgatgccaatgaggcagaacttcgacgttgtgaaaaccaaattgttggcattttgcgcagctatattgaaacgtggcctgcgaaccgcgctgacttacaagccgaacctgagtttgttggtgaggccatcaaccgcctcggcgagcttcgcagcgatcgtttggcagaattcacggctaaattcctagggctcatgaacgagatgtctacccgaaacctcggccaaatctcgcggcgtctacgtgatgcgcgccgggaaatcgaggagcgcatcgagccgatcaacgcctccttggcgcagtcggaattcaacgaaggtcgcttcctgcacatcgacatccgtgatcaaagtggtccgattgtgagggaattccagcagaaacttgatgccgctaccagcggtgacctgggaaccagtaccgagaaacaagccttcgcccgttatgcgctgatcgctgaaatcatttccaaactcgcctcccacgactccgctgacgcccgctggcgcaacaccgttctagacacccgccgccacgttcgcttcatcggcctcgagcgcgattccgacggcgcaaccgtcaacacttacgtcgactccgcttcactttcaggcggacaagcccagaagctggtgtttttctgcctcgccgctgccttgcgctaccagctagccgaacccggcgcccactatcccacctatgccaccgtcattctggacgaagccttcgaccgcgccgaccccgccttcacccgccaaaccatgaacgttttccacagcttcggcttccacatggtgctcgccaccccgctgaaactcatccaaaccctcggcgattatgtcggctccaccatcgtggtcagctacaccgaaaaaccaaacgcccagggcgcaatccagggcaattccagtttctctaggatcgagaaataa

SEQ ID NO: 42727 - DNA, 1107 bp, Corynebacterium glutamicum ATCC 14067
atgccattgcttatcgacgacgccctccaccgcagcaaaaaatacttccacgcgcacttaagcgagctgctcctcggcgaatttgcaggcctcagcctgcccctgcacccaccgacggcagctaaagccgccgccgatattgatgccacgagggaatttatccgccaatgggagggacgcgatgacgtggaatatgccgtgcgaaactggtctcctgtgggcttaggtaaaactgaagtacccgttaggctgacgttgaacacgattgaggaattagttgtgtttgcgcaggtagaggatgaatggtcttcacttcacgagaggttttcacagctgtctggttttacagcggaggtggtggcgaaacatgtgtcgctgtggcgttcgctgtctaacgaggatctctccaaggcggtgttagttgtggaatggtttttggagaaccccaactctggcctgctgaaacgcgcagtcgcggttgaaggcgtgcacactaaatggcttgaaaaccaccgcgtactcattgaaacgttagtggccgacaaacgtggtgaacctggtcgtgccgatcttggacttggtgacgccgaagctcgcgtccggctccgcttccattccgtagatgctcccgctgggctcacagacattgaagtaccgctttccaacctgtgcgaattacaagaaccgcaagtaattctgatggtggaaaacctcgattcatttctcgctttactcacttggccgggcgtaacaattgcttggggtgcgggctaccgtgcagtagacattgttcgaggaccctacttttctaatggtcggttgctgtactggggtgaccttgacctggacggtttcaaaattctcgacggcgtccgcagccacgttccccacaccgaatccgtgctgatgaaccctgaaaccgtctcccggtggcgataccttggcgttgccgaccgagaattcaaggcagaaagctttgacaaccttcacgattttgaatctgacgcacttgacctactcattacagacggtgagctccgcattgaacaagaacgcatccgcctcgatgttgctgttgaagaaatcgagaaagtaattcgtgggtga

SEQ ID NO: 42728 - DNA, 1389 bp, Clostridium citroniae WAL-17108
atgatacttatgaatgaaataccggaccggttttggagcttattccgctctataaaccggtctacttatattgaagcgctattaaagatcaatgaggaatatgagtacagcaactactttctcagcagggaaatgtgcatccagcttctcagcgaatatttttccagaaaaaagtatgtcctatggcaggacgagacggaagatgactgggatacccttgagcccccagccaccagggtcctgaactggcttttgagaaacggctggctgaggaaagtggatgattatgccaatatgaccgtgaatattgtcatccccgattatgcggctgttatgatcgaagcatttgcaaggcttgcaagggatgaggaagatgaaacggaaatttatatccagaatgtctatgccattctattttctctgaaaaatgatccccggtccagtataacccttctcaacaccgcgctggtcaatacaaagaagctgaataagtctctgcaggatatgctccataatatggacaaattcttcggcagccttttggagcagaaaaattatgagagcctgcttaaagagcatctggaccgctatgtggaagaaattgtaaacagaaaataccatatccttaagacttccgataacttttatctgtataaaacagatatcaaacgctggatcacagccatgcgccaggacgaggaatggatcgggcagatgtgcgcaaggcccgctggtttctttgtgcggaaaccctccaatgtaaccgaggcagacgtcatggaaaagctggatcagctggaacgcgggtttaacgacatagagcaccgcattgccaacatggacaaggaacacacccgctatgtgcgggccacggttaccaggctcaactatctcctgaatcaggaggataacatgaagggactggtggtgcagctgctgaaccatttatcggaatatgactgtccccaggaggatgtatcatccattggggccaggatgaacctgtcccaggtaagtattttatcggaacgatccctgtacaaaaagcgcaggacaaagacggattttaaagaacagttaaaggacgaggccctgtccagggagctgtccatggaggaggtcctgaacctgaacaaggtaaagaaccgctacagcagaaaagagatcgaaggctttattgaaacccatatggaaaacgggatcatggcagtggacaaggatactgtttccaatgacgaggagtttgaaaagctgatcctggcttacgattattccacccgcttaaaaagcgcctatgaggtggaggaccaggaaccggagatgatacacaacggcagatacacctacccgggctttgtatttgcaaggaggaaaaataatgccatttga

SEQ ID NO: 42729 - DNA, 798 bp, Clostridium citroniae WAL-17108
atgccatttgacataccctattatgacggcctgatgcaggaagaacaggcccaggtcacaggatccatacgccttttgctccaccagacatttatcctggagcgcaaatttgacaggcgcaccgggcgtttccagtataaccaggagttccgcgcctgcaacaagcatctggaatttatcaggaactattttgcggtcagcggggtcgaagttcaggagaacagtcagctgggccttatctatatccagggagaaaatctcatcggagataagctgcccaagctggccactctctatctgctggtgctgaagctgatctacgatgagcagatggagagcgtgtccaccagcgtcaatatctacactaccctgagggagatccacgaaaagctgggcagctaccgtctctttaaaaagcagccctcccccacggacatccgcaggacagtcacacttctcaaaaaatatcagatactggagccactggacctgctggaggacttaaacagcgacagccgcatgatcatctatccctgcatcaacgtggtgcttatgggggatgatgccagacagctgctggcatcctttgatgaacggcaggaggatgagggcgtacagggaaaagcggaccttccgcttgaggaacctgatgtgacggaagaaagcgaattggaagaaaatgaacttgaggaaaatgaacccgaagaaaatgaacccgaagaaaatggacccgaggaaaatggacccgaagaaaagaacatagaggagaaaggagcgtcagacaatggaattgactga

SEQ ID NO: 42730 - DNA, 3423 bp, Clostridium citroniae WAL-17108
atggaattgactgaaataaaccggacagcccaggaacattcccctgctccacaggaagggaccccaggaaaaagccgcttccttgccctttccaggatctgtctgaataactggcactatatcagcaggcgcaccctctcctttaatgaaaatatcaactttttcaccggccattcgggaagcggcaaatccacggtcattgacgccatgcagatccttctgtacgccaacacggacgggcgtgggttctttaataaagcggcggctgatgactcggaccgaagcctgatcgagtacctgagaggcatggtcaacattggggacaacaatgagttctcctatttgaggaaccagaacttcagctccaccattgtgctggagctgaagcgcagtgatacaggtgaatgccagtgcgtggggatcgtatttgacgtggagacagccaccaatgatatctcgcggcgttttttctggcataaaggccctgtttgggaaaatgaataccgcaccggaaaaaggaccatgtccattgcggaagtggagtcataccttcagtcccactacaacaaagaggagtgctttgcaacctcccataatgaacggtttcgcaggatcctttacgatacctatctgggcgggctggatcctgagaaatttcctcttctgttcaaacgcgccattccctttcgcatgaatatcaagctggaggattttgtgaaagaatatatctgcatggaaatggatatccacattgaggatatgcaggagagtgtgatgcagtacgggcgcatgaggaagaagatcgaggatacctgtgtggaaatacgggacctggaggagatccgccaggcctttgcgtcctatgaggaaaaggaaaaccagatcaagaaatgcacctattttgtgaaaaagctggagattctggacctccagacccaggtcagaactctggccgacaagctgaatcttgccaaaacagacctgctgcgccaggaggaggcaagggcgggcgtggaaacacagatcgctgacctgacggaacaaagcgatgacctgctgcgccggattgcatccaccgggtacgaggacctgaagcagcaggcggagagtctgaacgagctgctggagcgcctgggaaaaagtgaagccaggtggcagcagaccacacaggcgttaaaatgctgggaggaggaggatatcacctccaatcaaaccctttgggatattgaggaatttgaaaaccgcaccattgatgaacacactctttgccggttaaaggagtccattggctccatgtgcaccgacacggaaaagcagcgccaggaagcgtcctctgtgatccgggacctgaaaaacaaagaaaagcagactaaggatgagctggagaaactgcgctccggaagcaaggcatatcccaaatatctggaaaacgccagaaccttcctgcagcgccgtctgctggaggagacgggaaagggcgtggatgtccatgttctggccgaccttttggaggttaaaaatgcccagtggcgcaatgcggtggagggctatctgggcagccagaagctgagtcttgtggtggccccggggtatgccagggctgccctgaagatctacggggaactggacaaaaaagaatatcacagcgtggccgtgctggatacggaaaagatttcgggaagccagcacgcggtgctgcccaatgcgttgtcccgggaggtaacggtcagggagtcctacatacagccctacatggatctgctcctgggcaaggtcatcaagtgccagaccatagaggacctgcgtgagtgccgcatcggcattacgccggactgcatgctgtatcacagctaccggctgcagtatatcaatccggatcaatacagcaaatttgcctacattggcaaggacagcatgagacggcgcatccgccttctggagcaggaactggaatccctgggcgtccagagaaagccccatgaagaggtggtcagggaatgccagcgcatcctcaccctggagcagctatcactggagcctggagagtacatggagtggcttaaggatatcggttcctggaatgaaaaacagcgcgagaaaaagcggatccttcagaaactggagaaactgaaggttcagaacgtggaccagctggagcaggagagaaaggctgtggtcagcctgtgcgatggcaaaaagagggagcgggatgagctgctgaatatgataagggataaggaaaatgagatcagccgttatcagaatgcggccattgccctgaacgtgaccctgacggaccaggaacggggatgggagacaaaccacgatttcgagtcccagctggccggatacctctcgtccaaggaccaccccagatatgacagggaaagggagagttatgccgccagatgtgttaaacttacggagagcagggacacggccttccaaaacctgatgaccgtacggaccgattacctgaggcgctatcccaaccgaaacttcccggtcaacacaaaggacaaccaggcctatgaccacctgctaaagagcctgtcctgcgaccacctggacgagtacagaaaaaaggcggccgaacaggccagggcagcggtggagcattttaaaaatgactttatgtacaagatccgaagcgcgatccgtgaagccatgctgcgaaaggacgagctgaaccgtatcatcagccgcctggattttggaaaggataaataccagtttgtcattggacgcaacaggggggcggacggccggtactatgatatgttcatggacgagtccctggaggtaaacccctccgagctggcggattcctttgatcatcagatggacctgttcaccgcccagcacgagaaccggtacggggagcttatgggagaactcataagcatattcatccctccggaaaacgccaatccccagcagatggaggaagccaagcggaacatggacaaatatgccgattaccgcacttacctttcctttgacatgcagcagctgatccaaaacgaggatgaggtcatcaaaatacgcctgagccggatgatcaagaagaattcaggcggagagggccagaacccgttatatgtagctcttcttgccagctttgcccaggcctaccgcatcaatctctcccccaagatggaacgcaatcccaccatccgcctggtggtgctggatgaagcgttctccaaaatggatgcggagaaggtggccagctgtattgaactcatccgcggtctgggattccaggccatcataagcgccaccaatgacaaaatccagaactatgtggagaacgtggacaagacctttgtgtttgcaaatcccaacaaaaagtccatctccatccaggaatttgagagggagcgtttcccggagctgataaaagatttggaagaggaatag

SEQ ID NO: 42731 - DNA, 1419 bp, Clostridium sp. 7_3_54FAA
atgagactgatgaatgaaataccggaccggttttggagcttattccgctccgttaaccggcccgtctatatagaagcattactaaaaatcaatgaagaatacgaatacagcaattattttttaagcagggaggcgtgcatccggattctgggagagcattttgcccggaaaaaatacgttatctggcaggatgaactggaggacgagctggatacgctggaacctccggcaaccagggtgctgggatggcttttgcgggccggatggctcaggaaagtcgatgattacgcatccatgacggccaatatagtcatacccgactatgcggctgtcatgctggaagcgtttcgcagactccacagcgatgaggaagacgaaacccagatctatattcagaatatctatgcaattctgttttccctgaaaaatgacagaagagccgggctgagccttctcggcacggcgctggtcaacacgaaaaagctgaataagacgcttcaggacatgctgcacaatatggataaattttttgccggcctgctgcagcagaaaaactatgcaaatcttctgaaagatcacctggaaggttatgtggaagaaattgtcaggaagaagtaccatattttgaagacatccgataatttctatctctataaaaccgatattaagcactggatcggggagatgagggatgatgagcagtggctggaggctcttgtcagaaagagcgccgcagattcatacggcctgttatccgccggcaggacggcagaggaagaacagaaggccgccgagacgcggatgatggaggatatccttgaaaagctaagccagattgaacgcggttttgatgatattgaacacaggatttccaatatggacaaagagcattccaggtatgtccgcgccacggtgacgcggttgaattaccttctgaaccaggaggacaatacaaaggggctgattatcagactgctgaaccgcctggcggatgacggggagcaggagaacatgctcacggagacaggaaaacggatgaatctgtcccagatgaatatcctgtcggaggcatccctatacaagcgcagaaaggtaaaggccgatttctcaaagaatctggagccggacgaggaggataaggagctgaccacagaggaaattctcaacttgaaccgggtgaagaaccgttacagccgcagcgatatagagaattttatcacgcagagagccgtatcggggaaaatggaggcagatgcggacaccgtatcctgtgatgaggaatttgagaaactgatccttgcctatgactattccacgagacagaaaagccggtaccttgtggaggaggaagaggcggaaatgatagataacggcagataccgctatccgaagctggtatttgtaaggaggaacgaatga

SEQ ID NO: 42732 - DNA, 690 bp, Clostridium sp. 7_3_54FAA
atgacagatattccatattttgacggtctgatgggagaagaacagagggagattacagactcaatccgccttttgctccgtcagacctttattctcgagcggaaatatgacagacggaccggacggttccagtataaccgggaattccgtatctgcaataaacacctggagtttatacgcacttatttttccatcagcggcatatcggtttatgagaacagccagcttggtgtcatttatattcagggagagacgcttgtgggggataagctgcccaggcttgccaccctgtatcttctgatactgaagctgatttatgatgaacagatggaaagcgtatcaaccagcgtcaatgtgtatacgacgcttggcgagatgcatgaaaagctcggaagctaccggctttttaagaaacagccgtcgccgaccgatatcaggagagcggtgactcttctgaaaaaatatcaggtgatcgaaccgcttgagcttctggacgacctgaacgggaacagccgcctgatcgtttatccctgtatcaatgtggtgctgctgggggacgatgtcagggaactgctggaatcattcagggaggacgaggccctgcaggcagggacgccgcagcgggagattaattccgctttggaaccggagattgaggaggacgatgatgatacaacagacgaagactga

SEQ ID NO: 42733 - DNA, 3372 bp, Clostridium sp. 7_3_54FAA
atgatacaacagacgaagactgacagggagcgctttgtggcactttcccgcatctgcctgaataactggcattatatcagccggaagactctttccttcagcgaagaaatcaactttttcaccgggcactccggcagcggaaaatcgactgtgattgatgcgatgcagatagttctgtatgccaacacggacggaagaggctttttcaataaagcggccgcggatgattccgaccgcagcctgattgagtatctgagaggcatggtgaacataggggaaaataatgaatttgcctatctgagaaacagaaatttctctacgaccatcgttttggagctgaaacagacggacacggaggaatgccagtgtgtcggcattgtatttgacgtggagacggcttccaatgaaatctcgagaaagtttttctggcataaagggcctctgtgggagaacaactacaggacagaggggcgcgccatgaccatcgcggaggtggaggaggagctgctgcgttcctatggaaaagaagagtgtttttatacctcccataatgagcggttccgcaggcttctctacgatgtatatctgggcggccttgatcaggaaaaattccccctgctttttaagagggcgataccattcaggatgaatatcaaactggaggattttgtaaaagaatacatctgcatggagcaggatatccatattgaggatatgcaggaaagcgtgatgcagtacggcagaatgagacagaaaatagaagatacctgccgggaaatagaggaactcaaagagctggccgcacaataccgtgaggtacaggcccaggaggagcagattcgggcgaatacctatttcatgaataagatggaaataatgaatcttcgtcttcaggtgtccgagatatccgaccgtatcggacaggcggcctccgatctggataaacaggaagtattggaaaatcaggtggtgagtcaggctgcacagttgaaattaaggagcgacgagctgctccggcagattgcgtccaccggatacgatgagctgaaggataaactcctcaatctcaatgaactgctggaacatctttcaaaaagcgcggacaaatggcagaggacggcggaagggctgaaggcgtgggtcgatgaggatgtcacatccaaccagaccatctgggatatagaggaatttgaggcccgtaccatcggcagggaggcgcttatccggctgaaggcatccgtggaggagatgcgggaggatgtgggaagacagaaacaggaggccggttcaatcctccgtgagctgtcaaagcgggaaaaacaggcctgtgaggagcttagccagttaaaggccggaaacaaggcatatccgaaaaacctggagaatgcacgggcatatattaaacggcggcttctggaagagtgcaaaagatcggtggaggtccatgtcctgtccgaccttcttgatatcaggaacgatgagtggagaaatgccgtagaaggctatctggcgggcagcaagctgtctctggtcgttgcaccggcttatgcaaagacggcaatggagatttacggggagctggaccgcagggagtattggaatgtagctgtcctggatacggaaaaagcgtcaaaagccgctccgcctatatttgaaaatgccttgtcaaaggaggtggaggtgcgggaggattaccttcggcccttcattgatatgctgctggggaaggtgatcaagtgccgcggcatagaggaacttcggaaaaacaggacgggaattacgccggactgcatgctttaccgcaattaccgcctgcagtatatcaatccggatcattatacgaaatgggcttatatcggaaaggcgagcgtgaagaaaagaatccgcctgctggaagaagagatagaacagtgccgtgcacagaaaaaaccgcaggaggagcttcaaaaggaatgcatccggctcctggggcttgagaagctggaaagcagtgaggacacttatcttgaatggctcctcgatatcaggcaggtaaaggagaagaccagggagaaaaagcggctggaagataagcttctcaaactcaaggaacagaatatcgatgagtgggagaaagagcgggaggcggtcgaggccctgcgctttgccaaagaggaggagatccgcgagacaggcagacagatagaccgcagccgggatgaactcgagagatataaaaaagaggccgtatggcagcagggagagctttccgaccgggagcgcagcttcacaaaggtgcaggagctggaggaccggttagacgaatttctctccaaacgtgaaaatccgaggcttgacaaactgggggattatttcaaaggcagggcggcagcggcggcggaagcaagggaccgcgcgtttgaacagctgctcggccgccggcttgaatacctgaaacgttatccgaacaggagcttttcacccagcgcaaaggataatgcggcatacgacaagctgctcgatacgctgagctgcgataaccttgagcattacagggaagcggcggcagaacaggccaagacggcggtggagcattttaaagacgactttatgtataaaatccgcagcgccatccgcgaggcggttcagcgaaaggatgaactgaaccggattatcagcagcctgaatttcggaaaggacaaatatcagtttgtcatcggcagaaacaggggagccgacggccgtttttacgacatgtttatggatgaagcgctggaggtaaatccgtctaaactcagccagacctttgaaaaccagatgaatttctttacaatggagcatgagaaccagtatggtgagcagattaatgaactgattaatatcttcatcccgccggagaacgcttcggcggaggagatggaagaggcccgcaggaatatggataaatatgccgattaccgtacctatctctcctttgacatgcagcagattattaaaaatgacgatggaatcatgaagctgcagctgagcaaaatgataaaaaagaattcaggaggcgaggggcagaatcctctctatgtggcgcttttagccagctttgcccaggcgtaccggatcgggctgccgccaaaactgagacggagccctaccatccggcttgtggttttagacgaggccttctctaaaatggatgcggaaaaggtggcaagctgtatccaactgatccgggatctgggcttccaggccatcatcagcgctaccaatgataaaatccagaactacgtggagaatgtaaataaaacgtttgtctttgccaatccgaataaaaaggctatttccatccgtgagttcgagcgggaggagatgccgcagctgatgaaagggttggtttag

SEQ ID NO: 42734 - DNA, 1461 bp, Desulfobacter postgatei 2ac9
ttgaacttcactgggctgcaagcaaaatatcgtcgaatttttgatgacagcaaggcttggaaacttctccgggcggacaatgccccgatcatcctgtcctttcttgcctctatttttgccgaggaaagcgaagtgcctttcagtcgggccaggatcgaccttgatgcggaactgatccggcttggggagcttggcgtatgggaaaccgataccagtgccggggtctaccttaacctgtggatcaaagcgggctggcttcgggagatggacgacatgctctccaaaacagaggcggcagagatcgcgcttcgtttttgcaaaagcctggatgaaaaggccaatgtgactacggcctcgcacctgcggattgtccaggaggccgtccgggaactgctggtggctatcagtaccaaccccgaggagcgcctggtcctgctggaagaaaaaaaggcggcgatccagtacgaaattgaccagctgcacgcaggcgttatagttgaactgtctgcggcagagcaggcagagagaattcgtgagatttatcagctggcatcggtgctgcccggagactttcgccgtgtggaagatgaaatccggatgcttgaccagtcccttcgcgttcaaatcatagaggcggacaccacccgcggggatgtgctgcagtctgtcatggagcaggagaccgtgcttgagaatacagatgccggaagagcattcgaaggatttttccagctgctgtgcgagcagaaccggtccatggagttccgggaccagctgcgcacggtgttaaatcagcccgctgcagaccacctgaccccaccccagaaacattttctcacccagctcatgcgggagctgacccgggagagcgaccgggttttcaagatcaggcgacggaccgaagagggcttgagaaattacattgaaagcggctgggccagggagaacctggctgtggaccggctgctttccaggctggaaaggacggctgtggcgttacgggaacggtcgttgaatccaagatgccttacccgcctgtccctgcctgtggggccggtgcagattaactctcctgaaaaaatgcgtttaaggaccccggatgagaaattagatacatccggtatccgggaaaaaaagaattccgacaagccaagctttgaaatgctcaatattttagacacggttcggattcgccatgtggccgaaaaggcacggtccgcgctcgcccggcacggccccatgaccatcggggagatagccgccattcatccgctgacagccggacttgaagagcttgtggccttcctgcgagtggcaaaggccgtaggcgccgcgtccatggacagacaggaaaaaattgagctgcgcgataaacagggccatttcatgcgggcatcaattccatgctttctgctcagtgcggaactgttcccggaaaatcctgataatctgaacatttaa

SEQ ID NO: 42735 - DNA, 867 bp, Desulfobacter postgatei 2ac9
atgatcggcaaaggaaccatgaaaaaatccaatcccaatgaactgattcgggaaacgcctgaaccccaaagttttttagaccggatgagacttgaaaatactgcgccggatgacagcccggattcaatcccgccaccaggcgaaatgggcggcaacttttcttcagatgcagcacaagatcctgctgccgatgaaaacggccggcaaacccacgcggccatgccggccgaagcccggcgggcccttgtctttttgttgcgccagggtgtcattctctctgcccggaaggcaaagctgtttgaagcggtctgccggtatgaaacccgaatacggcagcacctgtcagatgtctatctcacccttgtgcttgatgaaaaatcgggcgtggcctttattgcaggcatgcagagtgagcattgccagttggccggggatgctgttgaagcaagggaagatgacgtgaatgaggacgaacagtactcccttatttcccgaagggtgctgccgctttatgacacgcttcttctgcttgtgcttcgcaaatactatcaaagccgggagctgtgcggtgagcagaagatcattgtggatattgaaaaaattgaatcagatctgacgcccttcctgccgttgaccaacagtgcccggacagaccggcgcaagttgaacggcgcgctgcagaaaatggtgagcagccggattttaagcacggtcagaggaagccttgaacgatttgaaatcacgcccatcatccgctatgtggtcagtgctgaattccttgaatccatgcttaaggagtatgaacggctggccctggaggcagaaccatccacagcagcccctgacccgggcattgaacaaccataa

SEQ ID NO: 42736 - DNA, 3453 bp, Desulfobacter postgatei 2ac9
atgcatcatgggccggacagtgacacaggcctcctgtttcaggtaaaaccgcgccagaccgttgaagcgcccctgttccgggcgggtcagatccggcttgccgaactttccgtattcaactggggtgcgttcaatgaacttcacaccgtgcggattgatcctttgggcacgctgatcacaggggataacggctcgggtaagaccacgctcattgacgggctcatggccctgctgcttccggcgggccggactgcattcaatgtggccgccgcccagggtgacaagaccgaccgttccctgctctcatacatgaggggcagttacgggtctgcccatgacggctccgggacccgggtgaaaagcatgcgggaaactgccgtggtcagcgggctgcgggcgctgtacaggtccgatgacggggtcatggtgaccctggccgccctgttctggaccacccagtccaccaatgccctttccgatgtcaaacgcatgtatgtggtgtgccgacgcaatatgaccttaaaggagatactggacaatttcggccagggcggagcccgaaccctgaaacagtggctgaagagcgacccggatgcgatctgctgtgatgacaatttttcagagtaccagagccattaccagaaactgctctccatggacaataaaaatgccccggcgcttctttccagggcacttggcctgaaaaaaattgatgatctgacccggctgatccgggagctggtgcttgagccaagttatgtaaagaccgatgcccgcaaggtagtggaggaattcggcgacctggtggccatccacgaccggctctccgatgccagggcccaggcatcgcttctggaaccattgccggaactggacaaaacgattaaagatgcttgtgtgacctttgagcatctgacagaagaaaaacagggtcttccggtctatttaggacatatttttctccggctttggcagcagaagctccttgaaatcaaggagctgctccataccctttcactgcagataacgcgtgtggaggaccagaaaaaagaggcggcaacccgggcggagcgctggcgtgaaaagtatctgcagctgggcggggacaagattgaaaacatcaaaaccgagctgaaacatgcccgggcagatcttgaccgggtggtgcaggccgctgctcgttaccagggtgatgccggaaagctgggcctttcccggaccctggaggagaaacagttcattgagaaccagtccaaagccgaatccgccatggcacagattaaaacccgaaccgacgaagccatggaccagttgggaactatcagcggaaaacgtgaccgctaccgggaggaacacctgcttcttgctgaagagatccgggaaatggagactaggcccgactccaacatttctgtaaaatttcagcagatgcgcgatgaactggcaaaatcccttgatatggacagacaagagctgatgttcatcggggaactgatcgacatcaaagatgaggagcgcggctggcagggggcggttgaacgggcactggggggcttgagaacgaccctggccgttccccgtgacatctcctccatggtcacccggtggctgaatacccgccataccgggcttcatgtgcgtgttcaggtgcttgagccccaggagaccgggacaacacagaaagctgccgcattcaaatccgacgggtatctgaagaaactggtctggagaacccacccgtaccgggagtggctgaaaaaacatctggaaaaatttgacttaagctgtgtgtctgatacggcggctcttgatcagacgcctttttccatgacccggcaggggcttgttcacctgaatccgggccggtttgaaaaaaaggatcaatataaaatcgatgaccggcgccagtggtgcatggggttttccaacaaagcccggcttgctgttttaaaatcagataaacagacactttttctggaacttaaccggatggacaaagaactggaacggattaaaaatgatatggaacaggtccaggcggaaaaaaatctgtgggagaagctgaagaattttggctggcacgacattgatgccccgtcccggcggttgaaatgccagggactggaacaggagcttgaagacctgacccgggcgggtagcgatttaaaacaggccgaagcccggcaccaggaggcccaaatacaagttgaacagtttcagggtgaactggacaccctccacggagaaaaaggcggtatacaaaaggagcttgaaaccgcccagaattcccatgacacctgccgggacgctgcagaacagcccctggccgattctgtaaaagagcgtctggcaggtcgggtgggggctgtgaccatggatgacctgaaacgcaaatccgccatccgccagcaaaatgaaggcaagctggaaaacgagctggagcgccagagaaataaaaaggggaatgcagaaaaaaaggctatcggcatcatgtctgcattcaggaccaatgaaaagtggcaggccctcaccgttgactggggcagcgacattaaaagcctgcccgattatctggagcatctgagccagcttgaaaaggagggattgccccatctggtggatcagtttgtcctgcggctgaacaaacacgccacccagtccctggccaatatcagtgccaagctggcatctgagcgggacgagatccttgaacggattgaaaccatcaacgaggtactcaggcggacggaattcatggccggctcctatctcaggctcggggcggccagggagagatacccccatgtgattgattttgaaaaccagctcagacaggtgttgagccaggtcacccgcaatgaccatgaagtcaggtatcttaaacttgcccaggtggttgagattctggacaaggccagtgcgccgggaacctcgggcaacctggagagccagcggcttcttgatccccgctaccagatgtccttttatgccgaggagattgatgcggcaaccagggaggtgcgtgatgttttgcgctcctccagcggtaaatccggcggagaaaaagagtcctttgccggcaccattgtggcagccagtctggcctatgtattaacaccagatgggcaggatcggcccgtgtactgcacggtttttcttgacgaggcattttccaatacggccgaagctgttagccggcgggtgctgcgggtgttccgggagctggatgtgcatatcaacctgatcaccccgtataaaaatttaaatctggcccgggagtcagcccgctctcttattatcgtggaaaaagacccggaacaccatgacagcaggttctgcgaggtcacctgggaggagatcgaccggatgaatgaagaaagggcacagcaactggcagccgaggccgaggcactgggcattgagattgagcctttgggcggggagataccatga

SEQ ID NO: 42737 - DNA, 1203 bp, Desulfobacter postgatei 2ac9
atgacgcccggatgggggatgctgccggatcatgcggtgcagctgatcaaaaagcgggaatgggatcactgggcacatcttaaagcacggctctccggtgaaaaaaaattccccatccggctgggactgaaaccgccggacggcaaaaaggctgtggcggatatggcccattacctggcctttgtaaatgcctggaaggcctttccctttcaggagatggttcagtgggaaccccgcaatttccagacgcttccaggccaaaccattcccgcggcgcttgttatctcctccatccaggatctggccgaacttatggggaaaaagggggaggcccgtgtcgggctgtgggaaaacaacatgaggcccatcctggaggtcggctcagcactttctccgccaaaccctctgtatcctgtactggtccgccgccttgatctcattgagaaactctcttgtgccgatacccgtatgctggctgatctgcttccccaactcacccccggcatggggaaaggcttttatctgcgcgcactcccggtcaccggggtggacaccaagtttatcgaaactcataaactgattattgaagagctgcttgatgtactccatggcggggcagtcaccgcgaccggcgggcttctgccctggttggactgcatgccccggcctgcggggtggcttatgattcgccctctggacaagtccacccgaaatgccctgggcggcctgtccattctgaaattgccgtatatgacgcttttgacctatgaactgccggcagaacatatccttgtggtggaaaacattgagcccggacttgccctgcggcccatggaagataccattgccgtcatcggcggcggcaaaaatgtggcctggatggatgcggtctggctgaaagaaaagcatgtgggatactggggggacattgacacctgggggctctgctttttaagcgatgccagaagcaaagtgaaacatttatccgccctgatgatggataaagagaccctgctggcccacgaatcgcggatgagtttagagcgccagccggcgccctctttgcctcaatatttaaccgaagatgagattgcgctgttccaggatctgaactccggaacgtttcagtcaaaccgtctggagcaggaacgcatctgtgcggattatatccgcagtgcattgactcgctggcacatttcttaa

SEQ ID NO: 42738 - DNA, 1431 bp, Desulfotomaculum gibsoniae DSM 7213
atgcaaatgtatggtaaagaattttttacacaggttccggacaattttttttcaatatttagccgtaaccttaaagaaatttatgtggatttaatctttttgatctaccaggagtataacaaaagaatttataccctgtcacgggatcatgtcgtcgatttgttttctgaatatttggagggcctgggagaacaggcctggcaggttgaagaaggggaagcagcgggggaaacggccaaaagcgcccgcgagcaggccctgcaatatttgcgcaggctggtggatacgggctggctgaacctggagcccgagcccgattatactttcagaatatccattcctgattacaccattgtgatgctggaggcgatgaataaaatccgtacgggttaccgggtggagtttaagggcaggatactcagcatctaccagaacctcagcggcagtgaaggattttcttatgtggccctgcagcaggcctacgaatccacgcaggaactgattgacggccttaaaagtttaaaccacagcattaaaaactataccgagaagctgctggaagcgaaggacgtgcgggctatcctgagccaaatttttgatgtgtaccaaaccaagatccttggcgagcagtactacaggcttaaaacttcggaacatatttccaaataccgcgtcggtattttaaagcgtaccagggaatggcggtccaaccggaacgagctggtcaggcaggccggtattatggtgcgggaaaaacgggtgccggatgcggcaactgccgaaaacctgatatatgaatggattgaatacatagatgcttctttgggccaggaaatggacaggctgttaagtgaaattgaccggcgcaatgccaggtatgccaggtcggcggccgaccggctgaggtttaagctgcaccaggggcgcggagccggccggcatatttacacggtgctggcttacctgggacagttggccaaagaatcgggtgaaaaaacactggctcccggggaaataacccgttccattgctctttttccccaggtggcggtggacaaccagagcttgcgcaagccccccgtggcgcggcagacccataaaccccagccgctccaggctgcctccgtatccgatgaggtgcgccaaaagcagctgctgcaatttggttcaagggtggcggaggagatcacggtgggacagttaaataattacgtggatagtattctgggcgaaagagatatctgccccattgagcaggtacctctcaacagccgcagccagtgggtgaagctaatctatattattctgttcagccagtcacccgtggcaagctaccgcctggaaggggaaaggagcgaaaccatcgccatcagggatggggcaattgaggtgcccaacctggtgataaaaaggaaggggagcaaacgttga

SEQ ID NO: 42739 - DNA, 624 bp, Desulfotomaculum gibsoniae DSM 7213
ttgagctggtaccaggagttcgaggatttttccaataaggataaagagactttcagtaaagcagctaatttgctgctcagccagaactttctggtatatgaccgggaagaggacaggctttgttaccggtttgtagagcgttatctggatatcttcagcgaatattttgcttactccggctgggacctgcatcatagcaaacggttctccgtactgcagctgcacaatcgctatggcaggaacaggtaccgttttaccctgcaggaaacaatagttttatttatactcaggctgctttatgatgaaaagcagcaagctttgcggctgacccaggagatattgatatcgggtgaagatatccagggtaaatacatggctctggagatcaaaaaccgtttgccgtccagggacgacctggaaaaggccttgaggcttttcagcagtttttccattttggacttaaagcgcgggcagtggaaggaccctgacgctgtctatttattatatccgaccattctattagttgttgacgtgcccagcctggaaaggctggcggactggataaatgcaggcgaagcaaagggggacaaagaggatgctactgaccgggatcaagctgattaa

SEQ ID NO: 42740 - DNA, 3342 bp, Desulfotomaculum gibsoniae DSM 7213
atgctactgaccgggatcaagctgattaactggcattactttactaacgaacacattccaattgcgggcagcgccttgatcaccggcaacaacaaagcgggcaagtccacgctgattgacgccctgcaggttgttcttgtctccaatatgcgcaagattatgttcaatgccgctgcctttgacgaaaaaaccgccagggacctgaagggttatttgcgtggcaggaccggcacagaaggcaggtacacctacttaagaggaaacgatgaggatttctccagctatatagtgcttgaatttacccgttcttccagcaatgaagcttgcttaatcggcgcggtgtttgactactactgcgacaccggagaagaagatcacgtatttttcaaaattgaaaattgcaggctgcgggagcatctgtttttacaggacggttacccccggaaccgggagcagtttgtccgctacatgaagtccagggggcttaattttcgccagtaccgcaatgacctggaaggctacagaaacgatttgcgccagctgtttggcgggatcaaggagtcttttttttcgctttttgttaaaggtatttcctttaaacccattactaacctgaggacgtttatttacagctacattttggatgagcggcccgtggatgtggataccatgcgggattacgccgaaagataccgccagatggaaacccagctgttaaacaccggcgctgaaattatggctctggaggaagaatgccaggcgtatgagaaagctgagcatttgaggcggcgggaagcagcgggccgctatatgctgcacaggggagactatgagcaaaaagtgcaggagctggacgaggcacagcagcagtgccaaaaatcggaggaacggctgcaatggctgctgactgaactaggcacactggaggccggttataaaaagttaaccgctgaaaaagaacagttaatcgaaaaaataaacggcatagcgattgtgcggcaggaaaacaaattaaagcagcaaatcgcggctttaatggaacaaatcgccaggttggaacaaaaacagctcaacctgctgcagcaggtcaaggcagacctgcgggacagggaaaagctggttgatattttaagcctgctgcaggcccccggccaattaacggaagcgcttaaagaagacgaacgtgcctggaagatgttcctggaggcggggttcttcccgtccgacccggataaacatacccgttcctggaatgaaagcatgaaatggctgatcgtacaggcagcggaactcaaaaaacagtgggaaaccgtgcaaaagcaggctcaggaactggctgaggttattagaaacctgggaaaaaaccgggtactaaacaatgcttcggccaccatgaaattaaaaaaaatgctggaggaacagcttaccccccgggaaggccagagccgggtgccggtggatattctttgtgaagccatcgacatacgtgaccgccgctggcataatgccatcgagggctatctttccacccagaaatttgatcttttggtgccgcccggctattttgaccgggcactgagcatttacgaacgctataaatttacccacggcatggaaaacgtgggtttggtcaataccgacaagctggtcaaggaggttaaaccaccgctcgcgggaagcctggccgaggaaatatcagccgataaagagcacatccgcgcttacgccaactggcttttaggcggtttgataaaatgttcgtcagagacggagttaaaacgacacaagcgggctattaccgctacctgcatggtgtatcagaattacaccgcccgccaaattccccgcaaacggtatgaggtgccctatataggagcgcaggcggtaaaactgcagctggccgtaaaacaggaggaattaaggaaatgccggcaagagttaaccctgctgaacgaaaaaatcaaaaaaagtgacagcgttttaagcttgaacagcgataagcattatctttaccagcagtggttaacgaatttcgagcagtgcaaaaatttagaccagctggaatgggaactggtacaaacaaaacaagaattgctgcacctggaccgttcggaactggaactactggaaaaggccaaagaaggtaaagagctggaattacagcagtgtgaaaaagaaatagccggtttaaacacagaaaaaggccaggtacaggccaaactggaattgcttgaacagcagctgcggcagcttgccggtgaaaaagatgccgcctaccgaaaatatcttgcttacctggatacacttgcagatgaattaaaggaaacctgcgaggccaaatgggagcgggaaagccagcagcgctcgcctgcggaactggcgcacaattattatatcagtattcaggggctggaaaccaaaattaaaaataatatggaccaggtagtcaacaccaggcatgattttaataagagatttgattttttagctgatgttaccgccgccgataacgaaaaatatgccgaaaggctgcattttttaaaggatattcacctgcctgaatacagcaaaaaagccggtgaggcccggcaaaaggcggagcaggctttaaaagagcacttcctgtcccgcttgcatgaggccatcaagctggcctatgaagaaatagacgaactgaattttgcgctgcaggatttaaaattcggcagttattcctaccggttcagcctgtcccccaagcccgaactgcgggagttttacgaaatgatcgagggataccagctgagctcaaccgagctactttttagcacggtgttccaggagctgtatggtgatagttttaaccggctgtttgaagagatcacctccgacagccggcaggataaattgcaggagcttaccgattaccgttcttatcttgattttgacatcatcattaccgatgaccggggcaacaaaacctatttctccaaggtgtcccggaccgaatcgggaggcggggcccagattcccttttatgtggccattttggcttccttctaccaggtttaccacctttaccgcaataaagaagataccctgcgcctggtggtttttgacgaagccttcaaccggatggatgccgacaatgttgaggaatgcatgcgctttatccgtaaattgggttttcaagtccttatcgtcgagccaaccggtaaaatccagctggtggtgccctttgtcaataccaatataattgtgatgcgggaaggcttcaacagtttcgtggagtgcgtaacctgcagggagatcgagcagtgggttgaacatgaacagcagcagtcaatggcagccagcagctag

SEQ ID NO: 42741 - DNA, 627 bp, Desulfotomaculum gibsoniae DSM 7213
atggaatggttaaaggaatatgaggtaatggcggaaaaggagaagcatttttttaaggaatgtactaataccttgctagcccagacatacctggtagctaaaaggaagaaggatttaccgttataccggttctgtgaacggcggttcgatcttattaagaattatttattgttatctggctggcagctcaatcatttaaaggcccagggtgtcatatctgtgcataatcaacttgataataaccggcacaagtttgtattatcggacactctttttctatttattattagacttttatatgatgaaaaagtaaaggaattaaatcttacccagcaagttataattaataaccgtgacatttatgaaaagtatgtagccttaaatattaaacagagacttccggctcaagatgagtatacgcggacactgaagttgtttcaaaatcattcattagttgaattagtgtctggtggctggactgattatgatgctacgattgttctttatccttcattaattgtagcggtttcgaaccgggcacttgataagataacagaatggttacaggccaaagctgatgatgggggtgatgggtatgaggattttgaacaaactgaagatgattga

SEQ ID NO: 42742 - DNA, 3345 bp, Desulfotomaculum gibsoniae DSM 7213
atgaggattttgaacaaactgaagatgattgattggcattattttcaggatgagactattaactttgaaacgagtacgttaattacaggtgataatggagccggaaagtcaactattattgatgctctacaggtattatttgttgcaaaccttaaacaaataaagttcaattcctctgcacatgaccagaatacaaagcgaacaatcaaaacatatttgaggggcaaaacaggaacggaaggctcacaagaatatttaagaaatacagatgacttttcgtcttatttggtgttagaaataatgcattcagtgaccggtaaatcatatcttattggtgtggtttttgatgttagcgttctaaataatgatgaggagcatactttcttcaaaatagatgaagaggcattacgtgataatttattctatgttgaggaaggacttgcccgtaacagagaacaattttttcaatacctaaagcaacaggggataaagtataagcaatacaaaaataacattggagaatatttaagcgatttgcgccaattgtgtggtggtgtcagagactcgttttcttcaataatccaaaagggcatttcttttacgccaattacaaatttacggaaatttgtttatgattatattttggacgaagagcccgttgatgttgaaaccatgcaggattactttgaaaagtttaaagaactggaatccatcattattgaaacagaaaaagaaataagagctcttgaagaaattgaagctcagtatgtagaaatcgctaaaacggatcgaaatattaccattggctattatatgattaaacgttcggcttggaaacaacaggagattaaatttaactcattgcaagagaaggtagaaaaagagaaagtagctttgggccaacatgaagcaaagaaaaaaatattaaaagatgagtttaataagttaaatacagctattgactctttaacgactagaattgcaaagcacgatataacgatcaaagagcaggatttaaagaaaaaaatagagcaattaaataaagatttagaagatattaaagataaaagaaagaatcttctttttaatatatccgtggagacaaaggaacgctcagagctcctcagtaaacttcaagagaatggtgcgccttacgaaattattaaggtcgtcctggatggttccacggtttggcattatttaacggaaacaggagaactagagcattttcctaaaaattattcacttcataatcaacaatggaaagcaggatttaattggttacaagaccaacaaaggcaatggcagaaacaaaaaaaagagtactatgaagcgaagtatgatgttgaaaagaaaatcaaggaattaaaaaggaaccaaatattaacaagcgatcatccatctatgaaactgaaacagctcttaaaggaaaatcttgttgcagcgaatggggctgaagtgccggtacatattttatgtgaagtgatagatgtgaaaaatgaaacatggaagaatgcagtggaaggctatttgcacacgcaaaagtttgatttgttagtgccaactggatattttgatgacgcactgtcttgttacgagagatataagtttacacatcagattgaaagggttggattggtcaacaccgataaaattatagaagagcaaaggaggccgcttttcagaagcttagccgaagaggtgacaactaatattgattatgtacaagcatatgtcaatcggctgttaggtgcattaatcaagtgtgagtctgaacgggagctaaaaaaatataaacgtagtattacagcaacgtgtatggtctatcaaaatcatacagcaaggcaaattgccagagaaagatatgaagttccatacattggtaaagaagccatacaggtgcagttgcaacaaaaaatcaaagagctaaagaatatagaagaggatatatcgaaaatttcagaaaagataaacagtgttgataggattttaaaaacggtaccggataaacgtgatcgctatgctagctggtttaaaatgtggtcagatatttcaaagcaaggtcagattgaagaagagttattaaataaaaagcaggaattattgcatttagataaaacagaagttgaaaaattggaagaagaaaaaggccaacttattgaagagagagatgagaatctcgccacaaaaattgaagaaaatagcagctcgatcactagttgtaggataaatattaaggattggttagaggaaagtgatgttgttcaagaagcagtaaatgaaaagaagagggattatcacacgtatctggagcaattgtcggatgaactcattaagatatgtgatgaaaagtggttaaatgagattcggagaaaaaatgagcagacaatttttaaaaactacgatgagagtacacagggcttaaatactaagagagcaaaactatttacgccatttgtccgactgcgaactgaattcaatgggcattttggctttggtggagatccaacaagtgatagtaatgaagagtatcagaaacgattgtccttccttagagaatccagcttaattgagtataagggcaaagcggaggaagcacgtaaaaaggctcaggagacgtttcaggagcacttcatcgcaaagctaaaagaaaatatcgaacgcgcacaggcaaattttaaaaggcttgatcaagctatgaaagatatgcagttcgggacagactgctatagatttaggttgcatggtaaatatgatatgctccattattatcggatgataactgatcctgatttatatttgggacattccttatttagtcatgtttttaaggaaaagcatggtgaggtagttgaggacctcttcttaaaaattgcagaggaacaagatcaattttctgagtcattaaacttctacaccgattataggagttacctggattttgaattagaaataattgatgaaaagggacgtgaaactaaattttcaaaagttgccctggagaaatccggcggagaaacccaagttccgttttatgtcgctatcttggcatctttttatcatacgtatcaaatgtatcgaacaaccgatacattgaggttggttatttttgatgaggcgtttaatcgaatggacgctgaccgtgttgaggaatccattaggtttattttaaaaatggggtttcaggcaatcatagtagcaccaactggtaagattcaattattggcacctcatctgccaaatacccttatcgtcatgaaggataattttgttagttatgttgaacgtttttcacgaaatgacgttattaactggattgaggaggagggaatggggagtggttag

SEQ ID NO: 42743 - DNA, 1260 bp, Desulfotomaculum gibsoniae DSM 7213
gtggttagcccgttacaagcaaatatattagatacgcttgttagcaaatatgaaacacgtaaggattacggcaggtctgaaaaaaatgggagaagaacaatgctgcatgttaataagaaaaacttcccagattattttcatgttagtgacagcagtttcaaacgagagtttaatcttgatgcagaagcattagcagatcagtgtttcataaaaattgcatgggaaagatttagcgaaaaagaagtgatagagaagctgatattattagaggaaaaccttcttcaaatatatgaactgttaggaaggacacccaaacaggtaaagtatgagcgtattgataaaatcgtagaggattttattgtaacagcaccaaaactcctgttatcattttacagtgatttaaaatctcggtttaaggagtttgcagagcttccttcaattataaatattgattctgaaattgaaactaaagatgcactttacgggttgcatgagttaataaaaaacaaagaagaaattccgaggagaaattggagtataaagttataccaggattcaaaaaaatgggagaagttacagggtaaaattataaaagttgttcgggattatcttttaaccgatgaaagtgattttttagaagacaatcaattgttgggggagtatggtattttaaataatcctcaacttattctcatgtccggaaatatcattatgaataaaaatgggaaaactatagacttttctctattcaaaccagactttggggttaatccaagattcttcgacgactgtgatattgagataatagaggcagatgcgataattacagttgaaaatttaacttcctattatgactacttataccataaagctaaacatcaagttaatcaaattgtgttatatcttggaggttaccataattatggccggcgtctgatattaaataaattgaatgattttttaaaaagaaatcattattcagtaccattttatcattggggtgatatagatttacatggatttcatatttggaagcatttaaggaataagacgggaattgactttagaccattatttatggatgaatcaacttatataaaccatttgagtgatggcaagccaattaaagaaacggacctttcgcaaattaaaaaactgttggaacaagaagagtataatatttttcatgacgttattcaccaaatgttaaaacacaaacgaacgatagagcaggaggctatctatctagtaaaaaattag

SEQ ID NO: 42744 - DNA, 1473 bp, Pseudoxanthomonas spadix BD-a59
gtggaccacgccaccctctccaccctgcgcgaccgccaccccgcctggcggctgctggcttctccgcacgcaccgctggtggcgagcttcctgcaccgggtgttcgtggtgccgaacgtgcgggtgatgaacgaggccgatcttgcggaagctctcgaggacgagctgtttgccctgcgcgagcagctggggccggaggcttaccccaagggcgcgctggactacctgaacgactgggccgcgcccgacaagggctggctgcgcaagttctacaagccgggcacggaccaggcgcagttcgacctgacgccgcccaccgagaaggccatcgcctggctgctgtcgctgaccgagcggccgttcgtgggcaccgagtcgcgcctgctgacgctgttcgcactgctggagcagatcagcgccggcaccgaggccgacccgatcaagcgggtggccgacctgcgcagcaagcgcgatgaactggacgccgagatcgcccgcgtgctggccggcgatgtgccgctgctggacgacacggcggtcaaggaccgcttccagcagttccagcaactggcgcgcgagctgctggccgacttccgcgaggtggagcacaacttccgcctgctcgaccgcaaggtgcgcgagaagatcgcactgtgggaaggcgccaagggcgcgctgctcgaccagatcatgggcgagcgcgatgccatcggcgattccgaccagggccgcagcttccgcggattctgggacttcctgatgtccagccggcggcaggaggaactctccgagcggctggaccaggtgctggcactgccggccgtggcggcgctcaagccagggccgcgcactcgccgcgtgcaccacgactggctggaggccggcgaacacacccagcgcacggtggcccagctgtcgcagcagttgcgccgattcctggacgaccgggcctttctggagaaccgccgcatcctggacctgctgcacggcatcgagagcaaggcgctggccttgcgcgaggccacgccgtccgggacggtgatgcaggtcgacgcgatggcggcgggcatcgaactgccgctggagcggcccttgttcacgccgagcgtcaagccacgcctggccgatctggcgctggtggccggtgaggacgacatcgacaccgcgcgcctgttcgaccagatcgtggtggacaaggcgcgcctgcgctcggcggtgcaacgcgcactgcgccgccagccgcagatcacgctgcgcgagctgctcgatgccgagcccctgcagcagggcctggccgaactggtggcctacctggagctggcccacgccgacgccggcagcgatgtgctggacggcctgcgcgccctggtcgacgaagcagtgatcgagccgatacgctggcaggccagcaacccagcgggccaggccgtgacgcgccaggcgcgcttgccccgcgtgatcttcacgcgctga

SEQ ID NO: 42745 - DNA, 705 bp, Pseudoxanthomonas spadix BD-a59
atgaacgacgtgctgcatgacaacgattcggtggagaccccgcccggcgcactgccggccgtgcccgagctgtcgcagctgatggtgcacctgctcaagggcgtgctctaccgcgatgacgacgagcgtctgtgggccagcctgctgcgcctgcaggcgcgggtgcgggagcaggccggcgtgctgctgctggatctggtgctggacgaggccgagggccatgccttcctgaagagccgcccagacccggacgcgtcggagggagcaccgcgcctgccaaggctcgtcgcacgccggccgctgtcctacccggtcagcctgatgctggcgctgctgcgcaagcgcatggccgagttcgacgccggcggtggcgacacccggctggtgctctcgcgcgatgagattgccgagctgatgcgggtgtttctgcccgatggcacgaacgaggcccggctgatcgaccaggtggacgcgaccatcaccagggtggtcgatctgggctttctgcgccggctcaagcctgctggcggcagtgggcaggaccgaggccactacgaggtgcggcgcatcctgaaagcctttgtcgacgcgcagtggctggccgagttcgacgcgcggttggaggtctaccgcacggcgctgtccgccgggcctgccgaagcgaccgacaaggccgtggccggcaaggcagtggccgatgcttga

SEQ ID NO: 42746 - DNA, 3402 bp, Pseudoxanthomonas spadix BD-a59
atgcttgaggcagcgacgctcggcctggacttcgtggccgacgacagccgggtgggctttcggctgcagcggctggaagtgctgaactggggcaccttcgacaggcgtgtctggcgctacgaactggacgggcgcaacggcctgctcaccggcgacatcggctcgggcaagtccacgctggtcgatgccctcaccaccttgctggtgccggcgcaccgggtggcctacaacaaggcggccggggcggattcccgcgagcgctccttgcgttcctatgtgctgggccactacaagagcgagcgcaacgaggtcacgggcagcgcccggcccgtggcgctgcgcgatgcgtcgagctactcggtcatccttggcgtgttccgcaacgagggctacgaccaggccgtgacgctggcccaggtgttctggctgaaggacccgcagggtgtgcctgcacgcctgttcgtggcggcggagcgggcgttgaccatcaccgatgacttcacggtcaacggcggcgacatcaccgcgttgcgcaagaagctgcgcggcgccggctgcgagctgttcgacagcttcccgccctatggagcgtggtttcgtcgccgcttcgggatcgagcacgagcaggccctggagctgttccaccagaccgtctcgatgaagtcggtgggcaacctcaccgatttcgtgcgcagtcacatgctcgagcccttggactccgggcaacgcatcgaggcgttgatcggccacttcgatgacctggaccgggcgcatcaggccgtgctcaaggccaagcggcaggtgggcttgctgacaccgctggtcgaagacggtgggcgccaccaggcgctggtgaccgagatccagggctggcgggatgcgcgcgatcagcttcggccctacttcgcccggctcaagggtgagctgctggaccgccgcctcgacttgctggcgcacgatgcggcccggctcgatgcgcagatcgagcgcctggacgcgcagcgcgagaccgagcggattgaagttggcgctctggagcgggcgctgcgcgacaacggcggcgaccgcctggaggagctggcggcggaaatacgccgcctggaacaggacaaggcacaacgccagaacaagtccgaccgcttccaggagctgctggcccgcatcgacgaggtggcaccggccgatgaagcaggcttcctcgcccgccagcagagcattgcccagcgcgccgagggcttgcgcgaacgcattgccgagctggacaaccaagagcgcgaggaggacttcgctttccgcaagggccgcgaagcgcacactgccctgtccgaggagatcgaaagtctgcagcggcgcaagagcaacatcgacgccgcccaggtccgcatccgcgatgcgctgtgtgcggccctggcgatcgcagaggaccagctgcccttcgcgggcgagctcatccaggtgcgtgaggacgagcgtgcatgggaaggcgccgccgagcggctgctgcgcggatttggcctggcgctgctggtgccggatgcgcactacaaggccgtggccgagtgggtggaccgccagcatctgggcgcccggctggtgtacttccatgtgcgtccacgaaaggctgcccagggggcgggcctgcatccgcagtcgctggtgcgcaagctgctcatcaagccggattcgccgcacgaggagtggctggagcaggaacttcgccagcgtttcgacgtggcctgctgcgacagcggcgagcagttccgccgccaggcccgcgccatcacccgcgccggccagatcaaggacccgagcgggcgccacgagaaggacgaccgcagccgcatcgacgaccgcagccgctacgtgctcggctggagcaatgccgacaagctgcgcgcgttgcgcgatcagcgggagcgtctggaggcaagccttgccacgctggggcagcgcatcggccagatcaggcaggcacgcaaggaactgcgcggccggctggagacgctcgcgcgcctggaggagttcacgcgctttgccgacatcgactggatgagcccggcccgccagattgccgcactcaccgaggaacgggagaggctggaagccgcatcgaacaccctgcaggaacttgggcgacagctgaaggccgcgcaagaccggctcggcgagatcgaaagcaggcgcggtgaagcgctgggcaggcgcggggaggtcaagagcaagcgcgaggcggcgcaggagctgcgcgatcaggccgatgccgcctggaacgccgcaccgctggaccagacgcaggtcgggcgcttggacggttggcgtgccgaggcgctgggcgagcatcagctgtcggtcgagtcctgcgacaaccgcgagcaggatgtgcgcaagtggctgcaggagcgcatcgatgcagaggacaagcgcctggcccgcctgagcgagcgcattgtcaatgccatgcgtggcttcaaggaggagttcaaggccgagacggccgagatggacgtgagcctggcggcgctgccggagtacgaacggatgctcaccggcttgaagggcgacgacctgccgcgcttcgaggcgcgcttcaaggagctgctcaacgtcaacacgatcaacgagattgccaacttcaacgcccagctcgcccgcgagcgggagacgatcagggagcgtgtcgaggtcatcaaccagtcgctccaggcgatcgactacaaccccggccgctacatcaagctggtggcacaacccagcccggatgcagagatccgcgacttccagcaggacctgcgggcgtgtaccgaaggtgcgatgacgggctcggccgacgaacagtattcggaagccaagttcctgcaggtcaaggccatcatcgaccgcttccggggccgcgagggactggcggacgccgaccggcgctggactgccaaggtcaccgacgtgcgcaactggttcctgttctcggccagcgagcgctggcgcgccgacggtgccgagcacgagcactactcggactcgggcggcaagtcgggcgggcagaaggaaaagttggcctacaccgtgctggctgcgagcctggcctaccagttcggcctggaatggggtgccgtgcgttcgcggtcgttccgcttcgtggtcatcgacgaggccttcgggcgcgggtcggacgagtcggcgcagtacgggctgcgcctgttccagcagctcaacctgcagttgctgatcgtcaccccgctgcagaagatccacatcatcgagccgttcgtggccagcgtcggcttcgtccacaacgagggcgggcgcgactcgcggctgcgctgtctgtcgatcgaggagtaccgggcgcacaaggcagaaggggtggcccaagcaagggcagacgcagaccgtgcggcgccatga

SEQ ID NO: 42747 - DNA, 1185 bp, Pseudoxanthomonas spadix BD-a59
atgagctggaccacgccggcagacctgcgcgcccaggtccagcgcttgtgggatcgcggcgacctgctgcgcgcggcggtcaccgacgctggcccaaggcccctgcgcctgaacctgaaggcgcccttggcttcggacctgtccgaccgcttcgaggccgtgcgtgactgggtgcgcgccattgccgacaccccgcaggtccggatcgaatggcgggagtggaatcatcgcgtccagggggtgcagcggcttcctgcggccgtctggctggacacccagcaggacgcgctggccttcatcggcaaggttggacaggcgcaacggttggaggtcttgtggcaacacacggccgccacgcagccggcgttgctggcctggctgttccgtcgaccgatccaggcgctggacctggccgaccgctgggagcgtcttctggccgtcgtcgcatggctgcaagcccatccccgcccgggcgtgtacctgcgccaggtcgacgtgcccggggtggacagcaagttcatcgaggcccaccgcggcgtgctgaccgagctgctggacctggccctgccggccgaggccgtcgagaggggagcaggcggcgtggcgcaattcacgcgccggttcggctttctggacaagccggtgcggattcggtttcgtctgctcgacccggcgctgcccagtttgcccggctgtgaggggctgcctgacatcaccctggacgcggcgagctttgcggcgcttgcgctacccgtcgagcgcgtcttcgtcaccgagaaccagaccaacttcctcgccttcccgccagcggcggccgccatggtcgtgttcggcgccggctacggttgggaggcgctggcgcgggcggcgtggctgcatcgatgccggttgcactactggggcgacatcgatacccacggctttgccatcctcgaccagttgcgtggctactttccgcacgcggcgtccttcctcatggaccggcagacgctgcttgcacaccgcctgcactggggccaggagcccgatcctgcgcgccacgacctgtcgcgtctgacgccggccgaggcggccgtccatgacgatctcagattcgatcgccaccagccgcgactacgactggagcaggagcgcgtcgggtttggatgggtgaacgcgcggctgcgcgggctcttcgagccgtga

SEQ ID NO: 42748 - DNA, 1383 bp, Clostridium clostridioforme 2_1_49FAA
atgatactgatgaatgaaataccagaccggttctggagcctgttccgctctgttaaccggtctacttacatagaagcccttcttaaaatcaacgaggagtacgagtacagcaattacttcctcagcagggaagtctgcatccagcttttaagtgaatatttctcccggaaaaaatatgtcatatggcaggatgagaccgaggatgactgggatgaactggaaccgcctgccaccagggttcttaactggctgctgcggaccggctggctccgcaaggtggatgattacgccagtatgacagtcaacatcgtcctcccggattacgccgcggtgatgattgaggcattttcccgtttgtctaacgacgatgaggacgagacccaggtttatatccagaatgtctatgccattctattttctctgaaaaacgacccccgctccagcgtcagcctgttaaatacggctctggtaaacacgaaaaaactgaacaagtcccttcaggacatgcttcacaatatggataagttctttggcagcctgctggaacagaagaattacggtaccctgttaaaggagcacctggaaggatacgtgacggaaattgtcaataaaaaatatcatatattaaagacctcagacaatttttatctctacaagacagacattaaatcctggatagccgccatgcgggaggacagttcctggatcaataaaatgtgcgccaaaagcgcggcttcaaccagggggcagaagaagacgcccctgacagaatacgatattgtggagaagctggaccagctggagcatgggtttgacgatatcgaacaccgcatctccaacatggacaaggagcacacccgttatgtcaaggcaacggtcacacgcctcaattacctgttaaaccaggaggacaacatgaaggggcttgtaatcaaacttctgaaccatatgtcggaatacggctgtccggaagatgaactgacagctgtaagcgccaggatgaatctgtcccagatgaccatactgtcagaaaaatccctgtacaaacgccgtaagaccaaggcggatttcacggaacagttaaaggatgaggaagaatccgaggaactgtccatggaggaagtcctgaacctgaacaaggtcaggaaccgttacagccagaaggagattgaagcatttatagaaggcagcatggcagacgggaaaatggtggtggacgaacaaaccatacattcagaccaggactttgaaaaactgatactggcctatgactattccaccaggagaacgagcccttataaggtggaagaggaagattcggaaatggtacacagcggcggctatatctatccgcggctggtatttgtcaggaggacaaaatag

SEQ ID NO: 42749 - DNA, 750 bp, Clostridium clostridioforme 2_1_49FAA
gtggaaaacatggaattggaaaacagcgtggcagacatcgcgcccgcggtcggatacaccggaaacagcatcccttactacgacaatctgatgcactcggagcagtcggaagtgacggaaatcatccgcctcctatggcgccagacgttcatactggaacataaatatgacaagcgtaccggaagattccagtacaacagagactaccgggtatgcagcaaacacctggaattcatcaagaattattttgccatcagcggagtggagctgcgtgaaaacagccagatgggcgtcatgtacatccagggtgaaaatgtggtgggtgacaagctgccccgtctcgccaccctgtacctgctggtgctgaagctgatatacgatgaacagatggaaagcgtttccaccagtgtcaacgtctatacatccctgcgtgaaatccacgaaaagctgggaaattacaggctgtttaagaagcagcccgccctcacggatatacgccgggcagttacccttctgaaaaaataccaggtcattgaacctttggatctgttagaggacttaaaaagtgaaagccgcatgataatatatccctgcgtcaacgtggtgctcatgggagacgatgtgcgccagcttctttcctcctttgatgaggatacggatgacagcggagtccagctgaaggccgaactggaggaagaagacgcggatgatatgacagcagaggaaggagaaccatggaacagaaaatag

SEQ ID NO: 42750 - DNA, 3390 bp, Clostridium clostridioforme 2_1_49FAA
atggaacagaaaatagcaaatgatcgttttctcgccctttccaggatatgtttgaataactggcactatataacgaaaaggactctgtcctttaatgatgaaatcaactttttcaccggacattccggcagcggcaagtccactgtcatagacgccatgcagattgtgctctacgccaatacggacggccggggcttcttcaacaaggctgctgccgatgactctgaccgcagcctgattgaatacctaagaggtatggtaaatatcggcgacaacaacgaattttcctatctgcgcaaccagaacttctcctccaccattgtgttggagctgaaacgaagcgatacgggccagtgccattgcgtgggaattgtctttgatgtggagaccgccaccaatgagatatcccgccgcttcttctggcacaaaggccccatgtgggacaatggctacaggggcgggaagcggaccatgtccatcgtggaaatagaggactatcttcaggccaattacaacagggaggagtatttcctgacctcccacaacgagcgtttccgccggatactctatgattcctacctgggcggcctggactccgaaaaattcccccttctcttcaagcgggccatcccgttcagaatgaacatcaagctggaggattttgttaaggaatacatctgcatggaacaggacatccatatcgaggacatgcaggaaagcgtcatgcagtacggccgcatgagaaagaaaatcgaggatacatgtgcggaaatccaatccttaaaacagattgaggaccgattccaaagctatgctgacaaggaacagcagctcaaaaaatcttcctattttgtgcagaaactggagattctgcagcttcagtcagaggtccgcaccctggcccacaaggcaaagctggcgggagaggatctggaaaagcagatccaggccagaagctccgtggacgaacagattggagaactgacccggcagagcgacgagctgctgcgccgtattgcctccactgggtacgaggaacttaaaaaccagcttaagagcctgaatgaactgctggaacagctgggaaaaagcgaggccaggtggcagcaggccacagatgccttaaagcgctgggaagaagaggacatcacctccaaccagactctttgggatatagaggaatttgaaaaccgcactattgatctggagacattggaacgcctgaaaaaatccatggcatccatgcgctcagacacggaaaagcagcatcaggaggcgtcttccgcactcagggagctcaaaaagcaggaaaagcagacaagggatgaactggaaaagcttcgttccggcagcaaagcctatcccaaatacctggagaatgcccggagctacatccagcgccgcctcctggaggaaacgggtaagagcgtggatgtgcatgtgctggccgatctgctggatgtaaagagagatgagtggcgcagcgcagtggagggctatctgggaaataacaaattaaatctggtggtagctccaaaatacgccaggaccgccctggaaatctacggggaactggataaaaaggaatacttcaacgtggctgtgctggacacggaaaaggcatcccagaaccagccccaggtacaaaaaggcgccctctcagaggaagtgactgtgagggaatcctacttaaggccctatatggacctgctccttggcagggtcatcaagtgcgataccatagatgaattaagggaatgccgtatcggcatcaccagcggctgcatgctctaccacaccttccgcctgcagcacatcaacccggataactatactaaattcgcctatatcggcaaggacagcgtccggagacgtatccgtcttttggagcaggagctggcggccctggatgaaaagaaaaagccattggaggagacggtcagggaagcccatagaatcctggcgcttccctggctctcggctgagcccccggaatacatggactggctgaaggacataaacagctataaggccaaggagcgtgaaaagaaaaagctgatacagaagctggagcttttaaaggagcaaaatgtggaccagttagaacgggaccgccaggcggtcatcacgctctgcgacggcaaaaagagggagagggacagcctgaatgtactcatccgcgataaagagcgggagatagaaggataccggaataagtccattgacagccagtccgttctcacgtcaaaggaacgggagttaacgcaaaatcctgactatgacaatgaactgacagcctatctgtcctccagggatacggtgcgctatgacagggaaaaggaaacctatactgtcaggtgcagcaagctgtctgaggccagggaagcagcctttcaggagcttctgacggtcaggaccagctatatccggacgtatcccaaccgcaatttcccggtaaacgccagagacaacgctgtctatgatcaccttttaagcgccctgaaatgcgacaatctggaagaatacaagcagaaagccacggaacaggccaaatccgcggtagagcatttccgggatgacttcatgtataaaatccgcagcgcaatccgggaggctctgatccgcaaggatgagctgaaccgcatcatcagccgcctggatttcggaaaggacaagtaccagtttattattggccgcaacaaaggacctgacggccgattctacgatatgtttatggatgattcactggatatcaatccggcggacctcaattattcctatgaaaaccagatggacctgtttaccattgagcatgaaaagcagtatggggatttgatgaatgaactcatcagcatttttatccccccggaaaacgccgccccggatcagatggacgaggcatggcggaacatggataagtattcagattaccgcacctacctgtcctttgacatgcagcagctcatacagaatcaggatgaggttatcaaaatccggctgagcaagatgattaagaagaattcaggcggagaaggccaaaacccgctgtatgtggcccttctggccagttttgcccaggcctaccgcatcaatcttccctctaaggtggagcgcaatccaaccatacggctggtagtactggacgaagcgttttccaagatggacggggagaaggtggccagctgtattgaattgatccgcggacttgggttccaggccatcatcagtgccaccaatgacaaaatccagaattacgtggaaaacgtggacaagacctttgtctttgcaaaccccaacaagaagtccatatccatccaggaatttgaacgggagcgttttgtggagctgatgcaggatgaagaagataggaatgagtttgcggatacataa

SEQ ID NO: 42751 - DNA, 1179 bp, Clostridium clostridioforme 2_1_49FAA
atgaacgcaccgctggaatgtattatccgaaaatgcgagaacagcactgtggactggaaggagggcatgagcggaaaccgctccgtcatattcagggaacaggattttaaagaaacaggaaaacaggactttatgaaccagcttatgaagctggaaaaggaggggctgctgaaggtcaaatggtatcagtacggaaccgaggcagaaaaggtatggtaccgcctggaacagatggagactatataccaacgtctgggaaaaacaccgaagttcaagcgtgtcaatgcactgaaagaagaggtggaccgacagcttgctttgatacagagccagtggatacgcagctattaccaatcctttctccagagtctggataaaggagatgttccaaaggcactggataccccgaagcgggaactgctgtttacctgtttcaaggccatagattgtctgcgggaaccagtctataaaaggattttcagcaaaaaatatctgggaaattccaaagcctttgaaaatcacctgcaatccaaaatcctatctgccgccagggtttatctggacacggtaaatgatgacatggatgactgtcaggtgctggaccagctcctgattaacggctatgcccaagagttagccgtgaaaggaaacctggtcattgaactggaaggaaacaagataaatctttccctgtttccctgcgggtttgtctttaacaaccagacactcaggaaagcatctatcccaccggaacagtccgttaccaaggtgattacagtggagaataaagcgaattatgaaagcatgccctatgaggaagggactctaatcatatattcacacggatacttttcaccggatgagcgtgcattcctgattcatctggaacgggttctgtccagcatccggacttcctgcgggacgacctatctccacaccggcgacttggattatggaggagtcaagatatttcaatatattaagaaacgcatcttcccaaatctgcagccgtatctcatggatacacaaacgcatgaacagtataaggcttacggtgaacccatagaaaccagtaaactggaaaaattgcagcggaccaccgaaccgctccttcagcccctcatagacaaaatctgtgctgaaaaacaggtgatagagcaggaatctttcctgttttga

SEQ ID NO: 42752 - DNA, 1461 bp, Rhodococcus opacus PD630
ctgcgccaggaccacgcagcctggacattgctgcgtgccgattcggcgccggcaattctggcgctgttgggccgtcacttcgagcatgggacccgccgcctcccggctccggaactcttcgcccgcttggactccgaccttcagaccatgcgcgacgagggcctcgacttcccgcgaaccggtcaggcctattgcaccgagtgggtgcggtccggatacctgctccgacgagcagcggccggtacccgtgaggagaccctggaaccgacggagggcgcgttcgccgcgatggccttcgtcgcgagcctcaccagtcaggcgagttcggcaaccgaatcccgcctgaccacgctctccacccagttgcaggccctcgcgcgcgattccgatccccgcgcggaaactcgtctcgccgcgctgctgaccgaacgggcgtcgatcgatgagcaggtcgcagcggtggagtcgggagttttcccggtcctcgacggcgaacgcgctgtcgagcgttccgccgagattctcgcgctggcctcggaggtccccgcggacttcgcccgcgtccgcgccgaactcgaggaactcaaccgtgatctgcgagcccgcatcctcgatgacgacggtgatcgcggcgacactctgggagatgtgttccgcggggtcgacctgatcggagattccgatgccggccgcagcttcactgccttctacgacatgattctcgatccggcccggtcgtctcagatcgacgagtggatcgatgcggtgctgcagcggccgttcgcctcccagttgacccacgatcagaaacgacggttccgcgcgttactgaccgagatggaaacggctggctccgaagtgcattcgacgatgacctccctgtcccggtcgttgcgtcacttcgtccagtcgcgtcactacgaggaacaccgccggctgcagcggtcgctgcgcaccgcgcagcagagtgctgtcgccgtggccacacgtcgccgaccctacgacctgctcgacctcgaactggtgcgcgtcggtatgagcatcgaatcggtcacagctcttcgcctgcacaaccccgccgacaacctcgtcaccgaaccggtgctgacccacgacgccgggaccgtcgatctcgacgaacttcgaaagctcgtccgagaatccgagatcgatatggacgaactgtccgacaacgtcgcggcgacgctccgtgcgcatggtcgcgccacgatcggtgacgtcctgcgcgaatacccggccacccaaggactcgcgagcgcagtcggactgatggtcctcgccacccaccacgggcacgcgatcgacggcacagaagacatccactggatctcgggagccggagtatcgcgtcgggcgacaattcgtcgtcgcctgttcgatcctgcttccgacgagttcaccgctcgtccggcgttcgcacccacggggagctcgacatga

SEQ ID NO: 42753 - DNA, 606 bp, Rhodococcus opacus PD630
atgacggacgagccgacgaccggcggccattaccccggggacaccggcgaactggacctcgagacgcggcgcgcattcgtgcagctactcaagggccctctcgtcaccgcggccaaacatcccgaggtgtggcgcgcggtgatccgggacgagcgactcctccggtcccgactcgccgacgtcttcctcgatctcgtcatcgacgacgagaacgagctggcattcacccgcccgcccgagaccggcaatgccaacacccccacggtgctgcgcaccgagcgtctgacattcatggacacggtcatgctgctcgcattgcgccagcgtctgctccgcgcgcaacccggcgaacgggtgatggtcgacctcgacgaactgcgcgaacagctcgagctgtatcgcacggccggcgacaccgacccggccggctacgcgaagcgcgtcaacgcgtcgtggaagaagctcgacaagtattcgctgctcacgaagacgtcgaccgatgaccggatggaggtctcaccggtgttgcggcagctgttcgatgccgaacaggtcgctctcgtcgaagtggagttccggcgcattctggaggaggacacaccgtga

SEQ ID NO: 42754 - DNA, 3288 bp, Rhodococcus opacus PD630
gtgatccatcccggtcagcgccgtctcgcgcgcgttcaggtcgtcaactgggggaccctgcacggccatcacgatctttccgtggcccgcaagggtttcctgatcaccggcaattccggctccggcaagtccacgctcatcgatgcgatctcggctgtgctcgtcccgggcaatcaactgcggttcaatgcggccgcgcaggaggccacgaactcgggacgcaacttcgtcacgtacatccgtggcgcgtggcggcgggaggcgggcgccgacaccgacggtctggtcgcctcgtacctgcgcaccggcgcgacgtggagcgggatcgccctgacctaccgcgccggccccgacgatccgccgatcaccctcgtcaagctcatgcatctggggcgcgggcagaacgccgcagcggacgtcacccacctccatctcattctcgaacacgaactcgacctgaccgacttcgcgtcgttcacgacacgcggcatcgacacgagggccatcaggaagcggtggccggagtcgacggtcagcccggcgtacgggccgtttgcccgtagcttccgctcccgcctgggtatttcgtcggagggcgctcagcgcctgctgcaccgcaccttgtccgcgaaaagcctcggcagcctcgaccaattgttccgcgactacatgctcgacactccgaacaccttcgcgatggccgaacgtgcggtcaaccagttccacgacctgcaggaggcgcaccgcgtcgtcgtcgacgcgcggcgtcaggtggagatgctcgcaccgctcgtcgatcttgccgacacccggcaacgcgggcttcagtccctgcgcgacacggacgaggagaacgcgcatctcggagcggttcacgcggagatgaccttgtcgctcctgcgcggtgaatgcactgaacgccatgccctgacgcctctgctggaggcgggtgcgagcgaagccaccgccgctgccgagcgtgcacggcaggagaccctcgatctgaccatgaaactcgagggcatcgggggcggcagactggccaccctccacgcgcagcgagacgcggaactgaagacgctggcgcgcgtccgaatcaggcgccagcagatcgccgaggcggtgtcggcctgggaaggaaccgttccggagacctccgaggagttcgcgcgactgcggggacaactcgaggatcaggcgcgtcaggccaccaccgcccacgaggaacggcacggcgcccgctacgcgctcgccgaacagcgcggcaccgcgcagaaggagcgcgcggcgctgatcaccgatcgcgagatcgtcgcccgtagacgttccaacatcgatccgactctgctccgcgcgcgcgagtcgatctgttccgccgcaggtgttccggacgacgcggtgcccttcgccggcgagttgatcgcggtgcgggacgaatactccgagtggaccggacccatcgagcgagtcctcggcggcctcggccgaaccctgctcgtcccggacgacgtgtatccggcggttgccgcggccgtcgatgccacccacctcggcgcgcgcctggtgtatcgccgagtgcgggtgggcgtcacaccgtcggcggtgccgaagaccggggcgttgtccctggtgcgtcgcgtggaggtcgccgacggtccgctcgccgcgtggatccaccaccatctcgccgaccgctacgactatgcgtgcgtcgacaccgctgccgaattcacggatcacgcgcgcgccgtgacacgcgccgggcaggtcaagcactccgcggagcgacacgagaaggatgaccgcagccgcatcgacgatcgccggcggtgggttctcggattcgacaacgaagccaaactcgaggacattcgccggcgaatcgcagatctcgatgtcacgatcgcaggtgcgacgagccgactcgacgcgctggatcgtgaggaccagcagatcgccgtccagaaccgcgcagcacagacagtcctcgatgctcagtgggtggacgtcgacgtgagcggtgcgcaggctgccgtcgacgccgtggacagccgtctcgaatcatggcagcaggacaacccggagcattctgcggtgtcggtcgccctcgagctcgccaagaaggcggagaacgaggccgacgcagcccggcgtcaggcggatactgcgttgacggtgcaccgaacggcggtgacggaactcgagacgcggatcgcgcaggccgaactccacgcggatgacgcggcacccggtgctgtcgccacgcggatcaaggcgcgattccagaaattcgcgcgccgggtcacgtcggacaacatcgacaaagccctgttcgaggtcggccagggcatcggcaaggacagggccgacgcacagaacgcggtgtctgccgccgacgcgtcgatcgtcaggatcctctcccagtatctggcgcgttgggagtcccgcggcggtgagctgcggattgacgccgaatacgtcgacgacgcactgacgatcctccagcgcctgcgctccgacggtcttccccggtacgaagatcggttcttccagttgttgcacgaccagtcccaccgcaatatcggcgaactcgctcgcacgatccgcaaggcgcccgccgagatccgttcccgcatcgacccggtgaaccactcactgcatcgctccgcattcgacaccgaccggtggttgcgcatcgatgtccgcgagcgacggtcgccggcggcggccgatttcctcgacgacctgacccggatcacgagtggtggatgggacatcgagcagcgtcccgcagccgaggagagattcgagcggatggcggctgtgctggagcgcctggcgtcgaaggaacccgcagatcagcggtggcagcgccaggtcctggacactcgcctgcacgtcgggttcatcggcgtggaggtcgacggtgccggagaggctcgcaactaccacgattcgagctcgggactgtcgggcggtcaggcgcagaaactcgtgttcttctgcctggcagcggcgttgcggtatcagctcgctcccgacggcgcagaccttccccgttacggcaccgtcatcctggatgaggcgttcgaccgggccgactccgcgtacacacgccgagccctggacgtgttcgcgcagttcggttttcacatggtgctcgcgaccccactcaagttgctcggcacactcgaggagtacatcggcggcgctgtgaccgtgagcatccgcgaccggatgcacaccgaactcagcctcatcgaattcgacgacgtgggcgccacatga

SEQ ID NO: 42755 - DNA, 1194 bp, Rhodococcus opacus PD630
atgagtgtgcggagtgttctgccgcccgctgccgcggcgaagacgctgaccacctacagcagtcgccgacgtcgctggctcgccgacccctcactcgccgaacaggattcgctgacggttgccctgcatccgccgtccgagcaccagatcgccgaggatcccgacgcggcggtcgcctgggtccgctcctggcgcgcctacaccggcgcgggccacgtggagtgggcgattcgccggtggccgagcttcggcacacaggacgtgccggtgcggctgacactggccggggctgatcagattgcgtccgcgagtggccgcgaaaccgaatggtgcgccctggtgatgcgtcgtgatgcccttgtcgaccgcctgggtcccgacaccccggcgttgtcggcggcggttgccgcgaccgcggcgaaatggctcgacctggacgacgacgacttcgtcaggctgacaaccattgcgcggtggctgagcgaccatccgaactcggggtatttcattcgtcagcttcccgttccgggtgtcgacacgaaatggctctcgagtcatcgcggaatggtggagacgctgctcgagggcgttcgcggacaccgggaactcggtatccggagcctgcccacactgcgcgacgtcgctctgtgcgatcccgagctcatgagcggaaccccgaggcgcttcgcgacctcattggaggaactcaccgcgttgccgctggccccggcgcgcaccctgattctcgagaacaaagagggtctgcatgcgctacctcggctggcggaaacggtggcactgcacggtggcgggtacacggttcacgagttggccggaatcccgtgggtcgtcgactcggaggtctggtattggggagacctcgacagtcacggtttcgccatcctcgaccgtctgcgccgacatcttccgcacgtgcggagtctgttgatggacacggacaccctgaatcggtggcggaccctcgcggtccgcgagcacaagcccaccttcaacgaggtctctcacctcaccgaatccgaagccgccgctctggagtcgctgcgcgaggacgatctccgcctcgagcaggaacgcataccctggccctacgccctgaagagacttctcgtcactttcggtgcgggtcagtcgtctgcggctgccgactgccctacgtgtccggacagcaagtaa

SEQ ID NO: 42756 - DNA, 1464 bp, Mycobacterium thermoresistibile ATCC 19527
gtggacgacaacagggggatgtcggcggccgatttgctcggcatgaaccgtgagctgcagggatcgcgcgccatccggttgctggccacccacaacctggggctgtacgccaccttgatggaacgccacctcaacgagggtgtggtcgccgagaccgaactggtgatccggctggagcgggatctcgccgagctggacgaccacccggacgggcaatccggtctggcgctgatcaagaactgggccagccagggctggctgcaccgcatcgtcgacgaccgcaccgggcagaacgtctgctatctgacccaggacgcccgccgggcgctggacttcctgcgcgggctgcgtcgcaacgacaccatcgccaccggagggtcgatcaacggcatcgcggcccggctcaagcaggttgcgatccgggtcggcggcgatccggcccggatccgcaaggacatcgaggcccagatcgccgcgctgcaggccgagctggaggcgctcgaggccggcgaacgcccggagcccgacgtcaccgactgctacgacgaggcccgcgcgatcgcactgcagatggagcgcatcatcaccgacatcggccagtacgggacgatgatcgagcaggccaccgccgcgctggacgaacccatcgacagcaacgccgcctaccgggaacgccagcgtcggttgtacgccgactatcaggccgcctgggagagctcgggccgcgacagccaccgcgcgttcctgcggatggtcaacgatccggaccagcgggccgagttcgaggccgatgtggcggcggtcgccgaggcgctgccggcgctggacccgcagctgcgcaaggtgatgaccgggttcttcgagctggtcggccatcagatcgacgaggtggagcgcatccagcagcgctgcgcccagcgaatcaaacggttcaccgccttcggcacgctggagcagagccgcggcatcgcgcgccagctcaacgaggcgatcgccgcggcccgcgccctgttgaagacgtcgctggccgactcccggctggacatcgaggtgccgctgacccggcacgcaatcagttccgtcggcgcgttgagcttcaagatcagtgacctgtcggtgcccaaaccggccgaaccggccggcggtgaggtcgacctgagcagcttcgcggcgctgaccacccaggtggacgccaccgcgatggccgagcggctcaacaccgagctggcctccggtccggtgtcgctgccgcaggcggtggacctggtcgacggcgccgggcagggcgcctatctggggcatgtcatcgtgctgtggtcgtgggcgctcaaacagcccggcgtggacggggactgcccgtcgacctgggtgcggttccggtccccggacggccgtgaccgcgccatcgaggttccgaatctgatgttcaccgaaccgatcactctggctggagctctctcgtga

SEQ ID NO: 42757 - DNA, 771 bp, Mycobacterium thermoresistibile ATCC 19527
gtgacaaccgatcaggaagccgatctcgcggcgttctcgcagctgccggaggtcaaccagaacccgcggccgccgcagcagcgccggccccggttcgacggcgatgtgtcggagctgcccgaccgcgcctgctgggcgttgcagcatctgctgacgcggcgttacatcagcgcggagaccgaacccgatctgtactcgtgggtgctggagtaccgcgatcagctccgggtgcggctctcggagctggatctgctgctgcggatcgtcgaaagcccgtacgagaatggcgatgtcgcgttcgtcgagcaggcccgctacgagtccgcgcgcggggtgaagctgctgcgccgcgaaccgctgggcacctacgactcgatcctggcgttgcacctggcgcagatgatgcgtgcggccggcgggcagaaggtggtgatcagccgggaggagatgcacgcgctgttctccggggtgctcaacgacaccgaccgtgacgcggtgacgttcgcggcccgcatcgacggcgcgatcgcccggctgaccagcctggagatcctgcggcgcaaccgcgacgacgaggacagctacaccatcagcccggtgatcaccgcgatcatgaccgcgtcggtgatcagcgagctgcaacagcagttcgaacagctgcagcgcggcgggccgcccgagtcccgcaacggtgacgcccccgagtcggggaacggggcgccgcaggatctcgaggaccgtctggacgaagaggttgaggtcgttgactga

SEQ ID NO: 42758 - DNA, 3390 bp, Mycobacterium thermoresistibile ATCC 19527
ttgactgaacagttccacctgtcccggttgcaggtcatcaactggggggtgttcgacggctaccactcgatcccgttctcgcccggcggcgcgttgatcgccggcgcctcgggcagcgggaaatcgtctctgctggacgcgatctcgctggggttcctgccgttcaaccggcgcaacttcaacgcctcgggtgatcagaccgccgccgggtccagcgccggccggcgcaccgtcgacaagtacgtgcggggcgcgtgggggcagcgcagcgacggcggcaccaaccgggtgatgtatctgcgcggcgagggcaccacgtggtcggcggtggcggtcacctacaccagcgactccggacgcacggtgaccggcctggtgctcaagtggttgaccggcgagtcgcggtccgattcctcgagccggttcgtgatcggcgacggcgacctggacatcgaggaggtgtgcaaccggtgggcggcccgccggttcgacgcgtcggtcttcaaggaggggggctggcggttcaccaccaaggtggaatcgcagtatctggcgcagctgtacgccaccatcgggatccgcgcctccgacgccgcccagcagttgctgggtaaggccaaatcgctgaagagcgtcggcgggctggaacagttcgtccgggagttcatgctcgacgagccggagagcctggcacggctgccggaggcgctcaagcagatcgacccgctggtggaggcgcgggagctgctggcggtcgcgcagcgcaaacgcaagatcctcggcgatatcgagcagattcagcagcggtacgccgcggagtcgtcggatctgggcatcatcgatctggtcgacatgccgacggtgcgcgcctacaccgaccatgtacggctggcgcagtgcccagagcagatcgcccagctcgacagcaccatcgaacagctcgacaacgaataccaggacatcacgcggcaactgaatctcgccaaggcggaggcggattcgctgaccgcgcagatcagcgggtcgagcgccagcctggcgccgctgcagtcgcagctgaccgccgccgaggccgaggccgagcaggtgtcgcggcgccggacggcgtatgaggacatgctgaccgcgcacgggctggagatcccggagaccgccgaggagttctggaatctgcgtgagcggctgctcaccgaggccaccgagtcgctggccaaggccgagcggcgccgggaggagtccaccgacgccgagtacgcgcagaaggcggcccggctggcccgcgacgagatcgccgcggagctgcgccgggtggagaaggtgggttcgtcgctgcccgagttcgcgctggtgatgcgggaacagatctgcgccgcgatcggtgtcgacccgtcggagttgccctacatcgccgagctgatggatctgcggccggatcagacccggtggcgggtggcggtggagaaggtgctgcgcggcgccgggttgcggctgctggtgccggacgcgtactggggtgcggtgctgcggttcgtcaacgagacgaacatgcgcggccggctggcgctgcatcatgtgcgggcgaggatgtacggggcggagccggtggagccggagccgaacacgttggccggcaagctgttcgtggtcgacccgaaccatccgtgtgcggcggaggccgccgatgtgatcgccgcggccggtgatcacatctgtgtggacgacccgaacgtgttcggccggttccgccgtgcggtgaccgacaccggcctgtacaaggagtccgatcggctggcgatcaaggacgaccggcggccggtgcgccagtccgaatacctgttccagggcgatgtctcggcgaagatcaacgcgttgaccgtcgagctagccgccgcggaggaggcgtaccagaaggcgcgccgggtcgccgatgagatcgccgcgcagcggcagcagtggcgggactgggcggcgtcgtgccgggcgatctgcgagcagttcccgcagtggagccagatcgacgtggagaccgccgacgggcatgccgaccggctgcgtgagcagtatgagctgcttttggccgagcatccggatctggatgcgctcaacgcgcgggcggaggactgctgggcgcagatccagaagctgatgacccggcgcggcgcggtgcagacccgccgcgacgagctggacacgcgacgcacccggctgttggagctggccgagcggttgtcgccgcctgccgatgagcgctcgcgcggagagcatagattcgtgtccgagccgttgaccgagctgctgcagcgcttcgccgcgcaggtgccggtgggcttggagctgctcgatccggagccgcaccgggaggcgttgttcgccgcgatcaagcgggagcgtgagcagctgcgcgagagccgtcggcggtcgtatgacgaattggcccgcatcctcaacactttcgacaccacattcccggacgccatccccaacgacagtgatgtgttcgacgaacgggtgcacgactacgtggcgttgtgccggcacatcgacgagcgggagctgcccgaggcctacgagcggatgatgcggctggtgaccgagcaggcgccggacgcgatcctgacgctgcaccgggtggccgaacaggaggcgcggcggatcgccgagcagatcgaacgggtcaacaccgggctgggggcggtggagttcaaccgcggcacccggctgacgttgcgggccaccccgcggcagttgacggcggtggccgagctgaccgagatcgtgcgggcgatcagccgccgcatcgccgaggtcgggctgggcgacaagcaggcgatcctggatcagtacgccgacattctgcgactgcgtaaccggttggcgtcgacgacaccggaggaccgggcctggacccgcgatgcgctggacgtgcgcaaccggttcaccttcgactgcgcggagtgggacgtcgccaccggtgagctgatccgcacccattccaacgcgggcgacaactccggtggggagcaggagaagctgatggcgttctgtctggcgggggcgctgagcttcaacctggccagcccggacagtcgcgacaaccggccggtgttcgcccagctgatgctcgacgaggcgttctccaagtccgacccgcagttcgcgcagcaggcgttggaggcgttccgcaagttcgggttccagctggtgatcgtggcgacggtgcagaacgcgacgacgatccagccgtacgtcgacagtgtggtgatggtgtccaagaccgaggcgacgggccgtaatccccggccggtggcgtcggtggcgacccggaccatctcggagttcaccgcgctgcgcgagaagatgggctcgtcgcgggtgccggccggggtgtga

SEQ ID NO: 42759 - DNA, 1380 bp, Hungatella hathewayi WAL-18680
atgaaacaactattaaatgaaattcctgataacttctggagcctgttccgctccaaaaaccgtcccatctacatagaggctttgctgcaaatcaatgaggagtaccagtacagcaattatttcctgtcacgggaaatctgtattcagacgctcagtgattatttttccaagcagaaaatctttctggagcaggatgagatggaggatgattttgatttgctggagcccatggctacgcggattttgaactggcttttgcgggccgggtggctgcggaaggtggatgactattattcgatgaccgtcaacattgtgataccggattatgcggcggtgtttgtggacgcgtttacccagctttgcagtgacgagggggatgcgacgcaggtgtatattcagaatatttatgccattttgttctcatttaagaatgacgcgcgggcgaatctgtccttgctgaaaacggctcttgtgaataccaggaaactgaataagacgctgcaggatatgctgcacaatatggataagttttttgcgagtctgctggagaaggggttctatggggatttgcttaaggagcatctggacgggtatgtggaggagattgtccgcaggaagtatcacattttgaagacttcggataatttttatctctacaagacggatatcaagatgtggctcaatgagatgcggcagaatccggagtggctttccgaggtctgtgagcggaaccggcggatgcgggggaagagtgtggaagtgcggtcggttctggagcagattgatttgattgagcggggctttgacgatattgagcaccggattgccaatatggataaggagcattccaagtatatccgggctacggtgacgaggctgaattatctgttgaatgaggaggacaatatgaaggggctggtgattcagctgttgaatcatttgtccttgtcagacagacaggatgaggagattggagaaatcggggggatgatgaatctgtcccagtttacgattctgtcagacaagtctctttaccggccacggaggccgcggcaggattttacggagcatttgtcggcggatgaggagccggaggagttgtcgaaggatgagattctgaagctgaataaaatccgcaaccggtatagcagaaaacaaatcgaggagtttgtattttcccatatgacggacgggcggatggaagtgacaccggggacggtttcttcggatgaggattttgagaagctggtgctggcctatgattattcgaccaggaaggacagcccgtaccgggtgcgggagcaggagacggaagcgattgataacgggcggtaccgttatccgaagctggtgtttgagaagaagaggaagaacggatga

SEQ ID NO: 42760 - DNA, 624 bp, Hungatella hathewayi WAL-18680
atgataaattattatgaggagttgtcgccggaggagcagttgaaggtgacgcagtcgattcagctgttgtataagcagacatttttactggagaggaaatatgataagaagaccgggcggtttaccgggaaccgggatttttatgtgtgtaataagcatttggagtttatccgggagtatttccgggttatggggattgaggtgatggagaacagccagctgggggtgatttatgtccggggcgaggctgtggtgggggacaagctgccgaagctggcgacgctgtatctgctgattttgaagctgatatacgatgagcagatggcgtcggtgtcgtcctctgtgaatgtgtacacgacgcttagcgatatgcatgagagactggggaattaccggttgtttaagaagcagccgtcggcgacggatatccggcgggcgatttcattgttaaaaaaatatcagattattgagccgctggaaatgatggacgagctggaaggacacagccgcatcatcatttacccgtgtattaatgtggtgctgtttggggacgacgtgcgggggcttttggaatcttatggggaaggagaggacgaggatgacagcgacgaaaccgagatttga

SEQ ID NO: 42761 - DNA, 3549 bp, Hungatella hathewayi WAL-18680
atgacagcgacgaaaccgagatttgaggcattatcaaggatagttttgaataactggcattatattaagcataaaacgctgtcgttcagcgaaggggttaacttctttaccgggcattcagggagcggtaagtcgacggtgattgacgccatgcagattgtgctgtatgccaatacggacgggcgcgggttttttaataaggcggcggctgatgattcggaccggaatttgattgagtacctgcggggaatgattaatattggggagaataatgagtttgcgtatctgcggaatcagaatttctcttctacgattgtgctggagctgcggcagacggatacgggggaatgtcagtgtgtgggcgtggtgtttgatgtggagacggccaccaatgagatttccaggatgtttttctggcataaggggggagtgccggagcatgagtaccggattgggaacggtactagggctatgtctacggaggaagtgaaggagtttcttcttcggaattattcgaaggaggagtgctattacgggagccataatgagaggtttcgaaagcagctctacgacatttacctggggggactggattcggagaagttcccgctgttgttcaagagggcgattccgtttcggatgaatatcaagctggaagagtttgtgaaggaatatatctgcatggagcaggacatccatattgaggacatgcaggagagcgtgatgcagtatgggcggatgcggaagaagattgaggatacgtgccgggagattgaacagctgaaggggatctgcgggcagtatgagaaggtgcgggaagcgagaaatacgattgacacgtatcggtattatgtgcaaaagctggatattctgcagtcgcggcgggtggcgcagacgacccaggagcggattcggctgacgacggaggaactggcgaagcggcaggaggagaagaaggggctggagcgggaaattgaggagctggcaggcaagagtgatgaactgctgaagcagatttccgcatcggggtatgaggagctgaaggcgcagctggcgtcactgaatgaattggtggaacggctgggaaacgggaaggcgcggtgggagacgacggcgtctgctctgaatgcctgggtggaccaggatgtgacttccaaccggaccatttgggatattgaggcgttttcggatgggagtatcacggaggaagggattgtccggttgaagaaggatatcggggaaatgctttcggacgtggataagcagcggcaggaggccaatgggattcttcgggatttgaagcggcgggagcagcaggccagggaagagctggagcagctgaaggccgggaataaggcttacccgaaggagctggagcaggccaggacgatgctgcagaaccggctgtaccaggagacggggaagagtgtgtcggtggagatactggcggatttgatggatatcaaggacgaccagtggagaaatgcggttgaggggtacatgggcggcaataagctgtcgctgattgtggagccgaagtatgcgcgggcggcaatgaagatttatgaggagctggataagcagaagtattaccgggtggcggtgctggacacggagaaggtgatgcaggacagccatgtggtgatggagggggcgctggcggaggaagtcagcgtccggagagattatgtgcaggcgtatattgattttctgctggggaaggttgtgaaatgtgagggggttgatgaacttcggaaatgcaagattgggataaccagggactgtgtactatatcacagttaccggattcagcatatcaatccggagcagtatacgaagtttgcttatattgggaagagcagcgtgcggcagagagtgaagctgttggagaagacgctggcggagattgcggaggagagagagccgcagatggaagtgctgcgggagtgtgaggggatactgaagctggaagggatgaaccatgatgtgtcggtttatctggagtggaaggcggatatggaagcgctggagaagaagaaggtggagcagaggaagctgcgggagaagctggatggactgaaggcgcggaatgtggaggtctgggagaaggagagagaggcgctgctggagctgtgcgaggccaggaagggcgtgcttagggagaatgagaggctgatttatgatggggagaatgcgctgaagaaggatagggatgaggcgattcgactgcaggaagagttgattgtgaaggagagggagctggaagaggagtgggcggctgagttggaggatggaagtccgggggctggcaggccggatgtgagactggcgggccgggtggctgcgggggagatggcaggtgctgggaatgatgagatgctgacggaggataaacgggcaggcgccggaagcacgggggctgtgggaatgctggcggttgcggctgcggcggaagaatcgctgcgggcggagcttgagaagcggagcaaccccagatatgaccttatgggaaatgagtatggggcgaagctgcagaaggcgattgagaagaaggatgaggagaagcagaagctgacggatttgcgtggggagtatctgcgggtttatctgaatcggagtttctcactctcatcggatgacaacagtgaatatgagaagctgttggagaagctgagttgtgacagactggaggagtataggaagagtgcggcggagcaggccaggtcggccgtggagcattttaaagatgatttcatgtacaaaatccgcagtgccatccgggaagcgctgatccgcaaggatgaattgaaccgggtaataagcgggctggattttggtaaggataagtatcagttctatatcggcaagaacaaggggccggatggacagtattacgatatgtttatggcggattcgctggagattaacccggcgcagctggacgtgtccatggataaccagctggatttcttcaccatggagcatgagaatcattatgggcagatggtgaatgatttgattaatgtcttcatcccgccggacaacgcgacgccggaggaactggaggaagcgaagcggaatatggataagtacgcagactaccggacgtatctgtcctttgatatgcagcagcttgtccagaatgaggatgagacaatcaagattcggctgagcaagatgataaagaagaattccggcggcgaggggcagaacccattatatgtagcgctgctggctagctttgcgcaggcgtacaggattaatttaaagccgaaggtgcagcggaacccgacgatacggctggtggtgctggacgaggcattttcgaagatggacgcggagaaggtggccagctgtatccagctgatacgaggcctcggcttccaggcgctgatttcagcgaccaatgataagattcagaattatgtggagacggtagataaaatattcgtgttcgccaacccgaataagaagtgcatctcgattcaggagtttgagcgggaggagtttggggagttaaaggcggatttggtggatggcgagggatga

SEQ ID NO: 42762 - DNA, 1497 bp, Marinobacter manganoxydans MnI7-9
atggacgaacaaacccacctgagaacccgctcctacctggtggcccgtcaccagcatccggcctggaagcttctgtctgccacccgcgggcccctggtacttagttgcctgcaggcactgatggaaacaaaccgggaagaaatcctgttcgaggatgcccagcaaatgctgacggatatcctgcgtgaacacgccaacagcgacgacctgaagctgtcccccgacgacccggcagccgatgccaggaaagaactacgttcctggattcgcaaagggctgatagtggaacgggacggccggctgatggccaccgatgccctgcaaaaagccctggcctttgttgagggcctcgatgaaaagatcatgacgtccaccgcctctcgcctcgccacggtacagcgggaaattgaaaacctggaaacccgtctgaacccgaatgcccaaagccgtgcggaccatatacgccgcaaaataagagacctggagcacgaactggccgacgtggaagccggtcgattcaaggtgctggagggggccgaagccgcagaaggcatccgcgaagtctacaatcttgccaccagtctgcgagcggactttcgccgggtggaggactcctatcgggacgcagaccgtcagttacgccaatccatcgtcagcgaacagcatcaccgtggcgaaatcgttgaccgcttgctggacggccacgacaccctgctggaaaccgccgagggcaaggtattccacaacttcagtgagcaacttagccgttccatcgagctggacaacatgaaacaccggttgcgtaccatcctgaagaatccggcaacccgccacgccctgtcccgacagcaacaggatgagttgcgctggctcgtgatccggctgatacaggagtccgctgctgtcatccgcgcccgggcccgcagcgaaaaagacgtcaaagggttcctgaaaaccgggctggccgccgagaaccacagagtcggcgaactgctcaatggtatactgaacaccgcacttaacatcgactggtccagccacaaggtccgcaaaggcgacacgcctctgccgccaattgccgtggcggtttccagcctgccgctggttgagcggctcagattcaagtccgccactgaagagcaggcacaaggcctcgagttgaccgatcagggcgtcaacctcgacgacgtcgacgaagagttctggcgggcatttgacggtcttgaccgggaagccctgtaccaggaaaccgtggaactgctgaaagtcaccgaccgccccatgagcatcggcgacctggcggctcacctgccgcccactcacgacctggaaaccattgccctgtggctggccatgtcccgtgaggcggaggtggaaatcaccgacgaccgggaagccgtggatattaccgacagcaacggacaccggctgcgcttccacgtgccgcaactggcgctaacccgacaagacgcagaagccatcgactgggagctgtaa

SEQ ID NO: 42763 - DNA, 744 bp, Marinobacter manganoxydans MnI7-9
atgtctgactattttgaccgcctgacaagccaggcagacgaccaacaaggccgggacgagccgcaacagacatcagaggcactggcccatgtcgatcagcaaacgcctctgacggaggccagccactacacgcccggcaatgtgaaagccaccgcccaggagctgctgaaatacgggttgctggaagcagaccgtaagcccaacctctaccaggttgccaccacccagaccgctgcgatcaaccagatcctggaaccgttcgacctgcgcctgaaagtggacgacgtacgtggactggctttccttgtcgtgtcagaccggctcttcagcgaaggccaagaaaacgacgacgagtggtcccaccccctggtgcgccgccagcgtctgaccatggaacagtccctgctggtggccatactacgccagcactttatcgcccacgaacaggaaaccggtctcggtgccggcgaagccactgtggaactggatgagctactgccccaactgcagctgtacctgggcgacaccggcagcgacacccgcgaccagaaacgcctgcgcagcctgctggacaacctcaagagccacggcattgtctcggacatcgacgccaacgaccaggtggtcgttcgccctatcatcacccacctggcgaacccggaaaatctgcagaacctgctccaccatttccgacaaatggccggccagtccgccccgcaagacgctgacggagaggatgtatga

SEQ ID NO: 42764 - DNA, 3324 bp, Marinobacter manganoxydans MnI7-9
atgagcctgccccagaccgacctctttgccgctgacatcctgccgcccacggcctatatcctgacccacctggacctgtataactgggggcccttcggtggacggcactgcgcggagatcgacccgaaaggcaccgccattatcggccccaccggcagcggcaagaccacgctggtggacgcgttgatgaccctgttgactcaccagccccggtacaacctggcctccactggcggccatgaaagcgaccgtgacctgatttcctatattcggggcgtatccggtgccggtaacaataccggcgacaacagccatatcgcacgcgctggtaaaaccgtaacagccgtgagcgcccgcttctccaacggtaacaacgctattcgcatcggggcgctgttctggatcgacggcagcagctctgccgccagcgacctgaaacgcctatggctgttttcagaaagggatgaccagagtctggacaactggctggccattcaccacgagggtggcgcccgggagctcaagcaacacgccggggataacccaggcttacaggccaacgacagtaagaaagcctacctggcccaagtacggcgattttttgaagtgggggaaaatgccttcactctgctcaaccgcgccgcgggcctgaagcagctcaacagcatcgacgaaatcttccgggaactggtgctggatgaccactcggcgttcgaccgggcggcagaggtggccagtgagtttgacgacctggccgcgatccacagcgaactggaaaccgcccgaaaacaacaccagtcgctgctacccatagcggaaacctacgaaaagcaccagagtgccaccagagagcttgaccagcagctgttattgaaagacatcctgccgatctggttcgcacaaaccggctacgagctgtggagcacccgcaaacaggacctggaacgccagcttgataagggcagagaaaccctcgagtcattgagcagcaatgttaagcaactcaacagcaaagccgataccctgaaagacatatacctgcaggccggtggtgccagcatagagcagctaaaggagcagatctcccaacagaagcgctgggtaggagaacggggccgacacgccagggactaccagaccctgaccggcaagcttgacctggacagcacactgagctccgaagcactggcccggaaccgccagctcggtgagtcaaagctggccgaactgtccgaacttgcggacactcaggacgaattcctgctcgacctgcgttttcgtcacggtaagctcaatgaaaccctgacggaaatcaccgaagaaatcgaccgcatcaaggcccggcccgggtccaacatcgacggacgttaccaggaattccgcagcgaactggcccaggacctgaacctggacgaaagcattctgccgttcgtggcagaactggtggaagtcaaagccgaagaacgtgactggcgtggcgccattgaacgggctatcggcgggcaccgcctgcgcctgctcgtgccaccggccgccatgcaatcggccctggacagggtcaacagccgtgacaaccgccttcatgtgcgactgctggaagcccaggcaccccaggccacggcacagttcatgaaggatggcttcacccgcaagctgaacttcaaggaccatcctcaccgggaagccctgaaacaattgttggccgaaatcgaccgacactgcgtggactctcccgaaaccctgcgccagacaccccatggcatgacccaacagggcctgatgtccggcaagaagggctattttgaaaaacgggacaatcagcggctcgacaagggctggatgaccggcttcaacaaccgtgaccgtctctccgcgctcaacaacgaactgagcgaaacccgtaagaaagcggacgctctggggcggcaactcgaatcagcccgccgtaatctcagggacacaaatgatcagataaggctttacgaactcctgggcgaaaccgagttcagcaccatcaacctgcccagcgcacaacgtgaactcgatgccctgcaaagccggctggaagcactgaccgctccggactcggatgtggaaaaagcacggggggaatttgaagcggttcgccagcaactagaagaaggccgacaacagctgtcgaaccaggaaaccgccctcgccctgctgaaagaaaagcgcaaccaggccacggaccgctgcacagaactgctggaccggcttggcgatggcctcacagacgaccagcaaagcctggcaaccagacacttccgcaccccgaaagcggaccagtacgaacgactggaagccctggagcgggaccagcgagagcaactggacaaagtcattgggaagctgggcaaacagatccagagttttgaactcagcctgacccaactgatggaaaaggcgctcaccattgataccggggcgctgattgaaaccggcagtaatatccaggacattccggaatacctggaacgcctgcgggtactggaggaagaagcccttccccaaaagctggagcgattcctcagctatctgaaccagtcgtcggatcagggcgtgacccaactgctggctcacatacagaaccaggtggccatcattgaagaacgtatcgccgatctgaacgccacactgcggcgggtcgacttccagcctggccgctacctgcgcctggagccccgccgggttacccatgaatccctccgcaggttggagcgcgcacaacggcagctgcgggcggatgccctgaaaggcgaccagggcgaaagccatttcaaggctctgcaaaacatggtggccttgctgcgggacgcggcagacaacaagcgcaccgtgggtgcccgggctctgctggacccgcgctaccggctgcagttcgaagtttcggtgctggaacgcgagtccggctcggtgatcgagactcgcaccggctcccaggggggcagcggcggcgaaaaggaaatcatcgccagctacattcttaccgcctccctgagctatgcgctttgtccggacggcgccacccagccactgttcggaaccatcgtgctggacgaggccttctccaagagctcccacgccgtagccggccgcatcatctcggctctcaacgagtttggcctgcacccactgttcgtcacgcccaacaaagagatgcgactgctacgggcccacaccagctctgccatcctggttcaccgcaaggacctgcgggccacccttacctcactgagctgggaagaactggaggcccacgcggagaaaatgacccggaaagcccatgaaatccccggctga

SEQ ID NO: 42765 - DNA, 1155 bp, Marinobacter manganoxydans MnI7-9
atgaaatccccggctgaactggcaagccgcctggcccgccaatggcagaacgcggacctgcgcgaacagcgcctgctccggcctcagggctggccattaaccctccccatcggcaagcccacgggcgcgacggtacgggagaaggtcacacaggtacgagaacacctgcggcaatggcgggaggtcaccaccgggcaggtccagtggcagctggtccgcttcaagagcaccagcgaagccatcgacattcccacccactggacactggacactcccagccagtgggtgcaggccgcaggcagcagtgaagtcaggcgggaatacgacacactcagccgtctcgcctctgttctggacccgcgatttcactcactgatcatacgccggcgcagcctggtcatggataagccggaaagcgacgttattcgcagcggcaaggttgcccttcagctccagccaggctgcgccgaaggaaaacccctcagggcactgtctattgccggcaccgacagcaagttcttcgagcgcaaccgccagcttgtaacgctgatgctggacattctgttcgacggccaggccagcgaaaccgggctggaagcctttctgggcgctgaagacgacggccaccactggttactggtcgccgaccttgatggctcgttgttgcccttcacgcaaatgcgggtccgggcccacgaactccaaagcacgcctttacctggcgaacggttgatactggttgaaaacgaacgctgccttcaccagttgcccagggtctccggtacggtctcggtacttgggtcgggcctgaacctgtcctggctcaacgcaacatggctgaaagatcgggcgaccgcctattggggcgacatcgatacctgggggctgaccatgctggccagcgcccggaaacacctcccgcttctcacaccactgctgatggacaggattaccttcgacacgttcgccgacgcaagtggtgttgaagaaccacagcctgccccctcgatcactccgccaggattgaccggaagcgaggctaagctttaccaacgtctgagacaggcagaccagggccggctggagcaagagtttctgccggtctgtgttgttcatagggccattggcgactgggtcgatcgctccgcagaataa

SEQ ID NO: 42766 - DNA, 1527 bp, Sphaerochaeta pleomorpha str. Grapes
atgcaaaaacccagttctcttgggagaaaaaccttgttatctgatagtacctttgttgaacagttaatccattacgatagtggtctcactttgctttcgcgtaagaatgctcccaggattatcgccttcctgtatcatgtcttcaaagaacagaaccgtaccagtatcgaacaatcacacctgcagcaattgctctctggctttctccaggtcaccgaggatttcgcagaagaagatgaactggaaacccttgaaacctcgattatcgaattggattacagtgacaaggcaaggaatctcatcctggcctggagtaatgaaaaaaacggttttctgttgcgttactatgatgcagcagccattgaaaccatcgaactgtcagcaggtctcgaaaggattttccggtttctcgaggaagttgtagactccaaacgactgtttgtaggaaccgagtcacgtttctcccagatcatggacgggtttcgcgaactcgatataaacaccattgacaacccacgggccaaaattgacgaattggagaaacagaaagaccaactgcagagacagatagatgaaatcaaacggacaggaacagcgaccaccttcaatgaacagaaagtttccgaacgcctctacaatttgcagcgaacggcaagggcactcctttccgacttcaggcaactgaaagacaacaatcatgcaatcttctcggaactctgccacaagcagatccagtccaccgaaagcaggggagaactactggccttcaccctggagaaaagcgaagaactggaaacctcaccccaaggccagagtttcacttctttttggaactacctctgttccaaccctgaggataattccatcagggcaaaagcagacgccctgaaagcccggttgggaaaccagctattcgactatccgttctttgcccatctggaagacaccctcatcgatgcgggacgtgagatcttggaagagaaccgtttgctttccgatcgtcttaagcgtgcgattacccgatacaactccaaggaataccgcctgataaaggaaaccctcgattccatcaaaatcctggcaataggaaatcctccctacaagacagagaacttatcacaaattgatggctcggcagatatattttcatccctgcaacgataccctgtcttaccagaaacccagtctacggtcaaaaaaaccacctacgaagaggagagggcaccggctgatatcgatatccaatctttgtttgacgaagctaggatcgatgaaaaccaattgcttgaaaacctggaatttgaccgaaaacatacacggcaattaacgttaggaactgttttactcaggcacccagtcaaagaaggacttgcagaaatcgtatcctatctctccttgttagccaaacaggattgggctgagtttgatgatacaagaaaagaaacagtaacatataccaatgcgatagacggggctcctgtcacgcttaccataccaaaggtggaaatcaatggaattgacaactga

SEQ ID NO: 42767 - DNA, 609 bp, Sphaerochaeta pleomorpha str. Grapes
atggaattgacaactgaatggggcaatctctgcacacggcttttgctcgcacctctctttcgggaagaaaatcccgatcatttcgaaagccttgtcatctggcagcagcaagtcaatgcatattttgccgtcataggccttaccctccagctgaacattgacgatggctatgcatttctggtggaaaacgaggatgaggagggcaatgtcatcggagacggactgagattgctcagaaaattcccccttacctatgaacagtccctgctgttagtcatattgcgtgacgaactcgacaaattcgaaatgagcagaagcacaagccgggcactcatcctccatgagggacagattgcagatttgatggaatcctactatccgaacagccaggataaagtgaaatatgcagatatggtagcatccctgctcgcaagcctgacccaaatggaatttatcaaatgcattcaccgaccgacatccgacaacctttcctctccgaatgaccgggaatatgaaatacgtaccattatccgggcaaaggttacctcggccttcctctctgcctttaaaaaccgtctggaaaacctcaagggggaagacaatgcttga

SEQ ID NO: 42768 - DNA, 3453 bp, Sphaerochaeta pleomorpha str. Grapes
atgcttgaaagtgaacttgatttgggtctccaacatagtggataccgcctctcgcatttccagatctataactggggaactttctccgaccatgtcgtaacgctggatttccaaggggagaacactctgctcaccggagcaaacggcagtggcaagaccaccttggtcgatgccttgcttacccttctcgtccccagggaatacaggacctacaacctatccagcggccaggacggaaaagacggaagaaccgaggaaagctacgttctcggggcctattcgacgacaaaaggcgaaagcgactatgccgcgaacaaagaatacctcagggacaagaactgccatagcatattgctgggtcaatttgataatgacaatgcagaattccccctgacgttgatgcagattcgctattttaccttgaacggaacaatgcagaaactcttcgtcatctgcgagggaagcctgagtttacaggacatggccgaacgtaacgttgccttcgatgccacccccggatggaaaaagcgcatgaccgcggcatttacttccacctgcaaactctatttcttcgacactttcaaagcctatagcattgaatttgctacccgctttgggttccgtgaccgggaaaaagcactcaggattttctcccagaccgttgggatgaaagacctttccaacctcaatgagttcatccgcacccgtatgcttgtcgagatggacatgatcggggaattcaacagcacactggccaatttcgaaaccctgatggggaccaagaagctgatcgagaaagaagaggaacagattcgccagctcaaggcaattgaaacggaggcacaggacttccttcatctcgacaccaagctggcatcactcggaatcgagaagcataccctacctttctgggaagggttgcgtgcagatcaattcctgcagaaagaaatcgtcaggctcgaaaatcagaaagatctggtagcagacaggctttcagagaataaaagggaatcggaagcgatcagggaaactatcgaggaagtgcatcgtacactctccagcgacaaacgggtggagcgggaagaagaactgaaaagacagcgtgaatggcttaccagcaaactcgctctcgccagagcgaacaggaacaactacaagacagttgttgacatgcttcaccttccccttagtgaaaattcggcagactttacggagaaccgttttcaatccgaccatcttctggaaaagattaccaacaaactgatgaacattgaggacgaccagaccgaccaagtgcaacaactgggggcatgtaaccgggaacgggaaaatgtccagagtcaactcgatgccatcggaaacagggagtccaacatcccgttggaatacttgctctgccgggaacaactctgcaaagatctccagctgaaagaaagcgacgtcccctttctcggggagttggttcagctcaggcaagattgcctttcgtttgaaaccggggcgaacgcagcactgcatacactagcccttacccttctcgtacaaccctaccaggaacagataatcgccacctatctttggaataacgcattggagttgcatctcgatgtaatggttatcgaaggaaccaaagccctaccggtcgatgaggacgaaaagcatcagctcaaactcgtcgatgatgaagagcaggtgttctttgaggataccaatgccccaaaccggcttgatttgatgcttgaagtcaaaccgagttgtacctttgcaccctttatcaaggatttgcttggcagggaagtgccctattattcctgtgacaacctctcccatgtactggaaagcccggcttccttcagtgaacgcggactatttcataaggaaacgctcctttgtaagggcgctacaaaaaaaggggaagagttgcacatcctcggatgggatgtcagcgaaaagagagaacgcattcggtcacgactggtgcaattggatgacctcaaaaaagaaactgaatctgtgctggaggatttgagaaaacaaaagaaacaccttgaggcacagaaagccgctatcttgcgcctccaggaatttaaggaattcagtgaaatcgacaccgcatcggtggaaacccagatagacgtactcgataatcaactctttgccctgagaagcgaaatggacgacctcagttctctcaaacagcaactgaggcaatcagaggtagccagggaccggctcgtatcggaacaagaagaactctatagaagccagggagcgaaccaacaggaacgcaaagacgccgaacgggaaaaaaagacctatgccgaccaacttgccaatttggaccttgcccaatatatggaccagatcgagaagatttccgctcgctataagctgcctgccacctttgagagcttgatacagatcaagaaaacacgaaacgagctattggcaaaactcgattcccagattgaggaaatctcggcaaaacgggatcaatcaaagaaaaagaccgagaacctgatggaccattttgtccgtcccaatgcaaaaatgacacaaacctatccgacctggattggagacgtctcggacctcaggcccgatattgaggctttggacatgttcttggccatgctggataaacttgagcgtgaagacctccccaaatacaaggaacggtttgcaaacttgcgttctcgtcagatgaagagcgatatcatcaatttcaatacagccctgcgtcaatgggaacggcatatcaaggaaaatattgtcgaactgaatgacagtctctcttcaatcatctaccagattcaccctgagacaaagatcaagctcactgcagagcgggttaaggatagccagatacgacaattcaattcgatgctcagtgcggccatacctgatgcaggaagcagaatccaaggaaatgagaaagcagaggaaatcgccaaccaacacttctttgaggcagtcaaaacccttttggaaacattgaaaacagatgaccagttctgtaaaaaagtattggatgtccgtcgctggtttgtctttgccgtagaggaatatgattccaagacagaaaaacaggtccgttattaccaggacagcgccggaatctcaggcggtcagaaagctaagctcgcctacaccatcttggcagcggcaattgcccatcagttcgatgtctttgacatttccaatgtctcacgttccttccggtttgtgatagtcgatgaggccttcagcaagagcgatgacgagaattcccgatatgccatggatttattcaagaaaatggacctccagttgatggtagtaacccccaaggacaaggtcaatctggtggagccctatatcaacagcgtgcagataaccgtgtgcaacgatggatgccattcctttgtgcacagcctcaccaaggaaaaactgagggaacaattagggagataa

SEQ ID NO: 42769 - DNA, 1167 bp, Sphaerochaeta pleomorpha str. Grapes
atgatcagcccagcggaaatcaaaacgaaggtcgaaaacaagaagaacgaatatctgaaggcaaagattttgggaacccctttctttcccctctcgcttcgtgcagacaaaggttcgatccatgacgatttccaaacgcgtgagagtgccctggcaacgctttttgcccagagcaaggcaaagaaaggcaaaggctatatcgtcgagacggaaacaaaagaatcccggaccatgggcaggcaaaccgccgtttcgaatctcttagttgaaacagaggatgattttctgtaccttctgggagctgaaaacaaaggatcccttttctctgctaacgtggcgatgctgaaggcaacatttcctgaggaggaattcatcccttggctgctggcaaagaagtcggaggtattctcccgttgggaaggaaccgatggtcaatggttttgccagattacccgttttctggttgacaatccaaactgcggcctctttgcgcgggaattacccgccgaagccccgacaaagtttttggaaacgaaccttgcactggtaaaaagcctggtgggctcccttcgaccccttgtcgaaggcgatgacgacctcacccgccttgggctcaggaaaaaggagtcattggtaaaaatccggtcaaacaggccttttgcggtgaacctggggagttcatcctgcgggcagacctcgaccattatactcacaccggaatccctacgttccttcaaccttgccgccaaacgtatctttatcgtcgaaaacgagactatgtttttcactttccccctggaggctgaagacctgtgtctttatgtaggaggctatgccctccttgcctgcaagggtagcttactattccagactgtcgggatatattatttcggggaccttgatgaacacgggtttgccatactggacaaattcaggacactctatccccaaacgaaatcgttctgcatggacataaagaccctggaagatcactgcgcctacctgctcaagggaaaatcctatccaggggaataccgcaaccttacaccagaagaaaaagaagccctgcatcgggtacagggccctgaagggccacttttgcttgaacaagagagaatttcccttggttatcttaaaaacagactccagaacctgacaaacgggtaa

SEQ ID NO: 42770 - DNA, 1479 bp, Rhodococcus pyridinivorans AK37
gtgtcgactgccgacctgtaccgcctgacgcggctgcgcgatcagcacgccgcgtggacgctgctgcgcgccgaccacgcccccgcaatcctcgggatgctgggacgacacttcgatcggggaacccggcgacttcccgcccccgaactgttcgcccgcctcgacgcagacctgcaggacctccgcgaccagggattcgaccttccacgcaccgcccaggcctactgcgcagattgggtgcgcgccggatttctgctccgacgtgccgatacgggctcgcgcgaagagacgctggagccgaccgagtccgcattcgtcgcactgaatttcgttgcgcaactgacgaccgacaccagttcgatcacggaatcacgactgacaaccctgtcgagccagttgcaggcgctggctcgcgattcggacccacggagcgaaacccgtctggcaacgctgcggaccgagcgcgacgcactcgaccggcagatcgcagcggtggaatccggcgacttccctgtcctcgatggcccacgggccgcggaacgcgtgtcggagatcctcgcgcttgccggcgagatccccggggatttcgcacgagtacgggccgaactcgaagggctcaatcgcgagttgcgcgcacggatcctcgacgacgaaggcgaccgcggcgacactctgggcgaggtcttccgaggtgtcgacctcatcggcagttccgatgcaggacgcagcttcaccgggttctacgacatgatcatcgatcctgaacggtctgcacagctcgacgactggatcgaggcggtactgactcgtccgttcgcccggagcctgtctcccgagcaacgtcatcggttccgatccttgctcaccgagatggaggacgcaggtggcgaagtgcatgcgacgatgacatcgctgtcacgctcactgcggcatttcgtgcagtcccgccattacgaggaacatcgccgattgcaacgtctgttgcgctcggcgcaacagcacgctctgcaggtggcaccccaccgcaagccttatgaaccgctcgacctcgacctggtgcggatcggcatgagtatcgaatcggtcgcggcattacagttgcacaatcccgcagacgatctggtggccgaaccggtggtgtcgcagacgccaggtgaggtcgacctcgacgatctgcggcgcatcgtccgcgaatcggaaatcgacatggacaagctgctcggtagcatagcggccacactgcgcgtgcgcggtagcgcgacgatcggcgaggtcctgcgcgaacatcccgcaacccaagggttggcaagcgccatcgggcttctggttctcgccgtcgagcacggacaccgcgtggagggcgatgaggagatttgctggagctccccatccggcgtcgaacgggtggccacggtacgccggcatctgttcgatcccaccgatcctgccttcaccaccttggaacaggacagcctatga

SEQ ID NO: 42771 - DNA, 600 bp, Rhodococcus pyridinivorans AK37
atgaccgacaccacgaccgggctgtatcccggcgacaccggcgaactcgaactcgacacccggcgcgcattggtccagctcctcaagggtccgctcattaccgccggcaagcatcccgaggtgtggcggacggtgatccgcgacgagcgcgtgctgcgttctcggttggccgatgtgtttctcgatctcgtcgtcgacgaggacgaacagctcgcattcacccgtcccgccgaaaccggcgatcacaaggcccccgcggtgttgcgcaccgagcgattgacattcgtggacaccgtgatgctgttgtcgctgcggcagctgctcctccgcgcacaacccggtgatcgggtcatcgtcgatttcgacgaaatggccgggcagctcgagatgtaccgtgcggccacgagtaccgacccggccggtttccggcgcagggtcaacgcttcgtgggagaagttgaagaagtacagccttctcgcgtcgacgtcgacggagggtcggatggaagtctctccggtgttgcggcagttgttcgatgccgatcaggttgctgctgtggaagcggagttccggcacatcgtcgcggagagtcagccgtga

SEQ ID NO: 42772 - DNA, 3309 bp, Rhodococcus pyridinivorans AK37
gtgacggccacccctccccacccgtcccagttccggcttgcccgcgtgcaggtggtgaattggggaaccttacacggtcaccacgacattccgattgcgcgcaagggtttcctgatcaccggcgcgtcgggatccggaaaatccactctcatcgatgcgatctccacagtgctcatgccgggcggcagtgtccgattcaacgcggccgcgcaggaatccgcggccggttccgggcgcaacttcgtcagttacatccgcggtgcgtggcggcgcgaagccgacgtcgataccgactccctgaccgcttcctatctacgtacgggcgccacctggagtgccgtcgcgctcacctaccgcaccggcgacggtgccgcgcccgtgacgctcgtcaagctcatgcacctgcggcgtggagccaacgcgaacaacgatgtctctcacctgcatctgatcttcgattttgatttcgacctgatcgatctcgagccgttcgccggccgcggtatcgacacccggggcatccgaaagcgttggcccggggctactgtcaatcccagttacacgccgttcgctcgcgccttccgcgcgaagctgggcatttcgtcggaggcggcccaacggttgttgcaccgaacactgtcggccaagagtctgaacagtctcgatcagttgctgcgcgactacatgctcgacgaacccgacaccttcgcgatggccgatcgcgcgacgtcccagttccgcgacctgcgcgaggcgcaccgtgtcgtcgtcgacgcgcgtcggcaagtcgaggcactcgatccccttgtcggtctcgcggaggttcgccgccgaggcctccagcagcaacgcgaactacaggaagagaacgaccacctcgacgccgtgcatgcccggatgacggtggatctactgcgagagaagctcgacgaggcctacgcacagatcggactgttgcagactgccgtcgacaagacctcggtcgaagccgagcgcgcggccgagcgcaccctcgatctgcgggtgcggctcgaaaccaccgacggtggacgtttgtccactctcaggctgcaacgcgacgcggcggaagccgacctgactcggaccgtacagtcacggagcaggttcgacaccgccgtcggatcgtgggaagcagaggcaccgaccaccgctgaggagttcgcgcatctgcgagcccagctcgaaacggagttgcgtgagctcgacgcgacagtcggtacacgcagaaacgatgtgtacgaggtggtgcgagcactcggcacactgcgttccgaacaccgacaactcatcgccgaccgagagctgctcgcccggcgacgctccaatctcgatcccgctctactgcggatacgcgaactggtctgcaccgcagctggtctcagcgaagacatgttgcacttcgcgggcgaactcctcgaagtgcgctccgagcatgccgagtggaccggccccatcgagcgcgtactcggcgggcttgctcgcacgatgctcgtacccgacgaatattattcacgcgttgcagcagtggtcgacgcgcagcatctcggcacccggttggtgtaccgccgggtgcgtactcgttccggccggcctgccaccccggcgagcggtgacgaatcgctggttcgaaaactggacgtgcggccgggaccgctcgcagcgtggctgcagcaccacctcgccgagcgtttcgactatgcgtgcgtggcgaccgtcgacgacctgcgaggtgtgccgcgcggcgtgacccgggccggtcaggtcaagcacggcggcgagcggcacgagaaggacgacaggtaccgcgtcgacgaccgcagccgatgggtgctcgggttcgacaacgaaaccaagctctccgatctgcgtcgccgcatcggcgaggtcgaatccgagatcgcccgcctgcaacgtcggcaggagttgctcgagcacgcagagtgcacggtacagcagcgtcgacacgcggcggagatcatcctcgacacgacctgggccgacatcgacgtcgaagcggccgaggcagcggttggcgcgatcgagcatcgactcgagggatggttgcagggcaatgccgagtacgcctcgctcacgctcgatcttgcccgtgcggaaaccgaggagaaggaggcccgcgcagcgtataccgcagccggatccggtctcgaacgccaccgtggcgatgtggagcacactcggcagcggcttgcagaagtggaagcacacgccgattcggcggtccccgacgggatcgacaagcgcatccgcgcacgcttcgatgctgccgcacgtcgaccgacgagcgagaacatcgaccggttactgcataccgtcggacgaaccatcacggacgagcaccgtgcggcgctcacgagaaccacggacgccgagcggcgcatcaccgcgatcctcaccgcctatctcgccgaatgggagtcacgacgcgccgagatgcgctccgacgcagagtacgtagacgatgctctcgcggtgctcactcgactgcgcaacgacggattacccgcatacgaggacgagttcttccggctactcaacgaccaatcgagccgcaacatcggagagctggcccgcgcgatccgcagggcaccgggcgagatccgttcccgtatcgagccggtgaacgaatcgctccggcgttctccgttcgacaccgaccggactctgcggatcgatgtgaaggatcggcgttcgcctgccgcggccgatttcctcgcggaactgcagcgcattgtcagcggctcgttcaaggaagaggaccgggtcgccgccgagcaacggttcgaacagatggagcggatcctcgaacgcctcgactcgggcgaacccgccgaccggcgctggcggcagttggtactggacacccgcctgcacgtcggcttcatcggagtcgaggtcgacggggagggcgtggacgtcaatttccacgactccagctccggcctgtcgggtgggcaggcccagaaactggtgttcttctgtctcgccgccgcgctgcgctatcagctggcggcatcgggggaagagttgccgcgctacggcacggtgatcctcgacgaggcattcgaccgtgcagatcctgcgtacacgcggcgagcactcgacgtgttcacccgattcggtttccatatggtgctcgcgacgccgctgaagttgctgcaaaccctcgacgattacattgatggggtggccgcggtgagcatcagggacaagaagtactcgcagctggccttgttgccgatccgcagcgcggaggagccccgcgagtga

SEQ ID NO: 42773 - DNA, 1131 bp, Rhodococcus pyridinivorans AK37
gtggccgatccaattgcagccgaatccgattcactgtcgattgcgttgcacccaccctcggaacggcaggtcgcggaggatcccgacgccgtggtcgcatgggtgcgcgcctggcagatgcaccgcggaatcggtcgcgtgcactgggagacgcggcgctggccgagcttcggcacgcaggatgtgccggtgcgggtcgtgtttgcaggtcccggtgagattgccgccgcggcaggccggatgtccgaatggcacaggctcaccgcccggcgggtgcagttggtggagattctggcacccggtacccccgcgcttgccgacgcgatcggctcgacgctttcacggtggctcgaactcggcgaagccgacttcgtgcgccttgtcggcgtggtccggtggctggccgaccatccggcttcggacgttttcattcggcagcttccggtgcccggtgtggataccaagtggatttcgcggcatcgcggactggtcgaggtacttctcgaaggcgctgtggggaatcgtgacctcggtgtgcgttcggtgcctcgattgtgcgaaattgcggtttgtgaccgcaccttgctacccacggcaccgcgacattgtgcagcgccgctggacgagctcgccgagttgccgctccacccggagcgcatactggtcctcgagaacaaagagggcctccatgcgctgcctgatctgccgggcaccgtggccgtacacggcagtggttacgcagtgcacgaactggccgcactatcctggctcgccgactcggatgtcgtttactggggtgatctcgacacgcacggcttcgtgattctcgaccgtttccgcgcttacctgcctgacgtgcgcagtttcctcatggacctccacaccctggaagcgtggagtgctctcgcggtagaggaaccgtcccccagctcgcacgtgccgatgcgactgacgcccgcggaaaatgaggtcttcacgcggttgcgcgtggaacgactccgcctcgagcaggagcggattccgtggccgcacgtgatggaggaacttgcccgcgccttcaccggcgcgatcggacatgatcgagactcgaccaggatggatccgaccgcgcttggagaaggagtctcatga

SEQ ID NO: 42774 - DNA, 1434 bp, Saccharomonospora azurea SZMC 14600
atgctcgcgctcctgcatcagacgcacgcgccgttcgtggtgacggcgctggcgatggtcttcaccgcggagcggccgagcgtggcggtggcggacgcgcacgcggagatcgacgacgcgctcgaccagttgcgcgccgcgggatacggggacgaggacaaccagccactgccgagcgggaacgcgcgggacctctgccggcagtgggtgcaggcgggctggttggtgcggcaggtctccgacgacgacgtcgaggtgtatcggctgtccgcgtacggcgtcggggcgctcgaagtcgcgggccgggtcggcggggtgcgcacccgggtgtcggagtcgcgggtcaggacgttgctggacgcgatcgagcggctcgcgcaggacgccgatccggacgtgatggcccgcatctcgcgcctgcacgaggagatccaacagcggcagaaggagctcacccggctcgaacggggcggcgcggtcgagaccgtcgaggacgagaagctgctggaggcggccgagaacgtgctgcacctggcgcgcgaactacccgcggacttcgcgcgcgtggcggagtcgatcaaagacatccagcgtgacgtcgtcgccgagttgcggcacgacgtgcggccgaccggcgaggtcctgcgcgaatacctggaacgcggcgagcagatcctcgacgcgacgccggagggccgcgcgttcgcgggtgcgttgcggctgatcggcgacccggcgcagatccacaacctgtggagtcagctacgaacggtgctccggcaccggttcaccgagctgctgccggagcggcagcggcgcgagctcaccgacatctcgcgccgagtcgagcagggtgtccaggaggtgctgaccgcgcagcggcaggcttctcacgtgatcaccactcaggtgcgcgaccacgacccgatgcgcgaccgccaggtggacgacctgctgaggaacgtgatgtccggccttcacacgtgggttcccggttctcgccgcggcgaggccgtcgagccgcttcgccgcctgccggtggccgacgtcgggcatctgcggcagcgggcaagcgacctgcggccgccgcagccccccgcgccgttgcgggagtgggacgaggtcgaggacgtggcctccgcggacacccgggcctggggcggtccgcgatacggcgcgctgcaggagcatctggccgcgttcgcgggcgacgcggacgacgtggatgtcgcggcggcgttccgtgcggcgcccgaggacctccggcgtccggtcgacctgctcggcttcctggagatcgcccacgacgccgggatgaccgagacggccgaggtcgccctggtcgacacggtccggcccgacggaacccggcgacggttcgcgctcggccgtgtcgtggcggcgaacccggctgacgggaacggtgagcaatga

SEQ ID NO: 42775 - DNA, 657 bp, Saccharomonospora azurea SZMC 14600
atgagtgagaccgagagctggtccgacacggacgccgggttcatcgacccggtgccgatggaggacgatccgaccgagctgttccccggggacgcgggcacgctggacgcggacgtgcggcgggtgttggtccagttgctgcgccgcaagttcctactggccgagaagaacccggcgcagtggcggacgttgctggagaaccagcagatcatcgagtcacggctgcacgacctgttcgtccgcctcgtggtcgatcacgaccgcggcatcgcgtacaagcagcaggtgcgctcgacggagctggacgtgccgatcctgctcagggacgagccctacaaccgggccgagacgttggtgctggtgcacctgcggaccgtcttccagcgggaacggagcacgggcgagacgtccgcacgcgtggacatcgaggaactggaacagaccgtgctgacctacttcgatcccagggaccacaaccaggcccgcagccagcaggaggttcgcggtgcggtgcagcggctgtccaccgagggcctgctcgtcgaggagtccgcgggccggtatcgcatcactcccctggtggaggtcgtgctgagtaccgcgaaactcgccgagctgcagcagtggttgcgtgaacggaacgaggccacggcgtga

SEQ ID NO: 42776 - DNA, 3342 bp, Saccharomonospora azurea SZMC 14600
gtgagcatgatcgacacgctgttcgggttgatcccggcggcatcacggggccagcagtgggtggcccgggacctgcaactggtgaactggggcggttacgacgggtatcaccgcgtgcggttcgcgcccggcgccacgctgctcagtggcggttccgggtcgggcaagtcgacgctgatggactcctacatcgcgttgctcatgccgcacacgaccccgttcaacggcgcgtcgaacggcggcgtggtcggcaggccccgaggcaaggaccagcgcaacatcctctcctacgcgcgcggcaaactcgacgagtcccgcacggacggcgagacgaagtcgcgcgtgttgcgcggtgacggccgggacacctggtcggccatcgcgatgacctgggtcgaccacaccggtgccgagttcaccgcgctccgcgcctggtatgtgccgtcgtccgcccgcgccctcgacgacgtcgtggcggtgcgcgccacctgcgaccaccactactcgctgcgggagctggaacgcccggcggccaagcggctcgcccgcgcggaggtcgaatcgaccggcctgacgtgcttcgagaccgaccgggacttcaccgcgcgactccaccacacgctcggcatcggcgctgcgggtgacgggcacaaggccgtcgcgctgctcggtcggatccaggccggccagcagatcaccaccgtcgacgccctgtacaagacgatggtgctcgaagaaccgtccaccttggccacagcggacgcggtggtgcagcagttcgacgagctgtccggcacgcgcgagcggatgatcgtcgctcgccagcaggtgaaggcgctgacgccgatccgcgagcaccggcgcgccatcgacgacgcggtggagcggctggacctgatcgaggcgatcggctcgttcaccgagacgtcgtcgcctgccgcgttgtggtgtcacgaacgtcggctcgaccttctccgtgcggccgagcgggacctcgctcagcgataccggcgggccgaacaggaactggcggagaccaacgccctggtcgaagccaccgaagcgcagtgcgaaggggccgccgacacactccgcgcctccggtggtgaccgcctggacaccgcactccgagagcggcgcagcgtcgagcagcggctgggcgacgtcgagcgaacccggcagcagctggaccgggcactcggcaccctcggcgtcacggtgtcgaccggcgcagaattcaccgcgctggtcgagacggcgcatcggtccctcgccgacacggaagcacggcgaaccgctcaagcccggttcgccgacgcgatgagcgagaaacgggacgccgacacggaactggccgcgctgcgcgccgaacgcaaggcggtcacggcgcgcaaggggaacatcccgaccgacctgcacacggctcgcgcggccctggccgaggccgccgggctggcgccggacgacctgccgttcgtcggcgagctgatcgaggtgcgcaccgagttcgaaccgtggcgggaggcgttcaacctggcactcggcgggttcgccatgcgcatgctcatcgacatgggacggctgaacgcgttccgtgaggccatcaacacggtgccgaccgctcgacgcgtgcacttccagggtgtgcgcacgggtcgacgcgacgaggtcaggctcaacgcgaagacgctgcccggcaggctcgactaccggccgtcgcccttcacggcgtggctcaagagcgagctcgcgagccggttcgacttcgtctgcgtcgacacgccccgattgctcccccagtaccccaaggcgctcacgatcaccggtcagacgtcgcagcacggccggggcgcgcacggcggccacggccgggccaacgtgctcggcttcaccaacaccaggctgctcgccgagctcgaccagcagatcgatgccgcgcgccaccgcctcgacgaggccgacgcgtgggtgtcgcgggcggaggacgagctcaactcgttcgaggcccggcgggcggcctaccggaccgtgacggagttgtcgtgggaccaggtggacgtcgagtcggtgaaggcggaacgcgaccggtgggaccgcgtcgtcgaggaggtccgcgcgggcaacccgaagatcgaccagctgcagcgacaggtcgacgagctgaaaaagcaggtcagggagctcacccaacgtgtcggtgagcggaggaagaccgtggaggagctcggcgcgcaatgggagtcgaccgtcgacgaggtcgaccgcgcccagtcggcgctcgacgcagccacggagaccggcacggtcgtccttccggagcaccaggaatacctggagacactgttcgcggacacctcggccgacgctccggcgacggaactggcggaattcgacgcggcggtgaaacgggccgccgaacgactccacgccgaccggcagtcggcgacggagacgatcggccggtcgagaaaggcgttggaggacacgttctcggtgttcctcgaacgctggcccaacccgaacctcggtaccgaccccgacgcctcgtaccgcgacttcgaccgtgtcctcaccgacctggagagcagcggcctgcacgagctggaggccgagtggcgggacagcctgctcaagctgtccggcaacgacctgaccgggctggacagcgagctcgccgcggcggtccgggagatccgcgaccggatcgatccggtcaaccgtatcctcgccgaactcccgttcgccgacgacgaacaccggctgcgcatcgacccgcaggagagccattccaccgtgcgcgcccggttccgcaaggagctgcgcgacgtgcgcgcgttgatcgaccgggcggacacggacgccgaccgggagcgcgcgtatcaccgcatggccaaggtgatcgaccgcatccggcgcaccgcccccgacttcgccgacctcgtcgacgtccgcaaccacgtgcggatcagcgccgagaaacgcgacctcgacggcaaacacgtcgccgtgtacgaccacatcggcgagaagtccggtggcgagtcgcaggagctggtggcattcatcgtcggtgccgcgttgcggtaccagctgggcgacgcgggcgccgatcgtccccgctacgccccgatcttcctcgacgaggcgctgatcaaggcggacgcgcgcctcaccggtcgagccatcggcgcgtggcgcggactcggtttccaactgatcatcggtgccccgaacgacaaacacagcgcgatcgagccgcacgtggacgcggagtacctgatcctcaagaactccgagggccgctcgtatgcgaagccgctggtcggagttgcggccgaatga

SEQ ID NO: 42777 - DNA, 1227 bp, Saccharomonospora azurea SZMC 14600
atgagagcactcgtcaccccggacgacgctctgacgacggttcgccgcaaggtcgagcagaagtgggcggacgccgtgtgcgcggacttcggcgtcggcgaccgggtcaccttctccgtcccgcttcgacccggcgtgtcgacgggcaaggccgtcgaacggctggggcacgccacctggcacgagtggcacaggctctggcgggagttcgcgagcagactccccgccggagtggacctcgtccgcacagcggtgagcatccgtggcgtggtcggtgagttccccgccacgctgcgggcggatgtcgacggcgccgtcgcgctcctcgccgacaccggtgtcgcaccacccactgtggacatcgggcgtgcccgtgagctggcgtcggcgctgcgctcggccgacgccgctctcaccccggccacgctccgagccgtctctcgtctgcggccgaacgacgtggacgtactgctcggcgcggtgacctggctgcggaagcatcccgacgtcagcccgtggacgctgcggcagctcccgatccccggcatgcacaccaagtggctggactctcacgggacactgctgcgtgatgtcagtggtcgcgacgtccgggccgaggtgcggccccggccgacggtcgtgcacctgacctacgtcgacccggaccacctggcatcgggccgccgcaggcacgacgcctggacgaccggggacgtgcacgacatcgcctacccgccgcgcgtggtcctcgtcgtggagaaccgcgactcccggctgtggttcccgccggtccgcgacacgatcgtggtggagggcggcggcaaggccgcagcagccctcctgggtggtgtgccctgggtccgtgccgcggagcacgtcgtctactggggcgacatcgacgcggacgggtacgcgatcctcgaccggttccgcgccacgctggccgaacccggacccgacgggacacccgcgaagccggtcacctcgattctcatggacgccaccgacctgcagcgctacgccgatcacggcgtcgaccgcgacaaggacgggcgccccctcagaccgtcaccgggggttctgcggcacctcaccgacgccgaaaccaccgcgtacgacacgatcgcgaccgcgggccccacgccgttccgtcgcatcgaacaggagaccatcccactcgccgacgccgtgacccgcttgctgcgcgtcgtgaacggccagggctga

SEQ ID NO: 42778 - DNA, 1407 bp, Desulfitobacterium hafniense DP7
atgggacttttcgatgtagtaccgaacaactttttttcggtattagtatcaggaaataaagaagtatatgttgatgcgctcatgcttctgcaccaactgttcaaattcgagctaaacattagggtggatgattatatttcttcattaatttccctgttggaggataaagcgtttgttcccgaagatgatgatgagatgccggaaagcagcctcacgcccagtggaaaagcccgtttgatcttaaatcgctttgtcaaaacaggctgggtcgacaaggagtttctcgacggctcatttgtggaaattattacgccccgtaattacgccatatccgtcatgaagctgctcagtgaacttggcgacaaatcactgcatgaatacaattcactggtttttgcaacctattccagcttaaaacaagcgaaaaacgaacatgaatcacagatgtatgaggctgttttatcagcaaaggctaacaccgaacagctggaatacgagctgcgcaggctctaccatggaattcgcgaatttttgcgcagcattcaggagcagaatgatgtaaacctgctgctacagaaccactttgaagaatacaaaaagatgtcggaccggatctatcatccgatcaagacaatggattctattcatcgttatatggccccgattcaaaatattttatccgatatactggcagatgagaaactcatgcggatcatgcgcgagagggccatgacgattaaaaagtatgatgagggggccgaagcggaggaagaaatcttatcggcaatcgattatgttctggatgcttatcaatcagtgggcagcatcatcaatgagatcgacagaaaacacagtacctatacaaaaagttctatcgaaaaaattcagtatctgatgaccgccgaccaaactatcaaaggtaagctcgtcgagcttttaaaaacttacgctgatgcaaaaagcgaggagcgcaacgcattgggtgacatgtttgaaaagaacattcgcatcaaccgtcaggagtttgtggacggcaaatcactttatcataaaagtatcaggagccggcgtgtccatactacgccgcttcctattgatcaggacaatgccttctctgatctggcgatggccggtatgctggagcagataaaaaatggctatccagtggcgaggattcgtgcctatgttgataggctcttcgcccatggagcagaatctgtaaggagcgaagatgttcccctcaacagtgacgctgattttatcctgctgattttagctattgttcgcgccaatgacaaaggaatgccttatcgggtgcagatgggagagggacgaatcgagcgaaacggataccgcattcccaacatgatcatcagtaagaaagggggcaagcaccatgtggagtga

SEQ ID NO: 42779 - DNA, 648 bp, Desulfitobacterium hafniense DP7
atgtggagtgaacgatacgaagctttatccagttatgaaagaggcgagttccgccgattggccaactatttactatctcatacctacatggtgagataccagtatcagccttcccagcagatgaccttgcctaacgctgattatcagatggccacgcgactttttcccgtgctgcgggattattttactgttacgggatggcagcttgagaaagacgacaactacggaattatgtcgttgatcaatatttacgatcataatcggttgcgaattgatcgtttcaccaccttgtttctctacacttgccgcctgatctatgaggagcagcgggagcaggccagcagcttccatatggtaaaaaccgacacgcaaaccgtggttgagaagatgcggatgctcggcctgcttgataagggtaaaacgacacaaaaagagcggatcgaagcccagcgcaccctcgggcattataatattattcaaaaaatggagtcggttgcctggagcaatgacggaaatgaactattaattttaccgtcaattttgtcgattatctcgaatcagggcattaatgatatgatgctggaattggaagaaatgcgtattaatggctctgatgaagcagggcaggagcaggaggattcggaatga

SEQ ID NO: 42780 - DNA, 3399 bp, Desulfitobacterium hafniense DP7
atgaaaaagatgaccaggctcctgctgatccattggcattatttcgcacgtgagatggtggaatttgaacaattgaattttttaacgggtaaaaatgcttccggaaaatccacaataattgacgcgctgcaattaattctactgggcgataccagcggcagcttttttaataaagccgctaatggacggggcaatcgaaccctaaccggatatctcaggggtgagttgggcgatgatgaagactcgggcttcaactatttgcgcagcgggaggtttaccagctatatcgcggtggagttttttgatgaggagaagaaaaggagctttaccgccggctgttgttttgatacattttcggaaaacgatatgcagaagctgttcttcttatatgacggcgctatacccgacaatgagtttgtcgagacagggagtcctatggtaatcaccgcactgcgtgcttatttgaaagagcattttaccggacaccactccacgaccgatgtcggtagagatttcaggacaaacctgtatggtaaactcgggggcttacgtgaacgctttggtcagttgctgaaaaaagcagtgtccttcaatccaaatgttgaaattcaacagtttatttctgaattcgtatgcgatacacagcagaccgtagacgtaagccgcatgcaggagaatatcagaagttacaaaagcctggaaagcgaggctgatgtcctaaagggtagaatcgccttgcttgaccagatactaactattcatcaaagttttacggtccagcggcaaaatgaaatgctgtactcttacctgatcgaacgttcccaagcagatataaaggcaatagaactggaagcggccaaggataaagccaaaacctatgacgcacagctatccgaattaacggataccatcaacgctgaaacgacacgccttagcaagcttcaggaagaacgggacctgatgcaggcgaagcttctgaacaacgagcaggcgcaggctctgcagctccttgaaacacaaatagctgaaaaggagcaacagatcagcgctttgcgcggagaatatgataaagcagttgccgttctgtctaaatgtgtatcatcctggagaatgaactcctctgcaatgctgcaaaagataggctccatagaaaatgctttactcgatccgttgcttgtttcccgcatcaacgatctgcactcagaagggcaggctttcttaaagcgaatggagtcattgccccgaattgactatgctgtaatcttagagactggccaaaaggggctcgatgaatatgccgtgctggccgattcgcttaaagtacattctatacaattagcctctcgtatgggagaggagcaagtgactcttgccgaacggagaaaaatactacagcaggaaaaggaatccctggaaagtggaatctatccctttccccaagatgtgaccgatttgaaagaggtggtctcttcccgtttgcgcctgaatactggaaaggacataaaagttctcgttgtagccgaagctgctgagattaaaaatgaccgctggcgcaatgttattgaaggatacctgaatacacaaaaatactacatcattgttcctcaggagtattttcagacggctttacgcgtttttgatgccattaagcgccaaaggcaaatatatggtacaggcatcattgatattgaaaaaatgaagcatattaagccaacggcagactcaggaagtcttgccgaagagattgcaacggacgagcaggatgtccggttgtttttggactacacccttgggcgggtaaagaaatgcgatcgtgtaggtgatttaaggcgttttcgtacatcggtgacagatgaaggtatgatgtaccaaaattttgttgtccgggcaatggatccgaaacgctgggcaaagccggcgattggccagggcgctatacagaggagactggaagacgttaaaaaagagataggcgtattagcacagcaaatagctgcatgtgccacgataaaaaccggtctccagttcagtagtacattggtcgcgctcagccaagcagagattgagcatgccatctcctcggcgaaaggcctgtctgccgtggaagctttggagaatgatgtgcgatctttgcgggaaagcctctcaaccattgataagagcgcggtggaggcgttgaaagcacacatcgaagctttagcaaatgagatgaagattctttccgaacgaattcgtaaagacaacatcgattatggaaaacgtgaggccattgttaccatgcttcgagatgaaactattccaaagcttacaggcgaattagagacattggaaacggagcttacaaggaaatacaatgaggaatggctggaaaacaccggccgcttgagatatcaacgagagttatcttcccgaggcaatgcagaggacatcaatcgggcattcccgcgagagctgagtagatctaccaatgcacgtgagtctatgtgggacgatctattgaatttacgccgtacttacaacgaaaaatacatcatgggctataatattaaggcggaagataatgaagtgtatgataatgcttggcttgaactcagtgaaaacaaattgcctgagtatttggcaagaattgaggatacgcgtcaaaaggcttttgaacagtttcaggaagatttcctcagccgtttgcagaacaacattaatgatgcgaagcgtcagattgacgggcttaacaacgcgctgagcgggagttccttcggtggggatacttatcggtttcgtattgtgccaaaaccggaatataggcgctattatgatatgatcgtcgaccctatgctcctcgagggaggctataatttgctttcagagcagttcaatgcaaaatacaaagaagagatcgcagagcttttcgctatcataaccaatgaaggagctccggcaaaggtacgtgagcatgacgattatgagaagcgcgtgcaggcatttaccgattaccgtacttatctgtcctttgatttggaagtcgtaaatcgtgacggcgaaacgcaaaggctgtcaaagacacttggcaagaagtccggaggagaaacacagacacctttctatattgcggtgctggcctcctttgcccagctatatcgaataggaagagacaaaaacgccagtacatcgcgtctaatcattttcgatgaggccttctccaaaatggacggcgagcggatcatccggagtattgagcttttgcgtcagttcaatttccaagtagtgctttccgcgccacctgataagataggagatattgctactctcgttgacagaaatctgtgtgttcttagagacggaaaacgtgcctgcgtcagaagccttgaccccaagcggcttgaggaaattgagtatgagtga

SEQ ID NO: 42781 - DNA, 1254 bp, Desulfitobacterium hafniense DP7
atgagtgatacgattcaacgacaattgttgtcagccttgctggataagtatgagcgcagcatctttttccgtgaagggatacacccaactcggagaattatgctgaagttatatgataacgggcagtctgattttccacagtataatattgagcaaagtgagaagcgcattttagccaatcgtgcggttttggcaatggtggagaagcggcttgtcttctaccaatggatgaagggcgaagaaaatcatatcatcgcccagatatggttaaaccttgaaaacttgcctatggcctacgaatttgctggacgtcaacccaagaatgagaagatcgatgatgtttgcttcgagatactggatgtcttggataaagttaaagtcttatgggcaaggcaatatcttcaggacctatatgagacaatttcccgcaagcgcgatcttggcaataggctcccggaagctgaagacgagcggaaagagttgttccgcgcgatacagtttattgacggtatgggggactccgaagtgttggaaagggtcttttcgttacaatgctttggagattccaagcaatttgaacgaacagtaaagtcacgcctgctaagtgttctgcgaaaatatctggatactgaagaggatgccagggacgaggagttgctcaggcaaattggaatcgttaaatatccggaacaatttgagttttgtggtgatgtaaagctatccttcgcgtgcggcacggtcgatttttcgtatctgcggtatggcggaaatgtctgctcagcggatttgctccgaggaaatttggttatcacttccgaagtggagcggattctatcaattgaaaaccgtgccaattatattgactatatatataagcataaggtggataatgaactggttatctatcacggtggacagtatagcccgtccaaaaagaaattctttcatgccgtagccaaggccatgccaacaaactgcggctggtctcactggggagatattgattatggcggctttagtatgttggcccggctgcggcgcgaaattacccaagatatcagtgcctatcgaatgaatgtgcaagaacttaagcgatatagcaatttaaccgcttcggttactcatgcctatgctgagaaggtaaagagtcttgagttacgatcagaactcaacgattgcaaggaatgtctggattatatggtgagtaatagaaagaagctggaacaggaggctatgctgaccgacacagaataa

SEQ ID NO: 42782 - DNA, 1458 bp, Acidovorax sp. NO-1
atggatctggactacaccacgctgcaccaaatgcgccgccagcaccccgcctggcggctgctggtggccgagcatgcgccgttggtggccagttttctgcaccgcgttttcattgcgccgaatgtgcgctccatggcgcaggccaacctggtggaggcgctgaacgacacgctttacgatctgcgtgaacgcctgggcgagcaggccttcccccggtcggcgctggactatctgaacgactgggccgcgcacgacaagggctggctgcgcaagttctaccccccgggcacggacgagccgcagttcgacctcacccccgccaccgagcgggccttgacctggctggccagcctgacagagcgcagctttgtgggcaccgaatcgcgcctgctcacgctgtttgcgctgctgcagcaaatgagcgaaggcaccgacaccaaccccgagacccgcatcgctgaactgcacaagcgccgcgatgccatcgacgcggaaatcgcccaggtgctgggcggacacatgccgctgctggacgacaccgcgctcaaagaccggttccagcagttcaccagcctggcgcgcgagctgctgggcgattttcgggaggtggagcacaactttcgccagctcgaccgcaaggtgcgcgaacgcatcgcactgtgggatggtggccccacgcagggccggggtgcgctgctgcgcgaaatcctgggcgagcgcgacgccattgccgaatccgaccagggcaagagctttcgggcgttctgggaattcctcatgtcgcaggcgcggcaagagcaactgagcgcgctgctcgaccacgtgctggccctcgacccggtggcgcaactggcccccgatgcacggctgcgccgcgtgcactacgactggctggaggcgggcgaacacgcccagcgcacggtggcccagttgtcgcagcagttgcgccggtttctggacgaccaggcctggctggagaaccgccgcatcatggagctgcttcacggcatcgaagcgcgggccgtggcgctgcgcgatgcacccccgcccggcgaggtgttcggcgtggacgccctgcaccccgccgtgcagttacccctggagcgcccgctgtttcgccctgcggccgccgtagcgctgaacgatgctcccgtgcaggtaggcgacgctggggtggacgctgcggcgctctttacccaggtgcgggtggacaaggccgcgctggctgcccatgtgcggcaagcgctgcaaacgcgggcccaggtcagcctgggtgagttgctgcacatgcgtccgctgcagcaggggctgggcgagctggtggcctacctgcaactggccagcgtggccgcgcaggccgtggtggatgaagctgtgcaagagacggtgcactggaccgcatccgacggcgtgcaacgcagcgccacgctgccgcgtgtgatctttgtgaggacttga

SEQ ID NO: 42783 - DNA, 669 bp, Acidovorax sp. NO-1
atgagcgacgacctgaacgacgcagcgcccatcgatgcaatcgccaaccccttaccgcagtgggatctgtctgccgtggtcatcccgttgctgcgtggcgtggtctaccgcgacgaagacgctgcgctgtgggacgccctgcaggcgctgcgtgcacgggcggcagactacgtggcggtgctggcgctggacctggtggtggacgaggccgaaggctatgcctttgtgcgctcgcgcgtgcaagaggaggacgaggcggccgccaagttgccgcgcctggtgcgccgccagcccctgagttttcacgtcagcctgctgctggccctgctgcgcaagaagctggcggagctggatgccaccggcggcgaagcccggctgattctggcgcgcgacgaggtggtggagatggtgcgcatcttcatgcccgccagcaccaacgatgcgcggctgatcgaccagatcgaaacgcacctgaacaaagtgattgagctgggctttgtgcgccgcctcaaggccacccatgcgggccaggcaccggtgtacgaggtgcgccgcatcctgaaggcctttgtcgatgcccagtggctggccgattttgacgagcgcctgcaggcctaccagcagcacttgagcacctcgcagacggaggcagacgatgcacagcagtga

SEQ ID NO: 42784 - DNA, 3510 bp, Acidovorax sp. NO-1
atgcacagcagtgacgagggcgacctgtttgcgggcgacccggcggcccccgcggccccgcttgcccctgccgggccgagcggggcccaggagcgggcggcggctcccacagttgcggcgctctcgggttttcggctcatgcggctggaggtgttcaactggggcacgtttgacaaacgtgtgtggtcgttggcgctggacggccgcaacgggctgctgacgggcgatattggttcgggcaagtccacgctggtcgatgccgtcacaacgctcttggtgccagcgcaccgcattgcctacaacaaggccgccggggccgatgcgcgtgagcgctccttgcgctcttatgtgctggggcatttcaagtccgagcgcaacgaaaccagcggtagcgctaagcccgtggccctgcgcgatgcgggcagctattcggtcatcctgggggtgtttcacaacgcggggtttgaccagacggtgacgctggcgcaggtgttctggctcaaggaggcccaggggcagcccgaacgcctgtacgccgtggccgacaaggccttgtcgattaccgacgactttgcccagtttggcagcgccatcaccgggctgcgcacacggctgcgcaaaggcggtgtggccttgtttgacagctttgcgcaatatggcgcgcattttcggcgccggtttggcaacctcggcgagcaggcgctggagctgtttcaccagacggtgtcgatgaagtcggtgggcaacctcactgagtttgtgcgccaccacatgctggagccctttgacgtggcgccgcgcatccagagcctgatggcccactttgacgacctgagccgcgcccatgcggcggtgctcaaggcgcagcaccaggtggcgctgctgacccccctggtggccgactgcgaccgccatgcccaggtgcaggcccacatcgacacccagcgcgccagccgcgatgcgctgcgcgcgcactttgccgggcttaagctggcgctgctggatgagcgcattgcgcagctcaccgatgccctggccagcgaccacaccaaggtgcaggtgctggagaccgacaaagcccgccagcaaacgcaagagcgcgaactgcgcgcggccattgcccaaagcggtggcgaccgcattgcccagctggaagaagccatggcccgcagccaggccgaaagcacgcgccgcaaagcccatgccgcgcgctacgacgcgctgcgccagccgctgggcctgctgcaggtgggcaacgcgcaagagctgctgacccagcagcaggcctgccaaagcatgcgtgaggtggaaggggctcgcagcaacgagctgcgcaacgaagaggtggagcagggcgccgcgctgcaccaggggcggcaggagcacgccgcgctggcggccgagatcgacagcctgcgcgggcgccgcagcaacatcgatgcgcggcagatcggcatccgcgcggcgctgtgccaggcgctgggcgtgcccgaagaccgcatgccctttgcgggcgagctgatcgaggtgcgagacagcgaacgcgactgggaaggcgccatcgagcggctgatgcacaactttggcctgtctttgctggtgcccgaagcgctttatgcgcgcgtggccgaatgggtggaccagacggccctgcgcggacggctggtgtactacaaggtgcacccaacgcggcctgcagacgtcccggagctgcccgccgatgccctgttgcgcaagctctccatcaaacccgattcacccttttacggctggctggagcaggcgctgtggcagcgcttcaacgtggtgtgctgcaccacccaagagcagtttcgccgcgagccccgggccatcacccgcgccgggcaaatcaagggcggcgagcgccacgaaaaggacgaccgccacgcgctggccgaccgcagccgctacgtgctgggctggagcaacaccgccaagctggcggccctgcaggccaaggccaaagtgctggaggcccacctgggccgcgtgggcgcccgcattgccgagctgcagacgcagcagcagtcggtgcaagagcgcttgcgctggctcgacaagctggtggagtttcgcgactatgcggagctggattggcaaacccctgcgcgcgaggtggcgaggctgaacgacgaactggcgcagttgcgcgcatcctccgacctgctgcaaaccctcaccgggcgtttggctgaggtggaaagagcactggtccagctggaggggcgcctggccgagcagcgcgaccggcgcacccgcaccgaggtgaacctggcccacgctcgcacccggcgcagcgatacagaagcggcccttaccgatgagccccctacagaccgtgctgccgccgagcacctgaacaccctgttgtccgaggtgctgggcggccagccgctcacgctgccccactgcgacgcccgcgagcgcgagctgcgcgaggcgctgcaaaagtccatcgacgccgaagggcggcgcagccagcaactggtggaaaaaatcatcgccgccatgcgcgcattcaacaccgcctatgcgctggagacgcaggaaatcgacgtggcggtggcttcggccagtgaataccgcaagttgctggagcaactgcacgccgacgacctgccgcgttttgaggccgacttcaaacgcctgctcaatgagaacaccatcaacgaggtggcgcatttcaactcgcagctcaaccgcgagcgcgaaaccatccaggaacgcattgcgctcatcaaccagtcgctcacccagatcgactacaaccccgagcgcttcatcgtgctggaggctcaggccacgggcgacgtggaggtgcgtgagtttcgcgccgagcttacggcctgcctgtcgggggcgatgtcgggcaccctgcccggtgacggggcggggcagggcagccagtactcagaggccaagttcctgcaggtcaaggccatcatcgagcgcctgcgcggccgcccgggcctggccgagcctgaccgccgctgggccgccaaggtgaccgatgtgcgcaactggtacgtgttttcggccagcgagcgctggcgtgccgatgggcgcgaacacgagcactacagcgactcgggcggcaagtcgggcgggcaaaaggaaaagctggcctacaccatcctggccgccagcctggcctaccagtttggcctggcctggggcgagacgcgttcgcgcagctttcgctttgtggtcatcgacgaggcgtttggcaggggctcggacgaatcggcgcaatatggcctgcagctgttccagcggctcaatctacaactgctcatcgtcacgccgctgcaaaaaattcacatcatcgagccctttgtgtccagcgtaggctttgtgcacaacgcagaggggcgcgactcgcaactgcgcaccctgagcattgaggagtaccaggccgagaaagagcggctggagggcctcacgcagcaaatccacatccacccggagcccggccatggcctggactag

SEQ ID NO: 42785 - DNA, 1224 bp, Acidovorax sp. NO-1
atggcctggactagcccggacgacctgcgcgcgcaggtgcaaaagcgctgggaccggggcgagctgctggccgcgctggtagctggccatgcagcggtggacacgccgtcgctggtcttcccctgccgactgcgcgtggtggcgcccagctccagcgagctggcccagcgctttgccgaggcccgcgcttgggccagcagcctgcgggcaggcgcaggccactaccggctggaagaacgcgaactgcgtcaccgcgaggtaggccagcacagcctgcccgacgttgcctgggtagacagcctggacgcagccctggccctgatcggcaaaaccgccgacgcccgccgctttgccgcgctggtggccaccactgccgggcagcagcccttgctgttgccctggttggcgcgccgccctctgcaggccctggcgctggctgcggcctggcctcggctgctggccgtggtggcatggttgcaggcccacccccggcccggcatctacctgcgccagatggacctgcccggcgtggacaccaagttcaccgaagcgcaccggggcgtgctgaccgagctgctggacctggtcctgccgccccaggccgtggacgctgcggccacgggcgtgggccagtttgcacgccgctatggttttgccgacaagccgctgcgcattcggctgcgctggctgggggcggctgcgctcgcgccgtggggggcgggcatcacagatatcaccatcacacaaggcgctttcgagtctttgaacccgcgcgtgcgccgggtgttcattaccgaaaacgaagtcaattttttggccctgccaccggttgccgacagcctggtggtgtttggcgcgggctacggttttgaggtgctggcgggcgcggcctggctgcggcactgtgcagtgcactactggggtgacatcgacacgcacggctttgccatcctggaccaactgcgcgccacgctgccgcaggcccagtcgctgttgatggaccgcgccaccttgctggcccatgccgaccactgggggcacgaaccccagcccttgactcgcgagttgccacggctgcaccctcatgaatccgcgctttacgacgacctgcgctatggccgggtgcgggcagagccccccctgcggctggagcaagaacgcatcgggtttggctgggttgagcaggccctgtccgtgctgcagccgaccggggaatctgaatga

SEQ ID NO: 42786 - DNA, 1449 bp, Arthrobacter globiformis NBRC 12137
gtgccccggtccgccacgtcctccgctgacgcgatcagcgcaaggctcagggaccttgagctcctcaccaagggaccggcttgggccctcacccgttccgccccgtgggtgatcgcggtcctgcaggcatcctttacccgcacccggccgcagcttccgctggaagaattccacgccgacgtcgactccttccttgagcagttgcgccgccaggagccggggctgggcgggcatgccaacggaaaatccttcggcgatgagtggacccgcaagcagttcctgacccgccggaaccaatcggggcagatcgtttacgaagtcacggaggcggccgcccgcgtgctggcgttcctggacagcctctccagcgaaaggtccacgcttaacggctcccggctgggcacactcctgggtgacgtggagaagctcgcgaacgagaccaacccggaccagagtgcacggctggaagcgctggaggaggagatcgaggagcggcagcagctgatcgaggacatcagctccggtgacttcgacggcctgctcgacgacgaccaggctgtggaagcagccggcaacatcctggatctcgccgccagcctgcccgcggactacaagaagatgcgtgatcgcatcgaggagctcgtgggcgagctccggaaccagatcatcgaggaatccctgaccaagggcgccacgatggcgcaggtccttgaggcggacaagcggctgcgccagagcccggagggcaggaccttccgttccttcaccgccttcctcgaggacccgcagcagcagctgcgcttccgctccgcgatcggcgaggtgctcagccgccagttcgcagacgacctgtcgccggaagaccgggagaccctgaaaaacctggtggccgaactccggcagcagcacagccagatccagcgcatctacggcaagctcagcgagagcctgaacacctacgtccagagcgacgacttccgccagtcggtgcgcctccgcaaggtgctgcgcgaggcggagcaggccatccggtccatgccctacgagcgcgaacggccgggcctggtccgcgggccggtactgttcaacgccggtttcgaatcgctcgccatggtcaagctcttcgacccggacgagtttgctgccccgcccaagctcgccgaccccatcgcgttcagcgactcggaccgggtccgctccccgcggaccgccaaggccaggccggaggcgatccgcgccgcggctgccggcgcctccacgctcgccgaggcctgggagcagcttccgccagaggaacagcacatcaactccatccgcgcgctcctctcgcacgccctccacaccggcgccggctttgaccagctggcatatgaggccctcaacttcgaacagatagacggcaccacccgcaaggcatacctgccggtggtcacgctcaagaaggattag

SEQ ID NO: 42787 - DNA, 825 bp, Arthrobacter globiformis NBRC 12137
atgactgaagagatgacgacggcggacgccgattccccggtggttgagcccgccgaatccgcggccatgccggcaagctccatgggtagcggcgtcaccccccgcgacacgtttgtggacggcgccgcactctttcccggtgataccggtgtgctgcccatgaaggtccgccaggccctcgtgaagctgctgaagggcccgtacgtcgacggcggccgggacgagaaactctggacaacgctgctggacaaccagctgatcctgcgcagccggctgtccgagcttttcctcacgctgcagctggaccacgagcgcaagatcgcggtgctgcgtcccgttgaccccgaggcgatcggcggcagtgcccgctccagcatcctgcgccagcagcgtgccctgagccgggtggaaacgatcgtgctgctgcgcctccggctcctgctggaccgccacgtcacggcgcagacggaccccaccatcacccgcgaagaaatcgccgaactcgtggcgcactaccagccggccggccagcaggacgccctgcgcgactcggacgtggtgaaccgcgcgatcaccaagctcctcgcccgccagctcctgctcaccaccggcctggacgacgtctacaccatctccaacgccctgcccctggccctccccttcgacaacataggcgacatccccgcccaaatcgaagccctgatagccgccacggcagacccgtcagggacagaaccactcatagaactcgacgccgaccgctccgtcagtgacgaagaagcggacagcgacgaaacaccggccacgggcggagaagccaagtga

SEQ ID NO: 42788 - DNA, 3453 bp, Arthrobacter globiformis NBRC 12137
gtgagtatcgcaagcatgctcccgctgggcgaggtcgttaacccgggccagatgcgcctggccctggtgcaggtggtcaactggggaactttccatggcgcccacacgatgcacgtggaccgcaacggcaccctgctgacaggcaactcgggtgtgggcaagtcgacgctgttcgacgccatgctgcgggtgttcgatgcccggccgcgctccaacgaggcagccgcgcagcgctcgggagccgtggaggacaagcggaccacgttcacatacatgcgcggcaaggtgggggacaaggccgtcggggagggctcggccagcgcgttccagcgtcccggcgccacctggtccgccgtcgccctgacattcgacaacgcggcgggcaccagggtgacggtgtcggcgctgttcgacctgcccaagaacggtacggagtcgagcgtcggccggtactacctgatcgacaccaggccactggacctcgccgcgatcgagggcatcgccgagaagcgcttcaccaaggctgcgctggaaaacatcttccccgacgcccaggtttttgatgtccataaggcgtttgcggagcggttccgccggctcctgggcatcaactcggaccaggcgctgcccctgctccgcgtcatccaggccggaaagggcctgggcggcagcgtgaacacgttcttccgagaccaggtgctggacgcgccggccaccctggccgcggcggacgacgtcgtcgaggaattcagcaacctcatgtccatccggcagcggctcgaggatgtccggcagcagcgcgaccagttggcccccgtcccggccctgaacagggagtacgcccagtcgctgctggacgcgaaccggctccgcgagctcgccggcgaggagttcgaggcctaccggcagcagcttgccgtcaccgtgcacgagaagacgctggcccgcttcaaggcgctcgcccagacgaaggccaaggagctcgcagcggaacgcggcgtccgggacgggctggccaaggagctccggcagctggaggcggactacaacaaccagggcggcaacgccatctcctcgatcgagcagtccctcgagaacgcccgggtgggcctgaagctccgccagcaggtggaagaggcggcccggcaggcgctggcggacgctggcctggatctggagtggacggctgaaggctgggagcaggcccacgagcaggctgccacccgctcggctgagctgaaggatgactccgcggccctgcaggagctccgcttcgaggccttcgacgcccatgccgcgaagaagcgcgagcatgccgcggccgaacaggagcttgtgtcgctgaaaacgcgcaagtccctgctgccgccgtcgagcattgaaaaccgggccgcgattgcggcggccaccggcgtacccgaggagcagatgccgttcggcggcgagctgatcgaccttgccgagggccaggagcagtggcgacccgccgctgagcgtgcgctgcggaacctggccaccacgctgcttgttccgggcaaacatttcgcggcagtcacccgctacctgaatgaccacacggtccgcggcgccctgcgcgcggtggacgtctccaagccgctcgccggggcagcgctcgcggtggaggacgtggccgacggcgacctgctgaccaagctggacatcctcaccaccgggacaaacgcagaagccgggatgtggatccgtgagcggatcgcgcttgacttcgcgtacccgtgcgtggccaaccccgacgaactggcggccctggacaagggcctgagcctgggcggcgtggtcaagcgcaaccggcacaccgtggagaaggacgaccgcttcaccagccgccaggactacgtcctcgggttcgacaacgcctccaagctggagctcgtggccgggcaggcggaagacctgcgccaggaactggcgaaggcggcgcagctggcccaaagccgcgaggaatcacaccagggcctgtcacgccagctcgaggccctccgcagggttgccgaggacgaccgcccgtgggaacaggtttcggcggcggttgctgcagacgagctaagcaggattgaacagcggctcaaggacgccctcgccgcccagaccgacctcgaaccgcttcgcgccaacatcgaagcggcccgccaaaagcaccagtccagcaccgaggccgccgccgtgctgcagagcgaatacaaggcactggaccagcagctcaccgcctccgattcgctgctggaagccgcacgtacccgcctgaaccaggccccgccgtcggactccaccaccgcagcgctggcgccctacttcgccgagttcgccgacgtcacggaaatgcacgaactggacaacctcgccggccgggtgcggacccagctgctcggtgacctgcacggtgcggagtcccgcgcccaggccacgtcggagcggctcacccggatcttcgaagggttcgtccgcgactggggcaccgccatttcggccgaccacggcacgtccatcggcgccgtcggcgagttcgaggcccgctaccacgcgatcatcaatgacgggctacccgcgcaggagaccgaattccggcagttcttcaaccagcgcacgcacgagtcgttcagcaccctgctccacctgctggatgaggagcgccgttccatcaccagcaggatcctgccgctgaacggaatcctgtccgaggtgaatttccacgaaggcagctacctcgaactcgacatcaagcagaccctgccggccacggccaagcagttcaaggacgccatccagaacgccctgaagacccggcacacccggcacggcaagacggaaaacgcccatgcgggccagaatgacgacgccgaactgaccgcccgctacaagtcgctggagacgctggtaaagcggctggggtcgcagacccccgaggaccggcgctggcgggccgaggtgctggacgtgcgcggccacctcttcatccagtgcaaggagcaccgagaggtggacgcccccgggaagaagggcggcaaacgcacggaagtgttcatgcatgccgacacgggctccatgtccggcggtgagcgccagcggttcaccgcgttcatcatggcggcggcgctgagctaccagttgggcatcgccgagcagggcttcaccacgtacggcacggtgatgatggacgaggcttttgtgctggcttccgaggagttcgccggcgcgggcatcaaggcgctgcatgagtttggcttccagctgctccttgcggcaccggagaacgtcatcgacctgtcccggcacctgggctcggtcaccgagatcctgcgggacaggcgaaccaaccgctccggcgtgctcaccgcccctgttatcaccccgaaaccgggaacagcaaggcagtggcggtccgaagccaatcccgtggatatcgtgctgcgctag

SEQ ID NO: 42789 - DNA, 1461 bp, Mycobacterium abscessus subsp. bolletii BD
atgaatgatctgaccgtcgaagagctgttcgcgcacaacgatgacgtgcagaaatcccgtgcggtccgcctgttggccgccaagaatctggcgccctacatcacgctcatggaacgccacctggaccgcagcgccaaagtctccgaacctcagctggtagccaagctggaccgggacctgagcgccgtcgggctgggagaacagtccgggctggctctcatcaagagctgggcgagcgacgggtggctgcaccgagcgtcggacggcaccggccccgatgccgagaacgtctgctcgctgaccgaggacgcgcgcagcgcgctggcctttgtgcgccgcctgcgccgcgctgacacggtggccacgggtgggtccatcgccggtatcgcggcaggcctcaaacgggtggccacccagctggacggcgacccgtcacgcctgcgcgccgacatcgaagcccagatcgcagaactgcagacccagctgcatgccatcgacgacggataccgtccggaaccggatatcgtcgatcttgaggacgagacccgggccatcgcctatcagatggaacaggtgatcaccgacatcgtccgctacggcagcatgcagaatgagatcaccgccggactcatcgacgccgccgaggactccgactccggctttcgcgaccgcgcccgcagaatgttcgcggactacgacgccctcttcgattcccgcgaacgcgcctcatattcggccttcacgcggaccatccaggatcctgatcagcgagccgcgctacggagcgatatcgcctgtgtcgcagagggtttgcccgatctcgacccgggactgcgcgaggtcatgaagaacttcttcaagctcgtttctcagcagatcacggaggtctcccgcatcgaacagcgctgcgcacagcgcatccggcggttcttcgccgccggcaccacggagcaggctcgtggccgtgcgcgacagctcaacgacgctctggcagccgggcacgctctactcaaggtgtcgacggcggactctccgatcgacgccgagctaccgattgggcgttccgctgcagcggccatcggcgcgctgtctttcaccatcaaggacaccgcgccgccggtgctcgcgcaggacgctccgtcggggccgctggatttgagcggattctcggcgctggccacccaggtggacatggcggcattggccgatacggtcaacagtgctgttgccggtggaccagtttccttgcccgacatgatctctcatgtcgaggccccctacctgggtgatgtgatcgtgttgtggtcactggccctcaagcaggacaacactgccgaccgcgaatcggtaaaggtgaagttccggtcccttgacggacaggaccgggtgatggaggtacctaagttgatgttccgtgaaccggtgctggccaccctcgaagaggagggatcgacactatga

SEQ ID NO: 42790 - DNA, 750 bp, Mycobacterium abscessus subsp. bolletii BD
atgaccacacaggtttcaggaacctccctggggaacatcaattttgacgacctgccgggtgtcgaacccgatgcctcggcaccgcgaacggccaaggggccgcgattcgacggcgacaccagtgagcttccggacaaggcctgctgggcgctgcagaacctggtggcccggcgctacctgagtaaggatggccagcccgaactgtgggcgtcgatgatggagcatcgcaaggtgctggccgcgcgcctgtccgaattggacctgcggctgcgggtgttcgacgatctcgaggttgcctacgccgaaccagccccgttggagaaccccagcgtgtacggcgccagggtgttgcgccgggaaccgttgggcacctacgcgtcgatcgtggcactgcacctggccaagatcgcgaggaccgcgcacgacgaacatgtattggtcagccgcgacgatattcacgaacttttcgccaacgtctcccacgatgtcgaccgcgacgaggcgatgctgcgtgatcgcgttgacgaggcgatcaagcggctgtccaaggctgagattctgcagcgcacccgcgatgacgagcacagctacaccatcagcccagtcatcaacgcgctgatgtcggcgcagatgatcgaggcactgcagcgtcagtacgagcagttgcagcgcggcggtgccgcccccgaagacgccgacggcgcagaccccaccgacgaagaagatggcgagaccgatgacgacgagtga

SEQ ID NO: 42791 - DNA, 3312 bp, Mycobacterium abscessus subsp. bolletii BD
ttgtcccggctgcaggtcatcaactggggcgtcttcgacggctatcacagcatcgagttcagccgtcgcggtacgctgatcaccggctcctccggtagcggtaaatcatctctactggatgcgatctcgttggcatttttgtcttcgaatcgccgtaacttcaacgcctcgagcgataccaccgccgcgggttccagcatgggcaagcgcaccgtcgacaagtatgtgcggggcttgtggggagagctgaagaacccgggggagcgccccaagcagatgttcctgcgcggcaagggtggggcctggtcggctatcgccgtcacctactccggcaccgacggtcgggtgatcaccggcctggtactcaagtggcttgccccgggctcggatacggactcgtccagccgctactacctgatcgatgccgacgccgacatccgtgatctctgcaatgcatgggccagcaagggatacgccggctcggtgttcgagggcgcgggttggcgcggccacaagagcgaacgctggtacctggaacagctatacgccgccgtcggtattcagggttcctctgccgcgcagcagctgctgggcaaggccaagtcgctcaagagcgtcggcggtctggagcagttcgtacgcgagtacatgctcgatgaaccggagtcgatggcagcgatatccgaagcgctagggcagatcacgccattggtcgacgcccgtgccgccttggcgatcgcgcagcgccagcggcagacgctgggcgatatcgaacagatccaacagacgtacgccagcgatgcggcgcagttggccaccgtggacgtcgtggaccatcacaccgtgcgcgactacgtggatcagcagcgcctggcgctggcgggcccggagatcgatctgctcgataccgagatcacccggctgggcggtgagtgtgacgaaatccagtcgcgccaggatattctcacgggagagcgggacaaattgctcggccggatcgccgccgccgacagcaatctggcgccactcaaaagcgagctggctcatgctcgtgcccgcgcagaagaggtgtcgcgccggcgcacggcctacgacagtgcattgtgggacctgggtcatgaagacgatatcgaatctgccgaggaattcgaggccatgcgggtggagagcctgcgggcagtcacccggatcaacgctgagctcgaagccggccacgatgcatatgtcatggccgcgggtgcgctctcgacggcacgtgaccagctgcgtgccgcatccgccgaattcaagcgggtcgagcacctgggtaccccggtgccgccggatgaggaccgcatgcgcggggagatcgccgcggcgcttgggcttacggccaaggacctgccctatgtatgcgagctgatggatctgcgcccggggcaggaacggtggcgcagatctgtggagaaggtgttgcgctccaccgggctctgcctgctggtgcccgatcagcaccatcgtcaggtgctgcgttacgtcaacgagaacccgatgcgcggctacctgcagatagagcgggtgattccctccggtaccccgcggcgcgccgagccgggcacgctcgccgactgtttgcgcctgaccaaccccaaccacgaatgcgccagtgccgccatgaatctggtggccggtgtcggcgactacgtgttggtggacagccccgacgaattcagcaagcaccgccgggcggtcaccgatcagggactgcgcaaggacggtgaccggcgcgcggtcaaggacgatcggcgtgaattgcgggcctcccagtacatctatcagggcaacgccggtgacaagcgcgccgcgctttccgacgatgtggtcgaagcgcagcaggcggtcagtgatgccgaaaagttcatcggcgaaatggacaccaagcgcgaagagctgcgctcggaggtggtgcggtggtccaagttgcacagccagtacgagtattggagccagatcgatacggactcggccgaggcggccgtggcgcgtctacaggaccagtacgacgcgatgctggaagccaaccccgacctgaccggattgcagcagcaggccgactcctacctcgacgagatcaagaagctctccgaacgcatcggagcattgcgcaagcaagaatccgagcatgattcgcgccggacccggctgctggatctgctggacaacctgaacccgcgtgaggtgggcgggcatacccgatcgggaatcgaggcctacgtgccccaactctcgtccagcctggatgtgttggaacccgacgcctaccgacttgagctgtggcggcagatcgagaaggatcagtcggtgctgcgtgagagcgtcacccgctcacgcaacgagctgaaccggattctcaacgcgtacgaccgggatttccccgactctatccccaacgacagtgagaacttcgacgagaagatccacgactatgtcgcactctgccgccggatcgatgaacgcgacctgcccgctgcctacgaacggatgctgcgactgatcaccgagcaggcgcccactgccgtgttgcggctgcaccagctcgccgaggaggaggcacaccgcatcacggaccagatcgaccgtgtcaatagcggtttgggttcggtcgagttcaaccggggtacccggctgaccctgcgtgccgagccgaaggcgctcgaagcggtgggcgagctcaacgagcgtgcccggcggatatccgggcgtgccgtcgccgtttcgatgggggacgagaaggccatccacgaccagtaccaggacatcctgcaactgcgtaacctgttggccgccgagacacctgaggcgcgccagtggacgcgcgacgcgttggatgtgcgtaaccgcttcgtgttgtactgcgaggagcgcgatgccgggaccggcgaaccgatccgcacttacagcaacgcgggtgcgaattccggtggagaacaagagaagttgatggcgttctgcctcgccggcgcgctgagcttcaacctggccaacccggagacgggtgacaaccggccggtcttcgcgcagcttatgctcgacgaggcgttctcgaaatcggatccgcagttcgcccagcaggcgctgtctgcgttccgcaagttcgggttccagctggtgatcgtggccaccgtgcagaacaccaccaccatccagccctatatcgacagcgtggtgatggtgtccaagccggacggcccgggggtgcgtccggttgcctcgacgcgcacggtgccgatcggtgagctcggtgatgtacgcaaggccgtgagcgcccgctag

SEQ ID NO: 42792 - DNA, 1461 bp, Mycobacterium abscessus subsp. bolletii CCUG 48898 = JCM 15300
atgaatgatctgacagtcgaagagctgttcgcgcacaacgatgacgtgcagaaatcccgtgcggtccgcctgttggccgccaagaatctggcgccctacatcacgcttatggaacgccacctggaccgcagcgccaaagtctccgaacctcagctggtggccaagctggaccgggacctgagcgccgtcgggctgggagaacagtccgggctggcccttatcaagagctgggcgagcgacgggtggctgcaccgagcgtcggacggcaccggccccgatgccgagaacgtctgctcgctgaccgaggacgcgcgcagcgcgctggcctttgtgcgccgcctgcgccgtgctgacacggtggccacgggcgggtccatcgccggtatcgcggcaggcctcaaacgggtggccacccagctggacggcgacccgtcacgcctgcgcgccgacatcgaggcccagatcgcagaactgcagacccagctgcacgccatcgacgacggataccgtccggaaccggatatcgtcgatcttgaggacgagacccgggccatcgcctatcagatggaacaggtgatcaccgacatcgtccgctacggcagcatgcagaacgagatcaccgccggactcatcgacgccgccgaggactccgactccggcttccgcgatcgcgcccgcagaatgttcgcggactatgacgcccttttcgattcccgcgaacgtgcctcttattcggccttcacgcggaccatccaagatccggatcagcgagccgcgctacggagtgatatcgcctgtgtcgcagatggtttgcccgatcttgaccccgggctgcgcgaggtcatgagaaacttcttcaagctcgtgtctcagcagatcgcggaggtctcccgcatcgaacagcgctgcgcacagcgcatccggcgattcttcgctgccggcaccacggagcaggctcgtggccgtgcgcgacagctcaatgacgcgctggcggccgggcacgctctactcaagatgtcgacggcggactctccgatcgacgccgagctaccgatcgggcgttccgccgcagcggcgatcggcgcgctgtctttcaccatcaaggacaccgcgccgccggtgctcgcacaggacgccccgtcggggccgctggatttgagcgggttctcggcgctggccacccaggtggatatggccgcattggccgatacggtcaacagtgctattgccggtggcccagtttccttgcccgacatgatctctcatgtcgaggccccctaccttggtgatgtgatcgtgttgtggtcactggccctcaagcaggacaacactgccgaccgtgaatcggtaaaggtgaagttccggtccctcgacggacaagaccgggtgatggaggtacctcagttgatgttccgtgaaccggtgctggccaccctcgaagaggagggatcgacactgtga

SEQ ID NO: 42793 - DNA, 750 bp, Mycobacterium abscessus subsp. bolletii CCUG 48898 = JCM 15300
gtgacgacacaggcttcagggaccgccctggggaacatcaatttcgacgacctgccgggtgtcgaacccgatgcctcggcaccgcgaacggccaaggggccgcgattcgacggcgacaccagtgagcttccggacaaggcctgctgggcgctgcagaacctggtggcccggcgttacctgagtaaggacggtcagcccgaactgtgggcgtcgatgatcgagcatcgcaaggtgctggccgcgcgcctgtccgaattggacctgcggctgcgggtgttcgacgatctcgaggttgcctacgccgaaccagctccgttggagaaccccagcgtgtacggcgccagggtgttgcgccgggaaccgttgggcacctacgcgtcgattgtggcactgcatctggccaagatcgcgaggaccgcgcacgacgaacatgtattggtcagccgcgacgatattcacgaacttttcgccaacgtctcccacgacatcgaccgcgacgaggcgatgctgcgtgatcgcgttgacgaggcgatcaagcggctgtccaaggctgagattctgcagcgcacccgcgatgacgagcacagctacaccatcagcccagtcatcaacgcgctgatgtcggcgcagatgatcgaggcactgcagcgtcagtacgagcagttgcagcgcggcggcgccgcccccgaagacgccgacggcgcagaccccaccgacgaagaagatggcgagaccgatgacgacgagtga

SEQ ID NO: 42794 - DNA, 3312 bp, Mycobacterium abscessus subsp. bolletii CCUG 48898 = JCM 15300
ttgtcccggctgcaggtcatcaactggggcgtcttcgacggctatcacagcatcgagttcagccgtcgcggtacgctgatcaccggctcctccggtagcggtaaatcatctctgctggacgcgatctcgctggcattcttgtcttcgaaccgccgtaacttcaacgcctcgagcgacaccaccgccgcgggttccagcatgggcaagcgcaccgtcgacaagtacgtgcggggcctgtggggagagctgaagaacccgggggagcgccccaagcagatgttcctgcgcggcaagggcggtgcttggtcggctatcgccgtcacctactccggcaccgacggtcgggtgatcaccggcctggtactcaagtggcttgccccgggctcggattcggactcgtccagccgctactacctgatcgatgcggacgccgacatccgtgatctctgcaatgcatgggccagcaagggatacgccggctcggtgttcgagggcgcgggttggcgcggccacaagagcgaacgctggtacctggaacagctatacgctgccgtcggtattcagggttcctctgccgcgcagcagctgctgggcaaggccaagtcgctcaagagtgtcggcggcctggagcagttcgtacgcgagtacatgctcgatgaaccggagtcgatggcagcgatatccgaagcgctagggcagatcacgccattggtcgacgcccgtgccgccttggcgatcgcgcagcgccagcggcagaccctgggcgatatcgaacagatccaacagacgtacgccagcgacgcggcgcagttggccaccgtggacgtcgtggaccatcacaccgtgcgcgactacgtggatcagcagcgcctggcgctggcgggcccggagatcgatctgctcgataccgagatcacccggctgggtggtgagtgtgacgaaatccagtcgcgccaggacattcttacgggagagcgggacaaattgctcggccggatcgctgccgccgacagcaatctggcgccactcaaaagcgagctggctcatgctcgtgcccgcgcagaagaggtgtcgcgccggcgtacggcctacgacagtgcgttgtgggacctgggtcacgaagacgatatcgaatccgccgaggaattcgaggccatgcgggtggagagcctgcgggcagtcacccggatcaacgctgagctcgaagccggccacgatgcatatgtcatggccgcgggtgcgctctcgacggcacgtgatcagctgcgtgccgcatccgccgaattcaagcgggtcgagcacctgggtaccccggtgccgccggatgaggaccgcatgcgcggggagatcgccgcggcgcttgggcttaccgccaaggacctgccctacgtgtgcgagctgatggatctgcgcccagggcaggaacggtggcgcaaatctgtggagaaggtgttgcgctccaccgggctctgcctgctggtgcccgatcagcaccaccgccaggtgctgcgttatgtcaacgagaacccgatgcgcggctacctgcagatggagcgggtgattccctccggtaccccgcggcgcgccgagccgggcacgctcgccgactgtttgcgcctgactaaccccaaccacgaatgtgccagtgccgccatgaatctggtggccggtgtcggcgactacgtgttggtcgacagccccgacgaattcagcaagcaccgccgggcggtcaccgatcagggactgcgcaaggacggtgaccggcgcgcggtcaaggacgatcggcgtgaattgcgggcttcccagtacatctatcagggcaacgctggcgacaagcgcgccgcgctttccgacgatgtggtcgaagcgcagcaggcggtcagtgatgccgaaaagttcatcggcgaaatggacaccaagcgcgaagagctgcgctcggaggtggtgcggtggtccaagctgcacagccaatacgagtattggagccagatcgataccgactcggccgaagccgccgtggcgcgtctacaggaccagtacgacgcgatgctggaagccaaccccgacctgaccggattgcagcagcaggccgactcctacctcgacgagatcaagaggctctccgaacgcatcggagcattgcgcaagcaagaatccgaacatgattcgcgccggacccggttgttggatctgctggacaacctgaacccgcgtgaggtgggcgggcacacccgatcgggtatcgaggcctacgtgccccaactctcgtccagcctggatgtgttggaacccgacgcctaccggctggagctgtggcggcagatcgagaaggatcagtcggtgctgcgtgagagcgtcacccgctcgcgcaacgagctgaaccggattctcaacgcgtacgaccgagacttccccgactctatccccaacgacagtgagaacttcgacgagaagatccacgactatgtcgcactctgccgccggatcgatgaacgcgacctgcccgccgcctacgaacggatgctgcggctgatcaccgagcaggcgcccactgccgtgttgcggctgcaccagctcgccgaggaggaggcacaccgcatcaccgaccagatcgaccgtgtcaatagcggtttgggttcggtcgagttcaaccggggtacccggctgaccctgcgtgccgagccgaaggcgctcgaagcggtgggcgagctcaacgagcgtgcccggcggatatccgggcgtgccgtcgccgtttcgatgggggacgagaaggccatccacgaccagtaccaggacatcctgcaactgcgtaacctgttggccgctgagacacctgaggcgcgccagtggacgcgcgacgcgttggatgtgcgtaaccgcttcgtgttgtactgcgaggagcgcgatgccaggaccggcgaaccgatccgtacctacagcaacgcgggtgcgaattccggtggagaacaagagaagttgatggcgttctgcctcgccggcgcgctgagcttcaacctggccaacccggagacgggggacaaccggccggtcttcgcgcagcttatgctcgacgaggcgttctcgaaatcggatccgcagttcgcccagcaggcgctgtccgcgttccgtaagttcggattccagctggtgatcgtggccaccgtgcagaacaccaccaccatccagccctatatcgacagcgtagtgatggtgtccaagccggacggcccgggggtgcgtccggttgcttcgacgcgcacggtgccgattggtgaactcggtgacgtacgcaaggccgtgagcgcccgctag

SEQ ID NO: 42795 - DNA, 1524 bp, Bradyrhizobium sp. STM 3843
ttgctgttccgatacctccatgatgacgcgtttctcgccttctcgcgggagcacaagcatctctatgcggcctgcctgctcgacctgtacgagcgcttcttttcgggcgcgccggcgtttcccacgccgcaggaggtgacgcatgccatctacgacgtcatgcgcgccaatcccacgctgtggaacgaggatgacgatttcggcgacccgctgccggaggtgatctccgctggaaggcgccgcatcaagcgcgccggcagcggtcagacggaggagtccgatcgggcgctggagatcgcccgtcaggtctatgcgcggctggtcggctggggctggctcgaggaggaggaatacgggcttcgcgtcaccgtcgacatgtcgatggggccgctgctcgtcgtccagcggttggcaagcctgaacaaggacgtctcgcagcgctttggcggcctgatcgtgaccgtgcggctcaacctggaggccgtcgagaaactcatgcccgacgtgaccgaccgcaagcagcgggaggtcgcgctcgccgtccgcgaggcccgcaaccaggttgaccatttcaccaagagcctgcgcgccatcctgtctgacctcaagcgcatccgcagagcggtcatggattcgaaaacggtgggcgaccggctggaggcgttcttcgaggagttcgtcgggcagctgctgctgcgggatttcgagtcgatcctcaccttcaaccatccctatcgttttcgtgacgcgatcgtcgatctggcgcgacggatcgcgcatacgccaccgacgatgcaggtcttggccgaggagtacaaggcgtccggcatctcgccctccatggccgaggcggcacgcgacgccgaggacgatctgctggcgatcgagagcaccttcggccagatcggcgagatgttcgaacggatcgagtcgttccgtcgccaactggaagggcgggtccgcaacaccatcaaatatgccgagcgcggcacccagggcctggtcgggcgcgccggcgatatcgtgcgccggcttgatcatctgctcgcgctcgggcggcatacgaccgcgaccgtggaatggagcctcgagccgttgcgctcgccttggtccgaatatcagcacgcgccgagccgcgagccgcgaaagccgatggaggcgcaggcgctcggcgagcggccgagcgatccgctctacgagatcaggaagcagcttcggctggactacatcgcccgcatcgcgcccggtcctgcgcagatccgctccttcctggagcggcaggtgccgaacggcggcatgcgcgaggcgcggttcatcgcgctttcgacaatcgacgatttcctcgccttcgatgccgcgcgccgccttgctctgggccgggacgtgcccgccgagatcgcccggcatttcgaactggaattcgcgcccaatacgccgccccatgacagcgaatggctgcgctgcgccaacttcatcatccgccggcgcgccgcgacagcgatgagacgcatccatgctcagtga

SEQ ID NO: 42796 - DNA, 639 bp, Bradyrhizobium sp. STM 3843
atgctcagtgaattcgaggccatcgaacgcacctatggcgccgagcgcgccggcgatctgcgcaaggcgctgcatttcctgctgcggcggcagttcgtgttcgccggcgatccgcgttcggccaccgtctacaacaccgtcatggacggccgcttccgggccgtcgtggacggcttcttcgacagttgcggctatcgcgttcatcgcgacgcagaggcgcaatgggccgggatcaccgccatgggcgaggacgtgccattgccgcgcatgaagctcgacgagaccatcgtgatcctggtgctggcggcgcactggcaggacgaggtcaatgttggtgcggtcgaggatcgcgcggtcgtcgtgaccacgctcaacacgctgttcgaccgctacaaggacatggtgcaccggaacggatcgagcgcgatcacgccgtcgcgcttccgcgaggtcctcaaagaagcctcgcaacgcggcctggtcgatcttggcgatctcgatgccgaggcgcaggacctggaggtcgcgatccgcccgatgatcaagctgatctccggcgccgatgccctgcagcggatcgagcgctatgtccgctcgcaggaggtgggcctcgccgtggtcgagggagacgacgcatga

SEQ ID NO: 42797 - DNA, 3441 bp, Bradyrhizobium sp. STM 3843
atgatggagctgcgtcacatcgccatggtgaactggcatctgttcgacatcgaggatgtcgagatcaccggccatgtcggcgtcttcggcgagaaccgctcgggcaaatcgaccattctcgacatggcgcaagtggtgctgaccggcggcaaccgcaacgtccagcggctcaacgcggtcgcgggcgacaagggccgcagccgcagcgcatcgaagcgcagcgtgctcgactactgcctgggaacgctgggcgaggatcagcgcaagcgtgaccaggcccgcacctatatctgcctcggcttcgtcgacagcgatggccagcgcgatcccgttacgatcggcatggcgatcgaggcgcgccgctcggagagcagcgagaccgtgctcgggcgttttgttgtcacgggcaaaatcctgacgtcggatgatttcatcgaaaagcgcgacggcaagaaatttcccgccgaatgggatgccgtccgcaaccgcatcatcgcatctgtcgggcagggcaacttcgtcaatcaccgcgacaaggcgatcgactatgtccgcgaatatatgcgcaagctggtgccgcacgtctcggtggttggcgagcagaacgccaatgcgctgcagaaggccgtcgtcaacgcgatgacgctggatcacgaccagaccgcgaccgagttcgtgcgcaactacgttctcgagcgcaacaacatgcgggtcggcgagctgcgcgagtcgatccgcacctaccgcaacatcaacgacaccatcaagaccatgcgcgagaaactggaggcgcttcttgccttgcgcgccatcatcgctgagcttgccggcgcctatgagcgacgggcctgcgagcaatggatcgcgcggcgcggcacttggttgtcggcccgcgccgcctatcagatccagatggcaaaattcgccgaggaagcggccaagcgcgatgcggccaaggcggagatggattttctcgaccaggacatcgaggcgatcgagactgaagtccgcagactcgagcgggcgatcgccgagcatgacgccaggaccgggcggaacgcacttgcgcaggcccgtgacgcggcgggacaggcgatgcagcgggcggtggctgccttcgaggcacggcttggccggctgcgcgcgctcgaaccgctctgcgccatgaccggatacgggtttgacgatctcattcgaccgctctcgcaagcaacgaaaaccggccgagatgcggcgatcgatcgcacgacgacggtgctggtcgaggcggaagccaaactgttgtcgcaagatccggcgctgctcgacaaggtcgacgagtcgcgtcgacggctgatccggcaggccgacgatgagcgtgcgcgcgccgagcagctccgggagcggctgcgcatccattcgagcggagcaggggccgcgcatctcagtgatgtcacgctgcatctctgtcgcaagctgcggcaggccaatatggtgccgcggatcctctgcgagttggtcgaagtcggagacgagtcctggacagccgccgccgaaggcctgctcggccgcgaccgcgaggccgtgttcgttgatcgttccgacatcgcgcaggcgaccgcgctgttcaaggaaggccggcgtgagttccgaggcgcctctctggtcagcctgaacaagcttgatccgctcaaggtgccgccgctgcccggcacatttccttcactgttcaaatccgacgacgccgacgcgttggccttcatttcacggcggcacggatcggtgcgcctcgctgacacgcttgcgcagttcaacgatccgggccgggcaatcatgcgcgacggcctctacgatgacggcctggtccgctcccaccgcgccgccgaacctgcgtcgttcaagatcggcaaatcagcgcaagcgcgcctcgcgaacgaaatgcgggatgaggtcgagaggctgacggagcagtgcgcgcgcagcgaggcggccgcgcgattggccgataaggcctatggcgagctgcgccgctttttcgacgaccgatctgtcaccttcgcctcgatcatcgccgacttcgcgaaggcccggcaggagaatgacgaaattgccgagcgcgtcgccgcgctcgatggcgaaggcgacggcgggttgcgcgacaagcggcgggagcagcgcaagctgcgcgagcacaggatcgagcagaaacgaagtcagcagcacgccttcaatacgcatctgctcgaagccgggaaggcggagggcgtgatcgggggcggagaaaacattccaggctcccggctcagcgtcaggcatgcttggaatttgtatggcaagagcttgctgctctatgaccggctcgcggggcgcgcgacctatcgcaaccggctcgatgcctcaccaaagcggccggaggcggatcgccaccgcgccattgccgatgccgcgacaaaggcggccgaggccgccgagaccgagcgcaaccggatcgaacgtgacgtgcgccgtgcgctcggtgcttatttcgacaagttcggcgtcgtgacgcaggtcggcgttgagagcgagccgctcggtgaagtcaagccgtggatggatctcctgatcgaggagatggaaaccagcgagctgcgcaaatatgagagccaggcgcgcgaggcagcagagaaggccgcgaccctgctgcggggccagttcatcaacgcgctgacctccaggattgcgaaaatggaacgcgagctgaccgcaatgaaccgcggtctcgccgatcacccgttccacaatgagaagtattcgttccatcacacccggctggccgaattccagccgatcctgaagatcatcgagatcggcaagacctctccggaagcgctcgacatgctgtttcggggcgacgaggtgcccgaggattttccgcaccgggacactttgcgcgagatcgaggtgctgctggaagatcccgaaaaggatttcagcgagttcgaggactatcgcaacttcttcaccttcgagatcatcatggaggacatcgtcagcggccgcaggacccgctgggagacgcggcgcgggaccggctcgggtgccgagcagcaggtgccgatctatgtctcgatcggcgcctcactggcgtcggtctatggcagcggcggccggcatggcggccgtgcgccgggcatggcgcttgcgatcttcgacgaggctttctccaagatggacggcaagaaccagcggcagatgatgagcttctacaagaagctgggcttgcagatcatcatcgccgcgccgaacgagaagcgcgtggccgttctggagcacatcgacaccgtgatcgaggtcgaccggatcggcgagagcgcccgggcgagcgtggcgcaactgaaggagcgcgcccgcgccgagctgagggcgatggatccggacctgctgtcggatgacgaattgaagaagctggcggccgagtag

SEQ ID NO: 42798 - DNA, 1164 bp, Bradyrhizobium sp. STM 3843
atgggacggcgattttccgatgccgaggcgctcttgtcccatctgctggaccggcgcgaggacggcatcgctgatccgaccgctcgtcccgatttttcaccactcgataacgtctcggagatcgactgtttcgtcaggcggctcgaggaggccgagtccgctggtgccatccgcatcgtcaaggggagggggcgcgacagcgaccagatcaagcttgtccgattgcaggataccgtgcggctctatgatctgctcggacgccgtccagtcgcagaactcgctgcagcggcgaccgagcggttgcgcgaccggcttgatgtgccacaggtcttcgacacgcatatcgctgcaatccgcgccacttggtcgcgaggcaaggaatggcagaagctcggcatggccgacgtggagcggctacgaacagcgctgctgtttgccaaagcgatccttgaacagaagcaccgcggtaccgactacaggaccttctcgcgcaaggtcgcgggcgacagcaaggcgttggagcggctcgaaggcgccgtcgtgaggctgcttgtcccggcactcgagctgccgccgggagcgcgtccgcgcgatgccctcaggacgctcggactggagaagttcgcaccgccactgcttctggccggccgtctcgatttcgacagcgccgagttgtccctgatacggccggcctatttcggcatcccgccgcaggaggcatcgcgcatccgcttgcgcgagacgccacgctacgtgctgacgatcgagaactatgccagcttccaccgacatatcgcagaagccgatcgcgacggcacgggcgtgaccatctatgtcggcggctatccgtcgctggcgacgcaggatgcgttgcgtgcgctcgcaggtctcgtgccagacaatgtgccgttcttccattggtcggacatcgatcctgacggcgcctggatattccgcaccatcgagcggatcatcgcgcggccgttgcggccacatctgatgacgccggagcttgccgaggcgtttggacgggcgccggacgatccgagccggccaccgaggcaggcggaaaacaccgcgattgcagctctgataacttatctatcgagcgagggcgccaaatggctggagcaggaagagctcgatccggcaatgcccgtgtag

SEQ ID NO: 42799 - DNA, 1575 bp, Bifidobacterium animalis subsp. lactis BS 01; identical to SEQ ID NO: 41902

SEQ ID NO: 42800 - DNA, 810 bp, Bifidobacterium animalis subsp. lactis BS 01; identical to SEQ ID NO: 41925

SEQ ID NO: 42801 - DNA, 3498 bp, Bifidobacterium animalis subsp. lactis BS 01; identical to SEQ ID NO: 41904

SEQ ID NO: 42802 - DNA, 1221 bp, Bifidobacterium animalis subsp. lactis BS 01; identical to SEQ ID NO: 41905

SEQ ID NO: 42803 - DNA, 1461 bp, Gordonia effusa NBRC 100432
atgcagaatgcggcgcagtcgaccctggccgaggcatgggacgccaatcggtccatacagaagtcggcggcagtgcggctattcgccgccaccaactcggcgctctacgtcaccttgatggagcgccacctcgactttggtacgcggctcaacgaaaccgaactcgccatcagactcgaacgtgacctcgtcgaacttggtgctcccgaccaaaccggtggcgccgacctcgtaaagctatgggcgcggcagggctggctgcatcggatcaccgacaccgcgagctcatcgacgcagatcacctgctatctgagtaccgaggcccgctcggtcctggactatatgcgccgattgcggcgcgaggatagcgtcgcgaccggcgggtccatcaacggggtggccgcgggactgcgtcgggtggccgggcaggtcaccagcgacccacagcagattcgggacgagatcgagagtcaaatacatgacctcgacgtcgaactggccgacctcgaagccggcgtgcggcccgagcccgacctcgccgcggctcaggacgaggcacgcgcgatcgcctaccagatggaacagattatctccgacatcgggcagtacggtgcgatgcttgatcgcatcacgacgcaactgcttgatgaccccaatgactccgaccttgcctatcgggaccgccagcggcagatgttcgacgactacgaagcactgttggaatcaccgcagagcgcctcgtatcacgcgttcagccagatgattcaggaccccacacagcgcggcagactgatgagcgacatcacgacggtgacccgccagctcagtgacatcgatccgggactgcgatcggtgatggacaacttcttcgccctcgtcaccgaacagatgagtgaggtcggccgcactcgtcagcgatgcgcccgccgaatccggcgcttcgtcgcggcgggaactctcgaacagagtcgcggcgtcgcacgacaattgaacgacgctctcaccaccgccaacgagatgctgaagacctcgctggccgatcgacgcatcggatatgaactgccacttgccaaaccggcgataaactcggtcgggcggctcgccttcgaaatacgaaatcccgcgccaccggcaccggcattgtcagcttccgccaacgctgacttctcctcgttcgcgtcactcgccggtcaggtcgatacggtggcgctgactgaattcgtcaatacagcggtagcaaccgggccgatcgcactgtccgaggtcatcgagcgtctcgacgagccgtatctcgcgcatgtcatcgtgctgtggtcgtgggctctgaaacagaccacccctacgaccgccgccgcgacacatgtgcggttccgctcgatggagggcgccgatcgcgccatcgaaataccagcacttatgttcaccgaacccattccgaccgcggaggccgacgcactgtga

SEQ ID NO: 42804 - DNA, 819 bp, Gordonia effusa NBRC 100432
gtgaccaccgacctcgacgccacaaccaccgacgacggacccgacgatcccggaaccgaggtgccgcccacgccggacgagttcgccggatatgacgatctaccgacagtcgtcaaagggggcggcaccaccggtccacgattgcctcgctttgacggcgatgtctcggcattgcccgatcgagcatgctgggcactgcaaaacctgctgacccggcggcacatcagcggcgagcgtcaaccgcagttgtggacgtgggtgagcgagtatcgcgacgagttgcgtacgcgactgtccgaacttgaccttcgcctacgaatcgtggacgaactggaagtggcgttcgtcgagcaggctggctacgactcacgttggggcagaaggattctcaaacgtgagacgatccatacctacgacgccatcttggcattgcatctcgccaaatacctccgagcctcgcgtaatgagcacgtattgatcacccgcgaggacattcacgagatgttcgccggcgtgaccaatacgatcgaccgtgacctggctcagttcgacaagcgcatcgaccacgccatcgacaagatgaccgagttggcgtttctgcgcgcgcaccgcgacgaccctgacatgtttaccgtcagcccggtgatttcggcagtaatgacggcgtcggtcatcaccgatctccagcgccagttcgagcagttcatcggctcgggtgacgaaggcgaactaccgcccgcgggtctcgagaccagcgaggacgagaattccgacgatgacgaagacgacgaagacgaactcgatggaggcgactggtga

SEQ ID NO: 42805 - DNA, 3357 bp, Gordonia effusa NBRC 100432
gtgaatagctcggtcagcgacgtcgaccaataccgcctgtcgcgtctgcaattgatcaactggggggtcttcgacggctaccactcaattccgttcagccccaacggctcgctgatcaccggatcgtcgggcagcggcaaatcctcactgctggatgcgatttcgctggcattcctcccggatcatcgacgtaatttcaacgcctcgggtgatgcgaccgcggctggcgcgtcgagcggtaaacgcacggtcggcaaatatgttcgcggcgcgtggggcgaacggcgtgatggcaccaatgcgcagcgcgaagtgatgtacttgcggggcaccggaccggcttgggcggccatctcggttacctacacctcgacgtcgggcacggcgatcaccggcctggtattgaaatggctggccgccggcaagatgaccgacgcccacagctcgtatttcatctgcgacggcgacgcggatatcgtggaggtctgcaacgcctgggccgcaagcaattacaatccgtcgaccttccgcgaagaggggtggcgcggaggccccggcgaggggaagtacctggcgacgctgtactcgctcatcggtatccgaggttcggacgcggcacagcagttgctcggaaaagccaagtcgctcaaaagcgttggcggtttggcacagttcgtacgcgaattcatgctcgacgccccgacgagtatcgtcggcatcaaagacgcactcgagcagatcgaccccctcgtcgacgcgcgggagttgctcgattccgcgcgccgcaaacgcgcgatcctcggcaatatcgaagccgtccaggaacggtatgccaccgaggcagcgactttcacggtgctcgacaccatcgataccgccacggtgcgttcgtatatcaacaacctccgactacacaatgcggtgcccgaagtcgccgacctcgacgaccaaatcgcccggctggacggagatttggcggcattaacgtcgcaacacgaccaattgcgttcggaccacagccacctgctgtcgaggatcgcgacctcgaccggcgatctggcgccactccaagaacagctggcaaccgcgcagaagaccggtgacgaggcggccgcccggcgctctacctacgaagacaaggtcaccggcctaggtttctccgcaccgaatgacgcggaggatttctggtcgctgcgtgagcacatgatcggcgaggcgactcgcatagacggccaacttgccgctgggaaaggacacttcgccgagttgctggccgccgaagtggcggcacgcacccgccgcgatgccgcagtcgacgagctgagtcgagtgcagcaggctggttcggcgctgccgcgcgccgaacacgagatgcgacgcatcctggcgaatgcgctgcaggtcgacgagtcggaattgcgatacgtggcagaactcgttgaattggcgcccgacgaggagcgttggcgcttagccgtggagaaggttctgcgcggcgccggacttcgactgttggtacccgacaagcactttcgtgcggcgctgcggtatgtcaacagtcacgacatgcgcggccggattcagattcaccatgccgagcagcgaccaatgcctacccccgaaccgggtacgttgggcgcgacgttacgtgccgtcgatcctgaccatccttgtgccgcagaagctttgacagtcctgacgaaactcggcaactatatgtgcgttgactcgccggccgatttcggcgcacacaacaaggccgtcaccgatcaggggctgcgaaaagactccgcaaaacttgcggtgaaggatgatcgccagccgttgcggccgtcgcagtacatcttcgtcggcaacgtcgaggcgaagatcagcgctctgcgcgaggaactttcggccgagcagaacgagtacgacatcgcccgggaggcaaccgcggagatcgatgccgagcggaccgagaagcaacagcgccgcgattcgtaccgacgcgtgtgtgaacagttcacacagtggagtgcgatcgataccgacgccgccgatgagcggctcgaccaactgaccgagcagtacgagctgctgatggttgacaatcccgatgtagaagcgttgcagcgcaaggccgaagagatctgggagcaggttcgcacggccatttcccaggcggcgttggtacgcgacaagatttctcggcatgacgaccgtaggactcaactgctcgatctgatcgaccggatcacaccggacgagatccttgcgcaagcgcaaaacaccctggacggatttcgcgaggaatccgccgtgccgctcgacgtcctcgcgcctgaaccgtaccggcaggagctgctcaaagtcgttgcgaaggaccgtgatcggatgcgatcggatgcgcgcaggtctcgggacgaattggcgcggatcatcgacacctatgacgaggaattccccgacgccatcccgaacgacagtgacgatttcgatgagcgggtgcatgactacgtcgcggtgagccgtcggatcgacgaacgcgaactgcccgccgcatatgaacgaatgcggcgactcatcactgagcaggcccccggagcgatccttggtttgcatatggcggccgatgcggaggaacgccgcatcgtcgagcagatcgagcgcgtcaacaccggtctcgcggcggtggcgttcaatcgcggtacccggttgcggttggttccaggacgcaaacaccttgccgcagtgtcggaattgaccgagcgtgccaaactgatctccgcgcgaacaactgcggtgagcttcggcgacgaacaggcgatcctcgagcagtacgcggatattctgatgttgcgcgagcggctggccggagcaacaccggaggaccgtgcttggactcgcgacgctctggatgtgcgtaaccggttcgacttctactgtgaggaacacgaggcgagcagtggcgaggtgattcgcacctacagcaatgctggcgataactccggtggcgagcaggagaagctgatggctttctgtctggccggagcgttgagcttcaacctggccagcccacacggcgatgacaaccggccgatcttcgcccagctaatgctcgatgaagcattctcgaagtctgacccgcagttcgcgcaacaggcgctcagtgcgttccgcaagttcggatttcagttaattatcgttgcgacagtgcagaatacgagcacgatccagccctatatcgacaatgtcatcatggtgtccaagacagaggcggcagaagactcccggccaatggcgacggcgctatcgacctcgatccaggatttctcagatctacggcgaacaagtggggcacggctgccggtgtag

SEQ ID NO: 42806 - DNA, 1464 bp, Gordonia polyisoprenivorans NBRC 16320 = JCM 10675
atggacagtgcaactcagcccacgctcatgcaggcgtgggagaccaaccgatcgatccaacgatccgcggccgtccggctgttcgccgcgaccaactccgcgctctacgtgacattgatggagcgtcacctcgacttcggggcgcgccggtcggaaaccgatctggcgatccggctcgaacgcgacatggccgaactcggcgtcggcgaccagccccacggcatggatctgctgaaactgtgggccaagaacgggtggctgcatcggatggccgacccggtcgtcgcgacccagaacctgtgctacctcacccccgaggcgcgctcggtgctcgattacatgcggcggctgcgccgggaggactcggtggccaccgcgggttcgatcaacggcatcgcggcaggtttgcggcgcgtggccggtcaggtcagcgacgaccccagctacatccgtgaggacctcacccatcagatcgaggaactcgacgccgaactcgccgacctcgacgccggtcgccggcgccgaccggatctgcgggccgccgaggacgaggcccgcgccatcgcctaccagatggagcagatcatctccgacatcgggcagtacggcagcatgctcgaccgcatcaccaccgcgctcctcgacgatccgaacgactccgatctggcctatcgggaccggcagcggcagatgttcgacgattacgaggccttgctggagtcctcgcagagcgcgtcctatcacgcgttcacgcacatgatcggcgacccgacccaacgggctcgattggtctccgacatcgagaccgtcaccgcgcatctgcccgccatcgatccagggttgcgatcggtgatggacaacttcttcgtgctggtcacccagcagatcgacgaggtcggccggatccgtcgccgctgcgcgcgtcggatccgccgattcgtcgcctcgggaaccctcgagcagagccgcggtatcgcccgccaactcaacgacgccctggccacggccaacgaactgctcacgatctctctcgccgatcggcggctgggttacgaattgccgctggccacccccgcgctgacgtccaacgggcgtctcgcgttcgagatccgcacccctgaacccccgcaaccggcggtacccgcgacaggggagaccgatctcgattcgttcgtttcgctggccggccaggtcgacaccgtcgaactcaccgaggtggtcaacaacgcggtcgtcgacggtccggtggcgttgtcggaggtcatcgattccctcgacgacccctatctcgcccacgtgatcgtgttgtggtcgtgggcgttgcggcaatcgtcggccaccggcgaccccgtggcgaccgagttcatccgattccggtccctcgacggcgaggaccgtctcatcgagattcccgccctgcatttcaccgaacccatccccaccgcggaggtcgacgtcctgtga

SEQ ID NO: 42807 - DNA, 858 bp, Gordonia polyisoprenivorans NBRC 16320 = JCM 10675
gtgaccgatcagtcagaacggtttcccgcgaaggggttcagcgccgaggggttcagcgccaaggggctcagtaccgaggagttcaacggctacgacgacctgcccgcggtgagccggaccgccatcgaggaaacaaaggtcccccgcttcgacggggacgtctcggcgatgcccgaccgcgcctgctgggcgttgcagaatctactcacccggcgctatgtcagcggcgaccgcactccccagctgtggtcctggatcgtcgaataccaggagcccctacgcatccggctgtccgaactcgatctgcggctgcgcctggtcaccgaactcgaggtcgccttcgtcgagcaggtgggctacgactcccgttggggtagaagactactcaagcgcgagacgatccaggcctacgacgcgatcctcgccctgcacctggccaaacacatgcgggccgcgcgcgaggatcaggtattgatcacccacgaggagatccacgaactgttcgccggcgtctccaacaccatcgatcgcgacctcgccctgttcgacaaacgcatcgacaaggcgatcgacaagctcgaggaactcgagttgctgcgccgccatcgcgacgaccccgacaccttcaccgtgagtccggcgatcaccgcgatcatgacggcatcggtgatcaccgatctgcagcaccagttcgagcaattcatcggtgccggcgaggaggccgacgcgcagacgctcgatcgctccgcgcccgaatccgaagacgacaattcgggatacctcgccgagggcgatcgggacaccgacgacggtgacgacaccgaggatgacgacacggacgaaggagatgactggtga

SEQ ID NO: 42808 - DNA, 3345 bp, Gordonia polyisoprenivorans NBRC 16320 = JCM 10675
gtgagcgatcgtgtcgaccagttccacctgtcgcggttgcagttgatcaactggggcgtcttcgacgggtatcattcgattccgttcagcgccaacggttctctggtgaccggctcgtcgggcagcggtaagtcctcgcttctggacgccatctccctggccttcctgcccgaccatcggcgcaacttcaacgcctccggcgacgccacggcggccggatcggcgagtggtcggcggaccgtcggcaagtacgtgcgtggagcatggggcgagcggcgcgacggcgtgaactcgacgcgcgagatcatgtacctgcgcggcaccgggccggcctgggcggccatcgccgtcacctacacctccacctcgggcgtgtcgatcaccggcctcgtcctcaagtggctcgctgcgggcaagatgaccgacgcccacagcgcctactatctcgccgacggcgacgccgacatcgtcgacgcctgtaacgagtgggcggccaacgggcacaatgcggcccggctccgtgagcgcggttggcggggcggtcccggcgaggggaagtacctcgcgtcgctgtactcgctgatcggcatccgcggctccgaggccgcccagcagctgttgggaaaggccaagtcgctcaagagcgtcggcgggctggcccagttcgtccgtgagttcatgctcgacgaaccgaccagcatcgcgggtatcaaggatgcactcgagcagatcgatccgctcgtcgaggcccgcgaattcctggacgtcgcacgtcgcaaacgcaccatcctcggcaacatcgaggccgtccaggaacggtatgcgaccgagtcggcgaagttctcggtgctcgacaccatcgacagcgcgaccatccgtgcctacgtgaccaacctgcggatccgcaacgccgaacccgagatcgccgacctcgacgatcagatcgcccgtctcgacggcgatctggccgcgctgacctcccagcacgatcaacttcgccaggatcacagccatctgctgtcgcgaatctcctccagcacagccgatctcgcaccactacaggaacagctcgccgcggccggcaaagcggcgagcgaggtgtcgatgcggcgggcctcgttcgactcgaagatgtcggcgctcgacgtggagatccccgagtcggccgaggacttctgggagacacgcgaatccctcatcgaggaggcgacacggctcgacgggcaactcgaggccggcaagggacactacgccgaactgctggccgcggaggtcgccgctcggagccgccgcgacgccgctgccgacgagctggcccgggtgcgcgaggccggatcggcgctgccgcgcgccgagcacgagatgcgccgggtgatcgccgacgcgttgcagctcgacgactccgaattgcgctatgtcgccgaactcgtcgaactcgacccggagcaggagcggtggcgtccggcggtggagaaggtgctgcgtaacgccggtctgcgattgctggtgccggatcgccatttcaatgccgccctgcggttcgtgaacacccacgatatgcgtgggcggatccagttgcatcatgtcgagcgccgcacggcggtgctgcccgaccccggcacgctggccgcgaccctgcgtccggtcgatccggagcacccgagctcggcggaagccctgacgctgctcacccgactgggcaattacgtctgcgtcgacgatccggccgaattcgccgaccatgccaaggcggtcaccgatcgcggcctgcgcaaggactccgcgaagctggccatcaaggacgaccggcaggcactgcggccctcgcagtacatcttcgtcggcaacgtcgacgccaaggtcgccgccctcggtgaggaactcgaccacgaggacagcattcatgccgcggcgcgcgaggccaccgccgtcctcgaacgcgagcgagccgacaaacaacgccgccgcgacctctaccgcactgtgtgcgagcagttcacgcagtggagtgagatcgacgtcgagtccgccgacgatcgcgccgagcggctctcggagcagtacgaactgttgatggaagagcatcccgacgtcgaggcactgcaacgcaaggccgaggagatctgggagcaggtccgcgcggcgatctcccatgccgcgctcgtgcgtgaccgaatcgcgacccaggacgagcgccggacgcagttgctcgatctcgtcgaccgcctcaaggccgaggacatctccggtcctgcacaggcggccctcgatacgttccgtgaggattctgcggccaccctcgatgtgctcgcaccggatccctaccgccaggaactgatcaaggccgttgggcgcgaccgggatcggatgcgcgccgatgcgcgtcgctcccgggacgaactggctcgtatcctcgcgacctacgacgaggagttccccgacgagatcccgaacgacagcagcgatttcgacgagcgcatctatgactacgtcgcgttgtgccgccgcatcgacgagcgggagctacccgcggcctacgagcggatgcgccggctcatcaccgagcaggcgccgggtgcgatcctcaacctgcacatggccgccgacgccgaggagcgccggatcgtcgagcagatcgagcgggtcaacacgggcctgggtgcggtcgcgttcaatcgtggcacccgactgcgcctgcaaccgggacgcaagaatctcggggccgcagccgaactcaccgaaaaggcgcgtcagatcgcggggcggtcgaccgccgtcgcgttcggcgatgagcaggccatcctcgagcagtacgccgacatcctcctgctgcgcgaacgcctggcgggggcgaccccggaggaccggcagtggacgcgcgacgcgctcgacgtccgcaaccgtttcgacttctactgtgaggagcacgacgccgagaccggggagacgatccgcacctacagcaatgccggcgacaattccggtggcgagcaggagaagctcatggccttctgtctggccggcgcgttgagcttcaacctcgccagcccgcatggcgacgacaaccgaccgatcttcgcgcagttgatgctcgacgaggcattctccaagtccgacccgcaattcgcccagcaggcgctctcggcgttccgcaagttcggcttccagctgatcatcgtcgcgaccgtgcagaacaccagcaccatccagccctacatcgacaacgtggtgatggtgtcgaagtccgaggcggccggtggtcgcccggtggcgacggcgacgtcgacctcgatcggtgcgttctccgacctgcgtcgggcgtcggggaagaaccggctgatctga

SEQ ID NO: 42809 - DNA, 1464 bp, Gordonia amarae NBRC 15530
atgagcgacgaccatgcgaccctgacgcaggcgtggcaggagaaccggtcgatccagaagtcggcggcggtgcggctgttcgcggccaccaactcggcgctgtacgtgaccctgatggaacggcacctggacttcggggcgcggctcaccgaacccgaactcgccgtccggctcgaacgggacatggccgagctcgaggtcgacgacaccccgacgggcgtggacctgatcaagctgtgggcgcgcaacggctggctgcaccgggtcaccgacacctccgacgacgtggcacccaatctctgctacctgaccgccgacgcccggtcggtactcgacttcatgcggcgccgccggcgtgaggacactgtcgccaccggtggttcgatcagcggtatcgcggccggtctgcaccgggtggccgggcaggtggccggcgaccccgaccagatccgcgaggacatcgagagccaactcgctgagctcgatgccgaactggccgacctcgactccgggatccggcccgaaccggacctgcagatcgccgccgacgaggcccgcgccatcgcgtaccagatggagcaggtcatctccgatatcgggcagtacggcacgatgctcgaccgcatcaccaccgcactgctcgacgatccgagcgactcggacctggcctaccgcgaccggcagcggcaactgttcgacgactacgaaaccctgctcgggtcgtcgcagagcgcgtcgtatcacgcgttcacccggatgatccaggaccccgatcaacgcgcccggctgtccgccgacatcgacaccgtcacccggagcctccccgatatggaaccgggcctgcgcgcggtcatgaccgatttcttcccgctgatcagcgagcagatggccgaggtggggcgcacccggcagcgctgcgcccgccgtatccggcggttcgtcgccgccggcaccctcgaacagagccgcggtatcgcccgtcagctcaacgacgccctcgccaccgccaacgacctgctcaagacgtccctggccgaccggcgtctgggttacgagatgcccctggcaacacccgacctgacctcgatcggccgggtggcgttcgagatccgtgacccggcaccaccaccaccggcgctgccgggggacgccaggggcgacctgagttcgttcgcctcactcgccggtcaggtcgacaccgtggagctcaccgatctggtcaacagggccgtcgccgacggaccggtcgcactgcccgaggtgctggaccgtctcgatgaggcgtaccttgcgcacgtcatcgtgctgtggtccctggccctcaaacaaccgggtgccgtgcccggcgccaccgagatcgtccggttccgctcgctcgaaggtgacgaccggatcatcgagatccccgccctgacattctccgaaccgatcccgaccgccgacatcccgctcgatgaggtctga

SEQ ID NO: 42810 - DNA, 771 bp, Gordonia amarae NBRC 15530
atgaccgacaccaccaccgatgttcccgacgagttcgcaggctacgacgacctgcccgcggtgccgctgacgtccgctgaccacggccccaagatgccgcgctttgacggtgatgtcagcgagctgcccgaccgggcgtgctgggcgctgcagaacctactgacccgccgccacatcagcggtgaacgtcagccgcagctgtggtcgtgggtgtccgaattcgccgacgtgctgcgcgtgcggctctccgagctggatctgcggttgcggatcgtggacgagctgcagatcgcgttcgtcgagcaggtcggctacgactcccggtggggcaggcggctgctcaaacgcgaaaccatcaacacctacgacgcgatcctggcgctgcacctggccaagtacatgcgcgcctcccgcgacgagaacgtgctggtcacccgcgaggacatccacgaaatgttcgccggtgtcagcaacaccatcgaccgtgacctggccgccttcgacaaacgtatcgaccgcgccgtcgacaagatggaggagatggagtttctgcggtcccagcgcgacgatcccgacacgttcgtcctgagcccggtgatcaccgcggtgatgacggcgtcggtgatcaccgacctgcagcggcagttcgagcagttcatctcctccggcaccgaggccccagaaaccgacagcgagaccgaggccgacaccgagagccggcccgaccccgacgagagccgcctggacacggcggaaggagccgactggtga

SEQ ID NO: 42811 - DNA, 3342 bp, Gordonia amarae NBRC 15530
gtgaccgacatcgaccagtaccacctgtcccggctgcaactgatcaactggggtgtgttcgacggttatcactcgatcccgttcagcaccaacggatccctcatcaccggatcatccggtagcggcaaatcgtctctgctcgacgccatctcgctggccttcctgcccgatcaccgccgcaacttcaacgcatccggcgacgcgacggccgccggttcgtcgagcggtaagcgcacggtcggcaagtatgtgcgcggcgcctggggggagcggcgcagcgggtcgggcgcggcccgagagatcatgtacctgcgcggcaccggaccggcgtgggcggcgatcgccgtcacctacacctccacctcgggtgcctccatcaccggcctggtcctcaagtggctggccgccggcaagatgaccgacgccaacagctcgtacttcatccacgacggcgacaccgacatcgtcgaggtgtgcaacgagtgggcctcgggcggatacaacaccgcccggttccgggagcgtggctggcgcggcgggccgggtgagggcaagtatctggcgaccctgtattcgctgatcggcatccgtggctccgacgccgcccagcagctcctcggcaaggccaagtcactgaaaagtgtcggcggcctggcacagttcgtgcgcgagttcatgctcgacgaaccacgcagcatcgccggtatcaaggacgctctcgaccagatcgatccgctggtgcaggcccgcgaactgctggaggtggcccgccgcaaacgcaccatcctcggcaacatcgaggaggtccaggaacggtacgcgggggagtctgccacgttcagcgtgctcgacaccatcgacaccgaggccgtgcgcgcctacctcaacaatctgcggttgcgcaccgccgaaccggaggtcgccgacctcgacgaccagatcgcccgcctcgacggcgacctgacctcgctgaccgctcagcacgaccagttgcgcgccgaccacagcaacctgctgtcccggatctccacctccaccggtgatctcgccccgctgcaggagcagctcgcggcggcccagaagttcgccggtgaggtggcgatcaaacgcaccaactacgagcaccgggtggccgcactcggtttcgaactccccgacgacggtgaacagttctgggagctgcgcgaccagttgatggacgacgccacccgcattgacagccagctcgaggcgggcaaggcgcagttcgccgagaccctcgcccacgaggtggcgttgcgcggtcagcgcgatgcggtggccgccgaactgaaccgcgtggagcaggccgggtcgacgctgccgcgcgccgaacacgagatgcgccgcatgctcgccaaccacctgcagatcgacgaatcggaactgcggtacgtcgccgaactggtggagctgcgccccgacgcgggccgctggcggctcgcggtggagaaggtactgcgcggggcgggtctgcggctgctcgtgcccgacgagcatttccgggcggcactgcggtatgtcaacagccacgacatgcgtggccggatccagctgcaccacgccgaacagcaccggatgccgacccccgagccgggcacgctcggcgccaccctgcacgcggtggaccccgaccacccgtgcgccgccgaagcactcaccatcctcacccgcctcggcaactacgtgtgtgtcgacgatccggccgaattccgcaaccacaccaaagcggtcaccgaccaggggctgcgcaaggattcggccaaactcgccgtcaaggacgaccggcaggcgctgcggccctcgcagtacatcttcgtcggcaacgtcgactccaagatcgctgcgctgcgtgaggaactcgaccacgagcaggccctgtacgacgccgcccaccaggccagtgccgccctcgaccgggaccgcaccgaactgcagcagcgccgggacgcctaccggcgggtctgtgagcagttcaccgggtggagcgagatcgacaccgacaccgccgatgaccgcgtcgacgccctcaccgaccagtacgaattgctgatggacgccaaccccgatgtggaggcactgcagcgcaaggcggaggagatctgggagcaggtgcgcggggcgatctcgcaggcggcgctggtgcgcgacaagatcgccacccacgaccggcggcgcacccaactgctggatctgatggaccggctcagccgcgagaacgtgtccgatcatgcggcggccaccctcgacgggttccgtgaggaatcggcggcggtgctcgatgtgcttgcgcccgagccgtatcggcaggagctgatgaaggcggtcaaccgggaccgggaccggatgcgcgccgacgcccgccgctcccgggacgaactggcccgcatcgtcgccagttatgacgaggagttccccgacgccatccccaacgacagcgacgacttcgacgaacgcgtccacgactacgtgtcggtgtgccggcgtatcgacgaacgcgagctgccgtctgcgtacgagcggatgcgccggctgatcaccgagcaggcgccgggtgcgatcctgagcctgcacatggccgcggatgccgaggaacgccgcatcgtcgaacagatcgaacgcgtcaactccggcctgggttcggtggcgttcaaccggggtacccgactgcgtttgcagccgggccgtaagacactgcccgcggtggccgaactgaacgacaaggcgcggcagatctccgcgcgtaccaccgccgtcagcttcggtgatgagcaggcaatcctggagcagtacgccgacatcctgctgctgcgtcagcggctggccggggccaccccggaggaccgggcgtggacccgcgacgctctcgatgtgcgcaaccggttcgatttctactgcgaggaacgcgacgcggggagcggggagatcatccgcacctactccaatgccggcgacaactccggcggcgagcaggagaagctgatggcgttctgcctggccggggcgctcagcttcaatctcgccgcccccgacagcgacgacaaccggccgctgttcgcccagctcatgctcgacgaggcgttctccaaatctgatccgcaattcgcccagcaggcgctgtcggcgttccgcaagttcggtttccagctcgtcatcgtcgccaccgtgcagaacaccagcaccatccagccctacatcgacaacgtggtgatggtgtccaagaccgagggcgccgacggccggcccgccgcgtcggcgctgtccacctcgatccagggtttcaccgaggtacgccgcaccaacgccggccggctctccctctga

SEQ ID NO: 42812 - DNA, 1425 bp, Erysipelotrichaceae bacterium 6_1_45
atgtccttatttgagaaaatggatccatccttctttaccatactggtatcgaagaaccgggatatttatgtggatctgcttctgcagattcatgactgcatttatcgcaatcagaccatgagtatggagcgtgccctgcttcaggatttactggaagattatgtgcaggataaaaaatatgaaatcgactttcaggaggaagcggaatacagcgatatcgagaatgagctgcgcagtgagaaggatgtttatgaccgggatatccagtttctgttacggctgtttgagaagcatacctggatcaatgtcgatctgcatatggatacgatgaaaaaaatggtgtctctgccctatcacagccgggtgttcatctccttcgtgaatgatattatcaaggaacgggaacagatcggctatctgattcgcatccatgcctccctgaaggatatggatgatcccgtgaaaatagaagacagctatcagcatatccgtaatgcctatgccgatttcaaggagctgattctgacactggaacagaccaatgccagaatacgggattattatgcgattcaggtgaaaaaggcatcaacgaaaatctatcatgatttctttgatgtttattatggtgatattgtggagggctatgtttttccaactcttgtggaggacagcttaaaacggtttaaaaacccggtcgcaggtattttggaaacccttctgcaggaggaagcagtcaaggagaaaattgtagacagtgcggtaagtcactatcgtgttgccagccgtgatacggcaaaaaagcatatcgaggaaatgctgtatgccatgtacaatgatttgaatatcgtggaaacgctgactgcccagctggtggacagcgacgcgggttaccgcagactggcaaagcagaaaattatgtatctgtgcaacagtgatcaggggttaaagggaaagctggtggaactgatccatcatatgaaggaagagccgcagagagtgtgtgagcagatcagtgaatccatcaatatccagcagacccgctacatggagcgtgatgaggtgtacacctttgaacgacgcaggcgtagggatgagcgggaagtgatgaccttcacctttgaagagagcacccagaatcaggaggagcttgaaaagcgcattggctttgaccgctacgctcgctttacccgtgaaagcatatcggcttactatgcagagaagctgcatggggaagcggtaggaaagctgaaggatatcggggtaaaggatatggatgactatatccgatccattctggtgtatgtatatggaagagaccgcaaaatggatgtgcaggcaaccctgattccgaatcagacggaagggattacagaaggggatttccattatcccaatctgttgattaaaaggaaggtaacaaaatga

SEQ ID NO: 42813 - DNA, 669 bp, Erysipelotrichaceae bacterium 6_1_45
atgaaggtagaacaactggatctgaaggaccgcgaggaattcggatggatcgtcaatatattactggcagaaaactgcatttaccagtatgcgaaaatcagacagtttgagaaaaaggaacgaaatgcagactatgtgtttatccatgatcactgggactgctttgaggaatatctccgctatgcgggatggctgctgtgcagggagcgttcatcttatatggggatgatttatctggtcaatgagcgggaggactgtagctgccgctatcgtctgacaaagctggaaacgcagcttctgctgattctgcgtaattattatgaggagaaaatgctggagctggatgcatctctcaccatacgtatttctgtcaatgagctgctgcagctgctggtggatgtgcatgcgatggtaagcgtaaggccttcgatgcaatacatccatgcggcattacagtccctgcaaagactgaatattcttcagaaatacacacagggggatgaggagctgatctgggtactgccttatatcacctgtgttctcacaccgaagcgggtggaggaaattctgatgaagctgcgtaatgaggaaggagaggaagacgatgaagctgaagaaaatgctgctggtcaactggctgtattacgagaagacgatcctgagctttga

SEQ ID NO: 42814 - DNA, 3249 bp, Erysipelotrichaceae bacterium 6_1_45
atgaaaaagaaagcccttctgaaagataccctgcgggaaatccgcaaatccttcggtcgcttcttttccatctttgccatcgtcggcatcggagtcgccttcttcgccggagtacgggacagtgtaccggtgatgaaaaatactgcggatacttattttgatgactataatttcatggatctgaagattatgtcgaccatcggcatgacaaaggaggatgtttccgctatccgtcaggtggatggagtggccggcgtgtatggcagctacagcatggatgtactcaatacgcataacaatcagcagcgtgtctacaagctgctgtcttatccgatgaatgcgaaggcagaggatgaaaactatatcaatcagatgcggctgatcaaggggcggcttccccggaaagcggatgaatgcgtcatcgaatacaccaacatcaagggagcagattccagaatcggagaaatgataacctttgcgagcggtacggacgaaaaactggatgcgtcattaaagcgctcaacctataaaatcgtcggagaggtaacgatgccgtattatctgtcctatgaaaagggcagctccgccatcggcagcggcagtattgataattatgcggtgattccggataccaacttcaaatcctcctattatacggaggtgtatgtgacggttgacggcgcaaagaagcccaactcctatgcggatgcttatttcgatatcatcgatcccaaaaagaccacaatcacagcactgggagaggagcgtgcacaggagcgctttgacgatatcaaaaaggaagcccttgccaaggtggaagccggtcgtaaggaatatgagaagaataaaaagaaatatgagacagaaataaaaaatgccaaggacaagctggagaatgcaaaagatgaactgcttgttggacaggccaccctgaatgcagagaaaagcagtgcggaaagaaccatacaggaaaaggaagcacagctgcagcagagtgaacagaccctgtcccagctgaaatctcagtactccagtgcgaaaagctatctggacgcgcagcagaaaaagctggatgacaatctgccgcagatacaaaagcagatagcggaagccaaagcaaagctgtcctcactggatgaggaacttgccaaagtggatacgcagctgcaggatccgaatctaacagagctggataaacagctgctgcaggagaaaaaggcggcactggaaacctcgcggcaggttgcttctcctgcattaacgatgctggaagcacagatatcaacaatgcaggaaatggtaaccatggcagcctctcagctgcatgcactcgaaacccagattgcgactgcccagcagcagattgagacgggaaagcagcagctggcatccgccagagtgagcgcacagcaggaaagtgcggccgcacaagataagataacaaacggacaaaaggaaatcgcgctgggaaagctggagcttgagaagcaggaaagggacggtgctgccaagctgcaggaggcaaaggaaaagctggatcggtcagaggaagacatcaacagcatggaaacgccgaaatggtatgtactggaccgccattcgcattactcctatatggattatggaagtgctgcggaccgcatgggagcaatcgccaaggtgtttccgctgttcttcttccttgttgcggctctggtatgtctgacgacgatgacccgtatggtcgatgaagaacgtcaggaaatcggtaccctgaaggcactgggatattccaagccggatatcgcgatgaaatttgtagcctatgcggcaattgccagtatccttggtggaatctgcggggcagtaattggcatgattgtcttcccgacagtgatattcaatgcctggggaattatgtatacactgccggatgttcagctgcaggcggatatcggactggcggcccttgccatcgggcttgcctccgtgataacggtagctgcagcacttgcggcctgttataaggaactggtggaaacgccggccctcctcatgcgtcccaaggctccgaaaaacggtaagaagattttactggagcgtattccatttatatggaagcgattcaattttatttacaaggtgaccgcgcggaatatctttcgctataaaaagcgtttcctcatgacggtgattggaatcagcggctgcagtgccctgctggtagccggctttggtattcaggattccatcggggaaattgcggtgaagcagtatggggatatcttcaaatttgatgtcaccatgacatataaaggtgaggatacgctcagccagaaggaacaggaattgaacgagctgcaaaaggactcccgtgtgaagtctgccactgctatggcggtatatcacggcttctatgcggatgagggggaggataagggaatcgacctgtatgttcctcaggatgtggaaagcctgcatacgtatatctccctgcgtcagcgcggctccaatgaagcgatcagcttaaacaatgacggagcagttatcacagagaaaatcgccaaggataaacatctgaaggtcggcgatactttcccgattgacaatggggacggtgtaaagaaggatgtgaaaattgcggctgtcacagagaactatgtggggcatatcgtatatatgacaccctcctattataagagtgtctatcacaagacaccgcaaagtaccggcatgtttgccatcatgcgggacagcagtgaaaaggatgaacaggcgctgggaaatgcctttatgaaaaaggataccattgattctgtatccttctattccggaattgcagcatccttccaggatacgattgcatccctttccttcattgttgttgtattgattatctcagccggactgctggcatttgtcgtactttacaatctgacgaatgtcaatatatcggagagactgcgtgagattgcgaccattaaggtactgggcttttatgacaaggaggtcagtgcctatgtatacagagagaatattttcctgacactgatcggtgcgctggcagggctggtgctgggaatcgtcctgcactccttgattatgtcgctggcagagctggatacggtgatgttcggaagaaatatcgaaaagctttccttcctgtattccgtggcaatcacgatggtgttcgccatcattgtgaatctggtaatgtatcgcaagctgaaaaaaataccgatggtggaatccctgaaatcggtggaatag

SEQ ID NO: 42815 - DNA, 1425 bp, Erysipelotrichaceae bacterium 21_3
atgtccttatttgagaaaatggatccatccttctttaccatactggtatcgaagaaccgggatatttatgtggatctgcttctgcagattcatgactgcatttatcgcaatcagaccatgagtatggagcgtgccctgcttcaggatttactggaagattatgtgcaggataaaaaatatgaaatcgactttcaggaggaagcggaatacagcgatatcgagaatgagctgcgcagtgagaaggatgtttatgaccgggatatccagtttctgttacggctgtttgagaagcatacctggatcaatgtcgatctgcatatggatacgatgaaaaaaatggtgtctctgccctatcacagccgggtgttcatctccttcgtgaatgatattatcaaggaacgggaacagatcggctatctgattcgcatccatgcctccctgaaggatatggatgatcccgtgaaaatagaagacagctatcagcatatccgtaatgcctatgccgatttcaaggagctgattctgacactggaacagaccaatgccagaatacgggattattatgcgattcaggtgaaaaaggcatcaacgaaaatctatcatgatttctttgatgtttattatggtgatattgtggagggctatgtttttccaactcttgtggaggacagcttaaaacggtttaaaaacccggtcgcaggtattttggaaacccttctgcaggaggaagcagtcaaggagaaaattgtagacagtgcggtaagtcactatcgtgttgccagccgtgatacggcaaaaaagcatatcgaggaaatgctgtatgccatgtacaatgatttgaatatcgtggaaacgctgactgcccagctggtggacagcgacgcgggttaccgcagactggcaaagcagaaaattatgtatctgtgcaacagtgatcaggggttaaagggaaagctggtggaactgatccatcatatgaaggaagagccgcagagagtgtgtgagcagatcagtgaatccatcaatatccagcagacccgctacatggagcgtgatgaggtgtacacctttgaacgacgcaggcgtagggatgagcgggaagtgatgaccttcacctttgaagagagcacccagaatcaggaggagcttgaaaagcgcattggctttgaccgctatgcccgctttacccgtgaaagcatatcggcttactatgcagagaagctgcatggggaagcggtaggaaagctgaaggatatcggggtgaaggatatggatgactatatccgctccattctggtgtatgtatatggaagagaccgcaaaatggatgtgcaggcaacccagattccgaatcagacggaagggattacagaaggggatttccattaccccaatctgttgattaaaaggaaggtaacaaaatga

SEQ ID NO: 42816 - DNA, 669 bp, Erysipelotrichaceae bacterium 21_3
atgaaggtagaacaactggatctgaaggaccgcgaggaattcggacggatcgtcaatatattactggcagaaaactgcatttaccagtatgcgaaaatcagacagtttgagaaaaaggaacgaaatgcagactatgtgtttattcatgatcactgggactgcttcgaggaatatctccgctatgcgggatggctgctgtgcagggagcgttcatcttatatggggatgatttatctggtcaatgagcgggaggactgcagctgccgctatcgtctgacaaagctggaaacgcagcttctgctgattctgcgtaattattatgaggagaaaatgctggagctggatgcatctctcaccatacgtatttctgtcaatgagctgctgcagctgctggtggatgtgcatgcgatggtaagcgtaaggccttcaatgcaatacatccatgcggcattacagtccctgcaaagactgaatattcttcagaaatacacacagggggatgaggagctgatctgggtactgccttatatcacctgtgttctcacaccgaagcgggtggaggaaattctgatgaagctgcgtaatgaggaaggagaggaagacgatgaagctgaagaaaatgctgctggtcaactggctgtattacgagaagacgatcctgagctttga

SEQ ID NO: 42817 - DNA, 3282 bp, Erysipelotrichaceae bacterium 21_3
atgctgctggtcaactggctgtattacgagaagacgatcctgagctttgaggatatcgtctttctgagcggtaaaaccggagagggaaagtcagcgctgattgatgccatgcagctggttattctcggtcgaaccgacaattccattttcaataaatccgcaaatgataaaacaacccgtgatctgatgggatatctgaagggcaaatacaaggatggtacctttaagcgtgacaaagggatgttcagctcacatctgtgtatggaatttgaggatgaacagcataggatttactgctttggtatcgtatttgatgtaaacgggcctacgcggggggatacggagcattgctactatatgatgaatcagccgattcccgggcattgctttacggatgagggaacggtattcaatatccgtcgtatgaagaagctgctggccagctttcaggatcgcagctgccgttcctttaccacacatatggattacaaaaactatttccgtcagcgcatgctgatcaaggaccagcggtttttcgatgtctttaaaatggcagttgcatacacaccgatgatgaatatttccgaattcatcgtaaaaaatatctgtcaggaggaggaagacctgaatctggaagagatgcaggaggaaattcaggattaccggcagatgaaggaacagctggaaaccgtacagcagaaaaaggctcagctttccctgatccatgaacagtatacggatatatgcggggaacaggagcgtgttgcgaacttgcgtgtggagcaaaaggcagctgtatatcacggtatgctggtggaacatgatgaggcagccgcacaatatgaggtatatacaaagagctatcagaagctgacaaaggaatcaagggaaaccgaggagcagcgggcactgctggaacagaacatggaagccttacgggatgcacgcagggataatgcggcagatattctggaacgaaagatacaggcgcatctggagcagcgaaacaccctgcaaagagatacgaccgccgttcagcagcagctggttacgaagggagaatttctgaaggaacagatagagcagctggaggaaatcgaggattatgacggcttgcagctggaggacttcgatctgtccggaatcaagctggctatacaaaggtccgtgcatgcggcacagcagctggctgcgtttgatctggatgcctatagggatattcagcgacagatgagagacatcgagaataccctgtccacggtgcgccaaaccatgcaaaacagcctgcagacatgcagggaggagcaggaggtgctagcggcaaatcgccgtgcgctggaagccgggaaaaagacatatccgaaaaagctgctcgttttaaagcaggagctggaggaacggctttatcagcaggtgggaaaaccggtagaggtatgcatactcgcagacctgttcagcattcaggaggaggcgtggacaaatgcgatcgaaggctacatccataaccagaagctgaatctggtggttgaggcagaatatttcatggatgcctatcgcatttaccgctccattaaggaagaaaaaaagattcatacctattccattgtggatatcgcaaaggcaaagccggggaaacgtcccgatgcaaaaacactgtatgactgcgtgcaggtggaacgcgaggatgtgcgcccctatgtggaatatctgctgggcagagtcgtatgctgtgaagcggaggagacactgcgaagctatccggtaagcatcaccagcgactgtatgctgtacagcggctatgcagtgtcgcatatgaatccggaattgtataaggtaccctttatcggtgccgattccatagaaaagcagctgcaggagctgattatccgccagcaaaagctcacctccacctgccgcaagctggaaacagtcacaaggacattgcaggcggtacagctgcaaaccgttatcagtgatgactttatccgtcagctggaggatggactgtgcaaggccaaagaggtggagcagctggaacaaaagatcaaagagctgcgtgacgctcagacaccggaatccctgcaggagcttctgctgctggatcaaaaactggatgaggcaaagaaaaagaaaaacgaactgtatatgctgcaggtggaacaggaaagccggcgccgtcagctggaagaggatatgaagctttgcaatgcacgtatacaggagcttcagcagcaggttaaggaagcgaaaaagcccgagcaaggcataccggacacaatcggggcaatcaccacggcagacggtatccgcaggaaacagaaacagctggaggaagcactgcgggagctgaacagccgtgttgaaatttccaagctggagctgataacgaaaaaaacacattacaatgataccttccgcattgccctcaacccgaattttttatgcgatgattatgagcgggaatatgaaaagcattcggataatattgttgaggactatatcgataaatgccgcctcgcacagcagaaggcatatgagtgcttccagaataatttctttagtgcgctcaatagtaaaatcgaaaatgtgcgaatgcagattgaccggttgaaccgctctatccgcaggcataaattcggccgctccagctatgaatttgtgtgtacctgcaatgaggattaccgtgagtattacaatctgatcaccaacaaggaattaaacgggcacaatctgttgaacacgaaggtgtatgaggaaaatgaggagctgattcatgagctgtttgataaaatttcttccttatcctccatgcaggaccccaaaaagtatcaggagctgcaaaaagaggttcagctgctttcccgcttcaccacctatctgaaatttgatattctggaaaacggaaactcgctgcgtgccacgatcggctccagctccggtggagaaacacagacaccgttttatgtcgctgtactggtatcgctgttcagcgtatatgatgcaggaaacgacggtctgcagctggcaatctttgatgaggccttcgataaaatggataatgagcgaatcgaggaatgcatttacctgttgaagtcactcggctttcaggcaattatcgtaacaccgacggataagatatccaatctgagcaaggttgcggatgcgacgctgattgcgacaacggatgagaaaaacggccagcgggtttccaccgttcagaaatggagtcagaaagaaaacatagccatccccgactcggaaatgagacaggaagaagtataa

SEQ ID NO: 42818 - DNA, 1407 bp, Lachnospiraceae bacterium oral taxon 082 str. F0431
atgaatatttttgatgagatagatgaaaatctgttcagacctctgaccggaaccaataaaagaaaatatgccgatatactggctttgatttgggataaatgtaagagaatgcctatgtattctatagaaaaaagcactgtctttgatatggcggaggaatatcttttgggcttaggagagagtgtggaacttgatattgaagagcaggaggaggtcagcggaaatatctcggatatgcgagtggtggcaggcacccttataagaaggcttagagatacaggctggctcttggaaaaacccggtgaatatgaggaagaggacaagttggctctacagtataaggttgtgtctatacttaagtcatttaaagaggttgtcagtccgacgattgtcacatataagggtaagcttttcaaaatatattcaatgtttgagcatatatccgagcaggggagtccgtatgaaggcgtattaaaagaagcgtcggaagactttgataatctgaatcaggcgcttagaaccttgtcggcttcaatagaagaccatataaacgagctgactatgggtaagagtccgcaggagatattggaattttttgaaaaatatgaagagaagatagttgtaggatcatatcacaggtttaagacaaatgacaatctgttttattacaggtcaagtctgtatgaaagccttgataaatgtgaagacagcttgtttgacgcactggtgcttgactgtattgatacggaacgcgtagaaaaagacatagctgaagttaagataagagaactgataacgaaggttcgcatggacattgaagagatggaaggtcttatgagggctattgacgacagacatataatctacaggatgagagccgtacaaagagcgcagtttttgttgctgtctgacggaagcagtaagagtaaaatcaataatatactgaggttttatgcaagtaccatagattcaaaggaagacggatataaagacgatgatactgtaggagccaaaatctttcagatattttgtcaaaacttttttgacagcgcttctattgcaacacctgtgagaaaaagaaagcctacacctattgagcttatgagtatattcgaagaaccggatatggagcttgtggaagagaaaaacaaaaagatgatggagtatataaagaatgctttgacatctgagaatgtaaacaggtttgcaagggatattcttgcaggaaatcatgccgtgcagataagctcggtatttgaaaaggatcctgatacatttacaaagattataggattgtatacatattcaaagacatctgaaagagaatacgatataagactgaaggacaatgtggtggaaataaatggtgtaaggttcaaagattttattgttgaggaaagaagataa

SEQ ID NO: 42819 - DNA, 576 bp, Lachnospiraceae bacterium oral taxon 082 str. F0431
atggcggttgatataaaagaagagatagccaattacctgttgaataattgctttttgatgggaactgtggatactacaagagagaagtactattatgttataaatcatgaagaaagcttcaggcagatttttttacctataggatatactttggtggttcacagaaatttgagggttattcagcttatcaataatcacggtagcggcagagttatattaaaaaaatatgagagtattattttgcttatactaagacttttgtacgtagaaaaaagagaaagtttgtccacaagtgaagacatggtgtttgcaactgttgaagagataaaaaatgaatatgagaagctcaacctcccgagaaaatttgacagagtattgttggaagagtctttaaggaatataaaaagatacaatcttttaaaggttgaggacagactttcggatatggatgcaaagatcaggatttacccttcagtgatgcttgccatgcctgatgtaaatataaataaggcctatgaggagaccgccaagcttttggcacagtatgaaaacagcgaagacggagatgaagaatga

SEQ ID NO: 42820 - DNA, 3330 bp, Lachnospiraceae bacterium oral taxon 082 str. F0431
atgattagaatgacgaggcttcatctgataaattggcataattttcaggatgatataatagatttcaaaaatatcacctaccttttgggggtgaacgctgtaggaaagactacaataatggatgccgtaaggtattgtcttactacaaataaggatttcaacacggcgggaaataaaaagagcggaagaactcttttaggttcggtacaccaaaagcaaagggcggaggattcatatcttcgtccgggacatacggtttcatatatagggatagagtttttggatgaggctataaaaaagaactttgtaataattgcccgtatagaatccgagacgccgaagcaggatttaaagggggtatatcaggactggtacattacaaaaccgggatttgttcttgaggatattcctttttttacaaagaaaaatgatgccaagagacctacatcaagagatgctttcaagcttgagaataagggcatggacagggcgtccaatcagtcggatgcaaaaagaaggatttgcagagtgctgggtataggtgaggcaaactcacctatcggaaagaagtttaatgaggtgttccatatgggcacgggacttgatgatataaaggatatcagagagtttatctatacatatattttgcctgagcctgaagtgaatatagagtttttgcaaaaggatatgcttgaacttgagagattgcaggagatattgcaggaggcaagtgacagagaagaacttttaaaagaaatcaatgaaagaataaaatcggcaaaagaactccttagcaaagtcaaaataaatgagagtttggttgcttatgcaaatcttcaggaaaatatcgaagagacaaatgagaaaaagtatcttatagaggaatggaataaaagccttgagatgcttgataagagattacttgaactttcagagagtgagaataaggcatcagctcttttgtatgaagcacaaagagcggcggaagaaaatgtggaaaataaggaaatgctctcacttgaaagtgaaaataagaacaataaacttgaaaatgagaagcttatattggaagcgggtatatttgaagatgtgcttcaaaagctgttttttcttattgacaggctgaataaggtaggattttatgtcaaagtagacgactctataaaagatgaaaatgccgacaaggatgacaggataagagaaattaaaaacagtgcaaagctttttgcagatatggaagaagaaatcaaaaatcatgatgcgaagataagaaatgatattgcagagcttaatgataaaagtgatgtactttcaaaaaagataaagagtttggaagcaggcgtgatgtgttatcctgatgaagcgatatttgtaagagataagataaatgctttcttgagtgagcaaagtaaaagagcggatgccaagctgctttgtgaacttttatatatgacggataacagctggcaggatgccgttgagagctatttgaatactcagaggtttaatattattgttgaaccggggaattatctttcggcaaaaaaggtctttgtatctctgggcgataaagttaaagggatagggcttatagatacaagaaagataaaggagcctgagtacaagtctttgaatgaggcttatcttggagataagattgattctgaaaatatctatgcaaagtcatatgcaagatatgttatgaaaaatgttatttgctgtgagtcttcggatgatttggagaatttttcaaagagtgtaacaagagacaggctcagattccaaaacttctgcttacagaggatggcaaaaaaagaacatttcataggtgtggatgccatagcaaagcaattaaagagtgcaaaagaagagtttgcaggcgtcaaaaaagaacttacaagacttgaagaagccaagaaaaactttgactctatttataacggatatacaaagttcagagcgggtgacaacttcggaaaacttgaaaactactgtgaatcaaaggcaaagtcaaaagtactctcagctaagatagaagatatagcaaagaagatagaggagtttaagaaaaatcctattttacttgctatgtatgacagagtgaaagaatgtaagaagaacttaaatgttgtaagagatgagataacggataacaaggcaaaaaagcaaaacattaatgctgatataaacagggcaaaaaatttgcttgaggagcttgaagcgagcctttcaaatttgcagactatatatgagaaaagtgttgaggagtatccggagtttataaatgacgttgagaagaagtatcaaaatgaaagaaaatcaaagaaggcttcagccattgcctataacttttcaaaccgtgtaattcaggacaatatcgcgttgaacaactacttaaatcaggaacttataccgctacaacacagatatatggctacatatacctgtgattacgctataggcctcggaggggcaaacaggtatatgcaggaattcctgacattgcagaatatagagcttgaaagacataagagcgaacttgtaaacgcacagataagatgtaaggacagattccgtaaggaagttctgtttagaatgaaggatgatattttaagagcaaagcagcagtttaagcagataaatcgtgttatggaaaatctcgagtacggtgaagaaagctacagattcggaattgataagagtaaggacagggaacttggaatgttctatgatataatcatggacaaggataatatgcagattgacagagacaatgaaatgcttatgcttattgcagagagtaacaagtctgaagtatttgaaagtcagatagatgactttatgcaaagaattatgattgatgttgaggaacatgcaaggcagaatctatcaggtcaaaaatcaggtgccaaaagtatgggaatgtatgtggattacagaacatatctggactatgacataattgtaaaaaattgtgtgacgggaaatgaggtgggactttcaaaggtcaacgcggaaggcagcggaggtgaaaatcaggctcctttttatgtggctatctgtgcatctcttttgcagatttatgagcagagcaaggaaggttctataaggctgatactgcttgatgaagcattcaacaatatgacaagtgacagaatagagccgatgatgaatatgttcaagaagcttaatttgcagcttgttctgatagcaacggctgaaaaggctacagccatattgccgtactgtgatattacatattctattgtaaagtccggaaacaggaatgcgataggagtgtttgagaggattgaggatggactacattaa

SEQ ID NO: 42821 - DNA, 1206 bp, Lachnospiraceae bacterium oral taxon 082 str. F0431
atggactacattaaggatattttgaacagattgatagatatgtatgaaagaagagaaggctttaaaaaagagccttcttatttgcgtgtgatacaggcggatataaaaaagatctaccctgaatatgcggacaggtacaatcacaatgtgtataaggatatcaatacagcaatagaaaagttgataaatgaaaatcttattgaatcaaaggcggatgagacgggcaaatatgaaaaggtaaaattaaatgtcgaaagtattgcagaatgctataagagagtaaaaagaattgatataccgaaacggtgtgagaaaataaaagaagttctggatttgtttaaagacaggaatatgcctgtactgagatgtattatatccgattggagtaaacttatatcaaactataaaaagctgccatatgatataaaatatgacaaagaaagactttttaacatactgaaaatacttgaggcaatacttgggcttggtcgagagagctatataagaaatttttcaaccgcaatgtttaaggactcaaagagatttcaaagggagtttaaatcgactgtagagagtatactttttgattatacggatgaggtagtggaaaaagataagatacttgagtactacaatctctatgagaatcccacatatgtgtatataaaaggcgatatagtaatcaagtttgaagattcggttattcatgtaagggaaattaacggaggtattgcactctcaaattcagcacttgaaaagataaaggagataaaggtaattgcaaagtctgtaataactgtggaaaatttgaccacctatcacgatgaagatgagaaagacagtgtgtatatttatcttggaggttatcacaacagatcaaagcgggtaatattgaaaaagatatatgatgagaataagcactgtgaatatctgcatgagggagatatagatgtatacggatttttgatacttgaaaatctcagagaaaagaccggaataccttttaaacctttgaatatgggagtggatactgtaaagaggttttatgatgcgaaaatatataaagagcttacgacttcagatatcaatatgatagagaaaaagaaaggaaagcttggagagtataggcaagtgttggaatttatgctcttacataactgtaaggtggaacaggaatccataagagcggttgagattttaaattag

SEQ ID NO: 42822 - DNA, 1485 bp, Solitalea canadensis DSM 3403
atgctggaatcttttcattctatattaaaagtaagaatccatattgattctgctattaccctaaaattacttcgggctcggaatcttccgttgattattactttcttgaatcgggagtttaaggagaacgaacaaatgatgatcccatatcagagccttgtgcaaaagttgggagattttttagaggagattgaatatggagatgatgatgatgatgaatttaaatcagttaaactcatccttgatttcgatgaaaaggcaaagttgtatattgatcgttggatagatttgaactatctgcgcaatataatggatgatagcagcaaagtactttttgtgttgctttcaaagcatactgaaaaagcctttcagttttttgatctattgaaagagagggagttcgttggcacagaatctaagtttaaagatatttttcataaactaagggatatagttgaaaatgctaatcctgataaagtgaaacgtcttgatgaacttgaaaagagaaaacaaacaattgaggaagaaattagaaaaataaaaatcgatggatttgtaacaacttatgaggactatcaagttaaatcaaggtatgaagatataaaccggttggcaaatgaattaattggtgattttaaagaagtagaggataattttaaagatataacaagaagaatttacgaacgtcaacaaaatacgaatctttctaagggtaaattacttgctgagacgtttgatgcattatatgaactgcgggcaactgaccaaggcaaaagcttttatgcattttggcaatttatgctcgacgatgtgagccaggcagattttcagaaattgactaaagaagtttatcaggtcctggaagatcggggaatcgaagtttcgtctcgttctcttcgcaagctaaaaaatttgcttcatatagctgccagaagagtacttgataagaatgggatattagcagataagcttagtcgggaaattgtggcaaaagatcagctggaatctcgtaaaacaagagagttaatgtcagctattcgtacgatggctataaaacgtatcaacaaaccattcgaacgagacgtctgcatggaattggatggagacgcagatgtttatcttcctttggaaagaaaactaggtgaaaaacctgaagttaacatattcactatgaatgctgaaagcgcatccctagctatagaagatataggggatttatcaaaactcttcaatgccgatctaatagagaagaaattattgcttgataatatttacgaactgcttttggacagaagtcagatctcattgaaagagattgttgaaataaagggaataacaaaaggattatcagaactcttggcatatattacattggttaatacctctagtaaatttttcataaatgatacagttaaagagacaatctgctttgacgattaccttaacaaatacctcgaactacctcaaattatattttcaaactaa

SEQ ID NO: 42823 - DNA, 591 bp, Solitalea canadensis DSM 3403
atggagtttataaatcctaacatagcagtttatgcaaaggcagcagttaaattattacaagggcctgtatttgaggatcaaaaagaattatgggaagagattaacaaataccatgtagagctgacccggtattttgagaaaatagcggtcaatgtaataatagataaccgcgatgggtatgcatatcttaaacaaatagagttagatgactcgggattaactatagggcttattcggcggataccgcttagttatgacttgaccttagtttgtgtattactgagagaatggctgcttgagtttgaatccaatgatgttgaaactaccaatctatatatcacagttaaacaatttagggatcgacttgaaatgttcttcaaagaaaaaacaaatgagcttaagtttatcaaagagcttaataaacatttagacgcttgtgagaaaatgggttttcttaaaattgtaaataagcaatcgtccaattccgatgacgacctgtatgaagtgaaacgtatcataaaggctcgcataacaaatgatgaactaactcgatttaaacaattattagaagatgagcttaagtctgtttag

SEQ ID NO: 42824 - DNA, 3414 bp, Solitalea canadensis DSM 3403
atgagcttaagtctgtttagtaccaaacccaatgaatctggctttaggttacatgcttatgagatctggaattggggaacttttgatgataagatatggacgctccagccccgaggcgagacatccctgttaactggtgcaaacgcatcaggtaagacaacgttagtagatggtttgttaaccttgctagtaccagaaaaaaggatgcggttttataatcagactgcaggctctaaaggtgagcgtacggaagatagttacgtaatgggagaatatggagaaacagaaaatgaaattacaaacgctagagagattaagaggttaagggccgaaaagactaaggcccaatccattttattagctgtatttcagaatgaatcccaatttgttaccctaatccaggcacgctggtttgccggtggcgaattaaagagaacatttattatcgcttataaagaattatcaataagcagggatctgatgccttttgatagcaatggggactggaagaagagattaaagcaaaaataccctaaacaagggagtaaagaattattgatgtttatggatagccctggcgaatatgggaggatgatgaggaaggtattaggtatgcgttcagagaagtcacatacgctctttagtcaaaccattggtcttaaggtattagggaatctggatgaatttgttcgctttcagatgttagaagagagggattcagaaatcgaatttcagaagattaaatcctacttcaaaacattaaatgatgcccacagagcaatcgagaagacaaacaagcagattgaactcctttctccaattcgtgatgttggggtaactcttaccgctgataaggttgatttagtgctacaagaaaagcaccaggaaatcttgccactatggtttgctaggaaaagccaatcattaattgaatcatttctttcttcagagagcaaaataaaagagaaaggagaaacagaaataagtctattacagcaggagattggagatgtagaggataaaatcgtaaaagtatcagttcaaatcgaatccgatgaggtcggaaggcaggttggtgatattgaaaaagaaatcaaaagactaattcgggaaaaggaggataaagaaaaagtattaaaacagtataatcgtttagccgaagaattagacttccaattaaacccagaatcggcaagcttatttgaggaacaaagaaatactgcaaaagatagtaaatctaaagtgagcattgagctggaaaaattggaagaagatcagtatcaggcaaaaagacttaaggaaaagttgaatgagcaatttgataatatatccaatgagctaagcatccttcagtctcaaaaaaataatatcactggctctactgcaagaattagaaaagaattattagactatacgggtgcctcagaattagaaatcccctttgtagctgagttaattaaaataaaaggagatgaaaaatattgggagccagctattgaaaaggttctgcataattttgcacttcgtttaatcgtacctgataaatattatcagcaagtaaatgaatatataaataattacgatttaagaggtcgcatgatttatcaaagattcaataaaagagacgtatccccaagattgttccaacaagtggatgaaggtgaattgatttataagcttgagttcaaaaaaactgagtacaccgaatgggttcaatctgaaattaacaaaaagttcaattttatttgtacagatgatttggaatcgttccaattattagaaaaggctcttaccagcaaaggcttattcaagaattccacccgtcatgaaaaggacgacaggcctgaagttaaaaaccagcaactatatgttcttggttgggacaataaggaaaagttatctgttttgaagggaaaagcagcggagttaaatcttgcggtatccgagtccgtaaaaaaaatagagtatatcaaaaatcaacaggatagacaaaaaaacataggagacaatttaactcgtttcattgaacatgatgatttcaaaaagatagattggtggagtctttcgtcgaaaattcaggaaaataaaataagaatagaagcacttcaaaagagcaatgaccgagttaaaacacttaaagatcagcgagatggattagtggccaatttgcaagtattgaagtcaaagttagatgggctaaaaaatactataactattatcggtgcagaaataaagcagcagcagcagaaactacgagagacgattgaaattattaacaggtatattattcttccagaccagacagatatcctgtgttttgaaaacaccttcatcactgatattgatttaaaattagattctattgacaattttaggaagaggatacaaagcataatctacgaaagtattgagacctataaggacaaaataagatctcaggaaagtgctgttgagactttgatgagagcctttatcaatccaccacgaaatattacggatcaatttgaagattggagttcggaaacccatcgtttaagagagcgggctgagtttatagatgaatacatcgcattgttagataaactagaaaaacaggaactcgcagggtataaacaacagtttaagaaataccttaatgaagagatgattacgaagatgtctgattttcagacatggttagaaaggcaggaagaggatattgaggataacattgaaaccctgaataaatctcttgaaaaaattgattttaagagtaatcccccaacatttattaaactgcatatcgagaaggattatgccccacgggtaaaggatttcaagatcagattaaatgattggaagcctaatcttattgaattcgaaagaacgaaagatgataatatcctagaacaaagttttaataaaattaaaggcttattggactatctcacctcggatgaaaccgcaagaaaagaagtgctggacgttagaaattggcttaaatttaaagctgttgaacatcataaggaagataaaacaaaaatatttcggagctatactggaacggcaaagctttctggcggtgaaggagctcaacttacttacaccatcttgggttcagcaattgcttaccaattcggtattcatcaggaaggcttaaatactaattctttccgttttatttgcgtagatgaagcattcagtaaacaggatgatgaaaaggcaaggtttttaatggagttatgtaaacagcttcatttgcaggttatggtagtgtcaccggcgaaggctgaagaggtcgcaatcgttgagccatatattgcacgggtccatttcgtacaacgtaaggataatcgtcattccgttgtttatgatatgccaataaaacagttagtagagcatcgggaagattatttacagtctgaattatcatga

SEQ ID NO: 42825 - DNA, 1143 bp, Solitalea canadensis DSM 3403
atgatcacaacaactgagataaagaaaaaagcagatagaatctacccccaagtactccgctctgttttaacggaagagaatgttttcccatttcacattagagctgataaatcactttcaaaagattttgtttcaatgagtcgggagattgcccatataatggatgattcaaaggatagaaaagggttcggttatactgttgttgcagaaagaaccaagaatagactgcatggtgttcaagatataccaaaagctataatatttgaaagtcaaatagattttcttaagtatgttggcaagcaaaaggagtttgaagcttttaattctgatatcaaaaagattttatctcttattcctgaattaaaagattggtgtatcagtaatcctcttttagtaatcaataactctctaaaatgggatgatttgattaaagtttgtttatggtttatgagttttcatgaaactgagaaatattatatcagagaacttcctattgccattgacactaagtttgtagaatctcatataagcattttacggacgcttttagatgaacttgttcctcatttaactaaaatggaggaaagtttctttcataaacgatttggattaaagtaccaggagcctcgtatccgattaaggtttttagacaaattattagctattgaaggcaggtttactgacataagtctacccctaagcgattttgtaaaatcaaatttaacgtgtaagaagattttaatcactgaaaatataatgaattttcttactctcccggatctaaatgatactattgcgatatggggtggtggttatgctgtaacgaatttaaaaaacatcaaatggctatatgataaacaaattttttattggggggatttagatattcatgggtttgagatattatcccaattgcgcggatattacagtcatgtaatatctgttatgatggatgaaacaaccctccgagagtttagcatttatcaagtttcaggaagcaaatcaaatgtaagcaaccttaatcatttgtctaaagaagaaaaacaattatatgtggaattgagaactggcaatataagattagagcaggaaaggatacctcaacagtatgttaataagtggttggaatcaagtttaagctaa

SEQ ID NO: 42826 - DNA, 1500 bp, Oceanimonas sp. GK1
atggatgaaacggcattacaacgcactcagaaatatgtgtctgcccgcaggcaaaatccggcctgggtgttgctggcttcgcgtcgagcaccgcttatcctggggtgtttgagtagtctgtttgaacaggctgatgatggtatcgctgaagaagacgctctgcaggcgctttcaagcatgctggctgaatatgcagtccaggatgaatatgaaatcgaaccggataatacccgcctgcaagccggacgggatctgcgcgaatggattaagcgtggcctggtgattgaacgtgctcaacgcctgtatgcaacagatgcgctgggtgctgccatccgctttattgattcactcgataaccgcatcatgacttccactgcttcgcgcctttctgtggtgcagcgtgaaattgaaaatcttgaaatgggtttgaacccaaaccccgccagtcgtattgcctcccttgaatcccgtattcagcagttgcagcaagagctgaaggccgcgcaatccggtgatattcctgtactgagtgaggcggaagccgtggagcgtattcgtgaagtgtatggcctggccacggcgttgcgcaccgattttcgccgtgtcgaggactcctggcgcgaggcggaccgtaacttgcgccagtcgattatgtcggaacaactgcatcgtggtgagattgtcgatcaccttctggatggtcaggaggcgctgcttcataccgccgagggccgggtgttcgacagttttcagcagcagctacgccaaagcagtgaactggatcgaatgcgtgatcgcttacgcctgatcttaagccacccttcagcgaataaagcgcttgaaccgaaccaaagcaaaaaccttcgctggttgccgtctcgtttggtcaaagagagtcaggctgtgctccaggcgcgggcgcgcagtgagcgggatgtgaaaggcttcctcaaaaccggcctggcggcagaacatcacagggttggccagctcttgaatgagattatgaatcaggcgctggagctggactggcagcctcgcgccaaccgccgtgagcctgtacctttgccacctgtgggcgtggcgctggcgaaaacgccattgccggagcgactgcgttttaaagcgattgaaaatatcgatcagcaagccctggatctttctcgacatcgggctgatttgagtgatcttgatgcggagttctgggatgcgctcaatggccttgatcgtgaaaccctgatccgggagacgctccagcttcttgctgagcagggtaagcctttgacgctggtggaaattgctcaacacctgccaccagaacatgatctggaaaccttcgcgctctggttgggtatggccagagaagctggtgttgagatagatctgagtcagccgcaggagtttgaagttttggatgaagaccagcgtcgctggctgttttcattgccgtatctgacgttgagttcgcaggacgtcagcgatatcgactgggagttttga

SEQ ID NO: 42827 - DNA, 726 bp, Oceanimonas sp. GK1
atgaatggagtttttgaccgcattacccaggcattcgctgacgaagaacctcaggtcacgccagatgttgaagcggcgggtgaaaatgaactgccagaccagcatcaagagtcagaacgcacgcctgcccggttacgcgaagtgtctcaggatctgctgcgctttggcctgctcgaagagcgccagaagccgaatttttacaaggttgctgtacgtgaactggatgagctgaaccgaatccttgaaccgctggatctgtttgccgctgttgatgatgttcgtggtctggtgtttcttaaagtgcttaaggctgatgagaacgcggatgttgaagaggagtggtcgcatccccttgtgcgcaagcagcgtctgaatctggagcaatcgctgttgctggccattttgcgccagtactttgttgcccatgagcaggaagcgggcacgggtgccactcaggcgttggtcgcggtcgacgagctgattccgcagatgcaggtttatctgggtgatcagggcagtgaatcacaggaacgaagccgcattttagaactgctcaaccagcttaaagaacatggtgtggtgacggcaccagataaagatgaacgggtgatgatacgcccggtgattgcgcatctggcaaacccggaaaacctcaccgctctgctgcactggctgcgcgagcgtgctcagaatgagtgtgatacccacaaggagcgggagcaatga

SEQ ID NO: 42828 - DNA, 3306 bp, Oceanimonas sp. GK1
atgaatcaggccggactctggcagcaggatgccagctataaactgcagacccttgagctgtttaactggggtggtttcggtggtcatcataccgccgatattcatactgaaggcactgctgtgatagggccgaccggcagtggcaaaaccaccctggtggatgccctgatgacgctgttgtgtaccaaccccagatacaatctggcctcaaccggtggtcatgagagtgaccgggatctggtctcctatgtgcgcggtgtgtctggccccggcgatggcagtggtacccagtcgcatatcgcccgcccgggcaaaaccgtcacgggtatcgcagccagtttaagcaacggtgatgaactggttcgcattggcttgttgctctggtttgatgacaccagctctgccgtaggagatatgaaacgcctgtttttctttgccacctcaccggcacaaacacttgaacactggctgacggtccagcatgaaggcggtatgcgggctctgcgccagcttgagaaaacgcaagccggactttggagttatcagaccaaaaaggattatctggtccgggtgcgcagcttctttgatgtgcgtgataatgccttcaacctgcttaaccgcgccgctggcttgaagcagctcaatagtattgatgagatctttcgtgagctggtgctggatgatacctcggcatttgaccgtgcccgtgaagttgccgacagttttgatgatctcagcgctattcatgaagagctggaagttgcccgccgccagcagatctcgcttgagccggtgaaaactaactggcttaaatatcaggccaatgccgaaaaactgaccgagcagcagacattgagccggattttgcctgtctggtttggtctgcaggctgaacacctttggcagcaggagtgccagcgcctggctcaggactgtgaagcagcagagtgcgctaaaaacgaagcgcagcgccagcatgatcagcaggtggagctttgtgatggtttgaaagagcaatatctgcagctgggcggttcggatattgagagcctggagaaattagttaaagcgacgcaaaaagagctcgcgaattgtgagcgtgatgccggtgattatcagcgtttagcgcagcaactgggtttgtctgattcactggataaaacctcatttacacataatcaggctcaactggctgagcagcagaagatgcttggggctgaggctgaaagtgcagagcaggctgtttatacagcaggcgtccaacatatgcaggcgtgtaacactctgcagtcgctggagcaggagctaaccgaagcaaggcagcgccccggctccaatattcgcagtgagtatcaggtttttcgggcagctctggccgaagagctggatctggagccggatcagctgccttttgtggcagagctggtgcaggtaaaagagagtgaacaggcctggcgcggggcgatcgagcgggcaattggtgcccaccgcctgcgtattctggtacccccgcacgccattaaacaggcactgcgctgggtgaatgcgcgtaataaccgcctgcatgtgcgcttgctcgaagtgaaagcgccggatgcgccgatccgtttctttgatgatggttacacccgcaaactggagtataaaaatcacccctaccgggaaacggttaaagccctgctggcacgtctggaccggcattgcgtcgatgccccggagcagctgcggcacactgagcacgccatgacgcaacagggcttgatgtcatccaaagcgcgggtgtttgataagcaggatcaaaagcgcctgcaggatgactggcagaccggttttgataaccgggaccgcctggcggcactggaggcgcagattactgaagcccgccagcagcttggccagctccaggctcaacttgaaaaggccaaagccgaggcccagcagctcaatacccgccaacagctgattacacagctgcaaacacttagctttgagcagatcgatcttggtcaggttcagcatgatttggcgcagcatcaggctaaactgcagcggctaacgtcacccgattccgatctggccgccgctaaacaggcactggatgctgcccagcaaagcctggctgatctggccgggcaggtgcaaacacttaccgaaaactacttcaagctcaaaccacaactcgatgctgcaaaacgcgaacatgccagcgcccagcaaagggctgcacaaggcctcaatgatgaacagcgccaaatcgctgcggcccgtttaccaacactcgaggccagtcagcggaatgagctggatgagatggaacgccgggccgctctggcagtgcagcaagcgttggatgcatataaagagaagcaaagccggttggtgcaggagttagtgcgctgcatggccaaagccaaacaggaagaccggggtgcactgtctgatgtgggtaccgacctggacgatacccggcagtaccttgaacgcctgcagatcctggtggaagaagccctgcctgagaaacgccagcgttttaaagagtatctcaatcgctcttctgatgaaggcgtcacccagctgctcagtcatatcgacaatgaagtcgccatgattgaagagcgccttgaagatgtaaatgccacgctgcggcgcactgatttccaggccggttgttatctgcaactcgttgcgtccaaagtggtgcatgaaagcctgcgcagcctgaatacagcccagaaacgcctggcctcggcgcgttttcaggatgatgacggtgaaagtcagtacaaggctttgcaagcgattgttgagcagctgcgcgatgcttgtgaacgccaccgtactcaagccgcacgtgcgctgcttgatccgcgtttccgcattgaatttcatgtttctgtcatcaagcgcgccacaggcaagacgcagagcacctttaaaggttcgcaaagtggcagtggcggtgagaaggagattatcgcttcctatgtgctgaccgcatccctgagttatgcactgtgcccggatggtgccagccagcctctgtttggcaccatagtgctggatgaagccttttcgcgcagctcgcataccgtggccgggcgaattattgccgcgctcaaggagtttgggctgcatgcgctcttcattacaccaaacaaggagatgcgcctgctgcgtaaccatacccgctctgcgattgtggtgcacaggcgtggcctggcttccagcctgatcacgctgagctggcaagagctggatgcgaaaaagccgcagcgcacaggtgcaacagatgaagttacccactga

SEQ ID NO: 42829 - DNA, 1152 bp, Oceanimonas sp. GK1
atgaagttacccactgatattgcagcacggttagtcaagcagtggcaccaaaccagccttcggcgtgaacgcttgctctcagccgaggcctggccaattgagtttgcgatcggcaagccctcagccaacatgtttagcgagcagccgggtaaggttcgtcgccatcttgaacattggcaggcggtgaatatcggtgatgttgaatggcagccggtcaaatatcgtagtgctgcagagccggtagagatgccggttagatggctgctgcgtaatccatcccaatggatagctgccgccgctgataaggtggtcgagggcgaatttaaaaccctcgaaaatttagttgtacaggtcaatccactttatcgtgagttgctgattactgaacgcggtttatggcgcaataagcccacagatgaggtgatagcagctgcccagttggccgattctctcgcacctggttgcgcgcaggggcgtccattacgattaatggcgggtctggcggtggataccaaatttatggagcgccatgctcgcctggtgatgcgcttactggatatgcgctatgcaggtgaggccagcgagcagggactggaaaactttctgggtgcatcaaatgataaagaacactggctgctggtgctggatctcgacggaaaactactgccattcaggcggatgcggttaacaagtcgtcagctggcgagtgctgttttaccaggctcatgtttgttggttgttgaaaatgaacaatgcgagcatttgttaccaccagtacctgatacccttgccgtgctgggggcagggctggatcttgattggctggcgaaccctgcttttcagcacaaaaaattggcttattggggagatctggactcctggggcttactgatgctctcgaatgcgcgcaagtgcgcgccgcaccttgtgcctttgctgatgaatgaggaaatatttaatcagttagcagagggcagtgccgtggttgagccggtgagcgcacagccggtaacgcctgcagccctgaacagtgaagaagcccgtttatatgagactttgatcaaggctcccagaggccgactggagcaggaatatctgcccgctgagatggtagagcgggcggtacaccattgggcctgtttgtttggttga

SEQ ID NO: 42830 - DNA, 1497 bp, Cupriavidus basilensis OR16
atggatctcgattggaagcaacgtacgcagcagtatgtgcaggcccggcgccagcatccggcctggcaattgcttgcagcgcgtagttcaccgctggtgctgagttgtctgcagacgctgttcgagaggagtcacgacgggatcgtctgcgaagaggcgcagcaggccttggcggcgctgctggagcagcatgccaatagcgacgaatttggcgtcgacgctgacgacagcgcggctgcagcgcgcaaggagttgcgcgcctggatccggcgcgcgctggtgatcgagcgggaggggcgcctgtatgctacggacgcgctggaggaagcgttgaggttcgtagccggactcgaaggccggctgatgacatcaaccgcatcgcgcttgtccatcgtgcaacgggagatcgagagtctggagtcaagcctgaacccggacccgcgcagccgcgccagatacttgcaacgcaagatcgccgaactcgagagcgaactggccgcggtcaacgcaggtgaggtcaaggtactgagcgatgccgaggcaaccgagggcattcgcgaaatattcaacctggccaccagcttgcggggggacttccggcgggtggaggattcctatcgcgaggcggaccggcggctgcggcaatcgattgtcagcgagcgcaaccatcggggcgaggttgtcgacaagttgctgaatagccacgatggcctgctggagacgccggagggcaaggtgtttcatggttttcagcagcagttggggcgctcggcagaactggatgcaatgaagcatcgcttgcgttcgatcatcaggcatccagccacccggtcggccttgaattcgcagcagcaaggtgaattgcgctggttgatcattcgcttggtggacgagtcagcagcggtgattcgtgcacgggcccgcagtgagcgtgatgtcaagggtttcctcaagacgggcttggctgccgagcatcatcgggttggagaactggtcaacgatatcctgcagcaggccctggcggtggactggggcagtgttgcggtacgccgccaggccggacctttgccgccagtcgccatcgcggtgtcggggctgccactagtagagcggcttcgcttcaaggccagcgaggacgatgagcagcagggcctcgagctgggctcccgcagcatggataccacgctgatcgatgaggatttctgggatgcgttcgatagtcttgaccgccaggcattgatggagcggacgctggccttgctggaggagagcgggcaggccatgggcattgccgagctggcgcggcatctgccgccgacccatgatctggagtcgatcgcgttgtggttgagcatggcgagggaggctgacgccccggtgcatcggcagcgcgagcgcgtagatgtgcttggccgtgacggaattgccctgcgtttccaggtgccccaggtggaattgggcgccgaacatctgcgcggcttggacatggagatatag

SEQ ID NO: 42831 - DNA, 756 bp, Cupriavidus basilensis OR16
atggcgagcattttcgatgacctgaccgcggcggatgggcccgccgcaaccgtggattcgtcttcgcggcacagcgaggaagaggttccgctcccatctgccgcgcaagccggagccgagcgtgggcttgccatcaccccgcgtcaggtcaaggatgcctgccaggagttgctcaagctcggtctgctggaggccgcgagaaagcctaatctctatcgcatcgctactacccatgcggccgatatcgatcgcatcctggagccgctggacctggcattgaagatcgacgacgtgcgagggctggcttttctggtggtgtcacaacccttgtttgcggaggcggaggaagagtggtcgcatcctctggtgcgccgccagcgcctgacgctcgaacaatcgctgctggtggccttgctgcgtcagcactatgtggcgcatgaacaggagggcgggattggggcgggagatgcccaagtggcgctggaagacctgctaccgcaattgcagctgtacctgggcaacctgggcagcgacgcgcgcgaacagcagcgtttgcgcaccttgctggagaagctaaagccgcatggcatcgtttccgaggtcgatccgcacgatcaggtcgccatccggcccatcatcgtccatcttgccaatcccgagaacctgcaaagcctgttgcaggcccttaggctcgcggcgcatgcgggcgctgacgacgatagcggtgcgtcgagcgattcggaggacgccgtatga

SEQ ID NO: 42832 - DNA, 3006 bp, Cupriavidus basilensis OR16
ttgctgccctccgcagcctatgtgctgacgcatctcgacgtctacaactggggaccgtttgggggacggcaccatgccgagatcgatattgagggtaccgcgatcatcgggcaaaccggcagcggcaagacgacgctggtcgacgccctgatgacattgatcgcggcccagccgcgttacaacctggcctcaaccggcgggcatgaaagcgatcgcgatctggtgtcctatgtacgcggcgtgtccggggtgggacgtggtggcgatactgaccatattgcccggccgggcaagaccgtgtccgcgatcgccgcgagctttggcaacggcaatgtgcgcttgaccatcgccggcatctttacgttggagggtagtagtcggcgcgccgaccttgaccggatctggttgatttcccggcaggagcagcaaggactggatgagtggctcgaagtgcatcacgccggggccttgctgccggtcgagaagggctggcagtcgcgcggcgagtaccggcagcaacaagcggtccagctcgacctgattgccatgctgccggtttgctatgcgctgcgcgcccaccagctttggcatggacgggccgacgatctagcgaggcagatcggattttgcacacagcgtgtcgatgcactgtccacggagattggtgagcaagaggtgcaggagcaagctctgcgtgaccgctacctgcagaccggcggcagcaacgtcgaattgctggaggagcaaatagaaaggcaacgcaagcactgcgagactcttcaacgctatgcgcgggactatcagcaactgacgaagtctttggcgctcgatggcaccttgacaactgaggcttttggagaggggcagcggcaggctggccagcagaaagtccagtatgaagggtcgcttgcggggcaggaaggcgaggctttcgcgcacggcgccaaggtagaggtcagcaaggtggttgcctcggaagtgatggaatccttgcggcaggtccaggcgcgacccggctccaacattccagggccatttcagcagttcaggagcgaactcgccgcacatctcggtcagcctgaggatgccttgccgtttgttgcggagatggtggaagtgcacgcaaatcaagcccaatggcgaggtgccatcgagcgcgccattggcgggcatcgacttcgtctgatggtgccgccacaggtgatgaaagcggcgttgtcgtgggtaaacggccgcgataaccggctgcacgttcgcttgctggaggtgaaggagcctgcgcaagcccctggctcttttgaggacggtttcacccggaagctgaatttcaaggaccacgcttacggggaagcgctcaggcaattcctgaccgagatcgaccgtcattgtgttgcctcacccgagatgctgaaaagtaccccgcacggcttgacggcgcagggcttgatgtcaggcaagactggctttttcgagaaacaggataagacgcctctccatcaggggtggatgaccggtttcgataacaaagacagcctggcggagctggaagaacagttgcgtcaggccacggcggcgcttaagaggcatgaggaattgttcgagttgggcaaggcggcagtgggtgaaagccgcgtacgcctgggcctgcttgagcgcttgctgggtctgcagttccaggacatcgacctacccgcagcagaaggcgaccttgctgatttgcaacggcgcctgattgatctgaccgatcccgagtcggacacggcgagggcgcagcagcgatggcaagatgccaagacgctgctgaggcaaaggtctgaggcgtggcaaaaggctcgcatggttcaagtcactttgcagaaagacctcgaggttgcgatagcacagcgggaacgcgcctaccgacgcagcggcgaggggttgaaggctgggcagctagcgctggcacatcagcatttcgatctgtccggtgtgcaacaagtcgatgcactggaggatcacgagaccgaggcggaagggcgcttgcgtgggcacctgcaaaagctcgccaacgagcttgttcgctgcgagagggacctgatccgcgccatgggacatgccaaaggcgaggataccggcaccctgtccgacgtcggcactgaattggaggacgtgccgcaatacctggcgcgcctgaagatactgaacgaagaggccctgccagagaagctgcaacgcttccagctgcaacgcttcctgaactacctcaaccagtcctcggaccagggcgtaacccagttactcggcagtatcgagaacgaagtggcgatcatcgaggaacgcatcgaagatcttaacaacaccatgcgccgggtggatttccagcccgggcggtatctgcggctggatccgcgccgagtggttcatgagagcctgaaaacgctgcagcaggcgcaacgcgcgctacgctcggcggcattgcaggatgatcagggcgaaagccacttccgggccctggcgcatgtggtcacgctgttgcgagaagccagcgagcgccggaccacggttggcgcgcgtgcgctgctggatccgcgctatcgcctgcagtttgccgtatcggtgatcgagcgcggcacgggtgcggtcgtggaaacccgcaccgggtcgcagggcggaagtggtggcgagaaggaaatcatcgccagctatatcctgacagcctcgctgagctatgccctgtgcccggatggtgggagcaagccgctattcggcaccatcgtgctggatgaggccttctcgaaaagctcgcaggccgtggccgggcggattatttcggcgctgcgggagtttggtctgcatccgttgttcgtcacaccgaacaaggaaatgcgtctgctgcgcgcgcatacccgctccgcgatcctgattcaccgcagagggcagcaggccaccatgacatcgctgagttgggaagagctggatgtgctcgctcgctctagacaaaacagccaagatgaagtcaccggatga

SEQ ID NO: 42833 - DNA, 1155 bp, Cupriavidus basilensis OR16
atgaagtcaccggatgagttggcggcgaagctcgccaggcattggcaatccgcgcaagtgcgcgtggctcgcttgctccaggccgatagctggccgctgagtctgtctataggcaggccgagcgcgagggcctttgccgacgagaccggcctggtcaggcggcatgtgcagcgctggcgtgagatgcaagtcggaacggttgtctggcaggatgtggcgtaccgagccggcaatgcgccggttgaagtaccgctgagttgggaattgcgcacgccgtcggaatgggtcttagcgactggggatccaacgatccaggctgagtatcgggcgctgggcaagttggtacaggctgtcgatccgctcttccatcccttgatcctgcgccaacgccgccttgcggtagaccgctcggcaggcgaagttgccaaggcgagcgaggtcgccctggccttgacgcctggctgtgcgggaggacggccgctgcgcgctttgactgtttgcaatattgatagcaagttcatcgaacgcaatcgcgccttgttgatccagatgctcgatgtgcgctttgacggactgcccggcgagctcgggctggagtccttcctggatgcagccgatgatagcgatcattggctcctgttggtgccgctggcgccgagactgctgccattttcgcagcagcgcgtgcgcgtcagcgagcttggcctgttgccggagtccgtcagccatatcctgatcgtggaaaacgagcgctgcctgcatcaattgccggcgctggcggattccgtcgccatcctcggtgcgggtttgagcctaggctggatgcgagccgaatggctggcgcacaagcatgttgcctattggggcgacatggacacctgggggctgacgatgctggccagggcacggcaggcccagcccgacgtgactgtcgtgcagatgaatcgagcctgcttcgatcaatacgctgtagcgttggctgtggcggagcctgtgccggccggtgtcgagccgccggagggcctgacagtcgttgaaagggagttctatcagtatttgcgcaggcaggagcgcgggcgccttgagcaggagttcctgccgccggatctggtagccgcagcgctaatcgcgtggcatagcgcctcgccgggttga

SEQ ID NO: 42834 - DNA, 1470 bp, Niabella soli DSM 19437
atgacgaaagagaatattggcacactgatacaactctcccctgccctgcaaatgctccggctgcggaatgcaggctgggtattgccttttttatttgaagcctttaaagaaagccggaaaatggtgctccgcgaagacgaattgatcacaaaactttcggaaacgctgagtctgattgcagacggcacggaggacctggaagaagcccgcatcgaatttggagaagatgaggaaagccgcagccgcaaatacctggttaactgggtacaaaaacggatccttcaggacttccccgatacggaaggacataccaactaccaactgagcgcttacaccgaaaaagtatttcaatggatgcaaaacctccaggccggtcagcaccatgtaggtacggaaagccggtttaaaatgctgtttagttcgctgcgcgatatggtggaaaataccgaagatgatcgtgaaaagaaattacagcagcttaaagaccgcaaagccgaactggataaagaaattaaagcgctggaaatgggcgtggcgccacagcgctacaacaatgcccaggtacaggaacggctcgacttatttatcaaactctgttatgagctgatcggtgattttcgggaggtggaagacaattttaaacagatccaccgcaatattgtagaacagcacacaaaggcggaacaaaacaaaggcgccatcctgggctttgcctttgaatcctatgatgccctgcggggcagcaaccaggggaaaagtttttatgcgttctgggatttcctcatctcacgcagcgggcaggaaaactggcgccagcttaccgagcaattattacaacttttacaagaccgcgaactggaagccgacactgatttcctgcgcaatatcaaatcctttttgctggaacagggaaaagccgtgtacgaagccaatgataagatggcggaaaagctcagtcgcattatcagtgaaaaagaaatcgcccggcatcgcaggctgcggcaacagatcagcaatatcaaagaattgatctttgacctcatggaggacgaaacagttaccgccggcatcccggtaacggaccccgttgagataaaaattgcaatggaccgcaagctggtgctggagcaaaagacaatcgcgggcacgctgaaacaaccaattgcaggcattgaaaaaattgaggatgtggaccgcttcaaccggctactcaacaccagctttattgacaaaaagatactgtggaggaaagtagaagaagtattgcaaaaaaaacaaaccgctacgctgaaggaaattatcgagaccacctctctggacaatggcctggcagaggtgatcagctattacagcttccttcgcgaaaaagcgaaacacgtgcaggtgctggctgataccacagaactgattcctattgacaaagcagccaccaaattcgtggaagtgccttacttgttattcagtaaataa

SEQ ID NO: 42835 - DNA, 591 bp, Niabella soli DSM 19437
atgtcagaaaaaatatatgctttcaccccggtgtttgtgaagcttttaaaaggtcctgtggagtatcttgaaaaaagcaactgggaaaagctgttacaatataaaacagaattaaccgcctttttgcagcaattagggttagcactggtactggatgagcaggacggttatgcctatattaaacacaatactgcggaagaagataccaccagtgtaagttgggtgcagcgccggtctttaacctacgatgaaagtgtgctcctggtattgctgcgcgatatgatggcagaatttgaagtgggtgaagccacacaccgcgagctggtaaaaaagcgccgggaaataaaagaatatgccgaactgttctttcgtgaaaatgccagccgggtaaaaatgctgaaagatatcgaccggctgatcgaccgtgccgaagaaaacgggttcctggaacaggccgaaaatcatgacgtggccgatgaacaaaaattccgcatccggaaaatcatcaaggcaagagtggacagtgaaattttagaggattttaaaaaccaactaacagcacatgcagctaagcgtattcagcacggataa

SEQ ID NO: 42836 - DNA, 3381 bp, Niabella soli DSM 19437
atgcagctaagcgtattcagcacggataatgaaaaaagcggattccggttacaatacatggaagtatttaactggggaactttcgacgataaaattcataccattcaccctgacggggaaaccagtttattaaccggcgctaacggaagtggcaaaaccacttttgtggatgcgctgctgaccctcatcgttcccgaaaaaagataccgcttttacaaccaaagcagtggcagcgaaaaaaaaggcgaccgcacagaagagacctatgtcctgggcggatacggtaccatcaatagtgaaaccggtgtaacccggagcctgtacctgcgcgaaaagaaagaagaagcttatagcatcctcctcgtgaacttcacgaacgaagacctgcaggaagtaacccttttccaggtaaggtatttcaacaatggtgagttaaaacgccaatttggtgtggcgcgtaagagcctgcacatcgaatccgattttaaaccctttgatctgggcaatgcctggaaaaagcgcattgacaaacagtacaaccagggcagtcgtaaacaagtagactggtttgattcagccagcaaatatgcacagcgcctggtagaagtactgggcatgcaaagcttacaggccttaacactatttaaccaaaccgtgggcattaaagtgctcggcaatctggatgattttatccgcacccatatgctggagccccgggatatggaaacaaaattccaggaactgaaaaaacacctgggaaccctgctggatgcgcaacggaatattgaaaaggcagaagaacagatccggttgctgcaaccgatccaggaacattatgccgcatttgaaaatcttaaaaccgaacaggaacaactccgccaatccattcatacagcaaccatttggaaaagttttacacaggccgcactgctgcaaaacgcgctggagcaggataacgcagctattaaagaaacagaaaaacaggtggcattcgtaaaactggaaattgaccggttacatgaatccgaacgtgtaacccgcaatcagatcgatcaaaacaaagccggccaacgccttaaacaattagagcaggagctgcaaaacttgcacgcgcgtaaaaaaacgaccgaaagcaatttggtgctttttacaaactggtgcgccactttacattttgaagaaaaaacagcaccggatgaagaggcttacaaacgcattttaaaagaaataagtcgcgccggaatgcggctaagccgggaacagcggctcaacgaagatgatgaatttgatgcaaagacacagctacaaaaatcgaacgaagaaaaaacaaaaattgaaacagagctaaatatattattgcacagcaaaagcaatattcccgcgcacctcattcggttacgtcaggacctctgccaggcgctaaagctggacgcagacgatttgccctttgcaggcgaattagtgcaggttaaagccggagaacaaatgtggcagccggcattggaaaagctgctgcattcattttccctgcgcctgttggtgccggataaatactacaaaaaagttacccgctatattaaccaaacctctttgggtacgcggcttgtttactaccatgtaaaagagagcatggctgttttggccgaagaccaaactgttttttataaattagatttccacccggatcatccattgtcaaactggttgcagcagcagatcattcagcagtttgcacacgtttgcctggaagatgaaaaaacaattgaacgctatcaaaaagcaattaccctaaatgggttgatcaaaaacagggaccgccatgaaaaagatgaccggcccggcggcagcgatgcgagccgctacgtaatgggctggaataacgagcacaaaaaagaagcgctaattacacgtagacatgcgctgacaaccattataaaccaatctgctgaaatcattgagcgcgcccaaaaaaaagcagatcgtttacaaaaacaattcaacgcgttaagccgcctgcaggaacatgaaggctttgaaaccattgatgtggagcagcttcaacggcaaatacaccaaaccgaaagccaggttaaacaattgagtgaaagtaacgaccagctaaaagaacttacacggcagttggaacagttgctgcaggaaaaaactgcaatggatgttaaacgggaaaagctaaccattgaaaaaaccacgctgcaaaatcaggtagatgccatgttgcagcgccaggcggcgcttgagcctcttttagaacttattacacctaatgataaagaccagttacttcagtttcagcaacagcatcatgcaacattgagcgctgtaaccctgcataacattgaaggtgtttatttcaattttaaagaacaactggaggcagcagcgactgccgcccaaacacggcttttcaaagaagaaaataagctaaacaaagccatcacccagatcaggaaccccgcccccgctatattacaacggtttccgggctggaatggggatgtgcagcatttaccggaagacgcggcgtatgccggtgagtttttggaatggttaaaaaaattagaaatagaaaatcttcccaaataccggaaagattttgaaaacttcatcaatgataccattacctacaaaattggcggattaaatgaagaaatggaaaaatgggaacgggagatcaataacagcgttgataagctgaaccagtcgctgggccacatcaatttcaaccggctgcccgacacttatattcagttgggcaaacgaaaagtacaggacagcaatgtacatgcttttcgcaatgcgttgttagaagctttaccccaggcggccaactggcagcaaagcagctttgaagaaaaggccattcattttcgcgaaaaagtgcagcccctgatcgacaacctggacgaaagcgaaacctatcgcgcccgcgtaatggatgtgcgtaattggttcgagttctgggccgatgaaaaataccgcaataccaatgagctcaaaaagacctaccggcagatgggacagctttccgggggagaaaaggcgcaacttacctacactatcttgtgcagcgctattgcttaccagtttggcatcacccgggaggggaagaacagccgcagcctgcgtttcattgctgtggatgaaagcttcagcaaccaggacgaggataaagctacttacctgatggagctttgcaaacagttacatttgcagttgctggtagtaacacctagcgataaaatacaaattgtacaggattacatcgcccatgtgcacctggcacagcgggtaaacaaccggcatagtatcatgtacaatatgaccattaaagaattgcagcaacaaatgaaaaaagaatga

SEQ ID NO: 42837 - DNA, 1149 bp, Niabella soli DSM 19437
atgatacccgcatttgcaaaacagttgaacggccactaccgttcttatttaaagaacctcgttgcggtagctccattttccccgattgtattaagaggggaaaaaatgaaaccccaaacaactgttgagctgcaccaggcgatcagcgcctttcagcaatttgagaaaaagccaggcgtcccgggctgggaaatagaatgggaatcctggttcagcaggaaactgggcgcccagcaatggccatcccgcatattgatcaatagcgaagaagattatctgttccttctgaagaaagaaaccgaagttgctgcttttaaaacccaattacaacggctgctgcattggcaacccgccattcaacagctattgctctcgcatcccgaaatggtgttacagttttctctggtatgggaacaattgatggcaacaacagattatttgttaaaccatgaggtgcgcggactgtacctccgcagcattgcagttccggcccacacgaaatttatcggagaaaataagagcacgatcatccggctgctcaactgtatcgctcccgatcgttttccggccggtgatgctatcgaagcaacgctgcaattaaaaacaaagcctgctctgtacctgatgcgctggctcgaccctgatctggcaagccaatacacacccaatatggaatttttcgccattcccattgatgttctttcaaaaaacaattggaatgtagcggaaatatggctggtggagaatgaaaccaatctttacctgctgccccgtcgcaaagaggcgcttgccgttttcagccggggatacgcgatggaagggttaaaagaaattccgctttttcgccaaacgagattattttattggggcgatctggatgaggatggctttataatgctgaatcgtatgcgctggcactatcccaaactgaaaagtgtattcatgggcgagagcaccctgatcaatcatgccgctgaatttgaccggcagccggcaaattacaagaccgctgctaatagcctggaccttttaacacctacagaaaaagcggcctttaatattcttaagcaccacaatggccgcctggaacaggaaagaatccggcaggattatatttggaagaaattgagcagatctgaacttggatga

SEQ ID NO: 42838 - DNA, 1455 bp, Saccharomonospora glauca K62
ttgcgagcgttccagaaccccatgctcgctctcctccatcagacacacgcgcctttcgtggtgacggcgctggcgatggtcttcaccgccgagcggccgagcgtggcggtggccgacgcgcacgcggagatcgacgacgccctccagcagctgcgggccgcgggctacggcgacgacgacaaccaaccgctgccttccgggaacgcgcgggacctgtgccggcagtgggtgcaggccgggtggctggtgcggcacgtctccgacgacgacgtcgaggtgtatcggctgtcggcacacggcgtcggcgcgctcgaagtcgccggccgggtcggcggagtacgcaccagggtgtcggaatcacgggtcaggacgttgctgcaggcgatcgagcggctcgcgcaggacgccgaccccgacgtcatggccagaatctcccgcctacacgaagaaatccagcagcggcagaaggaactcgcccggctggaacgcggtggaaaggtcgagaccgtccccgacgagcagttgctcgaagccgccgagaacgtgctgcacctggcgcgggagttgcccgcggacttcgcccgagtagccgagtcgatcaaggccgtgcagcgggacgtcgtcgccgagttgcggcacgacgtgcgcccgaccggtgaggtccttcgcgaatacctggagcggggccagcgcatcctggacgccaccccggagggtcgggcgttcgccggtgcgttgcggctcatcggcgaccccgcacagatccacaacttgtggagccagctgcgcacggtgctgcggcacaagttcaccgatctgctgtccgaacagcagcgccgggaactcaccgacatctcgcgccgggtcgaacagggtgtcaaggaggtgctggccgcacaacgccaggcttcccacgtcatcaccacccaggtgcgcaatcacgacccgctgcgcgaccgtcaggtcgacgagttgctgaggaacgtgatgtccgaactgcacaagtgggttcccgcctctcgtcggggcgagcccgtcgagccgctgcgccgtcttccggtggccgacctggggcacctgcggcagcggacgagcgagttgcggccgccgcaaccgcccgcgccgttgcgggagtgggaggagatcgaggacgtgaccaccgccgacaccagggcctggggtggtccccgataccccgagctggaggaccacttggcggcgttcgcgggccgggagaagcgcgtggacgtcgtggcggcgttccgcgcggcggacgaggacctccggcggccggtcgatctgctcgggctgctggagatcgcccacgacgccgggatgaccgagaccgaggaggtcaccacggtcgacacgatccggcccgacgggtcccggcgccggttcgccctcggcggtgtggtggcggccaatccggctgataggagtggtgaccgatga

SEQ ID NO: 42839 - DNA, 669 bp, Saccharomonospora glauca K62
atgagtgaggtcgagcccgagaacggctggtcgaccggcaccgccgccgggttcatcgacccggtgtcgatggaggacgacccgaccgagttgttccccggtgacgcgggcacgctggaggcggacgtgcggcgggtgctggtccagctgctgcgccgcaagttcctgttggccgagaagaatcccgcgcagtggcggactctgctggagaatcagcagatcatagagtcgcggatgcacgatttgttcatccggctcgtggtcgaccacgagcgaggcgtcgcctacaagcagcaggtgcggtcgacggagctggacgtgccgatcctgctgcgggacgagtcctacaaccgggccgagacgttggtgctcgtgcagcttcggaccgtcttccagcgggaacgcggcacgggtgaggcgtccgcgcgtgtggacatcgaggaactggaacagaccgtgctgacctatttcgaccccgaggaccacaacctggcccgcagtcagcaggaggttcgcagcgcggtgcagcggctggtcaccgaggggctgctcgtcgaggagtcggcgggccggtatcggatcacaccgttggtggaggtcgtgctgagcacggagaagctcgccgaactgcagcagtggttgcgcgaacggaacgaggccacggcgtga

SEQ ID NO: 42840 - DNA, 3339 bp, Saccharomonospora glauca K62
gtgagcatgatcgatacgctgttcgggttgatcccggcggcatcacgaggacagcagtgggtggcccgcgacctgcagctggtgaactggggcggctatgacggctaccaccgggtgcggttcgcgcccggagcgaccctgctcagcggtggttccgggtcgggcaagtcgacgctgatggactcccacatcgcgttgctcatgccccacacgacaccgttcaacggggcctccaacggcggtgtggtcggcaggcccaggggcaaggaccagcgcaacatcctgtcgtatgcgcggggcaagctggacgagtccagggccgatggcgagacgaagatgcgggtgctgcgcggcgacggccgcgacacctggtcggccatcgcgatgacctgggtcgatcacaccggcgcggagttcaccgcgctgcgcgcctggtacgtgccggcggccgcccgcaccctcgacgacgtcgtggcggtgcgcgccacctgtgaccgccactactgcttacgggatctggagggcccggcggccaagaggttcgcgcgcgccgaggtcgaggccaccggggtgacctgcttcgacaccgaccgggacttcaccgcgcggctgcactccacgctcggtatcggtgccgcgggtgacggccacaaggcggtcgcgctgctcggccgtatccaggcgggccagcagatcaccaccgtcgatgccctctacaagacgatggtcctcgaagaaccctccactttggccacggcggacgcggtggtgcagcagttcgacgaactgtccggcaccagacagcggatgatcgtcgcgcgtcagcaggtgaaggcgttgacgccgatccgcgagcatcgccgcgccatcgacgacgccgagcagcggctgcggctgatcgaggcggtcgggtccttcagcgcggagtcctcccccgcggcgttgtggtgtcacgaacgacgactcgaccttctccgcgcggccgagcgggatctttcccggcgctatcagcgggcgaaggacgaactggcggagaccgaggccctggtcaaagccaccgaagcgcagtgcgagggcgcgaccgagacgcttcgcgcctccgggggcgacaacttgaagaccgcgttcggtgagctgcgcaccatcgagcaacggctggtcgacgtcgaacgagcgcgcaagcagttggaccgggccctcgacaccctcggcgccacggtgtcgaccggcgacgacttcgccgcgctggtggagacggcgcaccgcgccctggccgacacggaggcccgccgcaccgcccagacccatttcgccgaggccgtggcggagaagaagcaggccgaggcggagctggccgagctgcgggccgagcacaaggcggtcaagtcccggcggggcaacatccccaccgagttgcacgcggcccgcgcggcgctggccgaggccgccggactcaccccggacgagctgccgttcgtcggcgagctgatcgaggtgagcaccgagttcgagccgtggcgggaggcgttcaacctggcgctcggcgggttcgccacgctcatgctcatcgactccgggcgcctgagcgcgttccgggaggccgtcaacaaggtcaggacgacccggcgcgtgcacttccagggcgtgcgcacggggctgcgcgacgaggtcacgctcaacccgaagacgctccccggcaggctcgactatcgtccgtcgccgttcaccgcgtggctcaaaagcgaactcgcccgccggttcgactacgtctgtgtcgacacgccccggcagctcgggcagtacgccaaggcgctgacgatctccgggcagacgtcggaacgcggcggccggggcgcacacggcgggcacggccgcgccaacgtgctcggcttcaccaacggcaggctgctcgccgacctcgagcaccggatcgacctcgcgcaccggcgtctcgacgaggccgtcgcgtgggtggcgcgggcggaggacgagctcaactcgttcgaggcccgacgcgcggcctaccggaccgtgacggagttgtcgtggaagcaggtggacgtcgactcggtgcgcgcggagcaagaccggtggaaccgcgtcgtcgaggaggtccgcgcgggcaacccgaggatcgaccagctgcagaaacaggtcgaggagctgaagcagcgggttagggatctcaccgagcgcgtcggcgagcaaaagaagaccgtgaaggtgctcggtaagcagtgggagtcgaccgtcgacgaggtggaccgcgcccagtcggcgctcgacgcggccatgcagacgggcacggtggtccttccggaacaccgggagtatctggagtcgctgttcgcgggcgactcggacagcgccacggagctggcggagttcgacgcggcggtcaaacgcgccgccgaccggctcgacaccgaccgacgttcggcgaccgagacgatcgcccggtcgaggaaggcgttggaggacatcttctcgacgttcctcgaacgctggccgaacccgaacctcggcaccgacgcggacgcctcgtatcgcgacttcgaccgcatcctcaccgacctggagaccagcggcctgcacgagttggaggccgagtggcgggacagcctgctgaagctgtccggcaacgacctcaccggcctggacagcgagctggccgccgcggtccgcgagatccgcgaccggatcgatccggtcaaccgtatcctcgccgatctgccgttcgccgacgacaaccaccggctgcgcatcgatccgcaggagagccactccgcggtccgcgcccggttccgcaaggagttgcgcgacgtccgcgccctcatcgacagcgcgaccacggacgccgagcgagaacgcgcgtatcaccgcatggccagggtgatcgatcggattcgccgcacggcccccgagttctccgatctcgtcgacgtccgcaaccacgtgcggatcagcgccgagaaacgcgacctcgacggcaaccacgtcgccgtgtatgaccacatcggggagaagtccggtggtgagtcgcaggagttggtcgcgttcatcgtcggtgccgcgttgcggtatcagttgggtgacgcgggcgccacccgcccccgctacgcaccggtcttcctcgacgaggcgttgatcaaggcggacgcgcgcctcaccggccgtgccatcggggcctggcgggggctcggcttccaactgatcatcagcgccccgaacgacaagcacagcgcgatcgagccgcacgtggacgcggagtatctgatcctcaaaaactccgagggccggtcgtgggcgaagcccttggtgggggtcccggacgaatga

SEQ ID NO: 42841 - DNA, 1227 bp, Saccharomonospora glauca K62
atgagcacgctcgtcaccccggagggtgcgtgtgcggagctccgccgcagaatcgatcggaagtgggcggaagccgtgtgcacgggcgtgcatggcggcgagacagtcatcttctccgtgccgctatgtcccggcgtgacaacgggaaaagccgtggagaggctgggatacggcgtctggcacgagtggcgcatgcgctggcgtgacatcgccgaccgactcccccacggcgtgcgactagttccccgcacgctcagtattcgaggagtcgtcggtgacttccccgccaggctcgtcgctgacctcgacggcggcgtcgcgttcctcgccgagttcggtgccgagccgccccctgtggatgttgaacgggctcgcgagctcgcctcggcactgcgatccgtcgatgcggtgctcaccccggccacgctccgtgcggtccaccggcttcaggcacacgacgtggaggtgctgcttcgcgcggtggactggctgcgtcagcaccccgacctcagcgcgtggaccctgcggcagctcccgattccgggaatgcacaccaagtggctcggctcccacggcgcgctgttacgcgatgtctccggaagagacgtccgtgcggaggcgcggccccgaccggcggtcgtgcacctgacctacatcgatcccggttacctggcgtccggccgtcgcagacacgacgcctggaccaccggggacgtgcacgagatcgcctatcggcctcgtgtcgtgctcgtcgtggagaaccgcgactgtcgcctctggttcccgcaagtccgcgacacgatcgtggtcgagggtggtggcaaggccgcggcctccctcctcgcggaggtgccctggctccggaccgccgaacacgtcgtctactggggcgatatcgacacggacgggtacgcgatcctcgaccgtttccgggcagtgctggccgagcccgcatcggacggagcacctcccaagccggtccactcgatcctcatggacgacaccgacctccaccgctatgccgatcacggcgtcaaccacgacgaacacggtcgccgtctctcaccgtcggcggaggtcctaccgcacctgaccgaggccgaacgcctcgcctacgacaccatcgcgaccgcgggccccacgccgttccgacgaatcgaacaggaagtcatccccctcgatcacgccgtgacccgcctgctgcacgttacgaacggccggagctga

SEQ ID NO: 42842 - DNA, 1425 bp, Geobacter metallireducens RCH3; identical to SEQ ID NO: 41710

SEQ ID NO: 42843 - DNA, 621 bp, Geobacter metallireducens RCH3; identical to SEQ ID NO: 41711

SEQ ID NO: 42844 - DNA, 3423 bp, Geobacter metallireducens RCH3; identical to SEQ ID NO: 41712

SEQ ID NO: 42845 - DNA, 1206 bp, Geobacter metallireducens RCH3; identical to SEQ ID NO: 41713

SEQ ID NO: 42846 - DNA, 1470 bp, Opitutaceae bacterium TAV1
atgaacttcacagaagccagacaacgcttggaaaaatccaccgcgctccgtctgctgaaggcggacagcgcggcgctttgtctcggatttctcgacgcggttttccgcatcgaccgtgccgtgtggcgttcgcaaaccgagatggtgtcgcgactgaccaccgttctcgaagaggtgaacgagagcgagtcgggcgagcggcgttatccgcgtcccgcacgtgaatacttggacaagtggattgccgacggtgcgttggtcagccgttacaacgaggacaacgagctcatctacgaactgacgcccgaggcggaccaggcgctgctgatcttcgagggtttggagacgcaaacgcgccggaccgtgggcgccgagtccaagctgcgcatcatcacgacgacgctgcaccgcatcgcggagcgggcgaatcccgaccggcaggagcggattgcggctctgcaaagcgagatcaacaaactcacggaagaggtgcagcggctgcgtgcgggcggtgaattggtcgccgcgccccccgagcaactcgtcgaggaatatcacgtggcggttggcgtcgcccgtcagctgctggcggatttttcactgatccggcagcgattcctcggcctcgccaaggaactcgcggaacggcacgcgctggccgaggctcatcgcggagcgatcctggcccgggcgctcgacgtgcatcgtgaactcaacgagggatcgctcgggcagagttttaacggctttcttgagtttctttattcgccggagtcgcaacaggtcttgtttgccttgatcgaccagatcacacgtctcgaaggcatcggagaagaggagaagcgccgcggttttctgcgccgcctgccggataatctcctggccgaggcaaagtcggtggtggatcagacgcgacggctttctgcggagttgcgacacatgctcgacgcggagtccatcgccagccgacgcgaaacgcgcgatgcgctcgctgcgttgcgcggtctggcctatcgtctcgccgatcagcctccggaggagaatcctgtcacgctgacccgcacctacgccgagatcagcgacacggaaaacatccttcggcatctctggcgtgcgccagacgtggtacgtcccgtgccggtggcgtccgcccaccgcgtcagcgacgaggagaaagcccaggccttggcgatgatggccgcgttgccggcgatcgaaatcaagcgcctccggcatcagcttgcggaacgcttcgaggcaggagacaacgcgtttcgcctgactgaaatgctggaatggtatcccccggtcgcggggaactggctgctggatgtcgtcggctacctggaaatcgcccgcgccaagggcagccaccatctggtgcacggcgacagtcatcatccgtgggtgtatgtcccgtccggcgaaacggaggcggcccggctgccgcaaatctatttctaccgatga

SEQ ID NO: 42847 - DNA, 735 bp, Opitutaceae bacterium TAV1
atgaacctcccgactccaccgcccgagaccgatgttccggaatttgacctcgccgcattctgcgccgatccgctggttcgaggcgcggcgcaggccaaaatcatgatcctgcgaggaccgatctacgcggaggatgcggcgtgggcgagtttgctccgctatcgcggcgaggtcgtgcggttcctcgcggaggtcggagcgcgactggtgctgaacgaacacgacggctacgcattcgccgatcaggctccggagggagaatcgggagcggagtggccgaagctcttttatcgggaccgtttcaacttcgacgtcacctgcgtgcttcttgtgttgcgcgagtggctgctcaagcgggagtcgatcccttcggacgaacacacgcctttggtcgaggacgacctggtcgcggagctgcggcgcttttcaaaaaagaccaacgccaatgcggagaaggaggacgcccgctggcgcatcgccatcaatcgcgccaaggattatggcctgctgaaaaaaattcccggcgacgaacgctcctacgtggtacgcccgattgtgcgggccaaactttcgctggaaatccttcaggagcttaaaaccacactcgaacgtcacgtgacaggagagcaggcgggtggggagagcctggcatcatcaaacgatgaaacgaccacgcccggcgagacgcgcgagcccggcacggcctccaacaatcaagaaaccacacaaccatga

SEQ ID NO: 42848 - DNA, 3390 bp, Opitutaceae bacterium TAV1
atgagcgaagccatcgcatcacctgccgacaccccgccccccgcttccgatgttaacgccgatacggaagccccggcaggcttccgcctccaagcggtagagatctgcaattggggcacgtttcacggcgaccagcattacgagatcgaactggatgggcgcagcgcgtgcctcaccggcttgaatggctcgggcaagagcaccgtgatcgacgcgattctcacgctgctcgtcccctatgagtttcgtcactacaatgtggcggccaccggctccggcgcgaagcgtgaacgttcgttgcgcacctacatcctgggcgcttacggcaaggaggagagtcccgagtcgtcgcgagggcagacgcggttcctccgcaagccgggcacggtgagcatcctcctcgcggtcttccgggacgcgtcgtttcagcgctcggtgacgctggcccagctgcactgggtcaccgcctcgggggaacaccaggggcgatatctcgtcaaggagggcgaagcccggattcccgatctgggcatcgccgggttgagcgtgaacgcctatgcggagcatttgaagaagttgggttggagttacgacacgacgttcgatccgtatctcggcaaattttccggcctgctgcgcatcccgacgcagcaggccctgaagctgttttgtcgcacggtttcggtgaaggacgtgccgagcgtcacggagtttatccggagcctcatgctcgaaccgtttccggtcgcaaagatgctggaggacgtggaaacgcacttcgcggatctcgatcacatccacacccagcttgaggacacgaagaaggagatacgcctgctcacgccggtaaaaacccaccatgccacctacgcggcggcggcgggcgaagcggggcggttggctgatctgtcgcgggcggcgcgcgtggtcatggcgcgagatgcgagtgtggtgctggatcaggcgatcgccgagcaggagcaaacgaggacgggacacctcgccaccgccgagcggctgctcggtgatttgaagaaaatcgacgacaccattctcagcaccaagttggccctggcgcagaacaaaaccttcgtggcgctggccgacctgcggaagcaggaggccgatttgtcatccgaactcggacgagcccggaccacgcgcaccgcctacgagacgtggctccgggcgctggggcgagaggccacagtgggctctcccgaggaattcgcccgggtgcgttcctgggcgcgtggagagtccagcgagcaggactcgcgacagcaacgcctgctgaaggatagcggcatcaaggaagccgaggccttgggcgtgcgacagcgcgcgaccacgttgtccgaggaaatccagagtctcgacgggcggcgggacaagattccgaaagagcaccgagacatgcgtcgacagatctgcgagcagttgcaaatcggcgaggcggcgctgcccttcgccggtgagttgctcgacgtgtccgggcacgaagtcgagtggcgcccctccttggaggtgttgttgcacgggttcgcgttgtccgtgctcgtgcccgaggatcattaccggcgtttcagcgcctatgtggataaatcggagtttagacgccgtctggtgtatttccaggtgccgaaggggactggagcaaacgtgaccctcgattcgaccaaggcctacgggaagatcgtgatcaaaccggatgcgtggtgccggggctggctgcaggcgcgcctgttcgatgattttccccaccactgcgcggagacgatggaggagttttggcaggtgcgcgggccggcgctcacgcgcaatcgccacatccgcggaggcgcgcgccacaccaaggaaaccactcatggggcacgcgattttgaccttctcggatggtccaacgaagccaagatcgccgagttgcgctcgcgattgacccatctgcagggggaggcacgcgacctcgatgcgcaggcccagaaactggaggcacaggcgaaaagtttgaagggcggggtggagctgctccgcaagctgaccgaggtcccggaataccgggccatcgacgtgctcggcattgaggccgagttgatggctgccacgcaacggcgcgaggaactggagaaggccgacggagccttgcaggcgttgaacgcagccttggcggaggcggagctggagcgtgcgaatgtcagccaacagcgcgatcaggaaaacatagccgctggaaagctggaggaagcaattaaagagctgcgtcgccggcgcggcgaatttgtgcgggtggtcaacgccgccgccacggatgatttcccctggcaggaacacgaggctgaagtggctgcgtatcgcgagcagggccagttgacgctgcgcggcctggagcaacaaaccaaggcggttgtggagaagatcgaagaggcgtttgggaaagcccgacgcgaggccgaggcagccgagaagctgcttttgccggcgatggcgagtttcctggatgccacgaaagacaagggctattcggccgattggagcccggtggccggatgcgcgcctgcgctggtcgcccacatgaatcgcctcgtcgaagaaaaatttcacgatcaagagcaggagtttaacacgatgatgcgcaccgtactgctgaaggagttgcaggttggcgaccaagggttgaaggcgaaaatccgggccaatcaggcgcgcatcgaggaactcaaccagaccttgcgcgatctgccttacaacgaggacacgatcgtgcagatcgtgtcgcgtccgtcgaaagagcacacggtgctaacctaccgtgcgaagctggaggactgcacgcggcacgtcatcgcaatgacggacgctcaattgctggagcgcttcaacgcggtgaaggcgttggtgacctacatccgcgaacatcgcagcgaggccgaaaagggagcgaatccgaatcattgggacacttttgccatcgcggaaattcgtccggaagcgcccgaggaggatccggtgaactggttcacggattccgacggcaactcgggcggtcagaaagcgaagctcgcctgcacgatccttgcggcggcgatggcgtttcaactcaaccacacgcgcaacaagcactcgaacgccttccgtctggtgatggtggatgagattttcgccaagagcgacgacgtgaactcggcttatgcgctttcgattttcgagaaattcgatttccaactgctgctcgttacgcctcgtgacggacgccttaaactcgtgcagccttacgtcggttcgttccacctcgtgcagaacccgaccacgatggcttcgacgatcacgagtgtgacgcgggtcgagctggagaaagccgccgcaacgaccgaagacgatggtaacccctga

SEQ ID NO: 42849 - DNA, 1107 bp, Opitutaceae bacterium TAV1
atgcgtggtgaatccatctttccgttggagcatacgcgtttcggccgcgcagaccgctcggcggccacagcggatatagatacacaggtgcgggccttgttagaggatgcggtggaggtggtttccccaagcctgacggagcttgcacgaccgcggcgcggccatggttacagcgtggatctcgccgttcatcgcctgcgtgggcatggcggagaacaggcccttccgaatcgtgtgtggttcgagacggcagaggattttctgatgttcatcggtgagactgagcggtggcactccttgctcgcggatgttgcggcgatctcgacagcagggcctgcgtttgccgaatgggcaggcaagcatgcgcgagaactgcgcacccgactgaaggcgggtgaaggggcggcattgggggcggcgctgggcgcattgcatgcgaagccacaccccggatgtttcgctcgtgaactcccattacccggagtttcaggaaaatttatcgaagagaacctggctttgctggcggacatacttcgcgagattggttcttccgcctggcgtgagggaggctccctccacgagcaactcggtctcaggcaaacatcccgtctgttacgcctgatggatttgaatggcagtcaattggactacggcctcccgctcaatcgattcattgacctgcctcccggtgttgaacggatgttgatcgtggagaacctgcgcacctttctgacgctcccgcgattgcctggcacacttgctctattcggtgaagggcatgcggtgcaaacgctctcttcgcatcgctggtttgctcatgtgcccatcacttattggggcgatctcgatcccaccggcttcgatattctagggcgtttgcgacgcgttcatccccacgtgcgatcggcgatgatggacatggcgacattgaccgcgcacagctccttgttgaccaaagcggctccggtagagaacccggttttcgaaacacttgcgccagaagagagcgttgccgccgcccgagttcagactgccaaacagggtattgaacaggaaaaattcccgactgatttcatacgtagcgttctatgcccggcactttcatga

SEQ ID NO: 42850 - DNA, 1443 bp, Leptospira noguchii str. 1993005606
ttgcaaagattatttcgttcctcttcaattcgtcttttaaaaaaagacaatgctccttttattatctattttttagaaaaatattttagaggttctgcgagaatttttgttccgtttgaggaactgaaaatactactccatcatgaattggaaaactttcgagaactcgaggaaacttttctctcaagaacagcggaagtttatataggagagtgggtcagcgaaaattttctatctcgtcggattcgttctttggaaggttccgaagaaataattttggaaccgagtagcgagttagaaaaagtattttcttggatggatgatttacgttctttagaaaataaagaatcaatcggaacagaaactcgatttttttctgtgttaaataaactgaaggaaattgttgaagaaagtgtttccgatccaaaagaaaaaattagacaacttgaatctaaaagagacgaattagacgatcaaattaaaaagctaaccgaagggaaagagataatcacttttgcgagtgagagaattcgaggccaatacttatatgcaagaaaggaagcaataggtcttctctccgacttccgtcaggtggaaggtaattttacggaaataacaaaattcattcacaaaaagtatttagaagtcgttcaaaaaggggaaatattacaatttgctctcgacggtgacgaggaattgctccaatcagaacaaggtaaaagttttcaagctttctgggactttctcaggtccgaacaaagccaagaaaattttgaaagtatattagattctctttattcattaaaagacatccttgtcttggaggacagaaagttttttcgaaatttcaaacggaatctaagagaagccggatccaggataaacactgttgtttccagaatgtcggaacaactcaagaaaagtcttgtagagcgtacacttcgcgacaatcgaaggtctaaagcaattatttcggaaatcaaacatcttgttttggaaagaaagttcgatctttcggaagaaaacttttattcaatggaagaaatattcgttcatcttccgatggacaggcccctttggaaaggggattctgcggatactccaagacccattcaaatatccgggcctgacgacgaaatgatttctctagattttttagactcgattcgaggaatcaattttgaaatatacgaacaacgaattcaaacattgcttcgtagttttccagaagtttctctagaaaaagttttggaggagtttccagagaataacgggtttgaaagtatcgtagcatatgtttttatagctagcaagggggaatatcattctttggacgattcagaatcttttcttttttatcccgcgttcaatttcacacaaaaagaaactcagagtgtctatcgtgttcccaaagctacttatagagtgggtaaggatggataa

SEQ ID NO: 42851 - DNA, 564 bp, Leptospira noguchii str. 1993005606
atggataaacttctttcttattctatttccatattaaggcttttgaaaggttcaatcgggatcgattcggaccctaaggtttgggaaaatctagttacctacgaaaaacaagttcgggaatactttgaaaaaatcggaatatttttacatttagatcgagaagacggttatgcttttttgcgtcaaacttcggacgaagatgatgttgagttcgatataaaacttccggttttgacgaggaagttacctttgacaaaggaggaaaccttgtttcttattttactcagagaatttattatcgagatggaagaaaaagatttatccggatcgattattctgagaaaagaagaattattcgaccgtattcatccattttttcctgactctttcgacgaagtcgatactcaaaaaaagtttgaaagattacttcgtaaatccgaggacctgggttttataaaatacatcgattctgaaaccttacgaatagaaaaaattttaaaagcgaagatcacagtatccgatttggaacgactacgaattaagtttaaaccggagaatgtatga

SEQ ID NO: 42852 - DNA, 3357 bp, Leptospira noguchii str. 1993005606
atgacggatttattttcttccagcgagattactgcaaatacaggatatagattaaagtatcttgaaattctaaattggggaaccttcaacggtaaaatctggaaattgaattcgcaaggagaaacttttcttttaacgggagcaaacggatccggaaaatcgactttggtggatgcaatccttaccttactggttccctctactaaaagaaattataatttagcctcgggcttggagagtaaaaaacgggatagatcagaaaaatcctatgtggaaggacactatggccgagcttcctcaggcagcgagggaatccttaaaatccgaggaaaacaggaagaatgttattccgttctttcagccgttttcaacgctaaaggaaaatttcctattatcagaattgctcaaattttttggtttgaatccagcgacttaaaaaaaatttatctcatttccgacgaaagcttggatttcgaaaaagatttggttttaagaaatagaaccatcaaagaactccgatctgatctaaaaaattcgggcgccaggctttatgataatttcaaggcttacggggttgactttagaaagatggttggtctgggatctgagaaggcgattgatctctttaatcaaattgtagctataaaatcattaggtgttttgaatgaatttgttcgagaacatatgctcgaagcgaaagacaaaagatttagaatcgaagaattggacaggaatttttttgatttgaatgaaacatatgaaacgattctaagtgccagagaacaattacgactcctggagcctatagaaaaaaaagcattcgaatacagggattggaactctaaagtagaaggggttcaggaacttattttgtttgcacccgaatactttacgcaaaaaaaatacgaactttgtaaaaagaaagaacaggattatactctcgatttgttccgagttcaggaccacttaaaagaattaaattcgttaactgaatccttaaaaaaagaagaacgagaattgtattattcattagaaaataatgatactcgaaagcgaatttccgatttgaaaagaaaatttgaggaaattcagacaaatctaaataaacgtcgctccgaaaggaaaaaatattctgagtatcttcttaaacttgatttagagaacgttttaatagaggattctttttattcgaattttcgtaaagccggcgaaaaacttcaaaaatccgattcgacccgtgattcaattagagatcgtcttacggacttaacagttaaacggaaggaatctaaagttgaatttgattcggtttattccgaattggaacatctcaaaaaaagtaaggataatcttcctagaattgtgtcctccatgagggaaaaaatctctcaaggcctgggagtttccgaaaaaaaatttccatttgtctgtgaacttatccgtgtaaaggattccgagaaagaatggaccggcgcgttggaaagattattacataatttcggcttacgtatgttagttgacgaagaggattacaaagtgctttcctcttatgtgaattcttctcatctaggtggaaagatcgttttttccagaatgttgactcagggaggtcctattttacagccaaaggataaggacgaagttttttacaaactcgaaattaaaccttccttatctaaatttcaaaaagaatggctggaaacacagattctgaaggaatttggacatatctgcggggatctacaacgtttgcaaaaagaagaaaaagctcttactaaggaaggtctgatcaagtccggaaaaattcgtcacgaaaaggatgatcgtaaaaatataaacgacgcaagagattatattctaggctggaacaatcgggaaaaaatttctgcgcttgaatccgaatttatgagattgggcaaggtgatcgataagattgaatcggaaattaaaaaagttgaagaagagcaaaaacaaaacgacctatttagagacgacctcaaatcctttctacgcttcgaacagttctctcaaattgacgaccaaagtttggaagaacctcttgaacaaacacgaaaagaaatccaagatttggaagttctttccgaggaatacggaaaattaaaagaacaatatgaatctgcaaaagttcgccttagcgaggcagagggcaaggaaaaagaaaccaccaaggaattgaccctcttagaagagcggttctcgaatttaaaaaaagaaatggaaaccttaaattccagaatcaaagagttcgaccctaacagacggactcgtttggaaccgatcttaaatgagcgtctcggacaagtaatctttaacttagattcgatcttagaacaagagcgaaagtttttggaagttcttattaaagaacggaatgattttattgagaaaagagattctatcggtgaagaattaaacaagggtatggatcgttatgtaaaaaaattcagggaagaagcggatcgagaagaattatcggtttctattttaaatgcagaagcatttgcagaattgacggaacggattcgtaaagataggctgcctgagttccaagataaattccgaaatatgatgtcagataaggtagctaaacaaattctagagtttaaggcggaacttgaggatgatgtttcagaaatcaaggaccggatagatgaactaaatgaatctttacgttatcttgactattctaaaggtaaatcttatattcaaatcagatacttcgaaacaaaagatcgggaaattataggaagtacaggttttaaagaattattgcggaatagtattccggatatgggagatagttctaataacgaagaaaaattttcaaggattcgagaattactcgggaaattgaaaggagagaatggatccgatcgttggtccaggctcgtaacagattctagaaattggttggacttccaggcggcagaatttcaaagagacacagacacgatcattcaggtttatgattcttcggcaggtaagtcgggtggtcaaaccgtaaaacttgcctatacaatccttgcctctgcgattgcttatcagtttaaaatccgcgagctaaattcgtttcgttttgtagtgatcgacgaaatgtttaataatttggataacgaaaattctagatacgctatggatcttttccgtcaattaggtttgcaattactcgttgtgaccccaatggataaaattacggtagtggaaccttacgtccagagtgttcattttgtaaaaaacaactcagatggtaatgattccagagtttatctaattacaaaggaaaaattagattcggagaaaatcgaaaatacagatcggaaagtgggaaatttatga

SEQ ID NO: 42853 - DNA, 1170 bp, Leptospira noguchii str. 1993005606
atgatttctctggaagaaatccgtaagaaatgtttattatattatcataaagttttaaatcgatcagtcttaggtgagaagtcttttccttgggaaatttccacaggcaaaatagatcccgaagagataatacacaacccgtctttactagaaaaaataaaaaaggaatctaaggaaaaaaaaggatttgggtttctgctcgtttcttttcaaaaagaaacgagaaaatttggaacgcaaactctaccttcgaaaattcgattcgaagacgaaattgactttttacgttttttgcacaaagaacaagaattttctttctacaaatcagattgtgatatgattttatttaaaattcccacacttatggaatggatattaaaaaatccttttctagtcattcaagaatctgggaattgggaagacctactttcggtgtgttcctactttttaaaaaatccgagacctggattatacatccgtgaattgccgatctctgttcctacaaaatttatcgaagaaaataaaaaagtactcaggaatcttttagattttttggttccggaaaatattgattacgaaggaaaagatttcgaatctcgattcggattgaaaaaaccggaagccttggttcgtttccgtatattggatccgatcattgccgagaaatctagcggcggtttattcgatataagtgttcccgttgatgaattccgtaatttgcatctatttggttgtaaacgaatttttattctggagaataaaatcaatttttctaatatcgatcattttctaacttttccgaaactttcgggatcgatcgccattttcggacagggatacggtttaggtattttgaaagattgcgtttggctgaataaaatggaaatcttatattggggggatatagatgtccaggggtttgagattctttctttattaagggagcaatactcccaaaccaaatcctttttgatggataaagaaacttttttaaagtttcagaattttgccgtcgacggtaaatattcaaaattttctaaattagattatttgacagaatctgaaaaggagacttgggaatatctacggtctctaggttcgaaaaatcgtttggaacaagagcgtattcctcaagaatatattgaaaaaactttacattcgcagttttga

SEQ ID NO: 42854 - DNA, 1458 bp, Leptospira noguchii str. 2007001578
gtggactataaccttttgcaaagattatttcgttcctcttcaattcgtcttttaaaaaaagacaatgctccttttattatctattttttagaaaaatattttagaggttctgcgagaatttttgttccgtttgaggaactgaaaatactactccatcatgaattggaaaactttcgagaactcgaggaaacttttctctcaagaacagcggaagtttatataggagagtgggtcagcgaaaattttctatctcgtcggattcgttctttggaaggttccgaagaaataattttggaaccgagtagcgagttagaaaaagtattttcttggatggatgatttacgttctttagaaaataaagaatcaatcggaacagaaactcgatttttttctgtgttaaataaactgaaggaaattgttgaagaaagtgtttccgatccaaaagaaaaaattagacaacttgaatctaaaagagacgaattagacgatcaaattaaaaagctaaccgaagggaaagagataatcacttttgcgagtgagagaattcgaggccaatacttatatgcaagaaaggaagcaataggtcttctctccgacttccgtcaggtggaaggtaattttacggaaataacaaaattcattcacaaaaagtatttagaagtcgttcaaaaaggggaaatattacaatttgctctcgacggtgacgaggaattgctccaatcagaacaaggtaaaagttttcaagctttctgggactttctcaggtccgaacaaagccaagaaaattttgaaagtatattagattctctttattcattaaaagacatccttgtcttggaggacagaaagttttttcgaaatttcaaacggaatctaagagaagccggatccaggataaacactgttgtttccagaatgtcggaacaactcaagaaaagtcttgtagagcgtacacttcgcgacaatcgaaggtctaaagcaattatttcggaaatcaaacatcttgttttggaaagaaagttcgatctttcggaagaaaacttttattcaatggaagaaatattcgttcatcttccgatggacaggcccctttggaaaggggattctgcggatactccaagacccattcaaatatccgggcctgacgacgaaatgatttctctagattttttagactcgattcgaggaatcaattttgaaatatacgaacaacgaattcaaacattgcttcgtagttttccagaagtttctctagaaaaagttttggaggagtttccagagaataacgggtttgaaagtatcgtagcatatgtttttatagctagcaagggggaatatcattctttggacgattcagaatcttttcttttttatcccgcgttcaatttcacacaaaaagaaactcagagtgtctatcgtgttcccaaagctacttatagagtgggtaaggatggataa

SEQ ID NO: 42855 - DNA, 564 bp, Leptospira noguchii str. 2007001578; identical to SEQ ID NO: 42851

SEQ ID NO: 42856 - DNA, 3357 bp, Leptospira noguchii str. 2007001578; identical to SEQ ID NO: 42852

SEQ ID NO: 42857 - DNA, 1170 bp, Leptospira noguchii str. 2007001578; identical to SEQ ID NO: 42853

SEQ ID NO: 42858 - DNA, 1449 bp, Leptospira inadai serovar Lyme str. 10
atggattataacctttttcaaagattatttcggtcctcctcgattcgtattttaagaaaggacaacgccccctttatcatatattttttggaaaaatatttcaggggttccggcagaaccttcgtccctttcgaggaactgaaaatattactgcgccatgaattggagaaccttcgagaactccaagatacttccttcttgagaagtgcggaagtctatataaacgaatgggtcaatgaaaattttctctctcgcaggattcgatcctccgaagaattcgaggaaattatagtagagcccagcagtgaattagaaaaagtattttcttggatggaggaccttcgttccttagaagatcgggaggcagtcggaacggaatcccgcttcttttccgttatgagtaagttgaaggagatcgttgaggaaagcgtttccgatccgaaggaaaaaatcaggcaacttgaatccaaaagaaaggatttggacgaacaaattcaaaaattaaaagaaggcgaagacgtatccacttttccgagcgaaaggattcgcggtcaatatctgtatgcgcgaaaggaagccctaactctgctttccgactttcgtcaagtggaaggcaattttaccgagataacgaaactgattcacaaaaagtatttagaggtcgtccaaaaaggggaaattttgcaatttgctttggatggtgacgaggagttacttcaatccgaacagggcagaagttttcaggctttctgggattttcttagatcggaacaaagtcaggaaaattttgagaacatattaaattctttatattcattaaaagatatccttgccctagacgacggaaaattttttcgaagttttagacgtaatgtaagagaggctggatcaagagtaaacggggttgtttcgagaatgtcagaacaactcaaaaaaagtctcgtggaacgtacgcttcgagataatcgaaagtctaaggagattatttcagaaatcaaacatcttgtcttggaggcgaaaatcgatctttcggaagaaaatttttattctgtggaggaaatgtcggttcatcttcctatggacagacctctttggaaaggagatccggtcgatacgttacgatatattcaggtatcccgagcagaagaggagcaaatttcttcggattttctagattcgatacgaggaatcaattttgaaatttacgaaaaacgaattcaaacacttcttcgcagctttccggaggtttctttggaaaaagttttggcagagttttcggaggatatcggatttgaaagtatcgtggcgtatatttccatagcaagtagaggggaacatcactcgctacatgattctgaaacgttcctgtgttttccttcttttgcggaagataaccagcgggcatatcgagttcccaagggtgtttatagagtaggcaagcatggataa

SEQ ID NO: 42859 - DNA, 564 bp, Leptospira inadai serovar Lyme str. 10
atggataaacttcttccgtattcgatagccgttttaaaacttttgaaaggttccatcgggatcgattcggatccgaaggtttgggaaaatctcgttacttacgaaaaacaagtgcgggaatacttcgaaaaaatcggaatatttctgcacttggatcgagaagacggttatgcctttttgcgtcaaacttccgatgaagatgaaatcgagcaggaggtaaagctccccgtcttaacgagaaaagtggctttgacaaaggaagaaaccttgtttcttgtcttactcagagagtctattatcgaaatggaagagaaagatccgtccgggtctattattatcagaaaagaagaattatcggaccgtattcgtccgttctttccggattcttccgatgaagtggatactcaaaaaaagttcgaaagactgcttcgcaaatcggaggatctaggttttatgaaacaactcgactccgaaacgttacgcgtagaaaaaatcttaaaagcaaagatcacggtatccgaactggacagattacgtattaagttcaaacaaggatcggaataa

SEQ ID NO: 42860 - DNA, 3357 bp, Leptospira inadai serovar Lyme str. 10
atggcggatttattttctcccggcgaaattgcattcaataccgggtatagactcaagtcattggagattttaaattggggaacgttccatggcaaaatctggaaattaaatgcggaaggagagacttttcttttaaccggattgaacggatccggtaagtcgaccttggtagatgcgatccttactttacttgttccgtctacaaaaagaaattataatttagcatccgggttggagagtaaaaagagggatagatctgaaaaatcatatgtggaaggacattacgaccggtcttcatccggtagcgagggcattcttaaaattcgaggaaaacaggaagaatgttattccgttctttccgccgtcttcgatgcgaaaggaaaatttccctccgttaggatcgctcaaatcttctggtttgaatccggggaattaaggagaatttatcttatttccgaagcgagtttggattttgaaaaggatttggtattaagaaacagaaccatcaaggaacttcgatccgatctaaaaaatctgggagccaggctatacgataattttaaggcttacggagtggattttagaaaagcggtgggcctggaatcggaaaaagcgatcgatcttttcaatcagatcgtggcgattaaatcactcggtgttttgaacgaatttgttcgagagcatatgctcgaagcgagggataaaagatccaggatcgatgaactggatagaaatttttccgatctaaatgaaacatatgaagccattctgagtgcaagagagcagttgcggcttttggagcctatagaaaaaaaagcattcgaatacggggactggaagaataaggccgaagagattcaggatttaatctcatttacgcctcagtattttactcagaaaaaatacgaacttcataaaattaaagagcaggattatatccacgatctatctcgcgttcaggaccggctaaaggaattaaattctttaacggaatccttgaaagaagaagagcgagcgttgtactattcgttggaaaataacgacactcagaaacgaatttccgatttgaaaagaaagtttgaggacattcagtcaaatctgaatagacgccgtatcgaacggaaaaaatattccgagtatcttcttaagctcgatttggaggatgtattaatcgaggaaactttctattcgaatgtccgcaaagccggtgataaattttcgaattccgcttcggcccgagaggaaattaggagccgtctagcggatttaaaggttcagtggaaggaatccgaatccgaattcaattcggtccagtcagaattggaatatcttaaaaagaatccggagaatcttcccaggtacgtgtcttccatgagggaaaggatttccgacgccataggaattcccccaaaaaagtttccatttatttgcgagcttatccgagtaaaagaatcggagaaggaatggaccggcgctttggaaagattacttcataatttcggcttacgcatgttagttgcggaagaggactttgagaaattttcctcgtatgtgaattcttctgatttgaatggaaaacttgttttttccaaaatggtaacttcaacgggtcctatattgcatccgaaggataaggatgaggttttttataaactcgaaatcaagccttccttaacgaaatttcagaaagaatggttggaagcgcagattctgagagaattcggacatatctgcggagatctacaacgtctgaaaaaagaagaaaaagctcttaccaaacaaggcctggtcaagtcgggcaaaatccgccacgagaaggatgaccgtaaaaatataaacgacgctagaaactatattctaggttggaataatcaggaaaaaattgcggctctcgagtccgacttcgcgcggttaggtcaggagatatacaagatcgaggcgaatatcgagaaagtgaaagaagacgaaacgcggaacgatgttttacgcgatgatctgaaatcttttctaaggtttgagcaattctcccaaatcgacgatcaaagtttggaagaaccgcttgaaagaacccgaaaggagatccaagaattagaagttctttcggaggaatacggcaagttaaaagaacaatatgaatccgcaaaggctcgcttttccgaggcagaaggcagggaaaaagaaaccaccaaggaatttactcttttagaagaacgactctctaatttaagaaaggaaatggaagacttaacgttcagaatgaaagaattcgatcccgaacgatcggttcgtttggagccggttttaaaggaacgtctcggtgatattatttttaacctggaatcgatttccgagaaagaacgaaagttttccgaggactttgttaaggaaagagcctatttccgggagaaaatggattttatcgcagaagaattaaacaagggtatggatcgttatgtaaaacgatttagggaagacgccgaccgtgaagaattatcggtgtccatctcgaatgtcgctgggttcgcgaaattaacggaaaggattcgtaaagataggctccccgagttccaggaaaaattccggagtatgatgtcggataaggtcgctaagcaaattttggaatttaaagcggaactcgaggatgatgttacggaaatcaagattcggatagatgatctgaacaaatctttacgttatctagattattctaaaggtaaatcctatattcaaatcaggtacttcgagacaaaagatcgggaaattattggtagtactggtttcaaagaattattacgggatagtattcccgatatgggagacaattccaataacgaggaaaaattttccaggatccgagagttgctcgggaaattaaagggagaaaatggctccgatcgttggtcccggttcgtaacggatcccagaaattggttggatttccaggcggcagaattccaaagggatacggacgagatcatccggatttatgattcttcggcgggtaaatcgggtggccaaaccgttaaacttgcgtatacggtccttgcttccgcgatcgcttaccagtttaaaattcgagaaccgaattcgtttcgttttgtggttatcgacgaaatgtttaataatttggacaatgaaaattctaggtatgcaatggatcttttccgtcaattgggtttgcaattattagtcgtgactccgatggataagattgcggtggtagagccgtacgtgcagagcgtgtattttgtgaaaaacaattctgacggcaacgaatccaaggtctatccgattacaaaggaaaaattacattcggaagaagaaggcatggacgatcgaaaagccggaaatttctga

SEQ ID NO: 42861 - DNA, 1167 bp, Leptospira inadai serovar Lyme str. 10
atgatttctccggatgaaattcgtaaaaaatgtttatcatactatcatgaagttttgaaccatgtaatcctgggcgaggtatcttttccttgggaaattccggcgggaaaagcggacccggaagaggtaatacgcgactcgtctttattagaaaaattaaaagaagaatccaaagaaaaaaaaggattcggattcctgttagtttcttttcaaagggaaacaagaaaattcgggacccagactcttccatcgaaaatactgtttgaagaggaaaatgattttttacgttttttgcgtaaggaagaggaattttcgtcttatcgatcggattgcaaccttatcctatccaaaattcccggacttaaggagtggatattgaaaaatccctctcttgtaatcgaagaatcgggaaattgggaagatcttcttacggtttgtcgcttttttataaaaaacccgagacctgagttatacattcgtgaattacctattcctgtttctacaaaatttatcgaagaaaataaaaaagtgcttagaaaccttttggattttttaattccggagaatatcgatttggaaggaaaggatttcgaatcccgatacggattgaaaaagacggaagctttggttcgtttccgtatattggatccgaaaatcgcccaggaatctagcggtggattattggatataagtattccgatctccgaatttcgcaatctacatctagccggatgtcaccgtgtttttatcctggagaataagacgaatttttctaatatcgataatttcctgactttcccgaagctttcgggagcgattgccgttttcggaaaaggatatggtcttggaattcttaaggactgcatttggatggacaaaatggagatcttgtattggggagacatagacgtccaaggatttgaaatcctgtctttactaagagagcagtatttccagactaaatcctttctgatggataaggaaactttcgtaagatttcggaattttgcggtagatggagtttattctaagtcttccaaattggattacttgacggaatccgaaaaggaactttgcgaatatctaaggtccttaggatccaaaaatcgtttggagcaagagcgaattccccatgagtatattaaagaaaaattattctatttatag

SEQ ID NO: 42862 - DNA, 1452 bp, Leptospira santarosai serovar Arenal str. MAVJ 401
atggactataaacttttgcaaagattgtttcgttcttccgcaatccgtcttctgcgaaaagacaacgccccctttatcatctactttttggaaaaatattttagaagttctgcacgtactttcgttccgttcgaggagctgaaaattctacttcgttacgaattggaaaacttaaacgatcaggaagagatctccttacaaagaagcgcggacgtttatctgggagaatggattggagaaaattttctgacccggaggatacgatccgcggagggaatcgaagagatcatattggaaccctcggtcgaattggaaaaagtattctcctggatggaagacatacgatccttggaagataaggacgtgatcggcacggaatcccgttttttttccgtattaaataaattgaaagagattgtggaagagagcgtttccgatccggaggaaaaaattcgacaattggaattcaagcgggacgaattggatcttcaaattcgaaaactcaaggcgggagaacaagtatccaaatttccgagcgaaagaattcggagccaatatgtgtatgcgcgaaaggaagcgttgggattactttcggatttccgacaagtggaaggtaattttatggaaataacgaagatgatccataaaaaatatctggaggtcgttcagaaaggggaaattttacgatttgctttggacgggaacgacgagttacttcgatcggaacagggtcgtagtttccaaaccttttgggattttttacgatccgaacgaagtcaggaacaattcgaaagtatattagattctttgtattcattggaagacgttttggagctggactcgagaaagtttttccggaattttaggagaaatttaagagaagcgggttctcgggtaaacggagttgttacccgtatgtcggaacagctcaaaaaaagtttggtggaacgtacacttcgtgaaaaccgcagatcgaaagaacttatcgcggaaattaagaatttggtcttggagaatccactcgatttctctcagacggatttttattctttggaagaaatggatgttcgttttccgatggaaaggcctctttggcgcggcgatccggaggagacgtttcgaaccgtccggatcgaaaatacggatgaggatggaaacgtattcgatattctggaatcgatccgaggaatcgatttggaaatgtacgaacaacggatccaaacgttgcttcgtatttctccggaggtttctttggaaaaggttctgcgggaatatccggacgacgtctgctttgaaagtttagtcgcttatgtttggattgcgggtaacggagaatttcattccttggacgattcggaaacctttgtatattccgtttccataatggatcatccttcggaaaaacttgcgtatcgaattcctaagggaacgtatagagtgggtcatttatga

SEQ ID NO: 42863 - DNA, 564 bp, Leptospira santarosai serovar Arenal str. MAVJ 401
atgaataaaccgcatatctacgcagcttctattctcaggttgttaaaaggatcgatcaacagcgagtccgatgcaaagatttggcagaatcttttggacaacgaaaaaccggtgcgggaacactttgaaaaactgggtatttttttgcacttggatcgggaagacggttatgcgtttctacgacagacttcggacgacgaaagtgcagaatcggatgagaaacttcccgtgatcacccgtaaacttccgcttacgaaagaagagactttgtttctaattctactgagggaatgtatcatagaaatcgaagaaaaagatccttccggttccatcctttttagaaaggaagagctatcggataaagtgagtccttttttctccgacctctccgatgaaatcgatcggcaaaaaagattcgaaaaattacttcgcaaatccgaagaactaggctttgtcaaacagatcgagccggaaacgattcggatcgaaaaactcttaaaggcgaaattgaccgtatccgagttagagggtttacgcggtaagtttcgactaggaacggaatag

SEQ ID NO: 42864 - DNA, 3357 bp, Leptospira santarosai serovar Arenal str. MAVJ 401
atgactgatttattttcacccggtgaaattgccgccaataccggatatagacttgaattcttggaaattttaaattggggaacttttcacggtaggatttggaaattacgaccggaaggggaaaactttcttttaaccggagcgaacggttccggcaaatccacgttagtcgacgcgattcttacgctgctcgttccggccgcaaaacgaaattataatctggcttcgggactggaaagtaaaaagagagatcgatcggaacgatcttatgtggaaggtcactacggtagatcctcttccggtagcgaaggaattttgaaaattcgcgggaaacaagaagagtgttattccgttttatcggcggtattcgaagcgaatggaaggttcccgcgaattcggattgcgcagatcttttggttcgaatccggagaattgaaaaagatctaccttttttccgataaagagttggacttcgaaaaagatctggttttgggaaaaagaaccgtaaaggaattgaaagcggatctgaaaaattccggggcaagactttacgatcagttcaaggcgtataacgtggattttaggaaagcggtgggtttggaatcggagaaagcgatcgacctattcaatcaaatcgtagccatcaaatccttaggagtgttgaacgaattcgtccgagaacatatgctcgagtccaaggataaaagatccaggatcgaggaattgaatcgtaatttttccgatctgagcgaaacatacgaggcgattgtaaacgcaaaagaacagttgaagttgttggaaccgatcgaaaaaaaagccgccgagtatagggaatggaatcggaaggcggccgatcttcaggctttgatcgtatatgttccgtattattttgcggaaaaaaattacgagcttcgtcaaatcagagaacgggattatctttttgaattatcgcgtttgaaagacagatccgacgaactatcgactgaaatcgaatccttaaatcaagaggaacggaagttattcaacgcattagaaaacaatgatactcaaaggagaatcgccgatcttgtacgaaaacgggaggggattctctccgatctcaaaacgcggggaatcgaaaggaaaaaatattcctcctatctttccaaaatcggtttggaggaagcgttctccgaagaaacattctatacgaacctgcgcatagccggaggaatgcttacggaaaccgattcgatttgggaagaaatcagggatcgattgggaaagctgacgcttcaaaaaatggaattgcaaaagaatttcgattcggttcgttccgaattggagtatctgaaaaaaaagcgggataatcttcccagaacccagtcggaaattcgggcaaaaattgcctccggaatcggactttccgaaaaaagatttccctttatttgcgaattgatccgcgtcaaggaatccgaaaaagaatggaccggggctttggaaaggctcttgagaaatttcggcttacggatgttagtcgcggaagaggactacgaggccgtgtcggcttacgtgaattcttcctatctgggagggaagttggttttttcaagaatggttcctttatcgggaccgatcttgcaacccaaagacaaggaagaagttttctacaaattggaattgaaatcggaattgtcgaacgtaaagaaagaatggttggaagcgcagatactgcgcgagttcggacatatctgcggggatctgaatcgtcttcggaaagaggagaaggctcttacaaaagaaggtctgattaagtccggtagaattcgacacgagaaggacgatcgtaagagcatttcggacgcaagagattatattttaggttggaacaatacggagaaaatcgccgcgttggaatccgaatttgcccttctcgggcagaacatttatcggctgaatgctgcaatcgacctgatcagagaagaggaaaacaaaaacaaaaacaaacgggacgacctgcttctctttctacgtttcgaacaattttcacaaatcgacgacgaaagtttgaaaggcccgcttcaggatacggaaagacaaatccgggaattggaattgcgttccgaagaatacgggaagttgaaggaacaatacgaactcgcaaaagctcgcctaacggatgttcaaggaagacaacgggaaaccgccaaggaattcaacgttttagaggataggcttttcactcttcggaaggacatggaagatctacagcagaggatccgaaaagtcgaccgggaaacgtcgatttcactggagccgattctcaacgaacgactgcgggaaacgatcctaaccctggagtcgatcgcggagacggaacggaatttttcggatcgtttggttgtagagcgcgatcaatatttggagaaacgagattcgatcggagaagaattgaacaaaggaatggatcgttatgtgaaacgatttcgagaggaggcggatcgggaagaattgtccgtttcggtttccaacgcggaagggtttgcgaaattgaccgaaaggattcggcaggatcgattgcccgaatttcaggaaaaatttcgaacgatgatgtccgacaaagtcgcaaagcagattttggacttcaaagcggaactggacgacgacgtctcggaaatcaaggaaaggatcgacgaactgaacgattcgttaaaagatctggattattctaaaggaaaatcttatattcaaattcgatactttgatacaaaagaccgcgagattgtgggagattccggttttaaggaaatgttacgcggaagcattcccgatttaggagacagttctcacaacgaggaaaaattcgctaaaatcagagagttgttgaaaaagttaaagggagagggcggtagcgatcgttggtccagactcgtaacggatcccaggaactggctggatttccaagcggcggaattccttagggataacaaccaaattcttcaggtttacgattcgtccgcgggtaagtcgggaggacaaacggtaaaactcgcttacacgattctcgcttcggcgatcgcttatcaattcaaaattcgtgaacggaattcgtttcgttttgtggtgatcgatgaaatgttcaacaatctggacggagagaattcaagatatgcgttgaacctctttcgtcaattgggtttacaattgcttgtcgtaactccgatggacaaaattacgatcgtcgaaccttatgtgagaagcgttcattttgtgaagaacaattcggaaggaaacgattccagagtgtatccgatttcgaaggaaaatgtatcgtccgggaaggatgaaaattcggaaaggaaagtgggaaatttatag

SEQ ID NO: 42865 - DNA, 1179 bp, Leptospira santarosai serovar Arenal str. MAVJ 401
atgatttctccggaaattttacgcaagagatcgctggcatactatcataacgaactcttacgttccatcgtcctaggaggtgttttatttccttgggagatttcgatcggtaaagttcttccggaagagatcttaaaaaatccgtctttgttacgagaattacgggcggaatcgaaagaaaacaaaggtttcgggtttagaatcgtctttcgttcgaaagagacccggaaatacggaatacaaacgattcctacgaaaatcgtttttgataccgaagacgattttttgcgttttacaaaaaagaaagacgaattcctctcctatagcaccgattgtacgttgattctttccgttcttcccgagctgaaagattggattttaaaaaatacgttatccgtaatcgaagagtccggtaaatgggaaagtattctttcggtctgttcctattttttagaatataggaatcccggattgtatatccgagaactaccgattcgaattcctacgaaattcatcgaggaaaataaaaaggttttgagaagtcttttggattttctattgcctgagatcgcggatgcgaaggatttcgaaactcgttacggattaaaaaaagcggaacctttggttcgatttcgaattttggatctcgaaattgcaaagtcttccaccggaggtttaacggatttgagcattcccgtccgggattttagaaagttggagctctccggttgtggaagggtttttatcttggaaaataaaacgaatttcgcgaacctattcaattttttaagttttccgcaactgaagggaacgatctccattttcggtcagggtttcggattaaacgttttaaaggattgtaactggttggagaaaatggaaattttttattggggagatctggacgttcagggtttcgaaatcttgtcgcaactgcgggaacaatatcctcaaagccgttcctttttaatggacctgaagacatttgttcggtttcgagactttgcggtagacggtatttcttcttctaaatcttccgaaccgaaatttctcactccatcggagcgcgaaacttggaagtatttaagttctttagattcgaaaaatcggttggaacaggagaaaattcctcacgaatacgtgcaagaagttctgtccggtttgggtggatcgcagtaa

SEQ ID NO: 42866 - DNA, 1452 bp, Leptospira santarosai str. 200702252
atggactataaacttttgcaaagattgcttcgttcttccgcaatccgtcttctgcgaaaagacaacgccccctttatcatctactttttggaaaaatattttagaagttctgcacgtactttcgttccgttcgaggagctgaaaattctacttcgttacgaattggaaaacttaaacgatcaggaagagatctccttacaaagaagcgcggacgtttatctgggagaatggattggagaaaattttctgacccggaggatacgatccgcggagggaatcgaagagatcatattggaaccctcggtcgaattggaaaaagtattctcctggatggaagacatacgatccttggaagataaggacgtgatcggcacggaatcccgttttttttccgtattaaataaattgaaagagattgtggaagagagcgtttccgatccggaggagaaaattcgacaattggaattcaagcgggacgaattggatcttcaaattcgaaaactcaaggcgggagaacaagtatccaaatttccgagcgaaagaattcggagccaatatgtgtatgcgcgaaaggaagcgttgggattactttcggatttccgacaagtggaaggtaattttatggaaataacgaagatgatccataaaaaatatctggaggtcgttcagaaaggggaaattttacgatttgctttggacgggaacgacgagttacttcgatcggaacagggtcgtagtttccaaaccttttgggattttttacgatccgaacgaagtcaggaacaattcgaaagtatattagattctttgtattcattggaagacgttttggagttggactcgagaaagtttttccggaattttaggagaaatttaagagaagcgggttctcgggtaaacggagtcgttacccgtatgtcggaacagctcaaaaaaagtttggtggaacgtacacttcgtgaaaaccgcagatcgaaagaacttatcgcggaaattaagaatttggtcttggagaatccactcgatttttctcagacggatttttattctttggaggaaatggatgttcgttttccgatggaaaggcctctttggcgcggcgatccggaggagacgtttcgaaccgtccggatcgaaaatacggatgaggatgaaaatgtattcgatattctggaatcgatccgaggaatcgatttggaaatgtacgaacaacggatccaaacgttgcttcgtatttctccggaggtttctttggaaaaggttttgcgggaatatccggacgacgtctgctttgaaagtttagtcgcttatgtttggattgcgggtaacggagaatttcattccttggacgattcggaaacctttgtatattccgtttccataatggatcatccttcggaaaaacttgcgtatcgaattcctaagggaacgtatagagtgggtcatttatga

SEQ ID NO: 42867 - DNA, 564 bp, Leptospira santarosai str. 200702252
atgaataaaccgcatatctacgcagcttccattctcaggttgttgaaaggatcgatcaacagcgagtccgatgcaaaaatttggcagaatcttttggacaacgaaaaaccggtgcgggaacactttgaaaaactgggtatttttttgcacttggatcgggaagacggttatgcgtttctacgacagacttcggacgacgaaagtgcagaatcggatgagaaacttcccgtgatcacccgtaaacttccgcttacgaaagaagagactttgtttctaattctactgagggaatgtatcatagaaatcgaagaaaaagatccttccggttccatcctttttagaaaggaagagctatcggataaagtgagtccttttttctccgacctctccgatgaaatcgatcggcaaaaaagattcgaaaaattacttcgcaaatccgaagaactaggctttgtcaaacagatcgagccggaaacgattcggatcgaaaaactcttaaaggcgaaattgaccgtatccgagttagagggtttacgcggtaagtttcgactaggaacggaatag

SEQ ID NO: 42868 - DNA, 3357 bp, Leptospira santarosai str. 200702252
atgactgatttattttcacccggtgaaattgccgccaataccggatataggcttgaattcttggaaattttaaattggggaacttttcacggtaggatttggaaattacgaccggaaggggaaaactttcttttaaccggagcgaacggttccggcaaatcaacgttagtcgacgcgattcttacgctgctcgttccggccgcaaaacgaaattataatctggcttcgggactggaaagtaaaaagagagatcgatcggaacgatcttatgtggaaggtcactacggtagatcctcttccggtagcgaaggaattttgaaaattcgcgggaaacaagaagagtgttattccgttttatcggcggtattcgaagcgaatggaaggttcccgcgaattcggattgcgcagatcttttggttcgaatccggagaattgaaaaagatctaccttttttccgataaagagttggacttcgaaaaagatctggttttgggaaaaagaaccgtaaaggaattgaaagcggatctgaaaaattccggggcaagactttacgatcagttcaaggcgtataacgtggattttaggaaagcggtgggtttggaatcggagaaagcgatcgacctattcaatcaaatcgtagccatcaaatccttaggagtgttgaacgaattcgtccgagaacatatgctcgagtccagggataaaagatccaggatcgaggaattgaatcgtaatttttccgatctgagcgaaacatacgaggcgattgtaaacgcaaaagaacagttgaagttgttggaaccgatcgaaaaaaaagccgccgagtatagggaatggaatcggaaggcggccgatcttcaggctttgatcgtatatgttccgtattattttgcggaaaaaaattacgagcttcgtcaaatcagagaacaggattatctttttgaattatcgcgtttgaaagacagatccgacgaactatcgactgaaatcgaatccttaaatcaagaggaacggaagttattcaacgcattggaaaacaatgatactcaaaggagaatcgccgatcttgtacgaaaacgggaggggattctctccgatctcaaaacgcggggaatcgaaaggaaaaaatattcctcctatctttccaaaatcggtttggaggaaaccttctccgaagaaacattctatacgaacctgcgcatagccggaggaatgcttacggaaaccgattcgatttgggaagaaatcagggatcgattgggaaagctgacgcttcaaaaaatggaattgcaaaagaatttcgattcggttcgttccgaattggagtatctgaaaaaaaagcgggataatcttcccagaacccagtcggaaattcgggcgaaaattgcctccggaatcggactttccgaaaaaagatttccctttatttgcgaattgattcgcgtcaaagaatccgaaaaagaatggaccggggctttggaaaggctcttgagaaatttcggcttacggatgttagtcgcggaagaggactacgaggccgtgtcggcttacgtgaattcttcctatctgggagggaagttggttttttcaagaatggttcccttatcgggaccgatcttgcaacccaaagacaaggaagaagttttctacaaattggaattgaaatcggaattgtcgaacgtaaagaaagaatggttggaagcgcagatactgcgcgagttcggacatatctgcggggatctgaatcgtctccggaaagaggagaaggctcttacaaaagaaggtctgattaagtccggtagaattcgacacgagaaggacgatcgtaagaacatttcggacgcaagagattatattttaggctggaacaatacggagaaaatcgccgcgttggaatccgaatttgcccttctcgggcagaacatttatcggctgaatgctgcaatcgatctagtcagagaagaggaaaacaaaaacaaaaacaaacgggacgacctgcttctctttctacgtttcgaacaattttcacaaatcgacgacgaaagtttaaaaggtccgcttcaggatacggaaagacaaatccgggaattggaattgcgttccgaagaatacgggaagttgaaggaacaatacgaactcgcaaaagctcgcctaacggatgttcaaggaagacaacgggaaaccgccaaggaattcaacgttttagaggataggcttttcactcttcggaaggacatggaagatctacggcagaggatccgaaaagtcgaccgggaaacgtcgatttcactggagccgattctcaacgaacgactgcgggaaacgatcctaaccctggagtcgatcgcggagacggaacggaatttttcggatcgtttggttgtagagcgcgatcaatatttggagaaacgagattcgatcggagaagaattgaacaaaggaatggatcgttatgtgaaacgattccgagaggaggcggatcgggaagaattgtccgtttcggtttccaacgcggaagggtttgcgaaattgaccgaaaggattcggcaggatcgattgcccgaatttcaggaaaaatttcgaacgatgatgtccgacaaagtcgcaaagcagattttggacttcaaggcggaattggacgacgacgtctcggaaatcaaggaaaggatcgacgaactgaacgattcgttaaaagatctggattattctaaaggaaaatcttatattcaaattcgatattttgataccaaggatcgggagattgtgggcgattccggctttaaggaaatgttacgcggaagcattccggatttgggagacagttctcacaacgaggaaaaattcgctaaaatcagagagttgttgaaaaagttaaagggagagggcggtagcgatcgttggtccagactcgtaacggatcccaggaactggctggatttccaagcggcggaattccttagggataacaaccaaattcttcaggtttacgattcgtccgcgggtaagtcgggaggacaaacggtaaaactcgcttacacgattctcgcttcggcgatcgcttatcaattcaaaattcgcgaacggaattcgtttcgtttcgtggtgatcgatgaaatgttcaacaatctggacggagagaattcaagatatgcgttgaacctctttcgtcaattgggtttacaattgcttgtcgtaactccgatggataagattacgatcgtagaaccttatgtgagaagcgttcattttgtgaagaacaattcggaaggaaacgattccagagtgtatccgatttcgaaggaaaatgtatcgtccgggaaggatgaaaattcggaaaggaaagtgggaaatttatag

SEQ ID NO: 42869 - DNA, 1179 bp, Leptospira santarosai str. 200702252
atgatttctccggaaattttacgcaagagatcgctggcatactatcataacgaactcttacgttctatcgtcctgggaggtgttttatttccttgggagatttcgatcggtaaagttcttccggaagagatcttaaaaaatccgtctttgttgcgagaattacgggctgaatcgaaagaaaacaaaggtttcggatttagaatcgtctttcgttcgaaagagacccggaaatacggaatacaaacgattcctacgaaaatcgtttttgataccgaagacgattttttgcgttttacaaaaaagaaagacgaattcctctcctatagcaccgattgtacgttgattctttccgttcttcccgagctgaaagattggattttaaaaaatacgttatccgtaatcgaagagtccggtaaatgggaaagtattctttcggtctgttcctattttttagaatataggaatcccggattgtatatccgagaactaccgattcgaattcctacgaaattcatcgaggaaaataaaaaggttttgagaagtcttttggattttctattgcctgagatcgcggatgcgaaggatttcgaaactcgttacggattaaaaaaagcggaacctttggttcgatttcgaattttggatctcgaaattgcaaagtcttccaccggaggtttaacggatttgagcattcccgtccgggattttagaaagttggagctctccggttgtggaagggtttttatcttggaaaataaaacgaatttcgcgaacctattcaattttttaagttttccgcaactgaagggaacgatctccattttcggtcagggtttcggattaaacgttttaaaggattgtagctggttggagaaaatggaaattttttattggggagatctggacgttcagggtttcgaaatcctgtcgcaactgcgggaacaatatcctcaaagccgttcctttttaatggacctgaagacatttgttcggtttcgagactttgcggtagacggtatttcttcttctaaatcttccgaaccgaaatttctcactccatcggagcgcgaaacttggaagtatttaagttctttagattcgaaaaatcggttggaacaggagaaaatacctcacgaatacgtgcaagaagttctgtccggtttggatggatcgcagtaa

SEQ ID NO: 42870 - DNA, 1452 bp, Leptospira santarosai str. CBC379
atggactataaatttttgcaaagattgcttcgttcttccgcaatccgtcttctgcgaaaagacaacgccccctttatcatctactttttggaaaaatattttagaagttctgcacgtactttcgttccgttcgaggagctgaaaattctacttcgttacgaattggaaaacttaaacgatcaggaagagatctccttacaaagaagcgcggacgtttatctgggagaatggattggagaaaattttctgacccggaggatacgatccgcggagggaatcgaagagatcatattggaaccctcggtcgaattggaaaaagtattctcctggatggaagacatacgatccttggaagataaggacgtgatcggcacggaatcccgttttttttccgtattaaataaattgaaagagattgtggaagagagcgtttccgatccggaggagaaaattcgacaattggaatccaagcgggacgaattggatcttcaaattcgaaaactcaaggcgggagaacaagtatccaaatttccgagcgaaagaattcggagccaatatgtgtatgcgcgaaaggaagcgttggggttactttcggatttccgacaagtggaaggtaattttatggaaataacgaagatgattcataaaaaatatctggaggtcgttcagaaaggggaaattttacgatttgctttggacgggaacgacgagttacttcgatcggaacagggtcgtagttttcaaaccttttgggattttttacgatccgaacgaagtcaggaacaattcgaaagtatattagattctttgtattcattggaagacgttttggagctggactcgagaaagtttttccggaattttaggagaaatttaagagaagcgggttctcgggtaaacggagtcgttacccgtatgtcggaacagctcaaaaaaagtttggtggaacgtacacttcgtgaaaaccgcagatcgaaagaacttatcgcggaaattaagaatttggtcttggagaatccactcgatttttctcagacggatttttattctttggaggaaatggatgtgcgttttccgatggaaaggcctctttggcgcggcgatccggaggagacgtttcgaaccgtccagatcgaaaatacggatgaggatggaaatgtattcgatattctggaatcgatccgaggaatcgatttggaaatgtacgaacaacggatccaaacgttgcttcgtatttctccggaggtttctttggaaaaggttctgcgggaatatccggacgacgtctgctttgaaagtttagtcgcttatgtttggattgcgggtaacggagaatttcattccttggacgattcggaaacctttgtatattccgtttccataatggatcatccttcggaaaaacttgcgtatcgaattcctaagggaacatatagagtgggtcatttatga

SEQ ID NO: 42871 - DNA, 564 bp, Leptospira santarosai str. CBC379
atgaataaaccgcatatctacgcagcttctattctcaggttgttgaaaggatcgatcaacagcgagtccgatgcaaagatttggcagaatcttttggacaacgaaaaaccggtgcgggaacactttgaaaaactgggtatttttttgcacttggatcgggaagacggttatgcgtttctacgacagacttcggacgacgaaagtgcagaatcggatgagaaacttcccgtgatcacccgtaaacttccgcttacgaaagaagagactttgtttctaattctgctgagggaatgtatcatagaaatcgaagaaaaagatccttccggttccatcctttttagaaaggaagagctatcggataaagtgagtccttttttctccgacctctccgatgaaatcgatcggcaaaaaagattcgaaaaattacttcgcaaatccgaagaactaggctttgtcaaacagatcgagccggaaacgattcggattgaaagactcttaaaggcgaaattgaccgtatccgagttagagggtttacgcggtaagtttcgattaggaacggaataa

SEQ ID NO: 42872 - DNA, 3357 bp, Leptospira santarosai str. CBC379
atgactgatttattttcacccggtgaaattgccgccaataccggatatagacttgaattcttggaaattttaaattggggaacttttcacggtaggatttggaaattacgaccggaaggggaaaactttcttttaaccggagcgaacggttccggcaaatcaacgttagtcgacgcgattcttacgctgctcgttccggccgcaaaacgaaattataatctggcttcgggcctcgagagcaaaaagagggatcgatcggaacgatcttatgtggaaggtcactacggtagatcctcttccggtagcgaaggaattttgaaaattcgcgggaaacaagaagagtgttattccgttttatcggcggtattcgaagcgaatggaaggttcccgcgaattcggattgcgcagatcttttggttcgaatccggagaattgaaaaaaatctaccttttttccgataaagagttggacttcgaaaaagatctggttttgggaaaaagaaccgtaaaggaattgaaagcggatctgaaaaattccggggcaagactttacgatcagttcaaggcgtataacgtggattttaggaaagcggtgggtttggaatcggagaaagcgatcgacctattcaatcaaatcgtagccatcaaatccttaggagtgttgaacgaattcgtccgagaacatatgctcgagtccaaggataaaagatccaggatcgaggaattgaatcgtaatttttccgatctgagcgaaacatacgaggcgattgtaaacgcaaaagaacagttgaagttgttggaaccgatcgaaaaaaaagccgccgagtatagggaatggaatcggaaggcggccgatcttcaggctttgatcgtatatgttccgtattattttgcggaaaaaaattacgagcttcgtcaaatcagagaacaggattatctttttgaattatcgcgtttgaaagacagatccgacgaactatcgactgaaatcgaatccttaaatcaagaggaacggaagttattcaacgcattagaaaacaatgatactcaaaggagaatcgccgatcttgtacgaaaacgggaggggattctctccgatctcaaaacgcggggaatcgaaaggaaaaaatattcctcctatctttccaaaatcggtttggaggaaaccttctccgaagaaacattctatacgaacctgcgcatagccggaggaatgcttacggaaaccgattcgatttgggaagaaatcagggatcgattgggaaagctgacgcttcaaaaaatggaattgcaaaaaaatttcgattcggttcgttccgaattggagtatctgaaaaaaaagcgggataatcttcccagaacccagtcggaaattcgggcaaaaattgcctccggaatcggactttccgaaaaaagatttccctttatttgcgaattgatccgcgtcaaagaatccgaaaaagaatggacgggggctttggaaaggcttttgagaaatttcggcttacggatgttagtcgcggaagaggactacgaggccgtgtcggcttacgtgaattcttcctatctgggagggaagttggttttttcaagaatggttcctttatcgggaccgatcttgcaacccaaagacaaggaagaagttttctacaagttggaattgaaatcggaattgtcgaacgtaaagaaagaatggttggaagcgcagatactgcgcgagttcggacatatctgcggggatctgaatcgtctccggaaagaggagaaggctcttacaaaagaaggtctgattaagtccggtagaattcgacacgagaaggacgatcgtaagaacatttcggacgcaagagattatattttaggctggaacaatacggagaaaatcgccgcgttggaatccgaatttgcccttctcgggcagaacatttatcggctgaatgctgcaatcgacctgatcagagaagaggaaaacaaaaacaaaaacaaacgggacgacctgcttctctttctacgtttcgaacaattttcacaaatcgacgacgaaagtttgaaaggtccgcttcaggatacggaaagacaaatccgggaattggaattgcgttccgaagaatacgggaagttgaaggaacaatacgaactcgcaaaagctcgcctaacggatgttcaagggagacaacgggaaaccgccaaggaattcaacgttttagaggataggcttttcactcttcggaaggacatggaagatctacagcagagggtccgaaaagtcgaccgggaaacgtcgatttcactggagccgattctcaacgaacgactgcgggaaacgatcctaaccctggagtcgatcgcggaggcggaacggaatttttcggatcgtttggttgtagagcgcgatcaatatttggagaaacgagattcgatcggagaagaattgaacaaaggaatggatcgttatgtgaaacgattccgagaggaggcggatcgggaagaattgtccgtttcggtttccaacgcggaagcgtttgcgaaattgaccgaaaggattcggcaggatcgattgcccgaatttcaggaaaaatttcgaacgatgatgtccgacaaagtcgcaaaacagattttggacttcaaggcggaattggacgacgacgtctcggaaatcaaggaaaggatcgacgaactgaacgattcgttaaaagatctggattattctaaaggaaaatcttatattcaaattcgatactttgatacaaaagaccgcgagattgtgggagattccggttttaaggaaatgttacgcggaagcattccggatttgggagacagttctcacaacgaggaaaaattcgctaaaatcagagagttgttgaaaaagttaaagggagagggcggtagcgatcgttggtccagactcgtaacggatcccaggaactggctggatttccaagcggcggaattccttagggataacaaccaaattcttcaggtttacgattcgtccgcgggtaagtcgggaggacaaacggtaaaactcgcttacacgattctcgcttcggcgatcgcttatcaattcaaaattcgcgaacggaattcgtttcgttttgtggtgatcgatgaaatgttcaacaatctggacggagagaattcaagatatgcgttgaacctctttcgtcaattgggtttacaattgcttgtcgtaactccgatggataagattacgatcgtcgaaccttatgtgagaagcgttcattttgtgaaaaacaattcggaaggaaacgattccagagtgtatccgatttcgaaggaaaatgtatcgtccgggaaggatgaaaattcggaaaggaaagtgggaaatttatag

SEQ ID NO: 42873 - DNA, 1179 bp, Leptospira santarosai str. CBC379
atgatttctccggaaattttacgcaagagatcgctggcatactatcataacgaactcttacgttctatcgtcctgggaggtgttttatttccttgggagatttcgatcggtaaagttcttccggaagagatcttaaaaaatccgtctttattacgagaattacgggccgaatcgaaagaaaacaaaggtttcggatttagaatcgtctttcgttcgaaagagacccggaaatacggaatacaaacgattcctacgaaaatcgtttttgataccgaagacgattttttgcgttttacaaaaaagaaagacgaattcctctcctatagcaccgattgtacgttgattctttccgttcttcccgagctgaaagattggattttaaaaaatacgttatccgtaatcgaagagtccggtaaatgggaaagtattctttcggtctgttcctattttttagaatataggaatcccggattgtatatccgagaactaccgattcgaattcctacgaaattcatcgaggaaaataaaaaggttttgagaagtcttttggattttctattgcctgagatcgcggatgcgaaggatttcgaaactcgttacggattaaaaaaagcggaacctttggttcgatttcgaattttggatctcgaaattgcaaagtcttccaccggaggtttaacggatttgagcattcccgtccgggattttagaaagttggaactctccggttgtggaagggtttttatcttggaaaataaaacgaatttcgcgaacctattcaattttttaagttttccgcaactgaagggaacgatctccattttcggtcagggtttcggattaaacgttttaaaggattgtaactggttggagaaaatggaaattttttattggggagatctggacgttcagggtttcgaaatcctgtcgcaactgcgggaacaatatcctcaaagccgttcctttttaatggacctgaagacatttgttcggtttcgagactttgcggtagacggtatttcttcttctaaatcttccgaaccgaaatttctcactccaccggagcgtgaaacttggaagtatttaagttctttagattcgaaaaatcggttggaacaggagaaaattcctcacgaatacgtgcaagaagttctgtccggtttgggtggatcgcagtaa

SEQ ID NO: 42874 - DNA, 1452 bp, Leptospira santarosai str. CBC523
atggactataaacttttgcaaagattgtttcgttcttccgcaatccgtcttctgcgaaaagacaacgccccctttatcatctactttttggaaaaatattttagaagttctgcacgtactttcgttccgttcgaggagctgaaaattctacttcgttacgaattggaaaacttaaacgatcaggaagagatctccttacaaagaagcgcggacgtttatctgggagaatggattggagaaaattttctgacccggaggatacgatccgcggagggaatcgaagagatcatattggaaccctcggtcgaattggaaaaagtattctcctggatggaagacatacgatccttggaagataaggacgtgatcggcacggaatcccgttttttttccgtattaaataaattgaaagagattgtggaagagagcgtttccgatccggaggagaaaattcgacaattggaattcaagcgggacgaattggatcttcaaattcgaaaactcaaggcgggagaacaagtatccaaatttccgagcgaaagaattcggagccaatatgtgtatgcgcgaaaggaagcgttgggattactttcggatttccgacaagtggaaggtaattttatggaaataacgaagatgatccataaaaaatatctggaggtcgttcagaaaggggaaattttacgatttgctttggacgggaacgacgagttacttcgatcggaacagggtcgtagtttccaaaccttttgggattttttacgatccgaacgaagtcaggaacaattcgaaagtatattagattctttgtattcattggaagacgttttggagctggactcgagaaagtttttccggaattttaggagaaatttaagagaagcgggttctcgggtaaacggagttgttacccgtatgtcggaacagctcaaaaaaagtttggtggaacgtacacttcgtgaaaaccgcagatcgaaagaacttatcgcggaaattaagaatttggtcttggagaatccactcgatttctctcagacggatttttattctttggaggaaatggatgtgcgttttccgatggaaaggcctctttggcgcggcgatccggaggagacgtttcgaaccgtccggatcgaaaatacggatgaggatggaaatgtattcgatattctggaatcgatccgaggaatcgatttggaaatgtacgaacaacggatccaaacgttgcttcgtatttctccggaggtttctttggaaaaggttctgcgggaatatccggacgacgtctgctttgaaagtttagtcgcttatgtttggattgcgggtaacggagaatttcattccttggacgattcggaaacctttgtatattccgtttccataatggatcatccttcggaaaaacttgcgtatcgaattcctaagggaacgtatagagtgggccatttatga

SEQ ID NO: 42875 - DNA, 564 bp, Leptospira santarosai str. CBC523
atgaataaaccgtatgactatgcaccttccattcttagattgttgaaaggatcgatcaacagcgagtccgatgcaaagatttggaagaatcttttggacaacgaaaaatcggtgcgggaacactttgaaaaactgggtatttttttgcacttggatcgggaagacggttatgcgtttctacgacagacttcggacgacgaaagtgcagaatcggatgagaaacttcccgtgatcacccgtaaacttccgcttacgaaagaagagactttgtttctaattctactgagggaatgtatcatagaaatcgaagaaaaagatccttctggttccatcctttttagaaaggaagagctatcggataaagtgagtccttttttctccgacctctccgatgaaattgatcggcaaaaaagattcgaaaaattacttcgcaaatccgaagaactaggctttgtcaaacagatcgagccggaaacgattcggattgaaagactcttaaaggcgaaattgaccgtatccgagttagagggtttacgcggtaagtttcgactaggaacggaataa

SEQ ID NO: 42876 - DNA, 3357 bp, Leptospira santarosai str. CBC523
atgactgatttattttcacccggtgaaattgccgccaataccggatatagacttgaattcttggaaattttaaattggggaacttttcacggtaggatttggaaattacgaccggaaggggaaaactttcttttaaccggagcgaacggttccggcaaatcaacgttagtcgacgcgattcttacgctgctcgttccggccgcaaaacgaaattataatctggcttcgggactggaaagtaaaaagagagatcgatcggaacgatcttatgtggaaggtcactacggtagatcctcttccggtagcgaaggaattttgaaaattcgcgggaaacaagaagagtgttattccgttttatcggcggtattcgaagcgaatggaaggttcccgcgaattcggattgcgcagatcttttggttcgaatccggagaattgaaaaagatctaccttttttccgataaagagttggacttcgaaaaagatctggttttgggaaaaagaaccgtaaaggaattgaaagcggatctgaaaaattccggggcaagactttacgatcagttcaaggcgtataacgtggattttaggaaagcggtgggtttggaatcggagaaagcgatcgacctattcaatcaaatcgtagccatcaaatccttaggagtgttgaacgaattcgtccgagaacatatgctcgagtccaaggataaaagatccaggatcgaggaattgaatcgtaatttttccgatctgagcgaaacatacgaggcgattgtaaacgcaaaagaacagttgaagttgttggaaccgatcgaaaaaaaagccgccgagtatagggaatggaatcggaaggcggccgatcttcaggctttgatcgtatatgttccgtattattttgcggaaaaaaattacgagcttcgtcaaatcagagaacaggattatctttttgaattatcgcgtttgaaagacagatccgacgaactatcgactgaaatcgaatccttaaatcaagaggaacggaagttattcaacgcattagaaaacaatgatactcaaaggagaatcgccgatcttgtacgaaaacgggaggggattctctccgatctcaaaacgcggggaatcgaaaggaaaaaatattcctcctatctttccaaaatcggtttggaggaagcgtcctccgaagaaacattctatacgaacctgcgcatagccggaggaatgcttacggaaaccgattcgatttgggaagaaatcagggatcgattgggaaagctgacgcttcaaaaaatggaattgcaaaaaaatttcgattcggttcgttccgaattggagtatctgaaaaaaaagcgggataatcttcccagaacccagtcggaaattcgggcaaaaattgcctccggaatcggactttccgaaaaaagatttccctttatttgcgaattgatccgcgtcaaagaatccgaaaaagaatggaccggggctttggaaaggctcttgagaaatttcggcttacggatgttagtcgcggaagaggactacgaggccgtgtcggcttacgtgaattcttcctatctgggagggaagttggttttttcaagaatggttcctttatcgggaccgatcttgcaacccaaagacaaggaagaagttttctacaaattggaattgaaatcggaattgtcgaacgtaaagaaagaatggttggaagcgcagatactgcgcgagttcggacatatctgcggggatctgaatcgtctccggaaagaggagaaggctcttacaaaagaaggtctgattaagtccggtagaattcgacacgagaaggacgatcgtaagaacatttcggacgcaagagattatattttaggctggaacaatacggagaaaatcgccgcgttggaatccgaatttgcccttctcgggcagaacatttatcggttgaatgctgcaatcgacctgatcagagaagaggaaaacaaaaacaaaaacaaacgggacgacctgcttctctttctacgtttcgaacaattttcacaaattgacgacgaaagtttgaaaggtccgcttcaggatacggaaagacaaatccgggaattggaattgcgttccgaagaatacgggaagttgaaggaacaatacgaactcgcaaaagctcgcctaacggatgttcaagggagacaacgggaaaccgccaaggaattcaatgttttagaggataggcttttcactcttcggaaggacatggaagatctacagcagagggtccgaaaagtcgaccgggaaacgtcgatttcactggagccgattctcaacgaacgactgcgggaaacgatcctaaccctggagtcgatcgcggagacggaacggaatttttcggatcgtttggttgtagagcgcgatcaatatttggagaaacgagattcgatcggagaagaattgaacaaaggaatggatcgttatgtgaaacgattccgagaggaggcggatcgggaagaattgtccgtttcggtttccaacgcggaagcgtttgcgaaattgaccgaaaggattcggcaggatcgattgcccgaatttcaggaaaaatttcgaacgatgatgtccgacaaagtcgcaaaacagattttggacttcaaggcggaattggacgacgacgtctcggaaatcaaggaaaggatcgacgaactgaacgattcgttaaaagatctggattattctaaaggaaaatcttatattcaaattcgatattttgataccaaggatcgggagattgtgggcgattccggctttaaggaaatgttacgcggaagcattccggatttgggagacagttctcacaacgaggaaaaattcgctaaaatcagagagttgttgaaaaagttaaagggagagggcggtagcgatcgttggtccagactcgtaacggatcccaggaactggctggatttccaagcggcggaattccttagggataacaaccaaattcttcaggtttacgattcgtccgcgggtaagtcgggaggacaaacggtaaaactcgcttacacgattctcgcttcggcgatcgcttatcaattcaaaattcgtgaacggaattcgtttcgtttcgtggtgatcgatgaaatgttcaacaatctggacggagagaattcaagatatgcgttgaacctctttcgtcaattgggtttacaattgcttgtcgtaactccgatggataagattacgatcgtcgaaccttatgtgagaagcgttcattttgtgaagaacaattcggaaggaaacgattccagagtgtatccgatttcgaaggaaaatgtatcgtccgggaaggatgaaaattcggaaaggaaagtgggaaatttatag

SEQ ID NO: 42877 - DNA, 1179 bp, Leptospira santarosai str. CBC523
atgatttctccggaaattttacgcaagagatcgctggcatactatcataacgaactcttacgttctatcgtcctaggaggtgttttatttccttgggagatttcgatcggtaaagttcttccggaagagatcttaaaaaatccgtctttgttacgagaattacgggccgaatcgaaagaaaacaaaggtttcggatttagaatcgtctttcgttcgaaagagacccggaaatacggaatacaaacgattcctacgaaaatcgtttttgataccgaagacgattttttgcgttttacaaaaaagaaagacgaattcctctcctatagcaccgattgtgcgttgattctttccgttcttcccgagctgaaagattggattttaaaaaatacgttatccgtaatcgaagagtccggtaaatgggaaagtattctttcggtctgttcctattttttagaatataggaatcccggattgtatatccgagaactaccgattcgaattcctacgaaattcatcgaggaaaataaaaaggttttgagaagtcttttggattttctattgcctgagatcgcggatgcgaaggatttcgaaactcgttacggattaaaaaaagcggaacctttggttcgatttcgaattttggatctcgaaattgcaaagtcttccaccggaggtttaacggatttgagcattcccgtccgggattttagaaagttggaactctccggttgtagaagggtttttatcttggaaaataaaacgaatttcgcgaacctattcaattttttaagttttccgcaactgaagggaacgatctccattttcggtcagggtttcggattaaacgttttaaaggattgtaactggttggagaaaatggaaattttttattggggagatctggacgttcagggtttcgaaatcctgtcgcaactgcgggaacaatatcctcaaagccgttcctttttaatggacctgaagacatttgttcggtttcgagactttgcggtagacggtatttcttcttctaaatcttccgaaccgaaatttctcactccatcggagcgcgaaacttggaagtatttaagttctttagattcgaaaaatcggttggaacaggagaaaatccctcacgaatacgtgcaagaagttctgtccggtttggatggatcgcagtaa

SEQ ID NO: 42878 - DNA, 1452 bp, Leptospira santarosai str. HAI134
atggactataaacttttgcaaagattgtttcgttcttccgcaatccgtcttctgcgaaaagacaacgccccctttatcatctactttttggaaaaatattttagaagttctgcacgtactttcgttccgttcgaggagctgaaaattctacttcgttacgaattggaaaacttaaacgatcaggaagagatctccttacaaagaagcgcggacgtttatctgggagaatggattggagaaaattttctgacccggaggatacgatccgcggagggaatcgaagagatcatattggaaccctcggtcgaattggagaaagtattctcctggatggaagacatacgatccttggaagataaggacgtgatcggcacggaatcccgttttttttccgtattaaataaattgaaagagattgtggaagagagtgtttccgatccggaggagaaaattcgacaattggaattcaagcgggacgaattggatcttcaaattcgaaaactcaaggcgggagaacaagtatccaaatttccgagcgaaagaattcggagccaatatgtgtatgcgcgaaaggaagcgttgggattactttcggatttccgacaagtggaaggtaattttatggaaataacgaagatgatccataaaaaatatctggaggtcgttcagaaaggggaaattttacgatttgctttggacgggaacgacgagttacttcgatcggaacagggtcgtagtttccaaaccttttgggattttttacgatccgaacgaagtcaggaacaattcgaaagtatattagattctttgtattcattggaagacgttttggagctggactcgagaaagtttttccggaattttaggagaaatttaagagaagcgggttctcgggtaaacggagttgttacccgtatgtcggaacagctcaaaaaaagtttggtggaacgtacacttcgtgaaaaccgcagatcgaaagaacttatcgcggaaattaagaatttggtcttggagaatccactcgatttctctcagacggatttttattctttggaggaaatggatgttcgttttccgatggaaaggcctctttggcgcggcgatccggaggagacgtttcgaaccgtccggatcgaaaatacggatgaggatggaaatgtattcgatattctggaatcgatccgaggaatcgatttggaaatgtacgaacaacggatccaaacgttgcttcgtatttctccggaggtttctttggaaaaggttctgcgggaatatccggacgacgtctgctttgaaagtttagtcgcttatgtttggattgcgggtaacggagaatttcattccttggacgattcggaaacctttgtatattccgtttccataatggatcatccttcggaaaaacttgcgtatcgaattcctaagggaacgtatagagtgggtcatttatga

SEQ ID NO: 42879 - DNA, 570 bp, Leptospira santarosai str. HAI134
atgaataaaccgcatatctacgcaccttccattcttagattgttgaaaggatcgatcaacagcgagtccgatgcaaagatttggaagaatcttttggacaacgaaaaatcggtgcgggaacactttgaaaaactgggtatttttttgcacttggatcgggaagacggttatgcgtttctacgacagacttcggacgacgaaagtgtagaatcggatgagaaacttcccgtgatcacccgtaaacttccgcttacgaaagaagagactttgtttctaattctattgagggaatgtatcatagaaatcgaagaaaaagatccttccggttccatcctgtttagaaaggaagagctatcggataaagtgagtccttttttctccgacctctccgatgaaatcgatcggcaaaaaagattcgaaaaattacttcgcaaatccgaagaactaggctttgtcaaacagatcgagccggaaacgattcggattgaaagactcttaaaggcgaaattgaccgtatccgagttagagggtttacgcggtaagtttcgactaggaacggaaaaacgatga

SEQ ID NO: 42880 - DNA, 3357 bp, Leptospira santarosai str. HAI134
atgactgatttattttcacccggtgaaattgccgccaataccggatatagacttgaattcttggaaattttaaattggggaacttttcacggtaggatttggaaattacgaccggaaggggaaaactttcttttaaccggagcgaacggttccggcaaatcaacgttagtcgacgcgattcttacgctgctcgttccggccgcaaaacgaaattataatctggcttcgggactggaaagtaaaaagagagatcgatcggaacgatcttatgtggaaggtcactacggtagatcctcttccggtagcgaaggaattttgaaaattcgcgggaaacaagaagagtgttattccgttttatcggcggtattcgaagcgaatggaaggttcccgcgaattcggattgcgcagatcttttggttcgaatccggagaattgaaaaagatctaccttttttccgataaagagttggacttcgaaaaagatctggttttgggaaaaagaaccgtaaaggaattgaaagcggatctgaaaaattccggggcaagactttacgatcagttcaaggcgtataacgtggattttaggaaagcggtgggtttggaatcggagaaagcgatcgacctattcaatcaaatcgtagccatcaaatccttaggagtgttgaacgaattcgtccgagaacatatgctcgagtccaaggataaaagatccaggatcgaggaattgaatcgtaatttttccgatctgagcgaaacatacgaggcgattgtaaacgcaaaagaacagttgaagttgttggaaccgatcgaaaaaaaagccgccgagtatagggaatggaatcggaaggcggccgatcttcaggctttgatcgtatatgttccgtattattttgcggaaaaaaattacgagcttcgtcaaatcagagaacaggattatctttttgaattatcgcgtttgaaagacagatccaacgaactatcgactgaaatcgaatccttaaatcaagaggagcggaagttattcaacgcattagaaaacaatgatactcaaaggagaatctccgatcttgtacgaaaacgggaggggattctctccgatctcaaaacgcggggaatcgaaaggaaaaaatattcctcctatctttccaaaatcggtttggaggaagcgtcctccgaagaaacattctatacgaacctgcgcatagccggaggaatgcttacggaaaccgattcgatttgggaagaaatcagggatcgattgggaaagctgacgcttcaaaaaatggaattgcaaaaaaatttcgattcggttcgttccgaattggagtatctgaaaaaaaagcgggataatcttcccagaacccagtcggaaattcgggcaaaaattgcctccggaatcggactttccgaaaaaagatttccctttatttgcgaattgatccgcgtcaaagaatccgaaaaagaatggaccggggctttggaaaggctcttgagaaatttcggcttacggatgttagtcgcggaagaggactacgaggccgtgtcggcttacgtgaattcttcctatctgggagggaagttggttttttcaagaatggttcctttatcgggaccgatcttgcaacccaaagacaaggaagaagttttctacaagttggaattgaaatcggaattgtcgaacgtaaagaaagaatggttggaagcgcagatactgcgcgagttcggacatatctgcggggatctgaatcgtctccggaaagaggagaaggctcttacaaaagaaggtctgattaagtccggtagaattcgacacgagaaggacgatcgtaagaacatttcggacgcaagagattatattttaggctggaacaatacggagaaaatcgccgcgttggaatccgaatttgcccttctcgggcagaacattgatcggctgaatgctgcaatcgacctagtcagagaagaggaaaacaaaaacaaaaacaaacgggacgacctgcttctctttctacgtttcgaacaattttcacaaatcgacgacgaaagtttgaaaggtccgcttcaggatacggaaagacaaatccgggaattggaattgcgttccgaagaatacgggaagttgaaggaacaatacgaactcgcaaaagctcgcctaacggatgttcaatggagacaacgggaaaccgccaaggaattcaatgttttagaggataggcttttcactcttcggaaggacatggaagatctacagcagagggtccgaaaagtcgaccgggaaacgtcgatttcactggagccgattctcaacgaacgactgcgggaaacgatcctaaccctggagtcgatcgcggagacggaacggaatttttcggatcgtttggttgtagagcgcgatcaatatttggagaaacgagattcgatcggagaagaattgaacaaaggaatggatcgttatgtgaaacgattccgagaggaggcggatcgggaagaattgtccgtttcggtttccaacgcggaagggtttgcgaaattgaccgaaaggattcggcaggatcgattgcccgagtttcaggaaaaatttcgaacgatgatgtccgacaaagtcgcaaagcagattttggacttcaaggcggaattggacgacgacgtctcggaaatcaaggaaaggatcgacgaactgaacgattcgttaaaggatctggattattctaaaggaaaatcttatattcaaattcgatattttgataccaaggatcgggagattgtgggcgattccggctttaaggaaatgttacgcggaagcattccggatttgggagacagttctcacaacgaggaaaaattcgctaaaatcagagagttgttgaaaaagttaaagggagagggcggtagcgatcgttggtccagactcgtaacggatcccaggaactggctggatttccaagcggcggaattccttagggataacaaccaaattcttcaggtttacgattcgtccgcgggtaagtcgggaggacaaacggtaaaactcgcttacacgattctcgcttcggcgatcgcttatcaattcaaaattcgtgaacggaattcgtttcgttttgtggtgatcgatgaaatgttcaacaatctggacggagagaattcaagatatgcgttgaacctctttcgtcaattgggtttacaattgcttgtcgtaactccgatggataagattacgatcgtcgaaccttatgtgagaagcgttcattttgtgaagaacaattcggaaggaaacgattccagagtgtatccgatttcgaaggaaaatgtatcgtccgggaaggatgaaaattcggaaaggaaagtgggaaatttatag

SEQ ID NO: 42881 - DNA, 1179 bp, Leptospira santarosai str. HAI134
atgatttctccggaaattttacgcaagagatcgctggcatactatcataacgaactcttacgttctatcgtcctgggaggtgttttatttccttgggagatttcgatcggtaaagttcttccggaagagatcttaaaaaatccgtctttattacgagaattacgggccgaatcgaaagaaaacaaaggtttcggatttagaatcgtctttcgttcgaaagagacccggaaatacggaatacaaacgattcctacgaaaatcgtttttgataccgaagacgattttttgcgttttacaaaaaagaaagacgaattcctctcctatagcaccgattgtacgttgattctttccgttcttcccgagctgaaagattggattttaaaaaatacgttatccgtaatcgaagagtccggtaaatgggaaagtattctttcggtctgttcctattttttagaatataggaatcccggattgtatatccgagaactaccgattcgaattcctacgaaattcatcgaggaaaataaaaaggttttgagaagtcttttggattttctattgcctgagatcgcggatgcgaaggatttcgaaactcgttacggattaaaaaaagcggaacctttggttcgatttcgaattttggatctcgaaattgcaaagtcttccaccggaggtttaacggatttgagcattcccgtccgggattttagaaggttggaactctccggttgtggaagggtttttatcttagaaaataaaacgaatttcgcgaacctattcaattttttaagttttccgcaactgaagggaacgatctccattttcggtcagggtttcggattaaacgttttaaaggattgtagctggttggagaaaatggaaattttttattggggagatctggacgttcagggtttcgaaatcctgtcgcaactacgggaacaatatcctcaaagccgttcctttttaatggacctgaagacatttgttcggtttcgagactttgcggtagacggtatttcttcttctaaatcttccgaaccgaaatttctcactccatcggagcgcgaaacttggaagtatttaagttctttagattcgaaaaatcggttggaacaggagaaaatccctcacgaatacgtgcaagaagttctgtccggtttgggtggatcgcagtaa

SEQ ID NO: 42882 - DNA, 852 bp, Leptospira interrogans serovar Bataviae str. HAI135
gtggaaggtaattttacggaaataacaaaattcattcacaaaaagtatttagaagtcgttcaaaaaggggaaatattacaatttgctctcgacggtgacgaggaattgctccaatcagaacaaggtaaaagttttcaagctttctgggactttctcaggtccgaacaaagccaagaaaattttgaaagtatattagattctctttattcattaaaagacatccttgtcttggacgacagaaagttttttcgaaatttcaaacggaatctaagagaagccggatccaggataaacactgttgtttccagaatgtcggaacaactcaagaaaagtcttgtagagcgtacacttcgcgacaatcgaaggtctaaagcaattatttcggaaatcaaacatcttgttttggaaagaaagttcgatctttcggaagaaaacttttattcaatggaagaaatattcgttcatcttccgatggacaggcccctttggaaaggggattctgcggatactccaagatccattcaaatatccgggcctgacgacgaaatgatttctctagattttttagactcgattcgaggaatcaattttgaaatatacgaacaacgaattcaaacattgcttcgtagttttccagaagtttctctagaaaaagttttggaggagtttccagagaataacgggtttgaaagtatcgtagcatatgtttttatagctagcaagggggaatatcattctttggacgattcagaatcttttcttttttatcccgcgttcaatttcacacaaaaagaaactcagagtgtctatcgtgttcccaaagctacttatagagtgggtaaggatggataa

SEQ ID NO: 42883 - DNA, 564 bp, Leptospira interrogans serovar Bataviae str. HAI135; identical to SEQ ID NO: 42851

SEQ ID NO: 42884 - DNA, 849 bp, Leptospira interrogans serovar Bataviae str. HAI135
atgacggatttattttcttccggcgagattactgcaaatacaggatatagattaaagtctcttgaaattctaaattgggggaccttcaacggtaaaatctggaaattgaattcgcaaggagaaacttttcttttaacgggagcaaacggatccggaaaatcgactttggtggatgcaatccttaccttactggttccctctactaaaagaaattataatttagcctcgggcttggagagtaaaaaacgggatagatcagaaaaatcctatgtggaaggacactatggccgagcttcctcaggcagcgagggaatccttaaaatccgaggaaaacaggaagaatgttattccgttctttcagccgttttcaacgctaaaggaaaatttcctattatcagaattgctcaaattttttggtttgaatccagcgacttaaaaagaatttatctcatttccgacgaaagcttggatttcgaaaaagatttggttttaagaaatagaaccatcaaagaactccgatctgatctaaaaaattcgggcgccaggctttatgataatttcaaggcttacggggttgactttagaaagatggtcggtctgggatctgagaaggcgattgatctctttaatcaaattgtagctataaaatcattaggtgttttgaatgaatttgttcgagaacatatgctcgaagcgaaagacaaaagatttagaatcgaagaattggacaggaattttttcgatttgaatgaaacatatgaaacgattctaagtgccagagaacaattacgactcctggagcctatagaaaaaaagcattcgaatacagggattggaactctaaagtag

SEQ ID NO: 42885 - DNA, 1452 bp, Leptospira santarosai str. HAI821
atggactataaacttttgcaaagattgtttcgttcttccgcaatccgtcttctgcgaaaagacaacgccccctttatcatctactttttggaaaaatattttagaagttctgcacgtactttcgttccgttcgaggagctgaaaattctacttcgttacgaattggaaaacttaaacgatcaggaagagatctccttacaaagaagcgcggacgtttatctgggagaatggattggagaaaattttctgacccggaggatacgatccgcggagggaatcgaagagatcatattggaaccctcggtcgaattggaaaaagtattctcctggatggaagacatacgatccttggaagataaggacgtgatcggcacggaatcccgttttttttccgtattaaataaattgaaagagattgtggaagagagcgtttccgatccggaggagaaaattcgacaattggaattcaagcgggacgaattggatcttcaaattcgaaaactcaaggcgggagaacaagtatccaaatttccgagcgaaagaattcggagccaatatgtgtatgcgcgaaaggaagcgttgggattactttcggatttccgacaagtggaaggtaattttatggaaataacgaagatgatccataaaaaatatctggaggtcgttcagaaaggggaaattttacgatttgctttggacgggaacgacgagttacttcgatcggaacagggtcgtagttttcaaaccttttgggattttttacgatccgaacgaagtcaggaacaattcgaaagtatattagattctttgtattcattggaagacgttttggagctggactcgagaaagtttttccggaattttaggagaaatttaagagaagcgggttctcgggtaaacggagttgttacccgtatgtcggaacagctcaaaaaaagtttggtggaacgtacacttcgtgaaaaccgcagatcgaaagaacttatcgcggaaattaagaatttggtcttggagaatccactcgatttctctcagacggatttttattctttggaggaaatggatgtgcgttttccgatggaaaggcctctttggcgcggcgattcggaggagacgtttcgaaccgtccggatcgaaaatacggatgaggatggaaatgtattcgatattctggaatcgatccgaggaatcgatttggaaatgtacgaacaacggatccaaacgttgcttcgtatttctccggaggtttctttggaaaaggttctgcgggaatatccggacgacgtctgctttgaaagtttagtcgcttatgtttggattgcgggtaacggagaatttcattccttggacgattcggaaacctttgtatattccgtttccataatggatcatccttcggaaaaacttgcgtatcgaattcctaagggaacgtatagagtgggccatttatga

SEQ ID NO: 42886 - DNA, 564 bp, Leptospira santarosai str. HAI821; identical to SEQ ID NO: 42590

SEQ ID NO: 42887 - DNA, 3357 bp, Leptospira santarosai str. HAI821
atgactgatttattttcacccggtgaaattgccgccaataccggatatagacttgaattcttggaaattttaaattggggaacttttcatggtaggatttggaaattacgaccggaaggggaaaactttcttttaaccggagcgaacggttccggcaaatcaacgttagtcgacgcgattcttacgctgctcgttccggccgcaaaacgaaattataatctggcttcgggactggaaagtaaaaagagagatcgatcggaacgatcttatgtggaaggtcactacggtagatcctcttccggtagcgaaggaattttgaaaattcgcgggaaacaagaagagtgttattccgttttatcggcggtattcgaagcgaatggaaggttcccgcgaattcggattgcgcagatcttttggttcgaatccggagaattgaaaaagatctaccttttttccgataaagagttggacttcgaaaaagatctggttttgggaaaaagaaccgtaaaggaattgaaagcggatctgaaaaattccggggcaagactttacgatcagttcaaggcgtataacgtggattttaggaaagcggtgggtttggaatcggagaaagcgatcgacctattcaatcaaatcgtagccatcaaatccttaggagtgttgaacgaattcgtccgagaacatatgctcgagtccaaggataaaagatccaggatcgaggaattgaatcgtaatttttccgatctgagcgaaacatacgaggcgattgtaaacgcaaaagaacagttgaagttgttggaaccgatcgaaaaaaaagccgccgagtatagggaatggaatcggaaggcggccgatcttcaggctttgatcgtatatgttccgtattattttgcggaaaaaaattacgagcttcgtcaaatcagagaacaggattatctttttgaattatcgcgtttgaaagacagatccgacgaactatcgactgaaatcgaatccttaaatcaagaggaacggaagttattcaacgcattagaaaacaatgatactcaaaggagaatctccgatcttgtacgaaaacgggaggggattctctccgatctcaaaacgcggggaatcgaaaggaaaaaatattcctcctatctttccaaaatcggtttggaggaagcgtcctccgaagaaacattctatacgaacctgcgcatagccggaggaatgcttacggaaaccgattcgatttgggaagaaatcagggatcgattgggaaagctgacgcttcaaaaaatggaattgcaaaaaaatttcgattcggttcgttccgaattggagtatctgaaaaaaaagcgggataatcttcccagaacccagtcggaaattcgggcaaaaattgcctccggaatcggactttccgaaaaaagatttccctttatttgcgaattgatccgcgtcaaagaatccgaaaaagaatggacgggggctttggaaaggctcttgagaaatttcggcttacggatgttagtcgcggaagaggactacgaggccgtgtcggcttacgtgaattcttcctatctgggagggaagttggttttttcaagaatggttcctttatcgggaccgatcttgcaacccaaagacaaggaagaagttttctacaagttggaattgaaatcggaattgtcgaacgtaaagaaagaatggttggaagcgcagatactgcgcgagttcggacatatctgcggggatctgaatcgtcttcggaaagaggagaaggctcttacaaaagaaggtctgattaagtccggtagaattcgacacgagaaggacgatcgtaagaacatttcggacgcaagagattatattttaggttggaacaatacggagaaaatcgccgcgttggaatccgaatttgcccttctcgggcagaacattgatcggttgaatgctgcaatcgacctgatcagagaagaggaaaacaaaaacaaaaacaaacgggacgacctgcttctctttctacgtttcgaacaattttcacaaatcgacgacgaaagtttgaaaggtccgcttcaggatacggaaagacaaatccgggaattggaattgcgttccgaagaatacgggaagttgaaggaacaatacgaactcgcaaaagctcgcctaacggatgttcaaggaagacaacgggaaaccgccaaggaattcaacgttttagaggataggctttccactcttcggaaggacatggaagatctacagcagagggtccgaaaagtcgaccgggaaacgtcgatttcactggagccgattctcaacgaacgactgcgggaaacgatcctaaccctggagtcgatcgcggagacggaacggaatttttcggatcgtttggttgtagagcgcgatcaatatttggagaaacgagattcgatcggagaagaattgaacaaaggaatggatcgttatgtgaaacgattccgagaggaggcggatcgggaagaattgtccgtttcggtttccaacgcggaagcgtttgcgaaattgaccgaaaggattcggcaggatcgattgcccgaattccaggaaaagtttcgaacgatgatgtccgacaaagtcgcaaagcagattttggacttcaaggcggaattggacgacgacgtctcggaaatcaaggaaaggatcgacgaactgaacgattcgttaaaagatctggattattctaaaggaaaatcttatattcaaattcgatattttgataccaaggatcgggagattgtgggcgattccggctttaaggaaatgttacgcggaagcattccggatttgggagacagttctcacaacgaggaaaaattcgctaaaatcagagagttgttgaaaaagttaaagggagagggcggtagcgatcgttggtccagactcgtaacggatcccaggaactggctggatttccaagcggcggaattccttagggataacaaccaaattcttcaggtttacgattcgtccgcgggtaagtcgggaggacaaacggtaaaactcgcttacacgattctcgcttcggcgatcgcttatcaattcaaaattcgtgaacggaattcgtttcgtttcgtggtgatcgatgaaatgttcaacaatctggacggagagaattcaagatatgcgttgaacctctttcgtcaattgggtttacaattgcttgtcgtaactccgatggataagattacgatcgtcgaaccttatgtgagaagcgttcattttgtgaagaacaattcggaaggaaacgattccagagtgtatccgatttcgaaggaaaatgtatcgtccgggaaggatgaaaattcggaaaggaaagtgggaaatttatag

SEQ ID NO: 42888 - DNA, 1179 bp, Leptospira santarosai str. HAI821
atgatttctccggaaattttacgcaagagatcgctggcatactatcataacgaactcttacgttctatcgtcctaggaggtgttttatttccttgggagatttcgatcggtaaagttcttccggaagagatcttaaaaaatccctctttgttacgagaattacgggccgaatcgaaagaaaacaaaggtttcggatttagaatcgtctttcgttcgaaagagacccggaaatacggaatacaaacgattcctacgaaaatcgtttttgataccgaagacgattttttgcgttttacaaaaaagaaagacgaattcctctcctatagcaccgattgtacgttgattctttccgttcttcccgagctgaaagattggattttaaaaaatacgttatccgtaatcgaagagtccggtaaatgggaaagtattctttcggtctgttcctattttttagaatataggaatcccggattgtatatccgagaactaccgattcgaattcctacgaaattcatcgaggaaaataaaaaggttttgagaagtcttttggattttctattgcctgagatcgcggatgcgaaggatttcgaaactcgttacggattaaaaaaagcggaacctttggttcgatttcgaattttggatctcgaaattgcaaagtcttccaccggaggtttaacggatttgagcattcccgtccgggattttagaaggttggaactctccggttgtggaagggtttttatcttagaaaataaaacgaatttcgcgaacctattcaattttttaagttttccgcaactgaagggaacgatctccattttcggtcagggtttcggattaaacgttttaaagggttgtagctggttggagaaaatggaaattttttattggggagatctggacgttcagggtttcgaaatcctgtcgcaactacgggaacaatatcctcaaagccgttcctttttaatggacctgaagacatttgttcggtttcgagactttgcggtagacggtatttcttcttctaaatcttccgaaccgaaatttctcactccatcggagcgcgaaacttggaagtatttaagttctttagattcgaaaaatcggttggaacaggagaaaatccctcacgaatacgtgcaagaagttctgtccggtttggatggatcgcagtaa

SEQ ID NO: 42889 - DNA, 1452 bp, Leptospira santarosai str. MOR084
atggactataaatttttgcaaagattgcttcgttcttccgcaatccgtcttctgcgaaaagacaacgccccctttatcatctactttttggaaaaatattttagaagttctgcacgtactttcgttccgttcgaggagctgaaaattctacttcgttacgaattggaaaacttaaacgatcaggaagagatctccttacaaagaagcgcggacgtttatctgggagaatggattggagaaaattttctgacccggaggatacgatccgcggagggaatcgaagagatcatattggaaccctcggtcgaattggaaaaagtattctcctggatggaagacatacgatccttggaagataaggacgtgatcggcacggaatcccgttttttttccgtattaaataaattgaaagagattgtggaagagagcgtttccgatccggaggagaaaattcgacaattggaatccaagcgggacgaattggatcttcaaattcgaaaactcaaggcgggagaacaagtatccaaatttccgagcgaaagaattcggagccaatatgtgtatgcgcgaaaggaagcgttggggttactttcggatttccgacaagtggaaggtaattttatggaaataacgaagatgattcataaaaaatatctggaggtcgttcagaaaggggaaattttacgatttgctttggacgggaacgacgagttacttcgatcggaacagggtcgtagttttcaaaccttttgggattttttacgatccgaacgaagtcaggaacaattcgaaagtatattagattctttgtattcattggaagacgttttggagctggactcgagaaagtttttccggaattttaggagaaatttaagagaagcgggttctcgggtaaacggagttgttacccgtatgtcggaacagctcaaaaaaagtttggtggaacgtacacttcgtgaaaaccgcagatcgaaagaacttatcgcggaaattaagaatttggtcttggagaatccactcgatttttctcagacggatttttattctttggaggaaatggatgtgcgttttccgatggaaaggcctctttggcgcggcgatccggaggagacgtttcgaaccgtccggatcgaaaatacggatgaggatggaaatgtattcgatattctggaatcgatccgaggaatcgatttggaaatgtacgaacaacggatccaaacgttgcttcgtatttctccggaggtttctttggaaaaggttctgcgggaatatccggacgacgtctgctttgaaagtttagtcgcttatgtttggattgcgggtaacggagaatttcattccttggacgattcggaaacctttgtatattccgtttccataatggatcatccttcggaaaaacttgcgtatcgaattcctaagggaacgtatagagtgggtcatttatga

SEQ ID NO: 42890 - DNA, 564 bp, Leptospira santarosai str. MOR084
atgaataaaccgcatatctacgcagcttctattctcaggttgttgaaaggatcgatcaacagcgagtccgatgcaaagatttggcagaatcttttggacaacgaaaaaccggtgcgggaacactttgaaaaactgggtatttttttgcacttggatcgggaagacggttatgcgtttctacgacagacttcggacgacgaaagtgcagaatcggatgagaaacttcccgtgatcacccgtaaacttccgcttacgaaagaagagactttgtttctaattctactgagggaatgtatcatagaaatcgaagaaaaagatccttccggttccatcctttttagaaaggaagagctatcggataaagtgagtccttttttctccgacctctccgatgaaatcgatcggcaaaaaagattcgaaaaattacttcgcaaatccgaagaactaggctttgtcaaacagatcgagccggaaacgattcggatcgaaaaactcttaaaggcgaaattgaccgtatccgagttagagggtttacgcggtaagtttcgactaggaacggaatag

SEQ ID NO: 42891 - DNA, 3357 bp, Leptospira santarosai str. MOR084
atgactgatttattttcacccggtgaaattgccgccaataccggatataggcttgaattcttggaaattttaaattggggaacttttcacggtaggatttggaaattacgaccggaaggggaaaactttcttttaaccggagcgaacggttccggcaaatcaacgttagtcgacgcgattcttacgctgctcgttccggccgcaaaacgaaattataatctggcttcgggactggaaagtaaaaagagagatcgatcggaacgatcttatgtggaaggtcactacggtagatcctcttccggtagcgaaggaattttgaaaattcgcgggaaacaagaagagtgttattccgttttatcggcggtattcgaagcgaatggaaggttcccgcgaattcggattgcgcagatcttttggttcgaatccggagaattgaaaaaaatctaccttttttccgataaagagttggacttcgaaaaagatctggttttgggaaaaagaaccgtaaaggaattgaaagcggatctgaaaaattccggggcaagactttacgatcagttcaaggcgtataacgtggattttaggaaagcggtgggtttggaatcggagaaagcgatcgacctattcaatcaaatcgtagccatcaaatccttaggagtgttgaacgaattcgtccgagaacatatgctcgagtccaaggataaaagatccaggatcgaggaattgaatcgtaatttttccgatctgagcgaaacatacgaggcgattgtaaatgcaaaagaacagttgaagttgttggaaccgatcgaaaaaaaagccgccgagtatagggaatggaatcggaaggcggccgatcttcaggctttgatcgtatatgttccgtattattttgcggaaaaaaattacgagcttcgtcaaatcagagaacaggattatctttttgaattatcgcgtttgaaagacagatccgacgaactatcgactgaaatcgaatccttaaatcaagaggaacggaagttattcaacgcattagaaaacaatgatactcaaaggagaatctccgatcttgtacgaaaacgggaggggattctctccgatctcaaaacgcggggaatcgaaaggaaaaaatattcctcctatctttccaaaatcggtttggaggaagcgtcctccgaagaaacattctatacgaacctgcgcatagccggaggaatgcttacggaaaccgattcgatttgggaagaaatcagggatcgattgggaaagctgacgcttcaaaaaatggaattgcaaaaaaatttcgattcggttcgttccgaattggagtatctgaaaaaaaagcgggataatcttcccagaacccagtcggaaattcgggcaaaaattgcctccggaatcggactttccgaaaaaagatttccctttatttgcgaattgatccgcgtcaaagaatccgaaaaagaatggacgggggctttggaaaggcttttgagaaatttcggcttacggatgttagtcgcggaagaggactacgaggccgtgtcggcttacgtgaattcttcctatctgggagggaagttggttttttcaagaatggttcctttatcgggaccgatcttgcaacccaaagacaaggaagaagttttctacaagttggaattgaaatcggaattgtcgaacgtaaagaaagaatggttggaagcgcagatactgcgcgagttcggacatatctgcggggatctgaatcgtctccggaaagaggagaaggctcttacaaaagaaggtctgattaagtccggtagaattcgacacgagaaggacgatcgtaagaacatttcggacgcaagagattatattttaggctggaacaatacggagaaaatcgccgcgttggaatccgaatttgcccttctcgggcagaacatttatcggctgaatgctgcaatcgacctgatcagagaagaggaaaacaaaaacaaaaataaacgggacgacctgcttctctttctacgtttcgaacaattttcacaaatcgacgacgaaagtttgaaaggtccgcttcaggatacggaaagacaaatccgggaattggaattgcgttccgaagaatacgggaagttgaaggaacaatacgaactcgcaaaagctcgcctaacggatgttcaagggagacaacgggaaaccgccaaggaattcaatgttttagaggataggcttttcactcttcggaaggacatggaagatctacagcagagggtccgaaaagtcgaccgggaaacgtcgatttcactggagccgattctcaacgaacgactgcgggaaacgatcctaaccctggagtcgatcgcggagacggaacggaatttttcggatcgtttggttgtagagcgcgatcaatatttggagaaacgagattcgatcggagaagaattgaacaaaggaatggatcgttatgtgaaacgattccgagaggaggcggatcgggaagaattgtccgtttcggtttccaacgcggaagggtttgcgaaattgaccgaaaggattcggcaggatcgattgcccgaatttcaggaaaaatttcgaacgatgatgtccgacaaagtcgcaaaacagattttggacttcaaggcggaattggacgacgacgtctcggaaatcaaggaaaggatcgacgaactgaacgattcgttaaaagatctggattattctaaaggaaaatcttatattcaaattcgatattttgataccaaggatcgggagattgtgggcgattccggctttaaggaaatgttacgcggaagcattccggatttgggagacagttctcacaacgaggaaaaattcgctaaaatcagagagttgttgaaaaagttaaagggagagggcggtagcgatcgttggtccagactcgtaacggatcccaggaactggctggatttccaagcggcggaattccttagggataacaaccaaattcttcaggtttacgattcgtccgcgggtaagtcgggaggacaaacggtaaaactcgcttacacgattctcgcttcggcgatcgcttatcaattcaaaattcgtgaacggaattcgtttcgtttcgtggtgatcgatgaaatgttcaacaatctggacggagagaattcaagatatgcgttgaacctctttcgtcaattgggtttacaattgcttgtcgtaactccgatggataagattacgatcgtcgaaccttatgtgagaagcgttcattttgtgaagaacaattcggaaggaaacgattccagagtgtatccgatttcgaaggaaaatgtatcgtccgggaaggatgaaaattcggaaaggaaagtgggaaatttatag

SEQ ID NO: 42892 - DNA, 1179 bp, Leptospira santarosai str. MOR084
atgatttctccggaaattttacgcaagagatcgctggcatactatcataacgaactcttacgttctatcgtcctgggaggtgttttatttccttgggagatttcgatcggtaaagttcttccggaagagatcttaaaaaatccctctttgttacgagaattacgggccgaatcgaaagaaaacaaaggtttcggatttagaatcgtctttcgttcgaaagagacccggaaatacggaatacaaacgattcctacgaaaatcgtttttgataccgaagacgattttttgcgttttacaaaaaagaaagacgaattcctctcctatagcaccgattgtacgttgattctttccgttcttcccgagctgaaagattggattttaaaaaatacgttatccgtaatcgaagagtccggtaaatgggaaagtattctttcggtctgttcctattttttagaatataggaatcccggattgtatatccgagaactaccgattcgaattcctacgaaattcatcgaggaaaataaaaaggttttgagaagtcttttggattttctattgcctgagatcgcggatgcgaaggatttcgaaactcgttacggattaaaaaaagcggaacctttggttcgatttcgaattttggatctcgaaattgcaaagtcttccaccggaggtttaacggatttgagcattcccgtccgggattttagaaagttggaactctccggttgtggaagggtttttatcttggaaaataaaacgaatttcgcgaacctattcaattttttaagttttccgcaactgaagggaacgatctccattttcggtcagggtttcggattaaacgttttaaaggattgtaactggttggagaaaatggaaattttttattggggagatctggacgttcagggtttcgaaatcctgtcgcaactgcgggaacaatatcctcaaagccgttcctttttaatggacctgaagacatttgttcggtttcgagactttgcggtagacggtatttcttcttctaaatcttccgaaccgaaatttctcactccaccggagcgtgaaacttggaagtatttaagttctttagattcgaaaaatcggttggaacaggagaaaattcctcacgaatacgtgcaagaagttctgtccggtttgggtggatcgcagtaa

SEQ ID NO: 42893 - DNA, 1443 bp, Leptospira noguchii serovar Autumnalis str. ZUN142
ttgcaaagattatttcgttcttcttcaattcgtcttttaaaaaaagacaatgctccttttattatctattttttagaaaaatattttagaggttctgcgagaatttttgttccgtttgaggaactgaaaatactactccatcatgaattggaaaactttcgagaactcgaggaaacttttctctcaagaacagcggaagtttatataggagagtgggtcagcgaaaattttctatctcgccggattcgttctttggaaggttccgaagaaataattttggaaccgagtagcgagttagaaaaagtattttcttggatggatgatttacgttctttagaaaataaagaatcaatcggaacagaaactcgatttttttctgtgttaaataaactgaaggaaattgttgaagaaagtgtttccgatccaaaagaaaaaattagacaacttgaatctaaaagagacgaattagacgatcaaattaaaaagctaaccgaagggaaagagataatcacttttgcgagtgagagaattcgaggccaatacttatatgcaagaaaggaagcaataggtcttctctccgacttccgtcaggtggaaggtaattttacggaaataacaaaattcattcacaaaaagtatttagaagtcgttcaaaaaggggaaatattacaatttgctctcgacggtgacgaggaattgctccaatcagaacaaggtaaaagttttcaagctttctgggactttctcaggtccgaacaaagccaagaaaattttgaaagtatattagattctctttattcattaaaagacatccttgtcttggaggacagaaagttttttcgaaatttcaaacggaatctaagagaagccggatccaggataaacactgttgtttccagaatgtcggaacaactcaagaaaagtcttgtagagcgtacacttcgcgacaatcgaaggtctaaagcaattatttcggaaatcaaacatcttgttttggaaagaaagttcgatctttcggaagaaaacttttattcaatggaagaaatattcgttcatcttccgatggacaggcccctttggaaaggggattctgcggatactccaagatccattcaaatatccgggcctgacgacgaaataatttctctagattttttagactcgattcgaggaatcaattttgaaatatacgaacaacgaattcaaacattgcttcgtagttttccagaagtttctctagaaaaagttttggaggagtttccagagaataacgggtttgaaagtatcgtagcatatgtttttatagctagcaagggggaatatcattctttggacgattcagaatcttttcttttttatcccgcgttcaatttcacacaaaaagaaactcagagtgtctatcgtgttcccaaagctacttatagagtgggtaaggatggataa

SEQ ID NO: 42894 - DNA, 564 bp, Leptospira noguchii serovar Autumnalis str. ZUN142
atggataaacttctttcttattctatttccatattaaggcttttgaaaggttcaatcgggatcgattcggaccctaaggtttgggaaaatctagttacctacgaaaaacaagttcgggaatactttgaaaaaatcggaatatttttacatttagatcgagaagacggttatgcttttttgcgtcaaacttcggacgaagatgatgttaagttcgatataaaacttccggttttaacgaggaagctacctttgacaaaggaggaaaccttgtttcttattttactcagagaatttattatcgagatggaagaaaaagatttatccggatcgattattctgagaaaagaagaattattcgaccgtattcatccattttttcctgactctttcgacgaagtcgatactcaaaaaaagtttgaaagattacttcgtaaatccgaggacctgggttttataaaatacatcgattctgaaaccttacgaatagaaaaaattttaaaagcgaagatcacagtatccgatttggaacgactacgaattaagtttaaaccggagaatgtatga

SEQ ID NO: 42895 - DNA, 3357 bp, Leptospira noguchii serovar Autumnalis str. ZUN142
atgacggatttattttcttccggcgagattactgcaaatacaggatatagattaaagtatcttgaaattctaaattgggggaccttcaacggtaaaatctggaaattgaattcgcaaggagaaacttttcttttaacgggagcaaacggatccggaaaatcgactttggtggatgcaatccttaccttactggttccctctactaaaagaaattataatttagcctcgggcttggagagtaaaaaacgggatagatcagaaaaatcctatgtggaaggacactatggccgagcttcctcaggcagcgagggaatccttaaaatccgaggaaaacaggaagaatgttattccgttctttcagccgttttcaacgctaaaggaaaatttcctattatcagaattgctcaaattttttggtttgaatccagcgacttaaaaagaatttatctcatttccgacgatagcttggatttcgaaaaagatttggttttaagaaatagaaccatcaaggaactccgatctgatctaaaaaattcgggcgccaggctttatgataatttcaaggcttacggggttgactttagaaagatggtcggtctgggatctgagaaggcgattgatctctttaatcaaattgtagctataaaatcattaggtgttttgaatgaatttgttcgagaacatatgctcgaagcgaaagacaaaagatttagaatcgaagaattggacaggaattttttcgatttgaatgaaacatatgaaacgattctaagtgccagagaacaattacgactcctggagcctatagaaaaaaaagcattcgaatacagggattggaactctaaagtagaaggggttcaggaacttattttgtttgcacccgaatactttacgcaaaaaaaatacgaactttgtaaaaagaaagaacaggattatactctcgatttgttccgagttcaggaccacttaaaagaattaaattcgttaactgaatccttaaaaaaagaagaacgagaattgtattattcattagaaaataatgatactcgaaagcgaatttccgatttgaaaagaaaatttgaggaaattcagacaaatctaaataaacgtcgctccgaaaggaaaaaatattctgagtatcttcttaaacttgatttagagaacgttttaatagaggattctttttattcgaattttcgtaaagccggcgaaaaacttcaaaaatccgattcgacccgtgattcaattagagatcgtcttacggatttaacagttaaacggaaggaatctaaagttgaatttgattcggtttattccgaattggaacatctcaaaaaaagcagggataatcttcctagaatcgtgtcctccatgagggaaaaaatctctcaaggcctgggagtttccgaaaaaaaatttccatttgtctgtgaacttatccgtgtaaaggattccgaaaaagaatggaccggcgcgttggaaagattattacataatttcggcttacgtatgttagttgacgaagaggattacaaagcgctttcctcttatgtgaattcttctcatctaggtggaaagatcgttttttccagaatgttgactcagggaggtcctattttacagccaaaggataaggacgaagttttttacaaactcgaaattaaaccttccttatctaaatttcaaaaagaatggctggaaacacagattctgaaggaatttggacatatctgcggggatctacaacgtttgcaaaaagaagaaaaagctcttactaaggaaggtctgatcaagtccggaaaaattcgtcacgaaaaggatgatcgtaaaaatataaacgacgcaagagattatattctaggctggaacaatcgggaaaaaatttctgcgcttgaatccgaatttatgagattgggcaaggtgatcgataagattgaatcggaaattaaaaaagttgaagaagaacaaaaacaaaacgacctatttagagacgacctcaaatcctttctacgcttcgaacagttctctcaaattgacgaccaaagtttggaagaacctcttgaacaaacacgaaaagaaatccaagatttggaagtcctttccgaggaatacggaaaattaaaagaacaatatgaatctgcaaaagttcgccttagcgaggcagagggcaaggaaaaagaaaccaccaaggaattgaccctcttagaagagcggttctcgaatttaaaaaaagaaatggaaaccttaaattccagaatcaaagagttcgaccctaacagacggactcgtttggaaccgatcttaaatgagcgtctcggacaagtaatctttaacttagattcgatcttagaaaaagagcgaaagtttttggaagttcttattaaagaacgggatgattttatagagaaaagagattctatcggtgaagaattaaacaagggtatggatcgttatgtaaaaaaatttagggaagaagcggatcgagaagaattatcggtttctattttaaatgcagaagcatttgcagaattgacggaacggattcgtaaagataggctgcctgagttccaagataaattccgaaatatgatgtcagataaggtagctaaacaaattctagagtttaaggcggaacttgaggatgatgtttcagaaatcaaggaccggatagatgaactaaatgaatctttacgttatcttgactattctaaaggtaaatcttatattcaaatcagatacttcgaaacaaaagatcgggaaattataggaagtacaggttttaaagaattattgcggaatagtattccggatatgggagatagttctaataacgaagaaaaattttcaaggattcgagaattactctggaaattgaaaggagagaatggattcgatcgttggtccaggctcgtaacagattctagaaattggttggacttccaggcggcagaatttcaaagagacacagacacgatcattcaggtttatgattcttcggcaggtaagtcgggtggtcaaaccgtaaaacttgcctatacaatccttgcctctgcgattgcttatcagtttaaaatccgcgaactaaattcgtttcgttttgtagtgatcgacgaaatgtttaataatttggataacgaaaattctagatacgcgatggatcttttccgtcaattaggtttgcaattactcgttgtgaccccaatggataaaattacggtagtggaaccttacgtccagagtgttcattttgtaaaaaacaactcagatggtaatgattccagagtttatctaattacaaaggaaaaattaaattcggagaaaatcgaaaatacagatcggaaagtgggaaatttatga

SEQ ID NO: 42896 - DNA, 1170 bp, Leptospira noguchii serovar Autumnalis str. ZUN142
atgatttctctggaagaaatccgtaagaaatgtttattatattatcataaagttttaaatcgagcagtcttaggtgagaagtcttttccttgggaaatttccacaggcaaaatagatcccgaagagataatacacaacccgtctttactagaaaaaataaaaaaggaatctaaggaaaaaaaaggatttgggtttctgctcgtttcttttcaaaaagaaacgagaaaatttggaacgcaaactctaccttcgaaaattcgattcgaagacgaaattgactttttacgttttttgcataaagaacaagaattttctttctacaaatcagattgtgatatgattttatttaaaattcccgcacttatggaatggatattaaaaaatccttttctagtcattcaagaatctgggaattgggaagacctactttcggtgtgttcctactttttaaaaaatccgagacctggattatacatccgtgaattgccgatctctgttcctacaaaatttatcgaagaaaataaaaaagtactcaggaatcttttagattttttggttccggaaaatattgattacgaaggaaaagatttcgaatctcgattcggattgaaaaaaccggaagccttggttcgtttccgtatattggatccgatcattgccgagaaatctagcggcggtttattcgatataagtgttcccgttgatgaattccgtaatttgcatctatttggttgtaaacgaatttttattctggagaataaaatcaatttttctaatatcgatcattttctaacttttccgaaactttcgggatcaatcgccattttcggacagggatacggtttaggtattttgaaagattgcgtttggctgaataaaatggaaatcttatattggggggatatagatgtccaggggtttgagattctttctttattaagggagcaatacccccaaaccaaatcctttttgatggataaagaaacttttttaaagtttcagaattttgccgtcaacggtaaatattcaaaattttctaaattagattatttgacagaatctgaaaaggagacttgggaatatctacggtctctgggttcgaaaaatcgtttggaacaagagcgtattcctcaagaatatattgaaaaaactttacattcgcagttttga

SEQ ID NO: 42897 - DNA, 1452 bp, Leptospira santarosai str. ZUN179
atggactataaacttttgcaaagattgtttcgttcttccgcaatccgtcttctgcgaaaagacaacgccccctttatcatctactttttggaaaaatattttagaagttctgcacgtactttcgttccgttcgaggagctgaaaattctacttcgttacgaattggaaaacttaaacgatcaggaagagatctccttacaaagaagcgcggacgtttatctgggagaatggattggagaaaattttctgacccggaggatacgatccgcggagggaatcgaagagatcatattggaaccctcggtcgaattggaaaaagtattctcctggatggaagacatacgatccttggaagataaggacgtgatcggcacggaatcccgttttttttccgtattaaataaattgaaagagattgtggaagagagcgtttccgatccggaggagaaaattcgacaattggaattcaagcgggacgaattggatcttcaaattcgaaaactcaaggcgggagaacaagtatccaaatttccgagcgaaagaattcggagccaatatgtgtatgcgcgaaaggaagcgttgggattactttcggatttccgacaagtggaaggtaattttatggaaataacgaagatgatccataaaaaatatctggaggtcgttcagaaaggggaaattttacgatttgctttggacgggaacgacgagttacttcgatcggaacagggtcgtagttttcaaaccttttgggattttttacgatccgaacgaagtcaggaacaattcgaaagtatattagattctttgtattcattggaagacgttttggagctggactcgagaaagtttttccggaattttaggagaaatttaagagaagcgggttctcgggtaaacggagttgttacccgtatgtcggaacagctcaaaaaaagtttggtggaacgtacacttcgtgaaaaccgcagatcgaaagaacttatcgcggaaattaagaatttggtcttggagaatccactcgatttctctcagacggatttttattctttggaggaaatggatgtgcgttttccgatggaaaggcctctttggcgcggcgatccggaggagacgtttcgaaccgtccggatcgaaaatacggatgaggatggaaatgtattcgatattctggaatcgatccgaggaatcgatttggaaatgtacgaacaacggatccaaacgttgcttcgtatttctccggaggtttctttggaaaaggttctgcgggaatatccggacgacgtctgctttgaaagtttagtcgcttatgtttggattgcgggtaacgcagaatttcattccttggacgattcggaaacctttgtatattccgtttccataatggatcatccttcggaaaaacttgcgtatcgaattcctaagggaacgtatagagtgggccatttatga

SEQ ID NO: 42898 - DNA, 564 bp, Leptospira santarosai str. ZUN179
atgaataaaccgtatgactatgcaccttccattcttagattgttgaaaggatcgatcaacagcgagtccgatgcaaagatttggaagaatcttttggacaacgaaaaatcggtgcgggaacactttgaaaaactgggtatttttttgcacttggatcgggaagacggttatgcgtttctacgacagacttcggacgacgaaagtgcagaatcggatgagaaacttcccgtgatcacccgtaaacttccgcttacgaaagaagagactttgtttctaattctactgagggaatgtatcatagaaatcgaagaaaaagatccttccggttccatcctttttagaaaggaagagctatcggataaagtgagtccttttttctccgacctttccgatgaaatcgatcggcaaaaaagattcgaaaaattacttcgcaaatccgaagaactaggctttgtcaaacagatcgagccggaaacgattcggattgaaagactcttaaaggcgaaattgaccgtatccgagttagagggtttacgcggtaagtttcgactaggaacggaataa

SEQ ID NO: 42899 - DNA, 3357 bp, Leptospira santarosai str. ZUN179
atgactgatttattttcacccggtgaaattgccgccaataccggatatagacttgaattcttggaaattttaaattggggaacttttcacggtaggatttggaaattacgaccggaaggggaaaactttcttttaaccggagcgaacggttccggcaaatcaacgttagtcgacgcgattcttacgctgctcgttccggccgcaaaacgaaattataatctggcttcgggactggaaagtaaaaagagggatcgatcggaacgatcttatgtggaaggtcactacggtagatcctcttccggtagcgaaggaattttgaaaattcgcgggaaacaagaagagtgttattccgttttatcggcggtattcgaagcgaatggaaggttcccgcgaattcggattgcgcagatcttttggttcgaatccggagaattgaaaaagatctaccttttttccgataaagagttggacttcgaaaaagatctggttttgggaaaaagaaccgtaaaggaattgaaagcggatctgaaaaattccggggcaagactttacgatcagttcaaggcgtataacgtggattttaggaaagcggtgggtttggaatcggagaaagcgatcgacctattcaatcaaatcgtagccatcaaatccttaggagtgttgaacgaattcgtccgagaacatatgctcgagtccaaggataaaagatccaggatcgaggaattgaatcgtaatttttccgatctgagcgaaacatacgaggcgattgtaaacgcaaaagaacagttgaagttattggaaccgatcgaaaaaaaagccgccgagtatagggaatggaatcggaaggcggccgatcttcaggctttgatcgtatatgttccgtattattttgcggaaaaaaattacgagcttcgtcaaatcagagaacaggattatctttttgaattatcgcgtttgaaagacagatccaacgaactatcgactgaaatcgaatccttaaatcaagaggaacggaagttattcaacgcattagaaaacaatgatactcaaaggagaatctccgatcttgtacgaaaacgggaggggattctctccgatctcaaaacgcggggaatcgaaaggaaaaaatattcctcctatctttccaaaatcggtttggaggaagcgtcctccgaagaaacattctatacgaacctgcgcatagccggaggaatgcttacggaaaccgattcgatttgggaagaaatcagggatcgattgggaaagctgacgcttcaaaaaatggaattgcaaaaaaatttcgattcggttcgttccgaattggagtatctgaaaaaaaagcgggataatcttcccagaacccagtcggaaattcgggcaaaaattgcctccggaatcggactttccgaaaaaagatttccctttatttgcgaattgatccgcgtcaaagaatccgaaaaagaatggaccggggctttggaaaggctcttgagaaatttcggcttacggatgttagtcgcggaagaggactacgaggccgtgtcggcttacgtgaattcttcctatctgggagggaagttggttttttcaagaatggttcctttatcgggaccgatcttgcaacccaaagacaaggaagaagttttctacaaattggaattgaaatcggaattgtcgaacgtaaagaaagaatggttggaagcgcagatactgcgcgagttcggacatatctgcggggatctgaatcgtctccggaaagaggagaaggctcttacaaaagaaggtctgattaagtccggtagaattcgacacgagaaggacgatcgtaagaacatttcggacgcaagagattatattttaggctggaacaatacggagaaaatcgccgcgttggaatccgaatttgcccttctcgggcagaacattgatcggctgaatgctgcaatcgacctgatcagagaagaggaaaacaaaaacaaaaacaaacgggacgacctgcttctctttctacgtttcgaacaattttcacaaatcgacgacgaaagtttaaaaggtccgcttcaggatacggaaagacaaatccgggaattggaattgcgttccgaagaatacgggaagttgaaggaacaatacgaactcgcaaaagctcgcctaacggatgttcaatggagacaacgggaaaccgccaaggaattcaatgttttagaggataggcttttcactcttcggaaggacatggaagatctacagcagagggtccgaaaagtcgaccgggaaacgtcgatttcactggagccgattctcaacgaacgactgcgggaaacgatcctaaccctggagtcgatcgcggagacggaacggaatttttcggatcgtttggttgtagagcgcgatcaatatttggagaaacgagattcgatcggagaagaattgaacaaaggaatggatcgttatgtgaaacgattccgagaggaggcggatcgggaagaattgtccgtttcggtttccaacgcggaagggtttgcgaaattgaccgaaaggattcggcaggatcgattgcccgagtttcaggaaaaatttcgaacgatgatgtccgacaaagtcgcaaagcagattttggacttcaaggcggaattggacgacgacgtctcggaaatcaaggaaaggatcgacgaactgaacgattcgttaaaggatctggattattctaaaggaaaatcttatattcaaattcgatattttgataccaaggatcgggagattgtgggcgattccggctttaaggaaatgttacgcggaagcattccggatttgggagacagttctcacaacgaggaaaaattcgctaaaatcagagagttgttgaaaaagttaaagggagagggcggtagcgatcgttggtccagactcgtaacggatcccaggaactggctggatttccaagcggcggaattccttagggataacaaccaaattcttcaggtttacgattcgtccgcgggtaagtcgggaggacaaacggtaaaactcgcttacacgattctcgcttcggcgatcgcttatcaattcaaaattcgtgaacggaattcgtttcgttttgtggtgatcgatgaaatgttcaacaatctggacggagagaattcaagatatgcgttgaacctctttcgtcaattgggtttacaattgcttgtcgtaactccgatggataagattacgattgtcgaaccttatgtgagaagcgttcattttgtgaagaacaattcggaaggaaacgattccagagtgtatccgatttcgaaggaaaatgtatcgtccgggaaggatgaaaattcggaaaggaaagtgggaaatttatag

SEQ ID NO: 42900 - DNA, 1179 bp, Leptospira santarosai str. ZUN179
atgatttctccggaaattttacgcaagagatcgctggcatactatcataacgaactcttacgttctatcgtcctaggaggtgttttatttccttgggagatttcgatcggtaaagttcttccggaagagatcttaaaaaatccgtctttattacgagaattacgggccgaatcgaaagaaaacaaaggtttcggatttagaatcgtctttcgttcgaaagagacccggaaatacggaatacaaacgattcctacgaaaatcgtttttgataccgaagacgattttttgcgttttacaaaaaagaaagacgaattcctctcctatagcaccgattgtacgttgattctttccgttcttcccgagctgaaagattggattttaaaaaatacgttatccgtaatcgaagagtccggtaaatgggaaagtattctttcggtctgttcctattttttagaatataggaatcccggattgtatatccgagaactaccgattcgaattcctacgaaattcatcgaggaaaataaaaaggttttgagaagtcttttggattttctattgcctgagatcgcggatgcgaaggatttcgaaactcgttacggattaaaaaaagcagaacctttggttcgatttcgaattttggatctcgaaattgcaaagtcttccaccggaggtttaacggatttgagcattcccgtccgggattttagaaagttggagctctccggttgtggaagggtttttatcttggaaaataaaacgaatttcgcgaacctattcaattttttaagttttccgcaactgaagggaacgatctccattttcggtcagggtttcggattaaacgttttaaaggattgtagctggttggagaaaatggaaattttttattggggagatctggacgttcagggtttcgaaatcctgtcgcaactgcgggaacaatatcctcaaagccgttcctttttaatggacctgaagacatttgttcggtttcgagactttgcggtagacggtatttcttcttctaaatcttccgaaccgaaatttctcactccatcggagcgcgaaacttggaagtatttaagttctttagattcgaaaaatcggttggaacaggagaaaatccctcacgaatacgtgcaagaagttctgtccggtttggatggatcgcagtaa

SEQ ID NO: 42901 - DNA, 1500 bp, Saccharomonospora cyanea NA-134
atggctacacgaggcatagaaggcgcgtaccagggtgcgctccgggcgttccagaacccgatgctcgccctgcttcaccagacgcacgcgccgttcgtggtgacggtgctggcgatggtcttcaccgcggagcggccgagcgtggcggtggcggacgcgcacgcggagatcaacgacgccctcgaccagttgcgggccgcgggctacggggacgaggacaaccagccgttgccggctgggaacgcgcgggacctctgcaggcagtgggtgcaggcgggctggttggtgcggcaggtgtccgacgacgacgtcgaggtgtaccgcctgtccgcgtacggcgtcggtgcgctcgaggtcgcgggccgggtcggcggagtgcgaaccagggtgtcggagtcgcgggtcaggacactgctggaagcgatcgagcggctcgcgcaggacgccgatccggacgtgatggcccggatcgcgcgtctccacgaagagatccagcaacgtcagaaggagctcacccggctcgaacggggcggcacagtcgagacggtcgccgacgagcagctgcttgaggcggccgagaacgtgctgcacctggcgcgggaactgccggcggacttcgcccgcgtggccgagtcgatcaaagccgtccagcgcgacgtcgtcgccgagctgcggcacgacgtgcggccgaccggtgaggtcctccgggagtacctggatcgcggcaagcgaatcctggacgcgaccccggagggccgtgcgttcgcgggggcgttgcggctgatcggtgatccggcgcagatccataacctgtggagtcagctgcgaacagtgctacggcacaggttcaccgatctgctgccggagcagcagcggcgggagctcaccgagatctcgcgccgggtcgagcagggcgtcagtgaggtgctgaccgcgcagcggcaggcatcccatgtgatcaccacccaggtacgcaaccacgatccgatgcgggaccgccaggtcgacgagctgctgaggaacgtgatggccggtctccacgagtgggtccccggttcacgccgcggcgaggccgtcgagccgctccgtcgtctaccggtggccgacgtcgggcacctgcggcagcggatgagtgacctacggccgccgcagccgcccgcgccgttgcgtgagtgggatgagaccgaggacgtgacgaccgcggacacccgggcatggggtggcccccggtacgccgcactgcaggcgcacttggtgacgttcgcgggcgacgcggagaacgtggatgtcgcggcggccttccgcgcggcggacgaggatctccagcggccggtcgacctgctcggtttgctggagatcgcacacgactccgggatgaccgagacagccgaggtcgccatggtcgacacggtccgacccgacgggaccaggcgacggttcgccctcggtggtgtggtggcggcgaacccggcgagcgctgacgaaagcggtgaccgatga

SEQ ID NO: 42902 - DNA, 669 bp, Saccharomonospora cyanea NA-134
atgagtgagctcgatcccggcgacggctggtcggccggctcgaccgccgggttcatcgacccggttccgatggaggacgatccgaccgagttgttccccggggacgcgggcacgctcgacgcggacgtgcggcgggtgttggtccagttgttgcgtcgcaagttcctgttggccgagaagaacccggcgcagtggcgcacgttgctggagaaccagcagatcatcgagtcacggatgcacgacctgttcgtccgtcttgtggtcgatcacgaccggggcatcgcgtacaagcagcaggtgcgttcgacggagctggacgtgccgatcctgctcagggacgagccctacaaccgggccgagacgttggtgctggtgcacctgcggaccgtcttccaacgggaacgcggcacgggagagacgtccgcacgcgtggacatcgaggagctggaacagaccgtgctgacctacttcgatcccaacgaccacaacctggcccgcacccaacaggaggttcgcagtgcggtgcagcggctggtcaccgaaggcctgctcgtcgaggagtccgcgggccggtatcggatcaccccgctggtggaggtcgtgctgagtaccgcgaagctcgccgagttggaacagtggttgcgcgaacgaaacgaggccacggcgtga

SEQ ID NO: 42903 - DNA, 3339 bp, Saccharomonospora cyanea NA-134
atgatcgacacgctgttcgggttgatcccggcggcatcgcggggccagcagtgggtggcacgggacctgcaactggtgaactggggcggctacgacgggtatcacaccgtgcgtttcgcgcctggcgcgaccctgctcagtggcggttcgggctcaggtaagtcgacgctgatggactcctacatcgcgttgctcatgccgcatacgactcctttcaacggggcgtccaacggcggggtggtcggcagaccccggggcaaggatcagcgcaacatcctctcctatgcgcgcggcaagctcgacgagtcccgagctgacggtgagacgaaggtgcgggtgctgcgcggagacggccgcgatacctggtcggccatcgcgatgacctgggtcgatcacaccggtgccgagttcacggcgctccgcgcctggtacgttccgtcgtctgcccgcaccctcgacgacgtcgtggcggtgcgcgccacctgcgaccaccactactcactgcgggcgttggaaggcccggcgggcaagcggctcgcccgcaccgaggtcgaggcgaccggattgacctgcttcgaaaccgaccgggacttcaccgcacggctccacaccacgctcggcatcggcgccgcgggcgacggacacaaggcggtcgcgctgctcggtcggatccaggccggccagcagatcaccaccgtcgacgccctgtacaagacgatggtcctcgaagaaccgtccactttggccactgcggacgcggtggtccagcagttcgacgagctgtccgaaatccggaagcggatgatcgtcgctcgccagcaggtgaaggcgttgactccgatccgcgagcatcgccgcgccatcgacgaagcggaggaacagctgcgactgatcgacgcggtcggctcgttcagcgaggcgtcgtcccctgccgcgttgtggcgtcatgaacgtcggctcgatctcctccgcgcggccgagagggacctggcccgacggcaccgccgggccaaggaggaattgagggagaccaacgccctcgtcgaagcgaccgaagcgcagtgcgaaggggcggccgacacgcttcgcgcctccggtggtgaccgcctggacaccgcgctccgggagttgcgtggcgtcgagcaacggttgctcgacgtcgaacgagcacggaagcagctggaccgggcactcgacaccctcggcactacggtgtcgaccggcgaggacttcgccgcactggtcgagacggcccatcggtccctggccgacacggaagccaggcgaaccgcccagacccggttcgccgaggcgatggcggagaagaagcaaaccgaagccgaactggccgagttgcgcgccgagcacaaggcggtcaagtcgcggagggggaacatcccgaccgagctgcacgcggctcgcgcggcgtgggccgaggccgccggcctgacgccggacgacctgccgttcgtcggcgagctgatcgaggtcagcaccgagttcgagccgtggcgcgaggcgttcaacctggcactcggcgggttcgccacgcggatgctcatcgacatcggacggttgaacgcgttccgagaggccatcaacaaggtcaggacagctcgacgagtgcagttcgagggcgtgcgcacggggttgcgcgacgaggtcggactcaacgcgaagacgctccccggcaggctcgactaccggccgtcgccgttcaccgcctggctcaagagcgagctcgcccgccggttcgacttcgtctgtgtcgagacaccccggctgctcgcgcagtaccccaaggcgctcacgatcgacgggcagatgtcgcaaggcagtcggggcgcgcacggcggccacggccgcgccaacgtgctcggcttcaccaacagcaggctgctcgccgacctggaccatcggatcggcctcgcgcgccaccgcctcgacgaggccgtcgcttgggtgtcgcgggcggaggacgagctcaactcgttcgaggccaggcgtgcggcctaccggaccctgaccgagttgtcgtgggaccaggtggacgtcgagtcggtccaggcggaacgggaccggtggaaccgtgtcgtcgacgaggtccgcgcaggcaatccgaagatcgaccagctgcagcgacaggtggatgagctcaaggagcgggtcagggacctcaccgagcgcgcaggtcaacagaagaagaccgtggaggtgctcggcgagagctgggaggcgaccgtcgacgaggtggaccgcgcccagtcggcgctcgacgcggccgcggagacaggcacggtcgtccttccggaacaccaggagtacctggaggcgttgttcgacagcgtcccggacagcgccaccccggcgacggagctcgcggagttcgacgcggcggtgaaactggccaccgacagactcgtcgccgaccgacgctcggcgacggagacgatcggccggtcgaggaaggcgttggaggacacgttctcgacgttcctcgaacgctggccgaacccgaacctcggtaccgacccggacgcctcgtaccgcgacttcgaccgcgtactcaccgacctggagaccagcggtctgcacgagctggaggccgagtggagggacagtctgctcaaactgtccggcaacgacctcaccggcctggacagcgagctggccgccgcggttcgggagatccgtgaccggatcgacccggtcaaccgcatcctcgccgaactgccgttcgccgacgacaaccaccgactgcgcatcgacccgcaggagagccattccacggtgcgcgcccggttccgcaaggagctgcgcgacgttcgcgccttcatcgaccgggcggaaacggacgccgaccgggaacgcgcctatcaccggatggccaaggtgatcgaccggatccgccgcaccgcccccgacttcgccgacctcgtcgacgtccgcaaccacgtccgaatcagcgccgagaaacgggacctcgacggcaggcacgtcgccgtgtacgaccacatcggcgagaagtccgggggcgagtcgcaggaactggtggcgttcatcgtcggtgccgcgttgcggtaccagctgggtgacgcgggcgccgagcgtccccgctacgcccccatcttcctcgacgaagcgctgatcaaggcggacgcgcgcctcaccggccgggccatcggcgcgtggcgcggactcggtttccagctgatcatcggcgctcccaacgacaagcacagcgcgatcgagccacacgtggacgcggagtacctgattctcaagaactccgagggccgatcgtgggcgaagcctctggtcggggttggtgacgaatga

SEQ ID NO: 42904 - DNA, 1233 bp, Saccharomonospora cyanea NA-134
atgagcgcactcgtcaacccggaggacgccctgacggcggtccgccgcaagctcggccagaagtgggcggaagccgtgtgcgcgggcttcggcgtcggcgaccgggtcatcttctccgttccgcttcgccccggcgtgtcgacgggcaaggccgtcgagcagctcgggcacgccgcatggcacgagtggcacaggcgttggcgtgagttcgcgagccggcttcccgccggtgtcgaaatcgttcgcaaagcggtgaccatccgtggagtcgccggtggtttccccgcgacgctcaaggcggatctggacggtgccgtcacgctcctcgccgacacccgcaccggtgctgaaccacccacagtggacatccgccgtgcccgtgagctcgcgtcggcgctgcgagccgccggcgcgactctcaccccggccacgctccgggctgcctaccgtcttcgggccatcgacgtggaggtgctgctgggcgccgtgacctggttacggcaacaccccgatgccggcacctggaccctgcggcaactcccgatcccaggtatgcacaccaaatggctggactcccacggcgcactgctgcgcgatgtcgctggacgtgacgtccgggaagaggtccggccccggctgaccgtcacgcacctgacctatgtcgaccctgaccacgctgcatcgggccgccgcaggcacgacgcctggacaaccggtgacgtgcacgacatcgcctaccggccgcgcgtcgtcctcgtcgtggagaaccgagactcccgcctctggttcccgccggtcagggacacgatcgtggtcgagggcggtgggaaagccgcagccgccctcctgggaggagtgccctggatccgtgccgcggagcacatcgtctactggggcgacatcgatgcggacgggtacgcgatcctcgaccggtttcgcggcactctggccgcacccgcaccggacggggctccggcgaagccggtcacctccatcctcatggacgccaccgacctgcatcactacgccgagtacggcgttgaccacgacaagaacggtcgtcctatcaagccgtcaccggagctcttgccacacctgaccgaagccgaaagaaccgcgtacgacaccatcgcgaccgcgggccccaccccgttccgccggatcgagcaggaagccatccccctcgcccacgccgtgacccggctgctgcaggtcgtggacggccaggggtga

SEQ ID NO: 42905 - DNA, 1467 bp, Niastella koreensis GR20-10
atgaaacaggaagatttattgtacttattgactgcgaatcctgccatacaaatgctccgctcccggagcgcccgttggtatttaccctttctttaccatgtttataaggaagagaaccggtttgttataggagaagacatattaattcaattattatctgaaacactttcacatcaggaagatgggactgaggattttgaagaagccaagatcattttcggggaagatgaagaaacccgcagccgcaaatacatgttgaactgggtacaaaaaagaattctacaggatcttcaggatgcggaaggcaatattcaataccagttaagcgcccataccgaaaaagtatttcaatggatgttgacattgcaggcgcgtaatcacgtaggcaccgaaagccggtttaaactattgttcaactccctgcaggacatagttgaaaaaactgaagacgaccggccaaagcgattacagatgttaaaagaccgccgggcagaaattgataaagagataaaagcaatagaactgggtgtggcgcccgataactacagcaatgcacaggtgcaggaacgcctggaattatttacccggctttgttatgagctcatcagcgatttcagggaggtggaagacaatttcaagcagatccaccgcgccattgttgaacaacacaccaaagccgaacagaacaaaggcgccatcgttggctttgcctttgcggcgtatgatgcgctgcgtaacagcaaccagggtaaaagcttttattcgttctgggactttcttatttcccgcgccggtcaaagcgactggaaagaactgactgaacaattactcgacctgttaaaagaccggggcatcgaggcggatgtgcagttcctggaaaatataaaatcactgttgttagaacagggtaaaacagtatacgacgccaacgataagatggcggaaaagctgagccggattatttctgaaaaggaaattgcccgtcacaaacgcctgcgtcaccagatagggaacatcaaggaactgatctttgacctgatggatgaggaagaagtaaaggctggcattagtttggatgaaggggtggaggtaaaaatgctgatggagcgaagactgttgtttgaacaaaagaaagcagtagtagcggtaaaacaaccgacagcagccagcgaaaagattgccgatcctgaacgtttcggccgaatgatgaacgttacctatattgataaaaaaaggctatggcaaaaggtggagtatgcattacaaaaaaagcaaacagccacgttgaaagaaattctggaggtgcaaccgctggagaacggcattgcagagattgtaagctattttggtttcctgcgggataaggcaagcagggtacagatcatccataataccagcgagcatattccgttaaatgaagccgctaccaaatttgtagaagtaccttatttattatttagtaaataa

SEQ ID NO: 42906 - DNA, 627 bp, Niastella koreensis GR20-10
atgagcgctcagcaaagaatattaccctatacatctgtatttataaaattactgaaggggcctgttgaatatgtagagaaaaacacctgggaaaagctgatccagtacaaggtggaactgaccagctttctgctgcaactgggattggccctggtactggatgaacaggatggctatgcctacataaagcattatccatttgaagaggacgagaaccctgtatcatggatccagagaagggcgcttacttatgaggaaagtgtgatgctggtgctgttacgcgaaatgatggccgagtttgaagtaggtgaagccaccaatcgtgaactgataaaaaagcgccgggaaataaaagaatacgccgagttgttctttaaagaaaatgccagccgggtaaaattccttaaggaaattgacaggctgattgataaagccgaggagaatggctttctggataaaacagaaacaagtgaactggccgatgaacaaaagttccgcataaagaaaattatcaaagcaaaagtaagcagcgaagagctggaccatttttaccagcaactggtacgacataaagaaacaaaagaagagacggaagtagtcaccgacctgtcaggtcaggaactatag

SEQ ID NO: 42907 - DNA, 3414 bp, Niastella koreensis GR20-10
atgcagttaagcgtttttagtactgatagtcaaaagagcggatttcggttacaatacatggaaatattcaactggggaacctttgatgatgtggtgcacagcatccgtcccatgggtgaaaccagtttacttaccggcgccaacggaagtggtaaaactacttttgtggatgccttacttacgttgatagtgcctgagaaacgttatcgtttttacaaccagagtagtggtagtgaaaaaaaaggcgatcgtaccgaggaaacctatgtaatgggaggctatggctctatgaacagcgagagcaccggttcgttaaaaaccctgtacctgcgcgaaaataaagacgaagcctatagtattctgctggcgcattttgccaatgaagcagaacaggccgttacccttttccaggtacgctacttttcgggtggcgatatgcgcaggttgtttggtattgcccataaagccctgcgcattgatgaagactttaaaccctttgatttgaatggccagtggaaaaaagcgctggaccagaaatacaataaaggcagccgcaaacaaattgagtggtttgatgcggccagcaagtatgcccagcaactggtgcatgtgttaggaatgcaaagcgtacaggccctgcaactgtttaaccaaacggtaggtattaaagtactgggtaacctcgatgagtttattcgcacccatatgctggagccacgcaacatggaagaatcgttccaggacctgaagaaacacctggctacgctgctggatgcgcgacgcaatattgaaaaggccgaagaacagataaaactgttacaacccatagagcaacacttcaccgcatacaatacgttgaagaatcaaattgaggggagcgaacaaatgttgcaaaccgccaggatctggaacagctttacccgcaatgaattgttgcaacaggctattgaagaaagcaatgccagcatacaggacattcagcaaaagcaacagatagttaaactaacttacgagcagttacaggaggaagagcgtgttgttaaaaaccagatagaccagaacaaggccggtcaacggatgcaacaactggaaaaagatgcgcaggacctggaattgaaaaagcaggaagccgcacgggaactctccctgtttgccagctggtgcgaagagttgcacctggaagagaaacagcctgccgatgaagccacctaccagcgtatagcaaaggaagctaatcgtaaaaagctggagctggaaaccaaacaacgcctgaatgaagaagatgaatattcagcaaagcgggcgaaagaaaaatcagatgcagataagaagaaagtggaagatgagctgaataacctgctgcacagcaagaacaatatgccgggtaacctgattagcgtacgcaagcagttgtgcgatgccctgaacctggatcagaacgatcttccattcattggggagttgatgcaggtgcggtctgattgcagtgaatggcaaccggcactggagaaattattacgtaatttttcgcttcgactgctggtgcctgataaacactacaagaaagtaaacaagtacatcaataataatcacctggggatgcggttggtgtacgagcacgtgaccgataacccaatgatccaaaaccccgaaaaggatacggtgtatgaaaagttggagtttcatccagacagcccgttaagcagttgggtagaacaacagatcatttggcagtttaaccacgtttgtatcaccgatgaaaaaacgctggaccgttacgagaaggcgatcaccctgaacggactggttaaaaacaaatcgaggcacgaaaaagatgaccgtaacgggaagcatgaccccagtaagtatgtgatgggctggaacaacgagaagaaaaaagacttcctgataaagcggaggaaccagtttgccgacctggtggtaaaagccagtgaaaccctggagaaatgtaaaagcaagtccgacaggctgcaaaaacaattctatgccattacccgcattcgtgaacacaagggttttgccgaactggatatggcaggcattcaacgcggtattcataagttacaggaacaaataaacggattgcgcaaagccaacaaagacctggataatttaaaagcacagctgatagatattcaacagaaaagggacgaagcggaaagtcagcgcggtcagttattgattgacgaaaccaggttaaaagaccgcattcagcaatactacgaacaacaggaagcattacagcccttgctgcagcatatcagtgaaggcgataaagacggactgttacagtttcaacagcaacaggcggctttgatctcggatattaacctgcagaatatcgatgaagtatatgacgggttgaaggcaaagcaaacgcgcctgaacgaaaaacaaagagatgagctgcacaaggaggaaacgcaactgaacaaatgtatcaaccgcatcaagaacccttctacagagttaaaaactaaattctcccccgaatgggatggcgatgtacaacacctgcccgaagatgcggcctatgccaacgagtacatcgactggctgggtaaactggtgcatgagaacctgccaaaatacaaacgcgcttttgaaagcttcatcaacgataccattacgtataagatcggtggcctgaatgaagaaatggaaagatgggagcgtgatatcaataacagtgtaacgcgcctgaaccagtcgttgggtggtattaacttcaacaggctgcctgatacctatattcaattgggaaaaagacctgtgccttcgggaacggatataaaagaattcagaggccgcctgctcgatgcattgccacaagccgccaactggcagcaaagcagctttgaagaaaagtcgaaacactttacccagaaagttcaaccgttgattgatgagctggataaaaatgaaagctatcgaaacaaggtaatggatgtgcgtaactggtttgagttttgggccgatgaaaaattccgcaataccgatgagataaagaaaacctatcgtcagatgggacagttatcaggcggtgaaaaggcgcagttaacgtataccattttgtgtagcgccattgcctatcagtttggtattacccgcgaaggaaagaacagccggagccttcgctttattgccgtagatgaaagcttcagtaaccaggatgaagaaaaggcaacatacctgatggagctgtgtaaacaattacacctgcaattgctggtggtaacgcccagtgacaagatagccatcgttcaaaactttatcgcccacgtacacctggtacagcgggtacaaaaccgccacagcgtactgtacaatatgaccattaaggagttgaaagaaaaagtggaagaagcaaatccattgttgcttgaaggataa

SEQ ID NO: 42908 - DNA, 1416 bp, Acetobacterium woodii DSM 1030
atgtttttatttgaagatgcacaatatgaccgtttctttaatccgctatgctgtaaaaataggaaactttattatgagtgtattttaaagatcatcgagtcatcaaagcgagtatcgctactttatgaacaagatgtcagagatagcctgatcctttatctgcgaaacagtaacatttctgttgatcaagaggatgacatcttcaataacaatcggaccgaaagtgaaaacgccagtgcaattttaagatattttcgggattgcagctggatctctgaaccggaaatcgggcgaaatggtgataatattgcgactgtgacaccctattgtcgaaagttgatcgatgcgattgaacgcattttcaaacgcgaaacccgcggcgacttgaccaaccacatcttttcaatttatgacactttaaaatcagccttagaacgtgatcatggtcggaccattcgaccttattctaatatcctattaccgcttcttgatagtgtttctgatttgaaaagcgaactatttagtttaaaagacagtatacggacgatcatgcgaattatcatcgatatttcagaggtcaacaaatttggccagtttttcatcaaagatgaaatgctgaatatctttttcaaggattacttttttatcaaaagggatggcttgattccaggatacattgctgaaatagaaaaaatgctgagacaggttgttaatatagacgtgtatggcaaaatgatcagtgaatatgagagcctgaaaaatgttgattcgtatcaagctaaggtggtaatcgatagccaatttgatgttatcagagattttatttatcatgactatgctcacgaaatggattatatcgataaaaaaatcaataactattacaacctctattcaacgcgaatgctaatggttttgagtaacaataccaatattcaaacctacttaaatgacctgttaatgtgcttaaaagatatggatacggaaaacagacaaagggcacttgctcaaatatctgaaggatatcaccttttgtcttatcagtacattgggaataaatctattgagagaagacgcaagcgcaatcccaatatcaaacgcggggcaattattccttctattttaactgcggaagaaaaaataaaaatgacgcaggacgttttagaaaacaaggaccgatatagtgttgacaaagttgcccactactttaagaatttgcttcaggatcggaattgccttaccaccagcgaagtaaacattaaaaacaaggatgatgtattaatgatggcatccagtattatctattcaaattcaaacgatttcccttatggtgtcaattttttggatggaatgattgaaaccgatttggctagtatcagcgatatttgtgtaaaaaggaagactgaagaaaatgagtga

SEQ ID NO: 42909 - DNA, 669 bp, Acetobacterium woodii DSM 1030
atgagtgatattaaacttgaaatttcaataaaagaagataatatcgatttatttaaacggtgtgttcggaaactcctagattcgacgtttattgttggtgaaaaggacgaacgactttataaatttatcgctagagaatcgaacaggcaggatatttccgactatttaagaatggccggttttgatgtactagttgatacaaatgtcaaaattgctatgcttaaaccttatgaagcggatcttgaagtaactgggcttaaaagaagtaatgttgtcacctttacaacagagcaatatcatctgctattagtgctctggtctgtgtatttagaaaaccttggatataacgaagaaaatctggttatgcgtggcgatctgattgacaaaattaaagcttatgctgttgatattgataaacgcaaattgtcgacagctctggcactgtttaaaaaatacagtttgattaatttcgatgagaaggataagacagaagaagccattattactttgtatccgtcactccaatttggatgggatattgtccagttcaaagaaatatcagcacaatatttgagtgatgtgccgtcatacgaagacagcgaaggtttatgcgacgatcaggatgagtacatagatgaagaacagatcgaagatatggaggaagaatga

SEQ ID NO: 42910 - DNA, 618 bp, Acetobacterium woodii DSM 1030
atgattaagttaaaagccattcggctgattaattggtatggttttaacaacgtcacgatgccgattggggactttacattaattgccggccaaaacggaaacggaaaatctgtgttactggatgctatcaaatatgcgttatatggagatacggtgtttaacaaatcaacggaaaataccggcagtcgaacactgccttcttatactcgaggttttaaagatgctacatcaggtacttgtatccggcctgccgatcaatggccaacgattatcacgcatattgtactggaaatgtttgaagaagaaatggaaagaagttttgtccttggcactgttattgaaactaaccttaccaataatactaaaacaaatcggtatattattgaagaagttaatctctgtgatttaaatcacacctatatcgaaaataacgaccttatgtcctataacggtaaggagcttcagaaaaagtatagtcttaagttactggatgccacagacggaaccgtcaagtttatgcagcgaaccggtgtaaattttcacattatttcggactggattaatcacaataaatcggatgaaaaagaaccaaataatgcgaaaataatggcgtgttga

SEQ ID NO: 42911 - DNA, 1437 bp, Gordonia polyisoprenivorans VH2
atgcaggcgtgggagaccaaccgatcgatccaacgatccgcggccgtccggctgttcgccgcgaccaactccgcgctctacgtgacattgatggagcgtcacctcgacttcggggcgcgccggtcggaaaccgatctggcgatccggctcgaacgcgacatggccgaactcggcgtcggcgaccagccccacggcatggatctgctgaaactgtgggccaagaacgggtggctgcatcggatggccgacccggtcgtcgcgacccagaacctgtgctacctcacccccgaggcgcgctcggtgctcgattacatgcggcggctgcgccgggaggactcggtggccaccgccggctcgatcaacggcatcgcggcaggtttgcggcgcgtggccggtcaggtcagcgacgaccccagctacatccgtgaggacctcacccatcagatcgaggaactcgacgccgaactcgccgacctcgacgccggtcggcggcgccgaccggatctgcgggccgccgaggacgaggcccgcgccatcgcctaccagatggagcagatcatctccgacatcgggcagtacggcagcatgctcgaccgcatcaccaccgcgctcctcgacgatccgaacgactccgatctggcctatcgggaccggcagcggcagatgttcgacgattacgaggccttgctggagtcctcgcagagcgcgtcctatcacgcgttcacgcacatgatcggcgacccgacccaacgggctcgattggtctccgacatcgagaccgtcaccgcgcatctgcccgccatcgatccagggttgcgatcggtgatggacaacttcttcgtgctggtcacccagcagatcgacgaggtcggccggatccgtcgccgctgcgcgcgtcggatccgccgattcgtcgcctcgggaaccctcgagcagagccgcggtatcgcccgccaactcaacgacgccctggccacggccaacgaactgctcacgatctctctcgccgatcggcggctgggttacgaattgccgctggccacccccgcgctgacgtccaacgggcgtctcgcgttcgagatccgcacccctgaacccccgcaaccggcggtacccgcgacaggggagaccgatctcgattcgttcgtttcgctggccggccaggtcgacaccgtcgaactcaccgaggtggtcaacaacgcggtcgtcgacggtccggtggcgttgtcggaggtcatccattccctcgacgacccctatctcgcccacgtgatcgtgttgtggtcgtgggcgttgcggcaatcgtcggccaccggcgaccccgtggcgaccgagttcatccgattccggtccctcgacggcgaggaccgtctcatcgagattcccgccctgcatttcaccgaacccatccccaccgcggaggtcgacgtcctgtga

SEQ ID NO: 42912 - DNA, 858 bp, Gordonia polyisoprenivorans VH2
gtgaccgatcagtcagaacggtttcccgcgaaggggttcagcgccgaggggttcagcgccaaggggttcagtaccgaggagttcaacggctacgacgacctgcccgcggtgagccggaccgccgtcgaggaaacaaaggtcccccgcttcgacggggacgtctcggcgatgcccgaccgcgcctgctgggcgttgcagaatctactcacccggcgctatgtcagcggcgaccgcactccccagctgtggtcctggatcgtcgaataccaggagtccctacgcatccggctgtccgaactcgatctgcggctgcgcctggtcaccgaactcgaggtcgccttcgtcgagcaggtgggctacgactcccgttggggtagaagactactcaagcgcgagacgatccaggcctacgacgcgatcctcgccctgcacctggccaaacacatgcgggccgcgcgcgaagatcaggtattgatcacccacgaggagatccacgaactgttcgccggcgtctccaacaccatcgatcgcgacctcgccctgttcgacaaacgcatcgacaaggcgatcgacaagctcgaggaactcgagttgctgcgccgccatcgcgacgaccccgacaccttcaccgtgagtccggcgatcaccgcgatcatgacggcatcggtgatcaccgatctgcagcaccagttcgagcaattcatcggtgccggcgaggaggccgacgcgcagacgctcgatcgctccgcgcccgaatccgaagacgacaattcgggatacctcgccgagggcgatcgggacaccgacgacggtgacgacaccgaggatgacgacacggacgaaggagatgactggtga

SEQ ID NO: 42913 - DNA, 3345 bp, Gordonia polyisoprenivorans VH2
gtgagcgatcgtgtcgaccagttccacctgtcgcggttgcagttgatcaactggggcgtcttcgacgggtatcattcgattccgttcagcgccaacggttctctggtgaccggctcgtcgggcagcggtaagtcctcgcttctggacgccatctccctggccttcctgcccgaccatcggcgcaacttcaacgcctccggcgacgccacggcggccggatcggcgagtggtcggcggaccgtcggcaagtacgtgcgtggagcatggggcgagcggcgcgacggcgtgaactcgacgcgcgagatcatgtacctgcgcggcaccgggccggcctgggcggccatcgccgtcacctacacctccacctcgggcgtgtcgatcaccggcctcgtcctcaagtggctcgctgcgggcaagatgaccgacgcccacagcgcctactatctcgccgacggcgacgccgacatcgtcgacgcctgtaacgagtgggcggccaacgggcacaatgcggcccggctccgtgagcgcggttggcggggcggtcccggcgaggggaagtacctcgcgtcgctgtactcgctgatcggcatccgcggctccgaggccgcccagcagctgttgggaaaggccaagtcgctcaagagcgtcggcgggctggcccagttcgtccgtgagttcatgctcgacgaaccgaccagcatcgcgggtgtcaaggatgcactcgagcagatcgatccgctcgtcgaggcccgcgaattcctggacgtcgcacgtcgcaaacgcaccatcctcggcaacatcgaggccgtccaggaacggtatgcgaccgagtcggcgaagttctcggtgctcgacaccatcgacagcgcgaccatccgtgcctacgtgaccaacctgcggatccgcaacgccgaacccgagatcgccgacctcgacgatcagatcgcccgtctcgacggcgatctggccgcgctgacctcccagcacgatcaacttcgccaggatcacagccatctgctgtcgcgaatctcctccagcacagccgatctcgcaccactacaggaacagctcgccgcggccggcaaagcggcgagcgaggtgtcgatgcggcgggcctcgttcgactcgaagatgtcggcgctcgacgtggagatccccgagtcggccgaggacttctgggagacacgcgaatccctcatcgaggaggcgacacgcctcgacgggcaactcgaggccggcaagggtcactacgccgagctgttggccgccgaggtcgccgcacggagccgccgcgacgccgccgccgccgagctgacccgggtgcgcgaggccggatcggcgctgccgcgcgccgagcacgagatgcgccgggtgatcgccgatgcactgcagctcgacgactccgaattgcgctatgtcgccgaactcgtcgaactcgaccccgatcaggagcggtggcgcccggcggtggagaaggtgctgcgcaacgccggtctgcgactgctggtgccggatcgccatttcaatgccgccctgcggttcgtgaacacccacgacatgcgtgggcggatccagttgcatcatgtcgagcgccgcacggcggtgctacccgacccgggcaccctggccgcgaccctgcgtccggtcgatccggagcacccgagctcggcggaggccctgacgttgctcgcccggctgggcaattacgtgtgcgtcgacgatccggccgaattcgccgaccatgccaaggcggtcaccgatcgcgggctgcgcaaggactccgcgaagctggccatcaaggacgaccggcaggcactgcggccctcgcagtacatcttcgtcggcaatgtcgatgccaaggtcgcggccctcggtgaggaactcgatcacgaggacagcatccatgccgcggcacgtgaggccaccgccgtcctcgaacgcgagcgggccgacaaacaacgccgccgcgacctgtaccgcaccgtgtgcgaacagttcacgcagtggagtgagatcgatgtcgagtccgctgatgaccgcgccgagcggctctcggagcagtacgaactgttgatggaagagcaccccgacgtcgaggcgctgcaacgcaaggccgaggagatctgggagcaggtccgcgcggcgatctcccaggccgcgctcgtgcgtgatcggatcgccacccaggacgagcgccggacgcagttgctcgatctcgtcgaccgcctcaaggccgaggacatctccggtcctgcacaggcggccctcgacacgttccgtgaggattctgcggccaccctcgatgtgctcacgccggatccctaccgccaggaactgatcaaggccgttgggcgcgaccgggatcggatgcgcgccgatgcgcgccgctcccgggacgagctgactcgtatcctcgcgacctacgacgaggagttccccgacgagatccccaacgacagcagcgatttcgacgagcgcatctatgactacgtcgcgttgtgccgccgcatcgacgagcgggagctacccgcggcctacgagcggatgcgccggctcatcaccgagcaggcgccgggtgcgatcctcaacctgcacatggccgccgacgccgaggagcgtcggatcgtcgagcagatcgagcgggtcaacacgggcctgggtgcggtcgcgttcaatcgtggcacccgactgcgcctgcagccgggacgcaagaacctcggggccgcagccgaactcaccgaaaaggcgcgtcagatcgcggggcggtcgaccgccgtcgcgttcggcgatgagcaggccatcctcgagcagtacgccgacatcctcctgctgcgcgaacgcctggcgggggcgaccccggaggaccggcagtggacgcgcgacgcgctcgacgtccgcaaccgtttcgacttctactgtgaggagcacgacgccgagaccagggagacgatccgcacctacagcaatgccggcgacaattccggtggcgagcaggagaagctcatggccttctgtctggccggcgcgttgagcttcaacctcgccagcccgcatggcgacgacaaccgaccgatcttcgcgcagttgatgctcgacgaggcattctccaagtccgacccgcaattcgcccagcaggcgctctcggcgttccgcaagttcggcttccagctgatcatcgtcgcgaccgtgcagaacaccagcaccatccagccctacatcgacaacgtggtgatggtgtcgaagtccgaggcggccggtggtcgcccggtggcgacggcgacgtcgacctcgatcggtgcgttctccgacctgcgtcgggcgtcggggaagaaccggctgatctga

SEQ ID NO: 42914 - DNA, 1515 bp, Gordonia terrae NBRC 100016
atggagttctcagccttcccggctccggtcgaggcccccggcacgtcgagcggttccgagtccgcgcaggtcacgctgaccgacgcgtgggaatcgaaccgctcgatccagaagtcggcggtgggacgactcttcgcggccaccaactcggccctctacgtcaccttgatggaacggcacctcgactacggcgccaaactgtccgagaccgagctgacggtgcgcctggaccgcgacctcgccgacctcgacctcaccgatcaggccaccggcctcgaactggtcaaactctgggcccggcagggctggctgcaccgcgtcaccgacaccaccgacccgcacgcccccaacctgtgccatctcaccagcgaggcgcggtcggtcctggacttcatgcggcgtcagcgtcgcgaggattcgatcgccaccggcggatccatcaccggcatcgccgccgagctccgacgcgtcgccggtcaggtcagcaacgatcccgaccagatccgctcggagatcgaggcgcagatgtccgacctcgacgccgaactcgccgacctcgacgccggccgacgccccccggtcgacctgcgcgtcgccgaggacgccgcccgcaccatcggctaccagatggagcagatcatctccgacatcggccagtacggcacgatgctcgaccgcatcaccaccgcgctgctcgacgaccccggcgactccgacctcgcctaccgcgaccgccagcgccagctcttcgacgactacgaggcgctcctcgactcgccgcagtccgcgtcgtaccaggcgttctcccacctgatccaggatccggagcgtcgtgcccgcctgaagtccgacatcgagaccatcatcgacagcttcccgggcatggacgcgggcctgcggtcggtgatggacaacttcttcggtctggtgacccagcagatggcggaggtcggccgcactcgacagcggtgtgcacgccgtatccgacgcttcgtcgcgtccgggacgctcgagcagagccgcggactcgcccgtcagctcaacgacgccctggccaccgccaacgaactgctcaaaacgtcactcgccgatcgtcgcatcggctacgagctacccctggccgcgccgacggtgaactcgatcggccgactcgccttcgagatccgcgaacacgtcccgcccgcacccgcgctcccggctgccgtcgacgccgacctcacctcgttcgcctcgctgtcgggtcaggtcgacaccaccgaactcacggacacggtgaatgccgcggtcgccaccggaccggtcgccctcgccgacgtgatcgaaggactcgaggagccgtacctcgcacacgtcatcgtcctgtggtcgtgggcctcgaaacagcaagcggcaggggagaaggtaccgatgaccaccgtccgcttccggtccctcatcggcgacgaccacgccatcgaagtgcccgacctgaccttcaccgaaccgattccgactgcggaggtcgacgccgaatga

SEQ ID NO: 42915 - DNA, 981 bp, Gordonia terrae NBRC 100016
atgacatctttgccccctgagttggacgctgactcctcgctccctgaggtgcgagcggacgaccctctgccccctgaggtgcgagcgcagcgagccacgaagggcgaccctgaggtgcgagcggacgacgcccaatctccgctccctgaggtgcgagcggacgaccctctgtcccctgaggtgcgagcgaagcgagccacgaagggcgcccccacccccgacgaattcgccggcttcgacgacctacccaccgtcgcgaaccgcgcggcgacccacacgccgaacgccccgcgcttcgacggcgacgtcagcgagctgcccgaccgcgcgtgctgggcactgcagaacctgttgacccgccgctacatcagcggtgaccggcagccacagctgtggtcgtgggtcgccgaataccaggacgtgctgcgcggccgcctctccgaactcgacctccggctccgcatcgtcgacgaactgcaggtcgccttcgtcgagcaggcgggctacgactcccgctggggccgaaagatcctcaagcgcgagacgattcatacctacgacgccatcctggcgttgcacctggccaagtacgtgcgcgccgctcgcgacgagccggtgctgatcacccgcgaagagatccacgagctcttcgccggcgtcaccaacaccatcgaccgcgacctcgcgctcttcgacaagcgcatcgaacgcgccctcgacaagatggaggagctcgagttcctgcgcaagcagcgcgacgacgccgacaccttcgtcgtcagcccggtgatctccgcggtgatgacggcatcggtgatcaccgatctgcaacggcaattcgagcagttcatcgggtccggtgacaccggggaagtgcccccggaggacctcgccgacgaacctgcggaccgcgacgacgacgcagccgacctcgacggagacaacgcctacggcgagaacgacgaaggagacgactggtga

SEQ ID NO: 42916 - DNA, 3345 bp, Gordonia terrae NBRC 100016
gtgagcgggcaggtcgaccagtaccacctgtcccggttgcagctgatcaactggggcgtgttcgacgggtatcactcgatcccgttcagtcccaacggttctctgatcaccgggtcgtcgggtagcggtaagtcgtcgttgctcgacgccatctcgctggcgttcctgccagatcatcgacgcaacttcaacgcctcgggtgatgcgacggcggccggatcctccagcggcaagcgcacggtcggcaagtacgtgcgcggcgcatggggtgaacggcgcgacggcaccaacgcccaccgcgagatcatgtacctgcgcggcaccggcccggcgtgggcggccatctcggtcacctacacctccagctccggcgaggccatcaccggcctggtgctgaaatggcttgccgccggcaagatgaccgacgcgcacagctcgtacttcatctacgacggcgacgccgacatcgtcgaggtttgcaacgagtgggccgccagcaactacaactcggcgaagttccgcgaccgcggctggcgcggcggacccggcgaggggaagtacctctcgacgctgtactcgctcatcggcatccgtggctccgacgccgcgcagcagctgctcggaaaggccaagtcgctcaaaagcgtcggcggtctcgcgcagttcgtgcgggagttcatgctcgacgccccgaccagcatcgtcgggatcgccgacgccctcgaccagatcgacccgctcgtcgaagcgcgcgaactgctcgacgtcgcgcgccgcaagcgcaccatcctcggcaacatcgaggaggtgcacgagcggtacgcgggggaggcggccaccttctccgtcctcgacaccatcgacaacaccaccatccgcagttacgtcaacaacctgcggatccacaacgcgcagcccgaggtcgccgacctcgacgaccagatcacccgcctcgacggcgatctcgccgccttgaccacccagcacgaccagctccgccaggaccacagcctgctgctgtcccggatcgcgacctccaccggcgacctcgccccgttgcgcgaacagctcggcggcgcacagaaactcagtaccgaggtcaccgcaagacgcaacgcctatgaggacaaggtctccgcgctcggcttcaccccgcccacccgggccgagggcttctggctgctccgcgaggaactcaccgaggaggccgcgaagatcgacggccagctcgacgccggacgcgcgcactatgccgaggcgctagccagtgaggtcgccgcgcgcactcgccgcgacgccgcccaggaagaactcggccgcgtcgagaacgccggctccgcgctaccgcgcaccgaacacgagatgcgccgggtcatcgcacacgcgctgcagatcgacgagtccgagctgcgctacgtcgccgaactcgttgaactcgaccccgacgaagagcgctggcgattggccgtcgagaaggtcctgcggaacgtcggcctgcgcctgctggtgccagacaagcacttccgtgccgccctgcgcttcgtgaactcgcacgacatgcgcggccggatccagctgcaccaggctgagacccgctccatgcccgtcgtcgagccgggcactctggcgtcgaagctccgtcccgtcgatgcgtcgcacccgtgtgcagccgaggcgatgacggtcctgtcgaagctgggcaaccacatgtgcgtggacagtcccggcgagttctcccaatacgccaaggccgtcaccgaacatggcctgcgcaaggattcggcgaagctcgcagtgaaagacgaccgccatcagctgcgccggtcgcagtacatcttcgtcggcgacgtcgcgtcgaagatcgcggcgctgcgcgacgaactcgagtacgaggagcgggcattcgaggatgcccgccaggattgcgcggagctcgaccgggagcgcagcgccaaggaacgacgccgcgacgcgtatcgccgtgtgtgcgagcagttcacgcaatggaacgagatcgatgtcgactccgtggatgaccgggtcgaccagctcaccgatcagtacgacctgctgatcgaggagaaccccgacgtcgaggcattgcagcgcaaggccgaagacctgtgggagcaggtgcgcaacgcgatttcgcaggccgcgctggtcaaggacaagatcgcccggcaggactcccgccgcacccagctcctcgacctcatcgaccggttgaagcccgaagacgttcctgcacaggcggagaagaccctcgacggcttccgtgaagacctttcggcgaccctcgacgtgctcaacccagagccgtaccgccaggagatcgtcaaggccgcgagccgcgagcgcgaccgaatgcggtcggatgcccgacgctcccgcgacgagctggcccgcatcctcgacacctacgacgaggagttccccgacgccattcccaatgacagcgacgacttcgacgaacgtctccacgactacgtcgccgtctgccgccgcatcgacgagcgcgagctgcccgccgcctacgagcggatgcgccgtctcatcaccgagcaggcgccgggcgcgatcctgggtctgcacatggccgccgacgccgaggaacgacgcatcgtcgagcagatcgagcgcgtcaacaccggtctcggtgcggtggccttcaaccgcggcacccgcctgcgtctgcgtccagggcgcaagaagctcgccgcggtcgaagaactgaccgagaaagcccgacagatctccaatcgtgcgaccgcggtcagcttcggcgatgagcaggccatcctcgagcagtactccgacatcctgctgctgcgcgaacgcctcgccggcaacaccccggaggaccgccagtggacgcgcgacgccctcgatgtgcgcaaccgcttcgacttctactgcgaggagcacgacgccgagtcgggggagaccatccgcacctactccaacgccggggacaactccggtggcgagcaggagaagctgatggccttctgcctcgccggcgcgctgagcttcaacctcgccagcccccacggcaacgacaaccggccgatcttcgcccagttgatgctcgacgaggcgttctccaagtccgacccgcagttcgcccagcaagcgctctcggcgttccgcaagttcgggttccagctgatcatcgtcgccacggtgcagaacaccagcacgatccagccttacgtcgacaacgtcgtgatggtgtcgaagacggaggcgggacctgagttgcggccggttgctaccgctacatcgacggggatcaaggcgttctcggagttgaggcggtctggcagtcagttgccggtgtga

SEQ ID NO: 42917 - DNA, 1551 bp, Gordonia sputi NBRC 100414
atggtgaactctgccgtggatggggctctgacgctgaccgacacgttcgaggcgaaccgctcgatccagcggtccgcagctgtccgactgttcgcggcctcgaactccgcgatgtacgtcacgctgatggagcgtcatctcgatttcggaattcgccactccgagtcagagctagcgattcgcctcgaccgcgacatcgccgcactcggcacctccgaccagcccaccggcctcgatctcatcaagtcgtgggccaagcaggggtggctgcaccgcgtcaccgacgcagcatcgccgtcggcgcccaacgtgtgcttcctgagcaccgaggcgcgctcggtgatcgcatacatgcgtcggttgcggcgcgaggacagcgtcgccaccggcgggtccatcatgggcgtggccgccggtctgcaccgggtcgcgactcaggtgaccgacgatccggaacgaattcgcgaagacatcgagagccagatcgacgaactcgacgccgaactcgtcgaactcaacgagggacgccgtcgaccattcgacctgcggggagctgaggacgaggctcgggcgatcgcctaccagatggagcagatcatcaccgacatcggccagtacggcgcgatgctcgatcgcatcaccacagcactgctcgacgacccgcacgactccgacctcgcctaccgcgatcgacagcgacagatgttcgacgactacgagtccctcctcgagtcatcccaaagcgcgtcctatcacgccttcacccagatgatccaggatccggtgcagcgcgcccgcctcatctccgacatcgagctcgtcgtcgacaggctgccgagtatcgacaccggactgcgcgcagtgatggagaacttcttcccgttggtcagtgagcagatggccgaggtcgggcgaatcaggcagcgttgtgcccgtcgaatccgacggttcgtcgcatcaggaactctcgagcagagccgtggcgttgcccgacagctcaacgacgcactggccaccgccaacgagttgctcaaggattcactcgccgatcgtcgtctcggctacgagctgccggtcgcaacgccgcaggtgacatccatcggtcggctcgcgttcgaaatccgcaatccggcaccgccggagcaggcacgacccgccgacggacgcaccaacctggcatcattcgcatctctcgcggggcaggtcgacacggtggaactcgccgacgtggtgaacgacaagctgaccgcgggaccgctgtcgttgagcgacgcgatcgccgcgctcgacgagccgtacctcgcgcatgtcatcgtgttgtggtcgtgggccctgcgccagcctcgggaagcgcagcgccagcctcgggaagcacagcgccagcctcgggaaatgcagcgcgagcctggggaggggtcgtcgtttgtgcggttccggtcgctggagggcgaggaccgcgcgatcgaagtgccgacgctgatgttcagcgagcccatcccgtcccagtacagcgataccgattcgattctcagcacggaagccgacgcctga

SEQ ID NO: 42918 - DNA, 840 bp, Gordonia sputi NBRC 100414
atgaccagcaccgacaccaccgatccgaacactcccgaggcatctacggacgccgctgtctccaccggcacgcccgtcgacgagttcgccggatacgacgatctgccgaccgcggcgacacacgggaggatcgacggaccaggcgcgccccgattcgacggtgatgtctctgcgatgcccgatcgcgcatgctgggcgttgcagaatctcctcacgcgcaggcatgtcagtggtgaccgcaacccacaattgtgggcgtgggtcaccgagtatgaggatgtgctgcgcagccgcctgtcggagctcgacctccgactgcgccttgtcgacgagctccaggtggcattcgtcgagcaggccggatacgagtcacgttggggcagaaagattctcaagcgcgagaccatccagacctacgacgctatcctcgccctgcacctcgccaagttcctgcgttcgtcgcgcgaggagacagcgatcatcacccgtgaggagatccacgagatgttcgcgggcgtgaccaacacgatcgaccgcgacctcgcgttgttcgacaagcggatcgagcgcgcgatagacaagctcgaagagctcgacttcttacgcagacaccgcgacgatcccgacacgttcaccgtcagcccggtgatcacggcggtgatgaccgcctcggtgatcaccgacctacagcatcagttcgagcagttcatcggcgcgggcgacaccggtgacgatctcgccgtcgacgccgattcggcgggcgcagaaggcaactcgacgcccgccgaccagtcggattccaccgacgaatactccgacgacgaaggagacgagtggtga

SEQ ID NO: 42919 - DNA, 3462 bp, Gordonia sputi NBRC 100414
gtggtgagtgatctcgacaggctcgatcagcgggacaggctcgatcagcgggacaggctcgatcagcgggacaggctcgatcagcgggacacgctcgatcagcggagcacgcccgatcgcggcgagggggacgagcagtactacctgtcccggttgcagctcatcaactggggagtcttcgacggctaccactccatcgggttcagcccgggcggcgcactcatcacgggctcgtcgggcagtggtaaatcgtcactgctggacgcgatttcgctggccttcctgccggatcaccgtcgcaacttcaatgcttctggcgataccaccgcggccggttcgtccggcggtcgacgcaccgtcggcaagtacgtgcgtggtgcgtggggcgagcgtcgcgacgcaacgggagcacaccgcgagatcatgtatctccgcggaagcggcccagcctgggcggcgatcgccgtcacctacacctcgacgtcgggcacagccatcaccggactggtgctgaagtggcttggcgcaggcaaactcaccgatgcccatagcgcgtacttcatccacgacggtgacgtcgacatcgtcgacgcctgcaacgagtgggccgcgaatggctacagcgccgcccggttccgcgaccgcggctggcagggcggtccgggagagggcaagtatctgtcgaccctgtactcgttgatcggtatccgcggctcggatgccgcacagcagttgctcggaaaggccaagtcgctcaagagcgttggcggactcgcacagttcgtacgcgagttcatgctcgacgaacccacgagcatcgcaggcatctccgacgcactcgagcagatcgatccactggtcgaggcgcgtgaactcctcgacgtatcccggcgcaagcgcaccatcctcgacaacgtcgaggcgatgcaggagcgctatgcggcggagtcggcgaccttcacggttctcgacaccatcgagcccgaggtcgtccgctcgtacgtcaccaacctgcggctgcacaatgccgaacccgagatcgccgacctcgacgatcaaatcgcccgcctcgattccgacctcgccgcgctcaactcgcagcacgatcaactccgccgggatcacagccaccttctcggtcggatcgcaacgtcgacaggcgatctcgcgccgctgcaggaacaactctcgacggcgcagaaggcgagcaacgaggcgtcgatccgtcgcgccacctatgaacacaagatctccgcgctcggattcgacattccggaagacggtgaggcgttctgggagttacgcgagcacctgatggaggaggccacccgactcgacggtcaactcgaggcgggcaagccacatttcgccgagaccctcgccaccgaggtcgctgcgcgctcccaacgcgacgctgcccgtgacgaactcgagcgcgtgcgccacgccggctccgcgctgcctcgcgccgaacacgagatgcgtcgaatcatcgccaatgcactccaactcgacgagtccgaactgcggtatgtcgccgaactcgtcgagctcgaaccctctgccgagaggtggcggctggcagtcgagaaggtcctgcgtaacgccgggctgcgactcctggtgccggacaatcattttgcggctgccctcaagttcgtcaacgagcacgacatgcgcgggcggattcagctccaccacgcagagacgcgtcccgcgccgatggtggagccgggcacgctcggggcgacgctccgggcggccgaacccgaccacccgtgcaccaacgaggccctcacgatccttgccaaactcggcaattacgtgtgcgtcgattccaccgcggatttcgtcgaacacaccaaggccgtgaccgaccgtggccttcgcaaggactcggcgaagctcgccatcaaggacgaccgtcagcagttgcgtccgtcccagtacatcttcgtcggaaacgtgagcgcgaaaatcgctgcgctgcaggaagaactcgagtccgagaacgagctgtacgagcaggcgcgagctcgcagtgccgaactcgaccgagagcgcacagccaaggagcagcgacgcgacgcctaccgacgggtctgcgaacagttcgccgcgtggaacgagatcgacctcgataccgctgacgaccgcgtcgacgcgctcaccgaacagtacgagctcctcatggaggagaatcccgacaccgaggcgctgcaacgcaaggccgaggacatctgggagcaggtccgcgccgccatttcgcaggccgcactcgtgcgggacaagatcgccacccacgacaagcgtcgtactcaactactcgacctggtcgacaggttgaagatcgaacccgtctctgcccacgcggaggcgacgctcgatcgcttccgcgaggagtccgcggcggtgctcgacgtgctcgcaccggatccgttccgccaggatctactcaaagccgttgggcgcgagcgtgatcggacgcgcgccgacactcgacgttcgcgcgacgaattgggtcgcgtcctcgacgcctacgacaaggagttcccggacgcgatcccgaacgacagcgacgatttcgacgagcgcgtccacgactatgtcgcgctgtgccgccgcatcgacgagcgcgagctgcctgccgcctacgagcgaatgcgacgactcatcaccgagcaggcgccgggcgcgatcctgagtctgcacatggcggccgaggccgaggagcgacggatcgtcgagcagatcgagcgggtcaactccgggctcggctcggtggccttcaaccgcggaacccgcctacggctctgccccggtcgcaagactctcgcggcagtcgccgaactgaccgacaaggcgcggcagatctcgtcgcgaaccgcagccgtcggattcggcgacgaggaggccatcctcgagcagtatgccgacatactgcttctgcgtgaacgactcgccggtgcaacgcccgaagaccgtcagtggacgcgagacgcactcgacgtgcgtaaccggttcgacttctactgcgaggaacgcgacgccgagaccggcgagaccatccgcacgtacagcaacgcgggcgacaactcgggtggtgagcaagagaagttgatggcgttctgtctggcaggcgcgctgagcttcaacctggcgagtccgcacggcaagggaaaccgtcccatcttcgcgcagttgatgctcgacgaggcgttctcgaagtccgacccgcagttcgcgcagcaggcactcgcggcgttccgcaagttcggcttccagttgatcatcgtcgcaacggtgcagaacaccagcacgatccagccctacatcgacaacgtcgtcatggtgtcgaagaccgaggacgtcaacagccgtcccatcgccaccgcgatctcgacgtcgatccagacgttctcggatctacgtcgaacgagcacgagccgtctgcccgtctga

SEQ ID NO: 42920 - DNA, 1677 bp, Gordonia otitidis NBRC 100426
atggcgaactccaccgtggatgattcggcgaccgcggttccggcggatcgggccactgagccgatgcgaccagtgcgcgcacgaccaacagatccggtcccgtccacgacgacgctggtcggcacctgggaggccaaccgagcgatccagaggtcggcgggagtccgcctgttcgccgcgtccaattcggcgctgtatgtgacgttgatggagcgtcatctggatttcggtacccgccataccgagtccgacctcgcgatccgtctcgaccgcgacctcgcggagctcgatgcctccgatcagccgtccggcctcgatctcatcaagtcgtgggccaagcagggctggttgctccgcgtcaccgacgccacgtcaccgtcggcgccgaacgtgtgtttcctgaccaccgaggcgcgctcggtgatcgcctacatgcgacgactgcgccgcgaggacagtgtcgccaccggtggctcgatcaccggtgtcgcggcgggtctgcatcgggtggcgacgcgggtcgccgatgatccggaccggatccgcgaggacatcgcgcatcagatcgatgaactcgacgccgagctcgtcgaactcaatgagggccgtcgccgacctctggaccttcgcggcgccgaggacgaggcgcgcgcgatcgcctatcagatggaacagatcatcggtgacatcggccagtacggcgcgatgctcgatcggatcaccaccgcgctgctcgacgacccgcatgattccgatctcgcctaccgggaccgacagcgtcagatgttcgacgattacgagcttctcctcgagtcgtcgcagagtgcgtcgtatcacgctttcacccagatgatccaggatccgcagcagcgcgcccgtctcatcgccgacatcgaactcgttgtcgaccggttgcccagtatcgacacggggttgcgcgcggtgatggagaacttcttcccgctggtgagcgagcagatggcggaggtcggacgaatccggcagcgctgcgcccgccgcatccgcagattcgtggcgtcgggaaccctggaacagagccgcggcgtcgcccgtcagctcaacgacgcactggccacagcgaatgagcttctcaaggactcgctcgccgatcgtcgcctcgggtacgaactcccggtcgcgacaccgctggtcacctcgatcggccgccttgctttcgagatccgtaatcccgcgccgcctgagcaggcccgtcctgctgacggtcgcacaaatctggcgtcgttcgcgtcactcgcaggccaggtcgacacggtcgaactcgccgacgtcgtcaacgagaagctggcgagcggcccggtgtcgctgagcgaggcgatcgacgcgctcgacgagccgtatctggcgcatgtgatcgtgttgtggtcgtgggccctgcgccagcctaggaatacactgcgccagcctagggaaattcagcgccagcctcggaatacacagcgccagcctggggacacacgttcggtggatgccttcgcgaacacggccggcgacggtggcgcgtcgtcgttcgtccgcttccgctccctcgagggtgaggatcgcgcgatcgaggttccggtgttgatgttcagcgaacccatcccgtcgcagtacagcgactccgattcgattctcagcacggaagccgacgcctga

SEQ ID NO: 42921 - DNA, 855 bp, Gordonia otitidis NBRC 100426
atgacaagcactgacacgaccggtccgcacaattcgacggcggacaccaccgagggcggcgtgaccggatcccctgcggtgcccgctgacgagtacgccgggtatgacgacctaccgtccgccgcgacccgcggacgcgtcgacgagccgcgcgcacccagattcgacggtgacgtctcggcgatgcccgaccgcgcgtgctgggcgctccagaacctcctcacccgcaggcatgtcagtggggatcgaaacccgcagctgtgggcgtgggtgaccgaataccaggaactgttgcgcagccgtctgtcggaactcgatctcaggttgcgtctcgtcgacgagctccaggtggccttcgtggaacaggctggctacgaatcacgctggggtagaagaattctcaagcgagaaacgattcagacctacgatgcgatccttgcgctgcacctggcgaagttcctgcggtcgtcgcgcgaggagaccgcgatcatcacccgtgaggagatccacgagctgttcgcaggcgtgaccaacaccatcgatcgcgacctcgcgctgttcgacaagaggatcgagcgtgcgatcgacaagatggaagagctcgatttcctccgccgccatcgagacgacccggacaccttcactgtgagtccggtcatcaccgcggtgatgacggcatcggtcatcaccgatctgcagcgccagttcgagcagttcgtcggtgccggagacaccggcgacgacctcgctgccaccaccgatcagaccgactccgatgcgtgggacggcacagacggcccgtcgtccgccgacgacaccgacgcttatgccgacgaggaaggagacgagtggtga

SEQ ID NO: 42922 - DNA, 3393 bp, Gordonia otitidis NBRC 100426
gtgagcagtttccacaggccggatcaacgaggaagcagtgccgcgctgcgcgacagcgacgagcagtactacctctcgcggttgcagctcatcaactggggtgtgttcgacgggtaccactccatcgacttcagcccgggcggcgcactcatcaccggatcatccggaagtggcaaatcgtcactgctggatgcgatctcactcgcattcctgcccgaccaccgacgcaacttcaacgcgtcgggggacaccaccgcagccggctcgtccggcggcaggcgcacagtgggcaagtatgtgcgtggcgcgtggggcgaacgccgcgatgcgacgggagcccatcgcgagatcatgtatctgcggggcagcggaccggcgtgggcggcgatctctgtcacgtacacctcgacgtccggcacggcgatcaccgggctggtcctgaagtggctggccgcgggaaagctcaccgatgcgcatagcgcctacttcatccacgacggcgacgtcgacatcgtcgacgcctgcaacgactgggcagcgaacaactacagcgcagcacgcttccgtgatcgagggtggcagggcgggcccggggagggcaagtacctcacgacgctgtactcactcatcggcatccgcgcctccgacgcagcacaacagttgctcggcaaagccaagtctctcaagagtgttggtggactcgcacagttcgtccgggagttcatgctcgacgaaccgacgagtatcgccgggatctccgacgcgctcgagcagatcgatccgctcgtggaggcacgtgaactcctcgacgtctcacgacgcaagcgcaccattctcgacaacgtcgaggcgttgcaggaacgctacgcagcagagtcggcgactttcacagttctcgacacgatcgaacccgaggttgtccggtcgtatgtgacgaatcttcgtatacgcaacgccgaacccgagatcggcgatctcgacgatcagatcgcccgcctcgacgccgacctggccgcgctgaccgcgcagcacgatcaactacgccaggatcacagtcacctgctcgggcggatagcgacgtcgaccggcgatctcgctccgctacaagaacaactctcgaccgcgcagaaggcgagcaacgaggcatctattcgccgcgcgacatacgagcacaagatcgcagcactcggattcgacgtccccgaggacggtgaggccttctgggaactgcgcgagcacctgatggaggaggcgacccgactcgacggtcaactcgaagccggcaagccgcatttcgccgagaccctcgccaccgaagtcgctgcccgcgcccaacgtgatgccgcgcgtgaagaactcgagcgagtacggcatgcgggttctgcgctgcctcgtgcggaacatgagatgcgtcgaatcatcgcgagcgcattgcaagtcgacgagacggagctgcgctacgtggcagagctcgtggaactcgctccttccgccgagcggtggcgagtggcggtcgagaaggttctgcgtaacgccggattgcgactgttggtgccggacaagcatttcgcagccgcgctcaagttcgtcaacgatcatgacatgcggggccggattcagctccaccatgccgaagcgcgtccggctccgctggtcgagccgggcaccctcggggcaacgttgcgtgctgcggaacccgatcacccgtgtacgaacgaggcactgacgatcctggccaagctcggcaactacgtgtgcgtggaatccaccgcggacttcgtcgaacactccaaggccgtgaccgatcgtggtctgcgcaaggactcggcgaagctcgcgatcaaggacgaccgcgggcagttgcgtccgtcgcagtacatcttcgtcggcaacgtcaccgccaagatcgctgcgctgcaagaagaactcgacctcgagaaccagctctacgagcaggcacgcgctcgcagcgcagaactcgaccgcgagcgaacgctctcggagcagagacgtgacgcctaccgtcgggtgtgcgaacagttcacacagtggagcgagatcgacctcgacacagccgacgaccgcgtcgacactctcaccgagcagtacgaactgttgatggaggaacatcccgataccgaggcgttgcagcgcaaggccgaggacatctgggaacaggttcgtgcggcgatctcgcaggccgcgttggtgcgcgacaagatcgccacgcacgacaaccgccgtacacggctgctcgatctcgtcgacagattgaagctcgagccgatctcgacacatgccgagacgacgctcgaccgtttccgggaagagtctccggcggtcctcgacgtactcgctcccgatccgttccgtcaggagctactcaaagcggttgggcgcgaacgcgatcgcatgcgcgccgacacccggcgctcacgtgacgaactcggtcgcatcctggactcctacgacaaggagtttcccgatgcgattcccaacgacagcgacgacttcgacgagcgggtccacgactacgtggccctctgtcgccggatcgatgagagggagttgcccgccgcgtacgaacggatgcgacgactgatcaccgaacaggctcccggcgcgatcctgagtctgcacatggcggccgaggccgaagagcgacggatcgtcgaacagatcgagagggtcaattccgggctcggctctgtggcgttcaaccgtggtacacgtctgcggctgtgccccggtcgcaagacgctggccgcggtggccgaactgaccgacaaggcacgacagggatcgtcggcgcgcaccgctgccgtcgggttcggcgacgaggaggcgatcctcgagcagtatgccgacatcctgctcctgcgcgagcggctcggtggggcgactccggaggaccgacagtggacccgcgacgccctcgacgtgcgaaaccgattcgatttctactgcgaagagcgcgacgccgataccggggaaaccatccgcacgtacagcaacgccggtgacaactcgggcggtgagcaggagaaactcatggcgttctgcctcgcaggagccttgagcttcaacctcgcgagccccactggcaacggaaaccgtccgattttcgcgcagttgatgctcgatgaggccttctccaagtccgacccccagttcgcacagcaggcactcgccgccttccgaaagttcggcttccagttgatcatcgtggcgacagtgcagaacacgagcaccatccagccctatatcgacaacgtggtgatggtctcgaagagtgaggacgtcaacgctcgaccggtcgcgaccgccatctcgacgtcgatccaggcgttctcggatctacgccgtacgagtggcagtcgcctgccggtgtga

SEQ ID NO: 42923 - DNA, 1833 bp, Sutterella parvirubra YIT 11816
atgtggcggcttctcgcgagccagcagggcccgctcgtgatcggcattctgcaggcgctcctctacgaagaggagcgcacgctgccgggctccgtctttctggagcgcctcgcgcccctttgggccgaggcgacgctcgaagccgtctcgcccgaagacgcccgcgctcttgccgcccgcttcgtgcgcgaggggtacctggtgacgaggctccccgcaggggccctggaagagcagtacgaattgaccgccggcgcattggaagcgatccgcatcctttcgcgcgcgttgacgcgccgctcggggccgtcggaaagccgcctcgaaatgctcgcgcacgcggtcgtgaagttggcgcaggacgccgaccccgaccccgcccgacggatcgaacagctcgaagccgaaaagcgccgcatcgacgaagagatcgcggccgtcaaagccggcgcaaggacggtcttagggaaggacgccgcgcaggcccgcacgggagacattctggagctcttcgcggagttgttgaacgacttccgcagcgtgcgcgaagagttcgaccggctcaacctcgacctgcgcgagcgcatcatgacgagcgaagggtcgcgtggcgacgtgctggagcgattcttcgcgggctacgacgagatcgcgcagagcgaagcgggcctcgccttcacggggttctaccggttgctcacgaacgagagcgcctccgcggaaatggaagccgcgctggagcgcatcacgcagcagcccttctacggggaattgtcgctccgcgaacggcgcaccctcgcgcagctccgaagcgaactcctctcccgctccatggacacgcacgacgtgatgcggcgcctcgcgcagagcctgcgccaattcgtcgagtcgcgcgagtacgtagaggagcgccgcatggggcagcttctgcgtgaagcgcgtgcggccgcggccgcggcccgcgaggacgcgcatcaaaggaaaacgttcctcgagctcgtcctccccaacgccgacatccattcgccgacgcagtatgagttggacgacccctcggtcgacgtcgaaaactacgacgtctccgtcgcgcccccgcccgaaatcgaccgcgaggcgctcgcccagcgcatccgctttgcggaaatcaactacggcgagctccgccttgccgtggtcgaggcgctcgggctcgccaagatggagggccgcgggaaggtgtcggtttccgaagtctggtcgcacgtccccaaccatcagggcttggggagcatcgtggggcttctgacgctcgccgcccggtacggtgaggccgcggaagccgctgaatcggtggatgccgctgaagcgcctgaatccgccgcctccgacgccgtcctctcggccgccgccgaggcgctcgaagccgtgacggaggcgcagttgacgggtcaggacgtcaaggctcccaagacgcccaaagcgcccaaacgccgctcgaagcgcatctccgcgctcgcggccgcgatggacgaagggcacctctcgggcggcgtggaactctccgccgaaggcattcaggccttccgcgcggacccctccgccgccgcgaacgactaccggggcttgcccatgcccgacgtctggccctcgggcacggaccttcacggcgagaccgcgccggggagtctcctcgcaccccaacacgaaacgatcagctggaccgaccgcgccggaggcgacgtgtcggccgagatcccgaagttggtcttcacgaccaccggggtcgcgcgcatgatgcggagcgcccgccaaagcgcgcaggcgcgcggcctcgcggacccgtttgcgcggtga

SEQ ID NO: 42924 - DNA, 945 bp, Sutterella parvirubra YIT 11816
ttgaagattgagaaggacgacaggatgacggaagagaaggacgaccagctgccggacgatcttttggcctacgcggacgcgttggaaatcgaggccgctgaagtcgaagaagcggaacaggaagccgaattcgatttcggcgaagcggaagccgaagaagccgacgcggaagacggcgatcaggacgacgcggccgacgaagcggacgacgacgccgacgaagacgatgacgacgcctccggcctctggcccggcgacacgggcgagctccccttcaacgtgcgccgcgtgttggtggcgctgctccgagggccgtgcctccgccgcgaccgccacccgaagctctggcgcgtgcttttgaccaacgaagccgtgatccggagccgcgtctccgacctcatcctcgacctcctcttggacgaagaggccggcgtcgcgatgctccgccgcgcggagaccggggacttgaaggccccgtcgctccttcacacccagaggctcaacttcctcgacagctgcgcccttctggaacttcgcgaaaagatgatgcggaacgccggcgccgccgacgagcgcaccgtcgtgacgcccgaagaaatcgccgaggcgctcaagctctacgaccgcaccgccttcaaggacgagcaggccttccgccggcacgtctcgggcgtggtgtcgcgcttgaccgcccgccgactgcttcttccccttcgcgggacgtccgccttggaggtgagcccgacgctgccgcgtctcttcaccgccgacgacgtcgcgaagctcaccgccgcctacaaggacaaggcgaaccgcgtgggccgcgccgaactcgatgcggaaggcgccgtgagcgtcgatgaagctgccgagaccgccgaacccgcggacgtcaccgacacgtccgacaacaagaacctcttcacgacggaggccgcccgatga

SEQ ID NO: 42925 - DNA, 1028 bp, Sutterella parvirubra YIT 11816
atgagcgtgcgcgacaccgaaacgaccatcgcccccgaactcgaagccttcgacgacgggagtcagatcgacgcgatggaggccgggacgaccccggccgggtacgagtccgcgggcgaaaagccgacgggcggtcggtccggtcaggaagacctcctggcggggctcaaccaattccgcgccacgcgtcttcagatcctcaactgggggaccttcaccgggtaccacgacgtgccgatcgcgcgcaaaggcttcctcttcgtgggggcctcgggctcggggaagtcgacgcttttggacgccatggtgacgctcctcttccccgcgcccgactacaacgccgcggcgcgcgaaggcgacaagcgccgcggggaccgctccctgatgagctacctccgaggcgccttcggcacgcagaccgaaaccgacgagcgcggcacgcgcacgacgacgcagtacagccgcacgggctcgaccttctcggcgatcgcgttgacgctcgaagacctcacgggcgaagccgtcaccctcatgatggtcgcgtacgtgaagggcgactcgaccgaagagagcaaggtgaaccgcatgtactacgtgctgcgctccccctggaccttcaacctccaggccttccgcggcttcgcgcagttcgcgtccttcgacttcaagtggctgcgccggtcgctgccgaaccccgaggtctatcagacgttctcggcctacggtgagcgcttccgcgaactcttccgcatccgcgacaagagcgcgatgaagctcctcgccaaggcccaatccgcgaagaacctgggcgacttgaacaccttcctgcgggacttcatgctcgaagaaccgcgcacgtttgaaaccgccgccaacctcgcgcgcgagttcgacgagttggacgaagcccaccgcgcggtcgtgcgcgcccgcgagcaggaggagtgtctcgccgccgcccgcgacgcgatcaagacccgcggcgaccaggaagcccgctggcgggcgggggtcgcgcagcgcgacgc

SEQ ID NO: 42926 - DNA, 1521 bp, Microbacterium laevaniformans OR221
gtgactcagcccgagctatccgccgccgccgcgtcaacggatgtcggtgtgttccttcagaatggacgcgtgcccgccgtcgcccaggttctcgagctcgcccagcttgcggagcgcgatgcggcgtggaagctgcttcgagccgacagcgcacccgtggtcgccggtcttctcggcacccacctgggcggagacgagcgccgagtcgacgctgaggagctgtacgagcggatcgatgccgacctcgagcggctccgtgcgcaggggctgatcttgccgctgactgcgaaggggtactgcggggagtggcgatcggccggcttcctggtgcgtcggccgtcatcggaagcgcggggtgagacgctcgagctttccccggatgcgatcgccgggatccgcttcttgcaggggcgtgccgccccgcgttcgagtgtgaccgagtctcggcttgcgagtcttgcggcgcaggtccgtcgcctcgcgatcgacaccgatcctgacgtgtcagcgcgcatcgcgctactcgaggaagagatcgagtcgattgagcggcggatcgagagcctgcgttccggtgacgagtccgcgatcgatgaagaccgggcgctcgagcgcgttcgcgacgtgctggcgcaggcggcggacgtgccggacgactttgctcgggtgcgtgccgagttcgagacgctgaatgcgtcgctgagggcgaagatcgtcgagtccgatgtttctcaggcgtcagtcgtcgacgaagtcttccgcggaatcgaccacatctccgactcggatgcaggccgcagtttcgctgccttctcccagctcgtgctcgaccctgcactcggtgccgcattcgaggccgacatccgtcgcatcctcgaccgcagattcgctcgtgatctcacctcggatgagcgccgggcactgcgcgccttcctcgcaacgctcaagggacgaagcgcggagatccacgatgtcatcacattgttcgcccgggcgctccgccgctacgtgcagtcgcaggactaccagcgcgaccgggtcctgcggactcttctgcgggaggctcagcacgcgggggtgcaagccgccgcacacacgcgtccgtggcatccgacgtttctcacgctggatctctcggccgttgcgctgtcgagcgtcggggcgatcgaccttcacgaccccgccgaattcgccgccaccgaagagatcgtcacgcagacgacatccctcgcgagcctcgaggagctgcgggcgatcgctcgcgaaaccgagatcgacttcgacgaactcacccggaacgtcaacgacttgctcgccgaggtgtcctcgtgcaccgtcgcagatgtccttgctcgataccccgcgacgcagggggtcggcagcgtgatcggacttctctcgatcgccgccgagcagggcaccgttgacgatgagcccgaggtgctcgcttggcagggcgccgacggagttccgcgtgcggcgattgtggccgcgcaccgattcacaggagcggtggcatga

SEQ ID NO: 42927 - DNA, 660 bp, Microbacterium laevaniformans OR221
atgaccgagtcgaccacggcggatgtcgcccccgacgaggacggaggcctctggcgtggcgacgccggcgaactccctgatcgcacgaggcgcgtcttgctgcgtctggtgcgtggcccgtatctttccggagcgcgcgaggcgcagctgtgggcggtgctgctcaccgacgaggctgtcctccgctcccggctcgccgatttgttcctcgaattggtcatcgatcgggacaacgagttcgccttcgtccgcaacgctccgtccgaggacgccccgaaggcagtgcggtctgaggcgttgacgttcctcgacaccgcaatgctgcttgtcttgcgccagacgctgctgagcgaggagggtcgcggtcgggtgatcgtcgggcaggcggaggtgttcgagcagctcgccgtgttccgcaccccggaccgtgatgagaaggacttcgcgagccgcgtcaactcgtcgtggaacaagatgcagaacaagctccgcgtgttgcacgccgttggcgatgaccgtgccgagatttcgcccgtgctccgactgctcgtcgatgccgaccagatccgcgcgatcacatcggagtaccaccggatcgcccgagagggcggaggagaatccgctgccccgtcgacggatgccgaggatgacacagaatga

SEQ ID NO: 42928 - DNA, 3354 bp, Microbacterium laevaniformans OR221
atgacgatgctgagcttccccaccgacgagccggaggtcgatccgaccaggcccggccagtggcgactcgcccaaatcgaactcgtcaactggggcacgttcgccggccacgtctccgtggatgtcgcgcgcgccggccacctgttcaccggcgcatccggatcgggcaagtcgtcgctactcgacgcgattgccgccgtcctcacccccgacaggtggctgcgcctcaacgcggcggctcaggatggtgcttcccggcagagcgatcggacgctgatgagctatgtgcgtggcgcctggagcaaggaagctgacgagactgccgatcgggccaccacgacctacctgcgctcgaaggcaacctggagcggcatcctgctgcgctacgagaatctccgcgatgaaccggtcgtcctgctgcgggtgttccacgcaccgggcacgcgcaccgaaccgaccgcgttgaaggacgcacggatcttcacccgcggtcacgtgaagcttctcgacgtgaagccgcacgtcgaaggcggaattgacgcgcgtcgcatgtcgaaggccttccccgacgcgctgatcaccaccggcgggagacacggacgctttcacgagcggatcatccgtcagttcggcttccgcggagatgcgacgcttcagcttctccacaagacacaatcagcgaagaacctcggcaccctcgacgcgttgttccgcgggttcatgctcgaccagccagggaccttcgcgcgggccgagaccgccgttgagcagttcacggagctcgatgccgcgcacaagcacgtggtcgacctgaggaagcaggctgatgcgctccgcaaggtcgacgaggcgatcaccgcgttcgacttggccggcgctgagatggcggcgatctccgatctgcacgagggggtcgagcccttcacagcgggactcaagttgcggctcgcgaaggaagccgcgggccccgcacgcgccgcgctggcgcgcgccgagagcgacctgagcgacaccgcgcgagagcagcggttggcggcagaggcgctggaaaccgcgaaggcgcgggtccgggacgagggcggcgcgcgcgtcgagcttctgcaggagcggatcgacagtgcgcagcgtgccgaggacgtcactaggcaatatcgagctcagttgaccgcagagctgatgcgcatcggcgcaccaatgcccgaagaccccgagcagtttgcggagctccttgccgcggccgtcaccgaggttgcgcgcgacatccccgctgtgtcgtatgaggtccgtgacgccgcgagtcaggcgcgtaaggcgctggacgaagtcaccaggcagatacaggcgctgagagatcaccggagcaacctcgacgagaagcttctgagcgcacgacgattcctcgcggacgctgtcggtgtgccggcatcgacattcccctttgcgggcgagctgatctcggtcgccgagcagcactccgcctggcgcggcgcggcagagcgagtgctcgctccgtttgcgtcgacgctcctcgtgcgggacgaacatcttgtcgccgcacgtcgggcagccgactcgcggacactcggtgtccggctcgtcatcgaagcggtcccgcacgccgtcgacgagccgcgtcgccccaaggatgcccgctcgctcgttcatcgcctcgcggtgagcgatgggcccttcgcgtcctacgtccgcaagcgcatggcctccgagttcgactacgcctgcgtttcgcaccccgacgagcttgatgacgtcgagcgtggcgtcacgatcggcggcctggtcaagcgcaactcacgcaggtatgagaaggacgaccgtcacgaggtcggtgatgccactcgatgggtgctgggcggcgacacccacgcgcggctcgaggcattgcttgagcgtcggcgggacgcgatggcggcgatggaggaagcatccgcccgcgacgccgaggccgactcgtttcgtcaggacgcggtcagtcggcgcgacgtcttcacacgcgtatcgacgttcagctgggaccaagtggacctcgcaactgcgatggcggtcaccgcggcccagcgcgacgatctccgggtgctcaccagcgagtcggggactctccgcgaagcacaggaggccgcggagcgagcgacccggcgactggacgaaacgaacgcgaagcacgcacgggcgctcggagcccacgctgtcgcccgcagtcacgtcgaaagcatcgcggcacacgtcgccgaactcgaggccaccccatatgcaccggtcgaggagcggatcgccgacgccctcgaaggccggttccgagccgagcgacgctccgtgagcctggagacggtggacgaagtcgcgcgaaaggtgcagtcggcactctcgaaggagaaggacgcctcggccagccgcgcagcggatgctgaggccagcttcgccgggcgcgccgccgagtttcggctcgggtggcccgctgcatccgcagagctgactgctgacatccgcgaccgctacggctaccgggaactgcgcgaaggcatcatcgcccgcggcctgcccgagaaggagtccgagttccgcaagctgttgcgggaacgatcgcaggacgtcgtcgcacacttgctcagcgacctccgcgacgccccgggtctcatccgtgagcgaatcctccccgtcaacgcatccctggggcggtccccgttcgagggagcggaccgcttcctcgagatcgatgtgaagacgacgcggaccccggaggtcgacgagttcctcacggacctccgtcgcatcgttgaaggcaactgggccgacgagtcggccgccggtgccgagcaacgattcgccgtgctgcagcgcgtaatcggtcgactcggatccaaggaccgcgtcgacatcgattggcgcaaccgggtgctcgacacgaggcttcacgtgagcttcctcgcgcgggagaaggacgtcgccggccgcgttgtgcgggtgtatgactccgcagagggcttgtcgggtggtcagcgacagaagctcgtcatcttctgcctcgcggcagcgctgcggtaccagctgactgaagaagaggacgaggttccgaggttcgggtcgatcgtgctcgatgaggcgttcgacaaggctgacagccgatacacgcgcaacgcgatggaggtgttccgcgagttcggattccacatgatcctcgcgacaccgcagaagctgctgcagacgctcgagccgtacgtgggtgcgatcacgtcggtatcgaaccccgaccgcaagttgtcgcggctcgcgaacgtcgtgttctcggtcggggggccggaggccccacatccaccgcacgcggagcagcacgcgtga

SEQ ID NO: 42929 - DNA, 1119 bp, Microbacterium laevaniformans OR221
gtgactacgtccgtcaccccggccgatgtgcgcgcgcgagcgaagaagctcttcgaccgcgaggcgcgcacctgggctgccgatcagcagaccgatgccgtgctcgacgtatcgctgcatccgccgacagagcgcgaggcgctgcgcgacctcgaacaggtacgacggtgggtcgactcctggcgcggactgagcgccgatccgtcggtcgagatcgagtgggccgtccgcaagtggccacgcatcggatcgcaggaagtccccgtccgcgctgtgttgcgcggttcggacgcgatcgctcggatcgccggcgagcgagatgtctggcaggttctcgtgtcgcgacttgacgcgctccggggactggccgggtccggcgccgattcggtgctccgcacccatgcgcgcgccatcgctgatctcgacggtggcgacttcgaacggctcgtcgatgtgctggagtggttgcgcgagaacccagaatccggtcgcctggtgcgggagttgccgatccgcggcatccacacgaaatggatcgaatctcgcatcggcctcgtggaggcgttgcatcgggccggaaccggcgcgaccgggctcggccttcgcgagccatcaccgctcgtgcggctccgcgttctcgatccgtcgctctccttccatggactcaccgatgtgtcggcgccggtcgacgacctcggcgcaagtcagatccgccccgagcgggtgttcgtgttcgagaacctcgccactgtactcgcgatgccggacgtgtctggagcggtcgcagtccacggcggtggccaccgcgtcgaccttgttgcccgtctgccttgggctcagaccgtgacgtactggggggatctggactcgcatggtttcgccatcctgaaccagctccgagccaggggagtggatgcgacgtcggcgctgatggagatggctacgctgttcgaccaccgcgacctctggggcgtcgatcccgatccgaacgtcggggtgttcgatcggctcacgcgcgatgaacgcgcaacactccaatcgctgagcgccgaggggaacatccgtctcgagcaggaacgaatcccgtgggactacgcactcgcgcggcttgagatttag

SEQ ID NO: 42930 - DNA, 1461 bp, Mycobacterium abscessus M93
atgaatgatctgacagtcgaagagctgttcgcgcacaacgatgacgtgcagaaatcccgtgcggtccgcctgttggccgccaagaatctggccccctacatcacgctcatggaacgccacctggaccgcagcgccaaagtctccgaacctcagctggtggccaagctggaccgggacctgagcgccgtcgggctgggagaacagtccgggctggccctcatcaagagctgggcgagcgacgggtggctgcaccgagcgtcggacggcaccggccctgatgccgagaacgtctgctcgctgaccgaggacgcgcgcagcgcgctggcctttgtgcgccgcctgcgccgtgctgacacggtggccacgggcgggtccattgccggtatcgcggcaggtctcaaacgggtggccacccagctggacggcgacccgtcacgcctgcgcgccgacatcgaagcccagatcgcagaactgcagacccagctgcatgccatcgacgacggataccgtccggaaccggatatcgtcgatcttgaggacgagacccgggccatcgcgtatcagatggaacaagtgatcaccgacatcgtccgctacggcagcatgcagaacgagatcaccgccggactcatcgacgccgccgaggactccgactccggcttccgcgaccgcgcccgcagaatgttcgcggactatgacgccctcttcgattcccgcgagcgtgcctcttattcggccttcacgcggaccatccaagatccggatcagcgagccgcgctacggagtgatattgcctgtgtcgcagagggtttgcctgatctcgaccccgggctgcgtgaggtcatgaggaacttcttcaagctcgtgtctcagcagatcgcggaggtctcccgcatcgaacagcgctgcgcacagcgcatccggcggttcttcgccgccggcaccacggagcaggctcgtggccgtgcgcgacagctcaatgacgcgctggcggccgggcacgctctactcaaggtatcgacggcggactctccgatcgacgccgagctaccgatcgggcgttccgccgcagcggcgatcggcgcgctgtctttcaccatcaaggacaccgcgccgccggtgctcgcacaggacgccccgtcggggccgctggatttgagcgggttctcggcgctggccacccaggtggatatggccgcattggccgatacggtcaacagtgccattgccggtggcccagtttccttgcccgacatgatctctcatgtcgaggcgccctaccttggtgatgtgatcgtgttgtggtcgctggccctcaagcaggacaacactgccgaccgcgaatcggtaaaggtgaagttccggtccctcgacggacaggaccgggtgatggaggtacctcagttgatgttccgtgaaccggtgctggccaccctcgaagaggagggatcgacactgtga

SEQ ID NO: 42931 - DNA, 750 bp, Mycobacterium abscessus M93
gtgacgacacaggcttcggggaccgccctggggaatatcaattttgacgacctgccgggtgtcgaacccgatgcctcggcaccgcgaacggccaaggggccgcgattcgacggcgacaccagtgagcttccggacaaggcctgctgggcgctgcagaacttggtggcccggcgctacctgagtaaggacggtcagcccgaactgtgggcgtcgatgatcgagcatcgcaaggtgctggccgcgcgcctgtccgaattggacctgcggctgcgggtgttcgacgatctcgaggttgcctacgccgaaccagctccgttggagaaccccagcgtgtacggcgccagggtgttgcgccgggaaccgttgggcacctacgcgtcgatcgtggcactgcacctggccaagatcgccaggaccgcgcacgacgaacatgtattggtcagccgcgacgatattcacgaactcttcgccaacgtctcccacgacatcgaccgcgacgaggcgatgctgcgtgatcgcgttgacgaggcgatcaagcggctgtccaaggctgagattctgcagcgcacccgcgatgacgagcacagctacaccatcagcccagtcatcaatgcgctgatgtcggcgcagatgatcgaggcactgcagcgtcagtacgagcagttgcagcgcggcggtgccgcccccgaagacgccgacggcgcagaccccaccgacgaagaagatggcgagaccgatgacgacgagtga

SEQ ID NO: 42932 - DNA, 3348 bp, Mycobacterium abscessus M93
atgacgacgagtgatgcagcgacacaacagttctggttgtcccggctgcaggtcatcaactggggcgtcttcgacggctatcacagcatcgagttcagccgtcgcggtacgctgatcaccggctcctccggtagcggtaaatcatctctactggatgcgatctcgctggcattcttgtcttcgaaccgccgtaacttcaacgcttcgagcgacaccaccgccgcgggttccagcatgggcaagcgtaccgtcgacaagtatgtgcggggcttgtggggagagctgaaaaacccgggggagcgccccaagcagatgttcctgcgcggcaagggtggggcctggtcggctatcgccgtcacctactccggcaccgacggtcgggtgatcaccggcctggtactcaagtggcttgccccgggctcggactcggactcgtccagccgctactacctgatcgacgcggacgccgacatccgcgatctctgcaatgcatgggccagcaagggatacgccggctcggtattcgagggcgcgggttggcgcggccacaagagcgaacgctggtacctggaacagctatacgccgccgtcggtattcagggttcctctgccgcgcagcagctgctgggcaaggccaagtcgctcaagagtgtcggcggcctggagcagttcgtacgcgagtacatgctcgatgaaccggagtcgatggcagcgatatccgaagcgctagggcagatcacaccattggtcgacgcccgtgccgccttggcgatcgcgcagcgccagcggcagacgctgggcgatatcgaacagatccaacagacgtacgccagcgatgcggcgcagttggccaccgtggacgtcgtggaccatcacaccgtgcgcgactacgtggatcagcagcgcctggcgctggcgggcccggagatcgatctgctggataccgagatcacccggctgggcggtgagtgtgacgaaatccagtcgcgccaggacattctcacgggagagcgggacaaattgctcggccggatcgccgctgccgacagcaatctggcgccactcaaaagcgagctggctcatgctcgtgcccgcgcagaagaggtgtcgcgccggcgtacggcctacgacagtgcattgtgggacctgggtcatgaagacgatatcgaatctgccgaggaattcgaggccatgcgggtggagagcctgcgggcagtcacccggatcaacgctgagctcgaagccggccacgatgcatatgtcatggccgcgggtgcgctctcgacggcacgtgaccagctgcgtgccgcatccgccgaattcaagcgggtcgagcacctgggtaccccggtgccaccggatgaggaccgcatgcgcggggagatcgcggcggcgcttgggcttaccgccaaggacctgccctacgtgtgcgaactgatggatttgcgcccagggcaggaacggtggcgcaaatctgtggagaaggtgttgcgctccaccgggctctgcctgctggtgcccgatcagcaccaccgtcaggtgctgcgttacgtcaacgagaacccgatgcgtggctacctgcagatggagcgggtgattccctccggtaccccgcggcgcgccgagccgggtacgctcgccgactgtttgcgcctgaccaaccccaaccacgaatgcgccagtgccgccatgaatctggtggccggtgtcggcgactacgtgttggtcgacagccccgacgaattcagcaagcaccgccgggcggtcacagatcagggactccgcaaggacggtgaccggcgcgcggtcaaggacgatcggcgtgaattgcgggcctcccagtacatctatcagggcaacgccggtgacaagcgcgccgcgctttccgacgatgtggtcgaagcgcagcaggcggtcagtgatgccgaaaagttcattggcgaaatggacaccaagcgcgaagagctgcgttcggaggtggtgcggtggtccaagctgcacagccagtacgagtattggagccagattgatacggactcggccgaagctgccgtggcgcgtctgcaggaccagtacgacgcgatgctggaagccaaccccgacctgaccggattgcagcagcaggccgactcctacctcgacgagatcaagaggctctccgaacgcatcggagcattgcgcaagcaagaatccgagcatgattcgcgccggacccggctgctggatctgctggacaacctgagcccgcgtgaggtgggcgggcacacccgatcgggaatcgaggcctacgtgccccaactctcgtccagcctggatgtgttggaacccgatgcctaccgactggagctgtggcggcagatcgagaaggatcagtcggtgctgcgtgagagcgtcacccgctcacgtaacgagctgaaccggattctcaacgcgtacgaccgggactttcccgactctatccccaacgacagtgagaacttcgacgagaagatccacgactatgtcgcgctctgccgccggatcgatgaacgcgacctgcccgctgcctacgaacggatgctgcggctaatcaccgagcaggcgcccactgccgtgttgcggctgcaccagctcgccgaggaggaggcacaccgcatcaccgaccagatcgaccgtgtcaatagcggtttgggttcggtcgagttcaaccggggtacccggctgaccctgcgtgccgagccgaaggcgctcgaagcggtcggcgagctcaacgagcgtgcccggcggatatccgggcgggccgtcgccgtttcgatgggggacgagaaggccatccacgatcagtaccaggacatcctgcaactgcgtaacctgttggccgctgagacacctgaggcgcgccagtggacgcgcgacgcgttggatgtgcgtaaccgcttcgtgttgtactgcgaggagcgcgatgccaggaccggcgaaccgatccgtacctacagcaacgcgggtgcgaattccggtggagaacaagagaagttgatggcgttctgcctcgctggcgcgctgagcttcaacctggctaacccggagacgggggacaaccggccggtcttcgcgcagcttatgctcgacgaggcgttctcgaaatcggatccgcagttcgcccagcaggcgctgtccgcgttccgcaagttcggattccagctggtgatcgtggctaccgtgcagaacaccaccaccatccagccctatatcgacagcgtggtgatggtgtccaagccggacggcccgggggtgcgtccggttgcttcgacgcgcacggtgccgatcggtgagctcggcgacgtacgcaaggccgtgagcgcccgctag

SEQ ID NO: 42933 - DNA, 1461 bp, Mycobacterium abscessus M94
atgaatgatctgacagtcgaagagctgttcgcgcacaacgatgacgtgcagaaatcccgtgcggtccgcctgttggccgccaagaatctggccccctacatcacgctcatggaacgccacctggaccgcagcgccaaagtctccgaacctcagctggtggccaagctggaccgggacctgagcgccgtcgggctgggagaacagtccgggctggccctcatcaagagctgggcgagcgacgggtggctgcaccgagcgtcggacggcaccggccccgatgccgagaacgtctgctcgctgaccgaggacgcgcgcagcgcgctggcctttgtgcgccgcctgcgccgtgctgacacggtggccacgggcgggtccattgccggtatcgcggcaggcctcaaacgggtggccacccagctggacggcgacccgtcacgcctgcgcgccgacatcgaagcccagatcgcagaactgcagacccagctgcatgccatcgacgacggataccgtccggaaccggatatcgtcgatcttgaggacgagacccgggccatcgcgtatcagatggaacaagtgatcaccgacatcgtccgctacggcagcatgcagaacgagatcaccgccggactcatcgacgccgccgaggactccgactccggcttccgcgaccgcgcccgcagaatgttcgcggactacgacgccctcttcgattcccgcgagcgtgcctcttattcggccttcacgcggaccatccaagatccggatcagcgagccgcgctacggagtgatattgcctgtgtcgcagagggtttgcctgatctcgaccccgggctgcgtgaggtcatgcggaacttcttcaagctcgtttctcagcagatcgcggaggtctcccgcatcgaacagcgctgcgcacagcgcatccggcggttcttcgccgccggcaccacggagcaggctcgtggccgtgcgcgacagctcaatgacgcgctggcggccgggcacgctctactcaaggtatcgacggcggactctccgatcgacgccgagctaccgatcgggcgttccgccgcagcggcgatcggcgcgctgtctttcaccatcaaggacactgcgccgccggtgctcgcacaggacgccccgtcggggccgctggatttgagcgggttctcggcgctggccacccaggtggatatggccgcattggccgatacggtcaacagtgccattgccggtggcccagtttccttgcccgacatgatctctcatgtcgaggcgccctaccttggtgatgtgatcgtgttgtggtcgctggccctcaagcaggacaacactgccgaccgcgaatcggtaaaggtgaagttccggtccctcgacggacaggaccgggtgatggaggtacctcagttgatgttccgtgaaccggtgctggccaccctcgaagaggagggatcgacactgtga

SEQ ID NO: 42934 - DNA, 750 bp, Mycobacterium abscessus M94
gtgacgacacaggcttcagggaccgccctggggaacatcaattttgacgacctgccgggtgtcgaacccgatgcctcggcaccgcgaacggccaaggggccgcgattcgacggcgacaccagtgagcttccggacaaggcctgctgggcgctgcagaacttggtggcccggcgctacctgagtaaggacggtcagcccgaactgtgggcgtcgatgatcgagcatcgcaaggtgctggccgcgcgcctgtccgaattggacctgcggctgcgggtgttcgacgatctcgaggttgcctacgccgaaccagctccgttggagaaccccagcgtgtacggcgccagggtgttgcgccgggaaccgttgggcacctacgcgtcgatcgtggcactgcacctggccaagatcgccaggaccgcgcacgacgaacatgtattggtcagccgcgacgatattcacgaactcttcgccaacgtctcccacgacatcgaccgcgacgaggcgatgctgcgtgatcgcgttgacgaggcgatcaagcggctgtccaaggctgagattctgcagcgcacccgcgatgacgagcacagctacaccatcagcccagtcatcaacgcgctgatgtcggcgcagatgatcgaggcactgcagcgtcagtacgagcagttgcagcgcggcggtgccgcccccgaagacgccgacggcgcagaccccaccgacgaagaagatggcgagaccgatgacgacgagtga

SEQ ID NO: 42935 - DNA, 3348 bp, Mycobacterium abscessus M94
atgacgacgagtgatgcagcgacacaacagttctggttgtcccggctgcaggtcatcaactggggcgtcttcgacggctatcacagcatcgagttcagccgtcgcggtacgctgatcaccggctcctccggtagcggtaaatcatctctactggatgcgatctcgctggcattcttgtcttcgaaccgccgtaacttcaacgcttcgagcgacaccaccgccgcgggttccagcatgggcaagcgtaccgtcgacaagtatgtgcggggcttgtggggagagctgaaaaacccgggggagcgccccaagcagatgttcctgcgcggcaagggtggggcctggtcggctatcgccgtcacctactccggcaccgacggtcgggtgatcaccggcctggtactcaagtggcttgccccgggctcggactcggactcgtccagccgctactacctgatcgacgcggacgccgacatccgcgatctctgcaatgcatgggccagcaagggatacgccggctcggtattcgagggcgcgggttggcgcggccacaagagcgaacgctggtacctggaacagctatacgccgccgtcggtattcagggttcctctgccgcgcagcagctgctgggcaaggccaagtcgctcaagagtgtcggcggcctggagcagttcgtacgcgagtacatgctcgatgaaccggagtcgatggcagcgatatccgaagcgctagggcagatcacaccattggtcgacgcccgtgccgccttggcgatcgcgcagcgccagcggcagacgctgggcgatatcgaacagatccaacagacgtatgccagcgatgcggcgcagttggccaccgtggacgtcgtggaccatcacaccgtgcgcgactacgtggatcagcagcgcctggcgctggcgggcccggagatcgatctgctggataccgagatcacccggctgggcggtgagtgtgacgaaatccagtcgcgccaggacattctcacgggagagcgggacaaattgctcggccggatcgccgctgccgacagcaatctggcaccactcaaaagcgagctggctcatgctcgtgcccgcgcagaagaggtgtcgcgccggcgtacggcctacgacagtgcattgtgggacctgggtcacgaagacgatatcgaatctgccgaggaattcgaggccatgcgggtggagagcctgcgggcagtcacccggatcaacgctgagctcgaagccggccacgatgcatatgtcatggccgcgggtgcgctctcgacggcacgtgaccagctgcgtgccgcatccgccgaattcaagcgggtcgagcacctgggtaccccggtgccaccggatgaggaccgcatgcgcggggagatcgcggcggcgcttgggcttaccgccaaggacctgccctacgtgtgcgaactgatggatttgcgcccagggcaggaacggtggcgcaaatctgtggagaaggtgttgcgctccaccgggctctgcctgctggtgcccgatcagcaccaccgccaggtgctgcgttacgtcaacgagaacccgatgcgtggctacctgcagatggagcgggtgattccctccggtaccccgcggcgcgccgagccgggcacgctcgccgactgtttgcgcctgaccaaccccaaccacgaatgcgccagtgccgccatgaatctggtggccggtgtcggcgactacgtgttggtcgacagccccgacgaattcagcaagcaccgccgggcggtcacagatcagggactgcgcaaggacggtgaccggcgcgcggtcaaggacgatcggcgtgaattgcgggcctcccagtacatctatcagggcaacgccggtgataagcgcgccgcgctttccgacgatgtggtcgaagcgcagcaggcggtgagtgatgccgaaaagttcatcggcgaaatggacaccaagcgcgaagagctgcgctcggaggtggtgcggtggtccaagctgcacagccagtacgagtattggagccagatcgatacggactcggccgaagctgccgtggcgcgtctgcaggaccagtacgacgcgatgctggaagccaaccccgacctgaccggattgcagcagcaggccgactcctacctcgacgagatcaagaggctctccgaacgcatcggagcattgcgcaagcaagaatccgagcatgattcgcgccggacccggctgctggatctgctggacaacctgagcccgcgtgaggtgggcgggcacacccgatcgggaatcgaggcctacgtgccccaactctcgtccagcctggatgtgttggaacccgatgcctaccgactggagctgtggcggcagatcgagaaggatcagtcggtgctgcgtgagagcgtcacccgctcacgtaacgagctgaaccggattctcaacgcgtacgaccgggacttccccgactctatccccaacgacagtgagaacttcgacgagaagatccacgactatgtcgcgctctgccgccggatcgatgaacgcgacctgcccgctgcctacgaacggatgctgcggctaatcaccgagcaggcgcccactgccgtgttgcggctgcaccagctcgccgaggaggaggcacaccgcatcaccgaccagatcgaccgtgtcaatagcggtttgggttcggtcgagttcaaccggggtacccggctgaccctgcgtgccgagccgaaggcgctcgaagcggtcggcgagctcaacgagcgtgcccggcggatatccgggcgtgccgtcgccgtttcgatgggggacgagaaggccatccacgatcagtaccaggacatcctgcaactgcgtaacctgttggccgctgagacacctgaggcgcgccagtggacgcgcgacgcgttggatgtgcgtaaccgcttcgtgttgtactgcgaggagcgcgatgccaggaccggcgaaccgatccgtacctacagcaacgcgggtgcgaattccggtggagaacaagagaagttgatggcgttctgcctcgccggcgcgctgagcttcaacctggctaacccggagacgggggacaaccggccggtcttcgcgcagcttatgctcgacgaggcgttctcgaaatcggatccgcagttcgcccagcaggcgctgtccgcgttccgtaagttcggattccagctggtgatcgtggccaccgtgcagaacaccaccaccatccagccctatatcgacagcgtggtgatggtgtccaagccggacggcccgggggtgcgtccggttgcttcgacgcgcacggtgccgatcggtgagctcggtgacgtacgcaaggccgtgagcgcccgctag

SEQ ID NO: 42936 - DNA, 981 bp, Lachnoanaerobaculum saburreum F0468
atgtttgaacatatatgtgagcagggaagtccgtatgaaggagtgctaaaagaagcatcggaagattttgacaatctgaatcaggcacttagaaccttgtcagcttctatagaagaccatataaatgaactgactttaggaaaaagtccgcaggagatactggatttttttgaaaaatatgaagaaaagatagttgtaggttcatatcacagatttaagacaaatgacaatctgttctactacaggtcaagtctgtatgaaagccttgataaatgtgaagacagcctgtttgacgcactggtgcttgactatatcgacactgagcgtgtagaaaaggatgaagcaagcataaagataaaggaacttataacaaaagttcgtatggatattgaagagatggaagaggtcatgcgagctattgatgacaggcatattctttatagaaccagagcggtacaaagagcacagtttttgcttttgtctgatggaagcagtaagagtaaaatcaacagtatactaagattttatgcaaatgagatacagtcaaaaggagacggcaacaaggatgatgatacggtagcaagtgaaatctttaggatattcggacaaaacttttttgacagcgcatcacttgccactcctgtaaaaaagagaaaacctacacctattgaactgatgaatataatagaagaactggatatagagctggtagaagagaaaaataaaaagatgatggagtatatacgaaatgctttgacatctgagaatgtaaacaggtttgcaaaagatattttaaacggaaatcacgcagtacggataagttcagtatttgaaaaagagcctgatacatttataaagattataggtctatatacatattcaaagactgctgaaagaggatatgatataaagttaaaggacaatgtggtggaagtaaacggtgtgagattcaaagatttcattgttgaggaaagaagataa

SEQ ID NO: 42937 - DNA, 576 bp, Lachnoanaerobaculum saburreum F0468
atgtcagttgatataaaagaagagatagccaattacctgttaaataattgttttctgatggggaatgtggatactacaagagaaaaatattactatgttataaatcatgaggagagtttcagacagatttttttacctatcggatatacattggttattcataggaatttgagagtagtccagctgataaataatcatggcaccggcagagttgtattaaaaaaatatgagagcattattttgcttatattcaggctcctatatgtagaaaaaagagaaagtctgtctacaagtgaagacagagtttttgtaactgttgaagagataaaaaatgaatatgagaagctgagtcttccaagaaaatttgacaaagtgtttttagaggagtctgtcagaaatataaagaaatataatctcatacaggtagtggacagacttttggaaatggatgcaaagatacagatttatccgtctgtgatgcttgctatgccggataccaatataagtaaggcatatgaggaaactgccaaacttttagcacagtatgaaaacagtgaagagggagatgaaggatga

SEQ ID NO: 42938 - DNA, 3330 bp, Lachnoanaerobaculum saburreum F0468
atgataagaatgaaaaggcttcatctgataaattggcataattttcaagatgatataatagattttaaaaatatcacctatcttttgggtgtaaatgctgtaggaaagaccactattatggatgctgtgagatattgcctcactaccaataaggacttcaatacggcaggaaataaaaagagcggaagaacacttctgggttcagttcaccaaaagcaaagggcacaagaatcctatcttcgcccgggacataccgtttcatatataggaatagagtttttggatgaggcaatcaaaaagaactttgtgataattgcccgtatagaatctgaaacaccgaagcaggacttaagaggagtatatcaggattggtatattacaaagcccggatacagtctggaggatattccgttttttacaaagaaaaaggatggaaagagtccgacttccagagacgcctttaagcttgagaacaagggtatggacagagcgtccaatcaggcggatgcaagaagaaggatttgcagaatgcttggtataggtgaagcagactcacctatcggaaagaagttcaatgaagtctttcatatgggtaccagcttagaggatataagagatatcagagagtttatctatacatatattttgccggagcctgaagtaaatatagaatttttacaaaaggacatgattgagcttgagagattgcaggaaatcttgcaggaggcttgtgacagagaagaactgctaaaagaaatcaatgataaaataaaagcggcaaaagaacttctgggtaaggtcaaagtaaatgagagtctggttgcctatgcgaatctacagggaaatattgaagagacagatgagaaaaaatatcttattgaggagtggagtacaagtcttaagataattgataagaaactgcttgatctttttgaaagtgagaacaaggcatccgctcttttgtatgaggcacaaagagcggcggaagaaaatgcggaaaataaggaaatgctctcacttgaaagtgaaaataaaaataataagcttgaaaatgataagcttatattggaagtaagtatatttgaagatgtgttgcaaaagttattttcacttaaagacagtttgaataaaataggctttgctgtaaaagtggctgattgtataagagatgaaaatgcagctgtagatgaaagaatcagagaaatcaaaaacagtgcaaagctttttgcagatatagaagaagaaatcaaaaatcatgatgcaaagataagaaccgatattacaagtttgagtgataaaagtgatattctttcaaaaaagataaaaagtcttgaagcaggtgtgatgtgttatccggatgaagcgatatttgtcagagataagataaatgattttttgagtgagcagagtaaaagggcggatgccaaactgctctgtgagcttttatatatgacggacagcagttggcaggatgctgtggagagctatttgaatactcaaagattcaatattattgttgagcctgacaattatctttcggcaaagaaggtctttgtttcactgggagacaaggttaaaggtataggacttatagataccggaaaaataagggatgtggagtataaaacttcagatgagtcatatctgggagataagatagagtctgaaaatatctatgcaaagacatatgcaagatttgttatgaaaaatgtcatttgttgtgagtcatcagatgacttggaaaattttacaaagagtgtgacaagggatagacttagattccaaaacttctgtttacaaaggatggcaaagaaggagcattttataggtgtggatgctatagcaaagcaattaaagagtgcaaaaacagagtttacaggcgtcaaaaaagaacttacgaaacttgaagaagccaagaaaaactttgactctatttataacggctatacaaaattcagagcgggagacaacttcggaaagcttgaaaattactgtgaatcaaagtcaaagtcaaaagcactttctgtcaagatagctgatatagcaaagaagatagaagagtttaagaaaaatcctattcttttagctatgtatgacagggttaaagaatgtaagaaaaacctcagtgttatcagagatgagataacggataataaggctaagaaacaaaatcttaattcaaatataaatcaggcaaaagcagatgttgacgagcttgaaaaaaatcttgcacaaatgcaggctgtatatgagagcagtatagaggagtatccggagtttatcaatgatgttgaaaagaaatatcaaaatgagagaaagtcaaagaaagcttccgccattgcttacaacttttcaaaccgtgcggtacaggacaatattacattaaataactatttgaatcaggaacttataccgcttcaacaaagatatactgcgacatatacctgtgattatgctgccggacttggcggtgcggacagataccgtcaggaatatctgacattgcagaatatagaacttgagaggcataagagtgaacttttagatgcacagataagatgtaaggacagattccgtaaggaagtgctgtttaggatgaaggatgatatcttaagggcaaagcaacagtttaaacagattaatcgtgtgatggaaaaccttgaatacggcgaagaaagctatagattcgggattgataagagtaaggacaaggaacttggaatgttctatgatattattatggacaaggacaatcaacagattgacagagaaaatgatatgcttatgcttatgactgaggcaagtaagtctgaggtctttgaaagtcagattgatgattttatgagcaggattatgattgatgtggaagaacatgccaagcagaatctgtcaggtcaaaagtcaaatgcaaagagtatgggaatgtatgtggattacagaacctatcttgactatgacatcattgtaaagaatgctgtaacaggtaatgaggtggaactttcaaaggtcagcggtgaaggaagcggaggtgaaaatcaggtaccgttttatgtggctatttgtgcatctcttttgcagatttatgagcagagcaaggaaggttcaataagacttatacttcttgacgaggcgtttaacaatatgacaagtgacagaatagaacctatgatgaatatgtttaaaaaattgaatctacagctggttttgatagctacggcggaaaaggccacggccatattgccgtactgtgatattacatattccattgtaaagtccggaaacagaaatgcgataggagtatttgagaggattgaggatggactacactaa

SEQ ID NO: 42939 - DNA, 1227 bp, Lachnoanaerobaculum saburreum F0468
atggactacactaaggatattttgaacagattgatagatatatatgaaagaagagaaggctacaaaaaagatccttcttctttgcgtgtgatacaagtagatataaaaaaggtatatcctgcatatgtggacagatacaatcacaatgtgtataaggagatcaatgtagcaatagaaaagttgataaatgaaaatcttgttaattcaaatattgatgtttccggaaaatatgaaaaggtaaagttaaatgttgagaatatttcagtgtgttacaaaaaagtaaagagagttactgtaatagagcagtgcaaaaaaacggaagctgtacttaatctgtttaaagataaaaatctgccggtattagacaatattttatctgattggagaaagcttatatcggaatataaaaagcttccatatgatataaaatatgatgcaatcagactgatgaatatactgaaaatacttgaagccatactaagactaagtaatgagagctatattagaaacttttcaaccgcaatatttaaggactccaagagatttcaaagagaatttaagtccggtgtagaaagtatactttttgattatacagatgaggcggtagaaagagataagatacttgaatattataatctgtatgaaaatccaacatatacatatataaagggagatgcggtgattaagtttgaagattcagtcatttatgtaaaagaactgtctgacgggattgcactgtcaaatgtatcacttgaagcgataagagaggtcaaagtatttgcaaagtctgtaataactgtagaaaacctgaccacttatcatgatgaagatgaaaaagaggcggtatatatttatctgggaggttatcacaataaatcaaaacaggtgatattaaaaaagatatatgatgaaaataagaactgtgaatttatgcatgagggagatatagatgtatatggttttttgatacttgaaaacttaaaagaaaagaccggaataccttttaaacctttaaatatggatgtagatactctaaaaagattttttgaagcaaatatatataaggaacttacattttctgatatcaatatgatagagaaaaataaagaaaagcttagagattataaggaagtattggaatttatgcttttgcataattgtaaggtagagcaggaatctataaaggcggttgagattttagagccggcaggcagacggattttttaa

SEQ ID NO: 42940 - DNA, 1464 bp, Mycobacterium phlei RIVM601174
gtggacggtaccgccgacaacacggagctctcggccgccgacctgctcgaactcaaccgcgagctgcagggcagcccgaccacccggctgctggccgccaccaatctcggcctgtacgccacgctgatggagcgccacctgctcgacggggtgacaccggagaccgagctggtcgtgcgcctggagcgcgacctcgacgacctcggctcgctcgagggccagtcggggttgtcgctgatcaagtcgtgggccagccagggctggctgcaccgcatcgtcgacccgcgcaccgaccagaacgtctgctacctgacccaggaggcccgccgcgcgctggacttcctgcgcgggatgcgccgccaggacaccatcgccaccggcggctcgatgcagggcatcgccgcgcggctcaagcaggtcgccgtccgggtggaccgcgacccggtccggatccgcaagcacatcgaggccgagatcgcggcactgcaggccgagctcgacgagctcgaggccggccagcgccccgaacccgacgtcaccgacgcctacgacgaggcccgcgcgatcgccctgcagatggaacggctgatcaccgacatcggccagtacgggacgatgatcgagcaggccaccgccgccctcgacgagccgatcgacagcaacgaggcctaccgcgaccggcagcgccagatgtacgaggactaccaggccgcgtgggactccaagggccgcgagagccaccgcgcgttcctgcgcatggtcaacgaccccgaccagcgcgccgagttcgaggccgacgtcgccgcggtcgccgaggcgctgcccatgctggacccggctctacgcaaggtcatgtcgggcttcttcgagctggtcggccagcagatcgacgaggtcgagcgcatccagcagcgctgcgcgcagcgggtcaagcggttcaccgcgttcggcaccctggagcagagccgcggcatcgcccgccagctcaacgacgccatcggcgccgcccgcgcgctgctgaagacctcgctgatcgactcgcgcctggacatcgaggtgccgctggccaagcacgcgatcacctcgatcggcgcgctgagcttcaagatcggcgacctgtccaccccgaagccggccgtccacgccgagggcgaggtcgacctgtccagcttcgcggcgctgaccacccaggtcgacgccccggcgatgtcggagatgctcaaccgcgcggtcagcagcggacccgtctcgctgccggaggccgtcgcgatggtcgacaacgcctacctgggccacgtcatcgtgctgtggtcctgggccctcaaacaaccgaatgatgctgcggcgcataagaagtcgatcccggttcgattccgttccctggacggtccggaccgggtgatcgaggtgcccgagctgttgttcaccgaaccgatcacgagcaccgcaggagtcgcgcagtga

SEQ ID NO: 42941 - DNA, 687 bp, Mycobacterium phlei RIVM601174
gtgaccaccgagcccgaggtcgacttcagctcactgcccgaagtcgaccagaacgcccgcaccccgcaccagcgccgcccgcggttcgacggcgacgtctccgagctgcccgaccgcgcctgctgggcgctgcagcacctgctgacccgccgctacatcagcgccgactccgacgccgacatctactcgtgggtgctggaataccgcgaccagctggccgtgcggctgtccgagctggacctgatcctgcgggtggtcgacggcatcgaggtggcgttcgtcgagcaggcccgctacgaatcggcaaggggcatcaagcttctgcgccgcgaaccgctgggcacctacgactcgatcctggcgctgcacctggcgcagatgatgcgcgccgcgggcgggcagtcggtgctgatcagccgcgaggagatccacggcctgttcgccggggtgctcaacgagaccgaccgcgacgcggtgacgttcgccgcccgcatcgacggcgcgatcgcccggctggccggcctggagatcctgcgccgcacccgcgacgacgaggacagctacacgatcagcccggtgatcaccgcgatcatgacggcctcggtgatcgaggaactgcagcagcagttcgaacagctgctcaacggcggcgccgcggccgacgaggaggacacccccgatgactga

SEQ ID NO: 42942 - DNA, 3357 bp, Mycobacterium phlei RIVM601174
atgactgaacagttccacctgtcgcggcttcaggtcatcaactggggcgtgttcgacggctaccactcgatcccgttcagccccggcggcgcgctgatcgccggcgcctccggtagcggcaaatcgtctctgctggacgcgatctcgctgggcttcctgccgttcaaccgccgcaacttcaacgcctccggcgacaacaccgccgccgggtccagcgcgggccgccgcaccgtggacaagtacgtgcgcggcgcgtggggtcagcgcagcgacggcaacaccagcaaggtgatgtacctgcgcggtgagggcaccacctggtcggcggtggcggtgacctactccagcgactcgggccgcaccgtgacgggtctggtgctcaagtggctgaccggcgagtcgcgcaacgactcgtcgagccggttcgtcatcggcgacggcgacctggacatcgaggacgtctgcaaccgctgggcggcgggccgtttcgacacaggtgtgttcaaggacggcggctggcggttcaccacgaaggtcgagtcgcagtacctggcgcagctgtacgccacgatcggcatccgcgcctccgatgccgcccagcagctgctcggcaaggccaagtcgctgaaaagcgttggcggcctggagcagttcgtccgggagttcatgctcgacgagccggagagcctggcccggctgcccgaggcgctcaagcagatcgacccgctggtggaggcgcgcgaactgttggcggtcgcgcagaagaaacgcaagatcctcggcgacatcgagaagatccagcagcgctacgcctcggagtccaccgacctgggcatcatcgacctggtcgacatgccgatggtgcgcgcctacaccgaccatgtgcggctggcgcagtgcccggcgcagatcgaggtgctcgacaccacgatcgagcagctcgacaacgagtacgaggacgtcacgcggtcgctgaatctggccaaggccgaggcggattcgctcaacgcccagatcagcgggcagaacgccagcctggcgccgctgcagtcgcaggtgaccgccgccgaggccgaggccgagcaggtgacccgtcggcgcagcgcctacgaggacctgctgatcgcccacgacatccgggtcccggagaccgccgaggagttctggaacctgcgcgaggagctgctcgccgaggccaccgagctgctggcccgggtggagcgcaaccgggaggcgtccaccgacgcggagtacgcgcagaaggcagcgcgtatcgcccgcgacgacgccgcccgcgaactcaagcgcgtcgagcacgtcggctccgcgctgccggagttcgcgctggcgatgcgcgaacagatctgcaccgcactggatctcgacgtcaacgagctgccctacatcgccgagctgctggacctcaaaccggatcagacgcgctggcgggtcgcggtggagaaggtgctgcgcggggcgggtctgcggctgctggtgcccgaccagcactgggagaaggtgctgcgtttcgtcaacgagaccgatatgcgcggccggttgcagctgcaccacgtgcggacccggatgctgggcgccgagcccgaagaacctgatccgaacacgttggcgggcaagctgttccccgtcgacccgaagcatccgtgcgcggccgaggccgtcgacgtcgtcgccgccgcgggtgaccacgtctgcgtcgacacccccgatgtgttcgcccgttaccgccgcgcggtcaccgacaccggcctgtacaaggacagcgaccggttggcgatcaaggacgaccgtcgtccgctgcgccagtccgactacctgtaccagggcgacgtgacggcgaagatcaacgcgctgaccatggatctggccgccgccgaggaggcctaccagaaggcgcggcgggtggccgacgacatcgccgccgagcggcagcgctggcgggaccgggccgcggcgtgcaaggcgatctgcgagcagttcccgcagtggagccagatcgacaccgagaccgccgaccggcacgccgaccggctgcgcgagcagtacgagctgctgatggccgagcaccccgacctggaggcgctcaacgcccgcgccgacgaatgctggtcacagatccaggctttgatgacgcgccgcggtgcgatccagacccgccgcgacgacctcgacgcccggcgcaccgcgatcctggagctctcggagcggctgtcgccggcgttcgtctcggaaccgttgacggagctgctgaaccggtattcggcgacgctgccggtgacgctggagctgctggatcccgagccgttccgcgacgcgctgttcaacacgatcaagaaggaacgcgagcagctgcgcgagagccgtcgtcgctcctacgacgagctggcgcgcatcctcaacacgttcgacaccgcgttcccggacgcgatccccaacgacagcgacaacttcgacgagcgggtgcacgactacgtcgcgctgtgccgccacatcgacgagcgcgagctgcccgaggcctacgagcggatgatgcggctggtgaccgagcaggcgccggacgcgatcctgacgctgcaccgggtggccgagcaggaggcgcggcgcatcgccgagcagatcgagcgggtcaacaccgggctgggcgcggtggagttcaaccgcggcacccggttgacgctgcgcgcgacgccgcggtcgctgacggcggtggcggagctgaccgagatcgtgcggtcgatctcgcggcgcatcgccgaggtgggcctgggcgacaagcaggcgatcctggaccagtacgccgatatcctgcggctgcgcaaccggttggcgtcgaccaacccggaggacaaggcgtggacccgcgacgcgctggacgtgcgcaaccggttcacgttcgactgcgcggagtgggatatcgagaccggcgacctgatccgcacgcactccaacgccggcgacaactccggtggtgagcaggagaagctgatggcgttctgcctcgccggcgcgctgagcttcaacctggcggcgcccaacagcgacgacaacaaaccggttttcgcgcagctgatgctcgacgaggcgttctccaagtcggacccgcagttcgcgcagcaggcgctgcaggcgttccgcaagttcgggttccagctgatcatcgtggcgacggtgcagaacgcgacgacgatccagccctacatcgacagcgtggtgatggtgagcaagacggaggcgacgggccgcaacgcccgccccgtcgcgtcggtggcgacccggacgatctcggagttcaccgcgctgcgtaaggagatgcgggagaaggttccggcgggcgtgtga

SEQ ID NO: 42943 - DNA, 1470 bp, Pseudomonas geniculata N1
atgaagcatcgcgaacgcattgcccgttaccgccacctgcgcgaacagccccagtggaagctgcttgccgccgaccacgccccggaaatcatcggcctgttgcagggcctgctgatggacggcgagcgcacgttgccttcgtcggtgctcaacgagcgcctgcagcgcgcgctggaccagttggccggcgatgaactctcgcgcgagctgccgcgtaccgcgcaggcctacatcgcgcactggctggcccagggctggctggaacgccgtttgcccgaaggcgccgaccaggagcagtacgagctgtccaccgccgcactgcaggcgatccgtttcgccgacggcctcgagcaggcccgcgtggccgccaccgaaagccgcctggcgctggtcattgagcagctctcggcgctggctgcgcagaccgaagccgatcctgatgcgcgcctgtccgcgctgcacgacgagcgcgaccgcatcgatgccgaaatcgcccgggtcggcactggccgcgtggttgcgctggacggcaagcgcgcgctggaacgcacccgccagatcatcggcctggccgacgagctgaccgaggacttccgccgtgtgcgcgatgacttcgagcagctcaatcgcgatttccgcgaacgcatcatcgacgacgagggcgagcgcggcgacgtgttgtcgcagctgttcgaaggcgtggatgtcatcggcgaaagcgacgccgggcgcagtttccaggcgttctggcgcctgctcaacgacgccgagcagagcgcccagctcgatgccgcgctggaagcggtgctggcgcgtggctttgcgcgccgcctggaccgcaacgaacgcaacttcctgcgcagcttcaccagcaccatgctcgaacgcggtggccaggtgcacgacgtgctgcagaacttcgcgcgcagcctgcgcggcttcgtgcagagccgtggctatctggaacagcgtcgcctcaaccagctgctgaagcaggcgcagtccgaagcactggctctgcgcgacgaattccccgcacagcgtggcatcggccgtgacctgcagttgaccaccagccgcctgcgctcgtggtcgcagtggaggctgcacgatccgcgcagtgcccaggtcgatggcaatgtcgagtacaacgacgccgcggccatcagcctggaaagcgtcggtgatctggtcgcttcgtccgaaatcgatttccgtaccctgcgccgcgacctgcacgacctgctcgatgcacagccgcggctcagcatcgcccaggccctgtcgcagcgcgaagcgccgcagggcctcggcagcgtcatcggctacctgtcgctgggcacgcgcttcggcaacgtggttgccggcgagcaggagcttgcgcaatggcgtggtggcgacggccagatccgtcgcgcccgcatcccgctggtttggttcactcaggagagacgccatgagctggcatga

SEQ ID NO: 42944 - DNA, 702 bp, Pseudomonas geniculata N1
atgagctggcatgaagatcccatcgacgcaccgcaggccgacgtggcggaagacgcctacgaggccgagccggtggcggccgtggcgcagccccgccgtggcaacgacgtgtattacctcggcgataccgggcgcctgccgctggatgcgcgccgcgcgctgtgccagctgctgatcggccccagcatcgaccagctgcgccacgccaaactgtggccggcgctgatccgcagcgaggcggccatccgctcgtcgctggcggacctgttcctggaactggtgctcgatcgtgacagcggcgtggcgttcacccgccaggccgataccgaagacgttgatgcgccggtgctgctgcgcacctcgccgctgaccttcatcgactcggtgctgctgctgtaccttcgccagcagctggccgaggccgatgcgcgcggcaaccgcgcggtggtcgccgatgccgagatggccgaagcgttggccatctacgaaaagaacctgtccaccgaccgcgccggcttcaaccgccgtgtcgcttcggcggtgcagaagatgaaggacaaccacatcctgacccgcctcagcggccaggaagaccgccacgaagtctcgccggcgctgaagctgctgttctccgccgaagacgtgtcccagctctcggcggtctaccgccagctgcgcgaaaccccggccgccgaggcctga

SEQ ID NO: 42945 - DNA, 3381 bp, Pseudomonas geniculata N1
atggctatctccaagcacactcccgccctgttcaacgaaggcctgccggacccgcgcctgcagcagttccgcatgcgccgcctgcaggtgcacaactggggtaccttcaacggcctgaccgaagtgccgatcgccgagcgcggcttcctgttcgtcggccgttccggctcgggcaagtcgaccctgctcgatgccatgtccgcgctgctgacgccgccggccatcgtcgacttcaacgcagccgcgcgtgaagccgaacgcagtggccgcgaccgcaacctggtgtcctacgtgcgtggcgcgtgggccgaccagcaggacagcggcaccggcgaaatcgccacccagtacctgcgcaagggcgcgacctggaccgcgctggtgctggaataccgcgccggcgatggccgcgtggtcagcctggtgcgcctgctgtggatctccggcaacggcacctcggctggcgatgtgcgcaagcactacatgatcgccgagcgcccgttcgacatcgccaaggatcttggtggtttcgacctggacctgcgcaagctcaagcagaagctgtccgacctgcaccacttcgacaccttctccggttacgccgagcgcttccgcgacctgctcggcatcgacaacgagatggcgctgcgcctgctgcataagacgcagtcggcgaagaacctgggcgacctcaatgtcttcctgcgcgacttcatgctcgacacgccgaagaccttcgacgccgccgagcgcctggtcagcgacttcgccgagcttgatggcgcgcaccaggcggtggtcaccgcgcgccgccaggtggaaaccctgttgccggcgcgcgcctactacaacgacctgaaggaaatgcatcgccggcgtggcgacgacgaagcgctgaagctcggtgttgacagcttccgcgaaagccggcgccaggcgctgatcgaggcgcgcctgcgcgagatggacgtgcgtgaccgcggcctgcttggcgaagaagcccagcgccgtgccgcactggacaaccacaccgagcgcctggccgaactggagctgcagcgccgccagcagggcggtgagcgcatcgaggaactggaacgcgagcagggtcgtgccgaagctgagcgcgaccgccgccaggccaagcgcgagcaggcacgccaggcggcgcagcagctgcaggcggaactgccggacgacgcccacggcttcgccgagctggtcgagcgcgcgcagaacgagctgcaggaccgccagcgtgcctcttcggcgctggacgacgcgatcagcgatcgcctgggtggcaagcgcgatgacgagcgccgcttcggcgaagtccgtgcggaactcgaagcgatgcagcgcacgccgtccaacatccctgcgccgatgcagaagctgcgcgcgcgcctggccgaggaaacgggcatcgccgaagcagcgctgccgttcgttggcgaactgatccaggtccgctccgaagagcagggctggcagggtgccatcgagcgcgtgctgggcggtttcgcgctgtcgctgctggtcgatgacaagcattacaacgacgtcgccgagtgggtgaaccgcacccacctgggcatgcgcttcacctactaccgcgtgcgccgcaacgatgatgcgttcgcgcgcgagccgtcggcgaagtccctgctgcacaagctggaactgcgcgagcacgtgttcgaaagctggctgcgccgtgagcttggcaagcgcttcgactacgagtgcgtcgatgccaagcagctgcgcaacgtcgatcgcggcatcacccgcgaaggccaggtcaagcatccgggcgaccgcttcgagaaggacgaccgcagtgccgtgggtgaccgccgtcgctggattctcggcttcaacaaccacgacaaggtcggcgccttcgagcgtgaagcacaggagctggccaagcgcatcgccggctgcgagaccgacatcgcgcgcctgcgtggccagcgtgatcgcgacaacgaacgccgcctggcctgccacgagctggtcagcatcagctggaacgagatcgatatcgccgccccgcagcagcgcctcagcgatatcgaagcgacgctgcgcgacctgcgcgaaggcaatgccgacctcgccaagctggccaagcagatcgacgcggtgcgcgcggacatcgaacagtcgcgccgcacctatgaagacgtgcgtgtcgagcgcggccagctggtcaaggagcgcgatcgccttgaccgcgcacgccagcagagccgtgcgctggtgctgccgagcctggcccaggagcaggaagccggcctcgccgagcgccttcaggagcagggcccgctcagtctggaaacgctggaagcgcacatgcgccaggtcagcaacgcgctgaacgagcagctgtcttcctcgcagcaggacctcaaccgcatcgagaaccagctgatcggctgcttccgtcgcttcatccagcagtggccggaggaatcgggcgacttcaccgtctcggtggcctcggccgaggacttcctcgcgcgcctcgaacgcctggaacgcgatggcctgccgcagcacgaagagcgcttcttcgacctgctgcagaaccagagcaagaacaacctgctggccctgcagcggcacagcgccgaggcccgcaagtcgatcggccagcgcctggacgaagtgaacgccagcctggaacaggtgccgttcaaccgaggcacgctgctgaccatcgaactgaacgaccgacgcctgccggaagtcggcgagttccacctgcagctgcgcgaagtgctgtcgcagcagcagaccgagcagcgcgagctggccgaatcgcagttcaccgtgctgcgccagctggtcaaccgcctgggctcgcaggaaggcgaggacaagcgttggcgcgagctggtgctggacgtgcgcatgcacgtggagttcatcggcgtcgagctggatgcggaaacgcgccagcaggtcgagatctaccgcagcggcgccggcaagtccggtggccagcgccagaagctggccacgacctgcctggcggccgcgctgcgctaccagctcggtggcgccgacagccagctgcccagctacgccgcagtggtactcgacgaagccttcgacaaggccgataacgagttcaccgcgctggcgatgaacatcttcgacaacttcggcttccagatggtggtcgccacaccgctgaagtcggtgatgacgctggaaccgttcatcggcggcgcctgcttcgtcgagatcagcggccgccacgactccggcgtgctgctgatcgagtacgacgaagaaggcaagcgcctgaagctgcccgagcgcagccgccagcaggccaacgaaccggaagaagccgaggcctga

SEQ ID NO: 42946 - DNA, 636 bp, gamma proteobacterium BDW918
atgctgagagaatttgaaaaaatcgtcgacaccaattccaacggcatcgacgccgcagagcttaaagctgttgccgcaagactgcgtgaacggcaatttattttcaaagaaagccgtgcactaggacgtacttatgacattctggtcagccagcaagactatttcgaagacctctttgccgcctttggcgacgagttctttgtcgacaatcactttggctactgcggcattatccccaaggccaaccgtcccggcctcaatcagctagagactatttttctgcttattttagccaaaatgcacgacatggaatgccgtaaagcccgctctgaaaatggccgcagccaacctagcgaagccatcttgttagatgaatattgccttgctaccggcagagagaagcccaagccacgcgacactaaatccgcattagaccgcctaagaaaagccggtgtgatcgaacttggcaaagtcaatgaactgtctgaaatgcaagaaattactatcctgccgtccatcatgcgcgtggttagcgccaattacctcaccacactaagcgcctttaccgacagccccgcaagtgacgacgatcaagacgaggatgaatcagagaccgaagccgaggacagccaatga

SEQ ID NO: 42947 - DNA, 3465 bp, gamma proteobacterium BDW918
atgaaaataattacccaccgcctcatgcgaatatcactggttaactggtatctttttgaaagcgacgacctcgatatcaatggcgagtcgatcatgcttaccggtagcaatggcgccggaaaatccaccattctcgacgccattcaaaccatcctagccggcgccgacgaaaacaagctgatgtacaacgcagcgtcttcagatgggcgaggttcaggccgctcaattcgctcatacgcccttggcgaagttaccgaagatagcggcagcaacgaaaaatgcgagcccaggcaagttgccaacacctatataagtctgtgcttccaaaagccaaacggcgcctactacagttttggctgcgcattctatgcccgacaagatcgcagcagcatcgacaaatacctatttttaattgacggctacgccctctcagcaagcgactttttacaagaccaatcggtattgcccttcaaagactttcagcaacgcttagccagtatgcccggcaaagccaccgttagcgcaacctcaaccgagtttcgcgatcaggcctgcgtcatgatgtcggccatgggcgctcatgcggctatttcgccagatgtgctatttcgcactatcagccagggtttgcgttttcaaccgcaaaaaaacgtaaccgaattcatccgcaatcacattctgccgagtaaaaatatcgatgtggttcgaatcgaaaacgattaccggcaatacaaagatattctgaaggacatccaaaacgccaaagaccgtcttgttcgattcaacgctatcatcaagcactttgacgcctacaaaagtcactctataaaatcagtggcctgtgaatgggcatcgcgggaagcgcaagtctgcaaggccgacttacgcttagagagcctagaagaacagcgcgacacgacggtcaccgaacaacggcatgaagatacgcaatgcgctgaattagaagacaagctcaccaagcttgcgtcaacgcgcgaccaagcactgacagacaaaaatgattccgacttagcggctaagatcgccctttatcgcgagcgtcttgatcgcgtcaacaccgacatcaagccgttgacgaccatcttaaatgaatgtcggcgcagcttgagtgcgatagaggcaatcccgctaagcaacggcattgacgccgccaatcgcactgaactccaaaccgtaattaacgacattcaagcctgcacagccttcgccaaagaagatgtttttaatacgtggccccagagtaaggcgacgctcaagcacacctttgctgccgtcgaaaaactcgctacaccgttaaccagcctaacccaaagggtgagtgatttagaccgtaaaaacagcgagtaccagagcacaatccaatacctaactgacgttcacaaaacccttaaagcgggccaagcgagtctcaaaccacaaacccaggccgtcatccagctcctcaaagcccatgatattcaggcaagtccagtgtgtgatatggcagagatcagttacggcgaatggcaggagggagtcgagcgctttttaggtgtttggaaccgcgaggccttgttgatcgtcaatcccgacggcgaacccgtcgacacgcctacgcttgaacgcgcactcgccatttaccgccgggagaagaacaccaacccgcgtttgcgcgcggtaaaattattaaatccgggaaaaattcgtgcaccgaaaaacaccccaaaaagcggtaccgccgcagccctgatcgagtccgacaatgtcgttgtgcgcaattatctgcaagggctactgtacgatgttgagctggttaacaccgagggcgaattgcgtcagtgccaccgaggcatcaccaaagatggtatgaccgccgcaaacggcaccatcagcggcggcaataccattgagtttattttgtttggccaagccgcgcgccagtcacaagcagaaaagctccatcaagatcttgttaataccttgcaagaacacactaaggtcaaagacctgttaggcccgctcaaagacattagcaacgagctaagccgccacaaaaccgaactactaaaacagcaagaccagacaatcgcgagcttcagcacccttcagcagctaaaaaaagacgcccagcattttcaagacttaataaaagaactggaagccgacgacagctttgccgcacttgaacgccgctttattgcagcagacaaggcctgcacagaatgtcgcagtgccatggcgacagcccagcagcggcgcggcgaattgcgcatgcaactgcaggaaattgagcgaagtatcccgccattaaaagatgaaatcggcaaggctgctaccgcccgcgccaccattgagtcacagccattttttgaccagcaggcctcctcggcgatgtttgaacaattggcagaaaagtataatgaagacttcgacactattcagaatgacgccttcgccaaggcgagaaatcaggagcgcaaggcgaccgaagcgaaagaaaatgccaacctagaactcagtgaacttgtgcatcgtcacgacttggaagacaagactgagctagtcgccctaccaccgcttgacgcactcagccgctgcagggaatacgccgacgccattgaaaaatctgagatcgccgtacacgagcacattgcggcagaaacccgagagatgatgattcagcatttccgcagcgaaatcgcctcaaagctaaaagacaatatgaccggcttgcaaggcaccttcgacaccttaaacagcgcactcacccacttgcactttaacaatacccgcttcaaattcacctctcagctcgttgagattgacaccctcaaagacgtgtatgcttacgtcacgttacccgacgaaagccatattcccggcggactctttgacgacgcgcaagatcacccaggtttaacgatcattgaggaagtcattaccgatgggcgcctgcatgagattgccgactaccgcaattttttcagctttgacatccagacaatcgacaccgaaaccggtgccaagcgccgtttctcagacctattgaaaaccggatcgggaggcgaacagcaatcgccattttacgtggccttaggcgcgtcgtttatgaacgcctacaagcttcgcaagcaaggtgacagtggcgttattggcggcgcctctttggctatttttgatgaagccatgtcaaaaatggacagtgtgaacaccgccgctgctctccagttctttcaaagtcttggcctccagattattctggccgcgccacctgaagcctcggtaaaaatcgccccccatattgaccgcaccatcacggtaatcagagcaaattctcaggtgtttctggataatcaccgccataccgacgcagcaaaactgttgctggagagtgacaatccgattattcaccccgagctggcgaatacctttatggctgccgtggagcaagaatttggacgctaa

SEQ ID NO: 42948 - DNA, 1227 bp, gamma proteobacterium BDW918
ttggacgctaaccccctcgcccacagcctcttgctgcaatgtctgaaacggctaaacaaaacgagtgcgctggtgtgcgaaggcaaaatcaatattacgcccagaagtcataacgactacctcacggcctcaacccccgatcggctagccgcccacgactatttaaatgcgctcgcgaggcaagttccccagcttcagatttgttaccacgccgagggctttgacgaaataccaatactcaagagtatcgtcatcggcaatacccgcgccgtgctaaaagccctaaatattgacgtcctcgcggaggtcattgaagctgacatacagttgctgcaaacccagcttcaaacggccccgagctggcttcaagacgcatttcgcgagcttgctgacacgtggcgaaatagcaaaagcattcatcgcttttcaaataatcgcaaagacgccctgcttctcggcattcgctttgcgagctggctagccgcgcaagacaatttgaatatcgattttcgaaccgcaagtgtaaaggccttcggcgactctaaaaccttagaaaacaatctccccgctatcaccgacgttttaatattgagtggccgccacgatctaagtatcgcgtacagccacgctgagatcttggctgaatggggcgtcagcaaattttccccgctgttgcgcatccgtggcaagtgccgtctagagctgcgcaattcagcaatttctacactgggcgccacgccttatattgccatgccgcttgagcaattgacggctatatcccttgccagccctagtccttatattttgttgattgaaaacttaagcagttttgaacgctattgccgagaaatcgacgacgacggcgtaatcatttacacctctggcttcccgccaaggcaatggatcgcaccagtgcagcgcctcattgcagccgttcagtgcccggtataccactggggcgacatagatcttggcggctaccaaatactcgcccacctagatcgccagcttgacggaaaagtgattccctttcgtatgtttaacgagccagcatcaaatgaaaatagaatagatttaaaggcactcaccgataccatagcggcagcaagcaattcgcatatcagccaccttcacaagcttattagcgaagcgctcaagcaaaataaggtcgtctgcagcgtcgagcaggaatctcttgaccccgtgtcgcccttacactttgcatga

SEQ ID NO: 42949 - DNA, 1491 bp, gamma proteobacterium BDW918
gtgaaagcagacaaaaacattgccacttaccgccgcatgcgcaatcagcctttgtggcgcttactcgcgtctggcaacgggccgacggtgattgctctgcttcaatcacacctctatgaaaaggaacgcagcctgccggcctcgatactgtttgagcgtctgacaagagatctggaagagttgcgggcccagggggatgattttccccagacggctcaggcctatgtggccaactggctgagtgacggttatctcgagaggcgattcccgccgggcgccagtgaggaggaatacgaactctctacagcaacggtggaggcaattcggtttgtgtctgccatcgctgagccccatgcggcggcgaccgagagtcgcctctcgctggtgatacaggccctggccgggctggccgaggacaccgatgctgataaacatcgccggatcgaccgcctgatggcggaacaggcccgtatcggtatggagattgatgccatccagaaggggcagctgcgcgtcctgccatgtgatactgcattggaacggacgcgggagatcatttccctggccgatgatctgacgggcgattttcgccgggtgcgtgaccagttcgagcagctaaaccgggatctgcgagagcgcatcatggatagtgatggcaatcggggcgaagtgctcgattcactgtttaccggtatcgatctgattgcggagagcgaagcgggtcggaccttctctgccttctggcgtctgctgaccgatcctgaacaggcagcgatgctggaggaatccctcgacagcgtgatgtcgcgggagtttgttgctgggctggatatgcgggagcgtcgtttcctgttgcgtttgaccagaaatcttctcgaacagggtggcgcggtccacgaggtgttgcagacctttgcccgcagcctcaagtatttcgtgcaaagccgtgagtaccttgagcagcgccgcgtgaaccagctactgaaggaagcacaacgcgccgcgctggcgatcaaggatggggtcaagacaactgagtccctgacatattccctggaactgactagcagtcggttgcactctctgtcccaatgggcactctacgatccggcactgcaggcggagccggaggcgatgcgcgagggtgaacccgcgcccatcgatctggagtcggtcagcgagttggtagcgcagtcggaaatcgattttcgcaccctgaaggagcatgtatgctcgctgctcgaacagcgtgaccaggcctcaatcggcgatatactggatcacttcccggcagagcaggggctgggcagtgtgatcggcctgctggcgctgggcagtcgtcatggcattaagggtagtgataaggggggcgatgcaagtgtcgatgatagtatcgagacggtggcctggatcggagaagacgatcagaggcgctgcgcccgtattcggggtcctagggattttgcctccaaatactgcaaaaaccgttga

SEQ ID NO: 42950 - DNA, 669 bp, gamma proteobacterium BDW918
atgctgaatgcagaggacaccgaacaggagccggaccaggctttgtatccgggcgatagcggtgagttgtcactggatacccgtcgtgtgctggtacagctccttgccggcccgtcactggacggtcagcggcactccaaactctggccaatcctgattcgcgatgaagcggcgatccgctgtcgtttgtcggagttgttcctgcagttggtgattgatcgggatctgcaagtggcttttacccgtcaggccgagaccggtgacctggaagctccccggctgctgcgtcgcgctaaattgactttcctggattccattctgctgctccacctgcgccagcgactcacccaggccgaagcacatggcgaccgtgcggtggtatcgaccgacgagatcattgagtttctcggggtttatcaacaggccggcaatactgatcgggcgctgttcgagaagcgtatccatgcatcgatcgagaagatcaaaaaacacagcatcctgcgcaagattcgcgcaagcgaaaatcgcttcgaaatttcgcccacgctgaagttgctgttctcggccgaagagattcaggcgctgacccggatttaccatgatatgcgggcgccggaagcatcgtcggaacaagatgatgaaatgccgtcaggggaggggaagggatga

SEQ ID NO: 42951 - DNA, 3366 bp, gamma proteobacterium BDW918
atgagcgagcagtctaccctgttcgcgccggaacaattccgcatgtcccggcttcaggtctataactggggcactttctccgatgttcacgatatcccgatcacggaacagggctttctgtttgtgggccggtcgggcgcagggaaatcaacgctactcgacgccttctccgccttgctggtgccgccacgttgggttgatttcaacgctgcggcgcgagaggcggaaaaaacgggacgtgatcgtaatctggtgagttatattcgcggcgcttgggcggagcaaaaggacgatgcttcgggtgaaattgccacgcgctacctgcgccccgggacgacctggtcggccctggcgctaagctaccggaacgccctggggcggcatgtggtgctggtgcagctcttatggctgcgcgggagtgccaatgggcccggcgacgtgaaacgccatttcatgatcttcgaacgtcctgttgaactcaatgagttggaagtgttcgggcagtccaatctggatgtgcgcaagctcaaacagacacttgatgatgcctttcatcgcagcgagttcagcgcctatgctgagcggtttcgtcgcttgctggggatcgacagcgagatggcgctgcgcttgttgcacaagacgcagtcggccaagaacctgggtgatctcaatacctttctgcgggacttcatgctggacagacccgcgaccttcgaggtagccgaccgcctgctcagtgagtttgatgaactcaatgcagcgcaccaggcggtggtgaccgcacgtcggcagttggagacactggttccggcacgagagaagcatcaacagcgagagttgctgctgaatgaacgcggtggcctcaacgaacttctggccggcattgacagttacggtgggcgtcgccgtatggagctgctgcaggatcagatcgagcgcttgaatattcaggctgacggtttgcagggtgagatcagccggaagcaggcggcgctcaaccagcatagtgactctttgcgcgaactggaacgtcgccatagggaggttggcggcgaccacgtggaagcctggcaggcggagaagtccaccctggagctgcagcgcgagcagtgcttgagaaagcaggggcaagccaaggaagcctgccgacaactcgactggacttttccgaactctcctcaagggtttgccgagctggtcggcgatgcgcgtcaggaacttgaacgctgggagagtggcagtagcgagatccgcgaacagcgcgatctgttggtgatcgaaaagaaggaggccgagacggcgtttacgcacaccgccggtgaggtgaaggccctggagcggcagccctctaatattcctgcgcatatgctggatctgcgtcaggcgatagccactgccatcggcgtatcggagagtgcgttgccctttatcggtgagctgattgaagtgaagtcagatgaggcggaatggcagggagctatcgagcgggtgctgcacggctttgcgctttctctgctggtcgatgaacgccactattccgcgctatccaatcatatcaacagccgccatctgggccagcggttggtttattaccgcacgggacagcttgatcgtaagccagccagaacggtcagcaccgattcactggtgctcaagttaacgatcaaagaatgcaatcaatccgagtggctgagcacggagctgcgccgccgtttcgattacgcctgtgtcgactccattcaatctttccggcgcgcggagcgggctctgacccgcgagggacaggtcaaacacagcaagacccgccacgagaaagatgatcgccgcgatgtcagtgatcgccggttttgggtgttgggtttcgataaccgtgagaagctggcgctctaccgcaagcaggcacaggagcttgcagggaaaatctctgatctggatgaacgaatcaaggcgctcattgagcaggagggtgcccgggccaaacgcgcgatgcattgccagacactggccagcctgcagtggcaggaggtggacgttgcgccattgctcacgggtatcgacaagctggaacgccggattcgtgatgccctggaaggtaacagtgagctgaagaatgtggccgatcaaatcgagcggcagaaaaaagtcgttagggacgccgatgaaacactgcgcaagacaaccatcgcctatgagaaggtcgtcggtaaagtcgatgaacacgaggagaccttaaagaatcttcaggatgatccaaccattgttccgttgacatcccgacaacagcagggattagacgagcgattcaatacgctcgcggagctagtacggttggaaaacctggacaaactcatccgttctgtggagaggtcgatacgcgatgagatggacgtcctgaccagggacgtggccaagtgcgatcggttcatcgaaaagcagttcgacgagttcattttcgagtggcctgcagaagcggagggactcgacgcgacccttgccgctgcctcggactttttctccaagctgacccgattggagaccgatggtcttccagcccacgagcagcgcttttttgaattactggagagccagagccaccagaacctggcggcgcttgccacctatctgagtgatgcccgcaaggaaatcctggagcgcatggatctggtcaacgacagtctcgcccaggtgccattcaatcagagcacccatcaaaccacttatctgcaaatcgatcccagcgatcggcagctaccgggtgtgcgcgagttcaagcaggagatccagcaggccttgagccacgcctggagtgaggaccgcgagttggcggagtcgcgctttctggcactgcgtcgtctggtagaacgcctttccagccaggagccggaggacaaacgctggcgccagtcggtgctggatgtgcggcaacatatggagttcatcggcagggagaccgatgagagcggtgtcgaggtggaggtctatcgcagtgggtcgggcaagtcgggcggtcaacgacaaaagttggcgacaacctgcctggctgcggcgttgcgctaccagttgggcggcaatgaacacggtgtacccctgtatgcgccggtggtgctcgatgaggcctttgacaaagcagacaacgagttcaccgcgctggcaatgaatattttcaaaaacttcggttttcagatgattgtcgccacaccgttgaagtcggtcatgaccctggaaccgtttattggtggtgcctgctttatcgatattagtgaccggcgtgtttccggcgtattgataattgaatacgattcggagcagcagcgcctgcaactgcctgctcacgcccatcaggaggcaagcgttgaagtttcctga

SEQ ID NO: 42952 - DNA, 1188 bp, gamma proteobacterium BDW918
ttgaagtttcctgatgatgttcaaaaggtgttgctgcgccgtttcaggaaccggcatcgggagtggttggaggcaagtggcgatcaggagaagccggaagcgaaggtctggccgctgaaggtcgctctgggaatccctacggaaaaccaagcgttaaagcaggttgaagacgttcgctcctgggtagcggcctggcaatcctggcgtggtgcggggtcactctcctggagcgaaaggcgttggcgcaagctgggtacacagcctgttcccgagaaactgctactgtctggccccgacgaagttgcacaatggatcggcgaggctgatcgatgggatctagcccaacaacggtatagagatcttatcggacattggccccagcttggcaacaagctgccccgttattttgccatgttagctgattacagcgaggtggattatcagcgtctggtcgatatagttgcctggatcgagaaaaatccaggttccaacctttatcccaggcaactgcccgtgagtggcctggacagcaaatggcttgaaatacgcaaagggcttctggctgatctcgttgacgcggtgcgaggtggatccacaaccgaaggcaatttttttcaatgctgcgggctccaggcgccaccgcaacttatccgtctgcgcatactggatgaccgcctgagacaacgggttggcgggctgagcgacctatccacaccctggaaacaattggctgagctcgatcttcctgttagcaacgtcttcattgtcgagaatctgcagaccggtctcgccttcgatgatctgcctgggtcagttgtcatcatgcatctgggttatggggtcgacgtactgggtcgtctgccctgggtggccagggcgcactgcgtttactggggggatctggacacacatggctttgcgatcctgaatcgtgccagaagttatcttcctaagctgacgtccgtattgatggacgaagtgaccctccgaagccatcaggatctgtgggtggaggagaaagatcagcatgctgcggacacattgcccttgctgacgggttctgagcaagcagtgtatcaagccatcaaacgcaatgcctggggacagaatgtccgtctggaacaggaaaggattgcttggactgtggcttggaacacggtgcagcagacacttttatcggtttgttga

SEQ ID NO: 42953 - DNA, 1575 bp, Bifidobacterium animalis subsp. animalis ATCC 25527
atggcggatgtgcggagtgaattggcccagttgaggccggtgtatgagaccggcgtgctgcgcatgctactgcacaagtattccgatatctacatcgccatgctgcgcgcctgcttcgacccgctcactgcagaagtcccgcaggagcgactgctggcgcgcatgcgcgaggcgatcggcgagctcgccgccgatggcacctacaccccgcgcgagggcgaggacgacatgatggcggcccggcgcatactcaaggagctcaaagccgaggatgccggcgactatgcgtgggtggccgattcgattgaccgccgccagcacaggctcatgtgccgcctgacccaacgtgcccatagagccatcgaggcattggcgacgcttcagcaacgcacagtgtcgctgtccggtgcgcaggtgaattcgatcatcatggagatcgagagcgcgcgcaaacaactcaccgtgaatgtggaggagcgcattgagctgctcgaacgtgagatcgacgaacggcagcaccagatcgacaatctcaaggcgcatggcattgggcggcggcccactcgcgagcaggtgtccgacatcatcaacgtcgtgtacaacacgctgcgcggggtgcctgtcgatttgcgcgaattggtgatcaccgagcgcgacaatggcgatgcgttgcgccggcgcatcgacgacggctcgatgagcagcaacgacatgctcacgttctaccacgaggaatacgagcgcacgtaccggctcagcgacgagggacgccgcttcaacgatgcattccaggtgatgtatgccccgcagagccgcgaggagctcaacgaggcgctgcaagacatctcgaacagcgaatggctgcatggcgaggccgacgacctcatgagcgtggtcaatcgggagttcgaagacatctacgacggcatagacgatgtgcgtcaccagattcgtgtgaccgacgaaagcgtgaagcttctggtgaggcagcagaccgacatgcagttccgcacgatgtctcgtcagctcgcgaagctgttcacccagttgggtgagtcggtgcatgcgaaaggccgctacgacattggcacggcgaccacctcgttgctcacattgccgacccgtgcgcgtgaaacacccgtgaaaaccgcggctcccaaactgcagatgcaggtggacgacggcatcgcacaggtcgatctcaatggcatcgttgcggccggcggcccacgcatccaccatatgatcgaattggtggccgcgcacccggtgctcatcgacgatgccggcggtgcgctcgccgattccgttgtcgacatcgcagccagtttcaacgaacttgccgccgacgagcgccgtgagagcgaaatcgtgggcttcctgagctacttgggttccgcgtcgcctaccgatgccgctggcaatagcgatggcggccagattcccgtgccccgcgagagtctgtggcattgcgtgaccaccgacggttggactcgcgtatggcgcacctgtgcgctgttcgtgcccgggcaggtgctgaaggattttctcgacgataccatggtggaggactga

SEQ ID NO: 42954 - DNA, 810 bp, Bifidobacterium animalis subsp. animalis ATCC 25527
atggcgatggacgacagcaccgggcagggaattgccggcgatgccaatctgggcatggtctcgaaggtgctcagtgacgagtatgaggaaggtgtggccgacgaggccggcatggccgatctggccaatgtgcatgcactgttcgatggtgacatcggtgacatgcccgcacccgcccgtgaggccgcgattgcgttgaaacgcaacaggtcgatcagcggcgacatgtaccaccaggcactcgactatatggaccacgtgcggcgttcgctcaacaacgacatgctcgtgccggtcatcgacacctactatgaggtgatgtatgcggagccgatcgctgccgatgaatacggcatacgatcgctcaagacccgtgtcagcctgagtgcccgtgaggcggtgatgctggcttcgctgcggcgcaaggtgctcgactacgagaatgtgggcgccgcggccgccgattggctcatttcgaaggaggagattgtcaacacgatgtccaccggcgcgggcccgcttgccggccgcaattcggaggaggcggtgcaggcgcaggtggaccgcctaatcggcagtgcgaagaacaacggcttcctggcgcctgtcgaagacgacgaaggcatgtatgtgatcaccaaactcgtgcccgtggtgctcaatccggagcgcatcgccgcatggctcggcgcggacgacgcatcgaccgcacagcccgaaccggatggaacaggtgacgattccgacggctccgggcataccgaccaagacgaataccccgaagatgacgatatggaggcgctgttttga

SEQ ID NO: 42955 - DNA, 3498 bp, Bifidobacterium animalis subsp. animalis ATCC 25527
ttgagcgagacttccgacatctatgcctcgattgaactcatgccgccgcattgggcgctcgcctcgcggcaattggtgaattggggttcctatgacggctaccatgtattcgaaccctccaccgccggcgacgatacggtgacgttgctcaccggccagagcgaatcgggaaaatccacactcgtcgacgcgcaggtctcgttgctctacccggcgaatgccgtattcaacaaggcctcgaacgccggacgctccgatcgcagcgactactcatacctgttgggactgaggggaatccgcagcaacaacgggcacgatgagccggtttacctgcgcgggcgcagcgggaagggcgagccgtacgcggtctggggtgcgatcgtcgaccactatgtcgacaccgccaacagcggcgcgttatggattgccaagttcatgtatctgcctgcggagggcacgtcggagagcatggtgaagctctatgtggtctccagctatgcaatcgacccgcggctcatggatgcacatcgcgaggagcgcttctcggtgccgctgatcaagcaggtgtacccgggcgtcaccgtgtacaactacgcgaagcagttccacgaagacatctggaaacgattcggcctcactgagtccgcgtgccgtctgctccaccgcatgcaggcctccgatgcgccctcccagctcgatgacatcttccgcaaaggtgtgctcaatgagccgcgcgccgttgagttcggcaagctcgccatcgacgattacgaacagttcgccgagaatttctcgagtatggagcgtacgcgtaagcgggtgcggcaactggaggcgatcgcctccgagttcgccgagtatgagtccgccgaacgtggtgtgcgcgagctttccgccatcgccccccagcagggcgatagcgcacggattcgcacccaatggcttgacgatcgcattcatgccgacatcaccgaagtactgcccgaatatgagcagtatgccacggagtgcagtgccagtgcacaggccgccaaagagcgggcggagcagatgcgggaacaggtcgactcgctcaataggcagcttcagggtatgggaggcgacgagataggccgcctggaagaccgcattcgcgatgcacagcggcgccaacgcgaagtgttgggacgcagggagctgttggcctcccgattcagtgcctctggcgaagcattgccggaaagtcgcgggcagtgggatgcattggtggccgaatacacgcaactcgaatcggaataccagcagcgtaaaaccgaattgcacgggttgcagtacccattgatcgacgcccagaagaaagccgaacagcgaatcaaggcactcgagaaggacttggaacgcaaacgccagtcgaagacgcgcatctccagcgatatggacgaggcccgcaatatgattgcgcgcgccaccggcctgagcccgcaggagctgccttatgcggcggagctcatggacgtgggcgaggagaacgaggagtggcgcaccgccatgaacgtggcataccggtcgctcgcaacggtgattctggtcgacagtcgccatgagaacggcttcgcagcgaaagtctcgcagatttcccaggaggcgctcccacgacgcaactggcggttcgtcgacacgagcgtccatgtggaggctgaggagcgtgaagggtggctgtcgagcaagctcacgttcaacgtggaatctccgttcgtcgattggcttcgtgcccgggtgaccgaggcacggtacgacgcatggtgcgtggaggcgatcgacgacaccaatgagacgacgcgccaggtgcagcgtgacggacagatcaaggaaggtcggaagggcagccacggcaccaagaacatgcctgccgtcatcggattcgtcaccgatgcctatctgcgcgatctggaggcagacattgccgaggcgcacaagacgcgggatgccgcaactcgcgatctcgaacagtacgacgtgcaactcaacgcgcttgagcaacgccatagtctggcccagacgctgcaggaccatgcatggaacgacatagatgcatacggtgtggaagaggaaatcgccagcctccaacaacgcgtcgacgaactcgagcagaaccccgaactggcacagctcaatgccacgctgaaagtccagcagcaggaaatggccaaggcgaacagtgcatgctatgccgcggaagacaaactcaagcgggcgaatgcggcggtgaggtcgacccggcagtggctggaagcgtatgaccggcgcacgcaatccgtggaacgccggcatttgaacgaggcatgcggtcggctgcttgaacagggatatctggcatacttcggcgagagcacacaatcggcgaacgaacgaatgggcagaatactcggtttggacgggcaatccggcacctcactgggcggccatgtacgcgagaacgaggcctgcgccaaacacgtacgcgaactgctcggcacactcgcccaaaccgtaggcaggcaggtgaaggaactggctacacagcgcgacaaccggaaacagtcatgcgaggcaagcatgcgctcgtacctcgaccaatatgcgtcaggcgacgaacgagtgagcgccgacgtggagaacgagcggtacttcaggaaagacctggaggagctcaaaccaggggtgatcggcgacgaggcgacgaacgtggaatacatgaactcgctcgacaagatgctccaggacctcgtgcagttgcagacgatgctcaaacttgaccagcagaggatcaccgaacagatcggcaaaatcaaccatctgcttgaacggtacccattcggtgcgcgaggcggtaggctgtcgatcgtcgtgcaggtgcacaggcccgatgcgaagttcaccacggcactcaccgggcaaatcggccgcatcaatgcgttcaaggcaaacgacgagcatgacgtggagaggtgccgaaagctgttcgccggccttgcgggactcatcgagatgttgcgcggcagcttcgacgaatatgcgggcaacggacgtggtaacgcgaacctcgacccacgcaaacgctcacggttcttcgggtcggtgacgaacccggatggcgtggtggaatcgatcaactccaccggcggcggatcgggcggctacttgcaggagctcacgtcgttcgcctacggcgcggcgctcatgtacctgctcgccaacgacaacgcaaccgaaccctcgtatgccaccgtcttcctcgacgaggcgctcatcaaagccgacggccagtacacgcgccgcgcattgagcgtgctgccgggactcggcttccaagtgatcgtttcggcaccggaatcgaagaccggcgagatcatgggttcggcttcgaaggtcattgtggcacacaaggaccaggccagcggcaggacgacgctgatgcagggagatctgctgggggacgctgatggcgatgagtcttcgatgggggagcggtccgagtga

SEQ ID NO: 42956 - DNA, 1221 bp, Bifidobacterium animalis subsp. animalis ATCC 25527
gtgacggatacggcgacactcaagactccggcggatgtgcgcggcgatgtggcgcgcattgtacagcgcgagttgttcgccgacgagagtccatggccgcgcacgattcgcattccgtggcccaaggagacgcagctcgtcgccgatgtggccggcgtgcacgcggcgaataatgcgctgaaggagttcgcggcacgattcggctgccggaccgacttcatctcgcgcaaaatgggcacggccgtgccgcttgtcgcgtatatccatgtgcctgacgaggccacggcgctcgccattgcggggcctacgctgcgacgccctcgcgaacaggcgttggccagagcggcgcagctcgagcaacgatgccatgtcgaccatgcgctcgccatggatgtggtacgcaggttgaacaacgaatccgacgtcgatttcgggttgttcgtcgaagccgcgcagtggttcggccggcattgggccgaagtgccggggctcaccgctcgtgagatccccttgcccgggttttcggcgaaatggttggcaggttcacgatcccacaggcgcgcggcgatctgtacagtgctcggtgtgcatcggatgccgctgcgggaacgcccgggcgaggtgcggtaccggtacatggaccaacggttcgccgccgagcccgaccgtgtggcgacctcggtgcagtgcgttcccgaacgccccgtctcgctggccgtcattgtggagaacaaagacacctaccaagccatgggccccattgacggagccgtatgtgtgttcggcgccggattcgccgtgaaccgggtacccgaactgctgccttggcttgccaatgatgcggtgcgtgttgtgtattggggtgacatcgatgctgcgggatttgagattctcagtggactgcgggcttcgggggtcgcttgtgagagcatattgatggatcgcatgacctatgccgaatacgagcgtttcggcacgacgagggatgcgatgagccatgagattcgctgcggcgaaccgaagcatgggctgcatctcagttcggaggagtattcgctgtatcgtgacctgtgcacaggcgaacttgccgtgccgcgcatcgagcaggaacgcattccgatcgctgaattcatgcgcttgatcagcgcaggccggagcgatggaagtgacggtgcaagagccgaccaatgccataaccaatcgccgcgcacaccaaagtga

SEQ ID NO: 42957 - DNA, 1497 bp, Rhodococcus imtechensis RKJ300 = JCM 13270
atgtccatcaccgccgacgtgcatcggcttcttcgcctgcggcaggaccacgccgcgtggacgttgctgcgggccgataccgcgccggcaattctggcgctgttgggccggcacttcgaccatgggacccgccgcctccctgctccggaactcttcgcccgcttggactccgatcttcagaccatgcgcgacgagggcctcgacttcccgcgaaccggtcaggcctattgcaccgagtgggtgcggtccggatacctgctccgacgagcagcggccggtacccgtgaggagactctggaaccgacggagggcgcgttcgccgcgatggccttcgtcgcgaatttcaccagtcaggcgagttcggcgaccgaatcccgcctgaccacgctctccacccagttgcaggccctcgcgcgggattccgatccccgcgcggagacccgtctcgccgcgctgctggccgaacggtcgtcgatcgatcagcagatcgcagcggtggagtcgggagtcttcccagtcctcgacggcgaacgcgctgtcgagcgttctgccgagattctcgcgctggcctcggaggtccccgccgatttcgcccgcgtccgcgccgaactcgaggaactcaaccgtgatctgcgagcccgcatcctcgatgacgacggtgatcgcggcgacactctgggagatgtgttccgcggggtcgacctgatcggagattccgatgccggccgcagcttctctgccttctacgacatgattctcgatccggcccggtcgtctcagatcgacgagtggatcgatgcagtgctgcagcggccgttcgcctcccaattgaccaacgatcagaaacgacggttccgcgcattactgaccgagatggaaacggctggctccgaagtgcattcgacgatgacatccctgtcccggtcgttgcgtcatttcgtccagtcgcgtcactacgaggaacaccgccggctgcagcggttgctgcgcagcgcgcagcagagtgctgtcgccgtggccacacgtcgtcgaccctacgacctgctcgacctcgacctggtgcgcgtcggtatgagcatcgaatcggtcgcagctctgcgcctgcacaaccctgccgacaacctcgtcaccgagccggtgcgtacccacgaccccggtaccgtcgatctcgatgaacttcgaaagctcgtccgagaatccgagatcgatatggacgaactgtccgacaacgtcgcggcgacgctccgcgctcacggtcgcgctacgatcggtgacgtcctgcgcgagtaccctgccacccaaggactcgcgagcgcagtcggattgatggtccttgccacccaccacgggcacgcgatcgacggcaccgaagacatccactggatctcgggagccggagtatcgcgtcgggcgacaattcgtcgtcacctgttcgatcctgccgccgacgagttcaccgctcgtccggcgttcgcacccacggggagctcgacatga

SEQ ID NO: 42958 - DNA, 606 bp, Rhodococcus imtechensis RKJ300 = JCM 13270
atgacccacgagccgatggccggcggccaataccccggcgacgccggcgaactggacctcgagacgcggcgcgcgttcgtgcagctactcaagggccctctcgtcaccgcggccaaacatcccgaggtgtggcgtgcggtgatccgggacgagcgcctcctccggtcccgactcgccgacgtcttcctcgatctcgtcatcgacgacgagaacgagctggcgttcacccgccccgccgagaccggcaatgccaatacccccacggtgctgcgcaccgagcgtctgaccttcatggacaccgtcatgctgctcgcattgcgccaacgactgctgcgcgcgcaagccggcgaacgggtgatggtcgacctcgacgaactgcgcgaacagctcgagctgtatcgcacggccggcgacaccgacccggccggctacgcgaagcgcatcaacgcgtcgtggaagaagctcgacaagtattcgctgctcacgaagacgtcgaccgacgaccgaatggaaatctccccggtgttgcggcagctgttcgatgccgaacaggtcgctctggtcgaagtggagtttcggcgcattctggaggaggacacaccgtga

SEQ ID NO: 42959 - DNA, 3288 bp, Rhodococcus imtechensis RKJ300 = JCM 13270
gtgatccatcccggtcaacgccgtcttgcgcgcgttcaggtcgtcaactgggggacgttgcacggccaccacgatctttccttggcccgtaagggtttcctgatcaccggcaattccggctccggcaagtccacgctcatcgatgccatctcggctgtgctcgtcccgggcaatcaactgcggttcaacgcggccgcgcaggaggccacgaactcgggacgcaacttcgtcacgtacatccgtggcgcgtggcggcgggaggcgggcgccgacaccgacggtctggtcgcctcgtacctgcgcaccggcgcgacgtggagcgggatcgccctcacctaccgcgccggcaccgacgatccgccgatcaccctcgtcaaactcatgcatctgggtcgcggccagaacgccgcagcggacgtcacccacctccatctgattctcgaacacgaactcgacctgaccgacttcacgtcgttcacgacgcgcggcatcgacacgagggcgatcaggaagcggtggccggagtcgacggtcagcccggcctacgggccgttcgcccgtagtttccgctcccgcctcggcatctcgtcggagggcgctcagcgcctgctgcaccgcaccttgtccgcgaagagcctcggcagcctcgaccagttgttccgcgactacatgctcgacactccgaacaccttcgcgatggccgaacgtgcggtcaaccagttccacgacctgcaggaggcgcaccgcgtcgtggtcgacgcgcggcgtcaggtggagatgctcgcaccgctcgtcgatcttgccgacacccggcaacgcgggcttcaatccctgcgcgacacggacgaggagaacgcgcatctcggagcggttcacgcggagatgaccttgtccctcctgcgcggtgaatgcactgaacgccatgccctgacgtctctgctggtggcgggtgcgagcgaagccaccgccgctgccgagcgtgcacggcaggagaccctcgatctgaccatgaaactcgagggcatcgggggcggcagactggccaccctccacgcgcagcgagacgcggaactgaagacactggcgcgcgtccgaatcaggcgccagcagatcgccgaggcggtgtcggcctgggaaggaaccgttccggagaccgcggaggagttcacgcgactgcgcgggcaactcgaggaccagttgcggcaggccaccaccgcacacgaggatcggctcggtgaccgctacacgctcgccgaacagcgcggcaccgcacagaaggagcgcgccgagctgatcaccgatcgtgagatcgtcgcccgcagacgctccaatatcgacccgggtctgctgcgtgcccgcgagtcgatttgttccgccgcgggcatttcggacgacgctgtgccgttcgccggcgagttgatcgcggtgcgggacgagcattccgagtggaccggccccatagagcgagtcctcggcggcctcggccgtaccctgctcgtcccggacgacgtgtatccgacggttgccgcggccgtcgatgccacccacctcggcgcgcgcctggtgtatcgccgagtgcgggtgggcgtcacaccgtcggcggtgccgaagaccggggcgttatcgctggtgcgtcgcgtggaggtcgccgacggtccgctcgccgcgtggatccatcaccatctcgccgaccgctacgactatgcatgcgtcgacaccgctgccgaattcacggatcactcgcgcgccgtgacacgcgccgggcaggtcaagcactccgcggagcgacacgagaaggatgaccgcagccgcatcgacgatcgccggcggtgggttctcggattcgacaacgaagccaaactcgaggacattcgccggcgaatcgcagatctcgatgtcacgatcgcaggtgcgacgagccgactcgacgcgctggaccgtgaggaccagcagatcgccgtccagaaccgcgcagcacagacagtcctcgatgctcagtgggtggacgtcgacgtgagcggtgcgcaggctgccgtcgacgctgtcgacagccgtctcgaatcatggcagcaggacaacccggagcattctgcggtgtcggtcgccctcgagctcgccaagaaggcggagaacgaggccgacgcagcccggcgtcaggcggatactgcgttgacggtgcaccgaactgcggtaacagaactcgagacgcggatcgcgcaggccgaactcgacgggaaagatgcggctcccgcggcagtcgccgcacggatcaaggcgcgattccagaagttcgcgcggcgggtcacgtcggacaacatcgacaaggccctgttcgaggtcggccagggcatcggcaaggacagggctgacgcgcagaacgcggtgtccgccgccgacgcgtcgatcgtcaggatcctctcccagtatctggcgcgatgggagtcccgcggcggtgagttgaggattgatgccgaatatgtcgacgacgcattgaaaatcctccaacgcctgcgctccgacggtcttccccggttcgaagatcggttcttccagttgctgcacgaccagtcccaccgcaacatcggcgaactcgctcgcacgatccgtaaggcgcccgcggagatccgttcccgcatcgacccggtgaacgactcactgcaccgctcggcgttcgacaccgatcggtggttgcgcatcgacgtccgcgagcgacgttcgccggcggcggccgatttcctcgacgacctgacccggatcacgagtggtggatggaacgtcgagcagcgtcccgcggccgaggagagattcgagcggatggcggttgtgctggagcgtctggcatcgaaggaacccgcggatcagcgctggcagcgccaggtcctggacactcgcgtgcatgtcgggttcatcggcgtggaggtcgacggtgccggagaggctcgcaactaccacgattcgagctcgggattgtctggcggtcaggcacagaagctcgtgttcttctgcctggcagcggcgttgcggtatcagctcgctcccgacggcgcagaccttccccgatacggcaccgtcatcctggatgaggcgttcgaccgtgccgattccgcgtacacacgccgagccctggacgtgttcgcccagttcggttttcacatggtgctcgcgaccccactcaagttgctcggcaccctcgaggagtacatcggtggcgctgtgaccgtgagtatccgtgaccggatgcacaccgaactcagcctcatcgaattcgacgacgtgggcgctacatga

SEQ ID NO: 42960 - DNA, 1152 bp, Rhodococcus imtechensis RKJ300 = JCM 13270
atgagtgtgcggtgtgttctgccgcccgcatccgcggcgaaagcgctgaccacctaccgcagccgccgaagtcgctggctggccgacccgtcacttgccgaacaggattcactgacggttgccctgcatccgccgtccgagcaacagatcgccgaggatcctgacacggttgtcgcctgggtacgctcctggcgcgtctacaccggcgcgggccacgtggagtgggcgatgcgccggtggccgagcttcggcacacaggaggtgccggtgcggctgacactggccggggccggccagattgcgtctgcgggtggccgcgaaaccgaatggcgcgccctgatgattcgtcgtgacgtacttgtcgaccgccttggtcccggcaccgaaacgttgtcggcagcggtcgccgcgaccgcggcgaattggctcgacctggacgacgacgacttcgtcaggctgacaaccattgcgcggtggttgagcgaccatccgaactccgggtatttcattcgtcagcttcccgttccgggtgtggacacgaaatggctctcacgtcaccacggaatggtggagactctggtcgagggcgttcgcggcaaccgggatctcggtatccggcgcctgcccggcctgcgcgacgtcgcactgtgcgatcccgatctactgatcggaactccgaggcgcttcgccacctcgctcgaggaactcaccgccttgccgctgaccccggctcggactctgattctcgagaacaaagagggtctgtatgcgctacctcggctggcgggaacggtggcattgcacggtggcggctacgcggttcacgagttggccggaatcccgtgggtcgtcaactcggaggtctggtactggggagacctcgacagtcacggtttcgccatcctcgaccgtctgcgccgacatcttccgcacgtgcggagtctgttgatggacatggacaccctggatcggtggcggaccctcgcggtccgcgagcacaagcccaccttcaacgaggtatcccatctcaccgaatccgaagccgccgccctgcagtccctgcgcgaggacgatctccgcctggagcaggaacgcataccctggccgtacgccctggagagactcctcgctgcagtcggtccgggtcagtag

SEQ ID NO: 42961 - DNA, 1632 bp, Bifidobacterium longum subsp. longum 2-2B
gtggccgatgtgatgcgggagctggaacggctgcgaccggtgtatgagacgggcgtcctgcggttgctgttgcgccagaacgcgatgctgtacgtgtcgctgctgcgttccacgttcgacccgctcaccggcgagctgccgcgcgagaccgtggaggagcggttcgcgcaaagtctgagcagtctggccgacgccggcgagtatgcgccgcgcgaggaccagaccttcgccgaggccgcccatcagatcctcgccgacctgacccgtgaaggcgaaggcgactacgcctggctcgccaactcgcatgatgcggcctcacaccgattcctctaccgtttgacggcccgcgcccaccgcgccatcgaggcgctgagcaggctcgaagacgaatcacgcgccctgtccggcgcgcaggccaacagcatcatcatggaaatcgagcacgcgcgcatgcagctgaccgccgaccccggcgagcgcatcaaactcctcaaccgtgaaatcaaggaacgcaagcacgagatcaaacgcatccaacagggcaagcagcatgccacgctgagcgaagcccaggtggaggacgtgatcgccgtgatccacaacacgctgcgcggcgtgcccatcgacctgcgcgaactcgtgctcgacgagcgggacaacggcgacgccttgcgtcggcgcatgcaggccggcgacatcagcgtggacgagaacctgacccgctaccacgatgaataccgccgctcgttccgcgaatcagacagcggccgccgcttcgaggacgccttccaggtgatcatcaccgacgagggccgccagcaaatcgacgaagccctgcgcgccatcgccaaaaccccgtatctggccggcgaatccggcgtgctgctcggccagatccgcgacgaactggcccgcatctacgacggcatcgaagccgtgtgccgccagatgcgcgtctccgacgaggcgatcagccggctcgtgcgccagcaaaccgacactcgctaccgtacgatgctcacccgcttgaaccgactgtacgcgcgcctcaacgcggatgcgaaaacccatatgggagacgcctcgcgcccgtacgacacggccacctcggacgcgctgttcgcgccattgccgatgcgcccggccaaatccatgacccgcgccaccgcacccggcctgagcgacctcgccgccgaagccccgcagtcgactccggtggccgatctgcgggacatggtcaacagcggcggcccccgactcctgcgcatggtcagcctcatccggcgcaacccggtgaccgttgacaggtccgatgacaggcccggcgcaaccctcgtggacatcgccgccagcttcaaccggctgcccgaaagcgaacgccgcgaaagcgagatcgtcggcttcctgggcgggctgggagccgtaagcggcaacgccatcgccgacgagccgtccactgacggcgtcggcgtcggggtcgacagcgacatcgccaccgagccggctccggcgcagcgcggcgatactgcgacctggcattgcgtatcgatcgacggcgagccccggaactggatcactagaccggtgctggccgacatggacgagctgagcatcattgtggaggaaggatga

SEQ ID NO: 42962 - DNA, 675 bp, Bifidobacterium longum subsp. longum 2-2B; identical to SEQ ID NO: 41629

SEQ ID NO: 42963 - DNA, 3549 bp, Bifidobacterium longum subsp. longum 2-2B
atgatgcaggcgacagacgtgcagatgatcgcggaccggtggatgctggaatcccgccgactcatcaactggggctcctatgagggctaccacgaattccgcccctccacggaccacaagctgccggtgaccctgctcgccggcgccagcgaatccggcaaatccacgctggtcgacgcgcagatctccctgctgtacccaaccggtacgccgttcaacaaggcctcgaactccggccgctccgaacgcagcgactacacctacctgcgcggcatggtcggcgtgggcagcaccgaaaccggcgacgagccgctctacctgcgcggccgcgacgagaacggcgcaccgcaacccgtgtggggcgccatcgtggacacctatcgcaaccagaccaccggccaggtgctctcctgcgccaaattcctctacctgatgcccggcgacggccgcggcgacgtgcgccgacagtacgtggtctggggcaagcccgtggaccccaggcgcatggaccaataccgtgacgccccgttcacgccggcccagctcaaagccacctaccccgactgcctcacattccccagcgccgaagcgttccacacacacatctggagcgcaatgggcctgagcgaggccgcctgtcgactgctgcacaagatccagtccgccgacgcgccctcccggctcgacgacatcttcaaacaaggcgtgctcggcgtgcccgaagccctggacctggcccgcaccacggtcgaggactacgaacgttacgacgagaacttccacgccatggacgagaagacccgccgcatggacacgctgcgcggcatccaacaggcctacggcgaatacgccgccgcacgcggcaaggcccgcgccttcgaaccggtcaagccggccgtcgacggcacggtaccggccgtgctgcgcgactgggcattggcccgcatgcgcggcgaagtcgccgtccaactgcccgccgaccgcgccgaacaacagaacagcgaggcggaagccaagctgctgcgccgccgaaccgaagacctgcgcacccgtctcgacatgatccgcggccagatgcagggtctggacggcggcaacctgacccgactcgaactcgaactcgaccaggcccgccgcaccctcgaagacgtgcaagccaaccgaacacgaatcgaacaaacgttcgcatccatcggcgagacgctgcccggcgacgaacaagcctggaacgaacgccgcatcaacgccgtgaacttcaaacgcgaatacaacaaacgagacggcgaatgcgaggaagccctcaccgccgccatcaacgcgcgggccggcgcacgcggcgacctcgaacgactgcaacgcgacttcgaccggcaacgctcccagcgcacccgcatctcccagcagatggacgaaacccgcgccatgctctgccgcgccaccggactcgcccccgccgaactgccgtacgtggccgaactcatggacgtgaacgaacacgaggaagactggcgtctcgccatgaacgtcgcctacgcgcccatcgcccagaccatcctcgtcgacaagcgccacgaacagggcttcgccgccaaagtcagcaccatcgacccgcgcaccatgccccgacgcacctggcagttcgtggacaccgcacgccactacgacgacaccggcgcgcacgcgaacatactcaccggagaacaggacggcgactggttgtccggcaaactgcgctaccgcgacgactcgcccttcgccgactggctgcgctcgcagacccaggacgaacgattcgacgccctatgcgtcaccgccatcgacgacaccgaccgcaccaaccgtcaggtgcaggccgacggtcagatcaaatccggcgcacgcggccagcacggcaccaaagaccgcgcccaggtcatcggattcgtcaacgaaacctacctcaacgcgctcgcagcgcaggtcgacgccgcccgcaacgcgctcagccaagccgacaccgactacacggccgccaaaacacagtccgataacctccaccgcgaactcgaactggccaaccagctcgcctacacgtcatgggaacgcatcgacatcgccggcgcgcaacggaccatcacggacacgcaggacgccatcgcatccatcaaaaacgatcccaaactcgccgaactcgccaaacagcgcgacgaactgaacgccgaactcgaccgtgtggaacgccagcgcatcgaatccgaccaggccgcggcccgcgccggcagcgccgtcgaagcggcgctcatctggctgcgcgaccatgccgacaccggcacgacggacgccgccggtgccaccgccgacaatgacgatgacgccgcttccggcccgctgccggacgaagtcacggcggcgctcgccgaatcctacgacaaccgattcgccgggctggcggacgcggccatgcgcgcgcacatgatcatcggcgcgggcgcggcaggaacgcaggcgccgggggagagtttccccgaacgcaccatcgccggcatcggcaaggacatgacctcccgcatcaatctgctgaacggccaggccgacgccgcgcgcaccggcgtcgaatcgaaaatgagcacctacatcgcgctctacgcggccgacgacgactcgctgaccgccagcgtggaggactaccggtactatctcgacgaactcgccagcctcacccagctggccgcggttgccgccaccgacgccgaataccggcgctgcctcgaacagctgctcaggagcttcctgaccatcaaacgcgccatcgacacggatgccagtgacatccacgaccagcttgaccgcatcaacgccatgctcaaaggccaacagttcggtcccaagcacggcagcctgtccctgcacgcggacgtgcgccgtcccgagcgcgccttctggacgcagctcatccgcgtcatcggcaccctgaacgattggaaatccgccgacgtcaacgattccgacgcctcgcgcaaggccttcgcggcctgtgcgccgatggtcgggctgctgcgcgccgaactcgcgcaggtcaaggacacgaacggcgtgaaaagctacggcgcccgcaatctcgacccgcgctgccgctcgtccttctacgccatcgtgcatcatgccgacggtccggacgaacgcatcacctccaccggtggtcgctcgggcggcgccttgcaggagctcacctcgttcgtatacggcgcggcgctcatctacctgcttggcggcggcctgaccagcgagccctcgtacaccacgctgttcctcgacgaggcgctcatcaaggccgacggccgttacacgcagcgcgccctcacggtgctgccgcgcctcggattccaggtcatcgtctccgccccggaaagcaagaccggtgaaatcctcgaggtctccaccaaggcctacgtgacctacaaggaccccgacaccggcctcacctccctgcgcgaggccgtgctgtaccagaatgacatggacgatgaatcatcgtcggatatattgaaggatgacggggttgccgaatga

SEQ ID NO: 42964 - DNA, 1185 bp, Bifidobacterium longum subsp. longum 2-2B
atggccggcatgaaagacatcgctgcgatcaccacatgcgtgaagaaacatatgcgttcacatatgtacgacatcgaaccggcatggccgtttcccgtgccggtgggattgccggaccaagcatttttggaaaccaatgcgattgcagtgcatgacaacaacaatgagatacggcaatgggcaagcaagaatggttgcgaaatcataaccaagcatcgcaccataggcacctctgtcgagttgatctccaaagtcgtcgttcctgacgaatcaatagccatgcgtgtggttggtcgtacgctggcggcggaatatcgcgaagcgcaccgccgcatagcatgtctggttgctgcttgtgacgttgctccggaaacaatcgaatcggccgctcgcatgacaggccatgaacagcctgacgacttcgatctgcttgtcagcgcagttcgatatttcaggcatcatgacgtgaccggtatgacgccgcgacagattccactgacaggattcagcggcaaatggctgaatgagtcaaaaaccaatcgtcgtaaggccatttgccgactgctcggtgtcgaaacgttgggtctgtcaaaacggccgaccgaactgcggttccgttatctcgatccggtccgcgacgatgctgagctcgaacgcatcatatggtgtccgtgggaaggcgaagcgttatccggcattaaatatgctgtcatcgttgagaacaaagacacgtatcagactatgccgccgattgcgcagggcatctgcatatggggttctggtcgcgctgtaagcgatgctgtacctgcggttcctgcactgcgtgacatgcgtatcgtgtattggggtgatatggatgcggatggactggaaatactttcgacattacgtgaatcaggtatcgaatgcgactccatcctgatggattgcgatgcatacgatcggtaccacagatttggtaccgatcgtactgaacgcagcgcgaagattgctatgcgggagcctaagccggcgcccggccttcaatcggcggagcgacgtctttatgaacgactgtgtgctgacaaaacaatcgcttatcggcgtatcgaacaggaacgcattcccatgcgtgatgcagttgacgaattacgcaagcttggcatccccgtggagtccattgaaaatcaggatttgccgatttag

SEQ ID NO: 42965 - DNA, 1632 bp, Bifidobacterium longum subsp. longum 35B; identical to SEQ ID NO: 42961

SEQ ID NO: 42966 - DNA, 675 bp, Bifidobacterium longum subsp. longum 35B; identical to SEQ ID NO: 41629

SEQ ID NO: 42967 - DNA, 3549 bp, Bifidobacterium longum subsp. longum 35B; identical to SEQ ID NO: 42963

SEQ ID NO: 42968 - DNA, 1185 bp, Bifidobacterium longum subsp. longum 35B; identical to SEQ ID NO: 42964

SEQ ID NO: 42969 - DNA, 1632 bp, Bifidobacterium longum subsp. longum 1-6B; identical to SEQ ID NO: 42961

SEQ ID NO: 42970 - DNA, 675 bp, Bifidobacterium longum subsp. longum 1-6B; identical to SEQ ID NO: 41629

SEQ ID NO: 42971 - DNA, 3549 bp, Bifidobacterium longum subsp. longum 1-6B; identical to SEQ ID NO: 42963

SEQ ID NO: 42972 - DNA, 1185 bp, Bifidobacterium longum subsp. longum 1-6B; identical to SEQ ID NO: 42964

SEQ ID NO: 42973 - DNA, 1632 bp, Bifidobacterium longum subsp. longum 44B; identical to SEQ ID NO: 42961

SEQ ID NO: 42974 - DNA, 675 bp, Bifidobacterium longum subsp. longum 44B; identical to SEQ ID NO: 41629

SEQ ID NO: 42975 - DNA, 3549 bp, Bifidobacterium longum subsp. longum 44B; identical to SEQ ID NO: 42963

SEQ ID NO: 42976 - DNA, 1185 bp, Bifidobacterium longum subsp. longum 44B; identical to SEQ ID NO: 42964

SEQ ID NO: 42977 - DNA, 1470 bp, Xanthomonas citri pv. mangiferaeindicae LMG 941
atgaagcaccaggcccgtatcgccggctatcggcaactgcgcgagcagccggcatggaaactgcttgccgccgaccacgcacccgaactgatcggcctgctgcagacggtgctgatggatggcgaacgccgcctgccttcggcggtgttgcacgcgcgtttgcagcgccagctcgacgccttgcgcgctgacgagctctcgcgtgaactgccgcgcaccgcacaggcgtatcttgcgcattggttggcacagggctggttggaacgccgcctgccggaaggcgcagccgaagaagaatacgaactctcgcgtgccgcgacccaggccatccgcttcatcgtcggcctgcgcgaaagcagcagcagcgccaccgaaagccgcctgtcgctggtgatccagcaactggtgcagttggccggacagaccgaagccgatccagagctccggctggccgcactgcgcgacgaacgtgcgcgcatcgatgccgagatcgaacgcgtggcgtccggccgcgtggcggcgctggatggcaagcgcgcgctggaacgcgcgcgcgacctgatccatctctccgacgagctggccgaagatttccatcgcgtgcgcgacgacttcgagcagctcaaccgccaattccgcgagcgcatcatcgacgacgaaggcgcgcgcggcgacgtgctcgaacaactgttcgacggcgtggacgtgattgcagacagcgaagccgggcgcaccttcgaggcgttctggagcctgctcaacgacacccagcaaagcagccagctcgaccaggcgctggatgcgctgcttgcccgtgggtttgcccgcaagctcgagcgccgcgaacgcgccttcttgcgcgggctcaccggcacgctgctggagcgcggtggcgaggtgcacacggtgatgcagcatttcgcgcgcagcctgcgcggtttcgtgcaaagccgtgggtatctggaacagcgccggctcaatcaattgctcaagcaggcgcagggcgaagccttgcaattgcgcgacagcctgcacgccaccaccgccaccggctatacgcagccgctcagcagcagccgcctgcgctcgttgtcgcaatggcggctgcacgatccacggctcacccaggtcgatggacgcgtgcaggccgccgacgcggccgagatctcgctggacagcgtgggcgatctggtggcgcaatcggagatcgatgtgcgcagcctgcgcaacgacctgcatgagctgctcggccaacgcccgcggctgacgatcggcgacgccttgcaacaacgcccggccgtgcagggcctgggcagcgtgatcggatacctgtcgctgggcacgcgccacggcatggtgatcgaaggacagatggaaacggtgcaatgggaaggcagcgacggcgccgtgcggcgcgcacgcattcccttggtgtggtttacccgggagaaacgcaatgaactggtctga

SEQ ID NO: 42978 - DNA, 627 bp, Xanthomonas citri pv. mangiferaeindicae LMG 941
atggcgcaaacatccagtgccgagccgcgcggcgagctgtttttgggcgacaccggcacgctgccgttcgatgcgcggcgtgcgctgtgccagttgctggcagggcccagcatcgatgcgcaacgtcacggcgcgctgtggccggcgttgttgcgcaacgaggtggcgatccgccaggtgctgtgcgagctgtttctggaattggtgctcgaccgcgagggcggggtggcctttacccgtcaggccgacaccgcagagctggaatcgcccacgctgctgcgcagtgcgccgctgacgtttatcgagtcggtgttgctgctgttcctgcgccagcaactggccgaggccgacacgcgcggcgagcgtgcagtggtggacgaggcgcagttggtggaagccttgtcggtgtacgaaaagaacgtatccaccgatcgggcgggcttcgcgcggcgggtgatgacggcgatcggcaagatgcgcgacaaccagttgctgtcgcgcttgcgcggcagcgaggagcgctatgaagtgtcgccggtgttgaagctgttattttcggcagaagatgtgcaggccttggtggtggcgtatcgggagctccgtgagggcgaggttgcgctggattga

SEQ ID NO: 42979 - DNA, 4023 bp, Xanthomonas citri pv. mangiferaeindicae LMG 941
atgaattcccagtccaatctgtcgccggcgcagccgggtgcctccttgtttgccgagacgctcgccgagcaacgtgcgcagcagttccgcatgcggcgcttgcaggtgcacaactggggcaccttcaatgggctgaccgaagtgccaatcgcgcagaagggcttcctgttcgttgggcgttcgggctcgggcaagtccaccttgctggatgcgatgtcggcattgttgacgccgccgagcatcgtcgacttcaacgctgccgcgcgcgaagccgaacgcagtgggcgcgatcggagtctggtgtcgtatgtacgcggtgcgtgggccgatcagcaggacagcgcgtccggcgaaatcgccacgcaatacctgcgcaagggcgccacctggaccgcattggtgttggagtacgcgaacgcgcatggccagacggtgagcctgatccggttgttctggatcgccggcagcggtaacgcggcggccgatgtgcggcgtcactacatggtcgcgccacgccgtttcgacgtggcgaccgagctggatggcttcgatctcgacctgcgcaagctcaaggcgcgattgggcgatgaagttgcgcatttcgacggcttcgccggctatgccgaacgcttccggcatgcgctgggcatcggcaacgagatggcgctgcggctgctgcacaagacccagtcggccaagaacctgggcgatctcaatgcattcctgcgcggtttcatgctggacgagccgcggaccttcgaagcggccgaccggctggtggaagattttgccgagctcgatggcgcgcaccatgcggtggtcaccgcccggcgccaggtggaaaccctgacccctgcgcgcgagcaccacgcggcgctgatggcgctgcgccacagcgtcggcgagttgcgcgagttgcagctgggcgtggacagctaccgcgagcagcagcggctggccttgctggaggagcggctgcaggagctggacaaccaggaccgtggactggccggcgaagaaggccagcgccgcgaatcgctggataaccacgaacaaaaactggtcggcctggagcgcgagcagcgcgccgccggtggcgagcaggtcgaagaactggaacgcgaacgcgcacgcgtcgagcgcgagcgcgacgaacgcctgcgccgccgtgcacagatcgaacaggcctgccgccagctcggtaccgccctggcggccggcgccagcggctttgccgcgcagattgcgcatgcgcagaccgtgctggataacggcaagcacgacgccagcgcgctggacgaggccatcgccgaacgcatgggcgcgcggcgcgacgacgagcgccgctttgccgaaatccgcgccgaactggaggccctgaaacgcgcgccatcgagcatgccggcaccgatgcaggccctgcgcgcgcggctgtgcgaagacaccggcattgccgaggccgcactgccgttcgttggcgagctggtgcaggtacgcgaggaccagacggcctggcgcggcgcgatcgagcgtgtgttgcacggctttgcgcaatcgctgctggtggacgagcggcattacgcgcaggtcagcgaatgggtcaaccgcacccatatcggtacgcgcctggtgtacttccgtgtgcgccgcaacgacgagctgcattcgcggcgggtcgatcccggcgcgctgcccggcaagctgcaattgcgcgagcacgcctttaccgaatggctgcgcaacgagctgacccgccgtttcgactacgcctgcgtggacaacgccgcagcgctgcgcaacgccgaccgcgcaatcacccgcgagggccaggtcaagcatcctggcgatcgctatgagaaggacgaccgccacgcggtcaacgaccgcaagcgttggctgctcggtcacgacaaccgcgacaagctcaaggtgttcgaacgcgaagcgcagacgctggctcagcgcatcgccagctgcgatgccgatgtggcagcgctgcgcaagcagcgtgagcaggaccaggaacgccaactggccgcgcacaccctggtggagcgcgactgggacgagatcgacgtcggccccaagctgcagcgcctgagcgatatcgacgaacagttggtgcagctgcgcgaaggcaacagcggcctgcgtgcgctcggccaggccatcgacaccgcacgcaccctgcgcgaacaggccaagcgcacctacgaagatgtgcggctggagcgcgcgcaactggcgcgcgagcgcgtgcggctcgaacagcagcaggcggcctgcgcgggccgcgccggttccgccacgctcacgcccacccagttgcagggcttgcgggaacggcttgccgcattgacgccgctgtcgctggacaatctggaagcgcatttccgcgtggtcgaacgtggcctggccgagcagctggccgacagccagggccgcgacagccggctcagcgcgcagttgctggagtgcttccgcaagtattgccagcaatggcccgaagacagcggcgatttcaccgtgagccttgccagcgccgacgatttcctagcgcgtctggaccggctggaaagcgatggcctgccgcgtcacgagcatcgtttcttcgacctgttgcagacccagagcaagaacaacctgctggccttgcagcgccacaccgccgaagcccacaagggcatcaagcagcgcatggacgaggtcaacgccagtctggagcaggtgccgttcaatcgcgacaccgtgctgaccatcgaggtcggcgaccgccgcctggccgaggtgcaggaattccagcagcagttgcgcgcggtgctgtcgcatcaacagaccgaagaccgtgccctggccgaagcgcagttttccaccttgcgtgcgctggtggcacgcctgggcgcgcaggaaccggaggcacgccgctggcgcgaacaggtgctggatgtgcgcctgcatgtggagttcatcggtgtggaactggacgcacagacgcgcgcgcaggtggagatctaccgcagcggcgccggcaagtccggcggtcagcgccagaaactggcaaccacgtgcctggcggccgcgctgcgttaccagctcggcggcgaagacggcgaactgccgcgctactgcgcggtagtgctggacgaagccttcgacaaggccgacaacgaattcaccgcactggcgatgaatatcttcgagaacttcggcttccagatggtggtggccacgccgttgaagtcggtgatgaccttggagcccttcatcggtggtgcgtgctttgtcgaaatcagcggccgtcataactctggcgtgttgctgatcgaatacgacgagcaggcacagcgattgaagctgccggagcgctcgcgcggcgatgagccggcagttgccgatgccactgacgctgcgccgtcgatcgaggctgcggccgagtcagcaggagtgcagggcgctgcaagcgcagatggcatggcaaccaacggcgtcccaatgcacacggcatcgcctgcgacggaggagaccccgcccgcagcgcaggaaacgcagactggtcagcgcaagccggcagtcgcgacgacgagcaagcagaacaagaccgccaagaccgcatcttccacgcgtgctgcggcacagcctcaagcaaaacgcccgaagaaatcgccttcgcgcactcctgctctggctggcaagccggcatccaacaaacgcccagcgggcgtgccggcggtgtcgtcaggagtcgcatccaggtccaacgtgggcaagaccactcggtcttcaaaaacgccgggcaagccgattgcggccacaagcgcatccaacgtcacatccaggaaggtcgccgccgcatctgcggcattgaaaactgccgcagccaagccacgtgcaacagccgcatcgactggtcagccagcgcgcggcgccggcaagacaacctcgacgcgtgcggtggctaaaccgtcgccggccacaacgcgcggcaccagggcagacgccccgcggtcgcgcggcaagcgctga

SEQ ID NO: 42980 - DNA, 1518 bp, Cellvibrio sp. BR
atgttttttagcgattcccggcttcatttttttaatccgctcacgggtaaataccgggcgctcgctgctgagtgcctgcgtcttttatatcagcgtttatacacagatctgcgtgactatggacatgcgattaatcgtgaacagctagtcgatatttttaaagaggcgattgctcgcgcgcccattttggatattgatcttgatgtcgataccgaaggtgaggatacaagtgaggggcgctttaaaacccagcgcgatctggcgagttttattattaaccgtttaattgaaaatggttggctggaaaagcaagtcgacgaaaccagtttgcaaagtagctatggttttagtcgcatgggccgtttatttacccagccctttgccgataacgatgcgaatcaatttcgtacccgcaatcgcaacacccgtaacacccgcaatagtttgcaagccttttacgatcaaggtgaaattaacgatttgctcgatgcttatgaatactcagagcgaatcatcagtgatttcaccgatgtcatcgccgagcttgaagagcgcaagcgtcaattggtgcgtgaagtggaatcacgccaattaattcagcaagcgagcgatgagttttttgattttatggagacggtattcaaacctgacctggaagtacgtttgtctgctgatagtgtagaaaaataccgcgaccaaatttccgacataatcaccaaaattcgccgcaaacggaaatacggtttgggcgatgaagaaaccgctgcaaaagattggcgcgcagtaatggaaattcgcttgcgcaaagcattaccgcaaaaagtagttaccggtgtatcgctgctggagaccttgctgcaaaccattgactcacgcttgaaaaatgcctgtgacattatgttgcccgcgctgcgtcgcgcattgaacacctttacccagcgggctgacattattattcgccagctcagctacattaatagccgcgggcaggatgacctgatggacatttaccgctcgcttggcaatttatcgcccgagcagcaggatgaggtattagtcgtgcaaggcgaagcgattgccagtatccaaatgggttatatcgaccctgcgcaaatccaattgcgtgccccgcgcaatattcaagttgtacgctcaatgcttgacgaggataaagcattggatgcagaagctcaaaaatcgttgttcattcaacaagcgttggataaagcctttattttgcaatccagtagtgtgcgtgattatgtccatcgtgcactgctggaaaaaggtgagattcgcagcagcgagttgcaggcgaattccatgcaggaattattaaatctctcccatgccattgaagttggcgctgcagacaatctttcgtcccgttatcgtttttgtgttcaacaaaatagcgaatggttgcaccaacagcctttggtagcaaatagcgcttactttaagcagcgcgatgaatttgtaattagcttgaccgatgaaggtaagcccaatgagtaa

SEQ ID NO: 42981 - DNA, 759 bp, Cellvibrio sp. BR
atgagtaacgcattaagctcgctcctgcaggagcagttggataaacacaatttaagtttggaaaactggcgtgagctggtacagcggctactggattacggtgtcttatgtcgcgatgacagtcaggttgaagccgaactctatgaccgctttttgcgtattcatgaactactgaatgattacttgagtttgatgggaattcgctttcagcatgacagccattttcgttttgtgcgcattctgccaccgggtgcacgtttacccggtatggatgatgaaactgacgagccattcaacgcagggttgcgcagccgcttaaatcaacacgaagttgctttggtattagtgctgcgcgccgaatacgacaaagcgttacgtgaaggtagcatcgacgagcagggttgcgccactttatcgctcgaagccatcgccatggcgatgaaaagtttgctgcgtcgcagcttgccggaaaatatcggtgagcgtcgccaggcgtttaaacgtttacgccagctgcggttgattaattttttcgccgaatcagatattgactccagtgaaagttggataaaaattcgtccgttaatcattaatctcgttaataacgaatggcttgagcagatccgtaatcaccttgccgaaaacttactactagttgatgaggatgcagaagagcccagcacagcaagcgacgctcgtccatcccccgtcaagcccaccccgcattttaatcgctcgctttttgccgctgaagaatag

SEQ ID NO: 42982 - DNA, 3657 bp, Cellvibrio sp. BR
atgtatctgaaaaagtttatttacgttaactggggcaatgtacccaataccgagtttgaatttgggccgattaatttattttccggcggcaatggctcgggcaaaactacggcggcggatgcgattcaaaccatcatgacggcagcccatgataatttgtttcatttcaaccctgggcaggatgaatcgagtcagcgtggccgcggtggaaaactggtgcgcacactcgcatcctatgtgctgggctgtgacgatggtgcgtattcccgcccgcaaggttgcgatggatatttagcggcaatatttcaccccacacaaggtgaaaatagcgagccatttaccgcattaatcggcatgcgtgcgtttttagaaacagcagggcaaggagcaggcctacaaaaagttgcccgtttggatgatacccagttttatattctgagtgatgtagaactggggttaaacgatttattaaaagaagaaaaaacacacaagtatgtagttccactcgacaaactctacgctggtttgcgccgcaaatatggtcagtcacaagtagagaaatacgacaagaaaaaatcttatctctgccggctttatggtgttttgcgcggcaaaaaggatgcaatctccgagcgtgaagccatgaatgccgcccgcgcattttcgcgctttatggcatacaaacctattaagggtatcgatgaatttgttgccaacgagattctggagtaccgcgatttaggcgaagccattcgcaccgtatccaccatgcttaaacgtattcataccatggagtcagacgcccgcacgctgcgccaaggcattgagcgtatggcacaggggcgtcagtggtcggacaactttatcgccaactggcttgaacaacaggtgctgcaatactctgtagcaaaacgccgctataccgactcacaaagtttgtatttggatgcaaaacataaacagcaattgctacgtgaaagctcggcgggacatcagcaatcgttatctgcctgtgaagcccagcgcgatgaaattaaccaattgattcttgccgcaacagcccgccgcttaggcgttccggcactgcgtgataaagatcaactggaacaggaaaaagttgctcaagaaaagctgattcaaacccaagtgccggaactgcgtaagcaacatcagcaacttttggttaaccttgaagctgcccaacaattctcactggctttgcgccaaacctccatcgcagtggatttacctgcgttaaaagatagcaacctgacggcattggttaaaaacctgtgtagcgattccgaggcactggatatccaccagcttctcaatcgtgacttaattgagcttagcccgctggaacctcagctggaaaaagtggtggagctgcaaaaacatcacaatgcatttttcgccagcttatttacgcaagattccaatgccggtgttgcgcggattaatttacgcgatcaaatcgctcaggagcgcgataaacgcaaaacccaggctgagcgtttgcaaaaaaatactgaggtaaaacgccgcgaaatccagaccttggaatcacgtcaagtgagttaccccggttttgtgcgcgtcgcgcttgacgcgattgctacccagtgcccgaaagccgatgccagggttttatgcgattacgtggatatcaccgatcgcgaatggcaagcggcgatcgaaggttatattggcgcagcacgttttggcattattgttgaaccggaatacgaagccgaggcgattgctattgtgcgcaatatggcagggcaggggaatcgcgcccgcattattcagggcgataaagcgcgtaaggatattgataaatctggcgaaccgactagtaactccattattcaagtaatgaatttttcccacgccaccgcagaggcctacattaaagcgagttatggcaatgtacaacgcgtagaaaatgccaaagagttaaaaaacacgcggcgcggcatcaccaaagatgctatgggctcgggcaattacgcgatgtttcgctgtgatatggcagattcagaattggtatttggccaaggcgctcgcgagcgcgcactggatgccaaacgcaatgaattccatacgctggtaagtgaatggcaagccgcaacggcttatgcggaagaggcccaagaactcttgcttgcgctggataaacttaagcccttgagttatgccgaaacattacaggcgatgctggcggcacaaacaaaaattcaagcgattgatagtaaattgcagcaattggatttaagtgataccacggcattagaggcagagttaaatgaactgcaattgcgtttgcaggagcagaaccaacattatgctcgcttaaacaatgcacaagtggattgccgcgcagaattaaagttggcggataatctctgccacaaactggatgcagagcaagataaaaccctcgcgcaggttgatagttgcgaaaccaacctgcaagccattgctgcattctggccagactttgacgcggacgcacgtttgcaacttgccgatgaagagataggccaacacagcgtgcagtactttgaaacccagttagctggggtaaatgccgagttaaaaactattttacatcgcttgcaacaagcggcgatggtgcacaaccagttctgtgcaaccagcgatgccattttgtttgatattgactacaacgacgatttgggaagcgcgaatttccgtgcaatttgcgatatgcgtcggcaatttgatgcgctctataatcgcgataaaaatcatattctcgctcagcgacatcaggaaattgaatcgctgcgtgaaagttttaacaatgcctttgtcaccaatctgtgccactccatttatcaagctattaatgatggtaaaaaaacactggaggatttgaataaagagttggagcatcaccgctttggcgcggaccgcgagcgcttccgttttgattgggaatgggtacctgaattcaaagagtattggcaattcttcaaagccgtaatcgatagccccagcctgggggaaggcgaaacactgttcaatatgaagctggatgaaaaacaccagcgtgtgcgcgaacgactaatggcgatgttgctggatgaggacgaacaaaaagccttgcgtgaattaacgcgcattgccgattatcgtaattatcgctgctatgaaatttacaaagaaccagaaggtaaagcccccattgcactcagccaatatggcacgggctctggtgggcagctggaaacaccggcttacattattcgcagcgccgccattacctccgcatttcgctttaatgaaggcaacagccatttgcgcatggtgttggtagatgaggcgttttctaaaatggatgagcatcgctcccgtgaagtgattaattacttaacagaaagcttgggcttgcagctgaattttattatgccaagcagtaagtcaggcccatttatggatttaatctccaatcagtttgtattcagtaaatgcccaacaagcgaaccggttggtgaattaaagacgcgggtaatgcttgatcgccaagtgtgtgatcaggaaaagattaaaaagttaatggccaatcaccgtcgagcgatacgtcagcaggccgcgttggattttatgttggaggttgaagggtaa

SEQ ID NO: 42983 - DNA, 1446 bp, Rhodanobacter sp. 115
ttgagcaccagcgtgccgccgctgttttcggtggtgccgggcgggctgtttggtccgttggcgagtgccaatcgcgagcgttactgggaactgttgtgtcggttgttcgacgagttcttcgggccggacgcgccgttgccgcccagcatcggctttcagcggcgcgaaatcaccggcgcggtcgagcgctatctgctcaccgacgatccgtgggtggatgaagacggcggcgagggcggcgcgccgggcgcctcgttgctggaacgcgccaacgcgatctacgaacgctttcgttccaccggctggttgcgtcaggagcgcgtgggtgcgcgcgaaatggtgtcgatgatgccggtggtgtcgcagctgctatccaccctggtcgagttcgccgagcatggtccgacgttcgtctcggccaaggtgcgttcgatcgagctgcaattgcagcaggtggtggacggcaaggcgtttggcgatgcgctggacgaggccgccgaccaggcgcggcgattgctggtgtcgctgtcttcgatgagtttgaaggtgcgcgacctaatgccggagctgagccgttcggaaaccacggcgcagtttgcgcggcagtggttcgaacgttacgtcagcagcttcttcgtgggcgactacgccgacctgcacaaggccgaccatccgctggcacggcgcagcgcgatcctgtcgatggcgcagcaggtggaagacgcgtcgctgcacgaagccatgctcggctggtatcgcgagcatctgaccggcggcgataccgagcgcgccgagctgcgcttgcaacgcagtctgcgccggctgcacgagcttgaacgcatcgacgaatatctcggtcggctggacgaggacatccgccaggccaatcgccgcgcactggccttcctcgactaccgtctgcgcgcgccggccaagctcgacgtgctgctgcgtcgtgcctgccgtggcgtgttgcaggcgccggaagatgcactgcgtctgccggtggcacccggtgcactgatggatgacgcgcaattgcgcccgcctcgacgcaagccgcagccgattccgcgcagcgccaacgccatgcagcagcccacgcccgagcagctggcgcgactcagtttgctgcgccggatgaagcgcgcacggctggtcaacgccgaggacatggcccgctacctcggtcgtcatttgccgcccgaaggtggcatcgactccacgcaattgtcgatcggctcgatcgaggatctgcgcgcctatcagaccctgcttaccctagcattgcgcagtcgccgcattggtggcttgcgccgcgaggatccgctgggtcgcctgcagcgcggcttccgcgtggaactgctcgacgcgggcgaagcgggcgacaacggctacctgcgcgcaccgcgcttcgccgtgcatcgattacggaaaaccgcatga

SEQ ID NO: 42984 - DNA, 660 bp, Rhodanobacter sp. 115
atgaaacgcagctggaacacgctcagccagatctccaacggcgtgtacgccgtgcaggatttcgagcgcgccgcctatcgcctggtcaccgagcaagtgctctacgccagcgatcgcaacgcacgcacggcgtatcacctgatcgaggatcacttcgacgattatcttgccgtgctcgaaccgctcggcatccggctggaacgcaacgcgcactatcgctacgtggtggcgctgcccacgcacggcgaaggcacgccggtgacgctggacgaaaccctgctgttgctggtgctccgccagcgctacgacgaggcgatgcgccagggtcagatcgaggaccagggcgaagtggtggtcgagctgcccgacctgcaggaggcgtatccggcgctggctggtcgcgcgatgcccgaggtcggcacgctgcgcacgctggtccggacgctcaaacgctggggtgtatgccgcctggtcgataccgagggcgacgatccgcagccgttccatttgcgcgtacgcccggccatcgtggagatcgtcggcgagcaatggctgcagcggctggaccagcataatcgcgacgacgacatcccggatgaagctcgcgacgacgccgacaccgacaccgatgtcacggaggacgacgatgcagctgcttga

SEQ ID NO: 42985 - DNA, 3432 bp, Rhodanobacter sp. 115
atgcagctgcttgagcgtgtgcacctggtgcagtttttcctgttcgaggcgcagaccctgacgctggacgccaccagcgcgatcatcgcgccgaacggtgccggcaagagcgcgttgctggatgcattgcagatcgtgctgctcggtggcgaccgcagtcgcatccgtttcaatgcgcaggccggcggcagcgcgcgggcgcgcagcattcgtgattactgcctcggcgtgtttcgcagcggcgaggaaggtcgcaaacggcgcaccgccaccacctacatcagcctggtgttccgcgaccaggacagcggcgtgccgctgaccgccggcatcgcgctgggcgcgtcggccgacgaaccggatcaccgtctgtacggccagtacctgctgcccggcgtggcgctggaactggacgatcatctggaacgcagcaagggtcgcgagctgccgctggagtgggccgcgttccgcgagttggcggtgcgccgctgtcgcgatgccaacggcaagctggagttgcatccgaccagcgaacgcttcgtcaaggatctgctgttccgcctgcgtgccgcgcccaccgcgcacccggatgtcgcggcttatcgcaaggcgttccagaacgcgctcaacctgcagcgtgtcgaggacgtcgacctgttcgtgcgtacgctggtggccgaggacaggcccaccgacattgcgcgtttccgcgggctgctggaatcgtttcgccagttgaaggaaaagatcgcgcaagtggtcgagcgcattgatgcggccgagggcgtcgagcagcaatatgccaagatcgccacgcaggccacgcgtgccgcatcctatcgggcgctggccgccgaatacgcccgtgacctgctggccgagcaggtcgaccaggccgagcaggccagcgagcaggccaccgacaagctggccgccacgcggcgcgccttgcaggaatcgaccctcgaacagcagtcggccgaggacgcgcaccagcaggccagcgcgcgcctgcagggcagccagggctacggcgaacaggcgcagatcgacgaactggctgcgcgcgatcgcaacgaactggcgcgcttgaagaaggaactgttgcgcgagatcagcttcgtgcgcgaacagtttctcgcgctcggcaaactcggtttgcccaacgtggatgccgcgatgctggaacacgcacaggccgcgtggcatggctggtacgacacgctggtggcgttgcccgccgacgccgagctgccgtgggatgccgcttcattgcatgcgcaggcgcaccaggcgctggcagtggctggcccgttgatcgccgcggcagacggccacgcgcgccagttgcatgccaccttcgaggacgcgcaggcgcggctcgccgctgcccgccagaaccagaagcggctcgctgccggccaggccgaactgaacccggatgccgtgcgcctgatgagttacctgcacgacgaagggatcgacgcgcgaccggtatgtgacctggtgcgggtcaccgatgccgcgtggcaaccggtgatcgaagcctatttgcgcagcaacgtcgaggccttgctgattcctgccaccgacgaggaacgcgccaccaaactgtatcgctcgctgcagggtgggcgcagcgtctacggcgtgaagctggcgctgagcagccaggcgcgcaacagccgcggcaacgaccggcctgcatccgacagcgtggccgcgctgctcgatggcgacaacgccgatgcgctcgccttcctgcgccgccagctcggcgaactgcgctgcgtggaaaccgaggccgagttgatccgcagccgccagggcctgacccgtgacggcctgctggccaagggcggcagcatcgaacggctgcgcctgccggcggccggtgatttgaagatcggcgccaccgacaaccgcgcgcgccagcgcgtgctgcgcgaagacatcgaagcggccgagcgcgacgtgcgccagctcgaaccggaactgcgccgtgccgaagcctgccagcgcggactggcacgactgagcaaccccgacgaaccggcgcagtcattgcacgatcgcgtgctggagcatcgccaggtcgcccagcgctatcgcgccgcattggaaaatcgcgagtccacgctcaacccggatctgctgcgactggccgaacaggtgcgcgagctgcacgagcgcatggccgagtggcgcaagcagagcaaccgcctgattggtgaagaagccttggcagcgcgtgccgtcgaagaggcgcaacgcctgttcgacggcctgcgcgcgcaggaagcgatggtggcgcagcgcgccgtcgaggccttccgcgatgccgatgtcgacaacgcacgggtcgagcgccagcgcgaggaactggacgcgaaattcccctcgctggaagaacgcggcaagcgctgtaccgaacgtgccggcgaaagcgatgcacgcctgcgcagcctgttgcccgaagcctggagcgggttggcccagtatgcgaaggaccatggcctcggcatggaattcgccccggaccagtggcgtccggcgcaggcgctgctgcagaaggaactgcatcacttgcgcgataccgaactggccaactaccaggggcaggccgacgaggcctacgccaccgcggtggagaccttccgcagcaacgtggcctccacgctgtacgacaacttcagcaagctcaggtaccagatcactacgctcaaccgcacgctgcgcggcagtcctgcgttctccaacaacgagcgctaccagttccattacgaggtggcgccggagtatcgcgagctgcatcgcttcatccagcgcgccgcggatgtcggcggcgaggacaacctgttcggcagtgccggcgaagtgcctgccgcgttccgcgaactgatcgaggacaacgccacgacgcgcggcagtacgtcaccgctggacgactaccgccgcttcttccgcttcgaggtgcagatccggcaggacgaacgcgtggtcggcacgctcagcgaacgcatgcgctcggggtcgggcggcgagcatcgtgcgccgctgtacgtgatcgccggtgccgcgctggcggccgcctacggcaagagcgaggcgtggcccggtggcatcggcctgatcctgctcgatgaattcggcgacaagatcgacgcgcagaacgcccgcgccgtggtcgattacctgcgctcgctcggcctgcaactggtgctggccgcgccggacaccgcccaaggcaccttgagcggcgtgctggaaagctatatcgaactgttccgcgatggcgacctgctgcaggccgaacgcatcgaggtaaagcaggcggcacgcgacctgctgctgagcgaccagtttgatctgcatccggccttgctggccgaggaagctgcccgcatcgcccgtgagtcatcgagcgcatga

SEQ ID NO: 42986 - DNA, 1203 bp, Rhodanobacter sp. 115
atgagcgcggcgcgcagcgtgctcgagcgcctgctgcgccgcgccgaaagtgcgcgtctgcgtggcgctgatgaacacgtttcgctgccgatgggcagtacccgcgaatacacggatttgcgctcgctggccgagctggaacgtttccatgccgaggtggcgctggccgagcgcgacggtgcggtcagcgtacagcgcgaagcccgcagtggtgatggttcgcgcctgctgcgtctgggcgtagcggatcttcccgcattggcgcgccatcttgatgtgccgttgctggacgaccgcgtgaccgaagccgcttcccgtctggcggcatgggtcgaacgcttccccgtcatcgccgacgtgctcgacgcctggcgcagcggacgcaagctgcgcagttgcggcccggaagccgccagggacctgtcggacgcggcgattgccgtcgcggcccgtgccgacgacgccggtcacgaacgcatcctgcgtcgcgagagcgtgcgcctgtttggcgacagcaaacggctggagaagctgaccacgtggctggagttgctggtcaccggggagctggccgctagcggcttgtcgaaagaggaagtgtggtcggcgatcggcctgcgccgcgaaccacaaccgctgttgatttccggctgcggcagggtcgtgttgaccgatgccagcgcgccgctggtgcgtccctatctgggcttgccggtcgaatcggtgcagtcggtggcggtgacggcagactatgttctgagcatcgagaacctcgccagttttcatgacgccgcactttcaccggatgcggctgccggcttgctgctctataccggcggtatgccatcgcctgcgtggcgaacggcgtacgcgcgcattctggagagcttgccgtcgacctgtccggtctaccactggggcgatatcgacgagggcggcttccgcattgccgcggtgctggccggggccgcgcgcggtgccggccgcgttttgcagccatggctgatgtcgcccactgacctggaggcttcgctcttgcgcatcgccgacgtgccttcgacgcccgtgctggcagcgatgtgccactgggcgagccgggccggttgggaaccgttggcacagacgctgatgcaacagccgattcgcctggagcaggagcggctcgatcccgtgatgcccacgccggagtcgtctacccgctga

SEQ ID NO: 42987 - DNA, 1455 bp, Rhodanobacter denitrificans; identical to SEQ ID NO: 42703

SEQ ID NO: 42988 - DNA, 657 bp, Rhodanobacter denitrificans; identical to SEQ ID NO: 42704

SEQ ID NO: 42989 - DNA, 3411 bp, Rhodanobacter denitrificans
atgaacgagccgctttcccccagcctgaatttcgtgggcgatgacaccttgtcgggctttcgtctgaaacggctcgaagtgctgaactggggcaccttcgacaagcgggtgtggacgttgcagctcgatcgacgcaatggtttgcttaccggtgacatcggctcgggcaagtccaccctggtcgacgcgatcacgaccttgctggtgccggcgcagcggattgcctacaacaaggccgccggtgccgacagcaaggaacgcacactgcgctcctacgtgctcgggcactacaaatccgaacgtcatgagaccaccggcaccgccaagccggtaagcctgcgcggcaacgacagttactcggtcatcctcggtgtcttccacaatgccggttacgaccagacggtgacgctggcccaagttttctggatgaaagaggcacaagggcaaccggcgcgtttcttcgtgggtgccgagcgggagttgtcgatcgccgaacacttcgcccagttcggctcggacatgacccagttgcgcagaaagctgcgcaaagcgggtgccgaaatcgaagatggctttccgaaatacggcgcgtggttccgccgccgtttcggcatcgaaagcgatcaggcgctcgaactgttccaccagaccgtgtcgatgaagtcggtcggcaacctgaccgacttcgtgcgcagccacatgcttgagccgttcgaggtggcttcccgcatccaggcattgatcacgcactttgacaacttgaaccgcgcgcaccaggcggtgctcaaggcacagcaccaggttgaactgctcacgccactggtggccgatggcgagcggcatgccacgatggtggttgaggtgacggcgctgcgtgcctgccgcgaagcgctgcggccgtatttcgccgggatcaagctcgggctgctggacaagcgcatcaccggtctgacgagcgagtggcagcggcaggatgcccaggtaaggcggctggaagcgcattgcagtggccagcgcggcgagcaacgagaactcgagcgcagcattgccgacaacggtggcgagcgtatcgcgcgtctggccaatgacattcgtcgcaaggaagccgagcaagcgaccaagcggggcaaatccacgcaatacgaagcgctggtgcttgacgtcggcgaaacgttgcctgatgtcgagcaggatttcctgaccttgcgcaagcggttcgctgcgctcgatgagcggtctcgggagcgcgaggcgacgttgcagaacgagcttaccgaacatgccgtcagcctgcgccagggtcgggaagaacatgcggcgctgcgaaccgagatcaatagcctgaaggctcggcgcagcaatattcccgagcaacaagtggcgatgcgttccgccttgtgtcacgccctcgaactggccgaagaggacatgccgtttgccggcgagttgctgcaggtacgcgatgacgagcgcgactgggagggtgccgccgaacggctgctgcgcagcttcggcctgtcgctgttggtaccgaacgagcactacatccaggtcgccgattgggtcgatcgcacgcacctgaaggggcgtctggtctatttccgcatacggcaggccgcgcgcggtgcgttgccgggcctgcacaccgattcgttggcgcgcaagctggcggtcaagtccgattcgcctttctacgactggctggatcgtgaggtggcccatcgattcgacgtggcctgctgcctcacccaggaacagtttcgccgcgagacgcgcgccatcacccgcgccggccagatcaaggcgccgggcgagcgccacgagaaggacgaccgccaccggctggatgaccgcagccattacgtgctcggttggaccaatgccgccaagatcgccgcgctggagaccaaggccagggtgctggaatccagcctggccgacgtgggtgcgcaaatcgcgggacttcagacggagcaggatgcgctcaagaagcgcctcgccacactgtccaagctcgacctgttcgtcgactttcaggagatcgactggcaatcgacggcgctggaggtggcgcgtctcatgcaagagaagcaatcactggaatcgggctccgacgtgctccgacagttgaccgatcaattgaatgcattgacagctgccttgcaggtcgtcgaaaaggagctggaggatcgcaaggacaggcgttccagaaccgatcagaagaagaccgacgcgcagatcctgcgcgaacaggcgcagacggtgctgaacgaatcggatgcggccgcccatgcggtccattttgcacggctcgaagctatgcgcgagggcgcgctcggcgatcatcagctgacggtcgaaacgtgtgccaaccgcgaaagcgatatgcgcaattggctgcagaacagccttgacgccgagaacaagaagctcgaacgtctgcgcgataaaatcatcgacgccatgcgtgtctactgcaccgccttcccgcttgatacccaggaagtcgacgtcgccgtggaagcatgtggcgaataccgcacgatgctggacaaacttaaggctgatgacctgccgcgcttcgttgccagcttcaagaagctgctgaacgagaacacgatcaacgagatcgccaacttcaacgcccagctggctcgcgagcgcgaaaccatcaaggaacgtatcgcgcgcatcaacgactcgctcacccagatcgactacaaccccggccgctatatcgtgctggaatcccagctcagccccgatgcggagattcgcgatttccagacggatttacgcgcatgtaccgagggagcggtgatcggctcggacgatgcccagtattccgaagcgaagttcgtgcaggtcaagaccatcattgaccgctttcgcggtcgcgagggtctgtccgaacaggatcggcgctggacatccaaggtcaccgacgtgcgcaactggttcctgtttgccgccagcgagcgctggcgcgaggacgacaccgagttcgaccactactcggactcgggtggcaaatcgggtggccagaaggagaagttggcgtatacgatcctggccgccagtctggcgtaccagttcggcctggagtggggcgcggtgtgctctcgatccttccgcttcgtggtgatcgacgaggcttttgggcgtggttccgacgagtcggcgcactatggcctccggctctttcaacaactcaacctgcaactactgatcgtcacgccgttgcagaagatccatatcatcgagccctttgtggcccatgtcggcttcgtccacaacgaagcgggcagttcatcgaaactgcgcaacctgaccatcgaggaataccgcgcgcagaaggttgtgcatgccatggcgacagccccactggagacggagcgcgacgctgaatga

SEQ ID NO: 42990 - DNA, 1203 bp, Rhodanobacter denitrificans; identical to SEQ ID NO: 42706

SEQ ID NO: 42991 - DNA, 1464 bp, Rhodanobacter thiooxydans LCS2
atgaaaacccgcgcacgcattgctacctggcagcggctgcgccagcagcccacctggaaacttctggcggcggacaacgcgccgctgattggcgccctgctgcaggcgctgctactcgatggcgaacgccagttgccggcctcgctgctgcacgagcggctggcgcgcgaactggacgaattgcgcacgcatggccacgcggcgccgcgcgcggcgcaggcctacgtggccgaatggctggcggccggctggctggagcggcgctttcccgccggggccagcgaggaacagtacgagctgaccgcgccggcgatcgcggcgctgcgcttcctgggcagcctggacgcaagccgcagcgtggccaccgagagccggctggcgctggtgatccagcaactggtgcaactggcgcggcagaccgatgccgacccgcacagccgcctgggcgaactgctcgccgagcgcgagcgcatcgatgcgcagatcgccgcggtcagcgagggccgggtcgacgtgctggacgacacccgcgcgctggagcgagcccgcgaggtgatcgcgctggccgacgagttggcggaggatttccgccacgtgcgcgacgatttccagcagctggatcgcgagttccgcgaacgcatcatcgacgacgagcgccagcgcggcgagatgctggaggcgctgttcgccggcgtcgacgtgatcgccgaaagcgaatccgggcgcagtttcgacgcgttctggcggctgctcaccgacgccgagcagagcggccagctggaagcggcggtggacgcggtgaccagccgcccgtttgcccgcgcgctggaccggcgcgaacgcagcttcctgctgcacctcacccgtaccctgctcgatcgcggcggccacgtgcacgacgtgctgcagcatttcgcgcgcagcctgaagggcttcgtgcagagccgcgcctacctggaacagcgccgcctgcaccagttgctgaaacaggcccaggccgaggcgctgaagctgcgcgaccgagtacgcagcaaccagggcatcgactacacgctgaccctgagcagcgcgcggctgcattcgctgtcgcgctggcggctcaacgatccgcgcaccggccaggtcgacggcagcatcgtccgcgccgacggcgcggcgatctcgctggacagcgtgggcgagctggtggcgcagtcggagatcgacttccgcagcttgaagcagcgcgtgcgggcgttgctggccgagcgagcgcagtgctcggtcggtgccgtgctcgaacactatccggccgaacagggcctgggcagcgtggtcggctacgtcgcgctgggcagccgccacggcatgctggtggccgatcgccacgaatcggtgagctggcgcggcgaggatggccgcgaacgccgtgcgcgcattcccctgctgtacttcctcaaggaaaaacgcgatgaactggtctga

SEQ ID NO: 42992 - DNA, 690 bp, Rhodanobacter thiooxydans LCS2
atgaactggtctgaagacagggacgaaccgaccccggaaaacccgttgccggaaagcgtgggcgatcccgcgctgtttcccggcgacagcggcagcctgccgttcggggcgcgccgcgtgctgtgccagttgctggccggccccagcgtggacgccgagcgccatgcgctgctgtggccggtgctgctgcgcgaggaaaccgccatccgcgcgcgcctgagcgacttgtttctggaactggtgctcgaccgcgacctgcgcgtggccttcgtgcgccaggccgacaccggcgagctggaaacgccgaccctgctgcgttccagtccgcttaccttcatcgactcggtgctgctgctggccctgcgccaacgcctggccgaggccgaggcgcacggccagcgcgccgtggtggaggaggacgaactgcatgcgcaactggccgtgtacgaaccgccgcagggcaccgaccgcgccggcttcgtccggaagctcaacgcagccatcgagaagatgaagaagaacaacgtgctgcagccgatccgcggcagcgagggtcgccacgaggtatcgcccacgctgaagctgctgttctccgccgaggacgtgcaggcgctgggtgcggtctatcgcgagcacctggccggccggcatggtggcgcggacgtggagagcgaggaggacgaggaatga

SEQ ID NO: 42993 - DNA, 3375 bp, Rhodanobacter thiooxydans LCS2
atgaaaaagtccgatggcgctcctaccctgttcctgtccgacctgcccacgccgcgcgaggagcagttccgcatgcgccgcctgcaggtactcaactggggtaccttctccggcctgcacgaggtgccgatcgccgagcgcggcttcctgttcgttggccgttccggctcgggcaagtcgaccctgctcgacgcgatgtcggcgttgctggtgccgccggcgctggtggatttcaacgccgccgcgcgggaggccgagcgtagcggtcgcgaccgctcgctggtgtcctacgtgcgcggcgcctgggccgaccgccacgacgacgattcgggcgaggtcgccacccagtacctgcgtcgcggcgccacctggtcggcgctggcgctggaataccgcaacgcgctgggccgctgcgtcacgctggtgcggttgctgtggatccgcggcaacagctccagcgcggccgacgtgcagaagtatttcatcatcgccgagcggccgttcgacctggcgacggaactggccggcttcgacctggacatccggcgcctcaagcagcgcatttccgatgtccactatcacgagactttcagcgcctacgccgaacgcttccgtcgcctgctaggcatcggcaacgacaccgcgctgcgcctgctgcacaagacccagtcggcgaagaacctgggcgacctcaaccatttcctgcgcgacttcatgctggagcgaccggaaaccttcaccgtagcggaacggctggtggccgagttcgccgaactggacgaagcgcacaaggcggtggtcaccgcgcgcgagcagatcgaaaccctgcgccccgcacgcacggcgcacgaccggctgatggacgtgcgccgcgaacgcagcgaactggacgagctgctggccggcatggacggctaccgcgagcgccggcggctgcgcctgctcgacgcgcggctggccgagctggacacgctcgaccgcggcctcgaaggcgaggagggccgccgtcaacagacatgggaacagcaccagcgtgaactgggcgacctgcaggcacgccaccgcgaacagggcggtgaccgcatcgaacaactgcaacgcgaccacgacagcgtgtcgcgcgagcgcgatgcctgcctgcgccatcgcggcgtggccgagagcgcgtgccggcaactggattggcagctcgccgccagcccgcaaggtttcgccgaacagctcgccgaggcgcgccgcctgctcgatgccggccaggacgccgccgccagtgccgaccagcgcatgctggaactgggcatgcagaaaaagcaggccgagcttgattttgccagggcacgtgccgagatctccgcgctggaaaagcatccgtcgaacgttcccgaatacatgcagaccttgcgcagccggctgtgcgccgcggtgggcctggccgagaccgcgctgccgttcgccggcgagctgatccaggtacgcgcggacgaagcggcgtggagcggcgcgatcgaacgcctgctgcacggcttcgcgctgtcgctgctggtggacgagcggcattacgccaaggtggcggcgtgggtcgacgccacccatctgggcggcaagttggtgtaccaccgcatcggcgctgcggatggactgaacgtgtccgcgccgccaccacgctcgctgctgtacaagctagaactggcgccacatgcacaccaggaatggctgcacgcggaactgctgcgccgctacgactacgcctgcgtggacagcgtgcaggcgctgcagcgcagcgatcgcgcgatcaccgcacaaggccagatcaagcacggccgcagccgccacgagaaggacgaccgccacgccgtcgacgatcgtcgccagtgggtgctgggcttcgacaatcgcgacaagctggcgctgtacaaggccgaagctggcgcgttggcgcagcagattgccgatgccgaccatgcgatcgcggcgatccacgtcgagcgcaggcagcgggccagccacgccgccgccgcgcagtcgctggccaacctgcgctggagcgatatcgacgtcgctccgctgctcacgcggctggatgccatcgcaatcgaattgggcgagttgtccgaagccaatgtgaccctgcgcgacctgggcgaacgcatcgccacgaaggaaaaacaagttacttcagcgcagcgccttctgaatgacgtgcgcgtcgaacgcgatggtcataggcgcgaacacgaacggctggacaaggagcgcgcccgctgcgtcgacgacgtggcggccaagccgctgacgccgctgcagcagcagggcctggacgcgcgctgcgaagccggcgcggcgttcacccttggcaatctggccgagcgcacgcttgtgatggagcgtgcgctgaaccagggcatcggcacgctggagaccgaggccggtgcgcagtcccatcgcatcgtcagcggtttcgaggcgttccgccgccgttggccgcaggatgccggcgacgtgcaggccgatctgcagagcgcggcggatttcttcgcccggctggagcggctggaacgcgacggcctgccggcccacgaggcgcgtttcttcgacatgctgcgcacgcagagcgggcagaacctggtggcgctgcagacgcacatcgcgcaggcacacaaggcgatccgcgcacgcatggaagacgtcaacgccagcctggagaaagtgccgttcaaccgcggcagcgtcctgcagatccggcccgaggatcgccgcctgcccgaggtgatcgagttccgccagcagctgcgcgacgtgctggcgcaccagcgcaccgacgaccgcgaacgcgccgaggcgcagttcgaaggcctgcgcaaactggtcgcccggctggcctcgaccgaccccgagcacaagcgctggcgcgaacaggtgctggacgtgcgcctgcacgtggagttcatcggcgaggaacgcgatgcggtgagtggcgagcagttggaggtctaccgcagtggcgccggcaagtccggcggccagcgccagaaactggccaccacctgcctggccgccgcgctgcgctaccagctgggcgacgaggacggcggcgtgccgcaatacgcggcggtggtgctggacgaagcgttcgacaaggccgacaacgaattcaccgcgatggcgatgcgcatcttcgagaacttcggcttccagatgatcgtggccacgccgttgaaatcggtgatgacgctggagccgttcatcggtggtgcctgcttcgtcgagatcaacgggcgccacgactccgccgtgctgatgatcgaatacgacgccgccagccagcggctggacctgccccgtagtgtgcccgggggcgacgatgcgcagccctga

SEQ ID NO: 42994 - DNA, 1155 bp, Rhodanobacter thiooxydans LCS2
atgcgcagccctgagcaggcggtcgccctgctgcgcggccaatggccgcgccaagccggtgattggctgggcggcagcggcgagtggccgctgcgtgtattgctggcggtcccgggtgaaaagcaggccagcgcgcactgggtggcgttcgaggcgtggcgatcggcgtggaagagttggccgggcggtgaggtgatttggatcgagcggcgctggcccctgctcggtcgccaggtggtgccggaagcgctgttgctgcccgacgcgaatgcactggccgccctgctcggcgaaaccgtgcgctggcagcgtgcctgtgcgcggttcgcgacgtggacgcaacgctggccatcgctggccaccgggctgcgccgccaataccttttgctggccgacaccggggaaaccgagttcatccgcctcggcgacatgctggcgtggctgcaggcacaccgtgcgtcgaacctgttcgcccgccagttaccggtggccgggctcgacagcaagtggctggagacccgtaccggcttgctcggcgactggctacgcacactggccgatctgccccgtgacaccgatttctggcgagccagcggcttgcgccgcgagcccgatcgactgcgcctgcgcgtgctcgatcccgccttgcgcgcccgcgctggcggcctgggtgacatccatgcgccgttcgaccagctggctgcgctggcgttgccggcgcgccgcgtgttcatcgtcgaaaacaaacagaccggcctggccttcgacgacctgcccggcgccgtggtgctgatggcgcgcggttatgcggtcgatcgcctgcatgaactaccgtggttgcgtgctgccgatgcggtgcattactggggcgacctggacacccacggcctggccatcctcggccacctgcgcggccacctgccgcaagtgcggtcgctgctgatggacgagacaaccctgctggcccatcgcgcgctgtgggtgaccgaaccgcaaccgcaccgcgccgacgcgatcgagtacctggatacccccgagcaggcgctgtaccgggacctgcgcggcgaccgctggggcgtgcgcgtgcggctggagcaggagcggattggctgggatgtggcgtgggcgaacattcgttcaatggcaagcggatga

SEQ ID NO: 42995 - DNA, 1497 bp, Rhodococcus opacus M213
atgtccatcaccgccgacgtgcatcggcttcttcgcctgcggcaggaccacgccgcgtggacgttgctgcgggccgataccgcgccggcaattctggcgctgttgggccggcacttcgaccatgggacccgccgcctccctgctccggaactcttcgcccgcttggactccgatctgcagaccatgcgcgacgagggcctcgacttcccgcgaaccggtcaggcctattgcaccgagtgggtgcggtccggatacctgctccgacgagcagcggccggtacccgtgaggagactctggaaccgaccgagggcgcgttcgccgcgatggccttcgtcgcgggcttcaccagccaggcgagttcggcaaccgaatcccgcctgaccacgctctccacccagttgcagagcctcgcgcgcgattccgatccccgcgcggaaacccgtctcgccgcgctgctggccgaacggtcgtcgatcgatcaccagatcgcagcggtggagtcgggagtcttcccagtcctcgacggcgaacgcgctgtcgagcgttctgccgagattctcgcgctggcctcggaggtccccgccgatttcgcccgcgtccgcgccgaactcgaggaactcaaccgtgatctgcgagcccgcatcctcgatgacgacggtgatcgcggcgacactctgggagatgtgttccgcggggtcgacctgatcggagattccgatgccggccgcagcttctctgccttctacgacatgattctcgatccggcccggtcgtctcagatcgacgagtggatcgatgcagtgctgcagcggccgttcgcctcccaattgaccaacgatcagaaacgacggttccgcgcattactgaccgagatggaaacggctggctccgaagtgcattcgacgatgacatccctgtcccggtcgttgcgtcatttcgtccagtcgcgtcactacgaggaacaccgccggctgcagcggttgctgcgcagcgcgcagcagagtgctgtcgccgtggccacacgtcgtcgaccctacgacctgctcgacctcgacctggtgcgcgtcggtatgagcatcgaatcggtcgcagctctgcgcctgcacaaccctgccgacaacctcgtcaccgagccggtgcgtacccacgaccccggtaccgtcgatctcgatgaacttcgaaagctggtccgagaatccgagatcgatatggacgaactgtccgacaacgtcgcggcgacgctgcgcgcgcacggtcgcgccacgatcggtgacgtcctgcgcgagtaccctgccacccaaggactcgcgagcgcagtcggattgatggtccttgccacccaccacgggcacgcgatcgacggcaccgaagacatccactggatctcgggagccggagtatcgcgtcgggcgacaattcgtcgtcacctgttcgatcctgccgccgacgagttcaccgctcgtccggcgttcgcacccacggggagctcgacatga

SEQ ID NO: 42996 - DNA, 606 bp, Rhodococcus opacus M213
atgacccacgagccgatggccggcggccattaccccggcgacaccggcgaactggacctcgagacgcggcgcgcgttcgtgcagctactcaagggccctctcgtcaccgcggccaaacatcccgaggtgtggcgtgcggtgatccgggacgagcgcctcctccggtcccgactcgccgacgtcttcctcgatctcgtcatcgacgacgagaacgagctggcgttcacccgccccgccgagaccggcaatgccaatacccccacggtgctgcgcaccgagcgtctgaccttcatggacaccgtcatgctgctcgcattgcgccaacgactgctgcgcgcgcaagccggcgaacgggtgatggtcgacctcgacgaactgcgcgaacagctcgagctgtatcgcacggccggcgacaccgacccggccggctacgcgaagcgcgtcaacgcgtcgtggaagaagctcgacaagtattcgctgctcacgaagacgtcgaccgacgaccgaatggaaatctccccggtgttgcggcagctgttcgatgccgaacaggtcgcgctggtcgaagtggagtttcggcgcattctggaggaggacacaccgtga

SEQ ID NO: 42997 - DNA, 3288 bp, Rhodococcus opacus M213
gtgatccatcccggtcaacgccgtcttgcgcgcgttcaggtcgtcaactgggggacgttgcacggccaccacgatctttccgtggcccgtaagggtttcctgatcaccggcaattccggctccggcaagtccacgctcatcgatgccatctcggctgtgctcgtcccgggcaatcaactgcggttcaacgcggctgcgcaggaggccacgaactcgggacgcaacttcgtcacgtacatccgtggcgcgtggcggcgggaggcgggcgccgacaccgacggtctggtcgcctcgtacctgcgcaccggcgcgacgtggagcgggatcgccctcacctaccgcgccggcaccgacgatccgccgatcaccctcgtcaaactcatgcatctgggtcgcggccagaacgccgcagcggacgtcacccacctccatctgattctcgaacacgaactcgacctgaccgacttcacgtcgttcacgacgcgcggcatcgacacgagggcgatcaggaagcggtggccggagtcgacggtcagcccggcctacgggccgttcgcccgtagtttccgctcccgcctcggcatctcgtcggagggcgctcagcgcctgctgcaccgcaccttgtccgcgaagagcctcggcagcctcgaccagttgttccgcgactacatgctcgacactccgaacaccttcgcgatggccgaacgtgcggtcaaccagttccacgacctgcaggaggcgcaccgcgtcgtggtcgacgcgcggcgtcaggtggagatgctcgcaccgctcgtcgatcttgccgacacccggcaacgcgggcttcagtccctgcgcgacacggacgaggagaacgcgcatctcggagcggttcacgcggagatgaccttgttcctcctgcgcggtgaatgcactgaacgccatgccctgacgcccctgctggaggcgggtgcgagcgaagccaccgccgctgccgagcgtgcacggcaggagaccctcgatctgaccatgaaactcgagggcatcgggggcggcagactggccaccctccacgcgcagcgagacgcggaactgaagatgtcggcgcgcgtccgaatcaggcgccagcagatcgccgaggcggtgtcggcctgggaaggaaccgttccggagacctccgaggaattcgcgcgactgcggggacaactcgaggatcaggcgcgtcaggccaccaccgcccacgaggaacggcacggcgcccgctacgcgctcgccgaacagcgcggcaccgcgcagaaggagcgcgcggcgctgatcaccgatcgcgagatcgtcgcccgcagacgttccaacatcgatccgactctgctccgcgcgcgcgagtcgatctgttccgccgcaggtgttccggacgacgcggtgcccttcgccggcgagttgattgcggtgcgggacgaatactccgagtggaccggacccatcgagcgagtcctcggcggcctcggccgaaccctgctcgtcccggacgacgtgtatccggcggttgccgcggccgtcgatgccacccacctcggcgcgcgcctggtgtatcgccgagtgcgggtgggcgtcacaccgtcggcggtgcccaagaccggggcgttgtccctggtgcgtcgcgtggaggtcgccgacggtccgctcgccgcgtggatccaccaccatctcgccgactgctacgactatgcatgcgtcgacaccgctgccgaattcacggatcacgcgcgcgccgtgacacgcgccgggcaggtcaagcactccgcggagcgacacgagaaggatgaccgcagccgcatcgacgatcgccggcggtgggttctcggattcgacaacgaagccaaactcgaggacattcgccggcgaatcgcagatctcgatgtcacgatcgcaggtgcgacgagccgactcgacgcgctggaccgtgaggaccagcagatcgccgtccagaaccgcgcagcacagacagtcctcgatgctcagtgggtggacgtcgacgtgagcggtgcgcaggctgccgtcgacgccgtggacaaccgtctcgaatcatggcagcaggacaacccggagcattctgcggtgtcggttgccctcgagctcgccaagaaggcggagaacgaggccgacgcagcccggcggcaggcggatactgcgttgacggtgcatcgaactgcggtgacagaactcgagacgcggatcgcgcgggccgaactcgacgcggatgatgcggctcccgatgctgtcgccgcgcggatcagggcgcgattccagaagttcgcgcgccgagtgacgtcggacaacatcgacaaggcgctgttcgaggtcggccagggtatcggcaaggacagggctgacgcacagagcgcggtgtccgccgccgacgcgtcgatcgtcaggatcctctcccagtatctggcgcgatgggagtctcgcggcggtgagctgcggatcgacgccgaatacgtcgacgacgcactgacgatcctccagcgcctgcgctccgacggtcttccccggtacgaagatcggttcttccagttgctgcacgaccagtctcaccgcaatatcggcgaactcgctcgcacgatccgcaaggcgcccgccgagatccgttcccgcatcgatccggtgaacgactcactgcaccgttccgcgttcgacaccgaccgatggttgcgcatcgacgtccgcgagcgacggtcgccggcggcggccgatttcctcgacgacctgacccggatcacgagtggtggatgggacatcgaacagcgtcccgcagccgaggaacgattcgagcggatggcggctgtgctggagcgcctggcgtcgaaggaacccgcggatcagcggtggcagcgccaggttctggacactcgcctgcacgtcgggttcatcggcgtggaggtcgacggtgccggagaggctcgcaactaccacgattcgagctcgggattgtctggcggtcaggcacagaaactcgtgttcttctgcctggcagcggcgttgcggtatcagctcgcccccgacggcgcagaccttccccggtacggcaccgtcatcctggatgaggcgttcgaccgggccgactccgcgtacacacgccgagcactggatgtattcgcgcagttcggttttcacatggtgctcgcgaccccactcaagttgctcggcaccctcgaggagtacatcggcggcgctgtgaccgtgagcatccgcgaccggatgcacaccgaactcagcctcatcgaattcgacgacgtgggcaccacatga

SEQ ID NO: 42998 - DNA, 1152 bp, Rhodococcus opacus M213
atgagtgtgcggtgtgttctgccgcccgctgccgcggcgaaggcgctgaccacctacagcagtcgccgacgtcgctggctggccgattccgcacttgccgaccaggattcgctgacggttgccctgcatccgccttccgagcaccagattgccgaggatcccgacgcggtcgtcgcgtgggtccgctcctggcgcgcctacaccggcgccggccacgtggagtgggcgatgcgccggtggccgagcttcggcacacaggaggtgccggtgcggctgacactttccggggccggccagattgcgtccgcgggtggccgcgaaaccgaatggcgcgccctgatgattcgtcgtgacgtacttgtcgaccgccttggtcccggcaccgagacgttgtcggcagcggtcgccgcgaccgcggcgaactggctcgacctggacgacgacgacttcgtcaggctgacaaccatcgcgcggtggttgagcgaccatccgaactccgggtacttcattcgtcaacttcccgttccgggcgtcgacacgaaatggctctcgcgtcatcgcggaatggtggagactctgctcgagggcgttcgcggacaccgagaactcggtatccggagcctgcccggcatgcgagacgtcgctctgtgcgatcccgatctcctgatcggaactccgaggcgcttcgcgacctctgtggaggaactcaccgcattgccgctggccccggcgcgcaccgtgattctcgagaacaaagagggcctgtatgcgctacctcggctggcggagacggtggcactgcacggtggcggctacacggttcacgagttggccggaattccgtgggtcgtcaactcggaggtctggtattggggcgacctcgacagtcacggtttcgccatcctcgaccgtctgcgccgacatcttccgcacgtgcggagtctgttgatggacacggacaccctggatcggtggcggaccctcgcggtccgcgagcacaagcccaccttcaacgaggtatcccatctcaccgaatccgaagccgccgccctgcagtccctgcgcgaggacgatctccgcctggagcaggaacgcataccctggccgtacgccctggagagactcctcgctgcagtcggtccgggtcagtag

SEQ ID NO: 42999 - DNA, 1521 bp, Bifidobacterium bifidum BGN4
gtgggtgatatccgacgggagatggaacggctgaggccggtctatgaaaccggcgtgctgagactgctgctccgtcagaattcgatgatgtacgtggcgctgctccgcgcggccttcgacccgttgaccggcgagctgccccgtgagaccctggaggaaagcttctcgcaaagcctgtcccggctcgtcgactccggcgaataccagctcagggaggatcagaccatcgcggacgcctcccggcgcatcctcgccgacctgacccgtgagggcgatgacgattacgcatggctcgccaactcgcatgacgccgcatcgcaccggttcctgtaccgtctcaccgcccgcgcccatcgtgcgatcgaggcgctgtcgcggcttgaggatgactcccgcacgctgtcgggcgcgcaggcgaactcgatcatcatggagatcgagcatgcgcgcatgcagcttaccgccgaccccggcgagcgcgtggcgttgctcaaccgggagatcaaggcgcgcaaacacgagatacgtcagatacgccacggtcagcggcaggcggcgctcaccgaatcgcaggtcgaggacgtgattgcagtgattcacaacacgctgcgcggcgtgcccatagacctgcgtgaactcgtgctgaccgaacgggacaacggtgacgcgctccgccgccgcatgcaggcgggcgacatgagcgtcgacgacatcctgacctcgtaccacgacgaataccgcaggtccttcagcgagtccgacagcggaagacgcttcgaggacgcgttccaggtgatcatcaccgacgagggacggcagcagatcgacgcggccctgcgcgacatcgcccacacgccgtatctggccggcgagtccggcgtcctgctcgatcaggtgcgtgccgagctttcgcgcatctatgacggcatcgaggcggtgcgtcgccagatgcgcgtatccgacgaggcgatcagccgtctggtgcgacagcagaccgatactcgataccgcacgatgctcggcaagctcaaccgtctgtatgcccacgtcaacgccgacgcgaaggcgcaccagagcgacgatgcgagaccgtaccggaccgataccgcggccggcaggttccctccgctgccgtcgcgccccgcgcgcccgatggtacgaacgaccaccccgggattgtccgtcccgcagacaccgggcgatgcgcctgcgcccgacctgcgttcgatgatcgacaacgggggaccgcggctgcggcgcatggccgcgctcatcctcgaatcgcccgtctacgcggacgacgggaacggcgccatcgacatcgtcgccagcttcaacggactgccgaaagccgagcggaaggaaagcgagctcgtcggtttcctgggagagctcggctgcggggacggagccggcgtcgcatggcattgcatatcggcagacggaagcccgagggactggatcaccggcccagtgctcgcacaagaggatgaattgcacgacatcgtgaaggaggactga

SEQ ID NO: 43000 - DNA, 1029 bp, Bifidobacterium bifidum BGN4
atgagcgacctgacgaacgacaccgcccagccggacgcggacatggacatggacatgattggcgacgacatgaccggcaccggcagtgccgataccgacagtgccagtaccggcgcggatgacatgggtgcggcggacgtcgaatacgatggcgcggacgcggaaggcgcggtcaacccatacgccctgttcgagggcgacacgggcgacatgaccgccgacgcgcgcatggtggcgatcatgctcaaacgcgagcgctacatcagcggacgtttctatgacctggcgctcgacaaccgcgcggcggtcatccgttcgctcaacaacgacctgctcgatctggtcgtcaacgagcactaccgcgtcatgtacgccaccgcggtgagcgggccggacatgacgctgcgcgcgctcaagacccgtgcgagcctcaaacgtgaggaggcggcgctgctggcgttcctgcgcatccgcgtgctcgaatacgagaacgcccacgtcgcgccggacgaatggctggtcagcttcgaggagatccgagcggcgcttgccaccggcgccgggtacctcgcctcgcgcaacgacgaggagggcgtgctcaggcaggtgagcgcgatcgtgtccgtcatgtgcacgtacggctatctcaggcagctcgacgatgacgagacgatgtaccgcatcacgccgctggtgccggtggtgctggaccgtcagttggcggacagctggctcgcagtcgcggaccgggacgacgatggcgagccggccggtgacatggccccggccggctcgcggtctgcagccggcgatacgtcgaacgccgatgcgagcggcgccgatgacgatggcgattcggacgatgcgggacccgacgccgaactgttcgaggctccgctgttcgatgacgacgccgatgcggacgccgccgagaacatcaagggcgccgatgatgccaatggcgcgaacgacagcgacattgacgacgagaccgcctcggacggcggcactgcacgggaaggggagtga

SEQ ID NO: 43001 - DNA, 3591 bp, Bifidobacterium bifidum BGN4
atgagcggcaaggacatgcagatgatcgccgaccgatggatgatggaaagcaggaggctcgtcaactggggatcctatgagggctaccatgagttccgtccctccacggactcgcaactgccggtgacgttgctcgccggcgcgagcgaatccggcaagtcgacgctggtcgacgctcagatatcgctgctctacccgaccggcacgcccttcaacaaggcgtcgaattcggggcgttcggaacgaagcgactacacctacctgcgcggcatgatcggcgtgggaggctccgacggcgtcgacgaaccgatgtacctgcgcggccgggacgagtccggcgcgccccggtccatatggggcgcgatcgtcgacacctaccgcaacttcaccaccggtcagatactgtcctgcggcaagttcctctatctgatgcccggcgacgggcgcggcgacgtccgacggctgtacctggcatgggacaagccgatcgacccgcgccgcatggacgtgttccgcgagtcgtcgttcacgcccacgcagctgaagtccacgtatccggggtgcgtcaccttcccgaacgccgaggcgttccacacccacatttgggatgtcatgggcctgagcgcggaggcatgccgtctgctggcccgcatccagtcggccgacgccccctcccgccttgacgacatcttcaaacagggcgtgctgggcgtgcccgaggcgctggacctggcccgtgcgaccgtggaggattacgagcgttacgacgcgaacttccgaagcatggaggaaaagaccaggcgcatgggcaagttgcgtgccatcaccgccagctatggcgactacgagtcggcccgtgacgcggtccactcgttcgacgcggtgaacccggccacgaagtccggctcggcgacgatccgagcatgggcgatccgccgcatgatcggcgaggtcagcgaacggcagccgctcgacaggcgtctgcgtgacgagcgacgcagtgaggcgcgggctgccggcaagcgcatcgaaagcctgcgcacccgcatcgacgcggtgcgcgagcgcatgcgaggcctcgacggcggcgacctgacacggctcgacgcggaaatgcggcaggcggaacgcgcgctggcggacatcaccgccggcagacagcgcatcgggcgcatgttcgaggcggccggcgaggagttccccaaagacgagcacgcgtgggacgagcggcgcatcgaggccgtgacgttcatgcgctcatatgagcagcgcaagggactgctggacgacatgcgcaaccagacgtacgccgcgcacgcgtccgtcaagcagacgctgcagcggctgaacgacgattacgaacgccagaaatcgcagcgcacccgcatctcccgacagatggacgagacccgcgccatgctgtgccgggccaccgggctgggcccgagcgaactgccgtacgtcgcggagctcatggacgtgcgcgaggaccaggagcattggcgtctcgccatgaacgccgcatacggatccatggcccagaccatcctcgtcgacaagcgccatgagcgtggattcgcagccaaggtcagcgccatcgacccgcacgccatggcgcggcgcacctggcagttcgtcgacaccgaacgcgggggagccgggaacgggcccggcggcgcgaacacgggtgcgaccggcgggacggacggagaggtgtggctgtcctcgaagctgcgctaccgcgaggattccccgttcgccggctggctgcgcgagcagaccagctccgagcgtctcgacgccctgtgcgtcgacggcatcgacgactccgaccatgccgtgcggcaggtgcaggccgacgggcagatcaaatccggcaaacgcggccagcatggcatcaaggaccgtcagcaggtcatcggattcgtcaacgaaagctatttggcgcaactgcgcacgcgcatccaggacgcgcaacgccaatgcgacgagaccgcgcaatcgtacgcgagcgcgaaggaacaggccgacctcctgcagcgagagcgcgaactcgccgaccagctcgcatacaccgcatgggagaagatcgacgagaacagcgcgaaggcggcgatcgccgacatcgaacgcaccatcgcctcggtcaggaacaatcccaagctcgccgaactcgacacgttgcaggagtcgctgtccaaggagctcgaccgctcgcagcgccagcgcatcgacatcgaacggcaggccgagctcgccgatcaggcggtgaacgcggcgcaggcatggctcgacgagcatgccgcgcagccgcagccgcaaccgcagacgcggccgctcgacggggaagcggcggacgtttcgccaaaagccgtcacgaacggacggactctcctgacggacgaggtggaggaggcgctcgccgaatcatatgagcagcgtctctccggtctgggggatgcgacgacccgcgcccacatgatcatcggcgcgggggcgccgcagcgtatggctcagggggataccttcgccgaccgtgtcatcgccggcatcggcaaggacctggaggcgcgcgtctccatgctcgaaggtcgtgcggcgtcggcccgcaccgccgtcgaggcgcggatgggtgcctatatcgagatgtatgcgggcggtgacgatacgatcgccgccagcgtggacgactaccggtattaccaggacgagttggaaagcctttcgaagctcgccaccgtcgaagccaccgccgtcgaataccacaactgcctcgacaagctgctgatgagcttcctgaccatcaaacgcgcgatagacaccgacgccggagacatccacgaccagctggaacgcatcaacgcgatgctggacggccagcagttcggcccgcgccacggcagcctgtccctgcacgcggacgtgcggcgccccgagcgcgcgttctggtcggccctgacccgcgtgatcggcaccctcaacgaccgcaaggcggcacagacggacgacgatcttgacggggcccggtgcgcgttcgcgtcctgcgccgcgatgatcgacatgctgcgccgcgagatcgggcagatcagggacgtcaacggcgtgaaaagctacggcgcccgcaacctcgacccgcggtgccgatcctcgttctacgcgctcgtgcgtcactcggacgggcaggtcgaacgcatcacctcgaccggcggacggtccggcggcgccctgcaggagctgacctcgttcgtgtacggcgcggcgctgatctacctgctcggcggcggcatggacaacaagctcaagccttcctacacgacgctcttccttgacgaggcgctcatcaaggccgacggccggtatacgcggcgcgcgctgtccgtactgccgagactgggtttccaggtcatcgtctccgcccctgaaagcaagacgggcgagatactggaggtctccaccaaggcatacgtgacccgcaaggaccccgacaccggctacaccacgctgcacgaagccagactggacggcatcgatgagacggaaggcgcagatgagccggaaggtaccgtcgagtcggatgacgccgccgaatag

SEQ ID NO: 43002 - DNA, 1437 bp, Mycobacterium chubuense NBB4
gtggacgaccacggggggctgtcggccgctgacctgctcgacctcaatcgcgacctgcagagttcgccgacggtccgcctgctggcggcgaccaacctgggcctgtactcgacgctgatggaccgccacctgtccggcggcgtcatggccgagaccgaactggtggtccgcctcgagcgcgacctgcacgacctcgacgacgaccagtccgggctcgcgctgatcaagacgtgggccagccaggggtggctgcaccgcgtcgtagaaaccagagccgagcgcctcgaccagaacgtctgctacctcacccaggacgcccgccgggcactggacttcctgcgcgggatgcgccgccaggacaccatcgccaccggcgggtccatcaacggcatcgccgggcgcctcaagcaggtcgccatccgcgtcggcaacgacccggcccgcatccgcaagagcatcgaagccgaaatcgcctcgctgcaccaggaactcgacgaactggacgccggtgatcgcccggcgcccgacgtcaccgacgcctacgacgaggcccgtgccatcgcgctgcagatggaacggctgatcaccgacatcggccagtacggcacgatgatcgagcaggccaccgccgccctcgacgagcccatcgacagcaatgtcacctaccgcgaccggcagcgccggatgtacgccgactaccaggccgcctgggactcccagggccgcgacagccaccgcgcgttcctgcggatgatcaacgaccccgaccagcgcgccgagttcgaggccgacgtcgccgccgtcgccgacgcgctgccccacctcgacccggcgctgcgcacggtgatggccggcttcttcgaactggtcggccaccagatcgacgaggtcgagcgcatccagcagcgctgcgcgcagcgggtcaagcggttcaccgcgttcggcacattggagcagagccggggggtggcccgtcagctcaacgaggcgatcggcgcggcccgcaccctgctgaagacgtcgttgatcgactcgcgcatcgacctcgagctgccgctggcccggcacgcgatcagctcggtcggcgccctgagcttcaagatcggcgacctgtccaacccgaagccggccgccgcggccgagggcgacgtcgacctgtccagtttcgccgcactgaccacgcaggtcgacgcgcccgcgatggcggagatgatcaacagcgcactgccggtgtcattgccccaggcggtcgccaaactcgacaacgcctacctcggccacgtcatcgtgctgtggtcgtgggcgctcaagcaacccaacgacgcggccgcgaagtccacgacggtccggttccgttcgctcgacggccgagaccgcgaaatcgccgtccccgacttggcattcaccgaaccgatcaccgctggagtagctcagtga

SEQ ID NO: 43003 - DNA, 690 bp, Mycobacterium chubuense NBB4
gtgacgaccgagcccgatatcgacttctcgtccctgccgcaggtcgaccagaacgcccggcctccgcaccagcgccggccgcgcttcgacggcgacgtctcccagttgcccgaccgcgcgtgctgggcgttgcagcacctgctcacgcgccgctacatcagcgccgagaccgacagcgacgtctatgcgtgggtactcgagtaccgcagccagctgtcgacccggctgtccgaactggatctgctgctgcgcgtcgtggacggcaccgacgtcgcgttcgtcgagcaggcccgctacgaatccgccaagggcatcaagcttctccgccgcgaaccgctgggcacctacgactccatcctggcgctgcacctggcgcagatgatgcgcgcgtcgggcgggcagagcgtgctgatcagccgcgaggagatgcacggcctgttctccggcgtgctcaacgacgtcgaccgcgacgccgtgacgttcgccgcgcgcatcgacggcgcgatcgcccggctgaccgggctggagatcctgcgccgcagccgcgacgacgaggacagttacaccatcagcccggtgatcaccgcggtcatgacggccagcgtgatcaccgagttgcagcagcagttcgagctgctcgtgaacggcggcggtgcggcagtggcccaggaagaagaggtcgatgactga

SEQ ID NO: 43004 - DNA, 3420 bp, Mycobacterium chubuense NBB4
atgactgagcagttccacctgtcgcggctgcaggtcatcaactggggtgtgttcgacggctaccactcgatcccgttcagcgagggcggcgccttgatcgccggcgcctcgggcagcggtaaatcctcactgctggatgccatttcgctgggtttcctgccgttcaaccgccgcaacttcaacgcctccggcgacaacaccgcggccggctccagcgcaggacggcgcaccgtcgacaagtacgtgcgcggcgcgtgggggcaacgcagcgacggcggcaccagccgggtgatgtacctgcgcggcgacggcaccgcatggtcggcggtggcggtgacgtacgccggcgactccggccgcaccgtgacgggcctggtgctcaagtggctgaccggggagtcgcgcaacgactcgtcgagccggttcgtgctcggcgacggcgacctcgacatcgaggacgtctgcaaccgttgggctgcaggccgtttcgacaccggggtgttcaaggaggaccggggcgagcggagcgacgggaaaagccaaggctggcggttcaccaccaaggtggagtcgcagtatctggcgcagctctacgcgaccatcggcatccgcgcatcggatgcggcccagcagctgctcggcaaggccaagtcgctgaaaagcgttggcggactggagcagttcgtccgcgagttcatgctcgacgagccggacagcctcgcccggctgcccgaggcgctcaagcagatcgacccgctggtggaagcccgcgagctgctcgccgtcgcgcagaggaaacgcaagatcctcggcgacatcgagaagatccagcagcgctacgcgtcggagtcgacggacctcggcatcatcgacctggtcgacctgccgatggtgcgcgcctacaccgaccacgtccgcctggcgcagtgccccacccagatcgagcagctcgacaccaccatcgaccagctcgacaacgaatacgaagacgtcacccgatcgctgaatctggccaaggccgaagctgattcgctgaacgcacagatcagcggcaacagcgcgagcatcgggccgctgcagtcgcaggtgaccgccgccgagaccgaggccgagcaggtgtcgcgccgccgcggcgcctacgaggacatgctcgccgcgcaggatctcgacgtccccgacaccgccgacgagttctggaacctgcgcgaggagctgctcacccaggccaccgagctgctcgccaaggtcgagcgccaccgcgaggcgtccaccgacgcggagtacgcccagaaggcggcccgcatcgcccgcgacgaggccgccaaggaactcaagcgcgtcgagcacgtcggctcggcgttgccggagttcgcgttgacgatgcgcgaccagatctgcgccgcggccgggctcgacgccacggaactgccctacatcgccgagctgatggacctgcgtccggaccagacccggtggcgcaccgcggtggagaaggtgctgcgcggagtggggctgcggctcatggtgcccgaccagcactggactaaggtgctgcagttcgtcaacgagaccaacatgcgcggccggctgcaactgcaccacgtgcgggcgaagttcctcggtgccacgccggtcgatccggagccgaacacgttggcggccaagctcttccccgtcgaccccacacatccgtgtgccgccgaggccgtcgacgtcatcaccaccgcgggcgaccatgtctgcgtcgacacccccgacgtgttcgcgcggttccgccgcgcggtcaccgacaccgggctgtacaaggactccgaccggctggcgatcaaggacgaccgacgcccgctcaagcagtcggagtacctgtaccagggcgacgtgtcggcgaagatcaacgctctgacggtcgatctggccgcggccgaggaggcctaccagacggcgcggcgcaccgccgacgacatcgccgcgcagcgccagcggtggcgggaccgggccgcggcgtgcaaggcgatctgcgaacagttcccgcagtggagccacatcgacaccgagaccgccgacggccacgccgaccggctgcgtgagcagtacgagctgctgctggccgacaaccccgacatcgaggcgctgaacgcccgcgccgacgaatgctggtcgcagatccagaaattgatgacgcgccggggtgcgatccagacgcgccgcgacgacctcgactcccggcgcacccggctgctggagctctcggagcggctgcagcccgtgttcgtctcggagccgctgacggagctgctgcaccggtatgcgggacaggtgccggtgggcctggagctgctacagcccgaaccgcaccgcgacgcgctgttcgccgcgatcaagaaggagcgagaacagctgcgcgagagccgtcgccgctcctacgacgaactggcccgaatcctgaacacgttcgacacggcgttcccggacgcggtgccgaacaactccgagaacttcgatgagcgcgtgcacgattacgtcgcgctgtgccggcacatcgacgagcgtgagctgcccgaggcctacgagcggatgatgcggctggtgaccgagcaggcgccggacgcgatcctcacgctgcaccgggtcgccgagcaggaggcccgtcggatcgccgagcagatcgagcgagtcaacacgggtctgggtgccgtggagttcaaccgcggcacccggctgaccttgcgcgcgacgccgcgcagcctgacggcggtgtcggagctgacggagatcgtgcgggcgatctcgcggcgcatcgccgaggtcgggctgggcgacaagcaggcgatcctcgaccagtacgccgacatcctgcggctgcgcaaccggctggcgtcgacggcgccggagggcaaggcgtggacgcgggatgcgctggacgtgcgtaaccggttcacgttcgactgcgccgagtgggatgtggcgtcagaggagctgatccgcacgcacagcaacgccggcgacaactccggcggcgagcaggagaagctgatggcgttctgcctggcgggcgccctcagtttcaacctggccagccccgcgcacgattcattttcggctaccgccgagatgccggacaacagaccggttttcgcgcagctgatgctggatgaggcgttcagcaagtcggacccgcagttcgcgcagcaggcgctccaggcgttccgcaagttcggcttccagctggtgatcgtcgcgacggtgcagaacgcgaccaccatccagccctacatcgacagcgtggtgatggtgagcaaaaccgaggccacgggccgcaacgcgcggccggtggcgacggtcgcgacgcggaccatctcggagttcaccgccctgcggcaggaaatgcggtccagcgcgaaggtgccggcgccggtctga

SEQ ID NO: 43005 - DNA, 1344 bp, Burkholderia thailandensis MSMB43
gtggttccgaacgtgcgcgtgatgtccgccgctgacctcgccgaagtgctcgaagacgaactttacgcattgcgtgatcgactgggcacggacgcctatccaaaacgcgcgctcgactacctcaacgactgggcaagcccggaaaaaggctggctgcgcaagttttaccgccaaggctcggacgaaccccacttcgaccttacgccagcgacggaaaaagcgatcgtatggctggacgcgctaacggaacgcagcttcgtcggcacggaatcgcgcctgttgacgttgttcgagttgctgcggcagatgagcgaaggcagcgaatccgatccgcaaaagcgcatggtcgaattatataggcgtcgagacgagatcgatgccgagatcgcgcgagtgaattccggggaccttccactattggacgacacggccctcaaagatcgcttccagcaattcatgcagttggcgcgcgacctgctgaccgattttcgcgaggtggagcagaacttccgcatgctcgaccgtcgcgtgcgcgagcgcattgcgctatgggagggttcgaagggcgcgctactggaggagatcatgggcgagcgcgacgcgatcggtgactcggaccagggcaaaagtttccgcgcattctgggatttcctgatgtccagcactcgccaggaagagcttaccgaacgactcacgcgagtgctcgcattgcccgtggtagccaacctgaagcccgacgcccggaccgctcgtgtgcattacgactggctggaagcgggcgaacacacgcagcgcacggtcgcgcagttgtcgcagcaactgcgccggttcctcgatgaccaggcatggctggagaaccgccgcatcatggacattctgcgcggcatcgaggccagggcgctggcggtacgcgacacgccaccggtcggcgagataatgaatcttgccgagtcgtcatccgacgtcgagcttccgatggaacgtccgctgcatacgcccgtgcagaagccggttatcacggatgtcgcgctggaaatgggcgacgtcgatctggacgatacggcgctgtattcgcaagtggtggttgaccgtgcgcagctcgcgggtcatatccgccaggccttgcaggatcggtcgcaagtgacgctgcgcgagctgatcgaatcgtacccgctgcagcaggggcttgcagaactggtcgcgtatctgcaactgggcagcgccgcgttcaagacggtcgtggacgaagacacgcacgaagtcatcgcgtggcaaacaaccggtcgcgacgagacgccgaaggcacgacgcgcccggctgccacgcgtgatcttcgtgaggtga

SEQ ID NO: 43006 - DNA, 645 bp, Burkholderia thailandensis MSMB43
atggaagacgaacgacaagaggtggcggggaacgccgatctgtcgacactggcgatcacgctgctcaaaggcgtgatctatcgtgagggtgatgaacgtctgtggggcgcgttgctcgacctgcaggcgcgtgtgcgggactacgtgtcggtactgggcctggaactggtgctggacgaggccgaaggctacgcgtttctgcgcagtcgtcccgagccggctgaagacggcgcggcgccaaagctgccgcgtttgattgcacgccggccggtctcgtttccggtcagcctgctgctggcattgctgcgcaagaagcttgccgaattcgatgccggcggcggcgatacgcgcctggtgctgtcgcgcgacgacatcgtcgagctcgtcagggtcttccttccggacagcagcaatgaagcgaagctgatcgatcagatcgaaacacacatcaacaagatcgttgagctgggcttcctgcgccggttgaaggttgcgagcggctcggccgccagtttcgaagtgcggcgcatcctgaaggcgttcgtcgacgcgcaatggctgtcggacttcgacacccgcctcgccgcgtaccaggcgcaactgacgggcacgacggcagggccgggaggtgatgtcgatgaatga

SEQ ID NO: 43007 - DNA, 3384 bp, Burkholderia thailandensis MSMB43
atgtcgatgaatgagccgaacgaggcgattccacaactgctggagctggattttctcgccgacgacacgctctcaggctttcgcctgacccgcctggaagttttcaactggggcacattcgacgggcgcgtatggacgctgcagttggacggcaagaacggtctgctgacgggcgacatcggttcgggcaagtcgacgctggtcgacgcgattacgacgctaatggttccctcccagcgtatcgcctacaacaaggcggcaggcgcggacagcaaggaacggacgctgcgctcgtacgtactcgggcattacaagtccgagcgcaacgaggtgaccggtgcagccaggccggtttccctgcgggaccgcaacagctactcggtgatcctcggcgtgttccacaacgctgggtatgaccagacgatctcgctggcgcaggtcttctggatgaaagaggcgcagagccaacccgagcgtttttatgtgggtaccgagcggaatttgtcgatagcgacggactttgtccacttcggctccgatatcgcgcaattgcgcaaaaagctgcgcggcctgggtgcgcaaatcgaagacacctttcccaaatatggcgcgtggtttcgccggcgcttcggcatcgacaatgagcaggcgctcgagctgttccatcagacggtgtcgatgaagtcggtcggtaacctgaccgacttcgtgcgtagccacatgctcgagccgttcgacgtcgcgcctcgtattgccgcgctgatctcgcacttcgacgatctgaatcgcgcgcacgaagcagtgctcaaggcgaagcgccaggtggagctgctcaagcccctggtggtggactgcgaccagcacggcgcgctggcggtggaactggaggcttcgcgcgtatgccgtgatgcgctgaagccatacttcgccgaattgaagctgggcctgctggatcgacggttgcagttgcttgcggaagatcatgcacgcctttctacgcagagggagcggcgcatcgagcagtgcgaccaggatcgaacgcaggccgatcgcctgaagcgtgcgattgccgagcagggcggtgaccggctggagcagcttgctgtcgcgattcgcgacgaggagcgcgagcgcaatcgacgccagcagcgcgccgaacgtcacgcgcaattgcttgctgcgatcggtgaggccgctgttgccaacgagcctgatttcatcgcgcagcggcagcaggtgaccgatctgcgcgagagcgtgagtcagcgggaagccgatctgcagaaccagatcaccgagtggggcgtgtcgctgcgcgagggcaagcgcgaacatgacgtgcttggcgacgaagtcgcgagcctgaaggcgcggcgcagcaatattcccaaggagcaggtcgccatgcgtgcggcgttgtgcgcggcactcggtttcgacgaagacagcatgccgttcgccggcgaactgatccaggtgcgtgaagaggcgcgcgaatgggaaggcgtgatcgagcgggtgctgcataactttggcctctcgcttctcgtgcccgatgcgcactattccgatgtcgccgcctgggtggatcgcacgcatctcgcgggacggctcgtctatttccgcgtgcgagccgcgcgcgaccaggacatcgccgagctgcatcgcgattcgctggtgcgtaacgtcgcgatcaaaccggattcgccgttttacggctggcttgagcgggcgctggcacagcgcttcgattacgcgtgctgcgcgacgcaggagcagtttcgtcgcgagtctcgtgcgctgactcgcacaggtcaggtcaaggcgcccggcgaacgccacgagaaagacgaccgccatcgtctcgaagaccgcagccgttacgtcctcggctggagtaacgacgccaagatcgccgcgctggaagggcaactgcgtgcgctcgagatgcgccttggcggcatcgctagccagatcgccgaagcgcagggcgatcagacgacgctgcggcggcaactggaggtgttggcggcgctcaatgagttcaacgatttccgtgaactggattggcagagctgctcggccacgatcgctcgcctgcgggatgagaaagcgcgtctggaggcggcctgcaatgcgttgctggaactggccgcgcagctcgagtcggtgcaggcggcgctgaaggagagcgagagggcattgtcggatgtcaaccgggagttaggcgggatcgacgcgagacgcgaagcggccgaagcattgcgggagcaaaccgcggcatggctggccgggatcgcccccgatacccgcgagcggctagacgtgctgcgcgcgcagattctgggcgagcatcagctttcggtcgagtcatgcgacaaccgtgaacgcgagctgcgtgacgcgttgcaggcacatatggacgccgaggccaagcgcctggatcgcctcaccgagcgcatcatcaagagcatgtcgacgttcaaggaaacatacaagctcgatacggccgacttcgacgccagcctcgaagccacgttcgagtatcgcgagctgctggctcgcctgaataccgacgatcttccgcgcttcgaggctcgcttcaaggagctattgaacatcaacacgatcaacgagattgccaacttcaacgggcaactcgcgcgggaacgcgaaacgatcaaggagcgcatcgcccgcatcaatgaatcgctggctcaaatcgactacgacccaggtcgttatatcgtgctggagtctcaggcgagccccgacgcagacatccgcgatttccaggcggagctgcgagcttgcacggaagggacgctgaccggttcggacgacacgcagtattccgaagccaaatttctgcaggtcaaggcgattatcgaccggtttcgcggccgcgaaggcctgtcggatcaggaccgccgatggacggcgaaggtcaccgacgtgcgcaactggttcctgtttgccgctagcgagcgctggcgcgaagatgatacggagtacgagcactattcggattcgggcggtaagtcgggcgggcagaaggaaaagctggcctacacgattctcgcggccagcctcgcgtatcaatttggtctggaatggggcgcggtacggtcacgctcgttccgcttcgtggtcatcgacgaagcgttcggacgcggctcggacgaatccgcgcaatacggactcaagttgttcaggcagctcaatctgcaactgctgatcgttacgccgctgcagaagatccatatcatcgagccgtttgtttccagcgtcggtttcgtgcacaacgatgaggggcgtgcttcgaagctgcgcaatctgacgatcgaggagcatctcgcgcgcaaggcggagggctcgacgtga

SEQ ID NO: 43008 - DNA, 1182 bp, Burkholderia thailandensis MSMB43
ttgcgcagcatggttagcgacgacgccgacgcggtgccgaataccgtgcttgccgctcgcggcgaactgaaggctggcctgcgctccggctgcgcgtttccgctgcgactcgtcctgaagggaccggcttcggccgaactcaccgaacgtttccaggctgtgcgtgaatggattgctgagcttgtcactgtcgcgcagatccggatcgaatggcgcgagttcaatcatcgcgtccttggtgttcagcgagtgccgcaggcagtctggattgatgatcttgacagtgcgctggcgatgatcggcaagcgtggcgatgcggcacacttcggccgcttgctcaccctcgtgggctcgcggcagccggcgctgctggtatggtttcgccggcgtccgctgcaggcgcttgagctggctgacgaatgtgaacgtttactggcagtggtcggttggatcgtacggcatccacgtcccggcatttacctgagacaagtggacattgccgatgtacacagcaagttcatcgaaaagtggcgcggtgtgttgtcggaatggctcgatctcgtacttcccttggaggccgtcgcggtagaaagaaacggcggtgcgcatttcgcggcccgctacggcttcctcgaaaagcctgaccgtatccggtttcgcgtgctcgacgcgcaattgcccatgttgcccggtcctgcgcttcccgatatcacagtcgatgcagacagctttgccgcgctggccgtgccgatccgccgggttttcatcactgagaacgagacgaacttcctcgcgttcccgcctctagccgatgcgatcgttgtcttcggtgcaggctatggatgggacgcgctgtcgaaagcggcatggctttcccgctgcagcatccactactggggagatatcgacacgcatggcttcgccatcctcgaccagttgcgcagccgctttgaccacgtcaagtctttcctgatggaccgggcgacgctgatcgcccacgaagctcaatggggcaaggaacatgatcaggtgctccgcgacttgccgcggctcgacgatggggagcaagcgctgttcaacgacctgcgcgataaccggattcgtaaaaatttgcggctcgagcaagagcgtatcggctttcagtgggttgaaaccgcgctcgccacgactgcaagacagtga

SEQ ID NO: 43009 - DNA, 1626 bp, Bifidobacterium longum; identical to SEQ ID NO: 41874
  subsp. infantis ATCC 15697 = JCM 1222 = DSM 20088

SEQ ID NO: 43010 - DNA, 663 bp, Bifidobacterium longum; identical to SEQ ID NO: 41875
  subsp. infantis ATCC 15697 = JCM 1222 = DSM 20088

SEQ ID NO: 43011 - DNA, 3555 bp, Bifidobacterium longum; identical to SEQ ID NO: 41876
  subsp. infantis ATCC 15697 = JCM 1222 = DSM 20088

SEQ ID NO: 43012 - DNA, 1461 bp, Mycobacterium abscessus 3A-0930-R; identical to SEQ ID NO: 41997

SEQ ID NO: 43013 - DNA, 750 bp, Mycobacterium abscessus 3A-0930-R; identical to SEQ ID NO: 41998

SEQ ID NO: 43014 - DNA, 3348 bp, Mycobacterium abscessus 3A-0930-R; identical to SEQ ID NO: 41999

SEQ ID NO: 43015 - DNA, 1461 bp, Mycobacterium abscessus 3A-0122-S; identical to SEQ ID NO: 41997

SEQ ID NO: 43016 - DNA, 750 bp, Mycobacterium abscessus 3A-0122-S; identical to SEQ ID NO: 41998

SEQ ID NO: 43017 - DNA, 3312 bp, Mycobacterium abscessus 3A-0122-S
ttgtcccggctgcaggtcatcaactggggcgtcttcgacggctatcacagcatcgagttcagccgtcgcggtacgctgatcaccggctcctccggtagcggtaaatcatctctactggatgcgatctcgctggcattcttgtcttcgaaccgccgtaacttcaacgcttcgagcgacaccaccgccgcaggttccagcatgggcaagcgtaccgtcgacaagtatgtgcggggcttgtggggagagctgaaaaacccgggggagcgccccaagcagatgttcctgcgcggcaagggtggggcctggtcggctatcgccgtcacctactccggcaccgacggtcgggtgatcaccggcctggtactcaagtggcttgccccgggctcggactcggactcgtccagccgctactacctgatcgacgcggacgccgacatccgcgatctctgcaatgcatgggccagcaagggatacgccggctcggtattcgagggcgcgggttggcgcggccacaagagcgaacgctggtacctggaacagctatacgccgccgtcggtattcagggttcctctgccgcgcagcagctgctgggcaaggccaagtcgctcaagagtgtcggcggcctggagcagttcgtacgcgagtacatgctcgatgaaccggagtcgatggcagcgatatccgaagcgctagggcagatcacaccattggtcgacgcccgtgccgccttggcgatcgcgcagcgccagcggcagacgctgggcgatatcgaacagatccaacagacgtacgccagcgatgcggcgcagttggccaccgtggacgtcgtggaccatcacaccgtgcgcgactacgtggatcagcagcgcctggcgctggcgggcccggagatcgatctgctggataccgagatcacccggctgggcggtgagtgtgacgaaatccagtcgcgccaggacattctcacgggagagcgggacaaattgctcggccggatcgccgctgccgacagcaatctggcaccactcaaaagcgagctggctcatgctcgtgcccgcgcagaagaggtgtcgcgccggcgtacggcctacgacagtgcattgtgggacctgggtcatgaagacgatatcgaatctgccgaggaattcgaggccatgcgggtggagagcctgcgggcagtcacccggatcaacgctgagctcgaagccggccacgatgcatatgtcatggccgcgggtgcgctctcgacggcacgtgaccagctgcgtgccgcatccgccgaattcaagcgggtcgagcacctgggtaccccggtgccaccggatgaggaccgcatgcgcggggagatcgcggcggcgcttgggcttaccgccaaggacctgccctacgtgtgcgaactgatggatttgcgcccagggcaggaacggtggcgcaaatctgtggagaaggtgttgcgctccaccgggctctgcctgctggtgcccgatcagcaccaccgtcaggtgctgcgttacgtcaacgagaacccgatgcgtggctacctgcagatggagcgggtgattccctccggtaccccgcggcgcgccgagccgggcacgctcgccgactgtttgcgcctgaccaaccccaaccacgaatgcgccagtgccgccatgaatctggtggccggtgtcggcgactacgtgttggtcgacagccccgacgaattcagcaagcaccgccgggcggtcacagatcagggactccgcaaggacggtgaccggcgcgcggtcaaggacgatcggcgtgaattgcgggcctcccagtacatctatcagggcaacgccggtgacaagcgcgccgcgctttccgacgatgtggtcgaagcgcagcaggcggtgagtgatgccgaaaagttcatcggcgaaatggacaccaagcgcgaagagctgcgttcggaggtggtgcggtggtccaagctgcacagccagtacgagtattggagccagattgatacggactcggccgaagctgccgtggcgcgtctgcaggaccagtacgacgcgatgctggaagccaaccccgacctgaccggattgcagcagcaggccgactcctacctcgacgagatcaagaggctctccgaacgcatcggagcattgcgcaagcaagaatccgagcatgattcgcgccggacccggctgctggatctgctggacaacctgagcccgcgtgaggtgggcgggcacacccgatcgggaatcgaggcctacgtgccccaactctcgtccagcctggatgtgttggaacccgatgcctaccgactggagctgtggcggcagatcgagaaggatcagtcggtgctgcgtgagagcgtcacccgctcacgtaacgagctgaaccggattctcaacgcgtacgaccgggacttccccgactctatccccaacgacagtgagaacttcgacgagaagatccacgactatgtcgcgctctgccgccggatcgatgaacgcgacctgcccgctgcctacgaacggatgctgcggctgatcaccgagcaggcgcccactgccgtgttgcggctgcaccagctcgccgaggaggaggcacaccgcatcaccgaccagatcgaccgtgtcaatagcggtttgggttcggtcgagttcaaccggggtacccggctgaccctacgtgccgagccgaaggcgctcgaagcggtcggcgagctcaacgagcgtgcccggcggatatccgggcgtgccgtcgccgtttcgatgggggacgagaaggccatccacgatcagtaccaggacatcctgcaactgcgtaacctgttggccgctgagacacctgaggcgcgccagtggacgcgcgacgcgttggatgtgcgtaaccgcttcgtgttgtactgcgaggagcgcgatgccaggaccggcgaaccgatccgtacctacagcaacgcgggtgcgaattccggtggagaacaagagaagttgatggcgttctgcctcgccggcgcgctgagcttcaacctggctaacccggagacgggggacaaccggccggtcttcgcgcagcttatgctcgacgaggcgttctcgaaatcggatccgcagttcgcccagcaggcgctgtccgcgttccgtaagttcggattccagctggtgatcgtggccaccgtgcagaacaccaccaccatccagccctatatcgacagcgtggtgatggtgtccaagccggacggcccgggggtgcgtccggttgcttcgacgcgcactgtgccgatcggtgagctcggtgacgtacgcaaggccgtgagcgcccgctag

SEQ ID NO: 43018 - DNA, 1461 bp, Mycobacterium abscessus 6G-0728-R; identical to SEQ ID NO: 41997

SEQ ID NO: 43019 - DNA, 750 bp, Mycobacterium abscessus 6G-0728-R; identical to SEQ ID NO: 41998

SEQ ID NO: 43020 - DNA, 3348 bp, Mycobacterium abscessus 6G-0728-R; identical to SEQ ID NO: 41999

SEQ ID NO: 43021 - DNA, 1461 bp, Mycobacterium abscessus 4S-0116-S
atgaatgatctgacagtcgaagagctgttcgcgcacaacgatgacgtgcagaaatcccgtgcggtccgcctgttggccgccaagaatctggccccctacatcacgctcatggaacgccacctggaccgcagcgccaaagtctccgaacctcagctggtggccaagctggaccgggacctgagcgccgtcgggctgggagaacagtccgggctggccctcatcaagagctgggcgagcgacgggtggctgcaccgagcgtcggacggcaccggccctgatgccgagaacgtctgctcgctgaccgaggacgcgcgcagcgcgctggcctttgtgcgccgcctgcgccgtgctgacacggtggccacgggcgggtccattgccggtatcgcggcaggtctcaaacgggtggccacccagctggacggcgacccgtcacgcctgcgcgccgacatcgaagcccagatcgcagaactgcagacccagctgcatgccatcgacgacggataccgtccggaaccggatatcgtcgatcttgaggacgagacccgggccatcgcataccagatggaacaagtgatcaccgacatcgtccgctacggcagcatgcagaacgagatcaccgccggactcatcgacgccgccgaggactccgactccggcttccgcgaccgcgcccgcagaatgttcgcggactatgacgccctcttcgattcccgcgagcgtgcctcttattcggccttcacgcggaccatccaagatccggatcagcgagccgcgctacggagtgatattgcctgtgtcgcagagggtttgcctgatctcgaccccgggctgcgtgaggtcatgaggaacttcttcaagctcgtgtctcagcagatcgcggaggtctcccgcatcgaacagcgctgcgcacagcgcatccggcggttcttcgccgccggcaccacggagcaggctcgtggccgtgcgcgacagctcaatgacgcgctggcggccgggcacgctctactcaagatgtcgacggcggactctccgatcgacgccgagctaccgatcgggcgttccgccgcagcggcgatcggcgcgctgtctttcaccatcaaggacaccgcgccgccggtgctcgcacaggacgccccgtcggggccgctggatttgagcgggttctcggcgctggccacccaggtggatatggccgcattggccgatacggtcaacagtgctattgccagtggcccagtttccttgcccgacatgatctctcatgtcgaggccccctacctaggtgatgtgatcgtgttgtggtcgctggccctcaagcaggacaacactgccgaccgcgaatcggtaaaggtgaagttccggtccctcgacggacaggaccgggtgatggaggtacctcagttgatgttccgtgaaccggtgctggccaccctcgaagaggagggatcgacactgtga

SEQ ID NO: 43022 - DNA, 750 bp, Mycobacterium abscessus 4S-0116-S; identical to SEQ ID NO: 41998

SEQ ID NO: 43023 - DNA, 3348 bp, Mycobacterium abscessus 4S-0116-S
atgacgacgagtgatgcagcgacacaacagttctggttgtcccggctgcaggtcatcaactggggcgtcttcgacggctatcacagcatcgagttcagccgtcgcggtacgctgatcaccggctcctccggtagcggtaaatcatctctactggatgcgatctcgctggcattcttgtcttcgaaccgccgtaacttcaacgcttcgagcgacaccaccgccgcaggttccagcatgggcaagcgtaccgtcgacaagtatgtgcggggcttgtggggagagctgaaaaacccgggggagcgccccaagcagatgttcctgcgcggcaagggtggggcctggtcggctatcgccgtcacctactccggcaccgacggtcgggtgatcaccggcctggtactcaagtggcttgccccgggctcggactcggactcgtccagccgctactacctgatcgacgcggacgccgacatccgcgatctctgcaatgcatgggccagcaagggatacgccggctcggtattcgagggcgcgggttggcgcggccacaagagcgaacgctggtacctggaacagctatacgccgccgtcggtattcagggttcctctgccgcgcagcagctgctgggcaaggccaagtcgctcaagagtgtcggcggcctggagcagttcgtacgcgagtacatgctcgatgaaccggagtcgatggcagcgatatccgaagcgctagggcagatcacaccattggtcgacgcccgtgccgccttggcgatcgcgcagcgccagcggcagacgctgggcgatatcgaacagatccaacagacgtacgccagcgatgcggcgcagttggccaccgtggacgtcgtggaccatcacaccgtgcgcgactacgtggatcagcagcgcctggcgctggcgggcccggagatcgatctgctggataccgagatcacccggctgggcggtgagtgtgacgaaatccagtcgcgccaggacattctcacgggagagcgggacaaattgctcggccggatcgccgctgccgacagcaatctggcaccactcaaaagcgagctggctcatgctcgtgcccgcgcagaagaggtgtcgcgccggcgtacggcctacgacagtgcattgtgggacctgggtcatgaagacgatatcgaatctgccgaggaattcgaggccatgcgggtggagagcctgcgggcagtcacccggatcaacgctgagctcgaagccggccacgatgcatatgtcatggccgcgggtgcgctctcgacggcacgtgaccagctgcgtgccgcatccgccgaattcaagcgggtcgagcacctgggtaccccggtgccaccggatgaggaccgcatgcgcggggagatcgcggcggcgcttgggcttaccgccaaggacctgccctacgtgtgcgaactgatggatttgcgcccagggcaggaacggtggcgcaaatctgtggagaaggtgttgcgctccaccgggctctgcctgctggtgcccgatcagcaccaccgtcaggtgctgcgttacgtcaacgagaacccgatgcgtggctacctgcagatggagcgggtgattccctccggtaccccgcggcgcgccgagccgggcacgctcgccgactgtttgcgcctgaccaaccccaaccacgaatgcgccagtgccgccatgaatctggtggccggtgtcggcgactacgtgttggtcgacagccccgacgaattcagcaagcaccgccgggcggtcacagatcagggactccgcaaggacggtgaccggcgcgcggtcaaggacgatcggcgtgaattgcgggcctcccagtacatctatcagggcaacgccggtgacaagcgcgccgcgctttccgacgatgtggtcgaagcgcagcaggcggtgagtgatgccgaaaagttcatcggcgaaatggacaccaagcgcgaagagctgcgttcggaggtggtgcggtggtccaagctgcacagccagtacgagtattggagccagattgatacggactcggccgaagctgccgtggcgcgtctgcaggaccagtacgacgcgatgctggaagccaaccccgacctgaccggattgcagcagcaggccgactcctacctcgacgagatcaagaggctctccgaacgcatcggagcattgcgcaagcaagaatccgagcatgattcgcgccggacccggctgctggatctgctggacaacctgagcccgcgtgaggtgggcgggcacacccgatcgggaatcgaggcctacgtgccccaactctcgtccagcctggatgtgttggaacccgatgcctaccgactggagctgtggcggcagatcgagaaggatcagtcggtgctgcgtgagagcgtcacccgctcacgtaacgagctgaaccggattctcaacgcgtacgaccgggacttccccgactctatccccaacgacagtgagaacttcgacgagaagatccacgactatgtcgcgctctgccgccggatcgatgaacgcgacctgcccgctgcctacgaacggatgctgcggctgatcaccgagcaggcgcccactgccgtgttgcggctgcaccagctcgccgaggaggaggcacaccgcatcaccgaccagatcgaccgtgtcaatagcggtttgggttcggtcgagttcaaccggggtacccggctgaccctgcgtgccgagccgaaggcgctcgaagcggtcggcgagctcaacgagcgtgcccggcggatatccgggcgtgccgtcgccgtttcgatgggggacgagaaggccatccacgatcagtaccaggacatcctgcaactgcgtaacctgttggccgctgagacacctgaggcgcgccagtggacgcgcgacgcgttggatgtgcgtaaccgcttcgtgttgtactgcgaggagcgcgatgccaggaccggcgaaccgatccgtacctacagcaacgcgggtgcgaattccggtggagaacaagagaagttgatggcgttctgcctcgctggcgcgctgagcttcaacctggctaacccggagacgggggacaaccggccggtcttcgcgcagcttatgctcgacgaggcgttctcgaaatcggatccgcagttcgcccagcaggcgctgtccgcgttccgcaagttcggattccagctggtgatcgtggctaccgtgcagaacaccaccaccatccagccctatatcgacagcgtggtgatggtgtccaagccggacggcccgggggtgcgtccggttgcttcgacgcgcacggtgccgatcggtgagctcggcgacgtacgcaaggccgtgagcgcccgctag

SEQ ID NO: 43024 - DNA, 1461 bp, Mycobacterium abscessus 6G-0212; identical to SEQ ID NO: 41997

SEQ ID NO: 43025 - DNA, 750 bp, Mycobacterium abscessus 6G-0212; identical to SEQ ID NO: 41998

SEQ ID NO: 43026 - DNA, 3348 bp, Mycobacterium abscessus 6G-0212; identical to SEQ ID NO: 41999

SEQ ID NO: 43027 - DNA, 1461 bp, Mycobacterium abscessus subsp. bolletii CCUG 48898 = JCM 15300; identical to SEQ ID NO: 42792

SEQ ID NO: 43028 - DNA, 750 bp, Mycobacterium abscessus subsp. bolletii CCUG 48898 = JCM 15300; identical to SEQ ID NO: 42793

SEQ ID NO: 43029 - DNA, 3348 bp, Mycobacterium abscessus subsp. bolletii CCUG 48898 = JCM 15300
atgacgacgagtgatgcagcgacacaacagttctggttgtcccggctgcaggtcatcaactggggcgtcttcgacggctatcacagcatcgagttcagccgtcgcggtacgctgatcaccggctcctccggtagcggtaaatcatctctgctggacgcgatctcgctggcattcttgtcttcgaaccgccgtaacttcaacgcctcgagcgacaccaccgccgcgggttccagcatgggcaagcgcaccgtcgacaagtacgtgcggggcctgtggggagagctgaagaacccgggggagcgccccaagcagatgttcctgcgcggcaagggcggtgcttggtcggctatcgccgtcacctactccggcaccgacggtcgggtgatcaccggcctggtactcaagtggcttgccccgggctcggattcggactcgtccagccgctactacctgatcgatgcggacgccgacatccgtgatctctgcaatgcatgggccagcaagggatacgccggctcggtgttcgagggcgcgggttggcgcggccacaagagcgaacgctggtacctggaacagctatacgctgccgtcggtattcagggttcctctgccgcgcagcagctgctgggcaaggccaagtcgctcaagagtgtcggcggcctggagcagttcgtacgcgagtacatgctcgatgaaccggagtcgatggcagcgatatccgaagcgctagggcagatcacgccattggtcgacgcccgtgccgccttggcgatcgcgcagcgccagcggcagaccctgggcgatatcgaacagatccaacagacgtacgccagcgacgcggcgcagttggccaccgtggacgtcgtggaccatcacaccgtgcgcgactacgtggatcagcagcgcctggcgctggcgggcccggagatcgatctgctcgataccgagatcacccggctgggtggtgagtgtgacgaaatccagtcgcgccaggacattcttacgggagagcgggacaaattgctcggccggatcgctgccgccgacagcaatctggcgccactcaaaagcgagctggctcatgctcgtgcccgcgcagaagaggtgtcgcgccggcgtacggcctacgacagtgcgttgtgggacctgggtcacgaagacgatatcgaatccgccgaggaattcgaggccatgcgggtggagagcctgcgggcagtcacccggatcaacgctgagctcgaagccggccacgatgcatatgtcatggccgcgggtgcgctctcgacggcacgtgatcagctgcgtgccgcatccgccgaattcaagcgggtcgagcacctgggtaccccggtgccgccggatgaggaccgcatgcgcggggagatcgccgcggcgcttgggcttaccgccaaggacctgccctacgtgtgcgagctgatggatctgcgcccagggcaggaacggtggcgcaaatctgtggagaaggtgttgcgctccaccgggctctgcctgctggtgcccgatcagcaccaccgccaggtgctgcgttatgtcaacgagaacccgatgcgcggctacctgcagatggagcgggtgattccctccggtaccccgcggcgcgccgagccgggcacgctcgccgactgtttgcgcctgactaaccccaaccacgaatgtgccagtgccgccatgaatctggtggccggtgtcggcgactacgtgttggtcgacagccccgacgaattcagcaagcaccgccgggcggtcaccgatcagggactgcgcaaggacggtgaccggcgcgcggtcaaggacgatcggcgtgaattgcgggcttcccagtacatctatcagggcaacgctggcgacaagcgcgccgcgctttccgacgatgtggtcgaagcgcagcaggcggtcagtgatgccgaaaagttcatcggcgaaatggacaccaagcgcgaagagctgcgctcggaggtggtgcggtggtccaagctgcacagccaatacgagtattggagccagatcgataccgactcggccgaagccgccgtggcgcgtctacaggaccagtacgacgcgatgctggaagccaaccccgacctgaccggattgcagcagcaggccgactcctacctcgacgagatcaagaggctctccgaacgcatcggagcattgcgcaagcaagaatccgaacatgattcgcgccggacccggttgttggatctgctggacaacctgaacccgcgtgaggtgggcgggcacacccgatcgggtatcgaggcctacgtgccccaactctcgtccagcctggatgtgttggaacccgacgcctaccggctggagctgtggcggcagatcgagaaggatcagtcggtgctgcgtgagagcgtcacccgctcgcgcaacgagctgaaccggattctcaacgcgtacgaccgagacttccccgactctatccccaacgacagtgagaacttcgacgagaagatccacgactatgtcgcactctgccgccggatcgatgaacgcgacctgcccgccgcctacgaacggatgctgcggctgatcaccgagcaggcgcccactgccgtgttgcggctgcaccagctcgccgaggaggaggcacaccgcatcaccgaccagatcgaccgtgtcaatagcggtttgggttcggtcgagttcaaccggggtacccggctgaccctgcgtgccgagccgaaggcgctcgaagcggtgggcgagctcaacgagcgtgcccggcggatatccgggcgtgccgtcgccgtttcgatgggggacgagaaggccatccacgaccagtaccaggacatcctgcaactgcgtaacctgttggccgctgagacacctgaggcgcgccagtggacgcgcgacgcgttggatgtgcgtaaccgcttcgtgttgtactgcgaggagcgcgatgccaggaccggcgaaccgatccgtacctacagcaacgcgggtgcgaattccggtggagaacaagagaagttgatggcgttctgcctcgccggcgcgctgagcttcaacctggccaacccggagacgggggacaaccggccggtcttcgcgcagcttatgctcgacgaggcgttctcgaaatcggatccgcagttcgcccagcaggcgctgtccgcgttccgtaagttcggattccagctggtgatcgtggccaccgtgcagaacaccaccaccatccagccctatatcgacagcgtagtgatggtgtccaagccggacggcccgggggtgcgtccggttgcttcgacgcgcacggtgccgattggtgaactcggtgacgtacgcaaggccgtgagcgcccgctag

SEQ ID NO: 43030 - DNA, 1461 bp, Mycobacterium abscessus 4S-0116-R; identical to SEQ ID NO: 43021

SEQ ID NO: 43031 - DNA, 750 bp, Mycobacterium abscessus 4S-0116-R; identical to SEQ ID NO: 41998

SEQ ID NO: 43032 - DNA, 3348 bp, Mycobacterium abscessus 4S-0116-R; identical to SEQ ID NO: 43023

SEQ ID NO: 43033 - DNA, 1461 bp, Mycobacterium abscessus 3A-0731; identical to SEQ ID NO: 41997

SEQ ID NO: 43034 - DNA, 750 bp, Mycobacterium abscessus 3A-0731; identical to SEQ ID NO: 41998

SEQ ID NO: 43035 - DNA, 3348 bp, Mycobacterium abscessus 3A-0731; identical to SEQ ID NO: 41999

SEQ ID NO: 43036 - DNA, 1461 bp, Mycobacterium abscessus 3A-0930-S; identical to SEQ ID NO: 41997

SEQ ID NO: 43037 - DNA, 750 bp, Mycobacterium abscessus 3A-0930-S; identical to SEQ ID NO: 41998

SEQ ID NO: 43038 - DNA, 3348 bp, Mycobacterium abscessus 3A-0930-S; identical to SEQ ID NO: 41999

SEQ ID NO: 43039 - DNA, 1461 bp, Mycobacterium abscessus 4S-0206; identical to SEQ ID NO: 43021

SEQ ID NO: 43040 - DNA, 750 bp, Mycobacterium abscessus 4S-0206; identical to SEQ ID NO: 41998

SEQ ID NO: 43041 - DNA, 3348 bp, Mycobacterium abscessus 4S-0206; identical to SEQ ID NO: 43023

SEQ ID NO: 43042 - DNA, 1461 bp, Mycobacterium abscessus subsp. bolletii 2B-0307; identical to SEQ ID NO: 42721

SEQ ID NO: 43043 - DNA, 750 bp, Mycobacterium abscessus subsp. bolletii 2B-0307; identical to SEQ ID NO: 42722

SEQ ID NO: 43044 - DNA, 3348 bp, Mycobacterium abscessus subsp. bolletii 2B-0307; identical to SEQ ID NO: 42723

SEQ ID NO: 43045 - DNA, 1461 bp, Mycobacterium abscessus subsp. bolletii 2B-0912-S; identical to SEQ ID NO: 42721

SEQ ID NO: 43046 - DNA, 750 bp, Mycobacterium abscessus subsp. bolletii 2B-0912-S; identical to SEQ ID NO: 42722

SEQ ID NO: 43047 - DNA, 3348 bp, Mycobacterium abscessus subsp. bolletii 2B-0912-S; identical to SEQ ID NO: 42723

SEQ ID NO: 43048 - DNA, 1461 bp, Mycobacterium abscessus subsp. bolletii 2B-0912-R; identical to SEQ ID NO: 42721

SEQ ID NO: 43049 - DNA, 750 bp, Mycobacterium abscessus subsp. bolletii 2B-0912-R; identical to SEQ ID NO: 42722

SEQ ID NO: 43050 - DNA, 3348 bp, Mycobacterium abscessus subsp. bolletii 2B-0912-R; identical to SEQ ID NO: 42723

SEQ ID NO: 43051 - DNA, 1461 bp, Mycobacterium abscessus 3A-0119-R; identical to SEQ ID NO: 41997

SEQ ID NO: 43052 - DNA, 750 bp, Mycobacterium abscessus 3A-0119-R; identical to SEQ ID NO: 41998

SEQ ID NO: 43053 - DNA, 3348 bp, Mycobacterium abscessus 3A-0119-R; identical to SEQ ID NO: 41999

SEQ ID NO: 43054 - DNA, 1461 bp, Mycobacterium abscessus 3A-0122-R; identical to SEQ ID NO: 41997

SEQ ID NO: 43055 - DNA, 750 bp, Mycobacterium abscessus 3A-0122-R; identical to SEQ ID NO: 41998

SEQ ID NO: 43056 - DNA, 3348 bp, Mycobacterium abscessus 3A-0122-R; identical to SEQ ID NO: 41999

SEQ ID NO: 43057 - DNA, 1461 bp, Mycobacterium abscessus 6G-0125-S; identical to SEQ ID NO: 41997

SEQ ID NO: 43058 - DNA, 750 bp, Mycobacterium abscessus 6G-0125-S; identical to SEQ ID NO: 41998

SEQ ID NO: 43059 - DNA, 3348 bp, Mycobacterium abscessus 6G-0125-S; identical to SEQ ID NO: 41999

SEQ ID NO: 43060 - DNA, 1461 bp, Mycobacterium abscessus subsp. bolletii 1S-153-0915; identical to SEQ ID NO: 42721

SEQ ID NO: 43061 - DNA, 750 bp, Mycobacterium abscessus subsp. bolletii 1S-153-0915; identical to SEQ ID NO: 42722

SEQ ID NO: 43062 - DNA, 3348 bp, Mycobacterium abscessus subsp. bolletii 1S-153-0915; identical to SEQ ID NO: 42723

SEQ ID NO: 43063 - DNA, 1461 bp, Mycobacterium abscessus subsp. bolletii 2B-0626; identical to SEQ ID NO: 42721

SEQ ID NO: 43064 - DNA, 750 bp, Mycobacterium abscessus subsp. bolletii 2B-0626; identical to SEQ ID NO: 42722

SEQ ID NO: 43065 - DNA, 3348 bp, Mycobacterium abscessus subsp. bolletii 2B-0626; identical to SEQ ID NO: 42723

SEQ ID NO: 43066 - DNA, 1461 bp, Mycobacterium abscessus subsp. bolletii 2B-1231; identical to SEQ ID NO: 42721

SEQ ID NO: 43067 - DNA, 750 bp, Mycobacterium abscessus subsp. bolletii 2B-1231; identical to SEQ ID NO: 42722

SEQ ID NO: 43068 - DNA, 3348 bp, Mycobacterium abscessus subsp. bolletii 2B-1231; identical to SEQ ID NO: 42723

SEQ ID NO: 43069 - DNA, 1461 bp, Mycobacterium abscessus subsp. bolletii 2B-0107; identical to SEQ ID NO: 42721

SEQ ID NO: 43070 - DNA, 750 bp, Mycobacterium abscessus subsp. bolletii 2B-0107; identical to SEQ ID NO: 42722

SEQ ID NO: 43071 - DNA, 3348 bp, Mycobacterium abscessus subsp. bolletii 2B-0107; identical to SEQ ID NO: 42723

SEQ ID NO: 43072 - DNA, 1461 bp, Mycobacterium abscessus 5S-0921
atgaatgatctgacagtcgaagagctgttcgcgcacaacgatgacgtgcagaaatcccgtgcggtccgcctgttggccgccaagaatctggcgccctacatcacgcttatggaacgccacctggaccgcagcgccaaagtctccgaacctcagctggtggccaagctggaccgggacctgagcgccgtcgggctgggagaacagtccgggctggcccttatcaagagctgggcgagcgacgggtggctgcaccgagcgtcggacggcaccggccccgatgccgagaacgtctgctcgctgaccgaggacgcgcgcagcgcgctggcctttgtgcgccgtctgcgccgtgctgacacggtggccacgggcgggtccatcgccggtatcgcggcaggcctcaaacgggtggccacccagctggacggcgacccgtcacgcctgcgcgccgacatcgaggcccagatcgcagaactgcagacccagctgcacgccatcgacgacggataccgtccggaaccggatatcgtcgatcttgaggacgagacccgggccatcgcctatcagatggaacaggtgatcaccgacatcgtccgctacggcagcatgcagaacgagatcaccgccggactcatcgacgccgccgaggactccgactccggcttccgcgatcgcgcccgcagaatgttcgcggactatgacgcccttttcgattcccgcgaacgtgcctcttattcggccttcacgcggaccatccaagatccggatcagcgagccgcgctacggagtgatatcgcctgtgtcgcagatggtttgcccgatcttgaccccgggctgcgcgaggtcatgagaaacttcttcaagctcgtgtctcagcagatcgcggaggtctcccgcatcgaacagcgctgcgcacagcgcatccggcgattcttcgctgccggcaccacggagcaggctcgtggccgtgcgcgacagctcaatgacgcgctggcggccgggcacgctctactcaagatgtcgacggcggactctccgatcgacgccgagctaccgatcgggcgttccgccgcagcggcgatcggcgcgctgtctttcaccatcaaggacaccgcgccgccggtgctcgcacaggacgccccgtcggggccgctggatttgagcgggttctcggcgctggccacccaggtggatatggccgcattggccgatacggtcaacagtgctattgccggtggcccagtttccttgcccgacatgatctctcatgtcgaggccccctaccttggtgatgtgatcgtgttgtggtcactggccctcaagcaggacaacactgccgaccgtgaatcggtaaaggtgaagttccggtccctcgacggacaagaccgggtgatggaggtacctcagttgatgttccgtgaaccggtgctggccaccctcgaagaggagggatcgacactgtga

SEQ ID NO: 43073 - DNA, 750 bp, Mycobacterium abscessus 5S-0921
gtgacgacacaggcttcagggaccgccctggggaacatcaatttcgacgacctgccgggtgtcgaacccgatgcctcggcaccgcgaacggccaaggggccgcgattcgacggcgacaccagtgagcttccggacaaggcctgctgggcgctgcagaacctggtggcccggcgttacctgagtaaggacggtcagcccgaactgtgggcgtcgatgatcgagcatcgcaaggtgctggccgcgcgcctgtccgaattggacctgcggctgcgggtgttcgacgatctcgaggttgcctacgccgaaccagctccgttggagaaccccagcgtgtacggcgccagggtgttgcgccgggaaccgttgggcacctacgcgtcgattgtggcactgcatctggccaagatcgcgaggaccgcgcacgacgaacatgtattggtcagccgcgacgatattcacgaacttttcgccaacgtctcccacgacatcgaccgcgacgaggcgatgctgcgtgatcgcgttgacgaggcgatcaagcggctgtccaaggctgagattctgcagcgcacccgcgatgacgagcacagctacaccatcagcccagtcatcaacgcgctgatgtcggcgcagatgatcgaggcactgcagcgtcagtacgagcagttgcagcgcggcggcgccgcccccgaagacgccgacggcgcagaccccaccgacgaagaagatggcgagaccgatgatgacgagtga

SEQ ID NO: 43074 - DNA, 3348 bp, Mycobacterium abscessus 5S-0921
atgatgacgagtgatgcagcgacacaacagttctggttgtcccggctgcaggtcatcaactggggcgtcttcgacggctatcacagcatcgagttcagccgtcgcggtacgctgatcaccggctcctccggtagcggtaaatcatctctgctggacgcgatctcgctggcattcttgtcttcgaaccgccgtaacttcaacgcctcgagcgacaccaccgccgcgggttccagcatgggcaagcgcaccgtcgacaagtacgtgcgaggcctgtggggagagctgaagaacccgggggagcgccccaagcagatgttcctgcgcggcaagggcggtgcttggtcggctatcgccgtcacctactccggcaccgacggtcgggtgatcaccggcctggtactcaagtggcttgccccgggctcggattcggactcgtccagccgctactacctgatcgatgcggacgccgacatccgtgatctctgcaatgcatgggccagcaagggatacgccggctcggtgttcgagggcgcgggttggcgcggccacaagagcgaacgctggtacctggaacagctatacgctgccgtcggtattcagggttcctctgccgcgcagcagctgctgggcaaggccaagtcgctcaagagtgtcggcggcctggagcagttcgtacgcgagtacatgctcgatgaaccggagtcgatggcagcgatatccgaagcgctagggcagatcacgccattggtcgacgcccgtgccgccttggcgatcgcgcagcgccagcggcagaccctgggcgatatcgaacagatccaacagacgtacgccagcgacgcggcgcagttggccaccgtggacgtcgtggaccatcacaccgtgcgcgactacgtggatcagcagcgcctggcgctggcgggcccggagatcgatctgctcgataccgagatcacccggctgggtggtgagtgtgacgaaatccagtcgcgccaggacattctcacgggagagcgggacaaattgctcggccggatcgctgccgccgacagcaatctggcgccactcaaaagcgagctggctcatgctcgtgcccgcgcagaagaggtgtcgcgccggcgtacggcctacgacagtgcgttgtgggacctgggtcacgaagacgatatcgaatccgccgaggaattcgaggccatgcgggtggagagcctgcgggcagtcacccggatcaacgctgagctcgaagccggccacgatgcatatgtcatggccgcgggtgcgctctcgacggcacgtgatcagctgcgtgccgcatccgccgaattcaagcgggtcgagcacctgggtaccccggtgccgccggatgaggaccgcatgcgcggggagatcgccgcggcgcttgggcttaccgccaaggacctgccctacgtgtgcgagctgatggatctgcgcccagggcaggaacggtggcgcaaatctgtggagaaggtgttgcgctccaccgggctctgcctgctggtgcccgatcagcaccaccgccaggtgctgcgttatgtcaacgagaacccgatgcgcggctacctgcagatggagcgggtgattccctccggtaccccgcggcgcgccgagccgggcacgctcgccgactgtttgcgcctgaccaaccccaaccacgaatgtgccagtgccgccatgaatctggtggccggtgtcggcgactacgtgttggtcgacagccccgacgaattcagcaagcaccgccgggcggtcaccgatcagggactgcgcaaggacggtgaccggcgcgcggtcaaggacgatcggcgtgaattgcgggcttcccagtacatctatcagggcaacgctggcgacaagcgcgccgcgctttccgacgatgtggtcgaagcgcagcaggcggtcagtgatgccgaaaagttcatcggcgaaatggacaccaagcgcgaagagctgcgctcggaggtggtgcggtggtccaagctgcacagccaatacgagtattggagccagatcgataccgactcggccgaagccgccgtggcgcgtctacaggaccagtacgacgcgatgctggaagccaaccccgacctgaccggattgcagcagcaggccgactcctacctcgacgagatcaagaggctctccgaacgcatcggagcattgcgcaagcaagaatccgaacatgattcgcgccggacccggttgttggatctgctggacaacctgaacccgcgtgaggtgggcgggcacacccgatcgggtatcgaggcctacgtgccccaactctcgtccagcctggatgtgttggaacccgacgcctaccggctggagctgtggcggcagatcgagaaggatcagtcggtgctgcgtgagagcgtcacccgctcgcgcaacgagctgaaccggattctcaacgcgtacgaccgggacttccccgactctatccccaacgacagtgagaacttcgacgagaagatccacgactatgtcgcactctgccgccggatcgatgaacgcgacctgcccgccgcctacgaacggatgctgcggctgatcaccgagcaggcgcccactgccgtgttgcggctgcaccagctcgccgaggaggaggcacaccgcatcaccgaccagatcgaccgtgtcaatagcggtttgggttcggtcgagttcaaccggggtacccggctgaccctgcgtgccgagccgaaggcgctcgaagcggtgggcgagctcaacgagcgtgcccggcggatatccgggcgtgccgtcgccgtttcgatgggggacgagaaggccatccacgaccagtaccaggacatcctgcaactgcgtaacctgttggccgctgagacacctgaggcgcgccagtggacgcgcgacgcgttggatgtgcgtaaccgcttcgtgttgtactgcgaggagcgcgatgccaggaccggcgaaccgatccgtacctacagcaacgcgggtgcgaattccggtggagaacaagagaagttgatggcgttctgcctcgccggcgcgctgagcttcaacctggccaacccggagacgggggacaaccggccggtcttcgcgcagcttatgctcgacgaggcgttctcgaaatcggatccgcagttcgcccagcaggcgctgtccgcgttccgtaagttcggattccagctggtgatcgtggccaccgtgcagaacaccaccaccatccagccctatatcgacagcgtggtgatggtgtccaagccggacggcccgggggtgcgtccggttgcttcgacgcgcacggtgccgatcggtgaactcggtgacgtacgcaaggccgtgagcgcccgctag

SEQ ID NO: 43075 - DNA, 1461 bp, Mycobacterium abscessus 6G-0125-R; identical to SEQ ID NO: 41997

SEQ ID NO: 43076 - DNA, 750 bp, Mycobacterium abscessus 6G-0125-R; identical to SEQ ID NO: 41998

SEQ ID NO: 43077 - DNA, 3348 bp, Mycobacterium abscessus 6G-0125-R; identical to SEQ ID NO: 41999

SEQ ID NO: 43078 - DNA, 1461 bp, Mycobacterium abscessus 5S-0817; identical to SEQ ID NO: 43072

SEQ ID NO: 43079 - DNA, 750 bp, Mycobacterium abscessus 5S-0817; identical to SEQ ID NO: 43073

SEQ ID NO: 43080 - DNA, 3348 bp, Mycobacterium abscessus 5S-0817; identical to SEQ ID NO: 43074

SEQ ID NO: 43081 - DNA, 1461 bp, Mycobacterium abscessus 5S-1212; identical to SEQ ID NO: 43072

SEQ ID NO: 43082 - DNA, 750 bp, Mycobacterium abscessus 5S-1212; identical to SEQ ID NO: 43073

SEQ ID NO: 43083 - DNA, 3348 bp, Mycobacterium abscessus 5S-1212; identical to SEQ ID NO: 43074

SEQ ID NO: 43084 - DNA, 1461 bp, Mycobacterium abscessus 5S-1215; identical to SEQ ID NO: 43072

SEQ ID NO: 43085 - DNA, 750 bp, Mycobacterium abscessus 5S-1215; identical to SEQ ID NO: 43073

SEQ ID NO: 43086 - DNA, 3348 bp, Mycobacterium abscessus 5S-1215; identical to SEQ ID NO: 43074

SEQ ID NO: 43087 - DNA, 1461 bp, Mycobacterium abscessus 5S-0422; identical to SEQ ID NO: 43072

SEQ ID NO: 43088 - DNA, 750 bp, Mycobacterium abscessus 5S-0422; identical to SEQ ID NO: 43073

SEQ ID NO: 43089 - DNA, 3348 bp, Mycobacterium abscessus 5S-0422; identical to SEQ ID NO: 43074

SEQ ID NO: 43090 - DNA, 1461 bp, Mycobacterium abscessus 5S-0708; identical to SEQ ID NO: 43072

SEQ ID NO: 43091 - DNA, 750 bp, Mycobacterium abscessus 5S-0708; identical to SEQ ID NO: 43073

SEQ ID NO: 43092 - DNA, 3348 bp, Mycobacterium abscessus 5S-0708; identical to SEQ ID NO: 43074

SEQ ID NO: 43093 - DNA, 1461 bp, Mycobacterium abscessus 3A-0810-R; identical to SEQ ID NO: 41997

SEQ ID NO: 43094 - DNA, 750 bp, Mycobacterium abscessus 3A-0810-R; identical to SEQ ID NO: 41998

SEQ ID NO: 43095 - DNA, 3348 bp, Mycobacterium abscessus 3A-0810-R; identical to SEQ ID NO: 41999

SEQ ID NO: 43096 - DNA, 1461 bp, Mycobacterium abscessus 4S-0303; identical to SEQ ID NO: 43021

SEQ ID NO: 43097 - DNA, 750 bp, Mycobacterium abscessus 4S-0303; identical to SEQ ID NO: 41998

SEQ ID NO: 43098 - DNA, 3348 bp, Mycobacterium abscessus 4S-0303; identical to SEQ ID NO: 43023

SEQ ID NO: 43099 - DNA, 1461 bp, Mycobacterium abscessus 6G-1108; identical to SEQ ID NO: 41997

SEQ ID NO: 43100 - DNA, 750 bp, Mycobacterium abscessus 6G-1108; identical to SEQ ID NO: 41998

SEQ ID NO: 43101 - DNA, 3348 bp, Mycobacterium abscessus 6G-1108; identical to SEQ ID NO: 41999

SEQ ID NO: 43102 - DNA, 1461 bp, Mycobacterium abscessus subsp. bolletii 1S-151-0930; identical to SEQ ID NO: 42721

SEQ ID NO: 43103 - DNA, 750 bp, Mycobacterium abscessus subsp. bolletii 1S-151-0930; identical to SEQ ID NO: 42722

SEQ ID NO: 43104 - DNA, 3348 bp, Mycobacterium abscessus subsp. bolletii 1S-151-0930; identical to SEQ ID NO: 42723

SEQ ID NO: 43105 - DNA, 1461 bp, Mycobacterium abscessus 6G-0728-S; identical to SEQ ID NO: 41997

SEQ ID NO: 43106 - DNA, 750 bp, Mycobacterium abscessus 6G-0728-S; identical to SEQ ID NO: 41998

SEQ ID NO: 43107 - DNA, 3114 bp, Mycobacterium abscessus 6G-0728-S
atgggcaagcgtaccgtcgacaagtatgtgcggggcttgtggggagagctgaaaaacccgggggagcgccccaagcagatgttcctgcgcggcaagggtggggcctggtcggctatcgccgtcacctactccggcaccgacggtcgggtgatcaccggcctggtactcaagtggcttgccccgggctcggactcggactcgtccagccgctactacctgatcgacgcggacgccgacatccgcgatctctgcaatgcatgggccagcaagggatacgccggctcggtattcgagggcgcgggttggcgcggccacaagagcgaacgctggtacctggaacagctatacgccgccgtcggtattcagggttcctctgccgcgcagcagctgctgggcaaggccaagtcgctcaagagtgtcggcggcctggagcagttcgtacgcgagtacatgctcgatgaaccggagtcgatggcagcgatatccgaagcgctagggcagatcacaccattggtcgacgcccgtgccgccttggcgatcgcgcagcgccagcggcagacgctgggcgatatcgaacagatccaacagacgtacgccagcgatgcggcgcagttggccaccgtggacgtcgtggaccatcacaccgtgcgcgactacgtggatcagcagcgcctggcgctggcgggcccggagatcgatctgctggataccgagatcacccggctgggcggtgagtgtgacgaaatccagtcgcgccaggacattctcacgggagagcgggacaaattgctcggccggatcgccgctgccgacagcaatctggcaccactcaaaagcgagctggctcatgctcgtgcccgcgcagaagaggtgtcgcgccggcgtacggcctacgacagtgcattgtgggacctgggtcatgaagacgatatcgaatctgccgaggaattcgaggccatgcgggtggagagcctgcgggcagtcacccggatcaacgctgagctcgaagccggccacgatgcatatgtcatggccgcgggtgcgctctcgacggcacgtgaccagctgcgtgccgcatccgccgaattcaagcgggtcgagcacctgggtaccccggtgccaccggatgaggaccgcatgcgcggggagatcgcggcggcgcttgggcttaccgccaaggacctgccctacgtgtgcgaactgatggatttgcgcccagggcaggaacggtggcgcaaatctgtggagaaggtgttgcgctccaccgggctctgcctgctggtgcccgatcagcaccaccgtcaggtgctgcgttacgtcaacgagaacccgatgcgtggctacctgcagatggagcgggtgattccctccggtaccccgcggcgcgccgagccgggcacgctcgccgactgtttgcgcctgaccaaccccaaccacgaatgcgccagtgccgccatgaatctggtggccggtgtcggcgactacgtgttggtcgacagccccgacgaattcagcaagcaccgccgggcggtcacagatcagggactccgcaaggacggtgaccggcgcgcggtcaaggacgatcggcgtgaattgcgggcctcccagtacatctatcagggcaacgccggtgacaagcgcgccgcgctttccgacgatgtggtcgaagcgcagcaggcggtgagtgatgccgaaaagttcatcggcgaaatggacaccaagcgcgaagagctgcgttcggaggtggtgcggtggtccaagctgcacagccagtacgagtattggagccagattgatacggactcggccgaagctgccgtggcgcgtctgcaggaccagtacgacgcgatgctggaagccaaccccgacctgaccggattgcagcagcaggccgactcctacctcgacgagatcaagaggctctccgaacgcatcggagcattgcgcaagcaagaatccgagcatgattcgcgccggacccggctgctggatctgctggacaacctgagcccgcgtgaggtgggcgggcacacccgatcgggaatcgaggcctacgtgccccaactctcgtccagcctggatgtgttggaacccgatgcctaccgactggagctgtggcggcagatcgagaaggatcagtcggtgctgcgtgagagcgtcacccgctcacgtaacgagctgaaccggattctcaacgcgtacgaccgggacttccccgactctatccccaacgacagtgagaacttcgacgagaagatccacgactatgtcgcgctctgccgccggatcgatgaacgcgacctgcccgctgcctacgaacggatgctgcggctgatcaccgagcaggcgcccactgccgtgttgcggctgcaccagctcgccgaggaggaggcacaccgcatcaccgaccagatcgaccgtgtcaatagcggtttgggttcggtcgagttcaaccggggtacccggctgaccctacgtgccgagccgaaggcgctcgaagcggtcggcgagctcaacgagcgtgcccggcggatatccgggcgtgccgtcgccgtttcgatgggggacgagaaggccatccacgatcagtaccaggacatcctgcaactgcgtaacctgttggccgctgagacacctgaggcgcgccagtggacgcgcgacgcgttggatgtgcgtaaccgcttcgtgttgtactgcgaggagcgcgatgccaggaccggcgaaccgatccgtacctacagcaacgcgggtgcgaattccggtggagaacaagagaagttgatggcgttctgcctcgccggcgcgctgagcttcaacctggctaacccggagacgggggacaaccggccggtcttcgcgcagcttatgctcgacgaggcgttctcgaaatcggatccgcagttcgcccagcaggcgctgtccgcgttccgtaagttcggattccagctggtgatcgtggccaccgtgcagaacaccaccaccatccagccctatatcgacagcgtggtgatggtgtccaagccggacggcccgggggtgcgtccggttgcttcgacgcgcactgtgccgatcggtgagctcggtgacgtacgcaaggccgtgagcgcccgctag

SEQ ID NO: 43108 - DNA, 1461 bp, Mycobacterium abscessus 5S-0304; identical to SEQ ID NO: 43072

SEQ ID NO: 43109 - DNA, 750 bp, Mycobacterium abscessus 5S-0304; identical to SEQ ID NO: 43073

SEQ ID NO: 43110 - DNA, 3348 bp, Mycobacterium abscessus 5S-0304; identical to SEQ ID NO: 43074

SEQ ID NO: 43111 - DNA, 1461 bp, Mycobacterium abscessus 5S-0421; identical to SEQ ID NO: 43072

SEQ ID NO: 43112 - DNA, 750 bp, Mycobacterium abscessus 5S-0421; identical to SEQ ID NO: 43073

SEQ ID NO: 43113 - DNA, 3348 bp, Mycobacterium abscessus 5S-0421; identical to SEQ ID NO: 43074

SEQ ID NO: 43114 - DNA, 1461 bp, Mycobacterium abscessus 4S-0726-RA; identical to SEQ ID NO: 43021

SEQ ID NO: 43115 - DNA, 750 bp, Mycobacterium abscessus 4S-0726-RA; identical to SEQ ID NO: 41998

SEQ ID NO: 43116 - DNA, 3114 bp, Mycobacterium abscessus 4S-0726-RA
atgggcaagcgtaccgtcgacaagtatgtgcggggcttgtggggagagctgaaaaacccgggggagcgccccaagcagatgttcctgcgcggcaagggtggggcctggtcggctatcgccgtcacctactccggcaccgacggtcgggtgatcaccggcctggtactcaagtggcttgccccgggctcggactcggactcgtccagccgctactacctgatcgacgcggacgccgacatccgcgatctctgcaatgcatgggccagcaagggatacgccggctcggtattcgagggcgcgggttggcgcggccacaagagcgaacgctggtacctggaacagctatacgccgccgtcggtattcagggttcctctgccgcgcagcagctgctgggcaaggccaagtcgctcaagagtgtcggcggcctggagcagttcgtacgcgagtacatgctcgatgaaccggagtcgatggcagcgatatccgaagcgctagggcagatcacaccattggtcgacgcccgtgccgccttggcgatcgcgcagcgccagcggcagacgctgggcgatatcgaacagatccaacagacgtacgccagcgatgcggcgcagttggccaccgtggacgtcgtggaccatcacaccgtgcgcgactacgtggatcagcagcgcctggcgctggcgggcccggagatcgatctgctggataccgagatcacccggctgggcggtgagtgtgacgaaatccagtcgcgccaggacattctcacgggagagcgggacaaattgctcggccggatcgccgctgccgacagcaatctggcaccactcaaaagcgagctggctcatgctcgtgcccgcgcagaagaggtgtcgcgccggcgtacggcctacgacagtgcattgtgggacctgggtcatgaagacgatatcgaatctgccgaggaattcgaggccatgcgggtggagagcctgcgggcagtcacccggatcaacgctgagctcgaagccggccacgatgcatatgtcatggccgcgggtgcgctctcgacggcacgtgaccagctgcgtgccgcatccgccgaattcaagcgggtcgagcacctgggtaccccggtgccaccggatgaggaccgcatgcgcggggagatcgcggcggcgcttgggcttaccgccaaggacctgccctacgtgtgcgaactgatggatttgcgcccagggcaggaacggtggcgcaaatctgtggagaaggtgttgcgctccaccgggctctgcctgctggtgcccgatcagcaccaccgtcaggtgctgcgttacgtcaacgagaacccgatgcgtggctacctgcagatggagcgggtgattccctccggtaccccgcggcgcgccgagccgggcacgctcgccgactgtttgcgcctgaccaaccccaaccacgaatgcgccagtgccgccatgaatctggtggccggtgtcggcgactacgtgttggtcgacagccccgacgaattcagcaagcaccgccgggcggtcacagatcagggactccgcaaggacggtgaccggcgcgcggtcaaggacgatcggcgtgaattgcgggcctcccagtacatctatcagggcaacgccggtgacaagcgcgccgcgctttccgacgatgtggtcgaagcgcagcaggcggtgagtgatgccgaaaagttcatcggcgaaatggacaccaagcgcgaagagctgcgttcggaggtggtgcggtggtccaagctgcacagccagtacgagtattggagccagattgatacggactcggccgaagctgccgtggcgcgtctgcaggaccagtacgacgcgatgctggaagccaaccccgacctgaccggattgcagcagcaggccgactcctacctcgacgagatcaagaggctctccgaacgcatcggagcattgcgcaagcaagaatccgagcatgattcgcgccggacccggctgctggatctgctggacaacctgagcccgcgtgaggtgggcgggcacacccgatcgggaatcgaggcctacgtgccccaactctcgtccagcctggatgtgttggaacccgatgcctaccgactggagctgtggcggcagatcgagaaggatcagtcggtgctgcgtgagagcgtcacccgctcacgtaacgagctgaaccggattctcaacgcgtacgaccgggacttccccgactctatccccaacgacagtgagaacttcgacgagaagatccacgactatgtcgcgctctgccgccggatcgatgaacgcgacctgcccgctgcctacgaacggatgctgcggctgatcaccgagcaggcgcccactgccgtgttgcggctgcaccagctcgccgaggaggaggcacaccgcatcaccgaccagatcgaccgtgtcaatagcggtttgggttcggtcgagttcaaccggggtacccggctgaccctgcgtgccgagccgaaggcgctcgaagcggtcggcgagctcaacgagcgtgcccggcggatatccgggcgtgccgtcgccgtttcgatgggggacgagaaggccatccacgatcagtaccaggacatcctgcaactgcgtaacctgttggccgctgagacacctgaggcgcgccagtggacgcgcgacgcgttggatgtgcgtaaccgcttcgtgttgtactgcgaggagcgcgatgccaggaccggcgaaccgatccgtacctacagcaacgcgggtgcgaattccggtggagaacaagagaagttgatggcgttctgcctcgctggcgcgctgagcttcaacctggctaacccggagacgggggacaaccggccggtcttcgcgcagcttatgctcgacgaggcgttctcgaaatcggatccgcagttcgcccagcaggcgctgtccgcgttccgcaagttcggattccagctggtgatcgtggctaccgtgcagaacaccaccaccatccagccctatatcgacagcgtggtgatggtgtccaagccggacggcccgggggtgcgtccggttgcttcgacgcgcacggtgccgatcggtgagctcggcgacgtacgcaaggccgtgagcgcccgctag

SEQ ID NO: 43117 - DNA, 1461 bp, Mycobacterium abscessus 4S-0726-RB; identical to SEQ ID NO: 43021

SEQ ID NO: 43118 - DNA, 750 bp, Mycobacterium abscessus 4S-0726-RB; identical to SEQ ID NO: 41998

SEQ ID NO: 43119 - DNA, 3348 bp, Mycobacterium abscessus 4S-0726-RB; identical to SEQ ID NO: 43023

SEQ ID NO: 43120 - DNA, 1461 bp, Mycobacterium abscessus subsp. bolletii 1S-152-0914; identical to SEQ ID NO: 42721

SEQ ID NO: 43121 - DNA, 750 bp, Mycobacterium abscessus subsp. bolletii 1S-152-0914; identical to SEQ ID NO: 42722

SEQ ID NO: 43122 - DNA, 3348 bp, Mycobacterium abscessus subsp. bolletii 1S-152-0914; identical to SEQ ID NO: 42723

SEQ ID NO: 43123 - DNA, 1371 bp, Methylobacterium sp. GXF4
atgctgttcgcgcagctgcccgacgagctgttcaagcccctggcctccccgagccggggcttcaacgcggccctgctgctgcacctgcaccggcgcgtcctcggggccgagccggtgcgcaaggccgagttgctggccgagatcggcgatttcgccgccggctggagcgaccccgagatcctgggcgacgagccgatctccgccgacccggccgagcggcgcaacgccctctaccgccgtctcctcgacaccggctggctgatcgagcggcgcgaacgctacgtgccggtggtcgagttcgaccccgaggcgcgcctcctgctcgaggagctgtcgcgcctggagcgcggcgagacccgctcgtatggtggcgcggtgctggaagtgctgggcggcctcgagagcgccgtctccgatccggccaaccgatccgaggcgctgtcgaatgccgcgcgggcgtccgccgccttcctggcccatgtccgtggcctcgccgccggcatgcgcaaggtcgaggaacggatcctgcgcgagcccgaccgggccaagaccttccggctgttcttcgaggatttcgtcgagcgccacctgatcagcgactaccggacgctgcacacccgcttcaacccgttccggttccgggccagcgtggtccgcgaggccggccgggccctgcgtgacgccctcacggtccgggcgctcgccgagggcctgatccgcgagggccgcagccccgatctcgacaccgcccagcgggcggtccgggcggatctcgcccagatcctctcggtgttcgaggggctcgacaaccatctcgacgcggtcgatgccgtggtggcgcgcctggagcggcggatcggcgccgcgctccacgccatggaccggccggacccgacgggaatcgagcgcaccgccgcgatgctgcgcgccgtcggcgccgccgaggtggcgcccgacgtgccgccggtggtgtcgctgctgcggccgccgatcggccaggcccacctgcagacgccccgcgcccgccgcagcgccatcgatgtcgagccgctgccggatgtcgattacgaccccgcggtcgacgccttcgcggtcgccaaggccgagttccgccgccggaccaccgtgacgccggaatccatgaccgccttcgtcgaggcgcggctcggcaaggccgtgtcgctgcgcggctcgcagatcacgatcgagggggtcgacgacttcgtggtgttccagcgcctgcgcgagattgacgtgctgttcgatgcgcggctgcgcgaccgctacgccgtggtccggctgcccgagcggctggccaatggctggctggattgcccggatttcgtggtggagcgtcgcgtcggtgcttga

SEQ ID NO: 43124 - DNA, 627 bp, Methylobacterium sp. GXF4
gtgcttgaggggtttcgcgcgatcatcgacggcgacgagccgccgccgccgggggctcgggcgcccgatgccgaggagctgtgccgcgccctgcaggtgatgctcaagggccaggtgatctacgccgacacgcccggcatcggccgctcctacgagctcgcgcggcactacgcgccgttcttcaccgactacttcgcctgcctcggctacgcgctcacggtctcgcaccgcgaccagatggtctcgctgagcccggccgcggacgcgccccggcacgacatcgcctccgagcggctgcgcaaggacgagaccctggtgctgctggcgctccggctgctctacgaggagggattgcgcgacaaccgcgccggcaccgacgggatcgtcgagtgcaccactgacgagatcgtggagaagatccgcgcggtggcgcgcaacgagcccccggaagagggccggctcgccgacatcctgcgcctctacgcccgccgcggcggcctcaggatgggcgagcgcgaccgcgtcgagagggtgacgccgctgtcgctgctgccgggtctggcggtgctcgcctccgacgcctggctggagcgcctgcgggcgtggtcggaagccggggagctctga

SEQ ID NO: 43125 - DNA, 3438 bp, Methylobacterium sp. GXF4
gtgtacgtcctcaccgatatcgccatctccaattggtacctgatccgccgcgagcagatccggctgcggggcgccgccgccctggtggggccgaccggggccggcaagtccacgatcttcgacgcggtcggcacggtgctggccggcaacaatgccagccggctggcgctcaacgcctccgcctccgggcgcagcgcccgcacggtgcgcgactattgcctgggctggatcagcgacccggccgagggcggccggccgacgcgggaatcctgcgagaccgtgctggccctggtattcgagaacccggcctcgggccgtaccgtcacggtcgggctggcgctcgccgcccgggccgtggagccgcgcgagaccgtgctgtcgcggttcatcgcggtcggccaccggttcgagatcgccgattacgcccgcaccgccccgggcggcagctacacggcgccgtggagcgagatcgccgccgacctgcgcgcccgggcggcgagcttcaccgaataccgcacctccggcgagcgcttcaccgccgacatcctggcgaccctgcgggagggcgcgccctcccccgagccccggcacttcctgcgcagcttcgccaacgcggtggcgttcaagccgatcttcgacactagcgccttcgtgcgcgccttcgtgctcgacccggagccgctggatgtcgagcgggtgcggctctccatcgccaattggcgccgcctgctggagacgatcggcgagctggagagccggctcgcccggctgcgccgcctgcgcgaccgctacgatgcctggagcgaggcggtgctggccgccgcagcccatgaattccgggcggcctgcgccgaattgcgccgccgcagcctcgacctcaccgcggtgcggctgcgcctgcgcgagggcgccgacacgctgcggatcgcccgggagcgcgtcgcggcgagccgcgggcacgtgcgcgagatcgacggcgagatcgccgagaagaaggccctgctcgccggcagcgccgcggaggggcggctggccgcctcgacgctcggcctgtcgatgctggagcgggaccggaaggagctggtcgcgcgggtttccgacctcgtcggccttgtgggccagatgggcaagctccagccggtcgccccgatcctgcgccaggcctgcccgccggcggcgcggctcgcggaatcctgcgcccgcgccggcctgcgccgggaatcctcgcccgaggagatcctgcgcccggacgggcccctggccgagctgatcgacggcctggcgcgcctgcccgaattcgacgaggccctggagcgggcggccgaggatgccgcgctcaaggcccgcgcccaggagagcgaggccgagcgcaccgcgccccgcaccgggggcggctcggccgcacgcttgtcctccgacacggttgcgttccgcggcgagctggagcggcgcgggatcgaggccttgccgatctgcgagctggccgagatcgtcgatccgacctgggggccggcgctcgaaggcctgctcggccgcgcccgcgaggccctggtggtctcccccgaccggctgagcgaggccctgggcgtgctccagtccggccgcgaccggttccaccgctgcatcctggtcaagaccaccgacaccgccaagcagcgctcgcgccgctacgatgacgggccgctcaccgtgatcgagacgagcgatccgcacgcggaggcgttcctgggggtgcggctcgggggttacgacctcgcccgggacgatgccgagctggcccggctgtcccgcgccgtggcgccgagcggccggaccaccgccggcatggcctattcagtcacccgcaacgtcgacctgctgatgacccgcggccatcgcggccccacggtcgacagccgccgcgcgcacgaggccgcggtcgccgaggcacggcggctgcgcggggaggccgcggtcctgcgcgaggccgcccgtaccgctgcggcggtacgggcgcgcatcgcccgcggcctcgacgacatcgacgccctgcggggcgagctcgacgggctggagggacggcggcgcacgctccagaccgagcgcgagggcatcgagaagcgcgacaatgccggcctgaccgccgagatcgcggcgctgaccaccgagcgggtcggctacctgcgggaattgtccgaagagctggagccgaagctcgaccgcctgctcgccgacgaggcggccttgcgggcgcgcctcgggcccgtgcgcgaggcggcccgggccgccctggcggcgcggcgctcggccctgcggcaggtcatgggcggcgacgcggcgcgggtgcgcctcgcccgctccgagccgttcagcgtcggcgtgatcgcggaggcgcggggtgccctcgcgggcctcgacgccaaggccgccggcacgcgggccgccaccgagcgcggccttgcccgggaggccgccgaggcggcccgctcgcacggtcggatcgccgagcgcgagctgaccgaggcctgctcggcctggcgggtcgagaatccgttgaatgccggcgacgccccggcgatcgacggctatgcctgggtccggcgggaatacgaggccgtggagggccacgagctgcgccgctaccgcgcccaggccgagcgggccgaggtcgagatgcgccggctcatgaccgaggatctgctgacccgcctggccgaccggttcgagcgggtccatgcccggctcgcggccctgaacgagcggctctcggcgcgcagcttcaccggccagacctacgcgttcgaggcggcggtggaccgccgctacgccgccgtccacgcgctggccaccgagaccgcccgctcgccggaggccgcgcaggcgctgctggcgggcgagaccgaggggccgatggcggcggctctggaagagatcaccgcgctgatcgccggccaggaggatgcggcccggctcgccgattaccgcaactacttcgtctacgagatcggcatgaaggacgcggccggcaaccgcaccaccatgtcggcgcgggccctgcgcggttcggggggcgaggcgcaggcgccgttctacgtggcgatcgcggcctcgctcgccagcgcctattacccgggcgaccggcccggcgacgagaatccggggctggggctatgcctgctcgacgaggcgttctcgaagctcgacgtgcgcaacagccaggcgctggtcgatctctaccgcgcctgggggctgcaactgctgatcgccgccccggaggacaagcgcacgacgctgaccgaggtgatggacaccatcgtcaccgtctacaaaagcccggatctgacgtcggtgcggatcgaggccgagcatccgctggaggcggcgcgccgggcgctgcacgcgatcaatccggagcaggtcgggatcgagggcttccgccgctcggacgcggcggagtga

SEQ ID NO: 43126 - DNA, 1455 bp, Bacteroides dorei CL03T12C01
atggatatgcaagtagaagaaataacacaaatattacgagagtcaccaagcgtacgactcatcaaatcaagaagtgtggatttcttcttgtcttttgtcattgaggcgtttgagggacagtcggctataatgcaggaacgcttgcacatgctactggagaaccgactggatgagcaggaaaatgcgttggtggaggataatcttgaaatgacaagactaggggagtcgaacgaacagaaagcaaaacgactcatcaaagactggacagacaagggattcttgaccaactatcagaacgaagagggagaggtgatatacgagatttcgtcgcacacaagcaaactgatggattgggtggtgagcttgaaaaaagaggattacatcggtacggaatcgaagttcaagacgctgtttgcccaactgaaggaattggtggaatactcgaacgaggaccgcgagaagcgactggaactgctccgagccaaaaaaatggagatagagcatcagattcagcgactggagatgggcgaagaggtcgaggtgtatgaggactaccagatagaaccacgatacaatagcttgaataaactggctaaggagctgcttagcgatttcaaggaggtggatgacaacttcaaggggattatcaaagagatatatgagcgccagacagacaatgcggagaagaaagtattgctgaactacatctttgatgcgtatggcgaactgaaacaatcgcaacaaggcaagagtttctatgcattctgggaattcctgctctcggccgatctgcagaaagaatgggacgagttgactggtgcactctatgaaacactggagaatagaggcattgatgcgcatgacatgtttctcagggaaatgaaaaagcatctgtttgacgcaggcgagaaggtggcgaaaaccaacgatcgcatgagcgagaaactgagtcgcatcattcgccagaacggacagatgaatgcagaggtgacaaagcaggtgattaatgatataaagaaactgctcatcgaagccaccaaacagaaagagaaaccagaagcttcgcttgaatatgaaactatcgatatcaatctgccagtcgagcgccctctgactctggctcctataaaagagactgtgtataaggataagcctgatatggctgaactgagtctggacgacttggagcgcataggcaaactctacaatccgtatcacatcgatcgtttggtgctgagagaccgcattaacaaggtgctgtacgacagacagcagacgacactagcagaggtgatagaacggaacgagggtgtggagaaaggtctgtcggaagtgtttggatacattggcgtgctgaaggaatataagactgtggtaaacgaagagcgccagcaatatattgtttttgcagaaaacaaaacgatatcaattcccgaaatcataataacacgatga

SEQ ID NO: 43127 - DNA, 585 bp, Bacteroides dorei CL03T12C01; identical to SEQ ID NO: 42186

SEQ ID NO: 43128 - DNA, 3393 bp, Bacteroides dorei CL03T12C01
atgcagcagatgaatctctttaataccagtccggaagtggcaggcttcaagcttgactatttggaagtgtggaactggggtacattcgaccaaaaggtgtactgcatgaatacgcagggcaataactcgctgctgaccggtgccaatgcatcgggcaagagtacgctggtagatgctctgctcacgctgctagtgccactgaagcgccaacgattctacaaccaatcatcgggtgtggagaagaagggcaaccgtacagaggagtcgtacttctttggcaactatggcaatcagcagcaggagggtgcagcgagcactaccacgcttagattgcgagacaaaggggcacgttcggtacttcttgcatcgttctgcaatgtggacaaacgtgtggtgacgctgtttcaggtgcgctactacactggcgaggaactgaaggtgttgtttggtatagctcgcgaaccgctgactataaagcgcgacttttcggagtttgacctgcatggcgactggcgcaagcgactgacgaagaaatacaatacgaatgacacaagacgcaagatagagttttttgacggcccggttgcgtatggcgagaagatgatagccctcttcggaatgcgttcggacaaggcgcttacactcttcaatcaaatagtgggcgtgaaagtgttggacgatctagacagtttcatccgtacgaatatgctcgaggaagtgtcggctgaggaaaagtaccaggaactaaaggacaacttccaaaatctgatggaggcgaaaaccaatatcgataaggtgaaggagcagattgcccaactggaacctatcaatacattggcaaaggaactgatggcgatagacacgcgcatagctgaattggagcaagagaagagtgtggtggcctattggtttgctgcgcgaacggtggatttgtgcaacgaggagttggcgcgctgcaagagcaacttgagaaaactggaagatgagttgaaggcgttaaaggtgaagaagagtgagctggaacaagagcagacgcgcttgtcggtggctattgagaaggacgaggtgggtcagcagatacgtgagattgagaaggaaatcaatcagaaggtgaagatgcgtgataaccgcaaggccaaagccgaagaatacgataagctagcaaagacggtggagctgacacaaagtcctgatgcagaggtattcgatgccaatcgtgcgaccgccaaacacgagaaagatgctctgcaggtaaagattgacaggcaactcatggaagagaagcgtcaggcacaaaaccgtcaggatgaaatcaactgcacgatatcagagcgagtggatactatacgctatctgcagcagcataagaacaatatctctggtcgtgtggctgagattcgtgatgagatactggaggctgttggtgcaaccgccgaagagattccattcatcggtgaactgatacgtgtgaaggatattgagtgcgattgggagtatgccatcgagcgtattctgcacaattttgccttgagattggtggtgccagagaagtattacaagcaggtgaatgagtatgtgaatggtcataatctgcgaggacgcatcgtgtatcagcgatacgagggcacagagcctcttcgtgagtttgaggataggacattgaaggtggattcgttgctccgtaaggttgaatacaagtcaaagtgcttgtatttggattggcttgaggataggttatttgctgagttcaactatagttgtgttgattcgcttgcggactttaactatctgcaagagaaagcagtaacgaaagagggactgataaaagcgagaggtggtaagcatgagaaagacgaccgaccagagacacgaggcaaggaacactatgtgttgggctgggacaataaggagaagattgccatgctgcaggcggaagtacgccagttgcagcaggatgaaaaggaggtggcaaccaaagtccgtcgtatagaggcagatacaaagaatgctcaggagaagcgagaaacctactcgaagctgtttgataaatacgataaatttgatgatatcgactggtggtcgtgtgcactcgtcattcagcaaaaggaagaacagaagcgacaactggaggagaccaatgataaggtgaagatgttgcaggggcaattggagagggtgagaaaggaacttggtgcacttgaggagaagtttaatgaagctatcggtaacaaagcattattggaaaatcgtgagaatatactcaagaaacagagcaatgattgtgctttggctttggctcaaataggcgttgttgataccgatgcttttgagtcgcaacacacagatttactgaatgtggcattggtgggtttggacaaaatgcgtgacacgttacagagtgacatcaattccgctttgcggaaacaacgtgagacgaagggtagcaagagtggcgatttgaagaacctgatttatcgcttcaagaatcccactgaggaaattaccgcgaagtatcgcgattggcgttcggacgtgaaccgtttgcccgaagccgtggagtttgtgggcgaatatcagacctattaccaacgattgctggacgaagatctgcctgggtttgaatcgcgcttcaacaagtatttacaggagaatatcatcaacaaggtcagtgcattcaatatgttcttccagaactggcgccagtctatcaccaagaccatcgaccaattgaattcgtatcttgtgggcatcgatttcaaggatgctccaaagacgtatatccagttggtcgcagccaaacgattgaacgtggatttgaaggagttccaagaccttctgagcagtgcaatcccgaacatccatgagatgaattcgacaatcgatggcagcaggattcattttgaacagcatatcgaaccgctgatgtctcgtttacaagacgaatcatggcgaaagttggtgatggatgtgcgtggatggtacacatataaggcggaggagttttatcaagacgatgatcagaagcgtaacacctacgaggctatgggacagctgtcaggtggcgagaaggcgcaattgacatataccatcctggggtcagctatcgcttatcagtttggcttgactaagaacggactcgactcttcgttccgcttcattgccatagatgaggcttttcgcgcacaggacgaggacaaggctcgctatctgatttcgctctgcaaacagctccacctgcagttgctcgtggtgactccgagtgacaacatccacatcgtggagaacgatatttcgtatgtgcattatgtggagcgcaagggtgaccgttctgtactctataatatgcctatcagtgagtttaaggcagaacgtgaaaggagtatggaggtatga

SEQ ID NO: 43129 - DNA, 1155 bp, Bacteroides dorei CL03T12C01; identical to SEQ ID NO: 42188

SEQ ID NO: 43130 - DNA, 1449 bp, Bacteroides nordii CL02T12C05
atgcaagtagaagaaataacacaaatattacgagagtcaccaagcgtacgactcataaaatcaagaagtgtggatttcttcttgtcttttgtcattgaggcgtttgagggacagtcggctataatgcaggaacgcttgcacatgctactggagaaccgactggatgagcaggaaaatgcgttggtggaggataatcttgaaatgacaagactaggggagtcgaacgaacagaaagcaaaacgactcatcaaagactggacagacaagggattcttgaccaactatcagaacgaagagggagaggtgatatacgagatttcgtcgcacacaagcaaactgatggattgggtggtgagcttgaaaaaagaggattacatcggtacggaatcgaagttcaagacgctgtttgcccaactgaaggaattggtggaatactcgaacgaggaccgcgagaagcgactggaactgctccgagccaaaaaaatggagatagagcatcagattcagcgactggagatgggcgaagaggtcgaggtgtatgaggactaccagatagaaccacgatacaatagcttgaataaactggctaaggagctgcttagcgatttcaaggaggtggatgacaacttcaaggggattatcaaagagatatacgagcgccagacagacaatgcggagaagaaagtattgctgaactacatctttgatgcgtatggcgaactgaaacaatcgcaacaaggcaagagtttctatgcattctgggaattcctgctctcggccgatctgcagaaagaatgggacgagttgactggtgcactctatgaaacactggagaatagaggcattgatgcgcatgacatgtttctcagggaaatgaaaaagcatctgtttgacgcaggcgagaaggtggcgaaaaccaacgatcgcatgagcgagaaactgagtcgcatcattcgccagaacggacagatgaatgcagaggtgacaaagcaggtgattaacgatataaagaaactgctcatcgaagccaccaaacagaaagagaaaccagaagcttcgcttgaatacgaaactatcgatatcaatctgccagtcgagcgccctctgactctgactcctataaaagagactgtgtataaggataagcctgatatggctgaactgagtctggacgacttggagcgcataggcaaactctacaatccgtatcacatcgatcgtaaggtgctgagagaccgcattaacaaggtgctgtacgacagacagcagacgacactggcagaggtgatagaacggaacgagggtgtggagaaaggtctgtcggaagtgtttggatacattggcgtgctgaaggaatataagactgtagtaaacgaagagcgccagcaatatattgtttttgcagaaaacaaaacgatatcaattcccgaaatcataataacacgatga

SEQ ID NO: 43131 - DNA, 585 bp, Bacteroides nordii CL02T12C05
atgaacgcaacaaatatacaaccatacagcagggctgtggtgaaactactgaaaggcatcgtagagaaagacgatgtagtgtggaatgatgtactcgactaccagagcgagatactggactatatcagcgtgatggggctggaactcatcgtgaaaaaggatgagggttttgcctttgtcaagcaactgaaattggacgatgacaaaacgttgaacatggtgtcgagaaggttgtatggttttgaggtgtcggtgatactcatcgtgttgaggcagatactcgaagacttcgacagcaatccaacagagtcgcaggcttcgtacaagtatgtaactgccactgaaataaaggaagaggcggaactgttcctgcccaccaccttcaatcgtgccaagtttgagaaagaccttgaccgctatatcgacagcatcgtcagctttggtttccttgtggaagcaaagcatgctgagggcgagaaacgctataaaatacatcgcatcatcaaggagaaggtgacactggacgatctattggaattcaaaaacaaactgaacgactatgatgcagcagatgaatctctttaa

SEQ ID NO: 43132 - DNA, 3396 bp, Bacteroides nordii CL02T12C05
atgatgcagcagatgaatctctttaataccagtccggaagtggcaggcttcaagcttgactatctggaagtgtggaactggggtacattcgaccaaaaggtgtactgtatgaatacgcagggtaataactcgctgctgaccggtgccaacgcatcgggcaagagtacgctgatagatgctctgctcacgctgctggtgccactgaagcgccaacgattctacaaccaatcatcgggtgtggagaagaagggcaaccgtacagaggagtcgtacttctttggcaactatggcaatcagcagcaggagggtgcagcgagcactaccacgcttagattgcgagacaaaggggcacgttcggtacttcttgcatcgttctgcaatgtggacaaacgtgtggtgacgctgtttcaggtgcgctactacactggcgaggaactgaaggtgttgtttggcatagctcgcgaaccgctgactataaagcgcgacttttcggagtttgacctgcatggcgactggcgcaagcgactgacgaagaaatacaatacgaacgacacaagacgcaagatagagttttttgacggcccggttgcgtatggcgagaagatgatagccctcttcggaatgcgttcggacaaggcgcttacactcttcaatcagatagtgggcgtgaaagtgttggacgatctggacagtttcatccgtatgaatatgctcgaggaagtgccggctgaggaaaagtatcaggaactgaaggacaacttccaaaatctgatggaggcgaaaaccaatatcgataaggtgaaggagcagattgcccaactggaacctatcaatacattggcaaaggaactgatggcgatagacacgcgcatagctgaattggagcaagagaagagtgtggtggcctattggtttgctgcgcgaacggtggatttgtgcaacgaggagttggcgcgctgcaagagcaacttgaggaaactggaagatgagttgaagatgttgaaggtgaagaagagtgagctggaacaagagcagacacgcttgtcggtggctattgagaaggacgaggtgggtcagcagatacgtgagattgagaaggaaatcaatcagaaggtgaagatgcgtgataaccgcaaggtcaaagccgaagaatacgataagctggcaaagacggtggagctgacacaaagtcctgatgcagaggtattcgaagccaatcgtgcgaccgccaaacacgagaaagatgctctgcaggtaaagattgacaggcaactcatggaagagaagcgtcaggcacaaaaccgtcaggatgaaatcaactgcacgatatcagagcgggtggacactatacgctatctgcagcagcataagaacaatatctctggtcgtgtggctgagattcgtgatgagatactggaggctgttggtgcaactgccgaagagattccattcatcggtgaactgatacgtgtgaaggatattgagtgcgattgggagtattccatcgagcgtattctgcacaattttgcattgcgattggtggtgccagagaagtattacaagcaggtgaatgagtatgtgaatggtcataatctgcgaggacgcatcgtgtatcagcgatacgagggcacagaggctcttcgtgagtttgaggataggacattgaaggcggattcgttgctccgtaaggttgaatacaagccaaagtgcttgtatttggattggcttgaggataggttatttgctgagttcaactatagttgtgttgattcgcttgcggacttcaactatctgcaagagaaagcagtgacgaaagagggactgataaaggcgagaggtggtaagcatgagaaagacgaccgaccagagacacgaggcaaggaacactatgtgttgggctgggacaacaaggagaagattgccatgctacaggcggaagtgcgccagttgcagcaggatgaaaaggaggtggcaaccaaagtccgtcatatagaggcagatacaaagaatgctcaggagaagcgagaaacctactcgaagctgtttgataaatacgataagtttgatgacatcgactggtggtcgtgtgcactcgccattcagcaaaaggaagaacagaagcgacaactggaggagaccaatgatagggtgaagatgttgcaggggcaattggagggggtgagaaaggaacttggtgcacttgaggagaagtttaatgaagctatcggtaacaaagcattattggaaaatcgtgagaatatgctcaagaaacagaataatgattgtgctttggctttggctcaaataggcgttgttgataccgatgcttttgagtcgcaacacacagatttactgaatgtggcattggtgggtttggacaaaatgcgtgacacgttacagagtgacatcaattccgctttgcggaaacaacgtgagacgaagggtagcaagagtggcgatttgaagaacctgatttatcgcttcaagaatcccgctgaggaaattaccgcgaagtatcgcgattggcgttcggacgtgaaccgtttgcccgaagccgtggagtttgtaggcgaatatcagacctattaccaacgattgctggacgaagatctgcctgggtttgaatcgcgcttcaacaagtatttacaggagaatatcatcaacaaggtcagtgcattcaatatgttcttccagaactggcgccagtctatcaccaagaccatcgaccaattgaattcgtatcttgtgggcatcgatttcaaggatgctccaaagacgtatatccagttggtcgcagccaaacgattgaacgtggatttgaaggagttccaagaccttctgaacagtgcaatcccgaatatccatgagatgaattcgacaatcgatggcagcaggattcattttgaacagcatatcgaaccgctgatgtctcgcttacaagacgaatcatggcgaaagttggtgatggatgtgcgtggatggtacacatataaggctgaggagttttatcaagacgatgatcagaagcgtaacacctacgaggctatgggacagctgtcgggtggcgagaaggcgcaattgacatataccatcctggggtcagctatcgcttatcagtttggcttgaccaagaatggactcgactcttcgttccgcttcattgccatagatgaggcttttcgcgcacaggacgaggacaaggctcgctatctgatttcgctctgtaaacaactccacctgcagttgctcgtggtgactccgagcgacaacatccacattgtggagaatgatatttcgtatgtgcattatgtggagcgcaagggcgaccgttctgtgctctataatatgcctatcagtgagtttaaggcagaacgtgaaaggagtatggaggtatga

SEQ ID NO: 43133 - DNA, 1155 bp, Bacteroides nordii CL02T12C05
atgataacggcagcagaaatacgtaagaagacagaacgcaagtatgtggattatttgcgttctgtggtcgctggctctgggtttgaaccaattgtgattccttgcgacaagaaagcgagcgcatcgatggatgagtatcagcgcgaactgacggacatccgttcgcaatcgaaagaggtgaagggctttggttacacgattgagtggaaaacagtgaaaacgaaagcattgggcgaacaggatctgcctgagcgtgtgttgttcgggagtgcatcggacgttgagcgcttcttgctgaagggtggtgaagtgtcacagtttcgcaaggatgtggcgatgttgcttaatgagtttccgcagcttcgtccatgggtggaacgctatccacttaaggtgatcgagaatgcttcctcttggcctgatttgttgaaagttttgcgttattttgtggcgaatccttgtcctgagttgtacattcgtgaattgcctattgaggtgcacaccaagttcattgagcgcaataagggagtgcttcgtgagttgctggatattgtcattgttgagtatgtctgttcggatgagaaggagttcgaaaagcgctttggattgcgatacgatgagccatgggtgcgcattcgtgtgttggaagcatcgattgcgagtgaatacttttctggtgtagacgatctgacgatgcctcagagtcagttctgtgcgttgtcgttgcctgtgcagaaggtgtttgtggtggagaataaagtcaacttcctgacttttcccaagttggcaagaagtctgctgatttgggggcatggattcaccgttggcatcctcaagtctgttccattcatgcggcacgcttccctatactattggggcgacattgatgcacagggcttcgaaattctctcgcagttccgcagttattttccccagacgcaaagccttctgatggatcgcgctacctttgatacctattttgaaggcgacaaaggcactccaagtgatgtatcaaagcctctccatcttacccctgcggaagccacactgtacaatcatatcaagtctcacaacctacgtctagagcaagagaagattccgcaaaaatgtattgataatatattcaatagttcgttaaaaattagacaaggctaa

SEQ ID NO: 43134 - DNA, 1575 bp, Bifidobacterium animalis subsp. lactis B420; identical to SEQ ID NO: 41902

SEQ ID NO: 43135 - DNA, 810 bp, Bifidobacterium animalis subsp. lactis B420; identical to SEQ ID NO: 41925

SEQ ID NO: 43136 - DNA, 3498 bp, Bifidobacterium animalis subsp. lactis B420; identical to SEQ ID NO: 41904

SEQ ID NO: 43137 - DNA, 1221 bp, Bifidobacterium animalis subsp. lactis B420; identical to SEQ ID NO: 41905

SEQ ID NO: 43138 - DNA, 1575 bp, Bifidobacterium animalis subsp. lactis Bi-07; identical to SEQ ID NO: 41902

SEQ ID NO: 43139 - DNA, 810 bp, Bifidobacterium animalis subsp. lactis Bi-07; identical to SEQ ID NO: 41925

SEQ ID NO: 43140 - DNA, 3498 bp, Bifidobacterium animalis subsp. lactis Bi-07; identical to SEQ ID NO: 41904

SEQ ID NO: 43141 - DNA, 1221 bp, Bifidobacterium animalis subsp. lactis Bi-07; identical to SEQ ID NO: 41905

SEQ ID NO: 43142 - DNA, 1461 bp, Mycobacterium abscessus subsp. bolletii str. GO 06; identical to SEQ ID NO: 42721

SEQ ID NO: 43143 - DNA, 750 bp, Mycobacterium abscessus subsp. bolletii str. GO 06; identical to SEQ ID NO: 42722

SEQ ID NO: 43144 - DNA, 3348 bp, Mycobacterium abscessus subsp. bolletii str. GO 06; identical to SEQ ID NO: 42723

SEQ ID NO: 43145 - DNA, 1473 bp, Xanthomonas campestris pv. musacearum NCPPB 2005
atgaaacaccgtgcccgcatcgcccgctatcgcgccctgcgcgagcagccgctgtggaaactgctggcggccgatcagtcgccggaagtgatcggcctgctgcagacgttgttgctcgacagcgagcgcggtttgcctgcggcggtcctgcatgaacgcctgcagcgcatgcttgacgatctcaatgtcgatcagctctcgcgcgagctgccgcgcactgcgcaggactatgtagcgcactggctggcgcagggctggctggaacggcgcctgcccgagggcgcgcagcaggagcagtacgagttgtctacccaggcgatgcaggcgattcgctttgccgatggtctggagcaggcgcgtggtgccgctaccgaaagccggcttgcgctggtgatgcagcagttgtcgcagttggccgcgttgaccgaaaccaatcccgatgcgcggctgtcggcgctgcgcgacgagcgtgatcgcatcgatgcggagatcgcgcgggtggctgccggcaaggtcgcctcgttggatggcaaacgcgcgctggaacgtgcgcggcaggtgatcgcgctggccgacgagctgaccgaggattttcgccgggtacgcgacgatttcgagcagctcaatcgccagttccgtgagcgcatcattgacgacgaaggcgagcgtggcgaggtgttgacgcggctgttcgagggcgtggacgtgatcggcgacagcgaggccggacgcagttttcaagcgttctgggcgctgctcaacgatgccgaacaaagcgcgcagctggatgcggcgctggagacggtgttggcgcgggcgttcgcacgcaagctcgatcgccgcgagcgcagcttcctgcgcggcttgaccggcaccatgctcgaacgcggcggtcaggtgcacgatgtgatgcagcatttcgcccgcagcctgcgcggcttcgtccaaagccgtggctatctggaacaacgccggctcaatcaattgctgaagcaggcgcaggccgaggcgttggggctgcgcgagcatctgcgtgcgcagcgctcggtcgggcacgacctcaacctgaccaccagccgcttacgctcgctgtcgcaatggcgtctgcacgatccgcgtcagacccaggtcgatagcagcatccagcgcaacgacgcagcggcgatctcgctggacagcgtcggcgatctggtcgcgcagtcggaaatcgacttccgtagcctgcgccgcgatctgtacgagctactgggcgaacacgcacagctgtcgatcgcgcaggtgctggcgcagcggcaggcagagcaggggctcggcagcgtgatcggctacctgtcgctgggcacgcggcatgggcaggtcgatgtacaacgcagcgagatcgcgcgttggcttggcggcgacggccagtggcgcggcgcacgtatcccgttagtctggttcagccaggagaaacgcaatgaattggcaggctga

SEQ ID NO: 43146 - DNA, 699 bp, Xanthomonas campestris pv. musacearum NCPPB 2005
atgaattggcaggctgacaacgtcgaaaccgacgaaccggcgccgagcgcgcacgccgatgcggctgcgcctgaggcggatgccgcgacaggtctgtttcccggcgatagcggtgcgttgccggtggatgcgcggcgcgtgctgtgccaactgctcgccggccccagcgtggacgtgcagcgccacagcaagttgtggccggcgttgctgcgccatgaagcggccgtgcgcagccgcctggccgaactgttcctcgaattggtgctcgaccgcgacgccggcgtcgccttcacccgccaggccgacaccggcgagctcgaagcgccggtgctgctgcgctccttgccgctgaccttcatcgactcggtgttgctgctgcatctgcgtcagcaactggccgaagccgatgcgcgcggcgtgcgcgcggtggtcgaagatgcgccgttgagcgaggccctggccgtctacgagaagaatctgtccaccgaccgcgccggcttcatgcggcggattggcaacgccattcagaagatgaaggacaaccacgtgctcacccgcctgcgtggcgacgacaaccgctatgaggtttcgcccacgctcaagctgctgttctcggccgaggatgtgtccgcgctggcgcaaatctatcgccagctgcgtgagcagcccggcaccgtcggcgatgcagagcacgcctga

SEQ ID NO: 43147 - DNA, 3384 bp, Xanthomonas campestris pv. musacearum NCPPB 2005
atgaaatcttcttcctccagcctgtttgccgacgatctgcccgacccgcgcgtgcagcagttccgcatgcgccgcctgcaggtccacaactggggcacgttcaacggtctgaccgacgtgccgatcgccgcgaagggcttcttgttcgtcggccgctccggttcgggcaaatccacgctgctggatgccatgtctgctctgttgaccccgcccaatctggtcgacttcaatgccgccgcgcgcgaggccgagcgcagtggccgcgatcgcaacctggtgtcgtatgtgcgcggcgcctgggccgaccagcaggacagcgcctccggcgaaatcgccacgcaatatttgcgcaagggcagcacctggaccgcgctggtgctggaataccgcaacggcgagggacgggtgatcagcctgatacggctgttctggatcgccggcagcggtgcggcggcagccgatgtgcgcaagcattacatggtggccgagcgcagtttcgatatcgccagcgaactagtcggttttgatctggatctgcgcaagctgaaggcgcgcctgggcgacgacatcgcccacttcgacaatttctccggctatgccgagcgcttccgccatcagctgggcatcgccaacgagatggcgctacggctgctgcacaaaacccagtcggcgaagaatcttggcgatctcaatgtgtttctgcgcggcttcatgctcgaagcgcccaagaccttcgacgccagcgagcggctggtgggcgacttcgccgaactcgatggagcgcatcgggcggtggtcaccgcacggcggcaggtcgaaacgctgttgccggcgcgtgcgcattacgacgacttgcagtcggtgcagcgccagcgcggccgcttgcaggaactcaagctcggcctggacccctatcgcgagcaacgccggcttgcgttgctggatgcgcgactgcacgcactggacgtcaacgaccagggcctggccggcgaggagggccaacgccgcgctgcagtggataaccaccaacaacgcttgtccgatctggaggcccagcgccgcagccagggcggcgagcggatcgacgcgctggaacgcgagcagctccaggtccagggcgaacttgcacgccgcagcgacaaacgcgtcagggccgaacaggcctgccgccagctcgaccagagcctggccgacaacgcgcatggatttgccgagcagtccgcgcaggcgcgtgccgcgctcgaggacgggcagcggctggccgccgaacaggacgaggtgatcggcgagcgtatcgccggcaagcgcgaggacagccagcgctttgcgcaggtgcgcgccgagatcgaggcgctcacccgcaatccctccaacattgctgcgccgatgcaggccctgcgtgcacgcctgagcgaagaaaccggcattcccgaggccgcgctgccctttgtcggcgaactgatccaggtgcgtgagggagatgtcgcctggcgcggtgccatcgagcgcgtgctgcatggctttgcgcaatcgctgctggtggacgagcgccattacgccgagctggccgagtgggtcaaccgcacgcatctcggctcgcgcctggtctattaccgggtgcgcaacaacgaacaagcgtttgccggccgcgaacccggcagcgcctcgctgctgcacaagctgcagttgcgcgagcatccctttgctggctggctgcggcgcgaactgggcaagcgtttcgactacgactgcctggagagcgccaaggccttgcgcacggcagagcgcgcgatcacccgcgaaggccaggtcaagcatcccggcgaacgctacgaaaaagacgaccgtcatgcggtcggcgaccgtcggcgctggctgctgggcttcgacaaccgcgacaagttggcgctgtacgaacgcgaagccatcgaactggcgcaacgcatcgccgcctgcgatgccgacgtggccgcgctgcgtgcccgccgcgaacgcgatgccagccggcgcctggcccagcacaccctggccaacctgggctgggaggaaatcgacgtcgccgcgcaactgcagcgcggcgacgatatcgccagcgccttgcgcaagctgcgcgaaggcgatgccaacctgcgtgcgctgggcgaggcgatcgagcgcacgcgcggcgatctggaacaggccaagcgcacgttcgacggtgtgcgcgaggaacggatcgcgctgggggtcgagcgcacgcgtctggaaaagcagcgcctgcaatgcgccgacgccgatacccgtgtggtcacgccgctgcagcgcgaggggctggaggagcgcctggccaacctgggcgcgctcagcctggacaatctcgaagcgcattttcgccagatcggcaacgccatcgccgagcagaccagcgccagcgacagcgagcacaatcggctcgaacagttgctgctcggctgcttccgccggtatagccagcagtggcccgaagacagtggcgacttcatcatcagcctggccggcgccgaggattttctcgcccgcctgcagcgtctggaacgcgatggcctgccgcagcacgaagcacgctttttcgagctgttgcaaagccagagcaagaacaatctgctcgccttgcagcgccataccgccgaagcgcgcaaatcgattgcccaacgcctggacgaggtcaacgccagcctggagcaggtgccgttcaaccatggcaccttgctgaccatcgaactcagcgatcgccgtctgccggaggtgatcgacttccatcaacgtctgcgggatgtgctcggtcaccaccagaccgaacagcgcgacgtggccgaacagcaatttgcggtgctgcgcgaactggtgcgcaagctcggctcggccgatggcgatgacaagcgctggcgtgagctggtgctggatgtgcgtctgcatgtggagttcgtcggcgtcgaactggatgcggccacccgccagcaggtggagatctaccgcagcggcgccggcaagtccggcggccagcggcagaaactggcaaccacctgcctggccgccgcgctgcggtatcaacttggcggcgaagacggcgaactgccgcgctacgcggccgtggtgctggacgaagccttcgacaaggctgacaacgaattcaccgcgttggcgatgaacatcttcgaaaatttcggcttccagatggtggtggccacgccgctcaagtcggtgatgacgctggagccgtttatcggcggcgcctgctttgtcgaaatcagcggccgtcacgactctggcgtgttgctgatcgaatacgacgaacaggcacgccggctcaagttgcccgagcgctcgcgcagcgcggcggcggccgccggtgcggcgcgcgcgacc

SEQ ID NO: 43148 - DNA, 1473 bp, Xanthomonas campestris pv. musacearum NCPPB 4379; identical to SEQ ID NO: 43145

SEQ ID NO: 43149 - DNA, 699 bp, Xanthomonas campestris pv. musacearum NCPPB 4379; identical to SEQ ID NO: 43146

SEQ ID NO: 43150 - DNA, 3435 bp, Xanthomonas campestris pv. musacearum NCPPB 4379
atgaaatcttcttcctccagcctgtttgccgacgatctgcccgacccgcgcgtgcagcagttccgcatgcgccgcctgcaggtccacaactggggcacgttcaacggtctgaccgacgtgccgatcgccgcgaagggcttcttgttcgtcggccgctccggttcgggcaaatccacgctgctggatgccatgtctgctctgttgaccccgcccaatctggtcgacttcaatgccgccgcgcgcgaggccgagcgcagtggccgcgatcgcaacctggtgtcgtatgtgcgcggcgcctgggccgaccagcaggacagcgcctccggcgaaatcgccacgcaatatttgcgcaagggcagcacctggaccgcgctggtgctggaataccgcaacggcgagggacgggtgatcagcctgatacggctgttctggatcgccggcagcggtgcggcggcagccgatgtgcgcaagcattacatggtggccgagcgcagtttcgatatcgccagcgaactagtcggttttgatctggatctgcgcaagctgaaggcgcgcctgggcgacgacatcgcccacttcgacaatttctccggctatgccgagcgcttccgccatcagctgggcatcgccaacgagatggcgctacggctgctgcacaaaacccagtcggcgaagaatcttggcgatctcaatgtgtttctgcgcggcttcatgctcgaagcgcccaagaccttcgacgccagcgagcggctggtgggcgacttcgccgaactcgatggagcgcatcgggcggtggtcaccgcacggcggcaggtcgaaacgctgttgccggcgcgtgcgcattacgacgacttgcagtcggtgcagcgccagcgcggccgcttgcaggaactcaagctcggcctggacccctatcgcgagcaacgccggcttgcgttgctggatgcgcgactgcacgcactggacgtcaacgaccagggcctggccggcgaggagggccaacgccgcgctgcagtggataaccaccaacaacgcttgtccgatctggaggcccagcgccgcagccagggcggcgagcggatcgacgcgctggaacgcgagcagctccaggtccagggcgaacttgcacgccgcagcgacaaacgcgtcagggccgaacaggcctgccgccagctcgaccagagcctggccgacaacgcgcatggatttgccgagcagtccgcgcaggcgcgtgccgcgctcgaggacgggcagcggctggccgccgaacaggacgaggtgatcggcgagcgtatcgccggcaagcgcgaggacagccagcgctttgcgcaggtgcgcgccgagatcgaggcgctcacccgcaatccctccaacattgctgcgccgatgcaggccctgcgtgcacgcctgagcgaagaaaccggcattcccgaggccgcgctgccctttgtcggcgaactgatccaggtgcgtgagggagatgtcgcctggcgcggtgccatcgagcgcgtgctgcatggctttgcgcaatcgctgctggtggacgagcgccattacgccgagctggccgagtgggtcaaccgcacgcatctcggctcgcgcctggtctattaccgggtgcgcaacaacgaacaagcgtttgccggccgcgaacccggcagcgcctcgctgctgcacaagctgcagttgcgcgagcatccctttgctggctggctgcggcgcgaactgggcaagcgtttcgactacgactgcctggagagcgccaaggccttgcgcacggcagagcgcgcgatcacccgcgaaggccaggtcaagcatcccggcgaacgctacgaaaaagacgaccgtcatgcggtcggcgaccgtcggcgctggctgctgggcttcgacaaccgcgacaagttggcgctgtacgaacgcgaagccatcgaactggcgcaacgcatcgccgcctgcgatgccgacgtggccgcgctgcgtgcccgccgcgaacgcgatgccagccggcgcctggcccagcacaccctggccaacctgggctgggaggaaatcgacgtcgccgcgcaactgcagcgcggcgacgatatcgccagcgccttgcgcaagctgcgcgaaggcgatgccaacctgcgtgcgctgggcgaggcgatcgagcgcacgcgcggcgatctggaacaggccaagcgcacgttcgacggtgtgcgcgaggaacggatcgcgctgggggtcgagcgcacgcgtctggaaaagcagcgcctgcaatgcgccgacgccgatacccgtgtggtcacgccgctgcagcgcgaggggctggaggagcgcctggccaacctgggcgcgctcagcctggacaatctcgaagcgcattttcgccagatcggcaacgccatcgccgagcagaccagcgccagcgacagcgagcacaatcggctcgaacagttgctgctcggctgcttccgccggtatagccagcagtggcccgaagacagtggcgacttcatcatcagcctggccggcgccgaggattttctcgcccgcctgcagcgtctggaacgcgatggcctgccgcagcacgaagcacgctttttcgagctgttgcaaagccagagcaagaacaatctgctcgccttgcagcgccataccgccgaagcgcgcaaatcgattgcccaacgcctggacgaggtcaacgccagcctggagcaggtgccgttcaaccatggcaccttgctgaccatcgaactcagcgatcgccgtctgccggaggtgatcgacttccatcaacgtctgcgggatgtgctcggtcaccaccagaccgaacagcgcgacgtggccgaacagcaatttgcggtgctgcgcgaactggtgcgcaagctcggctcggccgatggcgatgacaagcgctggcgtgagctggtgctggatgtgcgtctgcatgtggagttcgtcggcgtcgaactggatgcggccacccgccagcaggtggagatctaccgcagcggcgccggcaagtccggcggccagcggcagaaactggcaaccacctgcctggccgccgcgctgcggtatcaacttggcggcgaagacggcgaactgccgcgctacgcggccgtggtgctggacgaagccttcgacaaggctgacaacgaattcaccgcgttggcgatgaacatcttcgaaaatttcggcttccagatggtggtggccacgccgctcaagtcggtgatgacgctggagccgtttatcggcggcgcctgctttgtcgaaatcagcggccgtcacgactctggcgtgttgctgatcgaatacgacgaacaggcacgccggctcaagttgcccgagcgctcgcgcagcgcggcggcggccgccggtgcggcgcgcgcgaccgagccgtccgccgatgctatcggcgcagcgagcgccgatggactgcactga

SEQ ID NO: 43151 - DNA, 1182 bp, Xanthomonas campestris pv. musacearum NCPPB 4379
atgaccgccgccgcgcccatgctgttgcctgaggccgcgctgcgggccttgcgcgggcagtggcagcgcgcacgcgggcagtggctgatcggcgagggcgcaccgcaagcgattgggttgcgggcgccgacccaggcacaggccatcgcgcggttcgatgccttcggtgcgtggttgcagcagtggagccgcaccggcttgccggggcgggtggagtatcgcgcggtgagctggacgcaattggggccgcaacgcctgccgcaggcctggatgctggacgatgcaagtcaggccgccgccgcgcttggcgagggcgagcgctgggcgcgtgcccgccaacgcagcgctgccttgcaggcgcgctggccgcaggcggtcgcgctggcggcgcggctacgccgtcaattcgatctgctggccgactggccggaggccgacttcgcgcgcttggtggcggtggtggagtggctgcaccagcaccgcgacagtgggctgttcctgcgccagcttcccattgccggcatcgacagcaaatggatcgaaccgcatcgcggcgtcattgccgactggctcgccgccctgcgcggcatcgccgagccgcgcagctttgccagcctgtccggcctgcgcagcgcgccggatcgggtgcgtttgcgattgctcgacccggccctgcgccaccacctcggcggcctggaggacatcaatgcaccgatcacgcagatcgccgcgctgcgtctgcctgcgcgccgcgtcctgatcgtggaaaaccgcgaaaccggcctggcctgcgaatcgctgccgggtacgctggtgctgatggcgcgcgggtacgccatcgaatacgtgagcagtatcgagtggctgcgcgggttgccgctgtactattggggcgacatcgacacccacggcctagcgatcctgcaccgcctgcgcacgcacgcgccgcacaccactgcggtgttgatggatgaggccaccctgcatgccaccccgcgcgcgttgtgggggcacgaacgcaggcagcaccgcgcccaacacctggacgcgctcagcatccaggagcagcgtctctatgcagacctgcgtggcggccggttcggtccgtcgccgcgcctggagcaggagcgtatcgcctgggactatgcctggccgcgcatccaggcggcattggccgactga

SEQ ID NO: 43152 - DNA, 1473 bp, Xanthomonas campestris pv. musacearum NCPPB 4380; identical to SEQ ID NO: 43145

SEQ ID NO: 43153 - DNA, 699 bp, Xanthomonas campestris pv. musacearum NCPPB 4380; identical to SEQ ID NO: 43146

SEQ ID NO: 43154 - DNA, 3435 bp, Xanthomonas campestris pv. musacearum NCPPB 4380; identical to SEQ ID NO: 43150

SEQ ID NO: 43155 - DNA, 1182 bp, Xanthomonas campestris pv. musacearum NCPPB 4380; identical to SEQ ID NO: 43151

SEQ ID NO: 43156 - DNA, 1473 bp, Xanthomonas campestris pv. musacearum NCPPB 4384; identical to SEQ ID NO: 43145

SEQ ID NO: 43157 - DNA, 699 bp, Xanthomonas campestris pv. musacearum NCPPB 4384; identical to SEQ ID NO: 43146

SEQ ID NO: 43158 - DNA, 3341 bp, Xanthomonas campestris pv. musacearum NCPPB 4384
atgaaatcttcttcctccagcctgtttgccgacgatctgcccgacccgcgcgtgcagcagttccgcatgcgccgcctgcaggtccacaactggggcacgttcaacggtctgaccgacgtgccgatcgccgcgaagggcttcttgttcgtcggccgctccggttcgggcaaatccacgctgctggatgccatgtctgctctgttgaccccgcccaatctggtcgacttcaatgccgccgcgcgcgaggccgagcgcagtggccgcgatcgcaacctggtgtcgtatgtgcgcggcgcctgggccgaccagcaggacagcgcctccggcgaaatcgccacgcaatatttgcgcaagggcagcacctggaccgcgctggtgctggaataccgcaacggcgagggacgggtgatcagcctgatacggctgttctggatcgccggcagcggtgcggcggcagccgatgtgcgcaagcattacatggtggccgagcgcagtttcgatatcgccagcgaactagtcggttttgatctggatctgcgcaagctgaaggcgcgcctgggcgacgacatcgcccacttcgacaatttctccggctatgccgagcgcttccgccatcagctgggcatcgccaacgagatggcgctacggctgctgcacaaaacccagtcggcgaagaatcttggcgatctcaatgtgtttctgcgcggcttcatgctcgaagcgcccaagaccttcgacgccagcgagcggctggtgggcgacttcgccgaactcgatggagcgcatcgggcggtggtcaccgcacggcggcaggtcgaaacgctgttgccggcgcgtgcgcattacgacgacttgcagtcggtgcagcgccagcgcggccgcttgcaggaactcaagctcggcctggacccctatcgcgagcaacgccggcttgcgttgctggatgcgcgactgcacgcactggacgtcaacgaccagggcctggccggcgaggagggccaacgccgcgctgcagtggataaccaccaacaacgcttgtccgatctggaggcccagcgccgcagccagggcggcgagcggatcgacgcgctggaacgcgagcagctccaggtccagggcgaacttgcacgccgcagcgacaaacgcgtcagggccgaacaggcctgccgccagctcgaccagagcctggccgacaacgcgcatggatttgccgagcagtccgcgcaggcgcgtgccgcgctcgaggacgggcagcggctggccgccgaacaggacgaggtgatcggcgagcgtatcgccggcaagcgcgaggacagccagcgctttgcgcaggtgcgcgccgagatcgaggcgctcacccgcaatccctccaacattgctgcgccgatgcaggccctgcgtgcacgcctgagcgaagaaaccggcattcccgaggccgcgctgccctttgtcggcgaactgatccaggtgcgtgagggagatgtcgcctggcgcggtgccatcgagcgcgtgctgcatggctttgcgcaatcgctgctggtggacgagcgccattacgccgagctggccgagtgggtcaaccgcacgcatctcggctcgcgcctggtctattaccgggtgcgcaacaacgaacaagcgtttgccggccgcgaacccggcagcgcctcgctgctgcacaagctgcagttgcgcgagcatccctttgctggctggctgcggcgcgaactgggcaagcgtttcgactacgactgcctggagagcgccaaggccttgcgcacggcagagcgcgcgatcacccgcgaaggccaggtcaagcatcccggcgaacgctacgaaaaagacgaccgtcatgcggtcggcgaccgtcggcgctggctgctgggcttcgacaaccgcgacaagttggcgctgtacgaacgcgaagccatcgaactggcgcaacgcatcgccgcctgcgatgccgacgtggccgcgctgcgtgcccgccgcgaacgcgatgccagccggcgcctggcccagcacaccctggccaacctgggctgggaggaaatcgacgtcgccgcgcaactgcagcgcggcgacgatatcgccagcgccttgcgcaagctgcgcgaaggcgatgccaacctgcgtgcgctgggcgaggcgatcgagcgcacgcgcggcgatctggaacaggccaagcgcacgttcgacggtgtgcgcgaggaacggatcgcgctgggggtcgagcgcacgcgtctggaaaagcagcgcctgcaatgcgccgacgccgatacccgtgtggtcacgccgctgcagcgcgaggggctggaggagcgcctggccaacctgggcgcgctcagcctggacaatctcgaagcgcattttcgccagatcggcaacgccatcgccgagcagaccagcgccagcgacagcgagcacaatcggctcgaacagttgctgctcggctgcttccgccggtatagccagcagtggcccgaagacagtggcgacttcatcatcagcctggccggcgccgaggattttctcgcccgcctgcagcgtctggaacgcgatggcctgccgcagcacgaagcacgctttttcgagctgttgcaaagccagagcaagaacaatctgctcgccttgcagcgccataccgccgaagcgcgcaaatcgattgcccaacgcctggacgaggtcaacgccagcctggagcaggtgccgttcaaccatggcaccttgctgaccatcgaactcagcgatcgccgtctgccggaggtgatcgacttccatcaacgtctgcgggatgtgctcggtcaccaccagaccgaacagcgcgacgtggccgaacagcaatttgcggtgctgcgcgaactggtgcgcaagctcggctcggccgatggcgatgacaagcgctggcgtgagctggtgctggatgtgcgtctgcatgtggagttcgtcggcgtcgaactggatgcggccacccgccagcaggtggagatctaccgcagcggcgccggcaagtccggcggccagcggcagaaactggcaaccacctgcctggccgccgcgctgcggtatcaacttggcggcgaagacggcgaactgccgcgctacgcggccgtggtgctggacgaagccttcgacaaggctgacaacgaattcaccgcgttggcgatgaacatcttcgaaaatttcggcttccagatggtggtggccacgccgctcaagtcggtgatgacgctggagccgtttatcggcggcgcctgctttgtcgaaatcagcggccgtcacgactctggcgtgttgctgatcgaatacgacgaacaggcacgccggctcaagttgcccgagcg

SEQ ID NO: 43159 - DNA, 1182 bp, Xanthomonas campestris pv. musacearum NCPPB 4384; identical to SEQ ID NO: 43151

SEQ ID NO: 43160 - DNA, 1473 bp, Xanthomonas campestris pv. musacearum NCPPB 4392
atgaaacaccgtgcccgcatcgcccgctatcgcgccctgcgcgagcagccgctgtggaaactgctggcggccgatcagtcgccggaagtgatcggcctgctgcagacgttgttgctcgacagcgagcgcggtttgcctgcggcggtcctgcatgaacgcctgcagcgcatgcttgacgatctcaatgtcgatcagctctcgcgcgagctgccgcgcactgcgcaggactatgtagcgcactggctggcgcagggctggctggaacggcgcctgcccgagggcgcgcagcaggagcagtacgagttgtctacccaggcgatgcaggcgattcgctttgccgatggtctggagcaggcgcgtggtgccgctaccgaaagccggcttgcgctggtgatgcagcagttgtcgcagttggccgcgttgaccgaaaccaatcccgatgcgcggctgtcggcgctgcgcgacgagcgtgatcgcatcgatgcggagatcgcgcgggtggctgccggcaaggtcgcctcgttggatggcaaacgcgcgctggaacgtgcgcggcaggtgatcgcgctggccgacgagctgaccgaggattttcgccgggtacgcgacgatttcgagcagctcaatcgccagttccgtgagcgcatcattgacgacgaaggcgagcgtggcgaggtgttgacgcggctgttcgagggcgtggacgtgatcggcgacagcgaggccggacgcagttttcaagcgttctgggcgctgctcaacgatgccgaacaaagcgcgcagctggatgcggcgctggagacggtgttggcgcgggcgttcgcacgcaagctcgatcgccgcgagcgcagcttcctgcgcggcttgaccggcaccatgctcgaacgcggcggtcaggtgcacgatgtgatgcagcatttcgcccgcagcctgcgcggcttcgtccaaagccgtggctatctggaacaacgccggctcaatcaattgctgaagcaggcgcaggccgaggcgttggggctgcgcgagcatctgcgtgcgcagcgctcggtcgggcacgacctcaacctgaccaccagccgcttacgctcgctgtcgcaatggcgtctgcacgatccgcgtcagacccaggtcgatagcagcatccagcgcaacgacgcagcggcgatctcgctggacagcgtcggcgatctggtcgcgcagtcggaaatcgacttccgtagcctgcgccgcgatctgtacgagctactgggcgaacacgcacagctgtcgatcgcgcaggtgctggcgcagcggcaggcagagcaggggctcggcagcgtgatcggccacctgtcgctgggcacgcggcatgggcaggtcgatgtacaacgcagcgagatcgcgcgttggcttggcggcgacggccagtggcgcggcgcacgtatcccgttagtctggttcagccaggagaaacgcaatgaattggcaggctga

SEQ ID NO: 43161 - DNA, 699 bp, Xanthomonas campestris pv. musacearum NCPPB 4392; identical to SEQ ID NO: 43146

SEQ ID NO: 43162 - DNA, 3386 bp, Xanthomonas campestris pv. musacearum NCPPB 4392
atgaaatcttcttcctccagcctgtttgccgacgatctgcccgacccgcgcgtgcagcagttccgcatgcgccgcctgcaggtccacaactggggcacgttcaacggtctgaccgacgtgccgatcgccgcgaagggcttcttgttcgtcggccgctccggttcgggcaaatccacgctgctggatgccatgtctgctctgttgaccccgcccaatctggtcgacttcaatgccgccgcgcgcgaggccgagcgcagtggccgcgatcgcaacctggtgtcgtatgtgcgcggcgcctgggccgaccagcaggacagcgcctccggcgaaatcgccacgcaatatttgcgcaagggcagcacctggaccgcgctggtgctggaataccgcaacggcgagggacgggtgatcagcctgatacggctgttctggatcgccggcagcggtgcggcggcagccgatgtgcgcaagcattacatggtggccgagcgcagtttcgatatcgccagcgaactagtcggttttgatctggatctgcgcaagctgaaggcgcgcctgggcgacgacatcgcccacttcgacaatttctccggctatgccgagcgcttccgccatcagctgggcatcgccaacgagatggcgctacggctgctgcacaaaacccagtcggcgaagaatcttggcgatctcaatgtgtttctgcgcggcttcatgctcgaagcgcccaagaccttcgacgccagcgagcggctggtgggcgacttcgccgaactcgatggagcgcatcgggcggtggtcaccgcacggcggcaggtcgaaacgctgttgccggcgcgtgcgcattacgacgacttgcagtcggtgcagcgccagcgcggccgcttgcaggaactcaagctcggcctggacccctatcgcgagcaacgccggcttgcgttgctggatgcgcgactgcacgcactggacgtcaacgaccagggcctggccggcgaggagggccaacgccgcgctgcagtggataaccaccaacaacgcttgtccgatctggaggcccagcgccgcagccagggcggcgagcggatcgacgcgctggaacgcgagcagctccaggtccagggcgaacttgcacgccgcagcgacaaacgcgtcagggccgaacaggcctgccgccagctcgaccagagcctggccgacaacgcgcatggatttgccgagcagtccgcgcaggcgcgtgccgcgctcgaggacgggcagcggctggccgccgaacaggacgaggtgatcggcgagcgtatcgccggcaagcgcgaggacagccagcgctttgcgcaggtgcgcgccgagatcgaggcgctcacccgcaatccctccaacattgctgcgccgatgcaggccctgcgtgcacgcctgagcgaagaaaccggcattcccgaggccgcgctgccctttgtcggcgaactgatccaggtgcgtgagggagatgtcgcctggcgcggtgccatcgagcgcgtgctgcatggctttgcgcaatcgctgctggtggacgagcgccattacgccgagctggccgagtgggtcaaccgcacgcatctcggctcgcgcctggtctattaccgggtgcgcaacaacgaacaagcgtttgccggccgcgaacccggcagcgcctcgctgctgcacaagctgcagttgcgcgagcatccctttgctggctggctgcggcgcgaactgggcaagcgtttcgactacgactgcctggagagcgccaaggccttgcgcacggcagagcgcgcgatcacccgcgaaggccaggtcaagcatcccggcgaacgctacgaaaaagacgaccgtcatgcggtcggcgaccgtcggcgctggctgctgggcttcgacaaccgcgacaagttggcgctgtacgaacgcgaagccatcgaactggcgcaacgcatcgccgcctgcgatgccgacgtggccgcgctgcgtgcccgccgcgaacgcgatgccagccggcgcctggcccagcacaccctggccaacctgggctgggaggaaatcgacgtcgccgcgcaactgcagcgcggcgacgatatcgccagcgccttgcgcaagctgcgcgaaggcgatgccaacctgcgtgcgctgggcgaggcgatcgagcgcacgcgcggcgatctggaacaggccaagcgcacgttcgacggtgtgcgcgaggaacggatcgcgctgggggtcgagcgcacgcgtctggaaaagcagcgcctgcaatgcgccgacgccgatacccgtgtggtcacgccgctgcagcgcgaggggctggaggagcgcctggccaacctgggcgcgctcagcctggacaatctcgaagcgcattttcgccagatcggcaacgccatcgccgagcagaccagcgccagcgacagcgagcacaatcggctcgaacagttgctgctcggctgcttccgccggtatagccagcagtggcccgaagacagtggcgacttcatcatcagcctggccggcgccgaggattttctcgcccgcctgcagcgtctggaacgcgatggcctgccgcagcacgaagcacgctttttcgagctgttgcaaagccagagcaagaacaatctgctcgccttgcagcgccataccgccgaagcgcgcaaatcgattgcccaacgcctggacgaggtcaacgccagcctggagcaggtgccgttcaaccatggcaccttgctgaccatcgaactcagcgatcgccgtctgccggaggtgatcgacttccatcaacgtctgcgggatgtgctcggtcaccaccagaccgaacagcgcgacgtggccgaacagcaatttgcggtgctgcgcgaactggtgcgcaagctcggctcggccgatggcgatgacaagcgctggcgtgagctggtgctggatgtgcgtctgcatgtggagttcgtcggcgtcgaactggatgcggccacccgccagcaggtggagatctaccgcagcggcgccggcaagtccggcggccagcggcagaaactggcaaccacctgcctggccgccgcgctgcggtatcaacttggcggcgaagacggcgaactgccgcgctacgcggccgtggtgctggacgaagccttcgacaaggctgacaacgaattcaccgcgttggcgatgaacatcttcgaaaatttcggcttccagatggtggtggccacgccgctcaagtcggtgatgacgctggagccgtttatcggcggcgcctgctttgtcgaaatcagcggccgtcacgactctggcgtgttgctgatcgaatacgacgaacaggcacgccggctcaagttgcccgagcgctcgcgcagcgcggcggcggccgccggtgcggcgcgcgcgaccga

SEQ ID NO: 43163 - DNA, 1473 bp, Xanthomonas campestris pv. musacearum NCPPB 4394; identical to SEQ ID NO: 43145

SEQ ID NO: 43164 - DNA, 699 bp, Xanthomonas campestris pv. musacearum NCPPB 4394; identical to SEQ ID NO: 43146

SEQ ID NO: 43165 - DNA, 3419 bp, Xanthomonas campestris pv. musacearum NCPPB 4394
atgaaatcttcttcctccagcctgtttgccgacgatctgcccgacccgcgcgtgcagcagttccgcatgcgccgcctgcaggtccacaactggggcacgttcaacggtctgaccgacgtgccgatcgccgcgaagggcttcttgttcgtcggccgctccggttcgggcaaatccacgctgctggatgccatgtctgctctgttgaccccgcccaatctggtcgacttcaatgccgccgcgcgcgaggccgagcgcagtggccgcgatcgcaacctggtgtcgtatgtgcgcggcgcctgggccgaccagcaggacagcgcctccggcgaaatcgccacgcaatatttgcgcaagggcagcacctggaccgcgctggtgctggaataccgcaacggcgagggacgggtgatcagcctgatacggctgttctggatcgccggcagcggtgcggcggcagccgatgtgcgcaagcattacatggtggccgagcgcagtttcgatatcgccagcgaactagtcggttttgatctggatctgcgcaagctgaaggcgcgcctgggcgacgacatcgcccacttcgacaatttctccggctatgccgagcgcttccgccatcagctgggcatcgccaacgagatggcgctacggctgctgcacaaaacccagtcggcgaagaatcttggcgatctcaatgtgtttctgcgcggcttcatgctcgaagcgcccaagaccttcgacgccagcgagcggctggtgggcgacttcgccgaactcgatggagcgcatcgggcggtggtcaccgcacggcggcaggtcgaaacgctgttgccggcgcgtgcgcattacgacgacttgcagtcggtgcagcgccagcgcggccgcttgcaggaactcaagctcggcctggacccctatcgcgagcaacgccggcttgcgttgctggatgcgcgactgcacgcactggacgtcaacgaccagggcctggccggcgaggagggccaacgccgcgctgcagtggataaccaccaacaacgcttgtccgatctggaggcccagcgccgcagccagggcggcgagcggatcgacgcgctggaacgcgagcagctccaggtccagggcgaacttgcacgccgcagcgacaaacgcgtcagggccgaacaggcctgccgccagctcgaccagagcctggccgacaacgcgcatggatttgccgagcagtccgcgcaggcgcgtgccgcgctcgaggacgggcagcggctggccgccgaacaggacgaggtgatcggcgagcgtatcgccggcaagcgcgaggacagccagcgctttgcgcaggtgcgcgccgagatcgaggcgctcacccgcaatccctccaacattgctgcgccgatgcaggccctgcgtgcacgcctgagcgaagaaaccggcattcccgaggccgcgctgccctttgtcggcgaactgatccaggtgcgtgagggagatgtcgcctggcgcggtgccatcgagcgcgtgctgcatggctttgcgcaatcgctgctggtggacgagcgccattacgccgagctggccgagtgggtcaaccgcacgcatctcggctcgcgcctggtctattaccgggtgcgcaacaacgaacaagcgtttgccggccgcgaacccggcagcgcctcgctgctgcacaagctgcagttgcgcgagcatccctttgctggctggctgcggcgcgaactgggcaagcgtttcgactacgactgcctggagagcgccaaggccttgcgcacggcagagcgcgcgatcacccgcgaaggccaggtcaagcatcccggcgaacgctacgaaaaagacgaccgtcatgcggtcggcgaccgtcggcgctggctgctgggcttcgacaaccgcgacaagttggcgctgtacgaacgcgaagccatcgaactggcgcaacgcatcgccgcctgcgatgccgacgtggccgcgctgcgtgcccgccgcgaacgcgatgccagccggcgcctggcccagcacaccctggccaacctgggctgggaggaaatcgacgtcgccgcgcaactgcagcgcggcgacgatatcgccagcgccttgcgcaagctgcgcgaaggcgatgccaacctgcgtgcgctgggcgaggcgatcgagcgcacgcgcggcgatctggaacaggccaagcgcacgttcgacggtgtgcgcgaggaacggatcgcgctgggggtcgagcgcacgcgtctggaaaagcagcgcctgcaatgcgccgacgccgatacccgtgtggtcacgccgctgcagcgcgaggggctggaggagcgcctggccaacctgggcgcgctcagcctggacaatctcgaagcgcattttcgccagatcggcaacgccatcgccgagcagaccagcgccagcgacagcgagcacaatcggctcgaacagttgctgctcggctgcttccgccggtatagccagcagtggcccgaagacagtggcgacttcatcatcagcctggccggcgccgaggattttctcgcccgcctgcagcgtctggaacgcgatggcctgccgcagcacgaagcacgctttttcgagctgttgcaaagccagagcaagaacaatctgctcgccttgcagcgccataccgccgaagcgcgcaaatcgattgcccaacgcctggacgaggtcaacgccagcctggagcaggtgccgttcaaccatggcaccttgctgaccatcgaactcagcgatcgccgtctgccggaggtgatcgacttccatcaacgtctgcgggatgtgctcggtcaccaccagaccgaacagcgcgacgtggccgaacagcaatttgcggtgctgcgcgaactggtgcgcaagctcggctcggccgatggcgatgacaagcgctggcgtgagctggtgctggatgtgcgtctgcatgtggagttcgtcggcgtcgaactggatgcggccacccgccagcaggtggagatctaccgcagcggcgccggcaagtccggcggccagcggcagaaactggcaaccacctgcctggccgccgcgctgcggtatcaacttggcggcgaagacggcgaactgccgcgctacgcggccgtggtgctggacgaagccttcgacaaggctgacaacgaattcaccgcgttggcgatgaacatcttcgaaaatttcggcttccagatggtggtggccacgccgctcaagtcggtgatgacgctggagccgtttatcggcggcgcctgctttgtcgaaatcagcggccgtcacgactctggcgtgttgctgatcgaatacgacgaacaggcacgccggctcaagttgcccgagcgctcgcgcagcgcggcggcggccgccggtgcggcgcgcgcgaccgagccgtccgccgatgctatcggcgcagcgagcgc

SEQ ID NO: 43166 - DNA, 1182 bp, Xanthomonas campestris pv. musacearum NCPPB 4394; identical to SEQ ID NO: 43151

SEQ ID NO: 43167 - DNA, 1470 bp, Xanthomonas vasicola pv. vasculorum NCPPB 1326
atgaaacatcaggcacgtatcgcaggctaccggcaactgcgcgagcagccggtgtggaaactgcttgccgccgaccacgcacccgagttgatcggcctgctgcagacggtgctgatggatggcgaacgccgcctgccttcggccgtattgcacgcgcgtttgcagcgccagctggatgccttgcgcgccgacgagctgtcgcgcgaactgccgcgcaccgcgcaggcgtatctggcgcattggttggctcagggctggctggaacgccgcctgcccgaaggcgccaccgaagaagaatacgaactctcgcgtgccgcgacccaggccattcgcttcatcgtgggcttgcgcgaaagcagcagcagcgctaccgaaagccgcctgtcgctggtgatccagcaactggtgcagctggccggccagaccgaagccgatccggaagtgcgcctggccgccttgcgcgacgaacgtgcccgcatcgatgccgaaatcgaacgcgtggcctccggccgcgtggcggcattggatggcaagcgcgcgctggaacgtgcccgcgatctgattcatctctccgacgagctggcccaagatttccatcgcgtgcgcgacgacttcgagcagctcaatcgccagttccgcgagcgcatcatcgacgacgaaggtgcgcgcggcgatgtgctcgaacaactgttcaacggcgtggatgtgatcgccgacagcgaggccggtcgcaccttcgaggcgttctggagcctgctcaacgacacccagcaaagcagtcaactcgatcaagccctggacgcactgctcgcacgcgggtttgcgcgcaagctcgatcgccgcgaacgcgcgtttctgcgcgggctcaccggcacgctgctggagcgcggcggcgaggtgcacatggtgatgcagcacttcgcgcgcagcctgcgcggctttgtgcagagccgtggttatctggagcagcgtcggctcaatcaattgctcaagcaggcgcagggcgaagccttgcaactgcgcgacagcctgcatgccaccaccgccaccggctacacgcaggcgctcagtggcagccgcctgcgctcgttgtcgcaatggcggttgcacgacccgcggctcacccaggtggacggacgtgtgcaggcggccgatgcggccgagatctcgctggacagcgtgggcgatctggtcgcgcaatcggagatcgacgtgcgcagcctgcgccgcgacctgcatgcgctgcttggtcaacgcccgcggttgaccatcggcgatgcgctacagcagcgcccggcgatccaggggctgggcagcgtgatcggatacctgtcgctgggcacgcgccacggcatggtgatcgaaggacagatggaaacggtgcaatgggaaggcagcgacggcgccgtgcggcgcgcgcgcattcccttggtgtggtttacccgggagaaacgcaatgaactggtctga

SEQ ID NO: 43168 - DNA, 705 bp, Xanthomonas vasicola pv. vasculorum NCPPB 1326
atgaactggtctgagcagctgccgtccgacagatacgaggacgacgaggacgcagccgacagcaccccaccgctgcgcgcaagcgatgcggccggcgatccaccaggcggtgcgctgttcctgggcgacaccggcacgctgccgttcgacgcgcggcgcgcgctgtgccagttgctggcagggcccagcatcgatgcgcaacgtcacggcacgctctggccggcgttgctccgcaacgaggtggcgatccgtcagttgttgtgcgagctgtttctggagttggtgctcgaccgcgagggcggggtggctttcacccgccaggccgacaccgccgaactggaatcgcccaccttgctgcgtagcgcgccgctgacctttatcgaatccgtgttgctgctgttcctgcgccaacaactggccgaggccgatacgcgcggtgagcgcgcagtggtggacgaagcgcagctggtggaagccttgtcggtgtacgaaaagaacgtgtccaccgatcgggcgggcttcgcgcggcgggtgatgacggcgatcggcaagatgcgcgacaaccagctgctgtcgcgcttgcgcggcagcgaagagcgctacgaagtctcgccggtgctgaagttgttgttctctgcagaggatgtgcaggcgttggtggtggcctatcgtggtttgcgggaaggggatgtggctctcgagtaa

SEQ ID NO: 43169 - DNA, 4017 bp, Xanthomonas vasicola pv. vasculorum NCPPB 1326
atgacttcgcagcccaatctttcgccagtgcagccgggtacgtccttgtttgccgagacgcttgccgagcagcgtgcgcagcagttccggatgcggcgcctgcaggtgcacaactggggcaccttcaacgggctgaccgaagtgccgatcgcggagaaaggcttcctgttcgtcggccgctcgggttcgggcaaatcgaccttgctggatgcgatgtcggccttgctgacgccaccgagcatcgtcgatttcaacgccgccgcgcgcgaggccgaacgcagcgggcgcgatcgcagtctggtgtcgtatgtacgcggcgcctgggccgatcagcaggacagcacgtctggcgaaatcgccacgcaatacctgcgcaagggtgccacctggaccgcattggtgctggaatacgccaacgcgcacggcgaggcggtgagcctgatccgcctgttctggatcgccggcagcggcaacgcggcagccgatgtgcgacggcattacatggtggcgccgcgcagcttcgacgtggcgaccgagctggacggcttcgatctggacctgcgcaagctcaaggcgcggctgggccaggagatcgcgcatttcgatggcttcgccggctatgccgaacgtttccggcatgcgctgggcatcggcaacgagatggcgctgcggttgctgcacaagacccagtcggccaagaatctgggcgatctcaatgcgttcctgcgcggcttcatgctggacgagccgcgcaccttcgaagcggccgatcggttggtggaggattttgccgaactcgatggcgcgcaccacgcggtggtcaccgcgcgccgccaggtagaaacgctgacgcctgcgcgcgagcaccatgcggcgttgatggcattgcgccacagcgttggcgagttgcgcgagctgcagttgggcgtggacagctatcgcgaacagcagcggcttgccttgctggaggagcggctgcaggagctggacaaccaggaccgcggccttgccggcgaagaaggccagcgccgcgaatcgctggataactacgaacaaaaactggtcggcctggagcgcgagcagcgcgccgccgggggcgagcagatcgaagagctggagcgtgagcgtgcgcgtgtggaacgcgagcgcgacgaacgcctgcgccgccgtgcgcagatcgagcaggcttgtcgtcagcttggtaccgcgttagctgccggtgccagcggctttgctgcgcagatcgcacatgcgcaaaccgtgctggataacggcaagcacgacgccagcgcactggatgacgccattgccgagcgcatgggtgcgcgccgcgatgacgaacgccgctttgccgagatccgcgccgaactggatgtgctgaaacgcgcgccgtcgagcatgccggccccgatgcaggccctgcgcgcgcggctgtgcgaagacatcggcattgccgaagccgcgctgccgttcgttggcgagttggtgcgagtgcgcgatgaccagatggcctggcgcggtgcgatcgagcgcgtactgaacggctttgcgcaatcgctgctggtggatgagcggcattacgcgcaggtcagcgaatgggtcaaccgcacccacatcggcacgcgcctggtgtacttccgtgtgcgccgtaacgacgatttgcacgcgcggcgcgtcgatcccgatgcgctgcctggcaagctccaattgcgcgagcacgcctttaccgactggttgcgcaacgaactcacccgtcgcttcgactacgcctgcgtggacaacgcaaacgcgctgcgcaacgccgaccgcgcgatcacccgcgaagggcaggtcaagcatcccggcgatcgctatgaaaaggacgaccgccacgcggtcaacgaccgcaagcgctggctgctcggtcacgacaaccgcgacaagctcaaggtgttcgagcgcgaagcgcaggcgctggcccagcaaatcgccagctgcgatgccgatgtggcagcgctgcgcaagcagcgcgagcaggaccaggaacgccaactcgctgcgcataccctggtggagcgcgactgggacgagatcgacgtcggccccaagctacagcggctgagcgatatcgatgagcagttggtgcagctgcgcgaaggcaacagcggcttgcgcgcgctcggtcaggcgatcgacaccgcacgcaccttgcgcgaccaggccaagcgcacttacgacgatgtgcggctggaacgcgcgcaactggcgcgcgagcgtgtgcggctcgaacagcagcacgcagcgtgtgctggccgcgccggtaccgccacgctcacccccacgcagttgcagggtttgcgggaacggcttgctgcattgacgccgttgtcgctggacaacctggaagcacacttccgtgtggtcgagcgtggcctggccgagcagcttgccgaaagccagggccgcgacagccggctcagcacgcagttgctggaatgcttccgccggtattgccagcagtggcctgaagacagcggtgacttcgccgtgagtctggccagcgccgacgatttcctcgcgcgcctggaccgactggaaagcgatggcctgccgcgccacgagcatcgcttcttcgacctgttgcagacccagagcaagaacaatctgctggccttgcaacgccacactgccgaggcccacaagggcatcaagcagcgcatggacgaggtcaacgccagcctggagcaggtgccgttcaatcgtgacaccgtgctgaccatcgaagtcagcgaccgccgcctggccgaggtgcaggaattccagcagcagttgcgcgcggtgctgtcgcatcaacagaccgaagaccgcgctttggccgaagcgcagttttccaccttgcgcgcgctggtggcgcgcctgggtgcacaggaaccggaggcacgccgctggcgcgaacaggtgctggatgtgcgcctgcatgtggaattcatcggtgtggaactggatgcgcaaacccgcgcgcaggtggagatctaccgcagcggcgccggcaagtccggcggtcagcggcagaagctggcaaccacctgccttgcagcggcgctgcgttatcagctcggtggtgaagacggcgaattgccgcgttactgcgcggtggtgctggacgaagccttcgacaaggccgataacgaattcaccgcgctggcgatgaatatcttcgaaaatttcggtttccagatggtggtggccacgccgttgaagtcggtgatgacgctggagcccttcatcggcggtgcgtgctttgtcgaaatcagcggtcgccacaactccggcgtgctgttgatcgaatacgacgagcaggcgcagcgcttgaagttgcccgagcgctcgcgtggcgatgaggcagcggtggccgatgccactgacgccgcgccatcgatcaaggctgcgatcgagcctgaagaagtgcagggtgctgcagccgcagatggcattgcagcggacgaccttccaatgcacgcggcatcgcctgtgccgggccacgcaacgcctgcggtagagaacaagcgcagtggcaagcgtgttcccgcagtggcgacgacgaacaagcagaacaaaaacgagcagaacaagaaggccaggaccgcatcttccacgcgcgcggtggcacagcctcgagcaacccagccgaaaaaatcgcccgtgcgcacatcggctgtgactggcaagccggcatcggacaaacgcacatcaggcgcgcagcaagcgcctgcggtgtcgtcaggagctgcgtccaaatccaacgtgggcaagaccacgcgctcttcaaaaacccaaggtaagccgatgacggcgacgcgcgcttccaacgccacatccaagaaggccgccgccaagccgcgtgcatcaaccgcgtcgacggggcagccagcacgtggcgccggcaagacaacctcggcacgcgcggcggtgaaaccgtcgccaactaaaaagcgcggtgcgaaggcaggtactgtccagccgcgcggcaagcgctga

SEQ ID NO: 43170 - DNA, 1470 bp, Xanthomonas vasicola pv. vasculorum NCPPB 1381; identical to SEQ ID NO: 43167

SEQ ID NO: 43171 - DNA, 705 bp, Xanthomonas vasicola pv. vasculorum NCPPB 1381; identical to SEQ ID NO: 43168

SEQ ID NO: 43172 - DNA, 4017 bp, Xanthomonas vasicola pv. vasculorum NCPPB 1381
atgacttcgcagcccaatctttcgccagtgcagccgggtacgtccttgtttgccgagacgcttgccgagcagcgtgcgcagcagttccggatgcggcgcctgcaggtgcacaactggggcaccttcaacgggctgaccgaagtgccgatcgcggagaaaggcttcctgttcgtcggccgctcgggttcgggcaaatcgaccttgctggatgcgatgtcggccttgctgacgccaccgagcatcgtcgatttcaacgccgccgcgcgcgaggccgaacgcagcgggcgcgatcgcagtctggtgtcgtatgtacgcggcgcctgggccgatcagcaggacagcacgtctggcgaaatcgccacgcaatacctgcgcaagggtgccacctggaccgcattggtgctggaatacgccaacgcgcacggcgaggcggtgagcctgatccgcctgttctggatcgccggcagcggcaacgcggcagccgatgtgcgacggcattacatggtggcgccgcgcagcttcgacgtggcgaccgagctggacggcttcgatctggacctgcgcaagctcaaggcgcggctgggccaggagatcgcgcatttcgatggcttcgccggctatgccgaacgtttccggcatgcgctgggcatcggcaacgagatggcgctgcggttgctgcacaagacccagtcggccaagaatctgggcgatctcaatgcgttcctgcgcggcttcatgctggacgagccgcgcaccttcgaagcggccgatcggttggtggaggattttgccgaactcgatggcgcgcaccacgcggtggtcaccgcgcgccgccaggtagaaacgctgacgcctgcgcgcgagcaccatgcggcgttgatggcattgcgccacagcgttggcgagttgcgcgagctgcagttgggcgtggacagctatcgcgaacagcagcggcttgccttgctggaggagcggctgcaggagctggacaaccaggaccgcggccttgccggcgaagaaggccagcgccgcgaatcgctggataactacgaacaaaaactggtcggcctggagcgcgagcagcgcgccgccgggggcgagcagatcgaagagctggagcgtgagcgtgcgcgtgtggaacgcgagcgcgacgaacgcctgcgccgccgtgcgcagatcgagcaggcttgtcgtcagcttggtaccgcgttagctgccggtgccagcggctttgctgcgcagatcgcacatgcgcaaaccgtgctggataacggcaagcacgacgccagcgcactggatgacgccattgccgagcgcatgggtgcgcgccgcgatgacgaacgccgctttgccgagatccgcgccgaactggatgtgctgaaacgcgcgccgtcgagcatgccggccccgatgcaggccctgcgcgcgcggctgtgcgaagacatcggcattgccgaagccgcgctgccgttcgttggcgagttggtgcgagtgcgcgatgaccagatggcctggcgcggtgcgatcgagcgcgtactgaacggctttgcgcaatcgctgctggtggatgagcggcattacgcgcaggtcagcgaatgggtcaaccgcacccacatcggcacgcgcctggtgtacttccgtgtgcgccgtaacgacgatttgcacgcgcggcgcgtcgatcccgatgcgctgcctggcaagctccaattgcgcgagcacgcctttaccgactggttgcgcaacgaactcacccgtcgcttcgactacgcctgcgtggacaacgcaaacgcgctgcgcaacgccgaccgcgcgatcacccgcgaagggcaggtcaagcatcccggcgatcgctatgaaaaggacgaccgccacgcggtcaacgaccgcaagcgctggctgctcggtcacgacaaccgcgacaagctcaaggtgttcgagcgcgaagcgcaggcgctggcccagcaaatcgccagctgcgatgccgatgtggcagcgctgcgcaagcagcgcgagcaggaccaggaacgccaactcgctgcgcataccctggtggagcgcgactgggacgagatcgacgtcggccccaagctacagcggctgagcgatatcgatgagcagttggtgcagctgcgcgaaggcaacagcggcttgcgcgcgctcggtcaggcgatcgacaccgcacgcaccttgcgcgaccaggccaagcgcacttacgacgatgtgcggctggaacgcgcgcaactggcgcgcgagcgtgtgcggctcgaacagcagcacgcagcgtgtgctggccgcgccggtaccgccacgctcacccccacgcagttgcagggtttgcgggaacggcttgctgcattgacgccgttgtcgctggacaacctggaagcacacttccgtgtggtcgagcgtggcctggccgagcagcttgccgaaagccagggccgcgacagccggctcagcacgcagttgctggaatgcttccgccggtattgccagcagtggcctgaagacagcggtgacttcaccgtgagtctggccagcgccgacgatttcctcgcgcgcctggaccgactggaaagcgatggcctgccgcgccacgagcatcgcttcttcgacctgttgcagacccagagcaagaacaatctgctggccttgcaacgccacactgccgaggcccacaagggcatcaagcagcgcatggacgaggtcaacgccagcctggagcaggtgccgttcaatcgtgacaccgtgctgaccatcgaagtcagcgaccgccgcctggccgaggtgcaggaattccagcagcagttgcgcgcggtgctgtcgcatcaacagaccgaagaccgcgctttggccgaagcgcagttttccaccttgcgcgcgctggtggcgcgcctgggtgcacaggaaccggaggcacgccgctggcgcgaacaggtgctggatgtgcgcctgcatgtggaattcatcggtgtggaactggatgcgcaaacccgcgcgcaggtggagatctaccgcagcggcgccggcaagtccggcggtcagcggcagaagctggcaaccacctgccttgcagcggcgctgcgttatcagctcggtggtgaagacggcgaattgccgcgttactgcgcggtggtgctggacgaagccttcgacaaggccgataacgaattcaccgcgctggcgatgaatatcttcgaaaatttcggtttccagatggtggtggccacgccgttgaagtcggtgatgacgctggagcccttcatcggcggtgcgtgctttgtcgaaatcagcggtcgccacaactccggcgtgctgttgatcgaatacgacgagcaggcgcagcgcttgaagttgcccgagcgctcgcgtggcgatgaggcagcggtggccgatgccactgacgccgcgccatcgatcaaggctgcgatcgagcctgaagaagtgcagggtgctgcagccgcagatggcattgcagcggacgaccttccaatgcacgcggcatcgcctgtgccgggccacgcaacgcctgcggtagagaacaagcgcagtggcaagcgtgttcccgcagtggcgacgacgaacaagcagaacaaaaacgagcagaacaagaaggccaggaccgcatcttccacgcgcgcggtggcacagcctcgagcaacccagccgaaaaaatcgcccgtgcgcacatcggctgtgactggcaagccggcatcggacaaacgcacatcaggcgcgcagcaagcgcctgcggtgtcgtcaggagctgcgtccaaatccaacgtgggcaagaccacgcgctcttcaaaaacccaaggtaagccgatgacggcgacgcgcgcttccaacgccacatccaagaaggccgccgccaagccgcgtgcatcaaccgcgtcgacggggcagccagcacgtggcgccggcaagacaacctcggcacgcgcggcggtgaaaccgtcgccaactaaaaagcgcggtgcgaaggcaggtactgtccagccgcgcggcaagcgctga

SEQ ID NO: 43173 - DNA, 1470 bp, Xanthomonas vasicola pv. vasculorum NCPPB 206
atgaaacatcaggcacgtatcgcaggctaccggcaactgcgcgagcagccggtgtggaaactgcttgccgccgaccacgcacccgagttgatcggcctgctgcagacggtgctgatggatggcgaacgccgcctgccttcggccgtattgcacgcgcgtttgcagcgccagctggatgccttgcgcgccgacgagctgtcgcgcgaactgccgcgcaccgcgcaggcgtatctgacgcattggttggctcagggctggctggaacgccgcctgcccgaaggcgccaccgaagaagaatacgaactctcgcgtgccgcgacccaggccattcgcttcatcgtgggcttgcgcgaaagcagcagcagcgctaccgaaagccgcctgtcgctggtgatccagcaactggtgcagctggccggccagaccgaagccgatccggaagtgcgcctggccgccttgcgcgacgaacgtgcccgcatcgatgccgaaatcgaacgcgtggcctccggccgcgtggcggcattggatggcaagcgcgcgctggaacgtgcccgcgatctgattcatctctccgacgagctggcccaagatttccatcgcgtgcgcgacgacttcgagcagctcaatcgccagttccgcgagcgcatcatcgacgacgaaggtgcgcgcggcgatgtgctcgaacaactgttcaacggcgtggatgtgatcgccgacagcgaggccggtcgcaccttcgaggcgttctggagcctgctcaacgacacccagcaaagcagtcaactcgatcaagccctggacgcactgctcgcacgcgggtttgcgcgcaagctcgatcgccgcgaacgcgcgtttctgcgcgggctcaccggcacgctgctggagcgcggcggcgaggtgcacatggtgatgcagcacttcgcgcgcagcctgcgcggctttgtgcagagccgtggttatctggagcagcgtcggctcaatcaattgctcaagcaggcgcagggcgaagccttgcaactgcgcgacagcctgcatgccaccaccgccaccggctacacgcaggcgctcagtggcagccgcctgcgctcgttgtcgcaatggcggttgcacgacccgcggctcacccaggtggacggacgtgtgcaggcggccgatgcggccgagatctcgctggacagcgtgggcgatctggtcgcgcaatcggagatcgacgtgcgcagcctgcgccgcgacctgcatgcgctgcttggtcaacgcccgcggttgaccatcggcgatgcgctacagcagcgcccggcgatccaggggctgggcagcgtgatcggatacctgtcgctgggcacgcgccacggcatggtgatcgaaggacagatggaaacggtgcaatgggaaggcagcgacggcgccgtgcggcgcgcgcgcattcccttggtgtggtttacccgggagaaacgcaatgaactggtctga

SEQ ID NO: 43174 - DNA, 705 bp, Xanthomonas vasicola pv. vasculorum NCPPB 206; identical to SEQ ID NO: 43168

SEQ ID NO: 43175 - DNA, 4017 bp, Xanthomonas vasicola pv. vasculorum NCPPB 206; identical to SEQ ID NO: 43172

SEQ ID NO: 43176 - DNA, 1470 bp, Xanthomonas vasicola pv. vasculorum NCPPB 890; identical to SEQ ID NO: 43167

SEQ ID NO: 43177 - DNA, 705 bp, Xanthomonas vasicola pv. vasculorum NCPPB 890; identical to SEQ ID NO: 43168

SEQ ID NO: 43178 - DNA, 685 bp, Xanthomonas vasicola pv. vasculorum NCPPB 890
atgacttcgcagcccaatctttcgccagtgcagccgggtacgtccttgtttgccgagacgcttgccgagcagcgtgcgcagcagttccggatgcggcgcctgcaggtgcacaactggggcaccttcaacgggctgaccgaagtgccgatcgcggagaaaggcttcctgttcgtcggccgctcgggttcgggcaaatcgaccttgctggatgcgatgtcggccttgctgacgccaccgagcatcgtcgatttcaacgccgccgcgcgcgaggccgaacgcagcgggcgcgatcgcagtctggtgtcgtatgtacgcggcgcctgggccgatcagcaggacagcacgtctggcgaaatcgccacgcaatacctgcgcaagggtgccacctggaccgcattggtgctggaatacgccaacgcgcacggcgaggcggtgagcctgatccgcctgttctggatcgccggcagcggcaacgcggcagccgatgtgcgacggcattacatggtggcgccgcgcagcttcgacgtggcgaccgagctggacggcttcgatctggacctgcgcaagctcaaggcgcggctgggccaggagatcgcgcatttcgatggcttcgccggctatgccgaacgtttccggcatgcgctgggcatcggcaacgagatggcgctgcggttgctgcacaaga

SEQ ID NO: 43179 - DNA, 1470 bp, Xanthomonas vasicola pv. vasculorum NCPPB 895; identical to SEQ ID NO: 43167

SEQ ID NO: 43180 - DNA, 705 bp, Xanthomonas vasicola pv. vasculorum NCPPB 895; identical to SEQ ID NO: 43168

SEQ ID NO: 43181 - DNA, 4017 bp, Xanthomonas vasicola pv. vasculorum NCPPB 895
atgacttcgcagcccaatctttcgccagtgcagccgggtacgtccttgtttgccgagacgcttgccgagcagcgtgcgcagcagttccggatgcggcgcctgcaggtgcacaactggggcaccttcaacgggctgaccgaagtgccgatcgcggagaaaggcttcctgttcgtcggccgctcgggttcgggcaaatcgaccttgctggatgcgatgtcggccttgctgacgccaccgagcatcgtcgatttcaacgccgccgcgcgcgaggccgaacgcagcgggcgcgatcgcagtctggtgtcgtatgtacgcggcgcctgggccgatcagcaggacagcacgtctggcgaaatcgccacgcaatacctgcgcaagggtgccacctggaccgcattggtgctggaatacgccaacgcgcacggcgaggcggtgagcctgatccgcttgttctggatcgccggcagcggcaacgcggcagccgatgtgcgacggcattacatggtggcgccgcgcagcttcgacgtggcgaccgagctggacggcttcgatctggacctgcgcaagctcaaggcgcggctgggccaggagatcgcgcatttcgatggcttcgccggctatgccgaacgtttccggcatgcgctgggcatcggcaacgagatggcgctgcggttgctgcacaagacccagtcggccaagaatctgggcgatctcaatgcgttcctgcgcggcttcatgctggacgagccgcgcaccttcgaagcggccgatcggttggtggaggattttgccgaactcgatggcgcgcaccacgcggtggtcaccgcgcgccgccaggtagaaacgctgacgcctgcgcgcgagcaccatgcggcgttgatggcattgcgccacagcgttggcgagttgcgcgagctgcagttgggcgtggacagctatcgcgaacagcagcggcttgccttgctggaggagcggctgcaggagctggacaaccaggaccgcggccttgccggcgaagaaggccagcgccgcgaatcgctggataactacgaacaaaaactggtcggcctggagcgcgagcagcgcgccgccgggggcgagcagatcgaagagctggagcgtgagcgtgcgcgtgtggaacgcgagcgcgacgaacgcctgcgccgccgtgcgcagatcgagcaggcttgtcgtcagcttggtaccgcgttagctgccggtgccagcggctttgctgcgcagatcgcacatgcgcaaaccgtgctggataacggcaagcacgacgccagcgcactggatgacgccattgccgagcgcatgggtgcgcgccgcgatgacgaacgccgctttgccgagatccgcgccgaactggatgtgctgaaacgcgcgccgtcgagcatgccggccccgatgcaggccctgcgcgcgcggctgtgcgaagacatcggcattgccgaagccgcgctgccgttcgttggcgagttggtgcgagtgcgcgatgaccagatggcctggcgcggtgcgatcgagcgcgtactgaacggctttgcgcaatcgctgctggtggatgagcggcattacgcgcaggtcagcgaatgggtcaaccgcacccacatcggcacgcgcctggtgtacttccgtgtgcgccgtaacgacgatttgcacgcgcggcgcgtcgatcccgatgcgctgcctggcaagctccaattgcgcgagcacgcctttaccgactggttgcgcaacgaactcacccgtcgcttcgactacgcctgcgtggacaacgcaaacgcgctgcgcaacgccgaccgcgcgatcacccgcgaagggcaggtcaagcatcccggcgaccgctatgaaaaggacgaccgccacgcggtcaacgaccgcaagcgctggctgctcggtcacgacaaccgcgacaagctcaaggtgttcgagcgcgaagcgcaggcgctggcccagcaaatcgccagctgcgatgccgatgtggcagcgctgcgcaagcagcgcgagcaggaccaggaacgccaactcgctgcgcataccctggtggagcgcgactgggacgagatcgacgtcggccccaagctacagcggctgagcgatatcgatgagcagttggtgcagctgcgcgaaggcaacagcggcttgcgcgcgctcggtcaggcgatcgacaccgcacgcaccttgcgcgaccaggccaagcgcacttacgacgatgtgcggctggaacgcgcgcaactggcgcgcgagcgtgtgcggctcgaacagcagcacgcagcgtgtgctggccgcgccggtaccgccacgctcacccccacgcagttgcagggtttgcgggaacggcttgctgcattgacgccgttgtcgctggacaacctggaagcacacttccgtgtggtcgagcgtggcctggccgagcagcttgccgaaagccagggccgcgacagccggctcagcacgcagttgctggaatgcttccgccggtattgccagcagtggcctgaagacagcggtgacttcaccgtgagtctggccagcgccgacgatttcctcgcgcgcctggaccgactggaaagcgatggcctgccgcgccacgagcatcgcttcttcgacctgttgcagacccagagcaagaacaatctgctggccttgcaacgccacactgccgaggcccacaagggcatcaagcagcgcatggacgaggtcaacgccagcctggagcaggtgccgttcaatcgtgacaccgtgctgaccatcgaagtcagcgaccgccgcctggccgaggtgcaggaattccagcagcagttgcgcgcggtgctgtcgcatcaacagaccgaagaccgcgctttggccgaagcgcagttttccaccttgcgcgcgctggtggcgcgcctgggtgcacaggaaccggaggcacgccgctggcgcgaacaggtgctggatgtgcgcctgcatgtggaattcatcggtgtggaactggatgcgcaaacccgcgcgcaggtggagatctaccgcagcggcgccggcaagtccggcggtcagcggcagaagctggcaaccacctgccttgcagcggcgctgcgttatcagctcggtggtgaagacggcgaattgccgcgttactgcgcggtggtgctggacgaagccttcgacaaggccgataacgaattcaccgcgctggcgatgaatatcttcgaaaatttcggtttccagatggtggtggccacgccgttgaagtcggtgatgacgctggagcccttcatcggcggtgcgtgctttgtcgaaatcagcggtcgccacaactccggcgtgctgttgatcgaatacgacgagcaggcgcagcgcttgaagttgcccgagcgctcgcgtggcgatgaggcagcggtggccgatgccactgacgccgcgccatcgatcaaggctgcgatcgagcctgaagaagtgcagggtgctgcagccgcagatggcattgcagcggacgaccttccaatgcacgcggcatcgcctgtgccgggccacgcaacgcctgcggtagagaacaagcgcagtggcaagcgtgttcccgcagtggcgacgacgaacaagcagaacaaaaacgagcagaacaagaaggccaggaccgcatcttccacgcgcgcggtggcacagcctcgagcaacccagccgaaaaaatcgcccgtgcgcacatcggctgtgactggcaagccggcatcggacaaacgcacatcaggcgcgcagcaagcgcctgcggtgtcgtcaggagctgcgtccaaatccaacgtgggcaagaccacgcgctcttcaaaaacccaaggtaagccgatgacggcgacgcgcgcttccaacgccacatccaagaaggccgccgccaagccgcgtgcatcaaccgcgtcgacggggcagccagcacgtggcgccggcaagacaacctcggcacgcgcggcggtgaaaccgtcgccaactaaaaagcgcggtgcgaaggcaggtactgtccagccgcgcggcaagcgctga

SEQ ID NO: 43182 - DNA, 1479 bp, Alishewanella aestuarii B11
ttgagtggggacaaaggattgaacttcctaggtttgcaagccaaataccggcggttatttgatgagagcgcagcttggcggatgttaagggccgataatgcaccttatatccttgcgttcatcgcggaactcttttcagaagaaagcgaagttccttacggccgagcacgcatcttgctggatgctgagattgaacgaagcagagagctcggaatttggcaaacggagtcttcggccgccacctatttaaatcaatggattaagtatggctggttacgagaaatggatgattctcttactaaaactgacgccagtgaaatagcgttgagattctgtaaaggacttgatgaacgccattccggcacaactgcttcacatttgcgtattgtacaagaagccgttcgcgacttggcggttgcaattagtcctaacgttgatgaaaaagtaactctgcttgaaagtaaaaaggcagagatccaacgagaaattgagtcgcttcaagcgggggtagtcccggttttaagtgagtctgagcaaagagagcgaattcgtcagatttatcaattggcttcagtactgactggtgattttcgtcgtgttgaggacgagatcaggattcttgataaagaactcagaattcagattattgagggtgatatctctcgtggagatgtgctgctttcagtcatggaaagagaagcattgctttctactacagaagcaggaagtgcatttgaaggcttttatcagctgctgtgtgatcaaaaccgcgcaatggaatttcgtgagcagctccgtagtattttgagtcgaccgataggtcagcaattatcaagtagccagcatcaatttcttagccacctaatgcgtgagttgagccgagaaagcgaaagagtgtttcgtgtcaggcggcgtagtgaagagggcctgcgttcatatattgaaagcggcgctgctgcagaaaatcaggcggttgatagattgttgtcaaagctagagagacaagctcttttgctccgtgatggagatttggatttgatgacagaaacggaactgagtcttcctgttggtcctattgagattaaatctcctgaatcaatgagattaagaagcccggatgacaagctcgatacatcgggcgttgaagaaaatgctaataaaagagaacccagtactagcatgcttaattgccttgatgctgttcaagtaagacaagtggctaataaggttcttaacgctctgaaaaaacatggcccgatgtcgattgccaggctggctgaggaaaacccattgaagtcaggtctggaggagcttgtcgcgtatttgcgagtagcaaaagcggtgaatgcgaccatgttagatgaaaaagaggaagtaatcttagttgataagcaaggtgtcaagctgaaggcttttatacctacctatctattaactgccgaactatttccaaaagatatcgatgaacttgccctttag

SEQ ID NO: 43183 - DNA, 867 bp, Alishewanella aestuarii B11
atgacgaatgcaatgccacccaatagcttcttttcgatggtaacaggtaaatccgataaagagttacatgctgacgttaatgaagttaaaagcggaggaacggatgcagcaccccatgatttagatgattcattcctaaaagttccgaatcgacacatcgaagacctaacattgcaaagtgacgaatctggactaataacggagagccataaatcaagtgattctgaaatgccgcatgatgcacggcgagttttggttcatctgatgcggcagggggccgtgatggcatcacaaaaaccgaaactatttgaacagttatgtcgctatgaattggcagtacgtaagcatctatctgaagtttacctccagctagtacttgatcagaagtctggtgtcgcctttgtagccagtactacctcagaacatagtggcaaaattgaaggcggtgagttggaagatgaagtgactgaaactgacgagtcagccaccttgatcccgacgcgaaccctttccctgtttgatacattgatactattagttttaagaaagcattatcaggagcgagaatcagcaggagaacaaaaaattacgattgatatcgagcgtttagaatcctatctgacacctttcttaccaataactgaccatgcgtcaaaagatcgaaaaaagctactgattagagtaaaagagatggttaagcggaaagttttgtcgacgattagaggtgaagatgatcgttacgaagtcactcccatcattcgctatgtagtgaatgccggctttttagagaacatgttagctgaatacactgcgctcgcccaaaagcaactcaacgagacagttttcgcagggagtgatcataaatga

SEQ ID NO: 43184 - DNA, 3462 bp, Alishewanella aestuarii B11
atgactgctaatttactcgaaaactccgctcattcttctaccaacgagcttggtaacttaatatccaggaatgatttgttttctaaaggtcaaataaggttatctgaactgtcagtttttaactgggggtcatttcatgggctgcatacggcaacgattgacccagaaggaaccttggtaacaggggataatggtgctgggaaatcaactttcattgatggattgatggctcttatcctaccggctggtaaagccacatttaatgtcgctgctgcacaaggtgatcgttctgaccgttctctactgtcttacatgcgtggaagctttggttctgctcatgatggcgctgcaactcgcgtaaagagcaagcgggaaaaaggtgttgttaccggtctgagagcgctttaccgagctgacgatggttcttgtatcactttaggagcgcttttctggaccacaagcacaacaaatatactgagtgatgttaagcgtgtatatcttgtcgccaagcgaaatcttcaacttaaggagctgctcgatgcttttggtgaaggtaatacaagacaactcaaacagtggttaagggatgatcctgccataacagattgcgacagtaatttctcagaatatcaggagctatatcgaaagcatctctatatggataacaaaaatgcccctgtattgttatcgcgagcgcttggcttgaagaagattgatgatctaaccaagctaatacgtgagttagtacttgagccaagtggggtaaaagatgatgcaaaaaatgttgttgaggaatttgccgacctcgtggcaatacatgaacaacttattgatgcgaaggagcagtacagccatttaagtagattgcctgaattggctgattcaattgcaaaagctactaatgccatgggcgcactcttgctcgaaaagcgtaacctggggacctactttggtgaggcgctttctattctttgggcagaaaagcttgtagatataaataaagcactggatttaatatcacgcgaaataaacagcttagaaatagacgaaagtgatgctcagtcatccgttgagcagagacacgaagaatatttgagtcttggtggcgataaaattgaatcactgaaaggaaagattaaagacgttaaagacaagcttgatagcgtgattcaggtttcatctaaatatcagggtgattgccgaagtcttagtttgaattcggagcttaatgaagaggtttttctaactaacaagagcaaggctatcgaaaacctggccaaaattgaagaagacacaaagcaagcccaagatcgctttggggatgttgccgctcagctaagcgagcaacagaaaaatttaaatgcgattaaaggtgagattctggagattgaggctcgtccagattcaaatatcgatgttcgctatcagaagcttcgagatgaaatgattgaatcgctcggcttaccgggcgaggaacttgtttttattggtgagttgttggatgtcaaagatgacgagaagctatggcaaggggctattgagcgggcaatgggtggactaaaaacaacgttgcttgtgccccaaaagaattattcgatggttactcgctggctcaacgttagacatactggtttgcatgtgcgggctcaagttgtctctcaagttcgaacagatcaaagatccacaggtttcactgaattcagtgagcggggttatcttcgtaaattgatatggaaagaccatgcgtatcgagattggttgaaaagccacttgtacaattttgatttacagtgtgtgtctggaactgatgaacttgataccaccccattttcaatgactcgggaagggcttgtgcatatggagcggggccgttttgagaagaaagaccagaggaatatagatgatcgcagaagttggagtcttggattctcgaacaaatcacgcctggcactgctaaatacagataaaggggctgcggaacatcgtttgtctgagctgggtaagactttaaaggaggcaagagaagcacttaataaaaatgctgagaaggccaagatatgggaacgcctgagttcgttcacatgggagcagatcaatgcaccatactggcaaagacgtttagaaagtgagcaagttgctctgaatgatctggaaaaatcgggtggcgaccttgaagtagccagaagccggtgggataaagctaaagaacacctgaaagagattcaggaaagcaagggactgcttttaacgaggaaagggtcattagaaaaggataaatccaatgctcaagagctgctgaacaaacatcagcagcaagctgcagccggaatgaccgatgaaataaggcaattgcttcaatctagggtgggcgagatccggttagaggatgcccatcggcagtcagactttgaaaaagccattgatagcgaattagacaaaatacgttccgctaagagtacagcagaaaatgtcgcaaatgggataatgggagcgttccgaggaaaggataagtggcaacctatcacagttgactggccttcaggtctggaagggctgcaatattatcttgaacactatacctatattgagacagaagggcttccggagctaattgatcgctttaaagaacgtttgaacaagcatgccactcaatcattggctcgtatcaagacaaggcttgaatctgaaagagaagatattttagaaagaatagatacgataaaccgtgttttgaaacgaactgaatttaaacaaggaagccatttaaggctgggttccaagcgtgaaaaatatccacacgtgatggagtttgagagaaaagtcagaagtgcactgagctacgcaacgagtgatgaccacgaagtccgattccgacttttgtctgaagtggttgatattcttgacaaggcgagtgcaccgggtacatctactaatgaagaaagcaaaaggcttttggacccccgttatcaaatgtcattttttgcggaagaaattgactcgcagacgttggaagttagagatgtgcttgaatcaagcagtggaaagtctggtggtgaaaaagagtcatttgctggcactatcgtcgctgccagtcttgcctatgtgctaacaccggatggatacgatagaccaatttactgcacggtgtttctggatgaggctttttctaataccgccgaggctgtaagtcgtcgcgttcttagagtattcaaggaattgcatatacacgtgaatttgattacgccttataaaaatctaaacttagcaagagagtctgcacgatcactactcattgctgagcgagatccagcgctccatgagagtcatttgtgcgaagtcacatgggaggaaattgataagcgcatggcccagcagaaacgttcagttcagtttattgatatagcgggtgaaatcgaactgaaggaccttggaaacccagaagttgagtccagtgatgtctga

SEQ ID NO: 43185 - DNA, 1266 bp, Alishewanella aestuarii B11
atgtctgaaacaaacagtagaccagcatgggggcttcttcagcaggatatcgttgagcttttgcgtgctaagtattggaacaatacgaagactttaaagggcttgcttggtggtaacaaagagtttccgatacggatatctctgaagccacctaaaggtaatgcagtcctgaatgatattaagcattttcaagagtttatagattcttggagatctttctgtgagcagattgaatatgaatccttaaaagtcaaagtcagttgggataccgtaaaatttagatccctttctgagcagaaagtgccaactagtgtggcaataccagatatcagttcgattgctcaaatgctaggtagtgaacaagaacggcagcttatagactggcagaacagagtagcatttatctttgattcactcgcggtagagcttgctaaacgaagtgtccacccaatcaggtcaggttatgagcgtgagttattctccgaactcattgggaatctggaagtcttgtccgattttagcgattcagacttgaagttgctggttaaactcattccacagcttcacaagggcatggggcgcggatgttatttaagggcgcttcctgtcatatttgtagatacaaaatttatagagaaaaatcttagggttattgagtcagttacctcagccgtcttggattgctctgtaaaagaaatagggcttttaagttggcttgattgcaggaataagccaaaagattggctgttagtaaggcctttatgcaaaaaaactaaggattccctcagaggtttgccgcagttacgtctgtcttcagaaacattaatggactttgagttgcctgctaaaaatattcttgtgattgagaatgagcagtcgtgcctgtctttagataatattcctgacacgatagctgtgtcgggaggaggcaagaacgtttcatggatgaaggcaagttggctcaccagtaagcgagttgcctattggggagacattgattctgaggggcttgccatacttagtgatgttcgtagcaagttaagttcgattatcccattgatgatggattcggataccgttgaggcttaccgagatagaatggttgacgagccagaatcggtaactcgagagcctgttgcattgactgaccgcgagctgattctcttcagaatgctacgtaatggtactttcggctgtactcgtttagagcaagagcgtttacctatcgattttgtttatgagaaacttcggttgtgggtcggttaa

SEQ ID NO: 43186 - DNA, 1425 bp, Chryseobacterium sp. CF314
atgaactacgaaaaagcgctctccctctacaaaaacgacaaaaccctacagctcttgcgggcagaacactttccgctgttggtgagctttttccaccttatgttcaagcagcaggacaggatttcatatcttcaaaccgaattgcagagcatcctgggcgattacatcttttcgcttcaacggctgggcattgaggattaccagaaagcacccgtagattatttacagaaatgggcggatcagggttatctgcgccgatactatgaacgggccgacgaacccatgtacgaactttctccggcgacggaaaatgcgttaaaatggctcgaagatctgaataagcaacaatttgtaggcacccatagccggctcatccagttttttgatctgctgcaacgcattgtcaatactacttccgggccttatgagcgaatccagcagttgcaggaagaacgccggaaaattgatcaggaaatcgaacagatccgccagggcaattatacgaaaccttccgatacccagctgaaagaaaactattttctggccgaggaaactgcgaaacgtttgttatccgatttccggcaggtcgaagaaaatttcagagaattggatagccagacccgccagaccatcatcaaaagcaatctagccaaagcagatctgctcgataatgtttttcagcagcaggatttcctctggaataccgatcaaggaaaaagttttaaggctttctgggaatttctgatgagcgagcagatgcaggaagaactcgaagaattgctggataagatcaatgccatcccggcgattgtcgaaatcaaaaaagaacagaccgtagatcgtatcaaaaccaacctggtggatgccggtgataaagtaaaccgaagcaacgacggcctgattgagcagctccggaaatttgtggaacaaaaaaacctgtccgaaagccgccatatcctccaaagcatcgaagaaatggaaagcttgctgctggagcacaaagaaacgcttgatcagcaagtagcatggatggaaatcgatgaggtttttaaaccctcctttactatggaccggccgcttttcaatccaccggttaaagttgcctttgcagccaccgaaattgccgatggcgtggctacggctgataccgaccttctgtttgaacagttttacgtggatgtagaagtcttgcgaaaccatgtgaaaacccttttgaaaagccgttcacaggttgcactttccgagttactcaaccattacaaacccaccaaaggcgttgctgaaatattgggctatatgcaaatcgcgactaacgaaggcaaacatttcgtcaatcgtgatcaattcgaatatcacatcatcgaaaacaaatccaccggaaaaacctatcgcatgcaaacccctatcatcatctttaaccgataa

SEQ ID NO: 43187 - DNA, 570 bp, Chryseobacterium sp. CF314
atggaataccgttactctgcaagcctcattgctttattgaaaggaattgtatacagccaccagaaggaaacctgggaaaacctgctgcaatatgaacccgatgtcaaaaaatattttatcccgattgggctagaactctttctggataaaagcgaaggctacgcctttctccgccagaaggaatgggaagacgacgaaagacattttccgagaatgactgaaaaacgatcgctcaatttcatgacttctttagtctgtatcgttctgagaaaattcttactcgaacacgatgcacagggtggctcggtgcgttccatcatcagcgaccaggaaatcatcaaccgggtgaaagtattcttgcccaatgtaaatgatgaagccaaacaacaggaaaagatcaacaccgccatcaaccgtgtactcgccatcggattcctcagaaaactggaagaccaggaaaaaaactacgaaatacaccggatcatcaaaggttttgtgaatgccgatgtgattgatgaaaccctgcagaagttccggaactatgctgctgaaaaccaaccgaaagactaa

SEQ ID NO: 43188 - DNA, 3405 bp, Chryseobacterium sp. CF314
atggaagaactatttgatacccatcctgaagaactcaatctggccggttaccggcttcaatacttggaagtgctcaactgggggacctttaaccaggtgcgctggcagatccagcccaacggacaaaatgccctgttgacaggcgatatcggttcaggaaaatctacgctggtggatgccctgacctgcctgcttgtgccgcaccataagattatctttaataaagccgccggtgccgaaggaaaagagcgcaacctgctgagttacgtgagaggagaatttaaaaaagaaaaggaagaaatcactaaaaccgcaaagaaggtctacctccgtccggatgatcatacctataccgttattatcggaaatttttataaccagggttataatgaacacatttgcctggcccagtttttctggatcggcaaagagggaaaagtagaaaagttgctgatcatcggcacgattcctttaactattaaagatcattttcagcatttcggtgatatcaacgagttgcgaaagaacctgcgtaatacgccgggcatacaattattcaatgataatttctcgcaatatagcgaacatttccgcaggcttttcggcatgaacagcgacaaagcgatcgacctgttttatcagaccgtttccatgaagtccgtcagcagtctgaccgattttgtccgcgaacagatgctggaaaaaaccgatgtcaaagaacagattgatgccttgctcaaacgttttgatgaccttaataaagcccatgccgccgtagtgcatacccgggaacaataccagatactaaagcctttggcagaggccagtgaaacctacgaaacggttacccgtgaaattgaagatatagaagccatgttggaagtgatgccagtctggtttgccgaaaggaaatgggaattgctggaacaggccattgcagatgccggtcaggaactctcaacagcagaacagcagctacacaccatcacccaggaaatagaggcttgggaggagcggcggcaaacgattgtacaggacattgcgagcaacagaggaacacggatcgaacaaattgccggagagattaaacggcatgagcaagacaaagaaatcaagcaaaaggaattcgatgattatgagcgtctcgccttgcagaccgggttggcaagtataaagcaggaaagtgatttccagaacaacatcaagcgggctaatgaatcaatagagaaatgtggtcagatagaagaaaaaattcgggaacaacgggataacgaggtcagtgaactgcgtaaacaggaagcggaatatcaggcagagcgaaaagaactgcaatcactcaaagaacgtaaaacccagatcccggcttggctgattgcctttcggtcacaactttgtgccgatttgcggattaacgaggaagacttgcctttcactggggaattactgaaagtgaatgaacaggaaaccgaatgggaaggcgcaatcgaaaaactgctccgtgatgcaggcatcagcttactcgttcccggaaagcattaccggagtgtcagccgttacgtcaatagcaatccgttaaaaggtgctgatggaagaggcatcaagcttacttatttggaagcagatctgaatggtaacactcgacttttaaaagaattggatgaagacagcatcgcttataaaataaatattaaacctgaaacgcctttttacgattggctggaaaattatctgcaacgcagctttggcgattatatctgtactgatgttgacggtttgccacatgttccttttggcatcacccggcaagggctgatcaagagcggccgcatccgacataccaaagacgaccgcaaacggattgacgacaggcgtaattatgtattaggctggagcaatgccgagaagattaaagcactggaaaattcggtggataagctggagcgaaacatttatgagctaaaatctaggctaaaggatattgaagaaaaggaggaaaagaacagagaacagaagcaactgctaggacttttgctttatgtgaaagacttttcccgcatcaactggcaataccatgtggcgaaaatctatgaactggaacaggaacgcgatcaattgctgaataacaatgataagcttgcccagctgcaacataacaaaatcgaagtggaccagcagattatagatggaagaaccagacaaaaacaattcacggaagatatcggcggattcaaaacgaagattcaaaactatcgggaacagcaacaccatgccatacagcaaaaagaacaattagcccctcaactgaaagaaaaatggtattcgttgatagacgaaaaactcactggagtaaagataaacctcaggggcatagaaaatcggcaagaagaattccgaaaacaatttcagggagagaatggcgaattgaaaagacttcgtggacgtcaggctggtcatcgaacccacatcgagaaaaaaatgcgggaaatcaaggaacattcccgggccgaatatagtgaagttaccgacaacatcgatgcccgtaccgaatacattaaaaaattcagacaactggagtctgaagacttaaaacggcacgaagagcgcttcaaggaagagctgaataaaaacgtgatcaacagcatcgccgtcttcgacagccagctgcagaaacacgaaaaagatatcaaacagaaaatccggacgattaacgaacatctttcagaaattgtttacaatgcggtgcaggatacctacatcaccattctgatggatgccacccctaataaggaagtacggctattcagggaagaattaaaaaaatgctatatccattcctttagcagccataatgatctgtatacggaagagaaatacgaacaggtaaaaaggatcttagaccgttttgccagtatggaaaatgcagaccgcgactggacttcaactgttaccgatgtgcgccagtggtttgagttcaacgccagtgaacgttaccgctccgatgaaacagaaaaagagttttatgaaggttctggcggaaaaagcggtggacaaaaggagaaactggcctacaccattctggccagtgctttggcctatcagtttgggctgcagttcggagagcgcaaaagcaaaagtttccgtttcgtggtgattgatgaagccttcggcagaggcagtgacgaaagtacccgttacggactggaattgtttaaaaaactgaatctccaactgttgattgtgacaccattgcaaaaaatccatgtcatagaaggtcatgtcagctcctttcattttgtgagcaaccgggaaggcaataattcgcaggtcagtaattttaccaaagaagaatatgaaatcgaacgcgacaaacacaacggaatctttcctaatacccctgaaaaatga

SEQ ID NO: 43189 - DNA, 1167 bp, Chryseobacterium sp. CF314
atgattagcccggcggaaataaaaaaacaggcgttgaaatggtggaagcccttgctgcaaagccatattcagaaagaaccctttttcccgaaaataatagaccgtatcgggaaagtgaaatcagctcacatcacggaacgctttgaaatcctgcaaaaggagatagaagagctataccactattccaaaaaccagacaggtaaaggctacctagtacagactgccgatcggaatttcagacggacaggtagccatgatttgccggataccattatttttgaaagtcttgaagattacctctattttactggttatcaaaaatattggaaagtttttctgaagtattatgacacgataattagcaccattcctgtgttaaaagactggactttgcaacattgtttatggttaacggatcatcatatcaactggaatgacgttctgaaggtttgccgatattttatggaaacaccacggcctaatctgtacctgcgacagctgcccattgagatccacaccaaattcattgaagaaaacaatatactaattcaatccttacttgatttcctgattccggatcatgtgcgttcggctaaacaaaaacgtttcgccgaacgtttctttttacggtacgatgaaccgttgatcaggctctgctttctggatgaaaacccgaatccggattttaaatttagggatattagtatcccactctccgattttgaaacccttgaaattctggttgaaaatatcctaattacagagaataaaatgaattttttaaccttaccgctgttaggatccactgtcgccatctggagcggagggggctttaatatttcttttctcaaaaatgcggcctggctgtcagacaaaaagattcggtattggggcgatatcgatgaacatggctttcagattctgcatcagctacggtcataccatccgcatgcccaaagcatcatgatggaccggacgacttttgaaacttttcaaaactatgcagtaagtggcgcaagaaataaatcccaaaatctaaacctcttgagcaaagaggaaaacgatcttttccagtatttaaaggctttggaaaaaaacaggttggaacaagagaaaattccgcaggtgtatatagatagatgtttgaagaataggatcgaatcatga

SEQ ID NO: 43190 - DNA, 1431 bp, Mycobacterium smegmatis str. MC2 155; identical to SEQ ID NO: 41766

SEQ ID NO: 43191 - DNA, 723 bp, Mycobacterium smegmatis str. MC2 155; identical to SEQ ID NO: 41767

SEQ ID NO: 43192 - DNA, 3348 bp, Mycobacterium smegmatis str. MC2 155
gtgcgtcccggggcgggatatcgactccagtacgccgagatctacaactggggaacgttcgacggccaggtttggcggttcactcccggcgccgagaccgcattgctgaccggtgacatcggatcgggcaagtccacgatcgtggatgcgctcaccacgctgctggtgccgtcgcacaaagccgcttacaacaaggctgccggcgcggacgccaaggaacgcaccctgcgctcctacgtcgaaggccattaccgatccgaacgaaacgaggccaccggaaagtctcggccgaaggggctgcgggagaacagacggacctactcggtgatcctcggtgtcttccgcaaccacggccacgacgagacggtcacgctcgcccaggttttccagcagcgtgagagcaccggacagccctatcggttcttcgtcaccgcaaccaaggagctgtcgatcgccgtcgacttcgccgacttcggctccgatctgcgcgaactgcgaaagcggctgcgatccgcaggagcggagatcttcgacgagttccccaagtacgcgacctcgttgcgacggctgttgggaatccggtcggaacaggcactcgagctgttccaccagacggtctcgatgaaatccgtgggaaacctcaacgatttcgtgcgcgaccacatgctcgagccgagcgactcgaccgaacgcattcgcgagatcatcagccacttcgacgacttgaccagggcccacgacgccgtcaagcgggcacgtgagcagctcgaagcgctggaaccgattgccgacactgcggccaaatacgatgccgcactggctgaacgcgacggcctggagcacgaacgatcggcagttcggctcttcatcgccgaactccgttccggacttctcgccgatgagatcggtcggttagaggccgacggcgccgctctatggcagcaacaggatgccgccgaagccgaccagcgcagactcaaccacgaacgcgactccctgatcgaggagcgtgccaaggccggtggggatcgcatcggcgagttggagcggctggcccacgaggcccgtgcccaggccgagtcacggcggcaggccaggacattgttcgactccgcggtcggcgaggccgggctgacgaccgtcgccgatgaagaggcgttcctcaacctgcccactctggtcgctgccgaacgcaccaggctggccgccgagaagcgcgaggtcgatgccgccactgtcgacgcgatcggccgtgagcgtgactgtgaacgcaagtgcaccaccctcagcgcggagatcgagagccttgaacagcgcaccagcaacctgcctcatgagcaggtcgtgatgcgcgaagagttgtgtgccgcaatcggactgacaccggagcagctgccctacgccggtgagctcctcgatgtgtacgacgaacgcgccgagtggcgaggtgccgctgaacgagtgctgcggggcttcgcactctcgctgctggtgccgcagccgcactacgacgccgtgacccgatgggtcaacgaacgcaggctcaccgtcgccggcaggggtgccaaactggtctatgagcgggtcgctgcgcgccgcgtgcggctgcagccagcggagtctgacgggctgctgctggccgactgcatcgaagttcgggagggcccgttcgaggagtacctccgcaacgaactgatgaagcgcgccgacttccggtgcgccaccacactccaggagttccgtgacctgcgacgcgcggtcacccgagaggggcaggtgcggtccggtgaccggcacgagaaggacgatcggcaccgcgtcgacgacccacgccgctgggtgctgggctgggtcaacgaacgaaagctcaccgccctgcgcgacgagttcgccgacctggaacgcgatcggcaggaggccgctgccgtcgcggccgccctgagtgcgcgcagggaagtgctgcagcatcggctggacgcccttgtgcgaatcgagggctttcggtcctggactgagctcgatgccgacgaggccgtatcgcgcgccggggcccacgacgcggagcgggctcggttgcagtcaggatcctctcgactggaggagatcacgagggcactggaacgcaatgccgaagaagccggcgttgtcgccgagcggatcagacaactcaccggtcagctcgccaccacggccgcagccgtgcagcgcgcgcagcaggaccgaaaacgagatcaggagttcgtgactgcacagtcacccgagcaactcgaggtggcgcgggcgtcctaccccgctctcgaccgccggctcgctgcgagccggcccactcgagccgacgactgcgccgccgccgagtcggcgctgtcggaagacctgtaccggcgcatcgagcgattgacccgtgagctcggcgggtatggccagagcctggcacagtacatgctggaggtgcttcgccggtggcccgagctgcgtgcggacatggatgccaccgtcgaggcacgcggcgacttcctggccttccgccgccgcgtggcgaccgatgacctgccgcgttttgagtcggagttcaaggaacagctcaacaagaacgctatccaggagcttgcggggttcaacaactggctcagccggcaggcctcggccatcgacgaacgcatcgaccgcatcaacgaggcgttgggcgcggtgccctacaacccaggccgcttcatccggttggagaaggagcccaccaccaatcaggatgtcgcacagttccgttcagatcttcgcaacctgaccaacgacgcgctggcggtcgacggcgaccagtactccgaacagcgcttcctcgacgtgaagcggatcatcgagcgtttccgaggtcgcgagggctacgccgaatcggaccggaactggacccggcgggtcaccgatgtccgcaactggttcgtgttctcagcctcggaacgagacgtagacacgggcgccgagtgggagcactacagcgactcggacggcaaatccggcgggcagaaggagaagctcgcctacaccatcctagcggcgtcgctggcctaccagttcgggctcgaatggggcgccgaggagtcacgcgacttccgcttcgccgtcatcgacgaggcgttcgggcgcggatcggacgtgtcgacacggtacgcgctcgatctcttcgcaactctcgggctccaactgttgatcgtcacaccgctgcagaaggtgcacgtcatcgaaccgtacgtgaaggcgatcggcatcgtggacaacccgaccggaacatattcgcgtctgcagaccatgacgatcgaggagtatcgcgcccggcgcaacggaactcggccgtga

SEQ ID NO: 43193 - DNA, 1161 bp, Mycobacterium smegmatis str. MC2 155
atgtgggccacacccggtgacatcgcggccaaggtcaggcgccgctgggacgacggctccctgctgcgcgcctatggagagggggagccgttcgcgccaatcgaggtgccgcttcgtggtccgaccccggcgcagatcggtgacgacgttgcgcgtgtgcgcgactgggtgacggctctcgacgcggggcggcacgacgatgcgcggtacatgctggaatggaagtcggtgggcggcaagaagttcggccgcaacatgcttcccgctcgtgcggtgatttgctcatacggccaggcgtggacactgctgggggtgacggcggctgttgggcgtttcgacgagctgctcgcgtcggcgcacgatcatccccgaattcgtcaatgggtgatcgccaacccgcaccgggcgctggcactggcggcggacatgccgaagctgatcgcggcttgcgagtggctcgaccgacaccggcactcgcagcgttacctgcgcgagatcagtgcgcccggcgtggacacgaagttcgttgaacgccgccggtcggacttggccgggattctgggcgtgccatcctcggcccagggattcctcaccgaactcgggctacggtccaagcccagccttgttcggctgcgaccagcgccgtcgctggggctaccggcacctctctcggagctcgcggtccggcctgatgaattggcgcagctcgacctgcggccacgcacagcggtgatcgtcgagaacgagatcagctatctcagcgtcgacgtccctgaagctggtgtggtgatctgggggaagggcttcgatgtcgacaacgtcgggcggctgccgtggttggccggtgtccgcgtcgtgtactggggcgatatcgatacccatggatttgcgattctcgaccgacttcgggcgtggcagccgacagcagagtccgttctgatggaccgagccaccctgatcgcccatcgtgaccgctgggtggtggaggaccgtcctgctaggtcgatcctgcctcgactgtcacccgaggaacagcagctctaccgggaactcgtcgaggacagcctcggcgatcgcgtacgcctcgaacaggagcggatcgactggggctgggtcgagggccgattgaaggcgatctatcaaggtcgtatagattcatga

SEQ ID NO: 43194 - DNA, 1467 bp, Mycobacterium smegmatis str. MC2 155; identical to SEQ ID NO: 41770

SEQ ID NO: 43195 - DNA, 723 bp, Mycobacterium smegmatis str. MC2 155; identical to SEQ ID NO: 41771

SEQ ID NO: 43196 - DNA, 3357 bp, Mycobacterium smegmatis str. MC2 155; identical to SEQ ID NO: 41772

SEQ ID NO: 43197 - DNA, 1458 bp, Blastococcus saxobsidens DD2
atgcactacgacgacgtcgccgcgctgcagcggcacagctccgcgtggcggctggtccgcgccgaccacgccccgctgatcatcagcttcctcgaccaggtcttcgtcgaggggaacatccgcggcatcgccgccggcgagctggccgaccggctcgatgatgttctccatgcgctgaacgaggggcacgacccaccgctgttcccgaaaccggcgcgcgcctacctcgacttctgggcggcacccgacgccggctggctgcgcaagtactacctcgccggctccgacgagccgcacttcgacgccacccccgccgccgagaaggcggtcgcctggtgcacctccctacgggcccgcagcttcgtcggcaccgagtcccggctcaacaccgtcgtcgacctgctgcgccagatggtctacggcgccgaggccgatccagacacccgcctcgccgagctggagcgtcgcaggcaggagatcgacgacgagatcgagcgcgtccgccgcggcgaggtcgacgtcatggacccgtccgcccagcgcgaccggtatcagcagttcgccggcaccgcgcgcgagctgctggccgacttccgcgaagtcgaaggcaacttccgggcgctcgaccgcgacctgcgcgagcagatcaccacctgggacggcgccaagggcggcctgctcgagcaggtggtcgacggccgggccagcatcgccgactccgaccagggcaagagcttccacgccttctacgacttcctgctctcccccacccgccaggaggagctcaccgacctgctgcgccgggtgcacgagctgcccgccctcgccgacggcgacgaccgcctgcgcgccgtccaccacgagtggctggccgccggcgaacgcacccagaccaccgtgcgcacgctgtcggaacagctgcgccgctacctcgacgaccgggtctggctggagaaccggcgggtgatggacatcctgcgcagcatcgagacctccgcgctccagttgcgcggggaacgccgcatcgaggtgaccgtcgagatcgacgcgctggcaccgaccgtcgtcctgccgatggaacgtcccctctacacgccgcagacgcgggtcgccgtcgacagcagcgacctgcagagcggcgacgacgacttcgacgccaccgcgctgttcgggcaggtgcacgtcgacccggcaccgctcaccgcgcacgtgcggcgcgctctgctgcagcgaccacaggtcggcctggccacgctcctgaaccaccatccgctcgagcagggcctcgcggagctggtcacctacttctccctcaccgacggcaccttcgacgtcgtcttcgacgacatccccgagcaggtcgcctggaccgacagcgacggccgcacccggcgggccaccgttccccggctcacctacgcccgccgcgccgagctcccgcagtcggcgccgacgtga

SEQ ID NO: 43198 - DNA, 648 bp, Blastococcus saxobsidens DD2
gtgaccgcaccgcccgtccgatccgagctcgacctgccgctggtcgccacctcgctcatgaagggcgtgatctaccgcgacacccacgagcaggtctggcgccacctgctgcccctgcagagccggctgcgcgagtacatgtccaccatcggcctggtcccggtcatcgacgaggccgagggctacgccttcctccggcagcgggacgacgacgcagagggcaccgacggcgcccgggcggggtccgccgttccccggctggtcgcccgccgctcgctgtcgttccacgtcagcctgctgctcgcactgctgcgccgccggctggccgagttcgacgccacggacgccggcagccggctggtcctcacccgcgagcagatcgtcgcgatgctccgcgtgttcctccccagcaccagcaacgaggcccgcctcgtcgaccaggtcgaccagtccatcaccaaggtcgtcgagctcggcttcctgcgccgggtgccgggttcggacggcgcggtcgaggtgcgccgcatcctcaaggccttcgtcgacgcccagtggctggccgacttcgacacccggctggccgcctacgccgcccagctccgccaccccgatgccgccgccgagcccgaggaaggggcgcaaccgtga

SEQ ID NO: 43199 - DNA, 3384 bp, Blastococcus saxobsidens DD2
gtgaccacgcccgtccacctcgccaccgacgagactcctccacccgaggtgccgtccggtttccggctcgaccgcctcgaggtgctcaactggggcacgttcgaccagaaggtgtggaccctgcgggccggcggtgccaacaccctgctcaccggcgacatcggctccggcaagtccaccgtcgtcgacgccgtcaccaccctgctgctcccggcccagcgaatctcctacaacaaggccgccggcgccgacacccgcgagcgcagtctccggtcctacgtgcaggggcactggcgctccgagcgcaacgaggcgaccggcaccacccggcacgtcggcctgcgggcgggcagcacctactcggtgctgctcgccgtcttcaccaaccccggctacgacaccaccatcaccctcgcgcaggtgttctggctcaaggacggcgacggcggccagcccgaccgcttctacgtgaccgccgaccgcgacctcaccatcgcggccgacttcgccgacttcggcaccgacgtcaccgccctcaagcgtcgcctgcggggccagaccgggatctcggtgcagaacgcatttcccgactacggccgcgactaccgccgccggctcggcatcgactccgagcaggcgctggagctgttccaccagacggtgtcgatgaaggcggtcagcgacctcaacggtttcgtccgcagccacatgctcgaacccttcgacgccgccggctggatcgaccgactcgtcgcccacttcgacgacctcacccgcgcccacgagtccgtcgtccgcgcccgcacgcaactggaccagctgcggccggtgctcgccgacgccgacgcccacgaccggctcggcgccgagatcgccgcgctcgacgctcaacgcgaggccctgccggtgcacaccgcgcagcttcgggcagacctgctcgcccgccggatcgagtgcctgcgcgagtcggtggccgaggacgaccgggagctcgcccggctcaccgacgacctgggccggcaccggaggcgagagcgggagctgatcgtcgagcgtgccgggcacggcggcgaccggctggcccgcatcgacgaactggtcgacgcggaggaacgcgccctcgacacccgccggcagaaggccgccaccttcgccgacctgctcaccgccgccggcctcgacccggtcgccgacgagcacggtttcagcgcccggcgggtcgaggtccgagtcgcgaccgcggccgccgagtccgacgccgccgaggcgcagaaccggctccgcgagctcgccgtcgacgcgcgcggcctgcaggacgagtcggacgacctccgcgccgagctggccagcctgcgccagcgcaccagcagccttccgcggcagagtctggaactgcgccagcggctggtcaccgagctcggcattcccgcggcggcgctgcccttcgccggcgagctgatccaggtcggggcggcctcccgcgactgggagggtgccgccgagcgcctgctgcgcgggttcgccctgtcgctgctcgtccctggcgagcactaccccgcggtctcgcgctggatcgacgcccacgacctgcgtacccggctggtctactaccgcgtcgccgcgcgcgccccaaccctgccggcactgccgtccgccgactcgctcgccgccaagctggagatcaaggactccgccgtgcggccgtggctggaagcgcagctggcccaccgcgccgaccacgtgtgcgtcgactccatcgaggcgttccagcgcaccccgaaggccctcacccgcgccggccagatcaaggaatccggcggccggcacgagaagaacgacgccacccggatcgacgaccgccggtcgtacgtgctcggctggagcaacgcggagaagatcgaggcactgctcagccaggcccagcagctgcaggagcggctcaaccggctggccgacgaccgcgcccggtccgaggccgcctaccggaccgcggccgtgcggggccgcacgttgagcaagctggacgtcttcgacgactgggccgagctcgactggcaggccgtcgtccggcgcatcgccgatctgaccgcggagcgcgagcggctgctgtccgcgtcgggcgagctgcagcgcgtcgaccgggagctcgacggggtgcgctccgccatctccgaggcggacgacgccttgtcagcgcgccagcagcgacgcggcgggcacggcagcgagctggcggacgccgagcagcgcgccaccgccgtcgccgcccggctcgaggacgccggcagcgtgccggccgagcatctggacgccttggccggccgcgccgcggcgcaccccgcaccgaccacggtggaaggcgtcgacggtctggaggaggcgctgcgccggcagctgaccgaggaccgcgaccatcgggccaagcgccagtccggcgtggagtcccggctggtccgggcgatggggaagttcatcagcgaccatcccgtcgagaccagcgagatggacgcctcggtggccgcggccggcgagttccgcgcgctgcacgagcggctgaccggcgacgacctgccccgcttcgaagccaccttcaagcggtacctgaacgagaacaccatccgcgacatcgccgggttcctcgccgaactgaacaagcggtccgagctgatctcccagcgggtcgcgacgatcaacgcctccctcgtcggcatcgactacaaccccggccgctacatccggctggacacgcaactcaccccgcaccccgagatcaaggacttcaagcgcgacctgcgcgcctgcaccgacgacgccctcgcggacggcgacgaccagtactccgaacagcgcttcctgcaggtacaggccatcgtcgaacgcctccgcggccggccgggacacggcgacgtcgaccggaactggtcgcgtttcgtcaccgacgtccgcaactggttcgtcttcaccgcctccgaacgctggcgggaggacgacaccgagtacgagacctacagcgactccggcggcaagtccggcgggcagaaggagaagctcgcctacaccatcctggccgcctcgctggcctaccagttccgcctcgacccggccgccgcccggtcgaagacctttcgcttcgtcgtcatcgacgaggcattcggccgcggctccgacgagtccacccggttcgccctcaccctgttcacccggctcggcctgcaactgctcatcgtcacgccgctgcagaagatccacgtcatcgagccgcacgtggccgccgtcgggttcgtcgacaacccgaccggcaattactcccggatgcagagcatgaccatcgaggagtaccgcgagcagcaggcgctgagccgggccgccggcgacgcgggctga

SEQ ID NO: 43200 - DNA, 1206 bp, Blastococcus saxobsidens DD2
atggcgggcagcgcgacacggggaacctccgggccgggccgcaggcgcagcgagtggacgacgtggtcagacgttcgcgaccagctgcggcgtcgctgggaccgtggcgactctctcagcgctcacgccgccggcctgccgttcgagccgttggacctgccgatccgcgggcccgggccccgtgacatcggcgaccggttcgacgacgtccgggcctggcgcacgggctggacggcggcgccccgcggcgcccgggtcgtggaggcgtcgatcggggggcggttgatcggggtcaaccggctgccgtcccgcgtggccatcgacagctgggacgagctgatctccgtcctcggcgtctggcgcgatgtcgataccttcgacgcccggctggcatccgcgcgcgacctggcgcctgcgctggtcgagtggatgacccgctccccgatgcgggtgctcgccgcgggtgaggactgggaccggctggtcaccacggtgctctggatcgaccagcaggcccgcccgggcagctacctgcgggagatcgacgtgcccggagtcgacaccaagttcgtggagacccaccgcggcctgctcgccgacctgctggaatcgcagctggcgccggcgcggatcgacgccacccgcccccggtcggacttcgccggccggttcggtttccggagcaagcccgaccatctccgcctccggctgccgccggagcacgccgggccgttcagcgagatcgccgtccgcgtcgaggagctggcgcacgcgcccgtcggcgccgacaccgtgatcgtcgtggagaacgagatcacctacctggcgctgccaccccggccccgcaccgctgtgctcttgggtgggggctacgcagcccgccggctcaccccgctgacctggctggccgatgtcgacctccggtactggggggacatcgacacccacggcctcgccatcctcgaccggctgcgcgcggcctttccgcatacccggtcgatactgatggaccaggcgacgctgctggcgcaccggacccagtgggtgcaggagcccagtcccaccgccgaacgactggaccggctcaccccggaggagagcgcgctgtacgccgccctggtcaccgatgccttcggcccctccgtccggctggaacaggagcgggtgcggatgtccctcgccgaacgggcccttcgcgtcgactga

SEQ ID NO: 43201 - DNA, 1530 bp, Bradyrhizobium japonicum USDA 6
ttgaccttgttccgccatttgcatgacgacgcctttttagctttttcgcgcgatcacaagcacctgtacgcagcgtgtctgctggatctgcacgaacgcttcttttcaggcgcgccgtcgttcccgacgccgcagcaggtggtccacgccatctacgacgtcatgcgcgccaaccccgtcctctggaacgagggcgatgatttcggcagcctgccggaaatgatctccgcgagacgccgccggatccggaaggccgacgtcgcgctcgcttccgagaagggcgacaaggcgctcggtcttgcccgacaactatacgcccggctgctcgtctggggatggcttgaagaggaggaatacgggcttcgcgtcactgtggacatggctatgggaccgctgctcgtgctgcaacggctcgcgagcctcaacaaggatctctcgcagcgattcggcggcttgatcgtgcaaatccgcctcaacctggaggccgtcgaaaaactgaggcctgagatcaccgaccgcaagcagcgcgaagccgcgctcgccgtccgcgaggcgcgcaatcaggccgaccagttcactaagagtctgcgggccattctggccgacctgaagcgcgtccgacggaccgtcatggagtcgaaaacagtcgctacccggctcgaagcctttttcgaggagttcatcgaacagctcctgctgaaggatttcgagtccatcctcaccgtcaaccatccataccgcttccgcgacgccatcgtcgatctcgcgcggaggatctcctacagcccggaaaccatgcaggtcctcgccgaggagtacatagcttccagcatggcagccgacatcgaggacggtcgaatggccgcggccgacgacctgctggctatcgaaagcatcttcgatcagatcggggagatgttcgacaggatcgaggccttccgcaggcagctcgaagcccgggtccgcaacaccattaagtacgccgagcggggcgggcagggactcgtcggccgggccggcgacctggtgcggcgcctggatgccttactgcgcgacggcaggcaccacaaggcgacaatcgaatggagcatcgagccgctgcggtcgccctggtcggagcaccatcaggcgccggccaggcagccgcgccgtcccgtcgaagcaagggagctcgccgagccgccgtcggatccgttgtatgaactgcgcaagaagctccgcctcgagtacatcgctcgcatcgcgccccgccccgaggatgtcagacgattcctcgagggccaggtgccgccattcgcgaccagggaagcccgcttcatggaaatcgataccgtggacgactttctcgccttcgattgcgcccgccgatatgcgctgacaggcgaggttccggcgcaggtcgcggccgggttcgaactcgaaccgtgccccgacacgcccccacacgacagcgaatggctccgttgcgccaacttcctggtcaagcgatcgggcgcactccggaaggcgagggcggctcatgctcagtga

SEQ ID NO: 43202 - DNA, 639 bp, Bradyrhizobium japonicum USDA 6
atgctcagtgagttcgaaaacgtcgagcgctccttcggcgcggaaaaggcagccgacctccgcaaagcgcagcacttcctgctacggcggcagttcgtgttcgcgggagacccccggaccgggacagtctacaacacgatcatggacggccgcttccgcgacgtggtcgacggcttcttcgatagttgcggataccgcgtccaccgcgatccggaggcgcagtgggccggcatcgtcgccatggacgaggacgtgccgctgccccggatgaagctcgacgaaaccatcgtcatgctggtgctggcggcatactggcagcaggaggtgaacgtcggagcagtcgaggaccgggccgtcgtagtggccactttgaacgacctgttcgatcgctaccgcgagatggcgcaacacggcggcggtggcgcgatctcggccgcccggttccgggacatcctgcgcgaggtcgcccaacgcagtttggtcgagatcggtgattttgacgacgagcagcaggactgcgagatcaggatccgtccgatgattaagctgatcagtggcggcgatgccctccaacggctcgagcgctacgtccgtagcgaggaggcgcggtttccgcagcccacaggaggcgaggcatga

SEQ ID NO: 43203 - DNA, 3435 bp, Bradyrhizobium japonicum USDA 6
atgatggagctacgccacctgacgatggtgaactggcacctgttcgacgtcgccgacatcgacgtgacaggacacgtcggggtcctgggcgagaaccggtccggcaaatcgacaatcctcgacatggcacaggtcgttctcaccggcgcgagccggcggttcttgcgcctgaacgcggtcgccggcgatagcggaaaatcgcgcagcggctcgaagcgcagcgtcgtcgattactgccttgggacgctcggcgaagaccagcgccggcgcgacgaggcgcgcacctacatcgcgctcggtttcgaagacacggaagacgcccggccaccggtcacgatcggcatggcgctcgaggcgcgcaagtccgacagcagggagaccgtgctggcattgttcgtcgccgtcgggaccgttctgagctccaaggacttcatcgagcagcgaggaaagtcgcaattcccggcgcaatgggaggacgtgcgcgcccggatcgtcgcggcggtcggcgaaggcagcttcgtcaatcatcgcgaccgggcgagcgactatgtccgcgagtacatgcgccatcttctgccgcattcgtcctttggcgaacagaacgccagcgccctgcagaaatcaatcgtcaacgcgatgacgctcgatcacaaccagacggcgacgcagttcgtgcggaactacatcctcgaggacagtccgatcggcatcaaggagctgcgcgagtcgatccagacataccacaacatcagcgagaccatccggaaaatgcgcctcaggctcgaagccctgagggcgcttcggagcgtcctcgccgcgcttgaagaggcgctcgagaccaagttcagggaggaatgggtcgcaaaacgcgcgacttggctcgcggcgcgcgcgacaaacctggacttcaagaccaagcggcgtaccgagatggcccgccgggacgccgcagcaaaagaactcgaattcatcgacgacgacgtcaaggccatcgataaggagatcgaacgcctcacggccgcgatcgccgagcacgatgccaagaccggcagaaagtccctgcagcagaccgccgatgtggccgggcaggcggcgcaccgcgcctcggcggacttcaaggctcgcatggagaacatccgtcgcctggagccgctacgcgcgatgtgcgcggacggtttcgaggacttcgttcctgcgcttgagcgtcttctgaccgccaccgccggggccgacatcgtgggcgtctccgacgaggtcaccgcggccgagaagtccttcgcggcaagcggcgccaaatggctgccgaagatcgacgaagcgcgtcaaacgatcatcgcggagctttctggcctccgcggcaggcgcgacgaggtgctcgaacggatccgacagcacgccgccggaggggcgcgtgcctatctcggcgacgacactgaactcctctgccgcaggctgcggcaggagggaatggtcccgcgcgtactctgcgacatcatcgaagtcgccgaacccgagtgggtgggagccgccgaggcgctcctcggccgcgaccgggaagctgtgttcgtggacagagcggatatcagcgccgccacgtcaatcttcaaggaaggtcgccgcgagtttcgccatgcatcgctcgtgagcctaaacaagctcgagcagttcagggccaagccggagcgcggcactttcccctcgatcttccggagccaggatccggacgcgatggccttcatcatgcgccgctacggcaatgtccgtctcgccgacacgctcgaccagttcaacaggcccggccgggcgattatgaaggacggcctctacgacgacggactcgtccggagccatcgctggatcgaatcctcgcagcataagatcggaaaggcagcccaggcgaacgccctgcgatccctgcaggatcaggccgaggagctgggtcggatcatgaccgacaaggggaaggaggcccatgccgcggagcaggcttttgccgctctgaagaacatctgcgagggacgtaatgacctgggggcgtgcgcggccgccttcgtggccgcgcagactgaggtcgctgaagctcaggccaggctcgatgctctcgacggcgcgggggacggcgggcttcgcgaaaaaaagagggcgcagcagaagctgaaggagaagaggctggaggagagaaagacacagcagaaggcattcggcgagcatgacggcgaggtcaggtcggcggagaggaggctcggagagggcgagaacgtgcctggctccgaactcaaccttagggtcgcccggtcgatataccgcaagttcttcccactctactccaccgcgaaaggcagggccgtctaccgcgaccgcctcgatgccgcagcccaaaagggcttcgcggagaaacaccgggctatcgccgagaaggccttgaaggatgcgaacgcgtccgacaacgagcgcgcccggatcgagcgacgggtccgcgagcttctttacgattacttcgaccagttcgggatgagttcgcaggtcggcgcggaaagcgagccgctgcgggaggtgaagccatggatggagcagctgatctcggatatcgaatccaacgagctgcgccagtacgaaaggcaggcgcgggaagcggcagagaaggcctccaccctgctgcgcggcgaattcatcaatgcgctcacggcccggatcggaaagatggagcgggagctgcaatcgttgaaccgtagcctctacgcacatcccttccataacgagcgatattcattccatcgcacccagatggtggaattccagcccatcctgaagattatcgaaatcgccaaaacctctccggaggcgctcgatatgctgttccggggcgacgtgcccgatgacttcccgcacaaggatacgatcgtcgcactcgaggcgctgctcgaggaccccgacaaggatttcgcccagttcgaggactaccgcaacttctacaccttcgagatccacatggaggatgttgccaccggccgctcgacccgctgggagcagcggcgcggcaccgggtctggcgctgaacaacaggtgcctatctacgttgccatcggcgcttcgctggccgccgtctacggcagcgcggagcgtcgtgccggcaagcccgccggtttcgcgctcgccatgttcgatgaggccttctccaagatggacggcaagaaccagcggcagatgatgagcttttacaaaaacctcggcctgcagttcgtgatcgcggcgccgttcgagaagcgcgtcgccgtgctcgagcacatggacaccatcgtggaggtggaccggatcggcgagcagtctagggccactgtggtggaactgaaagagaaggccaagcgcgagctgatggccatcgatccggacctgatgtccgaagatgagctcgccacccgtctggccgccgagtag

SEQ ID NO: 43204 - DNA, 1170 bp, Bradyrhizobium japonicum USDA 6; identical to SEQ ID NO: 41690

SEQ ID NO: 43205 - DNA, 1353 bp, Pseudomonas aeruginosa NCGM2.S1; identical to SEQ ID NO: 42083

SEQ ID NO: 43206 - DNA, 750 bp, Pseudomonas aeruginosa NCGM2.S1
atggcagggatcttcgatcgaattgcaggcgcctctggcgccgacgaaacggatctgacggtggagcccatggcgttggatgacagcatggatgatgaacagcctgtcatgagcgccgctgtacaggtcgatgaacgccggacgccgcaacgggtacgtgaggccgtacaggaaatgctcaagtacgggctgctggaagaaagccacaagcccaacctgtatcgctcagcactttccaatatcgaggcggtcgacagaatcctggagccgctcgacctggccatgggagtcgacgaggttcgggggctggtgtttgttatcgttcgccagggcgaggtggccgaggaggatgactggtcgcaccccctcgtgcgtcggcaaaggctgaatctggagcagtctctgctgatagccattctgcggcagcatttcatcgcatacgaacaggaaagcggtacgggcgccagtcaggcactggtagcggttgatgagctgattccccaactgcaggtttacctgggcgaactgggcagtgaggcgaaggagcgcaatcgtattatcacgctgctggatcagctcaagggtcatggtttggtgtcggctctggacgcccatgatcgcgtcatcatccgccccatcattacccacttggccaacccggagaacctgcaggctctggtggcatggctgcgcgagcaggtggagggcgcggctactccggttgctggtgctgaggaggatgaggcgtga

SEQ ID NO: 43207 - DNA, 2718 bp, Pseudomonas aeruginosa NCGM2.S1
gtgggtgaaaacgccttcaccttgctcaaccgcgctgccggcctgaagcagctcaacagtattgatgagatctttcgagagttggtgctggatgatcgctctgccttcgagcgggctgccgaggtcgcaagcagcttcgatgatctaacggacattcaccgagagctggaaaccgctagaaagcagcagcgctcattgcaaccggtcgccgatggctgggagcgttacaaggccttgcagcaacagttacacgataaacagacgctcgaaggcattcttccggtctggttcgccgaacaggggtatcgcctgtggttggctgaaaccaacaggcttgagaaggcgcaaaaacaggccgaactgaatcaggagcaatgcaggggacagtttgatatccagaagggcgtggtcgatcagcatcgtcagcgctacctgcgagtaggcggtgcagagatagatctattgcgcgcgcgcatcgcggattgggttcgggagtttgataaacggcgcctgaaagccgagcagtaccagcgtttggccaaagggctaggactcgtggtggagttatcagccgctgcgctcgaggaaaatcagcagcagatcacggcacgcctggaagtactggccgagcaaattactgaggcacggcaaaaggcgttcgatgcaggcatcgtccagaaagaactcgatggccgcctgcagagcttgcagcatgagcgtgccgaggttgagcgacggcccggctcgaacctgcctgggcattttcatgcttttcgaggtgatctggcgcaggcgctttgcgtcgatgaatcggcccttcctttcgtcgccgaactggtgcaggtcaagcccgaggagctggcttggcggggggccatcgagcgggcaatcggtagccaccggctgcgtatcctggtgccgcagggctcgtccgaggctgcattgcgctgggtgaaccaacgacacaaccgcttgcatgtgcgcttgttggaggtcaaggagccgtcatcgcggccagtgttctttgacgatggttatacccgcaagctgactttcaaggagcatccgtaccgagaagctgtaaaggttctactggcggacaacgaccgacattgcgtggaaagcacagagcaattgcgtcataccccttacgccatgacggcccaggggctgatgtcgggcaaagagcgcttcttcgacaagcaggaccagaagcgcctcgatgaagactggctgaccggcttcgataaccgcgaccgtctggccttcctgactgaacaaattcgcgaggtcaatgaacagctcgcgcctgccaagctggccttggatgctgcccagggcgatgtccgcaagttggaggatcaagcttcgctgctgcagcgcgtcgaagaactgcagttcgaggagattgatctgccgggcgccgagcgtcagctggagtcgctgcgtgctcagctggacaccctgacacgccccgactctgacctcgcccttatcaagtctgagctggatgaagctgaggcattgctggactctctggatcgacagaggcaacaacttatcgagcagtgcggtcagttgaaaattcagttcgagcaggccgcatccgctacccgtaaggcttatcgcggcgccgaaaaggggctgagcgatacgcaacgtgagttggcgctagcgcacttcccgacgctgagcgctgctgagctcggcgatattgtcgagctggagcgcaagcatacgcatgagcttcaagggcagctcaaagcgctgggtgagaaactgggcgatcagaaatccgagcttgccaaacgtatgtccgacgccctgaaggttgacactggtgcgctgtcagaggtcgggcgagagctggtggacgtaccaaagtatctggagcgtctacgtgtgctgaccgaggaagccctgcccgagaaactcaagcgcttcctggaatacctcaatcgttcctcggatgacggcgtcacccagctacttagctatatcgaccatgaagtctcggtgatcgaggagcgtctggatgacctgaacagtacgatgcagcgtgttgactttcagcccgggcgctatctgcgcttggttgcgacaaaggtcatccatgcaagcctgcgcaccttgcaacaggctcagcgccaactgaactcggcgcgtttcatcgatgatgaaggcgagagccattacaaggcattacaggagctcgttggactgctcaaagatgcctgcgagcacaacaggaatcagggcgccaaagcgcttctggatccgcgcttccgcctggagttcgcggtctcagtgattgatcgagaaagcaagagtgtcatcgaaacccgaacaggttctcaggggggtagtggtggcgagaaagagatcatcgcctcctatgtgctgaccgcttccctcagctatgcgctctgtcccgacggcagcagccggccgttgttcggcaccatcgtgctcgacgaggcgttctcgcgcagctcccatgcggttgccggtcggatcatcgcagcgctgagggaattcggcctgcatgctgtcttcatcacgcccaacaaggaaatgcgcctgttgcgccaccatacgcgttcggccgtcgtcgttcatcggcgcggcgtggaatccagtctggtttccctgagctgggaagctttggatgagcatcatcaacagcgcatcaaggccatgcatgaagtcgcccactga

SEQ ID NO: 43208 - DNA, 342 bp, Pseudomonas aeruginosa NCGM2.S1; identical to SEQ ID NO: 42086

SEQ ID NO: 43209 - DNA, 1470 bp, Stenotrophomonas maltophilia D457
atgaagcaccgcgaacgcatctcccgttaccgccatctgcgcgaacagccccagtggaagctgcttgccgccgaccacgccccggaaatcatcggcctgctgcaggggctgctgatggacggcgagcgcacgctgccgtcgtcggtgctcaacgagcgcctgcagcgtgcgctggaccagctcaacggcgacgaactgtcgcgtgagctgccgcgtaccgcgcaggcctacatcgcgcactggctggcccagggctggctggaacgccgcctgcccgaaggcgccgaccaggagcagtacgagctgtcgaccgcggcactgcaggccatccgcttcgccgatggcctcgagcaggcccgcgtggccgccaccgaaagccgcctggcgctggtcatcgaacagctctcgcagttggccgcgcagaccgagtccgacccggatgcacgcctgtcagcactgcgcgacgagcgcgaccgcatcgacgccgagatcgcccgcgtcggcgccggccgcgtgatcgcgctggatggcaagcgcgcgctggaacgtgcgcgccagatcatcggcctggccgacgagctgaccgaggacttccgccgcgtgcgcgacgacttcgagcagctcaaccgcgacttccgcgaacgcatcatcgacgacgagggcgagcgcggcgatgtgctgtcgcagctgttcgaaggcgtggatgtgatcggcgagagcgatgccggtcgcagcttccaggccttctggcgcctgctcaacgacgccgaacagagcgcccagctcgatgccgcgctggaagcggtgctggcgcgtggcttcgcccgccgcctggaccgcaatgaacgcaacttcctgcgcggcttcaccagcaccatgctcgagcgcggtggccaggtgcacgacgtgctgcagaatttcgcgcgcagcctgcgtggcttcgtgcagagccgtggctatctggaacagcgccgcctcaaccagctgctgaagcaggcgcagtccgaagcgctggccctgcgcgacgaattccccgcacaacgcggcatcggccgcgacctgcagctgaccaccagccgcctgcgctcgtggtcgcagtggaagctgcacgatccgcgcagcgcccaggtcgatggcaacgtcgagtacaacgacgccgcagccatcagcctggagagcgtcggtgatctggtcgcttcgtctgaaatcgacttccgcaccctgcgccgcgacctgcacgacctgctcgatgcacagccgcggctcagcatcgcccaggcactgtcgcagcgcgaagcaccgcagggtcttggcagcgtcatcggctacctgtcgctgggcacgcgcttcggcaacgtgatcgctggtgagcaggagcttgccgaatggcgtggtggcgacggccaggtccgtcgcgcccgcatcccgctggtttggttcacccaggagagacgccatgagctggcatga

SEQ ID NO: 43210 - DNA, 702 bp, Stenotrophomonas maltophilia D457
atgagctggcatgaagatcccatcgacgcaccgcaggccgacgtggcggaagacgcctacgaagccgaaccggtggcggccgtggcgcagccccgccgtggcaatgacgtgtattacctcggcgacaccgggcgcctgccgctggatgcacgccgcgcgctgtgccagctgctgatcggccccagcatcgaccagctgcgccacgccaagctgtggccggcactgatccgcagcgaggcggccatccgctcctcgctggcggacctgttcctggaactggtgctcgaccgtgacagcggcgtggccttcacccgccaggccgataccgaagacgtggatgcgccggtgctgctgcgcacctcgccgctgaccttcatcgattcggtgctgctgctgtacctgcgccagcagctggccgaggccgatgcgcgcggcaaccgcgcggtggtcgccgacgccgagatggccgaagcgctggccatctacgagaagaacctgtccaccgaccgcgccggcttcaaccgccgtgtcgcctcggcggtgcagaagatgaaggacaaccacatcctgacccgcctcagcggccaggacgaccgccacgaagtctcgccggcgctgaagctgctgttctccgccgaagacgtatcccagctttcggcggtctaccgccagctgcgtgaaaccccggccgccgaggcctga

SEQ ID NO: 43211 - DNA, 3381 bp, Stenotrophomonas maltophilia D457
atggctatctccaagcacactcccgccctgttcaacgaaggcctgccggacccgcgcctgcagcagttccgcatgcgtcgcctgcaggtacacaactggggcacgttcaacggactgaccgaagtaccgatcgccgagcgtggcttcctgttcgtcggccgttccggctcgggcaagtcgaccctgctcgatgccatgtccgcgctgctgacgccgccggccatcgtcgatttcaacgccgccgcgcgtgaagccgagcgcagtggccgcgaccgcaacctggtgtcctacgtgcgtggcgcgtgggccgaccagcaggacagcggcaccggcgaaatcgccacccagtaccttcgcaagggcgcgacctggactgcgctggcgctggagtaccgcgccggcgatggccgcgtggtcagcctggtgcgcctgctgtggatctccggtaacggcacctcggccggcgatgtgcgcaagcactacatgatcgccgagcgtccgttcgacatcgccaaggatcttggcggctttgacctggacctgcgcaagctcaagcagaagctgtccgacctgcaccacttcgacaccttctccggctacgccgagcgcttccgcgacctgctcggcatcgacaacgagatggcgctgcgcctgctgcacaagacgcagtcggcgaagaacctgggcgacctcaacgtcttcctgcgcgacttcatgctcgacacgccgaagaccttcgacgccgccgagcgcctggtcagcgacttcgccgaactcgatggcgcgcaccaggccgtggtcaccgcccgccgccaggtggagaccctgctgccggcacgcgcctactacaacgacctgaaggaaatgcaccgccggcgcggcgacgacgaagccctcaagcttggcgtcgacagcttccgtgaaagccgccgccaggcgctgatcgaggcgcgcctgcgcgagatggacgtgcgtgaccgtggcctgctcggggaagaagcccagcgccgtgccgcactggacaaccacaccgagcgcctggccgaactggaactgcagcgtcgccagcagggcggtgagcgcatcgaggaactggaacgcgagcagggccgcgccgaagccgagcgtgaccgccgccaagccaagcgcgagcaggcaagcctggccgcgcagcagctcggggctgaacttccggacgacgcacacggcttcgccgagctggtcgagcgtgcgcagaacgaactgcaggaccgccagcgtgcctcttcggcgctggacgatgcgatcagcgatcgcctgggtggcaagcgcgatgacgagcgccgtttcggcgaagtccgtgcggaactcgaagcgatgcagcgcacgccctccaacatcccggcgccgatgcagaagctgcgcgcgcgcctggccgaggaaaccggcattgccgaggcggcgctgccgttcgtcggcgagctgatccaggtccgctcggaagagcagggctggcagggtgccatcgagcgtgtgctgggtggcttcgcgctgtcgctgctggtcgatgacaagcactacaacgacgtcgccgagtgggtgaatcgcactcacctgggcatgcgcttcacctactaccgtgtgcgccgcaacgatgatgcgttcgcgcgcgagccgtcggcgaagtcgctgctgcacaagctggagctgcgcgagcacgtattcgaaagctggctgcgccgtgagctcggcaagcgcttcgactacgagtgcgtggatgccaagcagctgcgcaacgtcgaccgcggcatcacccgagaaggccaggtcaagcatcccggcgaccgcttcgagaaggacgaccgcagtgcggtgggcgaccgccgtcgctggatcctcggcttcaacaaccacgacaaggtgggcgccttcgagcgcgaagcccaggaactggccaagcgcatcgccagctgcgagaccgacatcgcgcgcctgcgtgggcagcgtgaccgcgacaacgaacgtcgcctggcctgccacgagctggtcagcatcagctggaacgagatcgacatcgccgccccgcagcagcgcctgaccgatatcgaggccaccctgcgcgacctgcgcgaaggcaatgccgacctggccaagctggccaagcagatcgacgccgtgcgcgccgacatcgagcaggcccgccgcacctatgaagacgtccgcgtcgagcgcgggcagctggtcaaggaacgcgatcgcctcgaccgcgctcgccagcagagccgtgcgctggtgctgccgagccttggccaggagcaggaagccgggctcgccgagcgcctgcaggagcagggcccgctcagcctggaaacgctggaggcgcacatgcgccaggtcagcaacgcgctgaacgagcagctgtcgacctcgcagcaggacctcaaccgcatcgagaaccagctgatcggttgcttccgtcgcttcatccagcagtggccggaggaatcgggcgacttcaccgtatcggtggcctcggccgaggatttccttgcccgcctcgagcgcctggagcgcgacggcctgccgcagcacgaagagcgcttcttcgatctgctgcagaaccagagcaagaacaacctgctggccctgcagcgccacagcgccgaggcccgcaagtcgatcggccagcgcctggacgaagtgaacgccagcctggagcaggtgccgttcaaccgtggcacgctgctgaccatcgaactgagcgaccgccgcctgccggaagtcggcgagttccacctgcagctgcgcgaggtgctggcgcagcagcagaccgagcagcgagagctggccgaatcgcagttcaccgtgctgcgccagctggtcaaccgcctgggttcgcaggaaggcgaggacaagcgctggcgcgagctggtgctggacgtacgcatgcacgtggagttcatcggcgtcgagctggatgcggaaacgcgccagcaggtcgagatctaccgcagtggcgcgggcaagtccggtggccagcgccagaaactggccaccacctgcctggctgcggcactgcgctaccagctcggcggcgccgacagccagctgcccagctacgccgccgtcgtgctcgacgaagccttcgacaaggccgacaacgagttcaccgcgctggcgatgaacatcttcgacaacttcggtttccagatggtggtcgccactccgctgaagtcggtgatgacgctggagccgttcatcggtggcgcctgcttcgtcgagatcagcggccgccacgactccggcgtgctgctgatcgagtacgacgaagaaggcaagcgcctgaagctgcccgagcgcagccgccagcaggccaacgaaccggaagaagccgaagcctga

SEQ ID NO: 43212 - DNA, 1470 bp, Xanthomonas axonopodis pv. punicae str. LMG 859
atgaagcaccaggcccgtatcgccggctatcggcaactgcgcgagcagccggcatggaaactgcttgccgccgaccacgcacccgaactgatcggcctgctgcagacggtgctgatggatggcgaacgccgcctgccttcggcggtgttgcacgagcgtttgcagcgccagctcgacgccttgcgcgccgacgagctctcgcgtgaactgccgcgcaccgcacaggcgtatctggcgcattggttgtcacagggctggttggaacgccgcctgcccgaaggcgcagccgaagaagaatacgaactctcgcgtgccgcgacccaggccatccgcttcatcgtcggcctgcgcgaaagcagcagcagcgccaccgaaagccgcctgtcgctggtgatccagcaactggtgcagttggccggacagaccgaagccgatccagagctccggctggccgcgctgcgcgacgaacgtgcgcgcatcgatgccgagatcgaacgcgtggcgtccggccgcgtggcggcgctggatggcaagcgcgcgctggaacgcgcgcgcgacctgatccatctctccgacgagctggccgaagatttccatcgcgtgcgcgacgacttcgagcagctcaaccgccaattccgcgagcgcatcatcgacgacgaaggcgcgcgcggcgacgtgctcgaacaactgttcgacggcgtggacgtgattgcagacagcgaagccgggcgcaccttcgaggcgttctggagcctgctcaacgacacccagcaaagcagccagctcgaccaggcgctggatgcgctgcttgcccgtgggtttgcccgcaagctcgatcgccgcgaacgcgcttttttgcgcgggctgaccggcacgctgctggagcgcggtggcgaggtgcacacggtgatgcagcatttcgcgcgcagcctgcgcggtttcgtgcaaagccgtgggtatctggaacagcgccggctcaatcaattgctcaagcaggcgcagggcgaagccttgcaattgcgcgacagcctgcacgccaccaccgccaccggctatacgcagccgctcagcagcagccgcctgcgctcgttgtcgcaatggcggctgcacgatccacggctcacccaggtcgatggacgcgtgcaggccgccgacgcggccgagatctcgctggacagcgtgggcgatctggtcgcgcaatcggagatcgatgtgcgcagcctgcgcaacgacctgcatgagctgctcggccaacgcccgcggctgaccatcggcgacgccttgcaacaacgcccggccgtgcagggcctgggcagcgtgatcggatacctgtcgctgggcacgcgccacggcatggtgatcgaaggacagatggaaacggtgcaatgggaaggcagcgacggcgccgtgcggcgcgcgcgcattcccttggtgtggtttacccgggagaaacgcaatgaactggtctga

SEQ ID NO: 43213 - DNA, 702 bp, Xanthomonas axonopodis pv. punicae str. LMG 859
atgaactggtctgaggacactggcctatacgccgacgaggacaccggggcgccggccatcgacgaccgcatgccgatggcgcaaacatccagtgccgagccgcgcggcgagctgtttttgggcgacaccggcacgctgccgttcgatgcgcggcgtgcgctgtgccagttgctggcagggcccagcatcgatgcgcaacgtcacggcgcgctgtggccggcgttgttgcgcaacgaggtggcgatccgccaggtgctgtgcgagctgtttctggagttggtgctcgaccgcgagggcggggtggcctttacccgtcaggccgacaccgcagagctggaatcgcccacgttgctgcgcagtgcgccgctgacgtttatcgagtcggtgttgctgctgttcctgcgccagcaactggccgaggccgacacgcgcggcgagcgtgcagtggtggacgaggcgcagttggtggaagccttgtcggtgtacgaaaagaacgtgtccaccgatcgggcgggcttcgcgcggcgggtgatgacggcgatcggcaagatgcgcgacaaccagttgctgtcgcgcttgcgcggcagcgaggagcgttatgaagtgtcgccggtgttgaagctgttgttttcggcagaagatgtgcaggccttggtggtggcgtatcgggagctccgtgagggcgaggttgcgctggattga

SEQ ID NO: 43214 - DNA, 4023 bp, Xanthomonas axonopodis pv. punicae str. LMG 859
atgaattcccagtccaatctgtcgccggcgcagccgggtgcctccttgtttgccgagacgctcgccgagcaacgtgcgcagcagttccgcatgcggcgcttgcaggtgcacaactggggcaccttcaatgggctgaccgaagtgccaatcgcgcagaagggcttcctgttcgttgggcgttcgggctcgggcaagtccaccttgctggatgcgatgtcggcattgttgacgccgccgagcatcgtcgacttcaacgctgccgcgcgcgaagccgaacgcagtgggcgcgatcgaagtctggtgtcgtatgtacgcggtgcgtgggccgatcagcaggacagcgcgtccggcgaaatcgccacgcaatacctgcgcaagggcgccacctggaccgcattggtgttggagtacgcgaacgcgcatggccagacggtgagcctgatccggttgttctggatcgccggcagcggtaacgcggcggccgatgtgcggcgtcactacatggtcgcgccacgctgtttcgacgtggcgaccgagctggatggcttcgatctcgacctgcgcaagctcaaggcgcgattgggcgatgaagttgcgcatttcgacggcttcgccggctatgccgaacgcttccggcatgcgctgggcatcggcaacgagatggcgctgcggctgctgcacaagacccagtcggccaagaacctgggcgatctcaatgcattcctgcgcggtttcatgctggacgagccgcggaccttcgaagcggccgaccggctggtggaagattttgccgagctcgatggcgcgcaccatgcggtggtcaccgcccggcgccaggtggaaaccctgacccctgcgcgcgagcaccacgcggcgctgatggcgctgcgccacagcgtcggcgagttgcgcgagttgcagctgggcgtggacagctaccgcgagcagcagcggctggccttgctggaggagcggctgcaggagctggacaaccaggaccgtggactggccggcgaagaaggccagcgccgcgaatcgctggataaccacgaacaaaaactggtcggcctggagcgcgagcagcgcgccgccggtggcgagcaggtcgaagaactggaacgcgaacgcgcacgcgtcgagcgcgagcgcgacgaacgcctgcgccgccgtgcacagatcgaacaggcctgccgccagctcggtaccgccctggcggccggcgccagcggctttgccgcgcagattgcgcatgcgcagaccgtgctggataacggcaagcacgacgccagcgcgctggacgaggccatcgccgaacgcatgggcgcgcggcgcgacgacgagcgccgctttgccgaaatccgcgccgaactggaggccctgaaacgcgcgccatcgagcatgccggcaccgatgcaggccctgcgcgcgcggctgtgcgaagacaccggcattgccgaggccgcgctgccgttcgttggcgagctggtgcaggtacgcgaggaccagacggcctggcgcggcgcgatcgagcgtgtgttgcacggctttgcgcaatcgctgctggtggacgagcgccactacccgcaggtcagcgaatgggtcaaccgcacccatatcggtacgcgcctggtgtacttccgtgtgcgccgcaacgacgagctgcattcgcggcgggtcgatcccggcgcgctgcccggcaagctgcaattgcgcgagcacgcctttaccgaatggctgcgcaacgagctgacccgccgtttcgactacgcctgcgtggacaacgccgcagcactgcgcaacgccgaccgcgcaatcacccgcgagggccaggtcaagcatcctggcgatcgctatgagaaggacgaccgccacgcggtcaacgaccgcaagcgttggctgctcggtcacgacaaccgcgacaagctcaaggtgttcgaacgcgaagcgcagacgctggctcagcgcatcgccagctgcgatgccgatgtggcagcgctgcgcaagcagcgtgagcaggaccaggaacgccaactggccgcgcacaccctggtggagcgcgactgggacgagatcgacgtcggccccaagctgcagcgcctgagcgatatcgacgaacagttggtgcagctgcgcgaaggcaacagcggcctgcgtgcgctcggccaggccatcgacaccgcacgcaccctgcgcgaccaggccaagcgcacctacgaagatgtgcggctggagcgcgcgcaactggcgcgcgagcgcgtgcggctcgaacagcagcaggcggcctgcgcgggccgcgccggttccgccacgctcacgcccacccagttgcagggcttgcgggaacgacttgccgcattgacgccgctgtcgctggacaatctggaagcgcatttccgcgtggtcgaacgtggcctggccgagcagctgaccgacagccagggccgcgacagccggctcagcgcgcagttgctggagtgcttccgcaagtattgccagcaatggcccgaagacagctgcgatttcaccgtgagccttgccagcgccgacgatttcctcgcgcgtctggaccggctggaaagcgatggcctgccgcgtcacgagcatcgtttcttcgacctgttgcagacccagagcaagaacaacctgctggccttgcagcgccacaccgccgaagcccacaagggcatcaagcagcgcatggacgaggtcaacgccagtctggaggaggtgccgttcaatcgcgacaccgtgctgaccatcgaggtcggcgaccgccgcctggccgaggtgcaggaattccagcagcagttgcgcgcggtgctgtcgcatcaacagaccgaagaccgtgccctggccgaagcgcagttttccaccttgcgtgcgctggtggcacgcctgggcgcgcaggaaccggaggcacgccgctggcgcgaacaggtgctggatgtgcgcctgcatgtggagttcatcggtgtggaactggacgcacagacgcgcgcgcaggtggagatctaccgcagcggcgccggcaagtccggcggtcagcgccagaaactggcaaccacgtgcctggcggccgcgctgcgttaccagctcggcggcgaagacggcgaactgccgcgctactgcgcggtagtgctggacgaagccttcgacaaggccgacaacgaattcaccgcactggcgatgaatatcttcgagaacttcggcttccagatggtggtggccacgccgttgaagtcggtgatgaccttggagcccttcatcggtggtgcgtgctttgtcgaaatcagcggccgtcataactccggcgtgttgctgatcgaatacgacgagcaggcacagcgattgaagctgccggagcgctcgcgcggcgatgagccggcagttgccgatgccactgacgctgcgccgtcgatcgaggctgcggccgagtcagcaggagtgcagggcgctgcaagcgcagatggcatggcaaccaacggcgtcccaatgcacacggcatcgcctgcgacggaggagaccccgcccgcagcgcaggaaacgcagactggtcagcgcaagccggcagtcgcgacgacgagcaagcagaacaagaccgccaagaccgcatcttccacgcgtgctgcggcacagcctcaagcaaaacgcccgaagaaatcgccttcgcgcacccctgctctggctggcaagccggcatccaacaaacgcccagcgggcgtgccggcggtgtcgtcaggagtcgcatccaggtccaacgtgggcaagaccactcggtcttcaaaaacgccgggcaagccgattgcggccacaagcgcatccaacgccacatccaggaaggtcgccgccgcatctgcggcattgaaaactgccgcagccaagccacgtgcaacagccgcatcgactggtcagccagcgcgcggcgccggcaagacaacctcgacgcgtgcggtggctaaaccgtcaccggccacaacgcgcggcgcaaaggcaggcgccccgcaggcgcgccgcaaacgctga

SEQ ID NO: 43215 - DNA, 1008 bp, Ralstonia solanacearum K60-1
atgcgcggctgtcgcaacgcactggacgcggcactgtcggaccgcggtgacgcgcacgacctagtcgatgcctacgaatacgccgagaaagtcatcgaggatttgaccgatggcatcgactatttccaggagctggtccgtcacctgatgcagaccgcctcggtgcaaacgcaatggagtgagttcgtcgagttcctggaccgcttccagcgtgactattccaagcagctcactgctgataacgcaacgcttaaccggcaggccatcgtgcagaagctggagcgccttcgcctcgtccccgaagccaagttcaagcggatggacgaacagcttcgagacatcgcccattgggccgtgaaggaacacgtgggcacgtccgtctatgactggctcctgactcgcattgaagacatcgtcgatgctgcgtgccagtcgaagcagcctggcttcctgaaggccatggagacttacctcaagcgggtcaatggtttagcgctgcagtcaatgatgctgcgcgcaggccagacccggcatgcctacctcgctgcgattcagcaggtcgccgaggcccccaaggaacaacaggacctgctgctcatgcacatcgggcagttcttggcgccggctgaggtgcggttgctggaccccgcaagcttcaagctccggacggccgcccagcgccgcaaggcggtcacgatttccgtgcggccgcgaccctctcgcgaagagcgcttggctgcagccatggcgcgcgccgaggcggaggccttctccatccccaacgaagaggttgcccagttactccggcgggacctgcgcatctttcagcatcccattcgtgtttcagcgctcccaacggccaccgcccgcgacgccctccgtgccatgcaggcagtggaggcagttcgaagcgaggtcggcgcagacctgtccatcaagaagctgcctacccgcttggagaacgagctctacagcggtaacgattacgagattgacctcaaaaaatga

SEQ ID NO: 43216 - DNA, 672 bp, Ralstonia solanacearum K60-1
atgagcctcctgtcccacatcaacgaacaacttgcgcttgccaacatcaagccagaccggttccgggaaatcatcaaccgcctgatggcctacggtgccatcgtgcgcgaggaggaccgggttgagcttctgctatatgacgacgcaaggcgcgtcgagggcctgctggaggactacttcgacatcgccggcttccggttgcaccacgacagcaataaccagttctatcgcctctacgtggcgggcgccgtagttgatgggctgcctgaggacattttggagccgacgccatcgctgcgggctcgggtatctcccgacttcgttgcgatggcccttgctctgcgcttcctgtaccagaacaagctcaacacgggcgacatccagccccagggagaagcgctggtgagcttcgaggaaatcgcggccaccatgcagacgcaattaaagcgtcctctgccgaacggcatgggcgacaagatggccttgctggccgagttgaagcggcatcgcctgctcagctacacggccgagttttcgatttcggatgaagacgcgctgctcgctatccggccaaccatcctgggcatcgtgtccaacgacgcgctgagtgcagctctggaagcagaaggtgtggttgaccaagaggcgtccgccgaggaggccgaccaatga

SEQ ID NO: 43217 - DNA, 3633 bp, Ralstonia solanacearum K60-1
atgaagctcgaccgcttggtgcttgtgaactggggacaactgcagcccggcaactacgagctgggaaacatgacgctgctcaccggcccaacgggtgcgggaaaatcgacgatgctcgatggtcttcagaccatcatgacggcagcctaccaaggtatcgtggcctacaaccctggccaagaggaggtccagcaaaaccatcgccgtggcaaatccaagcgcacccttgaatccttcgtggtcggcgccgagtacagcctcttctctcggccggcaggtgcccagggctacctcgcggcggtctttcgtccagggcccgaggacggctcggccaagatgttcactgcgctcgtagccgcctcggcccgcgtggacggttcaggagagcggcgagacgcgaagttggaacgtctcgtcctggtcatcgtcgaggacgctgcgctgtcggtcgaacagttctttgaggacttggaccaaggtatctgtgtgccggtcgaaaacatcgttaggcagctgaaggccaggtacccgaaggtcgttacctacgacgaccacaagcgcgattacctaagcgggctttatggcaggttccgcgggcgcgtgtccattccctgggacgaggctcagaacgcggccaaggcatggtcgcagtcaattgcctacaagccaatcggctcggttcatgacctagttcgggacgacatcctcgagttcgatggaaagctgctgcaggagagcattacccgcatcagtgacctcatgcgccaagtgacaaacttgaaggttgaaggcaagcgcattgaagggaccgtcactcaacttcgcgcgctgaaggaggtcattggcaagacggccgccagcttcgaggaacaggttcaatatgacttgctcttggccaaaatgcatttggctgccgacgacgagcgcgtcgcttcggagcaggggaaaatcaagcacgacagagcgctagtcgaccagcacaagctcaaggctcaaaccgaagcacagctaaagcgcaacgttgataacggccgcattcatatcgcagcgaagttgagcggcattccggcccataccgagaagaagacgcttgacgagcgcctcgtgcgggcgacgtcggctgcgcgcgccaagctcgctgagctgcatgcaggtctcgtcgccgcggcgcacatcaagaacaccggcgacgccattgttgggcggccggtgccggagcagttcccgaggttacgcgcgtccgtagatgttgtggccgaggcccttgcgtctaccaatgtggacaggctagtagggctcctcaattccgtggacgatgcgaaccgtgatgacgtcctgtcagtagaaaagctacttcagttggcctccgcatttgacggcatcgacgcgggcctgagccagttgcacaactcgttagttggcaccgagggtagtgtgctgatggctgttgctgccgaatcggcatcgctcggccagcgcgtcgacagcgcgaagaaggagcgcgatgagctggctgaccgtaagcgacgacttgcggccggcgcgggcaactacaaccgggacaccgttctcgcgttggagcgcattcgagagaggttccccgacgccagtgtccaggtgttatgcgacctcgttgagccagtgtccgaagaatggcaaagcgccatcgaaggctacatggacggcgcgcgcttcaacctcatcgtcaagccagactgggaagcccgcacaattgacttcctgaagtcctggggctcgcgctcgaaggtcgttcagggaaagcgatgcttggagcgtgctgacgagtctcgtgtgccggttacttccatcattcacgagttgcgcaccgaccaccctattgcgcgggcctacctcatcgagcagttcgggcctgtcgtcaaagtgggagactccgaggagctgcggcggaccccgcgcggcctcaccaaggatggtaagggcagcagctcgatgacgatgttcatctgcgagcgccgggactttgtactcggtcgcaaggcgcgtgagcgggcgttggagcgcactgctgaaatgctagaggccgccgaaaaggacatcagtaagctggcgagctaccaaggtgacctggagggtttccggaagctgctcacgactctgaaggagcccacgttcgacgcgcagccgttggcccagcatgccgccgacctcgacgtcacacgtcggtctctgtcgcaacttaatttgactgaggtcgagcagctacaggctgagctgacccggatggaagaactcatccaagcgcatgacttggcaattgatgcggccaaggagactgtcacgctggcagaacagcgaataacggctgcggagagcgctatcaaacgcatcaatgagggccgggacgctcgtttccaagagcgcgaaaaccagattcgccggctgaagcacctctgcgaagcgaactcggagaagacgtacacggtgatggcccaagaggtggacgacctcattgcgtctcacgcgtacgaaatccctgccgttcaggcacgggtttcccatctgcatgggcaacccgataagctctttgccgacgtgcgcgagatgctggcggagtacaacgctgctgttcgtgccgacgagcgctttcagtctgcgctgccgcacctgacggatgcgccgtccttcgacccctgctatggccccttggtgctgctcggtcgttcggtcagcatgctccacaacgagcttgagagcatcggtctgtacaacaatcgtgccaaggtcgaggaggcagagcgctcctttcacgacgtcttcaccaagcagttctgcgttgaaatcaagagcaaggtcgacgaaggcgtgaggatgctgcgccagttgaatgtcgagcttgagaagctgaagttcggtaccgaccgcttcagcatcgactggtcgaagtgggagcctgaattccaggagtattacggcttcttctcagccgttgctgaactggccgattcgccggaagcggtggacctgttcggtgagacggagctgtcgcctaagcacatcgaggtccgtgaccgcctggtcaagctcctcctggaccaagaccaggacagggcggggcgcgagctgctgcgcatcgcagactaccgcaactaccgacgctacgaaatttggaatgactcggacagcggtggccgcattgccctgtcgacgtggggcactggctcgggtggtcagttggagacgccagcgtacattgtgcgcgccgccgttgtgaccaaccgcctgcgcctgttcgataagggtgctagcttgaagttgcttgttagcgacgagtccttctctcgcatggacgagccgcgtgcacgcgctgtcctgcgctatctgcgagacagcatgggtctgcagctggtcagcgccatgccgaccaagcacgccggcgcgctgcgccctgagttcgaccgcgagttcagcttcagccggatgagcgtgccagacaacggtgaaattgacttcgtctccgagtgcgatgagcgcgtcttcaagaaggaccgcatgcgcgatgtctgggaagcgcagcgtcaagaggttcgcgagcaggccaagctgctctttgatgcggcagaggttgaagaggtcacgggagctgcgaagtga

SEQ ID NO: 43218 - DNA, 1146 bp, Ralstonia solanacearum K60-1
gtgacggagcaactgctttggcttcagtctccgcctgttcagcaactgctgaacctgcttgtggaccgaatggattcggccgagcaaaggggaagcgctcgtacgcagtcggtcgctctcggggagcggacttggccggctctctacaaagctcagcgggaatcggaaaaggaggagctttggggccatgccgtcgagttggtgcgttgggggtggctcacggtcaagccagccgcggccatccggtcccgctctggctatgccgattcgccacgcgtcatggttgccaacgaggtcgaggtgagacggatggttggtcgcgcacagcgcgtcaagtcggctgcggagcgctggcgcgaggctgtccgcgacggtctccagggcaccgccgaggtcaaggccgctgtctgcgatttctgcatcgatatgcctgaccacactatggccgaggttgtcgaacgactgaacgagctccccgctcttgccggcaagcctatgctgcttcgcgaagtctcctctcagctgttctggggcatgtcgaaggtcctggacaagcggcagagcctcgtcgccgcagtcttaggtgtcgatgagtgcccgtttccggagtctccgattcagctgcaggtgttcctgccgccggcgggcctccggggagtgctgttcattgagaacctcatgagcttcgagcgtgccactcgctcgacgagctcggcgtttgacgggttggctctggtctacgcgtcaggcttcaagggaagtgctcagcggttgcgcaccccggatggttgctctctcttctacgccgcccgtggcggcatcagtcaaaaccttcgagatggcttcgaggcctggctctttggcaaggatgtcattccggccttcttctggggggacctggattggtctggcatgcgcatcctgtctgccatgcgcacgagttttctcggcctcacggcttgggaaccgggctactctcagatgctggccgctctcatagagggcaagggccactcaccggaagccgccgacaagcaaggacagaaggcgctaaacacctccggttgtgcctacgcggacgcccacctgatacccgcactgcagtcctacggaaggtttgttgaccaggagcaaatcaacccgtag

SEQ ID NO: 43219 - DNA, 1164 bp, Selenomonas sp. FOBRC6
atgatccgccgcatgaaggaattcggctggctggactatgagcagcgcgagaacttcaaaatatttattttgctcccacattacagcagccgcttgtgggggctttttgcaaatctctgcgaggggcgcgcggtggagtaccaacgctttgccttcacgacctatcaggtgctctcgggcgaggcggcaaaggtgcagccgagcatggcggtgctcgaggcggagcggctcgcggaggagttcgttgaggaactgcgcattctgctgaacaatatcaagagcaagatggagcaggtctccgcgcagacgagcctacaggacgtattatcccatcattttgtcgaatatcgtccggatatcgtggatcgcagctatcatcgcctcaagacctcggatcacgtctcgcgctaccgaatccgcattctgcaggaggtgcaggagatacggcagaacaaggagcgtctgcgtgccctctgcgatgatgccgtacgccgtcagcttgctgactcggtggaggctgcggaataccgcatgaacgcatcgctgcagacgatcgaggagatctatcggggactcgatgatatgtttgcccagatcgaccgccgccacaatcagtatgtgcgtgcgtcctacgagcgtgcactgtatttgcagcaggcgggcagcgcgcgcatggagagcatgattgcgggcgtcctcctcgccatagccgaggcacgcgaggagagaaccgaggttggtggtctgccgcgtctctttcgtctgcaagcgatggatatgctcctgcccgcgtcccgctatgtgccgcgcaagaagcgcattctggaaccggctgcggccacgcccgtgcgtgacgttgatgaggctctgcgcgcacgtgtgcggcgtgagagtgcggagcgcgttgcgcgcggtatctcgcggcagaagatcgaggcatggattctggatgtgctcgggcagcgcggctcgatggagatcgaggagctgctgaccatcctccgcgaggtggaggagcccgacctcttgcagctgctctacgtctatctctacgggcatgacgagctggcacgatatcagctgggcaagcacaaggagatacgcgagcaggacacgatacgatacagcaaccgcacggtcaggcgcagggagaagagaaaatga

SEQ ID NO: 43220 - DNA, 618 bp, Selenomonas sp. FOBRC6
atgaagctggaactgctgaacgaagaggaacgcatacgcattcggaacgtcatacagtcgcttttggcatgcaattttttgacgcgcgagcacgatgcggcactctacattgcggcgcggcgttatcgcgaagagcttgcggagtactttcaggtaatcggctgggagttccgcgtggatgagcgctatgagatcgtgtggctcctctccacggggatggcgcacaggcgctccctgacgttggaggagagtatatggctgctcgtattgcggctcatctatgaggaaaagcgtacagggctgaacctgagcacattccctatgactacgctcgcagagatccgcgccaagtatctggcactgcatctgcccgacctcaagaaaacagcgctgcagcgcctcacacagctctcgaagcaataccgcctcgcagatgtactcgatcgggagctgtccgaggaggcacgcatccgcctcttccacacgcttgtgcttgccgtcgacggggaggagctgtcggaactgcacaagagactggaaatctatcggcagagaaaggaggaggacgatgaagaagctgcggaaaatgaaggtcatcaattggcattatttcgatga

SEQ ID NO: 43221 - DNA, 3303 bp, Selenomonas sp. FOBRC6
atgaaggtcatcaattggcattatttcgatgaggacgagatttccttcggctcggcaaccatgctctcggggtacagcggcgcgggcaagtccacattgctcgacgccctgcagtacatcttcattgggagtcagacacaggcgcggttcaacgcggcggcgacgcaggaagcgcggcggacgctgctgcactatctgcgcggcaagatcaaggcagaaggggtacagtatctgcgcgcggatgaattcacctcctacatcgtgctggaattctatgacgatataaaaaaagtttcctttatcgcgggttatgtggtcgatgtcttccgcgatgacagcttgcaggaggaattcttcctgctcgatcgacgtgccctctcggaggtcgagtttcgtggggaggacggcgcgctctatacgcgggaggcatttcatcggcgctatgcacacggcagcagcgtctttgagacggggaagaagcagtggcagcggcgcctgatgaaccgactggggcagctttctgcacgcttcttgccggctttttcacgcgcgctcgcctttcgccccatcaatcaggtgcgcgattttatctatgagtacatcctcctcccgcgcgatctgaaattggacgtcctgcgcgaggtgttctactcctatcagaaattcgagcgcgatctgcaggggctgcgcgcgcagaagcgcgaactggaaacgctgcaggagcattatgattcctactgcaagtggcgggataccgcatgcgagcaggaatttgtcctcctgtcctacaggcatatgcgcgaggcggaaaagctggatgcggggcgtatgcagaaagagtcctgccgcgaacgcgtggatgagctgcaggtcagaatgcacgagcaggagcggctgtccgagcgcaggaatctcgagcagcaggaggcatatgctgcgtggcagggcaatgatacaaagcgcaggcgtgacgaactgcttgcggcacagaaggaatgcgaggagaagcagcgtgcgctcatagactcccatcggcgtcttcagcagggattattgcgcgaagccgagcgtattgcggcacttgcagcatatcctgcgggcgaattctatgcgctgccggagggttttgcagcctccttgggcgagctgtcgcaggtactcacgcatgtggcggaggatggtgtacagtcggaggagatcgggcagctgcaaggcgatttgcgtaatggcggcgcactgctcgccgagatcggtgcaggaatgcagcgcggcgcactcctcttggaacatgaacagacggcagctggagcgaggcaggaggaactgcgcgcggagatcgagggactcaagcggcgacagcgcaaatacggccccgagatgacgcggctcaaggagctcttggagcagcggcttgcgggacgctcgggggtctatgtgctctgcgaggagctggagattctggacgaggagtggcgcgatacactggaaggctatctgaatacgcagcggttcgatcttctcgtggatgagtctgtctttcgcgaggcgctgcacatctatgagactgaaaagaagcagcgccatttcgacggcgtggggcttgtcaatacagaggcagagaaaaagtatctgggagaaagggaacacaattcccttgcgtctctcctgcaggcgaagaatccccttgcacaggcgcgcgttgaccatctgcttggaacggttatgcaggctgcggatgagcaggagatgataacgtatcggagcgctgcaacgaagagctgtatgtcctacaaggggcttgtggcgcgtcagattccacgccgcttctatgagatcccgtacatcggcgcgggcgcgatcgagcgccagctcgagatccgtcagcgggagttggaggaggtgcaacagcggctcgctgcgctcgcagaggaagcgagccgcatgcagacatttgccgaccttctgcacgagcccctgcatcggtatggagattttgccgagcagctgggcgtcctgtccgaactcgaagcctgcgcggcggagctggcgcggatggcagaggagctttcgagcatggatctcagcgaggcggagcgactgaaagccgcctatgaggaggcgcggcagcgtgcagaggaggcggcacgcgcatgcagtgagacgacgaaggagcaggcacgtgccgagtctgcgctcgaccaggcggagcgcgcactgccgcttcttgcacgcgcggaggaggagtcggggcaggcggttcgggcgtggcgcgatgcctatccggagctgtccgaggcagccgaggcgcgtcttgccgctctcatgcaggaggcacacggcgagcgcagcatggaggagcgtctgcagagctacgatagcagtcggcgcggcaacgagacgcgtcgtgacaatatgtggcagcagctgctcgttgcgcgtgagcgctatggtctggaacacggcgacacggggcacgtctatgaccccgatcatgcctactacgcacagatccacgcacgccttgcggcgacggatattcccgccttcgaggagaaggcgcgcgaggctctggcgcagtcggagatggagttcaaggcgcatttcatcttcagtatgcgcgaggcgatagagagcgcgcggcatgaattccgtgacctgaactattcgctcgatcaatttcagttccacaaggataaatacagcttcctcatcacgcccagcgcgaagtacaagccgttttacgatgcggttatgacggcggattgggagatggcgggcgggctctttgcagagactgatgcagcggcaaacgagcaggcaatggagctgtttgaaaaactggtcaaaggcacgcccgaggagcaggaggagttctccgactatcgccgctacctcgattacgacatccgcattacggatacagcggggcagtcctatctgtactcgcgcgttctgcggcagacctcgggcggcgagacgcagacaccgttctacattgcaatcctcgctgcgtttcagcagatttacaacgacaagaccatacgccttaccgtctttgatgaggcgtttaacaaaatggatgaggagcgcatcaaatcctgcattcagctcatcaagcgcatggatatgcagctgattgtcgccgtcccggatgagaagctcgccgccattgcgcccctgatggatcagtcgatcatcgtgacgaatgctggaaatcactgctttaccgatgaattgggtgatgtgcggacatgggagaaggggatgacacatgaggcaaatagagagcagggcacactatga

SEQ ID NO: 43222 - DNA, 1236 bp, Selenomonas sp. FOBRC6
atgaggcaaatagagagcagggcacactatgaacgcgagattctgaccatccttctcgaaaaatacgaacgcagcagagccgccgtcggtgcggcgggacggcgtcctcagtttcgtctgcggaaatccccgcttgcctctgcctatgcggacgagctcgacgcagatcggcgtgaggcaatcgaggcggcggcagaggagctcgaacggcagggcatgatctctgtcgtgtgggagcgtcatggcacgggtcagatcgagcgcatcctgctcgcggcggacgcagcgcagctctatgagcgcatggggcgcacgatgccgctcatgcgcgtggaggaataccgcgctgacatttcgacgctcacattgtctgcagccatatgggtaaggcgctgctgcaatgcggcacacacaatattgtcggagaacaagattccctccttcctgcctagggagaatgaaattcgccgcgatctgatccgcgccatcctctcactgcccgttgtgggagagaatgccgtaccgaagcgtgtattcagtcagcgcgtttttggtgacagtaagtattttgaacgatgcatcgaggcgcccctgctcatcctcctgcggcgctttgcggaggagccgtgtgaaacggatgccgcgtatctggatatggcgggcatcagtggtcatcatgggaaagtctggattgcggggcgcatggacttttcgctgcatggtagggggtatatgcttgccgactttgcgggcgggatcgagctgacatatgatacggttgccgcgatggagattgacgcactgccgccctccatcctgacggtcgagaatctgaccaatgcagaggcgcttgcacaggagaaggtggatcgtctcctcatctatacggcgggatttccaaatcgaaccatacaagcgctgctatccaagattgcgggaaaacagctgcctaccgtacggcactggggcgatctggattatggcggaattcgcatttttgaatatctgcgcaagcacttcttttcccatctaatgccgtatcgcatgggcgtggaggaactgcgcgcccatcgcgcctttgcccagaacttgacagacgcacagaaaaaacgcctcaaggagcttcttcgtcgtgaggcttttgccctgtggcacgaactcatccgcgccatgctctccgagggcatatggttggagcaggaagctcttttgtgggaaaatgatatgacatcgtag

SEQ ID NO: 43223 - DNA, 1407 bp, Lachnoanaerobaculum sp. ICM7
atgaatatatttgatgaagtagatgaaaatctgttcagacctctgacaggtacaaataaaagaaagtatgtagatattcttgctcttatttgggaaaagtgcaagcgaatgcctatgtatgctatagaaaaaagtacaatatttgatatggcggaggaatatctcctgggacttgatgagaaggttgaaccggatatggaagagcaggaatatacaagcggaaatatagcagatatgaggactatttccggaagctttataagaagacttagagatacaggctggcttttggaaaagccgggtgaatatgaggatgaggataatctggcaattcattataaggtagtgcctatattgaaatcctttcaggaaattatcagtcccactatcatcacttataagggaaagctttttaaaatatattctatgtttgaacatatatcggaacaaggcagcccttatgaaggagttttaaaagaagcttctgaggattttgacaatcttaatcaagctctcagaacattggcggcatctattgaagaccatataaatgatctgacattgggaaaaagtcctgaagaaatattggatttttttgagaaatatgaagaaaagatagttgtgggatcatatcatagatttaagacaaatgataatttgttttattatagaagcagtttgtatgagagtcttgacagatgtgaagataatcttttcgatgctttggtacttgattatatggatacagagcgtgttgaaagggatgaggcaggtgtaaaaataaaagagcttatacaaaagcttcgtatggatatcgaggaaatggaagctataatgcgaaccattgatgacaggcatattttatatagaaccagggcggtgcaaagagcacaatttttgctcctgtctgacggaagcagtaagagtaaaatcaataatatacttaagttttacgcaagtcagataaatagtaaagaggatgtatatgatgaagatgacagcatagcatccgatatttttcagatattcgtacaaaacttctttgactgtaactctctttccacgcctgttaaaaagcgtaagcctactgctattgaatttgtggatattattgaggaactggaccaagatattatagatgagaaaaatcgaaagatgatggaatatataaaaaatgcattgacatctgaaaatgttaacagatttgcaagagatatattaaatgaaaatcatgcggtgcaaataagttcagtatttgaaaatgatccggatactttaataaaaataataggtctgtatacttattccaagacttcagaaagagagtatgatataaggcttagagataatgtggtggagtcaaacggtgtgaggttcaaagattttattgttgaggaaagaaggtaa

SEQ ID NO: 43224 - DNA, 576 bp, Lachnoanaerobaculum sp. ICM7
atggcaacagatataaaagaagagatagctaattatttattgaataactgttttcttatgggaacagtggatactacaagagagaagtattactatgttataaaccatgaagaaagtttcagacagatcttcttgcctattggatatactttggtcattcatagaaatttgagagttgttcagcttataaataatcatggcagcggaagaattgcattaaggaaatatgagagtattatcttgcttattttcaggcttttatatgtggaaaagagagaaagtttatctacaaatgaagacagaatttatgctacagttgaggaaattaaaaatgaatatgagaagctgaatttgccaagaaaatttgacagagcttttttagaggattccataagaaatataaaaagatataatttggtacaggtagcagataaattagttgatatggatgcgagaatacagatctatccttctgttatgcttgcaatgcctgattccaatatttcaaaagcatatgatgaaactgttaagttgctttctcaatacgaaaattctgaagaggaggatgaagaatga

SEQ ID NO: 43225 - DNA, 3330 bp, Lachnoanaerobaculum sp. ICM7
atgataaggatgacaagacttcatctgataaattggcataatttccaagatgatattatagatttcaaaaatatcacatatcttttgggcgtaaatgcagtaggaaagacaactataatggatgcgatcaggtattgccttaccacaaacaaggacttcaatactgccggaaataaaaagagcggcagaactcttttaggttcggtccaccaaaaacagagagcggaggacagttatcttcgtccggggcatacagtttcctatataggcattgaatttttggatgaggctattaaaaagacatttgtaataattgcacgtgtggaatcggaaactccaaagcaggatcttaggggagtatatcaggattggtatattacaaagccgggatacagccttttggatattcctttttttgtaaagaacaaagatggaaaaagtcctgcttcaagagaagcttttaagcttgataataaggggatggacagggcttcaaatcaggctgacgcaagaagaaagatttgtcgtatgcttggtataggggaggcggattcgcctatcggaaagaagtttaatgaagtattccatatgggtacaagtctggaggatataaaggatataagagagttcatttatacttatattctgccggaaccggaggtgaatattgactttttgcaaaaggatatgattgagctggaaaggctacaggagatacttcaggaggcatctgacagagaggctttattaaaggagataaatgaaaaaataaagaatgcaagagaacttttggttaaggtgaaaataaatgagatattggttacctacgcaaatcttcaaggaaatatagaagaaactaatgaaagaaaatatcttattggtgaatgggaagtaagtttatctttgtttgaggaaaaacttacagagctttcaggtagagaatcaaaggcctcagaactcttatatgaagcgcaaagagcagctgaaaataatgctgaaaataaggagatgctctctcttgagagtgaaaataaaaataataaagttgaagagaaaagacttacagaagaagcggcaaagtttgataatgtggctaaagacttatttgaattaaaggataaattaaataagcttggatttatttttgatatagataattgcataagagatgaaaattgctttgaagaaacaaagattgcagagataaaaagaattgccaagatttttgcagatatggaagaacaaataaaaaatcatgatgcaaaaataaggactgatatagcgaagctaaatgaggaaggcaatggactttcaagtaaaataaaatcccttgagtcaggtgtgatgtgttatcccaaagaagcaatatttgtcagagacaagataaatgaggccttgagtgaacaaagcaagaaggcggatgccagacttttgtgtgagctcttatatatgacagacaggagctggcaggatgcagtggaaagctacttaaatacacagagatttaatataattgtagaacctgataattatattttggcaaagaaagtttttatctctttgggagataaggtcaacggtataggacttatagatacaagaaaaataaagaatgtagaatataagactgagaaggaatcttatctgggtgataagattgaatctgaaaatatatatgccaaggcgtatgcaaggtttgtgatgaaagatgttatctgctgtgaaaattcagatgatttggagaaattttcaaagagtgttacaaaagacagacttagatttcaaagtttttgcttacagagaatggcaaaaagagaacattttatcggtgtggatgccattgaaaagcagttaaaagctgcaaaaaaagaacttgtggatatacaaaacagcttgaaagagcttgaagatgcaaagaaaagctttgacttggtatataacggatatacaaagtttagagccggagatggctttagtaagcttgaaatgtattgtgaatctaagaaaagagcaaaggagcttggaataaagatagctgatatagctaagaagatagaagagtttaagcaaaatccaatattgctcgcaatgtatgacagagtcaaggaatgcaaaaagaatgtaaatgatatcagagatgagataacggatattaaggcaaaaaagcaaaatatcagtgacaatataagaaaatcaaatctgcttatagaagagcttgaaaagaattttgtggagcttaaaattgtgtatgaaaacagtataaaaggatattcggagtttgcacttgatgtggaaaagaaatatttgaatgaaagaaagtctaaaaaatcttctgctattgcatataatttttcaaatcgtatggcacaggataatatagcattaaacagctatttaaatcaggaattggtacctttacaacaaaagtataccgccacatacacttgtgattatgcgataggcttggaaggggcaaatcggtgcatgcaagaatatcttactctgcaaaatattgagctggaaagacataagaatgaacttgcacaggctcagattcgctgtaaggacagatttcgcaaggaagtgctgtttaggatgaaggacgatatcttaagggcaaggcagcagtttaagcaaataaatcgtgttatggaaaatctggaatatggtgaggaaagctatagattcggaattgacaagagcaaagataaggaactgggacttttctacgatattattatggataaggacaatcagcaaattgacagagaaaatgatatgcttgcatatatggctgaggtaaataagtccgaggtatttgaaagtcagattgatgactttatgagtagaataatgatagatgtggaagagcatgcaaaacaaaatctcacaggtcaaaagtcaaaggcaaagagtatgggaatgtatgtggattatagaacttatctggactatgatattattataaaaaattcagtgacagagaaggaagttgcattatcaaaggtaagcggcgagggcagcggtggagaaaatcaagctccgttttatgtagcaatatgttcttcacttttgcaaatttatgagcaaagtaaggaagagtctatgaggctcatattgttggatgaggcatttaacaatatgaccagcgacagaatcgagcctatgatgaacatgtttaagaagttgaatttgcaactggtgcttatagctacagccgagaaggctacatcaattttaccatattgcgatattacctactcaatagttaaatccggaaacagaaatgcaatacgagctttcgagaggttggaggatggattacggtaa

SEQ ID NO: 43226 - DNA, 1212 bp, Lachnoanaerobaculum sp. ICM7
atggattacggtaaggatattttaaatagtttagtggatatgtatgaaagaagagagggctatataaaagagccttcttctttgcgtgcaatacaaatagatataaaaaagaattatccggcatatgcagacagatacaatcataatgcgtataaggatataaattcagctatagaaaagttgataagtgaagatgtgataatatcaaaacttgaatcaacaggcagctatagtaaggtcagattaaatattgacagaatagcagattgctataaaaaattaaacagaaaaagtattccggagcaatgtgaatatataaaacaaattttgtcctcatttgcggacagtaagtataggctgctgaataatataatatccgattggatgaatctggctgtaaactataggaagctgccatatgatttaaagtatgacggtaaaagattaaaagacatacttacaatattggaagctgtatttaagatagagcaggaaagttatatcagaaatttctcaactgccgtatttaaagattcaaagagatttcaaaaggaatttaagtcctgtatagagagtatattatttgattatacggatgatcctatagagaaggataagatacttgaatattataatttgtatgagaatcctacatatgtatatataaagggagatgtgataataagttttgaaaattctacaatatatgctagcgagttaccggatggaatagctctctccaatgcttcgcttaaaaggataaaaaatataaaggtacttacaaaagctgttattacagtggaaaatctgactacataccacgatgaaaataagaaagaagcggtatatatctatcttggaggataccacaataaatcaaagaaagaattacttgaaaaaatatataaagataataaatcttgtgaatatctacatgaaggggatatagatatctacggatttttgatacttgaaaacttaaaagagaaaacaggtataccgtttaggcctctccttatggatgtaaatacattgaaaagattttatgaggcgggaatatacaaggaacttaatgtatcggatatcagaatgattgagaaaaacagagaaaatcttaaagagtattcagaggtattggattttatgcttttaaataattgtaaggtggagcaggagtcattaagggctgtacgattacttgaaaacagttag

SEQ ID NO: 43227 - DNA, 1470 bp, Stenotrophomonas maltophilia Ab55555
atgaagcatcgcgaacgcattgcccgttaccgccacctgcgcgaacagccccagtggaagctgcttgccgccgaccacgctccggaaatcatcggcctgctgcagggcctgctgatggacggcgagcgcacgctgccgtcctcggtactgaacgagcgactgcagcgcgcgctggaccagctggccggcgatgaactctcgcgcgagctgccgcgcaccgcccaggcctacatcgcgcactggctggcccagggctggctggaacgccgtctgcccgaaggcgccgaccaggagcagtacgagctggcgaccgcggcactgcaggcgatccgcttcgccgacggcctcgagcaggcccgcgtggccgccaccgaaagccgcctggcgctggtcattgagcagctctcggcgctggctgcgcagaccgaagccgatcccgatgcgcgcctgtccgcgctgcacgacgagcgcgaccgcatcgatgccgaaatcgcccgggtcggcaccggccgcgtggttgcgctggacggcaagcgcgcgctggaacgcacccgccagatcatcggcctggccgacgagctgaccgaggacttccgccgcgtgcgcgatgacttcgagcagctcaaccgcgatttccgcgaacgcatcatcgacgacgagggcgagcgcggcgatgtgctgtcgcagctgttcgaaggtgtggatgtcattggcgaaagtgacgccgggcgcagtttccaggccttctggcgcctgctcaacgacgccgaacagagtgcccagctcgatgccgcgctggaagcggtgctggcgcgcggcttcgcccgccgcctggaccgcaacgaacgcaacttcctgcgcagcttcaccagcaccatgctcgagcgcggtggccaggtgcacgacgtgctgcagaacttcgcgcgcagcctgcgcggcttcgtgcagagccgtggctacctggaacagcgccgcctcaaccagttgttgaagcaggcgcagtccgaagcgctggccctgcgcgacgaattccccgcacaacgcggcatcggccgcgacctgcagctgaccaccagccgcctgcgctcgtggtcgcagtggaagctgcatgatccgcgcagcgcccaggtcgacggcaatgtcgagtacaacgacgcggccgcgatcagcctggagagcgtcggcgacctggtcgcttcgtccgaaatcgacttccgcaccctgcgccgcgacctgcacgacctgctcgatgcacagccgcggctcagcatcgcccaggccctgtcgcagcgcgaggcgccgcaaggtcttggcagcgtcatcggctatctgtcgctgggcacgcgcttcggcaacgtggtcgccggcgagcaggagcttgcgcaatggcgtggtggcgacggccaggtccgtcgcgcccgcatcccgctggtttggttcacccaggagagacgccatgagctggcatga

SEQ ID NO: 43228 - DNA, 702 bp, Stenotrophomonas maltophilia Ab55555
atgagctggcatgaagatcccatcgacgcagcgcaggccgacgtggcggaagacgcctacgaggccgaaccggtggcggccgtggcgcagccccgccgtggcaacgacgtctattacctcggcgacaccgggcgcctgccgctggatgcgcgccgcgcgctgtgccagctgctgatcggccccagcatcgaccagctgcgccacgccaagctgtggccggcactgatccgcagcgaagcggccatccgctcgtcgctggcggacctgttcctggaactggtgctcgaccgtgacagcggcgtggcgttcacccgccaggccgataccgaagacgtcgacgcgccggtgctgctgcgcacctcgccgctgaccttcatcgactcggtgctgttgctgtacctgcgccagcagctggccgaagccgatgcgcgcggcaaccgcgcggtggtcgccgacgccgaaatggccgaagcactggccatctacgaaaagaacctgtctaccgaccgcgccggcttcaaccgccgcgtcgcctcggcggtgcagaagatgaaggacaaccacatcctgacccgcctcagcggccaggaagaccgccacgaagtctcgccggcgctgaagctgctgttctccgccgaagacgtgtcccagctctcggcggtctaccgccagctgcgcgaaaccccggccgccgaggcctga

SEQ ID NO: 43229 - DNA, 3381 bp, Stenotrophomonas maltophilia Ab55555
atggctatctccaagcacactcccgccctgttcaacgaaggcctgccggacccgcgcctgcagcagttccgcatgcgccgcctgcaggtgcacaactggggcaccttcaacggcctgaccgaagtgccgatcgccgagcgcggcttcctgttcgtcggacgttccggctcgggcaagtcgacactgctcgatgccatgtccgcgctgctgacgccgccggccatcgtcgacttcaacgctgctgcgcgtgaagccgagcgcagtggccgcgaccgcaacctggtgtcctacgtgcgtggcgcgtgggctgaccagcaggacagcggcaccggcgaaatcgccacccagtacctgcgcaagggcgccacctggaccgcactggtgctggaataccgcgccggcgatggccgcgtggtcagcctggtgcgcctgctgtggatctccggcaacggcacctcggccggtgacgtgcgcaagcactacatgattgccgagcgcccgttcgacatcgccaaggatcttggtgggttcgacctggacctgcgcaagctcaagcaaaagctgtccgacctgcaccacttcgacaccttctccggctacgccgagcgcttccgcgacctgctcggcatcgacaacgagatggcgctgcgcctgctgcacaagacgcagtcggcgaagaacctgggcgacctcaacgtcttcctgcgcgacttcatgctcgacacgccgaagaccttcgacgccgccgagcgcctggtcagcgacttcgccgagctcgatggcgcgcaccaggcggtggtcaccgcccgtcgccaggtggagactctgctgccggcacgcgcctactacaacgacctgaaggaaatgcaccgccggcgcggcgacgacgaagccctcaagctcggcgtcgacagcttccgtgaaagccgccgccaggcgctgatcgaagcgcgcctgcgcgagatggacgtgcgtgaccgtggcctgctcggcgaagaagcccagcgccgtgccgcactggacaatcacaccgagcgcctggccgaactggaactgcagcgccgccagcagggcggtgagcgcatcgaagaactggaacgcgagcagggccgcgccgaagccgagcgcgaccgccgccaggccaagcgcgagcaggcaagcctggccgcgcagcagctgggggccgaactgccggacgacgcacacggcttcgccgaactggtcgagcgcgcacagaacgagctgcaggaccgccagcgcgcctcttcggcgctggacgatgcgatcagcgatcgcctgggtggcaagcgcgatgacgagcgccgcttcggggaagtccgtgcggaactcgaagcgatgcagcgcacgccctccaacatcccggcgccgatgcagaagctgcgcgcgcgcctggccgaggaaaccggcatcgctgaagcggcgctgccgttcgtcggtgaactgatccaggtccgctcggaagagcagggctggcagggtgccatcgagcgcgtgctgggtggcttcgcgctgtcgctgctggtcgacgacaagcattacaacgacgtcgccgagtgggtgaaccgtacccacctgggcatgcgcttcacctactaccgcgtgcgccgcaacgatgatgcgttcgcccgtgagccgtcggcgaagtcgctgctgcacaagctggaactgcgcgaacacgtgttcgaaagctggctgcgccgcgagctcggcaagcgattcgactacgagtgcgtggatgccaagcagctgcgcaacgtcgaccgcggcatcacccgcgaaggtcaggtcaagcatccgggcgaccgtttcgagaaggatgaccgcagtgcggtgggcgaccgccgtcgctggatcctcggcttcaacaaccacgacaaggtgggcgccttcgagcgcgaagctcaggaactggccaagcgcatcgccagctgcgagaccgacatcgcgcgcctgcgtgggcagcgtgaccgcgacaacgaacgccgcctggcctgccacgagctggtcagcatcagctggaacgagatcgacatcgccgccccgcagcagcgcctgagcgacatcgaggccacgctgcgcgacctgcgcgaaggcaatgccgacctcgccaagctggccaagcagatcgacgccgtgcgcgccgacatcgagcaggcccgccgcacctatgaggacgtccgcgtcgagcgcgggcagctggtcaaggaacgtgatcgcctggaccgcgcgcgccagcagagccgtgcgctggtgctgccgagcctggcccaggagcaggaagccggccttgccgagcgcctgcaggagcagggtccgctcagcctggaaacgctggaagcgcacatgcgccaggtcagcaacgcgctgaacgagcagctgtcgtcctcgcaacaggacctcaaccgcatcgagaaccagctgatcggctgcttccgtcgcttcatccagcagtggccggaggaatcgggcgacttcaccgtgtcggtggcctcggccgaggacttcctcgcacgcctcgaacgactggagcgcgatggcctgccgcagcacgaagagcgcttcttcgatctgctgcagaaccagagcaagaacaacctgctggccctgcagcgccacagcgccgaggcccgcaagtcgatcggccagcgcctggacgaagtgaacgccagcctggaacaggtgccgttcaaccgcggtacgttgctgaccatcgaactgagcgaccgtcgtctgccggaagtgggcgagttccagctgcagctgcgcgaagtgctgtcgcagcagcagaccgagcagcgcgagctggccgaatcgcagttcaccgtgctgcgccagctggtcaaccgcctgggctcgcaggaaggcgaggacaagcgttggcgggagctggtgctggacgtgcgcatgcacgtggagttcatcggcgtcgagctggatgcggaaacgcgccagcaggtcgagatctaccgcagcggcgccggcaagtccggtggccagcgccagaaactggctaccacctgcctggccgcggcgctgcgctaccagctcggcggtgctgacagccagctgcccagctacgccgcagtggtgctcgacgaagccttcgacaaggccgacaacgagttcaccgcactggcaatgaacatcttcgacaacttcggcttccagatggtggttgccaccccgctgaagtcggtgatgacgctggaaccgttcatcggcggcgcctgcttcgtcgaaatcagcggccgccacgactccggcgtgctgctgatcgagtacgacgaggaaggcaagcgcctgaagctacccgagcgcagccgccagcaggccaacgagccggaagaagccgaggcctga

SEQ ID NO: 43230 - DNA, 1353 bp, Pseudomonas aeruginosa NCMG1179
atggaggatgcgctgcaagcgctgtccgaaatgctggctgcttatgccagccaggatctttacgagatcgacccggatgcaacgcacatccaggcaggtcgtgaactccgtgaatggatcaagcggcgccttgttgtagagcgagagggccgcatctatgcaaccgacgcgctggagtccgccatacagttcgtcgactcgttggatagtcgtatcatgacctccacggcctctcgcctttcggtggtccagcgcgagattgaaaacctggaaacgggtctgaaccccagcccaagtggccgtattgccagcctgcgccgccgaatccaggacttggagcacgagctagcgcaggtagaagctggccacgtcgtcgtgctggacgaagctcaggcgatagagggtatacgcgaggtatataacctggccaccagcctgcgcgcagactttcgacgagttgaagactcttggcgcgaagctgatcgcgccttgcggcaatccatcatcagcgagcagtctcaccgtggagaaatcgtcgatcggttgctggacggtcaagatgcgttactcaacacaccggaaggacgtgtcttcgaaagtttccagcagcaactgaggcagtccgccgagctggaagtcatgcgtgagcgcttgcgtaccatccttcgtcatccagcggttccgaaggcactgaatcgtccccagcaacgtgagctgcgttggctggcgttacgcttggttcgggagtcgcaggctgtgcttcaggcgcgtgcccgaagcgagcgcgatgtacgtggcttcatgaagacgggcctggccgccgagcatcatcgcgtcggacagttactcaacgatttcttcaatctagcgctcagcgtcgactggcaacgccaggccgtgcgtcgtagcactgtccgtttgccgccggttggcgtagccattaccggagtcccagcgattgagcgtctacgtttcaagaccctggatgacgatgacacgggcgagctggatctgagtctgaagccagcggggctggaacagattgacgatgacttctgggatgctttcgacgggttggatcgcgaagcgctgattcatgacaccctggcggtgctggtggagcaggggcgacctgtgagtctcggggagcttgcgtctttgcttccacctgctcacgacctggaaacctttgcgctctggttggctatggcgcgcgaggcaggtactgaggtgctgacagaggagcgtcagctcgtggagctagttgacgaggatgagcaacgctggcgcttcaatctgccttatgtcggactcgaccacgaggcactcaaggacatcgattgggagttgtga

SEQ ID NO: 43231 - DNA, 642 bp, Pseudomonas aeruginosa NCMG1179
atgagcgccgctgtacaggtcgatgagcgccggacgccgcaacgggtacgggaggccgtacaggaaatgctcaagtacggtctgctggaagagagtcacaagcccaacctgtatcgctcagcgctttccaatatcgaggcggtcgacagaatcctggagccgctcgaccttgccatgggggtcgacgaggttcgggggctggtgttcgttatcgttcgccagggcgaggtggccgagcaggatgactggtcgcaccccctagtgcgtcggcaaaggctgaatctggagcagtctctgctgatagccatcctgcgccagcagttcatcgcctacgaacaggaaagcggtacgggcgccagtcaggcatcggtagtggtcgatgagctgattccccaattgcaggtttacctgggcgagctgggcagtgaggcaaaggagcgcaatcgcatcatcacgctgctggatcagctcaaggggcatggcctggtgtcggctttggacgcccatgatcgcgtcatcatccgtcccatcattacccacttggctaacccggagaacctgcaggcactcgtggcatggctgcgagagcaggtggagggcgcggcgacgccggctgccgatggcgaggaggatatggcatga

SEQ ID NO: 43232 - DNA, 3306 bp, Pseudomonas aeruginosa NCMG1179
atgaagcaggcactcctttggcgtgacagcgagaccttcattctcaccagcatcgagctctataactggggcggctttcagggctatcaccgtgccgagatcgacccctccggtaccgccgtgatcggcccgacggggagcggtaaaacgacactggtggacgctctgatgaccttgctgtgcgccaatccgcgctacaacctggcatccacgggcgggcatgaaagcgaccgcgacctggtgtcctatgtccggggagttaccggccccggggacggaggtatagagcagtctcatatcgctcgccagggtaagacagtaaccgcaattgcggccacgctcgagcgtgatggtgcgcaggtacgactgggggccgtgctctggttcgaaggcacaagctcctcggcatcggatctgaaaaaactgtggctgttaagcgagtcccccgagcagactctggagcattggctcagccagcatcacgcaggcggtatgcgggctttgcgtcagatggagaaggatgggacgggtatctggccttatcccagcaagaaagctttcttggccaggctgagggattacttcgaggtcggtgaaaacgcattcaccttgctcaaccgcgctgccggcctgaagcagctcaatagcattgacgagatctttcgcgagttggtgctggatgaccgttccgccttcgagcgggccgccgaggtcgccggcagcttcgatgatctaaccgacattcaccgagaactggaaacggctagaaagcagcagcgctcattgcaaccggtcgccgatggctgggagcgttaccaggtcttgcaagaacagctgcacgataagcaggctctcgaaggtatcctcccggtttggttcgccgagcaggggtatcgactgtggttggctgaaaccaacaggctcgagaaggagtacaaaaaggccgaactggatcaggagcaatgcaaaagtcagcttgaggcccagaaaggtgtggtcgatcaacatcgccagcgctacctgcgagtagggggcgcagggatagatcaattgcgcgagcgcatcgctgattgggtgagggagtgcgataagcgcagcctgaaagccgagcaataccaactcttggccaaaggccttggactagcggatgagttatcggccgctgctctcaaggagaatcagcagcatatcgcggcacgcctggaaatactggaccaacaaattactgacgcgcgccaaaaggcgttcgacgcaggcctcgtccagcaggaactcaatggtcgcctacagaccttacagcaggagggtgctgaggttgagaaacggccaggctcgaacctgcccgggcaatttcatgctttccgaagcgatctggcgcaggcgcttggtgtcaatgagtcggccctgcctttcgttgccgagctggtgcaggtcaagcccgaggagctggactggcgtggcgccatcgagcgggcaatcggtagccaccggctacgcatcctggtgccgcaggactcatcccaggccgcactgcgttgggtgaatcaacggcacaaccgcttgcatgtgcgcttgttggaggtacaggagccgacgtcgcgccccgtgttcttcgacgatggttttacccgcaagctgaccttcaaggagcatccgtaccgagaagccataaaggcactgctggcggacaatgaccgccactgcgtcgaaagcccggagcaattacgtcatacccctcatgccatgacggcccaggggctgatgtcgggcaaagaacgcttcttcgacaagcaggaccagaagcgtctggacgaagactggctgaccggcttcgataaccgtgaccgtctggccttcctggctgagcagattcgcgaggtcaatgagcagctcgagccagccaagctcgccttggatgctgcccagggcgacgttcgtcagttggagactcaagcttcgctgctgaatcgtgtcaaagaactgcagttcgaggatattgatctgccgggtgcccagagtcagctggagtcgctgcgtacgcaactggccaccctgacgcgccccgattctaaccttgccatgatcaaggtcgagctggatgcggccgaggccctgcaggagtctctggatcaacagctccgccaactgatcgaacagtacgttcagttaaaaactcagtttgaccaggccgcatccgctacccgtaaggcctataacagcgcggagaaagggctgaacgatacgcagcgtgaactggcgcaagcgcatttcccgactctgaccgcggatgacctcggcgatattgtcgagctggagcgcaagcatacgcgtgagcttcaagggcagctcaaagcgcttggcgagaaactgggcgatcagaaatcagagcttgccaaacgtatgtctgatgccctcaaggtagacaccggggcgcttgcagaggtcgggcgagagctggtggatgtccccaggtatctggagcgtctgcgtgtgctgaccgaggaagccttgccagagaaactcaagcgcttcctggaatacctcaatcgctcctcggatgacggcgtcacccaactgctcagctatatcgaccatgaagtctcgatgatcgaggaacgcctggatgacctgaatagtacgatgcagcgtgtcgactttcagcccggacgctatctgcgcctggttgcaggcaaggtcatccatgaaagcctgcgcaccctgcagcgcgcccagcgccaactgaactcggcgcgtttcatcgatgatgaaggcgagagccattacaaggcattgcaggatcttgtggggttgctcaaggacgcctgcgaacacagcaggaatcagggagccaaggcgcttctggatccgcgcttccgcctggagttcgcagtatcggtgatcgatcgagaaagcaggaatgtcatcgaaacccgaacaggttctcagggcggtagcggtggcgagaaggagatcattgcctcctacgtgctgaccgcttccctgagctatgcgctttgtcccgacggcagcagccggccgttgttcggcaccatcgttctcgacgaggcgttctcgcgcagctcccatgcggttgcaggtcggatcatcgctgcgttgagggaattcggcctgcacgctgtcttcatcacgcccaacaaggaaatgcgcctgttacgccaccacacgcgttcggcagtcgtcgttcatcggcgcggcctggagtccagtctggtttccctgagctgggaagctttggatgagcatcatcaacagcgcatcaaggccatgcatgaagtcgcccactga

SEQ ID NO: 43233 - DNA, 1452 bp, Phaeospirillum molischianum DSM 120
gtgtctcttttcggccatctcgacgatacggcctttttgattttcagtcgcggtaaccggcacctttatgctgaggccgtgctggtggtctatcgccagtttttcagtggaagccgcatcatcgttcccttgcgtgacgatgtggtcgagacgctggcgcgtttggtgcggcagcggcccgagctgtggcaagacccggaagagatcgaggacgttccggtcgggcgtggacgcaagcccttgccgttgccgaccgacgagatcggacgcaaggcccagcacgtctacggccgtttgctccgctgtggctggatcgaggaagaaccccacggtttcaacgcggtggtggaaatgccatcggcggcgatggcgctggccgaccagttcgatgccatcgaacgcgggctgccccaattgttcggcggcgtggtggtcgatgtgaaatccagcatcgaagccatcgcgttgaacccatccgccaacgcgctgggcctgcccgaagccgccgctaacgctgtccgcttcacccgtcggctgcgtgcgatcctttcgtcgctgcgggcggtgcagcgggcgatcatggccagcccggatatcaaatcgcgtctggatacttttttcgaagattttatcggtcgtatcctgatcgccgattacaaagcgactttttcctatgcccaacatccgctgcggttccgcgccgacgtggcgcgaatggcgcgtgcctacgccaccaatgtcgcgctggtcgaggatattgcccaggcttatgtgaagaacggcgtcagtcctgatgtggcctcggcgcggcgcgaggtgttcggtcagctcgacacgatcgccgagattttcgaggggatgaccagcttcgtcagccggatcgaggattttcggacccgtctggagcgacggttgcgcaacactatccgctacatggaccgcagcgacgacagcatcaccaccaggctggcgacgacgatgcgccgtgtcgatggattgcggacgaggggagagccgcatggtcttgagcttgaaatcccgacgcttcttgccgtccgtccccggctgttctcgcccgatggcttcgccgagccgagggagtcgaaagcgccgatcaaaccgcgcccggtccagcgcggcgaggccgatccggtcgaggattttcgcgatttgctggtcgaggcgtttgaagggatgctggagccggacgaagcgacggtcgccgctttcctcgatcgcagcatcgcgtctgaccggcccaatgaggggcggtggctgtgtcccgacgatctggccggttttgccgcattcgacgctctggtcgagcggctgaacgagccgggcggcggcgagatcgatgggcgttatcgtatcgcgccggccgaaggccgccatgccagcgcgtggatcgacgcccccaacttcaccattacccccgccgaggagtcgtaa

SEQ ID NO: 43234 - DNA, 729 bp, Phaeospirillum molischianum DSM 120
atgccggcaattctggcagaactgaccacgttcgaggagaaggtcgcagcctcgaaaggtcaggccgccgccgaacgcgcggtgggcacgctgcgccgggcgttgaacgtcctgctcgaccgccagtttatttataacggcgaccgtggcatggcccccctgtacgaggcgttgttgcgccccgatgtccgtcagatcgtcgaaggcgtactcgacgctcttggctatgcgctggtggtcgagaccaccgaccagtggatcggggtggtgcccagcgaaggcggcgaactgcacggtgcccggctgcgcatcgacgagacgatcatcctgctgctgctggggctggtctggcaggagggcatgaataccggcctgtccgaggaccgcgccaccgtgccgacgacctcggaagaggtgttcgcccggcacgccgccattcttgggcgggagcggattcccagggcgcggttccaggatatcctgctggatctgcgccgccgcgctctgatcgagattggcgaggaagacccggaaacccgcgacatgattttgcggatccgctcgaccatccgcctcgtctcaggcgaggcgcaggtgcagatgatcgagcgtttcgcccaggagaccgaccgcaggctggacgggctggatcgtgaggcggcccgccgggaggctgggctggaggagatgcccgaggacgaggccctcgacgaagacggggaagtctga

SEQ ID NO: 43235 - DNA, 3459 bp, Phaeospirillum molischianum DSM 120
atgtacgaactggtaaatgtcgctctgatcgactggtttttgctcgggcggcaggatattccgctacgcggcgccgtcggggtctatggcgagaaccgttcgggtaaatcgactctgctggatgcgatccagaccgcgatgttgtcgaacgacaagaacgcgctgcaactgaacgccgccgccaatcccgagaagaagcgcaagaaccggcgtagcgtccacggctattgccttggccgtctgggcggtgcgggcgagccgccgctgcgtgacgccgcccgttcgcatatcgccctggcctatcgcgattcgatcgacggccgttacgtctcgaccgggctgattttcgaggcgcgccagtccgagaccagggaggaaaccaccgcccgctggcttgtcaccgggatcaaggtggacagcgccgatcttgtcctgtccggcccggatggcgacgtcgcccgtacttggcccgagcttgaggcgcatctggaggcgcgctgtgccgccgagggtggcgaggtgcgggtctatatgagtcccagcgagcatatcggcgatatgctgcactggtgttcacaatccggccagcatggcggcatcgatcagttccgccgcgcctttgccaatgcggtcagcttcgagacgatcgacgacgaaagccagttcgtccgcacctatgttcttgaccgcgacgccatttcgatccgcggcctgcgcgaatcgatgcggaactaccgtgaaatcgccgagacgatccgccgtctgctgcaacaggtcgaggatctcgacgcgattcttgccgccgcccaccgccataccgccctggtggaagagaaataccatcgggcctggatgatgcggcgagccaaggttctgcttgccctgcgtgacgtgcgcaagcatcgaaaagcgctgcggagcgcccagaatgacgtcgcccgcctgaagcggatcattgaggattgcgagcggcagagcatcgagctgcgcgacgaaaagcaggggctggagcggtcggtgcgctccagcgaagttgccggggaactggcccgcgtcgaactcgatctcgaacagaaaaagggtcaattggccgaggtcatggctccggtccggcactgggaactggcggtgactcgcgccgcctcgatccccggccagaccggacccgccctcgacattctgcgcgagcgtgcgcctgcgctgctgaccgcgctcaacacactgcaacgactgtctggcgcggacaaacttccggtctggccggtcgatcccgatgccctggcccgtatcatcgatcagatgccggatctggacggtctctgccgcaccctgggcgatctcgccgacgaccggcttcgtgggctgggaactcaggaaattgaggatctgcaccgccgccttgaggcgatcgaaaagaccggatcagcgatctcttctgaaaccggcgcgtttctattcgacctggaggccgaggggttctcgccgaagctcgtttgcgccgagatcgaaatgcttgatcccgactggcgcgatgccgccgaaacgatcctgggtcgcgaccgcgaggcggtagtcctgccgcccgatcaggctcgccgcgccatcgctctgttgcgggagaggcgccacaccgggcgctatcacgggtgccgggtcgtcaataccacccggatcgagaccggacggtcgcctccgggcagcctcgcctcggtcctgcgcgccaggaatcccctggttgccgcgttcatcgtccatcgcctcgggaatgtccgtctggtcgagaccgaagcggagttgcaggagggtggtcgggccgtcaccaaggattgcgcctattgcgatgggctggtgaccgaaatccgtcaggtgggcgagcgtaaaatcggtgccgacgccaccggcgcgctgcggcgcgatcttgaaagccgtctgcgggtgctgctgtcggagcagagcgaaaccaaggatctggttcacggcctgcggtcgctggcggaacgtctgacgccgctggcggcggcgcgtacccatggggtggggctggtcgatgcggttttcgcctatcgcgacaagttgcggcagatcgaggggctgcgggggcagatcaagcggttgcaggactatgttcatcctgaaatcagccgccgtgtcgccgagatcgacagcgaccttgcggcgctggcgcttgaattgtccggcgatcccgacggagccgatcccgattcccgcaaaggcgcgaagcgtctgctcgacgacgcgcttcgggccgaagggacggcgacgaccggctgcaattccggtctgcccgatctgatcgtcgcgctgaatttctatcgcgaggaaagagccagggggatttttgcccaggcaatgccgctttggatcgcggaacgcgctcgttcccgtggtgcgcttcccccgattgtccggtcctgcgatgagcgcctgaccgttctggcggaggagattccccgcgccaacaaggcggtgttcgcccagattttcgaattccggcggaccagtcagcgcgatctcggtttcaccatcgattcatcgattggtgaggagatcgtgccctgggcatcccggttgcgcaacgatatcgcggacaaggatctcgcccagcaccgccgccgtgccgacgaggcggtcgatgaggcacagaagctgctgaagggcaatttcgtcaatatgctgcgcgatcgcttcgagcgggtgacgaacgcgatttcaatgctgaataacgtgttgcgccagcatgctttccataacgagcgctaccgcttcgaggtcgagccggatgccgattttgtcgggctgatcgatcttgtcgtcgcggcgacgcaagacgagatgattctgctgccgctattcggtggggccgaaatcgagaaatctctgcacgccgaaagcctgaagatggtcgaggcgatcctgatggaagacgatctcgactattcccgctacgaggattaccgcaactacttccgctttaatctggtgatgaccgacatcgaaaccggcaaggcgaccaccttcgcccatcggctgggtgtcggctccggggccgagaagcaagttccattctatgtcgccatcggggccgcgctggccagcgcctatcacaacggcctctatgccgcgtcgaagccgggcggtctggggctggcgctgttcgacgaggctttcatgaagatggaccctaagaaccagcgcgaagtgctgcatttctatcgcgagatcgggcttcagccggtgctcgccggaccgaaggggggcaagctgttcatgcagaaattcatggatacgctggttaaggtcgcccggcccagctatcggcggatggcgattaccgttacccaccccggcactgccctgaaagaggcgctgatgaccgaagatcccagcgagtggtcgcgtgagacgcttgagcggctctattcgacgctccggccctga

SEQ ID NO: 43236 - DNA, 1128 bp, Phaeospirillum molischianum DSM 120
atggccaaggtctatgtcgtcaccgccgatcaggcgtttgatcacttcttgtctgcgtatgagaggaagccagatcgtaccagagacgttcatgtctatcccgattaccatgggatgggggtggatcgcgctggcgaaagatttaatgttcgcatggtcgaagcctccaattttaatagaataaccgagactggcgagaaagttcccgcagtcgaactgacgtgggagccattcccggcaaaacgctatatcgccagggtgacgttgcgggatgctaaagccctctacgaccatctcaagcgtcagccgccggaacagcccgctctctcgcccgccgtgcaagccgtcctcgccgaggccgcccccgtcagcgacggggaacgggcgggatggatcgagatcgcgcgggcgatcgagggcgactggcctccatcgaagcttccagccctggtggccgaactgaagcgtatccggtccgaaccgaccgaccggcccgccttcattgcttcagccgccggtcccctggcctcgtcgaaattgctggatcggttgcctcgggcggctctgcggcggatcggcctttcgctcgaggactatcccgcgtcgccggtcgtgctgctgacggcgggggtagccgtgccggaggcggttgtgttggtcgagaacccgcgcgcgttcgagcgtgcgttcgtggccactcgcgatcttccggtggcttggatatcgacacacggtctcgtcgccatgtccgtcgttcgcgcccttcagggcgtctggtatggcgcgccggtcgatgggacgccgccccctctcgatgccttgcttggcgctgagcgactgttctattggggcgaccttgacgcggccgggctgatgatctttgccgaggcgcgcaagcgtctgccgcagatgagcctcagtgcgctctatcggccgatgctggccctgctgtccgaggggggagggcccccctacgcggcagtgacggacaaggccggtcagcgcccttggacctccgacgatcccgagcttcaggcattgctcgacgcctgcgcctcctcctgcatcgatcaggaatgggtgtcgcctcagtcgattcgggatctctgcacgcaagggttttgctag

SEQ ID NO: 43237 - DNA, 1443 bp, Arthrobacter sp. Rue61a
atgtcctcggccgatgccattagcgcgcggctccgtgacctcgaacagttgaccaggggccccgcgtgggccctgacacggtcggcgccgtgggtgatcgcggtgctgcaagcatccttcacccgcacccggccgcagcttcctctggaagagttccatgccgacgtcgacgctttcctggagcagctccgcaggcaggacccggcgctgggcggccagcagaacggcaagctctttggcgacgaatggacccggaaacagttcctgacccggcgcaaccaatcaggtcagatcgtttacgaagtcaccgaacccgcggctcgtgtgcttgcgttcctggacagcctctccagcgagcgttccaccctgaacggttcccggctgggcacgctgctgggcgacgtggagaagctcgccaacgagaccaaccctgaccagagcgcacgactggaagccctcgaagaggaaatccaggagcgccaacaactggtggaagacatcagttccggcgagttcgacgggctcctggatgatgaggaagccgttgaagcggccggcaacatccttgacctcgcggccagcctgcctgccgactacaagaaaatgcgtgaccgcatcgaagaactggtgggagagctccgcaaccagatcatcgaagaatccctgagcaagggcgccaccatggcccaggttctggaagccgacaagcgcctgcggcagagcccggaaggccgtaccttccgctcattcaccgctttcctggaggatccgcagcagcagttgcggttccgctcggcgatcggcgaggtactgagccggcaattcgcggacgacctcagccacgaggaccgcgaaacgctgaaaaacctggttgccgaactgcgcacccagcacagccagatccagcgcatctacggcaagctttccgaaagcctgaacacttacatccagagcgacgacgtccggcaatcagtcagcctgcgcaaggtgctggccgaagccgaacaagccatccgatccatgccctacgaacgtgaccgccccggcctggtccgcgggcccgtgctgttcaacgccgggttcgagtcgttggccatggtcaaacttttcgaccccgacgaatttgccacacccccgcgcctggccgatcccatcgccttcagcgactcggaccgggtgcggtcagcgcgcaccggaaaagcaaaacccgcggtggttcgggcagccatggccggtgcagccacgctgggcgacgcctgggaaaacctgcccgccgaagaacggcacatcaacactgtgcgaaccctgctgtccatggcgctgcaaacgggcgccgccttcgacagggccgcgtgggaacacatcgacttcgaacaaatcgacggcagcatccgcacggcgtacttgcctgtcgtctcgctgaatgaggattctgatgactga

SEQ ID NO: 43238 - DNA, 903 bp, Arthrobacter sp. Rue61a
atgactgaggaaatcacgacgacggacgtcaccgaagcggaacaagtcaccgaagcggtggctgaagtcggtgtcgaggctgagccggctcccgaggtcagccacgcggatccgttccgcattactccgcgggacaccttcgtggacggcgccgcgctcttccccggcgacactggtgtgctgcccatgaaggtgcggcatgcactggtgaaactgctgaaggggccctacatcgacggtggccgcgacgagaaactgtggaccacgctgctggacaaccaactgatcctccgcagccgcctctccgagctgttcctcaccctccagctcgatcacgaccgcaaaatcgcggtccttcgccccgtggacccggaagtcatcggcgccagctcccgctccagcatcctcaggcagcagcgcgccctgagccgcgtggaaaccattgtgttgctgcgactacgcctcttgctggaccgccacgtcacagcccaaacagacccgaccatcacccgcgaagaaatctccgacctcgtcgccaactacacacccgcgggccaacaagacgccctccgcgactccgacgtggtcacccgcaccatcaccaaactcctggcacgccaactcatcctccccaccccgctggacgacacgtacaccatcagcaacgccctccctctggccctcccgttcgaaaacatcggcgacatcccggcccaaatagaggccctgatagcagtagcagctgacgaatccggaacagaaccgttgctggatctcgactcctccgactccaaccaacccaacccctcaggtgatgacgtggacgacgaccctgaaggtgacgaccgcgctgacgtaagcaccgccgcggacgcaaccacgactgacgggacacagaagtga

SEQ ID NO: 43239 - DNA, 3480 bp, Arthrobacter sp. Rue61a
gtgaccatcgcaagcatgctcccgctcggcgagctcacgaaccccggccagatgcgcctcgcgttggtgcaggtggtcaactggggcacgttccatggagcccacaccatgcacgtggaccgcaggggaaccctcctgaccggtaactcgggcgtgggtaagtcgactctctttgatgcgatgctccgcgtttttgatgcccgcccgcgctccaacgaggccgctgcccagcgttccggcggtgctgtggaggacaagaggaccacgttcacgtacatgcgcggcaaggttggtgataaggcggtcggagacagctcggcgagtgccttccagcgtccgggcgccacgtggtccgccgtcgcgttgacgtttgataatgcggccggcacgaaggtgacggtgtcggcgctgttcgacttgccgaagaatggcacggagtcgagtgtcgggcgtttttatgtgatcgacagcaagccgttggaccttgaagcgatcgaggggattgcgcagaagcggttcaccaagggcgcgctggagtcgatcttcccggacgggcaggtcttcgatgtgcacaaggcgttcgcggagcgcttccgtcgcttgctcgggatcaactcggaccaggcacttcctttgcttcgcgtgatccaggccggtaagggcttgggcggcagcgtgaatacgttcttccgcgatcaggtgctcgacgctccggccacgttggctgccgctgatgatgtggtggaagagttcagcaacctgatgtccatccggcagaggttggaagacgttcggcagcagcgtgaccagttggctccggttcccgggttgaacaaggagtacgcgcaggcgttgctggacgcgaaccgcctccgggagctggccggggaggaatttgaggcctacaagcagcagcttgcggtcacagtccacgccaagacgctggcccgtttcaaggagttggcccagtccaaggcccaggaattggcggctgagcgcactgtgcgggacgccttgtccaaagacctccgtgaccttgaactggattacaacaaccgcggcggcaatgcgatttcggcgattgagcagtcgttggagaacgccaaggttggcctgaagctgcgccagcaggttgaggattcggccaagaaggcgttggccgacgccggacttaaccttgaatggtcggccgagggctgggatcaggcgcatgagcaggcagctgcccgctcggccgagttgaaggacgattcggaagcgctcaaggagcttcgtttcgaggcgttcgacggccatgccacgaggaaacgagagcttgcggcggctcagcaggagctgttgtcgttgcgatcgcgcaagtccctgctgccgccgtcgagtattgaaaaccgcgccgccatcgcagccgcaacaggcgtcccggaagagcggatgccgtttggcggtgagctgatcgacctcgccgaagggcaggatcagtggcgtcccgctgccgaacgggcgttgcgcaacctcgctaccactttgctggttcccggcgagcacttcgcggcggtcacccgttacttgaacgacaacaccgtccggggcgcgctgcgcgctgttgatgtttccaagccactcgccggcggtgcgctggctgtggaggacgtgtccgacggcgatctcttgactaagttgagcatccttacctcgggtgccaatgccgacgccggtgagtggatccgcgagcggatcgccttggacttcgcctacccgtgtgtcgaggatccggatgagcttgcctcgatggacaagggcctgagcctgggtggcgtggtcaaacgcaacaggcacactgtggagaaggacgaccggttcacgagccggcaggattacgtcctcggtttcgacaacgcctccaagcttgaactggtcgccgcgcgagtgggggagctggaaaacgagctcgtcaaggccgcggaacttgcacaaagccgcgaggattcgcaccaaggcatggcccggcagctcgaagctctgcgtcgcgtcgctgaagacgaacggccctgggaacaagtgtccgcagccgtggccgcggacgaacttgctcgaatcgaacaacgcctgacggatgctttggccgcgcaggcggaccttgagccgttgcgtgccaacatcgaagccgtgcgcgaaaagcaccagtcctccacaggcgccgccgctgtgctccagagcgagtacaaagcgctggaccacaagatgacaaccgctgacggcctgctcgatgcggcgaggctgaagcttgagcagacaccgccgtcggcttccaccgtcaccgcgctggaaccgtacttcgttggtgccgctgaggtttccgaactgtacgaactcgacaacttggccaacagtgtccgcaacaagctgctcgacgagctgcacgctgcggaatcgcgcggccaggccacagccgaacgattgacccgtatgttcgaagcattcgttcgcgactggggaagcgccatcagcgcggaccacggaacgtcgatcggcgcggccggggacttcgaatcccgctaccacgcgatcgtgagtgacggcctacccgcccaagaggccgagttccggttgttcttcaaccagcgcacgcacgagtcgttcagcacgctcctgcatttgctggatgaggagcgccgcagcatcaccagccgcatcctgccgctcaacggcatcctgtcccaggtgaacttccatgagggcagcttcctggaactggacatcaagcagacgctcccggccacggccaagcagttcaaggatgcgatccaaaacgccctgaaggcgaagcacaccaggccctcgcgtgccgccgccgctggttcaacggcagaaatcgacgacgacgccgagctcactgcacgctataaatcgttggagaccctggtgaagcggctcggatcccagacgccggaggatcggcgctggcgggctgaggtgctggacgtccgcgggcacctgttcattcagtgcaaggaacaccgcgaggtagccccgaaatcgggcaaagccggtggctccggcaaagcaggcaagaagaagaccgatgtcttcatgcacgccgataccgggtccatgtccggcggtgagcgccagcgtttcacggcgttcatcatggccgctgcgctgagctaccagttgggcatcgccgagcaaggattcaccacttacggcacggtgatgatggacgaggcgttcgtgctggcttccgaagaattcgccggcgccggcatcaaagcacttcacgagttcgggttccagttgctgctggccgctccggagaacgtcattgacctgtcgaggcaccttggctccgtcactgaaatcctccgggacaagcgcaccaaccgctcgggagtgctcacggctccagtcattgccgggccaggcgagcccggggcgtggcggtcggaggcaaaccccgtggacatcgtcctgcggtag

SEQ ID NO: 43240 - DNA, 1476 bp, Mycobacterium vaccae ATCC 25954
gtggacgacaactcgaccctgtccgccgtcgacctgctcgaactcaaccgcgacctgcagacctccccggcgatccgactgctggccaccaccaatctgagcttgtacgcgacgctgatggaacgccacctcgccgagggtgtggtgcccgagaccgagctggtcgtccgcctggaacgcgacctcgacgacctcgacctgggcactgaagcgcagtcgggcctggcgctgatcaagtcgtgggccagccagggctggctgcaccgcatcgtcgaccggcgcagcgaccagaacgtctgctacctgacccaggacgcccgccgcacgctggacttcctgcgcggcatgcgacgccaggacacgatcgccaccggcggctccatcaacggcatcgcctcacggctcaagcaggtcgcgatccgggtcggcaacgaccccgcccgcatccgcaagagcatcgaggccgagatccaggcgctgcaccaggaactcgagcggctcgacgccggctcggcaccggtgcacgaggacgccgacctcacagacgcctacgacgaggcccgcgcgatcgcgctgcagatggagcggctgatcaccgacatcggtcagtacggctcgatgatcgagcaggccaccgccgctctcgacgagccgatcgactccaacgtcgagtaccgggaccggcagcgccagatgtacgccgactaccaggccgcgtgggactcccagggccgcgacagccatcgcgcgttcctgcggatgatcaacgatccggaccagcgcgcggagttcgaggccgacgtggccgcggtcgccgaggcgctgcccgccctggacccggcgctgcgcaaggtgatggccggcttcttcgagctggtcggccaccagatcgacgaggtcgaacggatccagcagcgctgcgcgcagcgggtcaagcggttcaccgcgttcggcacgctggagcagagccgcggggtggcccgtcagctcaacgaggccatcggcgcggcccgcaatctcctcaagtcgagcttgatcgactcgcggctggacatcgagctgccgctggcccggcacgcgatcagctcggtcggcgcgttgagcttcaagatcggcgatctgtccagcccgaagccggccaaggccgccgagggcgaggtcgacctggccagcttcgccgcgctgaccacccaggtcgacgcgccggcgatgtcggacatgctcaatgccgcggtggccgacggtccggtgtcgctgccggaggctgtggcgatgctcggccgctcaggacagggcgcctacctcggccacgtgatcgtgctgtggtcgtgggcgctcaagcagcccaacgacgccgaaaccgccaccgccgcctcgacgaccgtccggttccgttcgctggacggcagagaccgcgagatcgccgtccccgacctgaaattcaccgaaccgatcagtgttggagcatccgcgtga

SEQ ID NO: 43241 - DNA, 693 bp, Mycobacterium vaccae ATCC 25954
gtgaccaccgaacacgacgccgacttcgcagcgttctccgcgctgcccgaggtcgaccagaacgcccggccgccgcaccagcgtcggccgcggttcgacggcgacgtctccgaactgcccgaccgcgcctgctgggcgctgcagcatctgctgacccgccgctacatcagcgccgagaccgacagcgacatctatgcgtgggtgctggagtaccgcggtcaactgtcggtccggctgagtgaactcgatctgatcctgcgggtggtggacgggaccgccgtggcgttcatcgaacaggcccgctacgaatccgccaagggcatcaagcttctccggcgcgaaccgctgggcacctacgactccatcctggcgctgcacctggcgcagatgatgcgcgccgcgggcgggcagagcgtgctgatctcccgcgaggagatgcacggcctgttctccggcgtgctcaacgacaccgaccgcgacgcggtcacgttcaccggacgcatcgacgccgccatcgcccggctgaccgggctggagatcctgcgccgcagccgcgacgacgaggacagctacaccatctcccccgtcatcaccgcggtgatgacggccagcgttatcaccgagttgcagcaacagttcgagctgcttcagggcggcgccacaccggaggtagaggtcgcactcgatgactga

SEQ ID NO: 43242 - DNA, 3363 bp, Mycobacterium vaccae ATCC 25954
atgactgagcagttccatctgtcccggctccaggtgatcaactggggagtgttcgacggctaccacgacatcccgttcagcgagggcggcgcgctgatcgccggtgcgtcgggcagtggcaaatcctctctgctggacgcgatctcgctgggattcctgccgttcaaccggcgcaacttcaacgcctccggcgacaacaccgcggcgggttcgagcgcgggcaggcgcaccgtcgacaagtacgtgcgcggcgcgtggggccagcgcagcgacggcggcaccagccgcgtgatgtacctgcgcggcgacggcaccgcatggtcggcggtggcggtcacctactccagcgactccggacgtaccgtgaccggcctggtgctcaaatggctgacgggtgagtcccgtaacgactcgtcgagccgattcgtgctcggcgacggcgacttcgacatcgaggacgtctgcaaccgttgggcggcaggacgtttcgacaccggcgtgttcaaggacagcggctggcggttcaccaccaaggtggagtcgcagtatctggcccagctgtacgcgaccatcggcatccgcgcctccgacgccgcccagcagctgctcggcaaggcgaagtcgctcaagagtgtcggcgggctggagcagttcgtccgcgagttcatgctcgacgaacccgagagcgtgacccggctgccggaggcgctcaagcagatcgacccgctggtggaggcgcgcgaactgctggccgtggcgcagaagaagcgcaagatcctcggcgacatcgagaagatccaacagcgctacgcctcggagtccaccgacctgggcatcatcgacctggtggatctgccgatggtgcgggcctacaccgaccacgtccgggtcgcgcagtgccctgcccagatcgagcagctcgacaccacgatcgatcagctcgacaacgagtacgaggatgtcacccgaagcctgaatctggccaaggccgaggcggattcactcaacgcgcagatcagcggatccagcgcgagcatcgggccgctgcagtctcaggtgaccgccgccgagaccgaggccgagcagatctcccgccgccgcggcgcgtacgaggacatgctcgccgcacagggcctcgacatccccgagaccgccgaggacttctggaaccagcgcgaggaactgctcgccgaggccaccgagctgctggccaaggtcgagcgcaaccgtgaggcctcgaccgacgccgagtacgcgcagaagtcggcccggctggtccgcgacgaggccgccaaggaactcaagcgggtcgagcacgtggggtcggcgctgcccgagttcgcgctgacgatgcgggagcagatctgcgcggcggtcggtgtcgaggcggccgacctgccgtatgtcgccgagctgatggatctgcggccggaccagacgcggtggcgcaccgcggtggagaaggtgctgcgcggggtgggcctgcggctgatggtgcccgatcagcactggaccaaggtgttggcgttcgtcaacgagaccaacatgcggggccggctgcagctgcaccacgtacgggccaggctgctgggcgccgagccggtcgatccggagccgaacacgctggcgggcaagctcttcccggtggacccggcgcacccgtgcgcggccgaggcggtcgacgtggtctccgcggccggtgaccacgtctgcgtcgacacccccgaggtgttcgcgcggttccgccgcgcggtcaccgacaccgggctgtacaaggactccgaccggctcgcgatcaaggacgaccgccgtccgctcaagcagtccgagtacctctaccagggcgacgtgtcggccaagatcaacgcgctgaccgtcgacctggccgcggccgaggaggcctaccagaaggcgcgccgggtcgccgacgacatcgccgcccagcgccagcagtggcgcgaccgggccgcggcgtgcaaggcgatctgcgagcagttcccgcagtggagccagatcgacaccgagaccgccgacgggcacgccgaccggttgcgcgagcagtacgaactgctgctggccgatcacccggacatcgaggcgctcaacgcccgggccgacgaatgctggtcgcagatccagaagttgatgacgcgccgcggcgcgatccagacccgccgcgacgatctggacgggcggcgcaccaggctgctggagctggcggagcgactgcagccggcgttcgtgtccgagccgctgaccgagctgctcaaccggtacgccgggcagcttccggtgtcgttggagctgctcgatcccgagccgcaccgcgacgcgctgttcggcgcgatcaagaaggagcgcgagcagctgcgggagagccgccgtcgctcctacgacgagctggcccggatcctgaacaccttcgacacgtcgttcccggacgccgtgccgaacgactcggagaatttcgacgagcgggtgcacgactacgtcgcgctgtgccggcacatcgacgagcgcgagctgccggaggcctacgagcggatgatgcgtctggtgaccgagcaggcgccggacgcgatcctgacgttgcaccgggtcgccgagcaggaggcccgccggatcagcgaccagatcgcccgcgtcaacaccggtttgggtgcggtggagttcaaccgcggcacccggctgacgctgcgggcgacgccgcgcaccctgaccgcggtgtcggagctgaccgagatcgtgcgggccatctcgcggcggatcgccgaggtgggcctgggcgacaagcaggcgatcctggaccagtacgccgacatccttcggctgcgcaaccgactggcgtcgacggcgccggaggacaaggcctggacgcgcgacgccctcgacgtgcgcaaccggttcaccttcgactgcgcggagtgggacgtcagcaccgaggagctgatccgcacgcactccaacgccggcgacaactccggcggtgagcaggagaagttgatggcgttctgcctggccggtgcgctgagcttcaacctcgccagcccggacagtacggacaacaggccggtcttcgcgcagctgatgctcgacgaggcgttctcgaagtcggatccgcagttcgcccagcaggccttgcaggcgttccgcaagttcgggttccagctggtgatcgtggcgacggtgcagaacgccacgaccatccagccctacatcgacagcgtggtcatggtgtccaagaccgaggcgacgggtcgcaacgcccgtccggtggcgacggtcgcgacgcgcaccatctccgagttcggccagttgcgcaagcagatgcgggccgacgcgaaagtgcccgccggggtctga

SEQ ID NO: 43243 - DNA, 1088 bp, Mycobacterium fortuitum subsp. fortuitum DSM 46621 = ATCC 6841
ggtcgatctcggggatcgccgccgggctgcgccgggtggccggtcaggtcagcaacgatccggatcgcatccgtgcggacatcgaagccgagatggccaagctgcgggatgaattggaggcccttgaacaggggcagcggcccgaacctgatctggtcgacgccgaggacgaggcgcgggccatcgcgttgcagatggagcagatcatctccgacatcgggcagtacggcgccatgctgaaccgcatcaccacccggttgctggatgcttccgccgataccgatctcgggtaccgggagcgtcagcgccagctgttcgacgactacgagtcccttttcgcctcccgcgaaagcgcctcgtacacggcgttcacccggatgatccaagatcccgagcagcgggcggcgctggtggccgacatcgaggcggtgacccgggaattgccgcacctcgatcccgacctgcgtgaggtgatgacaggtttcttcagcctggtctctgcgcagaccgccgaggtgggccgcacccggcagcgctgcgcgcgacggatcaagcgattcgtcgcctccggaaccctggagcacagccgcggcgttacccgtcagctcaacgatgccctgaccagtgcccatgacttgctcagcatctcgttggccgacagtcgcatcggcatcgaggtgccgctggtccgtaccgacttcaattcgatcggcgccgtggccttcaagattcgtgacgcgatcccgccgtcacaggccgagacctctcacggcgaggtgaacctgtcggcgttctcggccttggcgtcccaggtggacgccgccgagctggccgatctggtcaacggtgcggtcgccgccggtccactggcactgtccgacgccatcggcatgctggactcggcctacctcggtcatgtgatcgtgttgtggtcctgggctctcaaacagccactgagtcaaccggaatccgatgccgaatccgttcgggtgcgtttccggtcgctggagggtgccgaccgcgaaatcgaaataccccgattggttttcaccgaaccgatccctactgccagtgagagcatgctatga

SEQ ID NO: 43244 - DNA, 765 bp, Mycobacterium fortuitum subsp. fortuitum DSM 46621 = ATCC 6841
atgaccgacaaccccgacacgtcgcccgtcaaagacgggtcgatcgacttcgatgccctaccgagcatcgacgccgtcgaacggtccaccaatcagcggcgtgctccgcgcttcgacggggacgtcagcgagctgcccgaccgcgcctgctgggcgctgcagcacctgctgtcgcgccggtacgtcagcaaggacaaccactccgagctgtggtcgtgggtcacccgctaccgcgccgaactcaccgtgcggctgtcggaactcgatatgcggctgtgcatctcggacgatcacgacatcgcctacgtcgagcaggcggattacgaatcgcagtggcggcgccggttgctgcggcgggagaccctcaacacctacgattcgatcctggccctgcacctggccaagctcatgcgcgcggcgtcccgtgacgagaacgtgctgatcagccgtgacgagatccatgagctgttcgccggggtgaacaacgacaccgatcgggataccgcctcgttcgacaagcggatcgacaacgcgatcgagcggctcaccgacatcgagatgctcacgcgcaaccgcgaggacgaggacagtttcacgatcagcccggtggtcaacgcgatcatgacggcctcgatgatcaccgagttgcagcagcagttcgagcagctcaagcgcgtcgcgaacggcacggcctacgatcccggtgcttccgacgatcccgatgtatccgaacggctcgaagacgaagtggacgcccatggctga

SEQ ID NO: 43245 - DNA, 3363 bp, Mycobacterium fortuitum subsp. fortuitum DSM 46621 = ATCC 6841
atggctgaaccgaccaaccagttctcgctgtcgcgcctgcaggtcatcaactggggtgtgttcgacggatatcactcgatcccgttcagccggcacggcacgctgatcaccggctcctcgggcagtggtaaatcctcactgctggacgcgatttcgctggccttcttgccgtcgcaccgccgcaacttcaatgcctccggtgacaccaccgcagcgggctcgggcaccggcaagcgcactgtcgacaagtacgtccgcggcgcgtggggcgagcgccgcgagggcaccagccgccagatcatgtacctgcgtgggaccggtccggcctggtcggccgtcgcggtcacctacagcgaccgcaccggacgctcggtcaccgggctggtgctcaaatggctggccgccgagaagacctcggacccgggcagccgctactacctgatcgatgccgaccgcgacatcttcggtctgtgtaaccgctgggcgtccaacgggtatgacgccgcggtgttccgtgacgacggctggaccggcggccgcagcgagagccagtacctggcccagctctactccagcatcggtattcgggcctccgaggcggcccagcagctactcggcaaggccaagtcgctgaaaagcgttggtgggcttgaacagttcgtccgcgagttcatgctcgacgagccggccagcctcagcggtgtggaagaggcgctggagcagatcaacccgctggtcgaggcccgcggactgctcgacgtggcccggcgcaaacgcaacaccctcggcaatatcgctgcggtacaagcgcgttatgccgacgaggctgccaagttcggggtgatcgacaccatcgacaacgcgatgatccgcgattacgtcgaccatgtgcggctggcccaggccggtccggagatcgccaatctcgacgatcagatcacccagctcggcgcccagcgcgacgagttcgggacccagcagcgtcagctgaagaacgagcacaacgcacttatggcccagatcaactctgtggcggtagatctggttcccctgcagcaacggctgaccgaggccgagcggatcagcgaggaagtgtcgcgccgccgcagcgcctacgaggagaaggtgacctcactgggactgaccccgccggacaacggcgaggaattctggtcgctgcgtgagactttgatggaggaagccgaccggctgcatcgcgagctgttcaccggcaaccaaccctacgtggaggcctcggcgaaggaagtccgagcccgcgaggcgcgcgagagcgtcgaagccgagctggaacgggtgcagcggctgggttccccgctgcccagaaccgagtatgagatgcgggcccgcatcgcccgagcgctcgacatctccgaacgcgatctggtctacgtggccgagctcatggagctcaagcccgacgagtcgcggtggcggctggccgtcgaaaaggtgttgcgcggggcgggattacgcctgctggtccccgacgcctacatggaacgggcactgcgcttcgtcaacgagaacgacatgcgcggccggatccagctgcagcacgtccagcacggcgcgcaactgcgtaccccggctccgggcacactggccaccaaactgcagctggccgacccgacgcacgacagcgccgtggaggcgctcaacgtgatcgccgccgtcggcgattacgtgtgtgtcgatgggccgggggagttcaccgaacaatcccgcgcggtcaccgaccaggggctgcgcaaggacagcggccggctctcgatcaaggatgaccggtcacggctgcggccctcggactacatcttcctgggtggcaccgcggccaaagtcgaggcgctgcaggatgatctgaccgccgcgcaggatgtctaccaggtggcgcgaacggcccgcgagcgactggatgagcaccgcggccagctgcaatcccgggaacgggcctgccgggcgttgtgcgaccagtacatgcagtggagcgacatcgacaccgattcggtcgacgcgatgctcgagcggctgcagggtgaacacgatttgctggtctcggacaatcccgacgctgagcggctgcaacagcgggccgacgattgttgggagcgcgtcgagaaggtcatccagcagatcggttcgctcaacgaacgcgagaccaccctggaccgcaggcgaacggcgctgcttgagctgagcgagaccctgaccgagcggctcgggtccagcgagttcccgtcgcatgcccgggacaccatcgacggctatgccgccgacatcgcgctgaacctggagttgctcgagcccgagccctaccgcaacgaactggtccgcgtgatcggccgtgagcgggaccgattgcgggcggaccgcaaccgttcgcacgacgagttggccggcatcatggccgcctacgacagctcgttccccgacgcgatccccaatgacagcgatgtcttcgacgagcgtgtgcacgactacgtggcgttgtgccgccggatcgacgagcgggaattgcccgatgcctacgagcgcatgcagcggctgatcaccgagcaggcgcccggagcgattctgaacctgcacatgatcgccgacaacgaggcacgtcggataaccgaacagatcgctcgcgtcaacacgggtctgggcgcggtggagttcaaccgcggcacccggttgaccctgcacgccgggacccggcatctggctgccgtcgacgaactgaacgagaaggcccagcgcatctcgtcccgggtgtcgttggtgagcttcggcgatgagaccgcgatgttcgagcagtacaccgacatcctgcagttgcgaaagctgttggcgggcaacacccccgaggaccgccaatggacccgcgatgccctcgacgtgcgtaaccggtttgtgctgtattgcgaggagcgcgacgccgagaccggcgaggtcattcggacctacagcaactccggtgacaattccggcggtgagcaggagaagctcatggccttctgtctggccggtgcgctgagcttcaacctggccagcccggacagcgacgatacccggccgttgttcgcccagctcatgttggacgaggcgttctccaagtcggatccccagttcgctcagcaggcactgtcggccttccgcaagttcggcttccagttggtgatcgtgtcgaccgtgcagaacagcacgacgatccagccctacatcgacaacgtggtgatggtgtccaagtcggacgcgtcggcacccaacgcccggcccgtcgcgtcggtcacgtcagcgtcgatctcagaattcgctgatctgcgaaagacctcgggtgaggcggttgcgagcgcctag

SEQ ID NO: 43246 - DNA, 1476 bp, Actinomyces massiliensis F0489
gtgggaacccgcagagtcgttgcagatgcgctcaggctcacgcgactggtgcgcaaggatcctgggctggctcttctccgggccgatctgggtccgatggccgcagcgattctcgccgagcacctgggaggagaggtgcgtcgccgtcccgtcgccgagcttcacgagctggtcgacgaagacctcgcggcgctgcgcgatgcgggcgtagcggcatcgcgcgcgggtcgggcctactgcgaccagtggcgcagagccggtgtcctcgtgcgcgccacggctccgggctcccgacgggagacctacgagctgtccgctccggccgaggccgccatccgcttcctggtgcgcagcgggcgccctcgtcccgtcgccacgcagtcgcgtctggacaccatctccacgcaggttagtcgcctggctcgggactcggatcccaccgccatggggcgtctggaggctctgcgcgccgagcgcgacgctctcgacgccgagatcgcgcgggtcgaggccggcgacttcgtcccgctcgacgggccggaggccgccgagcgcctcgccgagatcctcgccctggccgaacaggtccccggggacttcactcgaatccgcaacgagatcgcggcgctcaaccgctccctgcgcgagcatgtcgtctccttggacgccacccgtggtgatgtgctcgacgacatcttccgcggggttgatcgcatcgagagctcggagaccggccgttccttcctcggtttccatgagctgctcatggactccgagtcctccgctcgcctggatgagaacttggagacggtcctcgcccgcgcattcgccacccgcctggaggacgccgagctgcgcttcctgcgccgctggcgctccgctgtcgcgcaggaggcgacctcggtgcgcagcaccatggacgatctgtcccgatcgttgaagcacttcgtgaggtcgcgcgccttcgaggaccagcgccgactgggcgccgagctcgcagaggcccagcgcctcgccgcccgcctcgccgcgcgcacgcctccgcagacgcagatggacctcggtcttgcgctcaccggcgtccacatggcctccatcggctcctggcgcatgcgcaaccccgctgacgcggtcgtcaccgagaagatccacagccgtgaggtcgcgcgcctcgacctggaggaggtgcgccgggtcgtgcgcgccagcgagatcgacctggtcgagctcatcgacgccgtcgatgcggtcctggaggagcggggagccgcgactgtcgccgaggtcctggccgcacatcctgccactcaggggctggccagtgtcgtgggcctgctgctcctcgcccgtcgtcgtggccaggaggtccccggcgacgagaccgtcacctggaggaccgccggcggagccgagcgctcggcccgcataccgcggttcctgttcaccaaccgcaccgagaagtcaggagacgcatga

SEQ ID NO: 43247 - DNA, 855 bp, Actinomyces massiliensis F0489
atgagctcccatgccgcaccggctcaggacggactggatcacaccggaggcgccaatcccggcgcgctgtgggacggagacccgggctcgctgccccgggacacccggcgcaccctcgtgcgcctcctccaggggccctacctcaccaccgagctccaccccgagctgtggaatgccctgctgaaggacgaggccgacattcgccgccggctgggcgacctcttcctcgagctcgtcatcgaccgcgcggcgggcctggccttcacccgcaacgcctcggaccccaccggcgcggccccctccgtcatgcgtgccatgcggctgaccctcgtcgacaccgtcctcctgctccacctgcgcactctgctgctgcgcgcgaacacgccgggcgagcgcgtcttcgtcgatcgcagcgagatcgacgaccacctgtccgtctaccggccgcacacctccaccgaccacacggggttcatgcgccgcgtgagctcctcggtcgataagcttaagcgggccgcccttctgcgcgacaccgacgtggccgagcgctacgaggtctccccggtgctcgccctggtcttcaccgccgacgaggtcgccgcagtcaccgctgagtaccgccgtctgctcggcgaggacggccgagacagcagtgacagcagtgagagcagcgggggcagcgggggcagtgagagcaacggcgcccccgagggcggactcctcggcggcggggcgcctgccgatgccggaaagggcggggcacctgcgggggcgcctgcggaggagcggccggcctctccggaggcggccagtgatccggtggccaactcatcggaggagagggacgagtcatga

SEQ ID NO: 43248 - DNA, 3897 bp, Actinomyces massiliensis F0489
atgaccagttcggcgaccgcgccgcagaccgcctcccagcaccgcctggcccgcatccaggtctacaactggggcacgttctccggtcaccacgatctgccggttccgcgcagcgggctcctgctcaccggaccctcgggctcggggaagtcctcgctgctggacgccctgtccgccgtcctcgtgccggccaagagcctgcgcttcaacgcggcggcccaagaatcatcctccacggccgaccgctcccgctccgtgctgagctatgtgcgcggcgcctaccggcgcagcgcggacgagatcaccggagaggtcgtcaccgactacctccgtccgcgcgccacccgcagcggcatcgccctgaccttcacgcgcctgcgccccgaggagacgatcaccctcgtcacgctctatcacgccaggcagggctcgacgtcggacgactccattacccagacccagctcctcgtggagggggatatcgccctgaccgagctcatggagtatctggtcaacggcatcgacaagcgcgccctcagccgcgatctgaaggggcgcgccacccgcttcgagcgctacgaggccttcgcggcccgcttccggcggcgcctcggcctgtccggtgaggtcgcccagcgcctgctccaccggacccagtccgccaagaacctcacgagcctcgataccctcctgcgcgacttcatgctcgatgagccggaaaccttcgccatggcggcggccgccgtcgagcagttcgccgaactgcgcgaggctcactcctccgtcgtcgaggcgcgcaatcaggaggccctgctctccccgctgcgccgcctggaggagcgcatcaccgcggcccgccgcgaccaggagcgcactgaacagctgcgcgccgccatcgacccctatctcgaacagctcaagacgacccttcacgagcagaccgccgacacggcccggcgcgccctggatcgtctcgccgatgagctcgcagccgcccgtcgggtcgaggaggacgctcgccgtgagcgggaggccgcgcgcctggctctggcgggtggcatcggtgagaacctgcccgctctcgatgcccgcctggaggcggcccgccggaccgccgagcgcattgcgcgggcgcgggaactcctcgactcccagctgggagtcctgggagcctccacgcccagtgagggcgccgccttcgccgagctgcggcgcacggcggagcaggagatcgagcgcgccgagcgcgccgaggacgagcaggatcaggcccgcagtgcgctgcgcgccgagcagatcgccctggaggagcgcagccgtgagctgcgcgagcgcgccgagcagatcaccgcctcgcgctcggccatgagcacggatctgctgcgggcccgggactccatcgcccacgccgtcgggcaggcgcctgccgccctgcccttcgccggggaggttctcgagctcgtccccgggcaggaggagtggcgggtcgccgtcgagactgtcgtggcccccttcgcccgcaccatgctcgttcctgagcacctctaccggaaggttgccgacgccgtcgatgccaagcgtctgcgcgcccgcctcgcctacgagcggatggccgccgcgccgcgctccgcccgccccgtgaccgccgatgcgctggcccgtcgcatccgccccaaaccgggctcggagcacgccgcgtggctcgacgccgagatcatgcgccgtttcgatcacgactgcgtcgaggatgcgcgcgacctggtcggcctggaccggggggtcacccgtgccgggcaggtcaagtcctcgcgcaccagtcacctcaaggacgatcgtcgggacttgaccgactcgcgcaactggacggtcggcgtcgacccggccgagcgcctcgagcaggtcatcgccgagggccgggaggtgaccgcccgcctggaggacatcggcggcgagctcgccgcactggaccgtgcccgcgccgtcggccgggagcgtcgtgacgcgtgcctgcgcattctggagacctcgtgggaggagctcgacgtcgatggcgccagggctcgcgaggccgatctggctgcgcagcgggagcgcgctgcgcatgcgctgccggggctggccgagctcgaatcgcgcgccgcggccgcgggcctggccgaggacaaggcccgggatgcggttctccggctcgcgggggaggagcaggtccagcgctcgcggctggaggatgccgaggccgcactggccgggatcgcccgtcggcgccaggagagggctgatgagggccgcgtgcgcgacggcgcggacgggactgacgggctcggtcccggcgatgccggcgcatccgagcacggttcccgctggctcgccctgggcgaggccgagcgggaggctctcttcgccgagctggagcagcgattccggacgcggcgtcgtcacgcggggctggcggaggtggacatcgccgcccgcgaggtcgagcagcagatcgcctacgacaaccagcgcgcctcgcaggccgagagccgcggactgggcgaggcccgcgccatcatggtgcgattctccgagcgctggcccatcccgagcagcggggtgcgtccggaggccgccttcctgggcgactacctcgagctgttgaaccgccttcagacagatagcctgccccggttcgagcgccgtttcgccgagctcctgcacaaccagtcccgtcagaacatcggccggctcgccggtgaggtgcgccgcgccgtcagccaggtcaggagccgtatcggcccggtcaacgacgccctgcgcgccaccgagtactcgcccggtcatcacctgcatattgaggtggccgagcggcggctgcccatcgtccacgacttcctgtcggacctggccaccatcgccgccgggagcctcgatctggccgacgagaccaccgaggaggccgaggagcgcttcgccgtcctcaactccgtcatgacgcgcctgggctcttccgacccccgcgacgagtcgtggaggcgtcagtgcctcgacacccgcctgcacgtctccttcaccgccgtggagcgcgatgcctccggcgtcgccgtcgactattacgagggcgccgcagggctgtcgggcgggcagcgccagaaactcgtcgtcttctgcctggcggccgcattgcgctaccagctcaccgagccgggacaggcggttcccggttacgcgctggtcgtcctcgacgaggccttcgacaagacggacgccgagttcacgcgcgctggcctggatgtcttccgcggcttcggcttccagctcctcctggccacccccatgaagatgctccagactctcgaggagcatgtcgggggcgccgccatggtgaccaactccccggccggtgacgactcccagctggccgtcgtcctgttcgacggcgatcggccgtcccggagggccagggccgtcagggcggccgtcgagcccgaggcgaccactgggactggggttcgggtggctgagcctgaggcgaccactgggactggggttcgggtgatcgagcccgaggccacgaccggggctgggaggcgggtggctgagcctgaggcgaccactggggccgggagacgggttgccgagcccatggccacgaccggggccgggaggcgggtcgccgagcctgggacggccactggggccgggaggcgtgtagctgcagagccgagggcgacgactggggccgggaggcgggtggctgagcctgaggtcacgactgggactagggttcgggttgctgagcccgaggcgaccgggtcggttactcgggtctctcgtgcccggcacgctgctgaaggcgcacccgatctcggcggtcagggcagtcgtcctgacggctccggcgatacgagcgcctag

SEQ ID NO: 43249 - DNA, 1518 bp, Slackia piriformis YIT 12062
atggtgacaatcgacgatgcacgatcgctacctttcgcgctgcgccgcgatgtcgaggctcagcgacggctctatgccgtgctttcgtcgccgaaacggatgttttatgttcatggcatcgtcgtgctgtgggacctgcattgcgccaaacggtggatcaccaaggaagatttcatagaaacgcttgcaacgcgcttcgagaactacctgatagaaggcaatcttggagttcgcgacgaatttctcgacaagaatttctcgattgaagaagaggattgcgctgacgaggaggatccttttctgcaggcgcgcatcgtgtttcgaaggttgcatgagacgggctggttcgagctttttaaagacgccgtcgaaggcagccttcgaaccacgctggtcgtcggagagcaggccagtcgtctcgcggagttcgtggctgcggagcagcgccatgctcacgtcgactccacatcgtgcgtgctcaatgtgcgggtcgggcttgagcatgcgcaaggtgcgttgaaccagatgaggtccggctctcgcgggctggatgacgctgtgctgcgaagcgttgtagggcgcgagttgtgcgaagcgctgaaaaacgcccaggagcgttccgccgtgctcaatgcccgaatcaggcggacgtgtcacgagttcaagcttacttctatgaggatcgcaggctgtcgtacccagtacgacctgcagcttgtcatggacgattacgaacagggccttttcgactcgatcatgcaaccgctgcgcatcgaggacggcttcgaccgcaatggggacgccatcgtgcgtatgctcgacgcctggagcgttgattccgagctgttgtcgcttgtgcacgagacgtcgcgcctgccgggcatgcccgaggggctttcgaggccgttcgaattcatccaggatgtgcgctacgcctatgcggtcagggtcagggacgcatgggaatacgcgctttccctcgaaaagcgcatcacgtccgagatgtcgaagaagcaccgtatgcttttgggcggcacgtcgacgatggcggcggcttacgaacgggcgatcatgcatattgcgcaaagcgacgacgctcttgcggcttgtgcgctcgaagccatgcaggacgtgctcttccttcccggcaaggggcctttcgacgattcgtgcctctcgacgtttagggcgtacgacgatgcggagaagatgaatcgtgtccgcattgccgatcggggcgatatggccacggtctgccgcgccgacgccgttgcggaaagcgcgttgacgcgcgcggggaagaagatgcagcgcatgattgcgcgtcagggctcgctggacggttcttcgttgccgctttcgagccgcgccgaccgcgtcgagcagatgctgtacgtgcttgctgccgattcgaaggattcgacctatgtcgtgcctcgaatcgacgatgaagatcgcgtggtgtcggacgggcagaacatcgcgcgcgttcgattcgtggaaagggcttcaagatga

SEQ ID NO: 43250 - DNA, 654 bp, Slackia piriformis YIT 12062
atgaagcggttctatcaaatggagacggaaaagaaggtcaagaccgtctgcgccatgctcattgcgcatcggtacctgtgcaagatgaagtgggtttcgcaagaagggcagcggacgaaagacattgcgccggagttcatgttttgcaaagaccacgaagacgaagtgcgcgaccgtcttgacgccgtggggtacaacctcgatttggatccgcagggtaatttttacatctgtgcgcctcaagacgacgtggatgttcgctacgagcgtcttgaccgtaccgaaactctgtttttattcggcctggccgtgacgtatgagaacaagcgctccgaaatgggtcgtttcgcaacggtcgattccgatatgaacgagcttctgagtcttttgtgcgtaacgtatcgagcgttcgaaaaggagccttcggtttccgaggtcaggcggatcatgtcccggttcgagcgtgcaggcgttattacgcgcaagcgcggccgttggtccgatttcgacgtggaattcgcgatccagcccgcaattgcgcacgtcgccgaccgcgcgacgatcgatgcgtacgaaaagcggtatgctgcggcgatcgatgccgcagtaatcgatgcgatggacgatgatgcgggagatgacgatgacgaataa

SEQ ID NO: 43251 - DNA, 3396 bp, Slackia piriformis YIT 12062
atgacgaataagggcatgcggacgggcatttacgcgagaaagcttctcgtggtgaattggtcgcttcatcagatgaagctgtatgagccgttcagcatcgacggatcggtgttcgccggcgcgaacggctcggggaaatcgacggcgttcgatgcgtttctcaccgtgttgctgggcagcaccaggcgttcgaattacaatcaggcatcgaagtcgcacagcgccgatacgcgcaacttcgccgaatacgtggtaggcaggcgcaagggctcctcgcagaagggcgtgcgcgaagggatggatttcacgacccacatcgtcgccgtattctgggactccttacgcgcgtcggaggtcactttcggcatgtgctgcgattatcgaagccgcataggcgcgcatgccttggtgccgaattactatttctacgagggcgggcttcctgaaaatcgcctggtggaagacggcgaggcgctcagcgtgcgcgataccaagatttatctgaagcaccttgaagaccagggcgtcatttcgaatgtgcatttgtgcgaatcgagctccgaatacaataagggctttctcgcccgcatggggtttagcgatcccgggtatttcggcgcattgaaaaacctcgtagccattggcaaggacacgcgcatcgaagacttcatttatcgctatctatgcgacggccgcagcgtgacgaccgccgacgacatgaacagcaacatcgacagctggcaacaatgccgcgaagacctcgatcgtgcgatcgaacgccaaagcgctatcggccaggagcgagagcgttacgccgcatggcgcgcatccgaagacgagcgcgacattttcatgcgcgcccgcattctgaggcagcgagcagacctcgccgacgaaatcgagtctttgcgtaaagaggaagaggatatcgaggcggagcgttcgcggctcaatgcgcgcatcgcggctttggaagcgcatgcggacagcatggacagcgaacggcaggcgaagtgggatttggtcaaaaacgacgatgtccagcgcgaacgcagtcgccttgcgaaggatatcgagcgcatcgatggcgaggtcgaacgctacgaacagcgttttcgcgacgactttcgcatgctctctgagaacctggcggttctgcacgaggcgcgccgatcgcccggtttcgcggagctgtcttgttccgatacggtacagcgtttgacatccaccttggaggacgtcatcgagcgcggtatgggagtgctcggcgagggccccgatgcgttcggctaccttgtcgatcttgccaccgaagcgtatcaggaggcgcagcgcgaggaatttgtggcgctcgacgagcatcgagaggcgtcgggccgccagcttgaagcgatgcgaaggaagaaggccgccgaagcgggggaggcagtgcgcgacgccgatgccgacgcgctgatcgcgtacttgcgcgaagaggcgggaatagaggcgacgtgtctgtgcgatgccatcgatatcgcccccggcgaacaggggtggcgtgctgccgtcgagggcatgctcgggcgcaggcggtccgaccttttggtggcgcccgattcgttcgcgcgggcgtttcgcgcatacggctcgtatcgcggccgcaaaaccgtgcggctcatcgatacgccgggtatcttgaaacatggggagaagacgaagcgtgtcgaagggtctctcgcggccaagacagtggcgtccgaaggccgcttcgcgaaggttgccacggcgtataccgactgggcgctcggcgatatagcctgctgtgccgacagagaaggcctacttgcattcatcagggaaaatcctgggaaatcggccgtcacggcgaacggggattgctaccgcggatttgccgtgtacgcgcttgccggccgcgatcgtcttcgcttcatgatcggatcgtctgcgcaggaggcgcgtcgcatcgaggatattcacgacgctgagaaggtcatcgcggacaacgagaggcttgcggccgctttgtcggcccggcaggagctgttgcgctccatcaaaacggcttgtcccgataaggagtcgcgttttgcacgcgggattgcttcgatggcggaggattatgacaagctggtttctggcagagcggaagcggaaggcatgcgtgcggcgcttgccgcctcagggtcggccgagtccgcctccatcatggaatccgtgcgcgccctgaaaaacgaaattgaatccgtgcgcgccgaatccgcgcaatgccagcgttcgctcggcgatgccgaccgtcgcgcgaagaacgcggcggcgcgccgtgagcaatgcgaggccgacctcgcgaaggtcgaagcggcgaatgtcgctttggaagaggagcacctcgaagaggctgcttgtcgggaatgcgcggccaattcgctcaaagacctcgaagagcgctcgcgtgccaaggcttcggcaagcagggaatgctggaatgcgctcgtggcgtttcgccgcgagcgttcgtccgctgtttcgtcggagcagatcgacgaaacggaccgcggcaacgaggcgtgggatcgcgaatggtgcgcgctcgagacgagcgtcatacctgagcgcagggcgctttttgagcgcatggaggccgagaccaaggaaggcttcacgacggcgatcgtgggcgcactgcgaaacggcatcgtcgatgtgaggaggacgattcgcgaaacgaacgcctacttgtccgagtgtccgttcggcgatatcaggtatcgcttcgactgctcgaaaaacatcgattatgcgccgtattacgacatgatcatggatcccgatttcgacaacgcgctcggcggcctgtgggacgacgagttccatgccaagcacggggcggtgattgacagcttcttcgacacgatcagagacagccgctgtgccgagaccgagcagcagcgcagcgaggcgcttgcccgcaaacgggcgctgctcgactacaaaagctatctgagcttcgacatgaaagaggtgcgtcccgacgggagcgaagtgtcgttgaaggcgggtttgggcggcagctcgggcggcgagcagatgctgccgttttacgtggtgcttttcgcctccatggcgcatcgctgccgcacgaagaagaaggggcttgacggcaacacgctgcgtacggtgctaatcgacgaagcgttcgaggtggtcgatagcgaacgtaccgtccaggctatcgagttgatgcagcgtcttgggttgcagccgattctggccacgccgaatgagcgtgtaggaactttcgcgtccatgacgggaagcggcttcatccatcgaaatctgggcggcgcgttcgaggtgtcgcgctggtatgatgaggggatggaggggctcgaataa

SEQ ID NO: 43252 - DNA, 1461 bp, Pseudomonas pseudoalcaligenes CECT 5344
gtgaaagcagacaaagccatcgcgacctaccgacgcatgcgggcgcagccgctgtggcgtctgcttgcctcgactaccgggcctaccgtcattggcctgcttcaatctcatctgtatgagggcgagcgaagcctccctgcctccatttttcacgaacgcatcgcaagggatctggaagagctgcgcgcccaaggcgaagactttccccaaacggcacaggcgtatgtcgccagctggctcgccgatgggttcctcgagcgacgcttcccggctggcgcttccgaagaggaatatgaactcaccacggcggccgtcgaagccatccggtttgtctctggcctggcacagccgcattccgccgccaccgaaagccgcctgacgctcgtcattgaggcattggcccgacttgccgaggacaccgacaccgacaagttccgccgcatcgaccggctcatggccgagcaagcccgcatcgacaaggagattgacgccatccagaaggggcagatgcgcgtgctgccccatacgacggcgctcgagcgcacgcgggagatcatcacgctggctgacgatctggccggtgatttccgccgcgttcgagatcagttcgaccagctgaatcgcgatcttcgtgaacgcatcatggacaacgatggcaatcgtggggatgtgctggattcgctgttcgccggaatcgacctgatttcagagagtgacgccggaagaactttctccgctttctggcgattgcttacggacccagagcaagcggccacgcttgatcaggcgcttgatagcgttatgtcgcgggagttcgtggggcagctcgaagccaaggagcgacgattccttctgcggctgacgcgcacccttcttgagcagggcggcatggttcacgaggtgctccagaccttcgcgcgcagtctgaagcacttcgtccagagtcgtgaatacctcgagcaacgccgactcaatcacctgctgaaagacgcccagcgcgcagcactggccctgaagaacgaggtcagggccacagaaaccctccagtacacgcttgagctaacgagcagtcgtttgcgctcattgtctcaatgggtgctgcacgacccatccctacaagcattgcccgggcagatggcagaaggggatgcgccgccaatcgaccttgagtctgtgagcgaactggtcgcacagtccgagatcgacttccgaacactgaaggccaacgtgctggctgtcctggagcaacgctcccaggcatccattgccgacgtgctggagcagttccccgctgcacaggggctgggcagcgtcgtcggcctgctggcattgggcagtcggcatgggttcaaagccgaccacagtgaaaccgtaggctgggttggaggcgacgagcagcgtcgtagcgcccgaattccaaagatcttctttttgagggagcgggccaatgaactggtctga

SEQ ID NO: 43253 - DNA, 708 bp, Pseudomonas pseudoalcaligenes CECT 5344
atgaactggtctgagaacgacgaatcggcaataccagccgaaacacaagcgccagatgctgctcaagcacctaccaacaccctcttcatgggtgacagcggcgagttgccactggatacccggcgcgcattagtacaactgttggcagggccatcgctcgacggtcgtcggcatccaaaactctggccgatcttggcgcgagacgaagcagtgatccgtcggcgtcttgccgaactgtttctcgaactggtcatcgatcgggatgtgcaagtggccttcacgcgtcaggcagataccggcgaccttgaagtgcccctgctgctgcgtcgcgcccaactgacgttcattgactccattctgttgctccaccttcgccagcgattgacccaggcggactcgcagggggatcgtgccgtggtgtcgacagacgagatcacggagtttctctccctctatgagcgcgccgccaacaccgaccgtgcagggttcgtgaaacgggttcatgcctccatcgagaagatcaagaagcacagcattcttcagaaaattcgctcgagtgaggatcgcttcgagatttcgccgacgctgaagctcctcttctcggcagaggaaatacaagcgctgacgcacctgtatcagcgaatggctgccgcagaaacgccagcgcagctggttcagactgaagctgatgaggaggctgaccaatga

SEQ ID NO: 43254 - DNA, 3375 bp, Pseudomonas pseudoalcaligenes CECT 5344
atgatctcggaaccccaaaccgcctccttgtttgcccgcgagcagttccggatgacccgcctgcaggtttacaactggggtactttctccggcctgcacgacgtaccaatcagcgagcgaggctttctgtttgtgggtcgatccggcgcagggaagtcgacgctgctcgatgcattttcggcgttgctgacgccacctcgctggatcgatttcaacgctgctgcgcgtgaggcagaccgcagtggccgagaccggaacctcgtcacctacatacgtggtgcgtgggctgaacagaaggatggggagtcgggagagatcgcaacgcgctacctgcgcgcggggacgacctggtcagccttggcgctgacctaccagaatgccttgggccaatctgtggtgttggttcaggtgttctggctgcggggcaatgcgaacggcagcaccgacgtcaaacgccactaccttgtcatggagcgggcctttgacctgcgcgagctcgaggacttcggccaatccaacttcgacatccgtaagctcaagcagtccttcccggaggcattcgcccgcgacgaatttcgtccctattgcgaacggttctgccgtctgctcggcatcgagagcgaaatggcgctacgtttgctgcacaaaacccaatccgccaaaaacctcggcgacctcaataccttcctgcgcgacttcatgctcgacaagcccgagaccttcgaggtagcggatcgcttggtcagtgaatttggcgagctcaatgcggcccaccagtcagtcgtcacggctcgcgagcaggttcaaacgctcgccccagcgcgggaccagcacctgcgcagggactcgctgatgctgcagcgcaatggcttggatgagcttcggttgggcgtggacggctaccgggagacccgccgcattgatctcctcaaggagcacgtggcatccctggaggtgcaagccaacggctcagaaggtgaagtggggcgacgtcaaagcacgctggataaccacgccgcaatcttgcgcgatctggagcgacagcaccgtgaggcaggcggtgatcagatcgagcaatgggaaaccgagaaatcggggctggagggccagcgcacggatcgtttgcgcaaacgcgcccaggccgaagatgcgtgcaagaagctgggctggagtctcccggattcgcctcaagcctttgcggaactgttgggcagcgcgcggcaggaggtcgaaaactgggagcagcgcagcaacgatagccgcgccgagcagttccgcctggacagagaaaagaaggatgccgagaccgcgttttcgcaagcattgaaagaggtgcaggcactccagcgccagccatcgaacattccggcggacatgctggaaatgcgtcgaaacatcgccgccgccatcgggatctcggagtcggcacttccctttgttggcgaactcgtcgaggtgaagtctgacgaggtcgaatggcagggggccattgagcgcgtactgcacgggtttgcgctctcactcctggtagacgagcgccagtattcggcattggccaatcacatcaacaccacccaccttgggcagcgcttggtgtattaccggactggccgcccggagacgcggcaggccaagcccatcgggaccaattcgctcgtcctcaagctgaacgtcaaggaggggagctacgctgattggctccaggccgagctgcggcaacgcttcgattacgcgtgcgtcgattccattcagtcgttcaggagcgcagatcgcgccattacccgcgagggtcaggtcaagcacagcaaaactcggcacgagaaagacgaccgcagaagtgtcggcgaccggcgaaactgggtgctcggatttgataaccgggagaagctagggctctttcaagctcaggcgcaggagcaggctgacgcgatttcgcgcctcgccggggagatcgacaaactctccgagcaagacaagaatcgtgcggcccgagcgatgcagtgccagactctggtgaatctccagtggcaagaaatagatctgctcccattgctggatcgcatctccaccattgagcggcaaatccacgaagcgcgcgaggggaacaccaccctgctgcaaatcagtgagcagatcgagaagcaaaagaaactcgtcgatgatgctgacaaagatcttcggcaggcaacgcgtgcgcacgactcgattgttgaccagatcaagaccagcacccagaaactggaatccctcctgcaggacgcgtctatcgttccattgacgtcccagcaggtttcgggtctcgacgagcgcttcgccaagcagtcagatgcagtccggctcgacaacatcgacaaggtgacaacctctgtagaacgcgcactcaatgcggagatcgaagaggtcaaccgtgggattggtgcctgcgagaaggaaatagaagcacgctttgccgacttcaaacggcaatggccgatggacgcgggcgacatggacacgagccttgccagcgcgccagacttcttcgccaaactggttcggctggagacagatgggctgcccgcctatgagcagcgattctttgaattgctgcagaaccaaagtcaccagaatctggcggcgctttccacctacctgaacgatgcgcgtaaggcgatcctggagcggatggatctggtcaacgacagtcttggccaggtgcccttcaaccagagcgccaatcaacgcacctatctccacatcgacgccagtgaccggcagcttgtcgacgtcaaggaattcaagcgggagatccagcaggcactgagccacgcatggacggaggatcgcgagtttgccgaggcgcggttcctggccttgcggcgacttgttgatcgacttgccagtcaggaccccgagcagaaacgctggcgtgagactgtgctcgatgttcgacagcatgttgaattcatcgggcgggagatcgacgaaagcggtgtcgaggtcgagatctaccgcagcggagcaggcaagtccggcggccaacggcagaagctagccaccacgtgcttggccgcagccctgcgatatcaactgggcgggaacgaccacggcgtgccgatgtatgcccccgtcgtgctggatgaagccttcgacaaggcggataacgagttcaccgcgttggcgatgaacatctttaccaatttcggattccagatggtggtcgctacgccgctaaagtcggtcatgacccttgagccattcatcggtggcgcctgctttgtggatatcagcgatcggcgcgtctcaggcgtcctgctcatcgagtacgacggtgatcgtcagcggttgaagctgccagagcacgcacgagaggaggctagcgttgaagcttcctga

SEQ ID NO: 43255 - DNA, 1164 bp, Pseudomonas pseudoalcaligenes CECT 5344
ttgaagcttcctgaagatgttcggcagtttcttgcccgtcgctttcaaagcaagcaccgcgagtggttggtcggtgatccgggcgagggccaatggccattggaagttcccctcggcataccgacggagcaggctgcgctgaggcaagtcgacggcgttcgcgcttgggtgagcgcatggcaaggctggcaaggagtcggcaccctgtcctggtgtgagcgtcggtggaaagcgcttggtgtccagcgactgccagagaaactggcgttacgaggccctgaagatgttgccatgtggatcggtgcatccgcacggtgggttcgttccctgtctcggtatcagacgctcactgctcgctggccggtgcttgcacagcagttgccgagatactttgatgtcctcgctgactacagcgatgccgatttccgtcgactggcagagatgctggattggatcagtcgcaatccgaaatcgaatctctacccacgacaaattccggttgccggtgccgacagcaaatggctggattctagaaagggcatcatctctgacttgattgcaacgctccagggtgacccaacaggagagcgcgacttcttctggcgctgcggcttgagggcacagccgcagttaatgcgcatgcgcgttctagacccggatctaagggcccattttggcggtcttggcgatatctctgcgccttgtgatgaggtcgcgagaattggtatacgaccaaagagtgtcttcgttgttgagaaccttcaaactggcctggcctttgatgatctgccaggggcggttgtgatcatgcgactgggttacgcggttgacgttttgggacagcttccatggctacaacaggcgcaatgtatctactggggtgacattgatacgcacggctttgccattcttaatcgagccagaacatacatcccaagcctgaagtctgtgcttatggacgagtttacgctgatgagtcatcgcgatttatgggtcgaagagaaagaccagcactcttccacagagctcccactactcaccaataccgaacaaaagctctaccagtcgattaaaggaaatgtctgggaccaacaagtccgcctcgagcaggagcggatacgctgggatgtggcgtggaatgccatacaggcaagtattcgatga

SEQ ID NO: 43256 - DNA, 750 bp, Pseudomonas aeruginosa ATCC 25324
atggcaggggtcttcgatcgaattgcaggcgcctctggtgccgacgaaacggagctgacggtggagcccatggcgttggatgacggcatggatgatgaacagcctctcatgagcgccgctgtacaggtcgatgagcgccggacgccgcaacgggtacgggaggccgtacaggaaatgctcaagtacggtctgctggaagagagtcacaagcccaacctgtatcgctcagcgctttccaatatcgaggcggtcgacagaatcctggagccgctcgaccttgccatgggggtcgacgaggttcgggggctggtgttcgttatcgttcgccagggcgaggtggccgagcaggatgactggtcgcaccccctagtgcgtcggcaaaggctgaatctggagcagtctctgctgatagccatcctgcgccagcagttcatcgcctacgaacaggaaagcggtacgggcgccagtcaggcatcggtagtggtcgatgagctgattccccaattgcaggtttacctgggcgagctgggcagtgaggcaaaggagcgcaatcgcatcatcacgctgctggatcagctcaaggggcatggcctggtgtcggctttggacgcccatgatcgcgtcatcatccgtcccatcattacccacttggctaacccggagaacctgcaggcactcgtggcatggctgcgagagcaggtggagggcgcggcgacgccggctgccgatggcgaggaggatatggcatga

SEQ ID NO: 43257 - DNA, 3138 bp, Pseudomonas aeruginosa ATCC 25324
atgaccttgctgtgcgccaatccgcgctacaacctggcatccacgggcgggcatgaaagcgaccgcgacctggtgtcctatgtccggggagttaccggccccggggacggaggtatagagcagtctcatatcgctcgccagggtaagacagtaaccgcaattgcggccacgctcgagcgtgatggtgcgcaggtacgactgggggccgtgctctggttcgaaggcacaagctcctcggcatcggatctgaaaaaactgtggctgttaagcgagtcccccgagcagactctggagcattggctcagccagcatcacgcaggcggtatgcgggctttgcgtcagatggagaaggatgggacgggtatctggccttatcccagcaagaaagctttcttggccaggctgagggattacttcgaggtcggtgaaaacgcattcaccttgctcaaccgcgctgccggcctgaagcagctcaatagcattgacgagatctttcgcgagttggtgctggatgaccgttccgccttcgagcgggccgccgaggtcgccggcagcttcgatgatctaaccgacattcaccgagaactggaaacggctagaaagcagcagcgctcattgcaaccggtcgccgatggctgggagcgttaccaggtcttgcaagaacagctgcacgataagcaggctctcgaaggtatcctcccggtttggttcgccgagcaggggtatcgactgtggttggctgaaaccaacaggctcgagaaggagtacaaaaaggccgaactggatcaggagcaatgcaaaagtcagcttgaggcccagaaaggtgtggtcgatcaacatcgccagcgctacctgcgagtagggggcgcagggatagatcaattgcgcgagcgcatcgctgattgggtgagggagtgcgataagcgcagcctgaaagccgagcaataccaactcttggccaaaggccttggactagcggatgagttatcggccgctgctctcaaggagaatcagcagcatatcgcggcacgcctggaaatactggaccaacaaattactgacgcgcgccaaaaggcgttcgacgcaggcctcgtccagcaggaactcaatggtcgcctacagaccttacagcaggagggtgctgaggttgagaaacggccaggctcgaacctgcccgggcaatttcatgctttccgaagcgatctggcgcaggcgcttggtgtcaatgagtcggccctgcctttcgttgccgagctggtgcaggtcaagcccgaggagctggactggcgtggcgccatcgagcgggcaatcggtagccaccggctacgcatcctggtgccgcaggactcatcccaggccgcactgcgttgggtgaatcaacggcacaaccgcttgcatgtgcgcttgttggaggtacaggagccgacgtcgcgccccgtgttcttcgacgatggttttacccgcaagctgaccttcaaggagcatccgtaccgagaagccataaaggcactgctggcggacaatgaccgccactgcgtcgaaagcccggagcaattacgtcatacccctcatgccatgacggcccaggggctgatgtcgggcaaagaacgcttcttcgacaagcaggaccagaagcgtctggacgaagactggctgaccggcttcgataaccgtgaccgtctggccttcctggctgagcagattcgcgaggtcaatgagcagctcgagccagccaagctcgccttggatgctgcccagggcgacgttcgtcagttggagactcaagcttcgctgctgaatcgtgtcaaagaactgcagttcgaggatattgatctgccgggtgcccagagtcagctggagtcgctgcgtacgcaactggccaccctgacgcgccccgattctaaccttgccatgatcaaggtcgagctggatgcggccgaggccctgcaggagtctctggatcaacagctccgccaactgatcgaacagtacgttcagttaaaaactcagtttgaccaggccgcatccgctacccgtaaggcctataacagcgcggagaaagggctgaacgatacgcagcgtgaactggcgcaagcgcatttcccgactctgaccgcggatgacctcggcgatattgtcgagctggagcgcaagcatacgcgtgagcttcaagggcagctcaaagcgcttggcgagaaactgggcgatcagaaatcagagcttgccaaacgtatgtctgatgccctcaaggtagacaccggggcgcttgcagaggtcgggcgagagctggtggatgtccccaggtatctggagcgtctgcgtgtgctgaccgaggaagccttgccagagaaactcaagcgcttcctggaatacctcaatcgctcctcggatgacggcgtcacccaactgctcagctatatcgaccatgaagtctcgatgatcgaggaacgcctggatgacctgaatagtacgatgcagcgtgtcgactttcagcccggacgctatctgcgcctggttgcaggcaaggtcatccatgaaagcctgcgcaccctgcagcgcgcccagcgccaactgaactcggcgcgtttcatcgatgatgaaggcgagagccattacaaggcattgcaggatcttgtggggttgctcaaggacgcctgcgaacacagcaggaatcagggagccaaggcgcttctggatccgcgcttccgcctggagttcgcagtatcggtgatcgatcgagaaagcaggaatgtcatcgaaacccgaacaggttctcagggcggtagcggtggcgagaaggagatcattgcctcctacgtgctgaccgcttccctgagctatgcgctttgtcccgacggcagcagccggccgttgttcggcaccatcgttctcgacgaggcgttctcgcgcagctcccatgcggttgcaggtcggatcatcgctgcgttgagggaattcggcctgcacgctgtcttcatcacgcccaacaaggaaatgcgcctgttacgccaccacacgcgttcggcagtcgtcgttcatcggcgcggcctggagtccagtctggtttccctgagctgggaagctttggatgagcatcatcaacagcgcatcaaggccatgcatgaagtcgcccactga

SEQ ID NO: 43258 - DNA, 678 bp, Pseudomonas aeruginosa ATCC 25324
gtggacaccaagtttttcgagcgaaacgctatcttgctgacgaaactcctcgatgagcgcttcgaaggcgcggcgtccgagcaaggtctgacgacttttctggatgcctttgaagaaaccagtcattgggttctagtcgttcctcttcagcctgagctgctgcccttcaagcggatcaggctcacgacttcggaactggccgaaacctcacttcccggttcgcgattgctcgtggtggaaaatgagcaatgtgttcacttgctacccgaaacgctgccggacaccctcgctgttctgggcgcagggctcgatttgcagtggttggcgtctgcgcatctggccgggaaacagatcgcttactggggcgacatggatacctggggcttactgatgctggcgcgagcgagacaccatcaacctgcagtcgaagcactgctaatggaccgggagctgtttgaccagcactccttgggaagcgcggtcgtcgagccagctaaagctcaggaattggctcccgaaggattgatgaccgacgaagctgatttctatcggtatctccttgcacaggagcgggggcgccttgagcaggagtatctgccacgcaggcaagtcgaacaggctattagtaaatggtttggagagtcggtagcgccggctcatcctgagcgaacggcttga

SEQ ID NO: 43259 - DNA, 1617 bp, Pseudomonas aeruginosa CI27; identical to SEQ ID NO: 41751

SEQ ID NO: 43260 - DNA, 750 bp, Pseudomonas aeruginosa CI27; identical to SEQ ID NO: 41752

SEQ ID NO: 43261 - DNA, 3138 bp, Pseudomonas aeruginosa CI27; identical to SEQ ID NO: 41753

SEQ ID NO: 43262 - DNA, 1146 bp, Pseudomonas aeruginosa CI27
atgaagtcgcccactgacatcggccgtaacctggccaggcaatggcagcgctccagcgtgcgcttggagcgcttgctcaatcccggtagctggccgcaaagcctcaacatcggtaagccttcggcacgtctattcactgacaacatccaggcggtgctccggcatgtggagaactggcggagcgtgaacgtgggtaaggtcgactgggaacctgtcagctaccgagcaggtctggcccccatttccttgccgatgcgttggcatttgcgtagcccctccgaatggattgccgcgagcgatgatccaagggtcagccaggaatacgctcaactcgagtatttggtcgagcaggtagacagtgcctttcatacgctgctggtggcacaacggagcttatggttgacgaggacgcctgaagaagtcgtcgccacggcgcaactcgctactcaattagctccgggctgcgctcaaggccgcccattgcgtctgcttgcagagcacggagtggacaccaagttttttgagcgaaacgctaccttactgacgaagctcctcgatgagcgcttcgaaggtgccgcgtcggagcaaggcctgacgacctttctggatgcctttgaagaaagcagtcattgggttctagtcgttcctcttcagcctgggctgctgcccttcaagcggctcaggctgacaacttcggaactggccgaaaccccacttcctggttcgcgattgctcgtagtagaaaatgagcaatgtgttcacctgctacccgaaacgttgccggacaccttagcggtgctgggggcaggactcgatttgcattggttggcgtctgcgcatctggccgggaaacagatcggttactggggcgacatggatacctggggcttgctgatgctggcgcgagcgagactccatcaacctgcagtcgaagcactcctaatggagcaggagctgtttgaacagcactcacaggggaatacagtcgtcgagccggctaaagctctggaatcggctccccctggtttgctggctgacgaggctgatttctatcggtatctgttggtgcaagagcgggggcgtcttgagcaggagtatcttccaaaggctcaggtggagttggccataagaaagtgggccagatga

SEQ ID NO: 43263 - DNA, 1470 bp, Sutterella wadsworthensis 2_1_59BFAA
atgaaagccagcatctcataccccggcttccagcgtctgcgcgcagcgcccctctggaagcttctggcggcagccaatgcgcccgccatcatcgccatcctggccgaacacctctacgaggcggaccacgggatgcgtgcgtccgaattttacgcgcgcgtcgaccgcagtctcgaggagcttcgcgcaacgggcgtcgacatgccgtcgacggcccgcgaatacgcgtcgcagtggctcgcccaggggcttctcgaacgcacgctgccctacggcagcgacgaggaggtctattcgctcacctcggcctcggtcgacgccgtgaggtttgtgaccggcatgggcaggccccgtgcggaggcgacggaatcccgcctgcagcttgtgatcaccgcgctcgacggacttgaagaagacaccgacgcggacgtcgaacgccgcgagcatcgtctcatcgaggagcagagccgcatccgccgcgagcttgaggccgtgggcaggggcgaggtgaaggtgctggacaaggacaccgcgctagagcgcacccgcgagattctcacgctcttctcggggcttgtgggcgactttcatcgcgtgcgcgacagcttcgaggcgctcaacgctgaccttcgccgccgcatcatggagtgctcgggctcgaggggcgacgtcctcgaggacgtcttcgcagggctcgatctcatcaggctcagccctgcaggccgaaccttcttcgcgttctggcgcctgctcaacgatcccgtcgagtccgcccgcttcgaggaggcgatcgacgccgtgctctcgcgcgactttgcgcgcgatcttaccgtcgaagagcgcaggatgctgcgcacgatgcgccgcaacctgctcgaaaggggcggggatgtgcacgacacgacgaagcgtctggcccagggtctcaggaactttgtggaaagccgccagtatctcgaggaacaccgtctcaacaggctcctcaccgaggcgatgcgcgcagggatcgatgcggccgacgagcagagtcccgtccgtaggaccgggatcgaactttcgaggacgggcttcacaccgaggtccgcgggccagatggtcctctgggatcccgtcacctatgcgcctccgccgcccgtcgaggacggcacgccgcctccgcttgacctctccgccgtgggcgagcgcattgcaagatccgaaatcaacatccgcgagctcagggagaacgtcgccgacgtgctctcccgcaaggaccaggcgagtgtcggcgaggtactcgaggcgcatcccgcgaagcagggcctcggcagcgtcgtcggtctcatggagctcgcgcttcgtcacggcattcccggctcgggcaccgagagcctcaagtggacggggctcgacggccgcgagcgctccgccaccgtgaatcaactcttctttgttaaggacaagatcgatgaactcacccgaatctactga

SEQ ID NO: 43264 - DNA, 717 bp, Sutterella wadsworthensis 2_1_59BFAA
atgaactcacccgaatctactgacgccgcgcgcaatgacgaacaggccgcgggcctctggcgcggtgacgcgggcgggttgaagctcgacgcaaggcgcgcgctcgtgcagcttctcaagggccccgtgctcgacggcatgcgcatgcccgtcatctggaaggccctgcttgagagcgaggacctgatccgcagccgcctcaacgacctctttctcgacctcgtgatcgaccgcgagcagctcttcgcgttcacgcgccaggcggacaccgatcccgtcaaggcgccgatccttctgaagcgcaagccgctcaactacatcgagacctatcttttcctcttcctgcgcctgaggctctcaagcgccgagggcaggggcgagcgcgccgtcatcggtcttgacgaaatccgcgagcatctagccgacatcgcgggccgcaatcgcgacgccgtcggcttcgagaggcatctggcgggtgccgtcaccaaggcggaccacttcggcgtgctgcgccgcctcaagagcggcgaggacgccttcgagatctcgcccgtcctcaagatgctcatgacggccgacctcgtcgagcaggtcaagggctactacgagggcagggccgccaagccgggcgaggtcgccgccgaaattcccgccggcattgaaaacgacgaatccgaagacgaagacgacgaagacgatgcggaggacatggaatga

SEQ ID NO: 43265 - DNA, 3381 bp, Sutterella wadsworthensis 2_1_59BFAA
atgaccgatctcgcgcttttccccgagctcatgcccgaagaacagttcagggccgtgcgcctgcaggtacacaactggggcaccttctcgggctgcaacgacattccgatcgccgaagagggctttctcttcgtgggcgcctcgggctcgggcaagtcgacgcttctcgacgccttctcccagctgctgattccgccccgctgggtggacttcaacgccgccgcgcatgagacgggcggcaaggtcaagggcgaccgctcgatcgtctcctacgtccgcggcgcatggtccgagcttcagaccgatgcgggcgtgacaacgcagtacctgcgcgaggagacgaccgcctcgggccttgcgctcaccttccgcaacgcccgccgcatcgtgacgctcctgcaggtattctggatccgcggaaagctcaacggcgtgggcgacgtcaagcgcctctacgccgtcgtcgagcgggacgtcgacctcaaggccctcatcaccggcttttcggagtccgactacgatctcaggcgcctcaagatcgatctgggcgacgccaggtgctcggacctctttccgccctacgagaccgccttcacggcgctcctcggcatcaagagcagccttgcgctcaagctccttcacaagacgcagtccgcgaagaaccttggcgacctcaacgaatttctgaggaacttcatgctcgatgagccgcgcacctacacgatcgccgcccgtctcgtcgacgagtttgtcgagctcgaggcctcgcaccgcgccgtcgtggccgccaacgcccagatccgcgtgctctcgcccgcgcagacggcgttcggcgatatgcagcaggcagaagagggccgcctccgcgcgaagctcctcgcggaggcgctccccgcctaccgcgagtcctggcgcgcgaaccttctgaccgcccaggccgcgaagctcgagaacgagcgccgcacgcatgaggagaacgtccgcacgattcaggccgatctcgtcgcaaggcgcagcacgctcgccgaccttgagcttcgcgagcgccagagcggcggcgaccagatcgccggctgggaggccgaaaaggcccgtcgcgaacaggaccgcgaccgcgcgatgcgcgagcgcggaaaggtcgaggccgccgcgcgcgagctcggcgaggctctgccgcccacggctgacgaattccgcacgctcgttgaggttgccgccgctgaagaggcgggtgccgccgacttgaagaaggcgagggacgcgaagatcgaggccctcatcggcgaagagcacggcatcaagagcgagctcgacgtcctctgcgaggaaatcgagtcgctcgaatcgcagcgctcgggcattcccgccgtgcagctcaggatccgcgagaaggtcgctgccgaggcggggctcaggaccacggacctgccctttgcgggcgaattcatcgaggtgctgcccgagcagatcgcctggagaggcgctctcgaacgcgcgctcaggccgctcgccctttcgattctcgtgccctccgaacatttcgaagctgtttcccgtgtcgtcaacggcgcccactggggcgcccacgtgcgcctgctgaggacgggcggcgcgatcgtcgaggaggcggggagcctttcggacgactccgtcatccgcaagatccgggtcaccgacggcgtgcacgcccagtggctcgagagcgtccttcgccgcgactacgacctcgcctgcgtcgagacgcccgaggccttcgccgccgcgcgccgcgccgtgacgaagacgggcttcgtgaaggacacgcacgcacgatacgacaagaacgacacccgcgcggtcgacgatccgcgcgcctgggtgctcggcatggacaatcgcgccaagctcgcggccctcagggccgaagaggagattcgccgtcgtgatcttcatgagaagaggcgcgcgatcacggccctcaagaacgaggaggctgaggccagccgcaggctcgtgcactgccacacccttgcggccgcctcctggatcgacatcgatcccgctccgattcttgccgacatccaccgcctcgaggcccagatccgcgccgtgcgcgagggcaacgaggccctcagggagctcgcgaaggccatcgaggagacgcgcattcagattgccgccgtcgaggagaagctctccgacgcaaaggccgacctcaagaccgccgacggcgcgctcacgaccgtcaggaagcgcctgcagaccctgaatgacgcctggagcacgcagatcgcggcgctcaccgacggcatgcgcaagggactcggcgaccgcttcggtgcaaggctcggcgagatccgcctcgacacgctcgacgacctcgtcaacatggtcgcgcgtgaaatcaatgacgaaatctcgaagctcgtcgctcgcgtgaaggacatggagatccgcgtcacgaccgcgttcgacaagttccgcgaccagttccccgcagagtcggccgacctcggcgcgggccttgagttcgcgggcgactacttcaggctgctcgagacgctcgagcgcgaccgcctgcccgacttcgaggcgaagttccgcgagctcctgcgccaacagagcatgcagaacctctcgcagctgcgccagtacctcaccgaggagcgccgtgacattctgcagcgcctcgaactcgtgaacgaaagccttcacgtcgtgcccttcaacgtgacgaacggtcgcaggaccttccttcgcatcacgacgcaggagcgcatgctcccggaagtggtcgagttcaggaagcggatccgcgacgccctcgagggcgcctgggacgtcaaggtcgaggacggcgaggctgaaaagcgcttcgcgatcctcgccgagctcgtgtcgagtctcaaggacctgcctgaaaaccgccgctaccgcgacacagtgcttgacgtacgccgccacgtcgacttcattggcgaggaagtggatgacgacggacgccagatcgaggtctaccgcagcggcgccggcaagtccggcggccagcgccagaagctcacgacgacttgcctggctgccgccctcaggtaccagctctgcggcgacagcgtgtcggtcccgacctatgcgctcgtggtgctcgacgaggccttcgacaaggccgacagcgacttcacgacgctcgccatgaacatcttccgccagttcggcttccagatgatcgtcgccacgcccgacaaggccgtcacgacgctcgagcccttcattggtggcgcctgcgtggtgcacatcgtcgagcgcaagtactcgagcgtgcttacgatcccctacgacggcgcggtccaccgcctcgtctggaaggcgcccgctgaatccgcagaacccgtgaaggaggcctga

SEQ ID NO: 43266 - DNA, 1212 bp, Sutterella wadsworthensis 2_1_59BFAA
atgaagacgccggccgaggtccgcacgactgtggcgcgtcgattccgggcgtcgtgccgcaggtggctcgccggtcatctgggccttcccgacgactcggcctggccgtttgccgtcccgcttggcgttccttccgagcgcgaggtcctcgccgacccgcagaagacgctcgactggcgcgacgcatggagcgcggaggccgaatcgggccgtctcaaggtggccttcgcggtgcgggactggacggcctgcggccgtcagaccgttcccgaacgtgcggtgttcgagtcgcccgaagccgttgcgcgtgcagcgggcgagcttcacacatggagacgtgcgctcgagcgtgcctcccgcctcgtcgacggcgaagacggcctgagggaggcgctcgtgcgtgcctggagcgtgctcgccgaatgggaggacgaggatttcgcgattctgctctccgccttcaggtggcttgccgacaatcccgaaagcggtctctatgttcgtcagctgcccgtcgagggcatggataccaagtggctcacgaagcccagaatgacggtgcttcgcgatcttctcgccgcccgctggcgtgcttccgggaggcccgtgcccgaggcgcaggccttcgaggccttcgcaggtctgaggagcaggccctcgagcgtgcgcatgaggcttcttgatcccgcagaccgtgcgctcatgcacggactctccgacctctcagcgccgccggaggaaatcgcgatcctgccgcttcatccgagaatcgtcttcatttccgaaaacgagcagtcgggccttgcgttcggcgacgtgccgggcgccgtcctctttttcggtttgggcaagggcgtcacgcagctcgatgccgttccctggattcatgaggggacggtcatctactggggcgatgccgacacgtggggccttcagattctcgcgtctttaagacggcgctttcccaagacgcgcgccgtcatgatggacgaggcgacgctcgtgcgctttcatgcctacgccgtcgaggagcccaggcaggcgcccgaagctgtctgcgagggccttctgcctgctgaagccgcgctttgggacgcactcaagtccgacaaatatggcatgcgccttcgccttgagcaggagcgcatcccctgggcccatgcctgggccgaactcatgaaggcagttgccgaagcttccagaaagtcctga

SEQ ID NO: 43267 - DNA, 1461 bp, Gordonia rhizosphera NBRC 16068
atggagagtgcggagcaaccgacgccgagacaggcgtgggaggcgaatcggtcgatccagaaatcggcggcggtgaggctgttcgccgcgaacaacgccgccctgtactggaccttgatggaacgccacttggacttcggcgcccggctcggcgagaccgagctggcgatccgactcgaacgcgacctggccgagttcggtatcgacgatcagtccagcggcctcgacctgatcaagtcgtgggccaagcagggatggctgcaccggatcaccgattcggccggaccgagcacccagaatctgtgctacctgacctcggaggcccgatcggtcctcgactatgtgcggcgcctgcgccgcgaggacagtgtcgccaccggcggctcgatcaacggcgtcgcggcaggtctgcgccgggtggcgggtcgggtgaccgacgacccccgtcagatccgcgacgagatcacccatcagatctccgaactcgatgccgagctggccgaactcgacgccggcctgcgacccgaccccgacctgcgcggtgccgaggacgaggcccgggcgatcgcctatcagatggaacagatcatctccgacatcggccagtacgggacgatgctcgatcggatcaccaccgccctgctcgacgacccgcacgattcggacctcgcctaccgcgatcggcagcggcagatgttcgacgactacgaatcgctgctcgaatcgtcgcagagcgcctcctatcacgcgttcgcgcacatgatccaggacccgcagcagcgggcccgcctcgccgccgacatctccacggtcacccaccggttgcccgggatcgacgctggactccgctcggtgatggacaacttcttcgccctggtcacccagcagatggccgaggtcggcaaaacgcgtcaacgatgcgcccgccggatccgccggttcgtcgccaccggcacgctggaacagagccgcggtgtcgcgcgccagctcaacgacgcgctcgcgaccgcgaacgacctgctgaagacctccctgaccgatcgtcgtctcggctacgaactgccgctcgcgacacccgcgatcacctcggtcggtcgcctcgccttcgagatccgcgatccggccccgcctgcacccgtgcagcccgcgaccggcggcgccgacctcgcctccttcgcgtcgctggccggtcaggtcgacacggtcgaactcaccgaggtggtcaacagtgcggtggcggcagggccagtcgccctgtcggacgtgctcgagcggatcggcgagccgtatctcgcccacgtgatcgtgctgtggtcgtgggcgctcaaacagcccggcaacgccgaccggcggcccgaggtcgtgcgattccggtcgctggaaggggaggaccgcgtcatcgaggttcccgcattgacgttcaccgaaccgattccgaccgcggaggtcgacgcactgtga

SEQ ID NO: 43268 - DNA, 759 bp, Gordonia rhizosphera NBRC 16068
gtgaccactgacttccagaccccggacgagttcgccggctacgacgatctcccggccgtcccgacgcgtgggaccgacgacgacaccccgaaggtcccgcgcttcgacggtgaccacagcgcactgaccgatcgtgcgtgctgggcgctgcagaatctgctgacccgccgctacgtcagcggtgaccgccatccccagctgtgggcctgggtcgtcgagtatcaggacgcgctgcgcgtgcgcctgtccgaactcgacctgcggctgcggatcgtcgacgaactcgaggtcgccttcgtcgagcaggcgtcctacgagtcacgatgggggagaagacttctcaaacgagagacgatccagacctatgatgcgatcctggccctgcacctggccagatatgtccgctcggcacgcgacgagcatgtcacgatcacgcgtgaggacatccacgaactgttcgccggggtcaccaacaccatcgaccgcgacctggcgctgttcgaccggcgcatcgaccgcgccatcgacaagctcgaggagatggagttcctccgcaagcaccgcgacgacccggacaccttcacggtcagcccggtcatctcggcggtcatgacggcttcggtgatcaccgacctgcaacgacagttcgaacaattcatcggcgctggggagaccggcgacgaggtcgaccctgcaaccgggacgggcggtcccgacctggacgaagacggcgacgaggacgagggagacgattggtga

SEQ ID NO: 43269 - DNA, 3351 bp, Gordonia rhizosphera NBRC 16068
ttggtgagcggacgtgcagaccagtaccacctgtcccgcttgcagctgatcaactggggggtcttcgacggctatcactcgatcccgttcagccccaacgggtcgctgatcaccggatcgtcggggagcggcaagtcgtcgctgctggacgcgatctcgctggccttcctgcccgatcaccgacgcaacttcaacgcctccggcgacgccaccgcggccggatcgtcgagcggtcggcgcacggtcggcaagtacgtgcgcggcgcctggggtgagcgccgcgacgggaccaacgcccaccgcgagatcatgtacctgcggggcaccggcccggcgtgggcggccatcgccgtcacctacacctcgagttcggggacctccatcaccggcctggtcctcaagtggctggccgccggcaagctgaccgacgcccacagttcctacttcatctccgacggcgacgtcgacatcgtcgaggtctgcaacgagtgggccgcgagcaactacaactccgcccgcttccgggaccgcggctggcgtggcggtcccggcgagggcaagtacctcaccgccctgtactccttgatcggcatccgcggttccgaagcagcacaacaacttctgggcaaggccaagtcgctcaagagcgtcggcgggctcgcccagttcgtccgcgagttcatgctcgacgagccgaccagcatcgtcgggatctccgacgcccttgagcagatcgatccgctggtcgaggcccgggaactgctcgacatcgcgcgccgcaaacgcaccatcctcggcaacatcgagaccgtgcaggaacgctacgtgaccgaggcggccaccttcaccgtcctcgacaccatcgattccgcggcggtgcgcagctacctcaacaacctccgcctgcgcacggccgaaccggaggtcgccgacctcgacgaccagatcgcgcgcctggacgccgatctgtccgcgctcaccgcgcagcacgaccagctgcgtaccgaccacagtcatctgctgtcgcggatcgccacctccaccggcgatctcgccccgctgcaggaacaactcaccgccgcgcataaggtcggcaacgaggtctccctgcggcgcgcgagctacgagcacaagatctccgcgctcggctgtgctttgcccgacgacgccgaggatttctggtcgttgcgcgcgaccctgatccaggacgcgacccgcatcgacgggcaactcgaggccgggaaaggacacttcgccgattccctggccaccgaggtcgccgcccgggcgcaacgggacgcggcccagaccgagctgagtcgggtgcagcaggcggggtcggcgctgccgcgcgccgaacacgagatgcgccgcatgatcgcccacgccctgcagatcgacgaatccgagctgcgctacgtcgccgagctcgtcgagctgcgtggagaccaggaacgctggcggctggcggtggagaaggtcctccgtaatgcgggcctgcggctcctggtgcccgacaggcacttccgcgccgccctgcggttcgtgaacacccacgacatgcgaggccggatccaattgcaccacgccgagacccggccggctccgacacccgacccgggtacgctggccgcgaccttgcgtgccgtcgaccccgaccacccgtgctcggccgaggcgctgtcgatcctgacccggctcggcaaccacacgtgcgtcgacgaccccgccgagttcaccgaccacgccaaggcggtcaccgacaccggcctacgcaaggattcggcgaagctcgcgatcaaggacgaccgcatggcgctgcggccctcgcagtacatcttcgtcgggaacgtcgacgcgaagatcgcggcgttgcaggccgaactcgaacatgagcagcacgcctacgacagcgcccgggaggccagcgcggccctcgaccgcgagcgcaccgagaaggagcagcggcgcgacgcctaccgccgggtatgcgagcagttcacccagtggagcgagatcgacaccgattcggccgacgagcgcgtcgatcagctcaccgagcagtacgagttgctgatgtccgagcaccccgacatcgaggcgctgcagcgcaaggccgaggatctctgggagcaggtccgggcggcgatctcgcaggccgccctggtgcgcgacaagatcgcgacccacgacgagcggcgcacccgcctgctcgacctgatggaccggctcacacccgaagatgttgcggcgcaggcggagaacaccctcgatggattccgcgaggaatccgcggccacgctcgacgtgctcgcacccgagccgttccggcaggagctgatgaaggcggtcaccaaggaccgtgaccggatgcgtgccgacgcccggcgctcccgcgacgaactcgcccgcatcctcgatacctacgacgaggagttccccgacgcgatccccaacgacagcgacgatttcgatgagcgcatccacgattacgtcgcggtctgccgtcgtatcgacgagcgtgagttgcccgccgcctacgaacggatgcggcgactgatcaccgagcaggcccccggcgccatcctcagcctgcacatggccgccgacgcggaggaacggcgcatcgtcgaacagatcgacagggtgaactccggcctgggcgcggtggcgttcaaccgcggcagccgcctgcggttgcgtccgggccgcaaacacctcaccgccgtggcggaactcaccgataaggctcgccagatcgcccagcgcaccaccgcggtcagtttcggtgacgaacaggcgatcctcgagcagtacgccgacatcctgctgctgcgcgcacggctggccggcgccacacccgaggaccggcagtggacgcgcgacgccctcgacgtccgcaaccgcttcgacttctactgcgaggaacacgacgcggcgaccggcgagacgatccgcacctacagcaacgccggcgacaactcgggcggtgagcaggagaagctgatggcgttctgtctcgccggagcgctgagcttcaacctggccagcccgaacggtgacgacaaccggccgatcttcgcccagctgatgctcgacgaggcgttctcgaagtcggatccgcagttcgcgcagcaggcgctgtcggcgttccgcaagttcggcttccagctgatcatcgtcgccacggtgcagaacaccagcacgattcagccctatgtcgacaacgtcatcatggtgtccaagaccgaggcgggcggcgattcccgcccgaccgccaccgccatgtcgacgtcgatccgcgcgttctcggacctgcgccgatcgagtggggcgcagctgccggtgtga

SEQ ID NO: 43270 - DNA, 1443 bp, Gordonia rhizosphera NBRC 16068
gtggatttcgacgcgttcggcagcctgtgggagcggcatcccgcgtggcggctcctgcgtgcccacaactccccgctcatcctggcctttctcggtaacttctttgtcgagggcaatcgcggcgcgacttcggccagtgacctggccacggcgttggacgacctgctctacgacctcaacatcgccgtaccgaccgaggacgggcaggccaggtttccgaaggagccgcgcgcctacctcgaggactggtcggcgaccgaggccggcttcctgcgccgcttctacccacccggcgacgacgaggtccactacgaggtgacgcccgcgttcgagaaggcctacgcgtttgtcgtctccctgcagggacggtcgttcgtcggcaccgagtcgcggctccacaccgtcgtcgaactgctcagacagatcgtgcacggcaccgaggccgacccggagatccgattggccgagttgcggcgccgccgtgccgagatcgatgccgagatcgccgccgtcgagtcgggtgacgtcgcggtgctcgattcgaccggcgtccgtgaccgctatcagcagctggcatcgaccgcacgggacctgctctccgactttcgggaggtcgaggacaacttccgtctcctcgaccggaccgcccgggagaagatcgcgtcctgggacggtccgaagggtgagcttctcgccgagctggtgggcagccgctcggagatcgccggctccgaccagggccgtagcttccagtccttctacgagttcctgctgtccgacgccaggcaaaccgaactgtcggatctgctggccaaagtgtcgtcgctcgacatcgtggacgccgaccgacgtatccgcggcatccaccacgactggtcggaggccgccgaccgcacccaacgcacggtccggcagatctcggagcaactccgccagttcctcgacgaccaggtgtggttggagaaccgacgcgtcctcgacctcgtccgctcggtggagagcaccgccctcgaaatacgcggcgaggaacccgggttcggcctcgaagtggaccaacccggcatcgagatcagcctgccgttcgaacggccgctctaccagcagcccgccgtggtgaccgtcgagagcagggtcgacgacgcgaccgaacaggtcgatgccgacctcctgttcacccagaccttcgtcgaccaggcccggctggccgccaacatccgcaacatcctcccggagaggtcgtcggcgctgctgtccgacgtggtcaccatgtacccgatcgagcagggtgcggccgagatcgtcggctacctcgcgctcggcgacgacgacgtcagcgtggacatcgacgacaccgacgagatgctgctggaataccccgaccccgacgacccggacaccaccaagcgggcccggctaccgagagtcacggtgagacgacgatga

SEQ ID NO: 43271 - DNA, 579 bp, Gordonia rhizosphera NBRC 16068
atgaccgacgaacgagccatagcgagcgcgatcatccggctgatgcagggtgtggtgtatcgcgagtccgacgaggacacctgggccacgctcgagcggtccggagcaggcgtgcgcgatcacttcgccaccatcggcgtcgacgtggtcgtcgacgactccgagggctacgcctacctgcggtcgcgcccggaatccgaaggcgacgaaccccttccgcggctggtgcgtcgccgcgcgctcacctacaacgtcagtctgctgctggtcctgctgcgcaaacggctgctggagttcgagatcaccggcggcgaaggacgactcgtcctgtcgaccgaccagatcgtggagatgctccggcttttccacgccgattcgaccaacgaggcccggctcgtcgaccaggccgagtcgacgatcaagaaggccgtcgagctgggattcctgcggcaactgcgcggacagaccgatcagtgggaggtccggcgcatcatcaaggcctacatcgacgcgcagaccctgtcggacttcgccggcaagctacgggaatacgccggggcggtggccaccgatgagtga

SEQ ID NO: 43272 - DNA, 3402 bp, Gordonia rhizosphera NBRC 16068
atgagtgagggattgttctcgtcggtcgaactcggaaccgcaggcggcggagccggtttccggctccagcacgtcgaggtcctgaactggggcaccttcgaccgccaggtgtggcgcctgacgccgaacaccgacaccacgttgctgaccggcgatatcggatcgggcaagtccaccctggtcgacgccgtgacgaccctgctgatgcccgcgcacaagatcgcctacaacaaggccgcgggcgccgaagccaaggaacgcaccctgcgttcctacgtcgagggtcactacaagtccgaacgtcaggaggcgaccggacgatcacgcgccaagggtctgcgtcaggatcgcagcacctactcggtgatcctcggagtcttcaacaaccccggctacgacgagaccgtcaccttggcgcaggtcttccagcagcgtgacagcgccgggcagccgtaccggttctacgtcaccgcgaccaaacagctcgccatcgcatccgacttcgccgacttcggttccgatctgcgtgacctgcgcaaacgactgcgcgccggcggcgcggacgtcgtcgacgagttccccaagtactcgacatcgctccggcgtctgctcggtatccggtccgagcaggccctggaactgctgcatcagaccgtgtcgatgaagtcggtcggcaacctcaacgacttcgtccgcgggcacatgctcgagcccagcgacgccaccgaccgggtccgcgacatcatcgcccacttcgacgacctcaccaaggcctacgacgcggtcaaacgtgcccgcgaacagctcgaggcgctcgatccgatcgtctcgacgaccgcgaaatacgatgccgcgctggccgaacgtgacgcgctcgacctgcagcgagcggcggtgcggttgttcatcgccgagcatcggtcgggcctgctcgccgacgagatcaccaccctgaccgccgagggcgaacggctgctgcgcgagcaggacgacgccaaagcccgacaacggaatctgagccgcgaacgcgagtccctgatcgaggagcgcgcccgggccggcggtgatcgggtgggcgaactcgaacggctcgcggccgctgcccgtgacgatgtcgccaaacgccgccacggccgaaccctgttcgacgcaaccgtggccgacgccgcattcgatccggtcaccaccggtgagcagttcaccgcgttacgtggactcatcaccgatgaacggccgcggctggacgacgcgaagcgcacgctcgactcgtcgacggccgatgccatcgggcgtgagaaggaagcggcccgacggtgtgacgccatccgcgccgaactcgacgacctgcagaaccgtacgagcaacctgccgcccgaccaggtgcagctgcgcgatcagctctgcaccgatctgggtctcacacacgaggacctgccctacgcgggcgagcttctcgacgtcgacgaggaccatgcacagtggcggggcgcggccgaacgggtgctgcgtgggttcgcgctgtcgctgtttgtgccgcagcagcattacgaggccgtcacgcagtgggtcaatggtcgtcggctcacgtttcacggggccggtggccggacggtcggcgcgaaactcgtgtacgaacgggtgccggcacgtcgggttccgttgcagcgacaggactccggcgtcatggtgctggccgactgtctggagatcaaagagggtccgttcgaggactatctgcgcgacgaactgatcaagcgcgccgatcaccagtgcgcggtgacgctcgaggagttccgggccgcgaagcgggccgtcacccgcgagggtcaggtgcgctctggtgggcggcacgagaaggacgaccgacaccgcgtcgacgatccccgacggtgggtgctgggctgggcgaatgaacgcaagatcgccgcgctgcgtgaggatctcgacgatctcgaccgacaccgcgcagtcgcggcagccgatgtggccgcgctgtcggaggaacgggacgccctgcagacccggcgcgaggcgctcgcccgcctcgacggcttccactcgtgggccgatctggacgtcgaggaggcccagcgccgtgccgacgagtacgaggccgaacgcgtccggctggagtcgggttcctcacgcctgcaggagatcacgaccgcgctggaacgcaatgccgaactctccgccgcggcggcagaggtgatcgacgatctcaccggcaagcttgccaccacggctgcggaggcgaatcaggccgaacaactcaagaagcgcgacgacgagttcatcgcgcaacactccgatgcagatctcgccaccgctcgtgcatcgtatgccgcactgacacaacgtctcaccgggacgttgccgacgcgggcgaccgattgcgcggcagccgagaactcgctgtcatcgacccttcatcaacggatcgagcggctcacacgggaactcggtggtttcgggcagagtctggcccagtacatggccgacgtgctgcggcgttggccggacctgcgggccgacatggacgcccacgtcgacgcacgggccgatttcgtgatgttccgcgaacgtgtcgccaccgacgacctgccgcgcttcgagctcgagttcaaggagcaactgaacaagaacgccatccaggaactcgccgggttcaacaactggctcaaccggcaggccgcctcgatcgacgaacgcgtcgcgcgcatcaacgaggcgttgggtgcggtgccctacaacccgggccgctacatccggctcgagcgggaatccaccacgaatcaggatgtggcacagttccgcgccgatctgcgcaacctgaccaacgacagcctcgccgtcgacggcgatcagtactccgagcagcgcttcctggacgtgaagcggatcatcgaacggttccgcggccgcgatgggcatgccgactccgacaagaactggacgcgccgggtgaccgatgtgcgcaactggttcgtgttctccgcgtccgagcgggacgtcgacaccggcgtcgagtgggagcactacagcgattccgacggcaagtccggcgggcagaaggagaagctggcctacacgatcctggcggcgtccctggcctatcagttcgggctggaatggggtgtggagaaatcccgcgacttccggttcgcggtgatcgacgaggcgttcggacgaggatcagacgtgtcgacccgctatgcgcttgaccttttcgccaagctcggtctacaactgctcatcgtgacaccgttgcagaaggtgcacgtcatcgaaccgtatgtgaaggcgatcgggttcgtcgacaaccccaccggtacgttctcgcggctgcagacgatgacgatcgaggagtaccggtcgcgtcgcgacggacgcctgaagtga

SEQ ID NO: 43273 - DNA, 1152 bp, Gordonia rhizosphera NBRC 16068
gtgagtcgacgctggactgttcccgacgacgtcactacgaaggtacggcgccgatgggaggacggatcgctgttgcgcgcctacgcgaccggctccgctctcgaacccatcgaggttccgctacgcggaccgacaccgtcacaaataggtgaggacctcggcgccgcacgcgactgggtgaccgcgctcgacgcgggccgtcgtgacgaccggcgctacacacttcagtggcagaccgtcgggggccgtcaggtcggacgcaaccggctccccacgcgggcggtggtgtcgtcgttcgagcaggcgtggacgctactgggggtgggtccgtccgtccgtcgattcgaggaggttctcgacctggccgccacccgacctgccatacgcaactgggtcgtcgacaatccgctgcgtgcaatcgaattggctccggagatgcctcgtctgatcgccgcctacacgtggctggacgcgcatcggcgatcggatcggtatctgcgtgagatcagcgcgcccggagtcgacaccaagttcgccgaacgtcatcggtcggtgctcgcggcaatgctcggggtgccgtcgaccgcgtccgggtttctctccgggctggggttgcacggcaagcccgagttcgtgcggctacgcccgtcatcgtcgctgggtttgccgacaccgctcaccgagatctcggttcgcgcagacgaactcgcgcaattcgatctacggccgcactccgcgctcgtcatcgaaaacgagatcacctacctgagtgtcgacatccccgatgacggtatggtgctgtggggcaaggggttcgaagtggatcgcatcggacggctcccctggctggccgacgtgccgctccactattggggtgacctcgacacccacggcttcgcgatcctggatcggctgcgggcctggcttccgcagaccgagtcggtgctgatggatcggaccacccttgacgcgcatcgggatcggtgggtcaccgaagatcggccgacgtcgtcgggcctgacccggctgacgcctgctgagcgcgacctctacgccgacctcgtgagcgacgtactcggagaacgcgtccggctcgaacaggaacggatcgactggtcctgggcgcagcagcggctcggcgccggcacgtag

SEQ ID NO: 43274 - DNA, 1458 bp, Kineosphaera limosa NBRC 100340
atgtccgccctcgccgccgcgctcaccttcgggcggctcgtgcgcgagagcgcgacgctgcgcctgctgcgggccgaccatgtggcggtggccgcggccatgctctcgacgcacctcggtgcccccggcgcgcgcctgccggccgatgacctgcacgaactgctcgaggccgacctcgaggagctgcgcgatcacttcgatctgggggccaagtccgcgaaggcgtactgcgacgactggcgggcggccggcctgctcgtccgccgtcccgcgccggagtcgcgcggggagacctacgagctgtctccggaggcgatcgacgggctgcggatcctcgcccagctcgacgaaccccgctcgacggtcaccgagtcgcgcctggtcgggctcatggcggcggtccatcagctcgcgatcgacaccgacaccgacgtcacgcgccgcgtcgaggcgttgcgcgccgagcgggaccggctcgacgcgcagatcgaccggctcaccggaggcgacgtcgacgtgctcgacgatcggcgggccctcgagcgggtcaccgacgtgcttctccaggcccgcgacctgcccgcggatttcgcccgggtgcgggcccgcttcgaggagctcaaccaggacctgcgcgcgagcatcgtcaacgccgacgcggcccagagcaccgtgctcgacgacgtcttccgcggcgtcgacctcatcgaatcctccgacgagggaaggacgttcacggccttctcggcgctcatccgggatccggagcggtcggcgaccttcgacgtcgacgtcgccgacatcctcgatcgggagttcgcgcggcgcctgccgccggaggcccgccggatgctgcggaccctcgtccgcgagctgaagaacggcagccgcgaggtgcacggtgtgctcacggagttcgcccgcggcctgcggcgctacgtgcactcccaggagttcgcgcgcgaccgggcgatgcgccaggccctccaggaggcgctcgccgccgcgatccccgcgagccgccagacccgcccgtaccgcgacgtcgggctcgagctggagctgtcggcgatgcgcctgaccagcgtcggggagacgacgccgcacgatccgacggagttcgacaccggctccgccctgctcgacgagccgcctggcagcgtcgatctcgcggtgctcgcggcgctggcgcgcgagaccgagatcgactaccccgagctggtgcggcacgtcaacgccgtgctggcgggagcctcgaccgcgagcgtcggcgaggtgctgcacgcccatcccgcgagccagggcgtcgcgagcgtcgtcggactgctgtcgctggccacccgttacggcgaggtgcgcgacgccgagaccgagcagctcacctggcagggcgtcgacggcatcgaccgccacgccgacgtcgagcggcacctcttcacccaggaggtggacgcgtga

SEQ ID NO: 43275 - DNA, 744 bp, Kineosphaera limosa NBRC 100340
gtgagccccgatcagcccgtgagttccgaccggcccagcggcgtggggatgggccaggagatcggccacgacgattgccgcgacgatgcccacgacgacggcgcgcaggtcggcctgtggcccggcgacaccggcacgctgcacgacggctcccgccgcgcgctgctgcgcctgctccaggggccctacgtctcgggtcgcgcgaatccgcagctgtgggccgcgctcgtggcggacgaaaaggcgatccggtcgcggctgcacgacctgttcctcgacctcgtcatcgaccgggtcgacgagttcgcgttcacccgcaaggtccgcaccacccaggccgacgtgccgcaggcgctgcgcagcgagcgactcaccttcgtcgacaccgcgatgctcctcgtgctgcggcaactcctgctgtccgcggctggggagccgcgcgtcatcgtcggtcaggaggaggtctacgagcggctctcggtctatcgcgacggcgacgagagcacctacctgcgcaacctcaacggcgcgtggacccgcatgaagaaccgcttccgggtgttgcacgacgtcggcgaggaccgggtcgagatctcgcccgtcgtcaagttcctcatcgacgaggagcaggtcggggcgctgagccgggtctacgccaggctcgccgagagcgacgagccaacgcttcccgatgccgatgccgatgccgatgctgcggagaccgatgacggggaggctccgtga

SEQ ID NO: 43276 - DNA, 3345 bp, Kineosphaera limosa NBRC 100340
gtgagcgacaccctgcccttcgacctcgccgccgagcccgaccgcgacgcgggcgccgcgcccgacgggcagtggcgcctcgccgagatccaggtcgcgaactggggcacgttcgacggggcgatctaccggatgccgatcgcgcgcgccgggcacctcgtcacggggccgtccggctcgggcaagtcgtcgctgctcgacgcgatcgcggcggtcctcaccccggatcggtggctgcggttcaaccaggccgcgcagggggccggcgcgcgcgtcgaccagcgcagcgtcgtcagctacgtgcgcggcgcgtggtcgcggacgacggacgagctcgaggaccgggtcgtctcggcctacctgcgcaccggcgcgacgtggagcgggatcgtgctgcgctacgagaacggcgtcgatcggccggtctcgctggcccggctcttcttcgtcaagggcacggggacgacgtcgtcggatgtcagcgacctctatctgctcgaccggagcgcgatcgacctgcgcgacctcgagccctacgcccgcgccgggctcgagacccgcaaggtcaaggcggcctggccggatgcggtcgtcacgtccggcggggcgcacgcccgtttctacgcgcggctgcgctcgctcttcggcatcccgcacgagggtgcgctgcagctgctgcacaagacgcagtcggccaagagcctcgacagcctcgaccagttgttccgcgagtacatgctcgagcggccgggcacgttcgcgctcgcggagtcggcggtcacccagttcggggagctgcgcgacgcccacgaccacgtcgtgcagctacgcaagcaacgcgacctcctcctggagctgcgcacggcggcccaggagttcgaccgcgcgaacacggcggcgagcacggcgggggcgctggcggaggcgttgggtccgtatcgcacccgccgcggcctcgacctcacgcgcgccgagattcggggggtgctcgagcagatcgccgggctgagcctcgacgcgcagcgcgcgcaggagaccgcggcccgggcggaggaggacttcgagcgggcgcagcgacgggcccgcgacctcggcggctccgaggccgagcatctgcagcaccggatccgggcggcgcgggaggccgtcgactccacgacccggcgctgggaggagctgcgccgactcgtcagcaccgccgggatcgcgcacacgccgacgacgtcgacggagttcaccgagctgctcgcgcagatcgacacggcgccgacgccgagcgcggccggcccgacccacgcgcagctcgaccggcacgctcaggcccgccgcgagaaggagcgggtggaggtcgagatcgcgtcgctgcgccggagcgggtcgacggtgcccgaccggctcgtcgcggtgcgtgcctcgatcgcccaggcgacggggctgccggtgagcgcgctgccgttcgcggccgagctcatcgacgtgcgtgccgaattcgcggagtgggctggtgcgatcgagcgggtgctgcggcccttcgcgctcacgctgctcgtgcgcagcgagcacctgccggtcgtgcgccggtgggtcgatgcgcaccgcatcccggcgcggctagtctacgaggaggtgcgcggcgacgccccggccccgcggccggccgggcacgagagttcgctggtgcatcgcgtgcgggtcgccgacggcccgttcgccgcgtgggtgtcggggcagctgtcggagcgcttcgacgtcgcgtgcgtcgacagccccgacgatctcgacgcgcatccgcgggccgtgacgatccacggccagatcaagtcgcgatcgcgctacgagaaggacgaccggcagcgcctcgacgaccgcgcgcactgggtgctcggcgaccgggagggcaagctcgaggcgctcatcgcccagctgcgcgaggcgacgcgggaggaggaggcggccggcgcgatcgtcgaccgcgccgcgcggctgcgcagcgaggcggactaccggcgggcgacgctggagtcgatccgcggccagtcgtgggcggacctcgaccgcgccgcggcgcaggccgaggtggagcgcctcacgacgacgctggcgcagctcacggcccacgacggcgacctcggcgtcgcggtccgggaggccgaggaggctcgcgtggcgcgcgacacggcgaccgggctgcgggaggacgcgcgcctcgctctgcggcaggcgggctcggcgcgcgacgaactgactgctgccgcgcaggcgctggaggcgcagatcgcctcgggcgaggtgcccgaggtcgacgaggcgacgtgggcggagctcgaccggcgcttccgggcggtgcagcgtcgcatcacgcgatcgacgatcgccgacgtcggccacgacgtgatgcgccggctgcagcgggagcgcgacgtggcgcaagaggcggcgcgggaggcctccggtacggtgacgacgctcgcgacccgcttcaaggagcggtggccggcgtcgtcggcggacctcgtgccgcgggtcgaggatcgcgccgcctacctggagatcctcgatcagatcatcgcccacggcctgcccgagcacgaggcgacgttcctgcggctgctgcgggagcgctcgcgggacatgatcggtgagctggtcagcgacatcctcgcggcgccacgcgagatcgaggatcgcgtcgtgccggtcaacagttcgctgcgccgctcgcctttcgacgacgagcggtggctgcggctgcgggtcaagacgcggcgcagcgagacggtgacgcgcttcatcggcgatctgcggtcgatcgccgagggcgggtgggggcaggacgatctcgacgcggccgaacgccggttcgccacgctcgccgagctgatgcggcggttcgcctcgagcgaccacgtcgaccgggtgtggcgcacgcaatgcctcgacacgcggctgcacgtgacgttccgcgcggaggagatcgacgcgcacgggcgggcgcacgcgacgtacgactccggcgccgcgatgtcgggcggccagcagcagaagctcgtcgtgttctgcctcgccgcggcactgcgctaccagctcgcggacgccgacgaaccgcatccgcgctacggcacgatcgtgctcgacgaggccttcgacaaggcggacacgcgctacacccggatggcgctcgacatcttccgcgagttcggcttccacctcgtgctcgcgaccccacagaaacttctgcagacgatcgagccgtacgtcggcgccgcgacctcgatcgagaatccgacgcggcggcggtcgcagatcgcgacgatcgagtgggacgagcggggcgcctcctcgtga

SEQ ID NO: 43277 - DNA, 1344 bp, Kineosphaera limosa NBRC 100340
gtgatcggggtcgccgcggcgcgggagctcgcgcgggcgcggctgcaggccaagtcggcgcagtgggcggccgccgcagtgtcgggcgccatgtcgggcgaggtgtcgggcgcggtgaccggcgcggtggcggaagcgtccggggagggcgccgaactcgtcgctgacagcccggatggtccagtcggcgcgctcgtgtcgatcccgctcaagccgccgaccgagcggcagatgctcgccgacgagccggcggcggaggcgtgggcgcgcgagtgggccggccttgcgccactgtcgggggtcgaggtggagtggcagatccggtcgtggcgcagcatcgggcggcagcgggtgccggtgcgcctgcacctgagcgacgccgacgcggtcgggcgtttcgtcggaggctcggcggaagcgcactggcgccggctgcgggaccgggcggtgtgcctcgccgaccggctcggcgcgctggacgcgttgggcgcggtgatccggcggcacgcccgcgacctcgcaggctatgacccggaccgtttcgggcaggtggtcgacgtggcggcctggatcgtcgcgcacccggtggcggggttgcgtccgcgtcaggtgccggtgcggggggtcgattccaagtggctcggcgcgcaccggaggctcgtcaccgacctcgtcgcggcggcgacaggctcgccggacctcggcctcctcgacgccgaccggctcatccgcatccgcatcctcgacgatgccgacgatgccgacgaggctggcgatgccgacgaggctggcgaaaccgaccaggctggcgaaaccgaccaggcccgccaggccctggcggtgggcggcctgcgcgacctggccgcccccgcggcccaactcgccgaactggccctcgcgccgaggctcgtcatcgtgctcgagaacctcgagtcgatgctcgcgctgccgccctggccgggggcggtggcggtgcacggctcgggctacgcggtctcggtggtcggcggactgccgtgggtgcggcgtgcgccggtcctctactggggcgacctggactccaacggtttcgcgatcctgcggcatctgcgccgcggtcacccgaacgtgacgtcggtgctcatggacgagccgaccctcctggcgcaccgcgacctctgggtgcccgagcccaccccggtccgcggcgacatcgacacgctgaccgagggtgaggttcgtgcgctgcacgcgcttcgacgcgagggcgatgtgcgcctggagcaggagcgcatcccgtgggagcacgctctggcggccctgcgtcgggccgcgccacaagaggctggcgacgggccactttga

SEQ ID NO: 43278 - DNA, 1521 bp, Gordonia namibiensis NBRC 108229
atggagatttctgccttcccggctcagcacgaggtcgggcgacccgccgtgccgttggaatcggcgcaggtcacgctgggtgacgccctggaggcgaaccgcgccctgcagaagtcggcagcggtcaagctgttcgcggccaccaactcggctctctacgtgaccttgatggagcgtcacctcgattacggcacaaagatgtcggaggtcgagctgacgatgcgcctcgaacgcgacctcgccgaactcgacctcaccgaggatcagcccaccggcctcgaactggtcaaactgtgggcccgtcagggctggctgcaccgcgtcaccgacaccaccgaccccgacgcccccaacctgtgccatctgaccagcgaggcccgctcggtcctggacttcatgcgccgccagcgccgcgaggactccatcgccacgggcggctcgatcaccggcatcgccgccgaactccgacgcgtcgccgggcaggtcagcaacgaccccgagaccatccgcctcgagctcgaggcccagatgtccgacctcgacgccgagctcgccgacctcgaagccggccgccgcccaccggtcgacctccgcgtcgccgaggactccgcccgcgccatcggctaccagatggagcagatcatctccgacatcggccagtacggcacgatgctcgaccgcatcaccaccgccctgctcgacgacccgggcgactccgacctcgcctaccgcgaccgtcagcgccagctcttcgacgactacgaggccctgctgcagtcgtcgcagtcggcgtcgtaccaggcgttcagccagatgatccaggacccggagcgccgcgcccgcctcaaggccgacatcgacaccatcatcgagaacttccccggcatggacgccggcctgcgatcggtcatggacaacttcttcggcctggtcacccagcagatggccgaggtcggccgcacccgtcagcgctgtgcccgtcgtattcgacggttcgttgcgtcgggcaccctcgagcagagccgcggtctggcccgtcagctcaacgacgcgctcgccaccgccaacgatctcctcaagacctccctcgcggaccgccgcctcggctacgaactgccgttggccgccccgaccctcaactcgatcggccgcctcgccttcgagatccgcgaacacgtcccgcccgccccggcactgcctgccggtggcgccgacgccgatctggccgcgttcgcgtcgatgaccgggcaggtcgacactgtcgaactcaccgagaccgtcaacaaagccgtcgccgccggcccggtcgcgctcaccgacgtcatcgaaggcctcgacgaggcgtacctcgcgcacgtcatcgtgctgtggtcctgggcccaaaagcaggccgcggcaggggagaaggtgccgatgaccaccgtccgcttccggtccctcctcggggaggaccacgccatcgaagtccccgacctgaccttcaccgaacctattccgactgcggaggtcgacgccgaatga

SEQ ID NO: 43279 - DNA, 873 bp, Gordonia namibiensis NBRC 108229
atgaccaccaccgacgagaccaacgccggctccgacgagacccaatcttcgctccctgaggtgaacgcggaggccaacccctcgctccctgaggtgcgagcggaacgagccacgaagggccccgacctcccagacgagttcgccggcttcgacgatctccccaccgtcgccaaccgcgccacctcgcacgccccgagcgcaccgcgcttcgacggcgacgtcagcgagatgcccgaccgcgcctgctgggcgctgcagaacctgctggcccgccgctatgtcagcggtgaccggcagccgcagctgtggtcgtgggtatccgagtaccaggacgtcttgcgaatccgcctgtccgagctcgaccttcgcctccgcctcgtcgacgaactccaggtcgccttcgtcgagcaggccggctacgactcccgttggggccgacgcattctcaagcgcgagaccgtccacacctacgacgcgatcctggcgctgcatctcgccaagtacatccgcgccgcacgcgacgaggatgcgctgatcacccgcgaggagatccacgaactcttcgccggcgtcaccaacaccatcgaccgcgacctcgcgctcttcgacaagcgcatcgagcgggccatcgacaagatggaagagctcgagttcctgcgcaagcagcgcgacgacgccgacaccttcaccgtgagcccggtgatctccgcggtcatgacggcgtcggtgatcaccgacctgcagcgccagttcgagcagttcatcggttccggcgacacgggggatgagccgccggagagcgcaaccgacgatcccgcccggcccgacgacgccgaggacggcttcggcgacgacgaaggagacgactggtga

SEQ ID NO: 43280 - DNA, 3339 bp, Gordonia namibiensis NBRC 108229
gtgagcgtcgaccagtaccacctgtcccggttgcaactgatcaactggggcgtgttcgacgggtatcactcgatcccgttcagctccaacggttctctgatcaccggatcgtcgggttcgggtaagtcgtcgttgctcgacgccatctcgctggcgttcctgcccgaccaccgccgcaacttcaacgcctcgggtgacgccaccgccgccggctcgtcgagcggcaagcgcaccgtcggcaagtacgtgcgcggcgcgtggggcgagcggcgcgacggcaccaacgcgcaccgtgagatcatgtacctgcgcggcaccggcccggcgtgggcggccatcgcggtcacctacacctccacctcgggcaccgccatcaccggtctggtcctcaagtggctggccgcgggcaagatgaccgacgcgcacagctcgtacttcatctacgacggcgacgccgacatcgtcgacgcctgcaacgagtgggccgcctccaactacaactcggccaagttccgcgaccgcggctggcgcggcggacccggcgagggcaagtatctctcgacgctgtactcgctcatcggcatccgcggctccgacgccgcgcagcagctcctcggaaaagccaagtcgctcaagagcgtcggtggtctcgcacagttcgtgcgggagttcatgctcgacgccccaacctccatcgtcggcatctccgacgccctcgagcagatcgacccgctcgtcgaagcgcgtgaactgctcgacgtcgcgcgccgcaagcgcacgatcctcggcaacatcgaggaggttcacgagcggtacgcgagcgagtcggcaaccttcagcgtcctcgacaccatcgacagcaccaccatccgcagctacgtcaacaacctgcggatccgcaacgcgcagcccgaggtcgccgacctcgacgaccagatcacccgcctcgacagtgatctcgccgcgctgaccacccagcacgaccagctgcgccaggaccacagcctgctgctggcccgcatcgccacctccaccggcgacctcgccccgctgcgcgaacagcttggcggcgcacagaagctcagcaccgaggtcaccgcacgacggaacgcttacgaggacaaggtctccgcactcggcttcagcgcacccacgaatgccgaaggcttctggtcgctgcgcgaggagctcatcgaagaggccaccaagatcgacggacagctcgacgccggtcgcgcccactacgccgaagcgctcgcccgcgaggtcgccgcccgtagtcgccgcgacaccgcgcaggaagagctcggccgcgtcgaacaggccggttccgccctgccgcgcaccgaacacgagatgcgtcgcgtcatcgcgcacgcgctgcagatcgacgagtccgaactcaagtacgtcgccgaactcgtcgaactcgaccccgacgaggaacgctggcgcctggcagtagagaaggtcctgcgtaacgccggcctgcgactcctcgtgccggacaagcacttccgctccgccctgcgcttcgtcaactcgcacgacatgcgcggccgtatccagctgcaccaggccgagacccgacccatgcccgacgtcgagccgggcaccctggcgtccaaactgcggcccgtcgaccccggccacccgtgtgccgccgaggcgatgaccatcctcgcgcgcctgggcaaccacatgtgtgtcgacaacccgggcgagttctcgcagtacgccaaggcggtcactgaccagggtctgcgcaaggactcggcgaagctggccgtcaaggacgatcgccagcagctccgccggtcgcagtatatcttcgtcggcgacgtcgaatccaagatcaccgcgctgcgcgacgaactcgcctacgaggagcgcgctttcgaggacgcccgtgaggactgtgccgaactcgaccgcgaacgttccgccaaggaacgacgccgcgacgcctaccgtcgtgtgtgcgagcagttcacgcagtggaacgagatcgacgtcgattccgtcgatgatcgcgtcgatcagctcaccgaccagtacgacctcctcatggaggagcaccccgacgtcgaggcgctgcagcgcaaggccgaagacctctgggagcaggtccgcaacgcgatctcgcaggccgcgctggtcaaggacaagatcgcccgccaggacgagcgccgcacccagctgctcgacctcatcgaccggctgaagcccgaagacgttcccgcacaggcggagaagaccctcgacggcttccgcgaggacctctcggcgacgctcgacgtgctcaaccccgagccgtaccgccaggagatcgtcaaggccgccggccgcgaacgcgaccgcatgcgctccgatgctcgccgttctcgcgatgagctggcccggatcctcgacacctacgacgaggaattccccgacgccatccccaacgacagcgacgacttcgacgaacgcatccacgactacgtcgccgtctgccgccgcatcgacgaacgcgagctaccgtcggcctacgagcggatgcgccgcctcatcaccgagcaggcacccggtgcgatcctcggtctgcacatggcggccgacgccgaggaacgacgcatcgtcgagcagattgagcgtgtcaacaccggcctcggtgcggtggcgttcaaccgcggcacccgcctgcggctggtcccgggccgcaagaagctcgctgcggtcgaggagttgaccgagaaggcccgccagatctctactcgtgcaacagcggtcagcttcggcgacgagcaggccatcctcgagcagtactccgacatcctgctgctgcgcgaacgcctcgccggcaacaccccggaggaccgccagtggacccgcgacgccctcgacgtccgcaaccgcttcgacttttactgcgaagagcacgacgccgcgtccggcgagaccatccgcacctactcgaatgccggcgacaactccggtggcgagcaggagaagctgatggcgttctgtctcgccggcgcgctgagcttcaacctggccagcccgcacggcaacgacaaccggccgatcttcgcccagctgatgctcgacgaggcgttctccaagtccgacccgcagttcgcccagcaggcgctgagtgcgttccgcaagttcgggttccagctgatcatcgtcgccacggtgcagaacaccagcacgatccagccgtacgtggacaacgtcgtgatggtgtcgaaggtcgaggcagggccggatctgcgaccgatcgcgaccgcgacgtcgacgacgatcaaggctttctcagagctgcggcggtcgaagagtcagttgtcggtctga

SEQ ID NO: 43281 - DNA, 1500 bp, Alcanivorax pacificus W11-5
atggataacagccctcaacaccgcacccgaaagtacattgctgcccgtcggcagcatccggcctggctgctgctggcctcaccccgtgcgccactggtgctggggtgcctcaccgccctgttcgactttgccgaagacggtattgccgagacggacgccctgcaggccctgtcggacatgctggccaattatgcggcgcaggacgaatacgacatcgacccggacaatacccgcctgctggctgcccgcgagttgcggcagtggatcaagcgcgggctggtcattgagcgtggccagcgcatctatggcaccgatgcgctgtcatcggcgatccagttcgttgaggcactggataatcgcatcatgacgtccaccgcctcccggctgtcggtggtgcagcgggaaatcgaaaacctggaggtcgggctgaaccccgacgcgtccagccgcaaggccgctatccgccggaaaatcacgctgctggagaatgaactggccgacgtggaagcaggccatgtccccgtgctgaccgaggccgaagccgtcgagcgcatccgtgaggtgtacaccctggcgaccgggctgcgggcagactttcgccgggtggaagactcctggcgcgaggcagaccgtgcgctgcgccagtcgatcatgtccgagcattatcaccggggcgagattgtcgaccggttgctggatggccaggccgccctgctggataccgccgaagggcgggtattcgacagtttccagcaacaattacgacagaaagtggagctggacaacatgcgccagcaactgcgcagcattctggcccacccggcggtggagaaagcgctcacccgcacccagcgacaggatctgaaactcctccgcatgcggctggtgctggaaagccaggccgtattgcaggctcgtgcacgcagcgagaaagacgtcagggcctttatcaagacggggctcgcggctgaacatcaccgggtcggccagttgctcaatgaggtgctcaacgtggcccaggatctggactggcaacagcaaaaagtccgccgtgccgcttcgcccctgccgccgctgggctttgcgctgaccaacctgccggttgcggagcgattacgctttaaagcactggagagcgacgcagagaatgaactggacctgtccccgcaggatgctgatctgagcggcatcgaagacgaattctgggacgccctcgacgggctggaccgtgaggcgctggtacaggacacgctggcagtgctgtcgaaggaagaaagacctttgaccctggccgagctggccgaacgtttaccgccagcccatgatctggaaacactggccctgtggctgggcatggcccgcgaagcgggcattgacatcatcacgcaggacaccgaaacactgacactgaccgacaaagaacagcgcgagtggctgttccgggtgcccagggtggcactgagcgaacaggccttcgacggcattgaatgggagttttaa

SEQ ID NO: 43282 - DNA, 747 bp, Alcanivorax pacificus W11-5
gtggcggggatttttgatcagattaccgggcaaccggccggcgacgaaccggaggatgcggacagcaacaccgatgttgaccccggtgaaacgacaggcgcctctctggctgaagccgaccgcaccgaccgggctctgcgcgaagcggctcaggaattgctgcgcctcgggctactggaacacacccaccggcccaatctgtatcgcacagccctggtggcactggatcaattgaatgccattcttgaaccgctggatctgctggcgcgcgttgacgacattcgcgggctggtgtttctggcagtacgccataccaccgactcgccgcagggcgcagcggcagaacaggatgactggtcacaccccctggtgcgcaaacagcggctgaaccttgagcagaccctgctggtggcgatcctgcgacagcatttcattgcctatgaacaagaagccggcagcggcgcgaccgaggccatcgtggcggtggacgaactggtgccgtcattgcagctgtacctgggtgacagcggcagcgaagcccgcgagcgcagccgcgtattacagttactggatcaattgaagggccacggtttggtgtccgccccggacagtcacgagcgtgtggtcatccggccaatgatcgcgcacctggccaaccctgaaaacctgaccgccctgctgcatgcactcaagcaacaggttgccgaggcggcccggaaccaggatggcaccgggggagaacgctga

SEQ ID NO: 43283 - DNA, 3348 bp, Alcanivorax pacificus W11-5
atggcgacacaatacacgctggacgccgccggacagacgaacggctggcagctggccgccacctacacactgcattccctggaactgttcaactggggcggcttcaacggcctgcaccgggcggacatcgacttgcagggcaccgccatcatcggccccaccggcagcggcaagaccacgctggtggacgcactgatgaccctgattaccgccgcgccccgctacaatctggcctccaccggcggccacgagagtgaccgggacctggtgtcctatgtacgcggcgtcaccggccccggcgacggcagcgaagcgcagtcgcatattgcccggcagggccgcaccgtcaccggcctggccgccacactgcataacggcgacggcctggtccgcctgggcgccctgctgtggttcgacggccccagcatgtcgccgtcggacatgaagaaactgtggctgttcagcacccatcccgagcaaaccctgcaaagctggttaaccgtgcagcacgaaggcggcatgcgcgccctgcggcaactggacaagaccgggagcggcatctggacctacccgagcaaaaaggcttttctggcgcgcctgcgcgaccacttcgaggtccgcgacaacgccttcaacctgctcaaccgcgccgcaggcctcaagcaactgaacagcatcgacgacatcttccgggatctggtgctggacgataacgcccagttccagcgcgcccgcgaagtggcagacagcttcgatgacctgaccgccatccacgaagaactggacatcgcccggcgtcagcaacgctccctggagcccatccgggccggttgggacaagtaccagcaaaaccgcacattactgaccgacaagatcaccctgagcgaagttctgcctgtctggtttggcgaacaggcccaccgtttgtggaaagccgaatcagagcgcctgacgcaccagctgcaccaggcggaagccgccctggccaccgccgaggaacagcatcgccaccagcagcaaacgcgcaaccagttgcacgaggcctacctgcaactcggcggggccgatatcgaaacgctggaagacctgattcgggaaaaacgcgccaacctggaacgctgccagcaccatgccgcgcagtaccagcaactggcccgctccctgtcactgcccgacaccctcacccgcgaagccgtgctggccaaccagacacaggccgccgaacaactgcagcaggtcacccaggcgcaccaggacgcacaggagcacgcttttgaacagggcagccatcgccgccaggcaagcaacacgctggacgccctgcgccgggaacggtccgaggtagaagcgcgcccgcgctccaatattcgcagcgactaccagcaattccgggccctgctggccgaagagctgtcactgacagaagacgacctgccttttgtgggcgaactggtacagatcaaggcctcagagaaagcctggcgtggcgccatcgagcgcgccattggcagccaccggctgcgcatcctggtaccgccgggcgccatgagccaggcgctgcgctggatcaacagccgtcacaatgccctgcatgtgcgtattctcgaagtcaaagccccccaaaaaccgccgcagtttctggaagacggctttacccgcaagctcgattacaaggaccacccctaccgggaaaccatcaaggatcttctcgccgggctggacctgcattgcgtggactcatcggagaccttgcgtgatacaccgcatgcaataacgatcgaaggtctgatgtcgggcaaggcacgcttcttcgacaaacaggaccagaaacgcctcagtgctgactggcagaccggctttgacaaccgggatcgattggccgccctgacgcaagagattgccgacagtcaggcagcgctggacgccgcccgtgcagaggaagaaaaagccaagtcgtcactggcggcccttgagcagcagatggcctctctgaatctgctgaaaaatctggactacacccagatcaatgtgtcacaggccgagcgagaactgcgagagcaggacagccgtcttcaggcattgaaagcaccagactccgacgccgcggttgccaaggaaaaactaaccgaagcagaccgtttactcgcgcagctggatactgcgcgcacggactgtattggcgcctgccagaagctgatcgcctcactggagcaggcagaacgagcaaagcgcaacgctttcagcaaagccgaagccggcctgaagaatgccgcgcggcaattggccgaagcccatctgcccgcgcttgaaccgcaacagctcaacgatatagataacatcgaaagacagaccgccagcgatctgaaacgacaattggataaactgcagggcattgacacccaactggccaaagatctggtcagggccatgggcaacgcccagaaagaagatcgcggcgccctttcggaagcaggcaccgagctggaagatgtgccggagtacctgaaacggctcactctgcttatcgaggaagccctgccggaaaaacagcaacgcttcaaagaatacctcacccgctcctccgacgaaggcgtattgcagttactgtccaccatcgagggcgaagtcgagcgcatcgaagaacgcctggaagacctcaaccacactctgcgacgggtcgacttccagcgcgaccgctacctgcaactggttgccaacaaggtcgtccacgaaagcctgcgtaccttcaacaaggcgcagaacagcctgaactcatcacgcctggtcgatgacggcggcgaaagccagtacacggccctgcaacatatcgtgcgcctgctgcgcgacgcctgcgaacggcaccgtaccctcggcgcgcgcgccctgctggacccgcgcttccggctggaattcaaggtatccgtactggatcgggaaagcggccgcgtcatcgaaacccgcagcggctcccagggcggcagcggcggggaaaaggaaattatcgcctcctatgtgctcaccgcctctctcagctatgccctgtgcccggacggcagcaaccggcccctgttcggcaccatcgtgctggacgaagccttttcccgcagctcccatgccgtggccgggcgcatcatttctgcactgaaagcatttcacctgcacgcgctgttcatcacccccaataaggaaatgcggctgctgcgcaaccacacccgctcggccgtcgtggtccatcgccgtggcaatgaatccagcctgacgccggtaagctgggaggcgctcgacgaggcccgcgcacaacgcgcccacaccgacaatgaagtaatgaacgatgaagggagagcatga

SEQ ID NO: 43284 - DNA, 1170 bp, Alcanivorax pacificus W11-5
atgaaatcccccactgagctggctgaacgactggcccgccaatggcatcgggcaccgctgcgggtggaacgcctgctgtctgcagacagctggccattgcgattgcccatcggcaagcccaccggcggccagtttgcccatcagatcccgcaggtgcaggcgcatgtacaacgctggcgagccgtcagcatcggcgaggtcatctgggaaaccgtcaattatcgcgccggcgcggaaccggtgtccgtgccggtgtactggtgcctgcggacgccatcggaatgggtggcggccaccggcaatgatctcgtccgtgaagaattcagcattctggaggagctggcgcacggcgtctccccgctataccgggaactgctggtgaccgaacgcccgttgtggcgcagcaaagcaccccgtgacgtgataaccgccgccaccctcgccgacaccctgtccccgggcatcgccgccgggcgtccgctcaggctgctgggcgggctggaggtagacaccaaatttgtcgagcgccatgccaccctgctgacccggctgctggatgaacggtacaacggcgccgccagcgaacaggggttatacccttttctcgatgcgcccgcagacaaggaccactggctgatgatcgtgccgctccaggccgggctgctccccttccggcgccaacgcgtcaccgcgcaggaactggcccgggcccccttgcccggctcacgcgtgctggtggtggaaaacgagcaatgcctgcacctgttacctgccctgcccgataccgtcgccattctcggcgccgggctggatctgcaatggcttggtgccgacaccttccgcgataagcaggtggcttactggggcgatatggatacctgggggctgctgatgctggcgcgtgcccggcagtattgcccagcactttgttcattgatgatgacacgggcgcattttgagcggcatgcgccggggtgtgctgtgccggagcctgtgcccgccaaacacagtgcgcccgcggagctgaacgacgaagagcgggccttttttgagtttctcctggggcaggagaaggggcggctggagcaggagtatcttcctgaggaggtggtgcatcgggagatggggggctggggaagatgccacggtattgaacaccaggccctttaa

SEQ ID NO: 43285 - DNA, 1521 bp, Bifidobacterium bifidum LMG 13195
gtgggtgatatccgacgggagatggaacggctgaggccggtctatgaaaccggcgtgctgagactgctgctccgtcagaattcgatgatgtacgtggcgctgctccgtgcggccttcgacccgttgaccggcgagctgccccgtgagaccctggaggaaagcttctcgcaaagcctgtcccggctcgtcgactccggcgaataccagctcagggaggatcagaccatcgcggacgcctcccggcgcatcctcgccgacctgacccgtgagggcgatgacgattacgcatggctcgccaactcgcatgacgccgcatcgcaccggttcctgtaccgtctcaccgcccgcgcccatcgtgcgatcgaggcgctgtcgcggcttgaggatgactcccgcacgctgtcgggcgcgcaggcgaactcgatcatcatggagatcgagcatgcgcgcatgcagcttaccgccgaccccggcgagcgcgtggcgttgctcaaccgggagatcaaggcgcgcaaacacgagatacgtcagatacgccacggtcagcggcaggcggcgctcaccgaatcgcaggtcgaggacgtgattgcagtgattcacaacacgctgcgcggcgtgcccatagacctgcgtgaactcgtgctgaccgaacgggacaacggtgacgcgctccgccgccgcatgcaggcgggcgacatgagcgtcgacgacatcctgacctcgtaccacgacgaataccgcaggtccttcagcgagtccgacagcggaagacgcttcgaggacgcgttccaggtgatcatcaccgacgagggacggcagcagatcgacgcggccctgcgcgacatcgcccacacgccgtatctggccggcgagtccggcgtcctgctcgatcaggtgcgtgccgagctttcgcgcatctatgacggcatcgaggcggtgcgtcgccagatgcgcgtatccgacgaggcgatcagccgtctggtgcgacagcagaccgatacccgataccgcacgatgctcggcaagctcaaccgtctgtatgcccacgtcaacgccgacgcgaaggcgcatcagggcgacgatgcgagaccgtaccggaccgataccgcggccggcaggttccctccgctgccgtcgcgccccgcgcgcccgatggtacgaacgaccaccccgggattgtccgtaccgcagacaccgggcgatgcgaccgcgcccgacctgcgttcgatgatcgacaacgggggaccgcggctgcggcgcatggccgcgctcatcctcgaatcgcccgtctacgcggacgacgggaacggcgccatcgacatcgtcgccagcttcaacgggctgccgaaagccgagcggaaggaaagcgagctcgtcggtttcctgggagagctcggctgcggggacggagccggcgtcgcatggcattgcatatcggcagacggaagcccgagggactggatcaccggtccagtgctcgcacaagaggatgaattgcacgacatcgtgaaggaggactga

SEQ ID NO: 43286 - DNA, 1053 bp, Bifidobacterium bifidum LMG 13195
atgagtgacctgacgaacgacaccgcccagccggacgcggacatggacatgattgacgacgacatgaccggcaccgacagtgccgataccgacagtgccgataccgacagtgccgataccgacagtgccagtaccggcgcggatgacatgggtgcggcggacgtcgaatacgatggcgcggacgcggaaggcgcggtcaacccatacgccctgttcgagggcgacacgggcgacatgaccgccgacgcgcgcatggtggcgatcatgctcaaacgcgagcgctacatcagcggacgtttctatgacctggcgctcgacaaccgcgcggcggtcatccgttcgctcaacaacgacctgctcgatctggtcgtcaacgagcactaccgcgtcatgtacgccaccgcggtgagcgggccggacatgacgctgcgcgcgctcaagacccgtgcgagcctcaaacgtgaggaggcggcgctgctggcgttcctgcgcatccgcgtgctcgaatacgagaacgcccacgtcgcgccggacgaatggctggtcagcttcgaggagatccgagcggcgctcgccaccggcgccgggtacctcgcctcgcgcaacgacgaggagggcgtgctcaggcaggtgggcgcgatcgtgtccgtcatgtgcacgtacggctatctcaggcagctcgacgatgacgagacgatgtaccgcatcacgccgctggtgccggtggtgctggaccgtcagctggcggacagctggctcgtagtcgcggaccgggacgacgatggcgagccggccggtgacatggccccggccggctcgcggtctgcagccggcgatacgtcgaacgccgatgcgagcggcgccgatgacgatggcgattcggacgatgcgggacccgacgccgaactgttcgaggctccgctgttcgatgacggcgccgatgcggacgccgccgaggacatcaagggcgccgatgatgccaatggcgcgaacgacagcggcattgacgacgagaccgcctcggacggcggcactgcacgggaaggggagtga

SEQ ID NO: 43287 - DNA, 3591 bp, Bifidobacterium bifidum LMG 13195
atgagcggcaaggacatgcagatgatcgccgaccgatggatgatggaaagcaggaggctcgtcaactggggatcctatgagggctaccatgagttccgtccctccacggactcgcaactgccggtgacgttgctcgccggcgcgagcgaatccggcaagtcgacgctggtcgacgcgcagatatcgctgctctacccgaccggcacgcccttcaacaaggcgtcgaattcggggcgttcggaacgaagcgactacacctacctgcgcggcatgatcggcgtgggaggctccgacggcgtcgacgaaccgatgtacctgcgcggccgggacgagtccggcgcgccccggtccatatggggcgcgatcgtcgacacctaccgcaacttcaccaccggtcagatactgtcctgcggcaagttcctctatctgatgcccggcgacgggcgcggcgacgtccgacggctgtacctggcatgggacaagccgatcgacccgcgccgcatggacgtgttccgcgagtcgtcgttcacgcccacgcagctgaaatccacgtatccggggtgcgtcaccttcccgaacgccgaggcgttccacacccatatttgggatgtcatgggcctgagcgcggaggcatgccgtctgctggcccgcatccagtcggccgacgccccctcccgccttgacgacatcttcaaacagggcgtgctgggcgtgcccgaggcgctggacctggcccgtgcgaccgtggaggattacgagcgttacgacgcgaacttccgaagcatggaggaaaagaccagacgcatgggcaagttgcgtgccatcaccgccagctatggcgactacgagtcggcccgtgacgcggtccactcgttcgacgcggtgaacccggccacgaagtccggctcggcgacgatccgagcatgggcgatccgccgcatgatcggcgaggtcagcgaacggcagccgctcgacagtcgtctgcgtgacgagcgacgcagtgaggcgcgggctgccggcaagcgcatcgaaagcctgcgcacccgcatcgacgcggtgcgcgagcgcatgcgaggcctcgacggcggcgacctgacacggctcgacgcggaaatgcggcaggcggaacgcgcgctggcggacatcaccgccggcagacagcgcatcgggcgcatgttcgaggcggccggcgaggagttccccaaagacgagcacgcgtgggacgagcggcgcatcgaggccgtgacgttcatgcgctcatatgagcagcgcaagggactgctggacgacatgcgcaaccagacgtacgccgcgcacgcgtccgtcaagcagacgctgcagcggctgaacgacgattacgaacgccagaaatcgcagcgcacccgcatctcccgccagatggacgagacccgcgccatgctgtgccgggccaccgggctgggcccgagcgaactgccgtacgtcgcggagctcatggacgtgcgcgaggatcaggagcattggcgcctcgccatgaacgccgcatacggatccatggcccagaccatcctcgtcgacaagcgccatgagcgtggattcgcagccaaggtcagcgccatcgacccgcacgccatggcgcggcgcacctggcagttcgtcgacaccgaacgcgggggagccgggaacgggcccggcggcgcgaacacgggtgcgaccggcgggagggacggagaggtgtggctgtcctcgaagctgcgctaccgcgaggattccccgttcgccggctggctgcgcgagcagaccagctccgagcgtctcgacgccctgtgcgtcgacggcatcgacgactccgaccatgccgtgcggcaggtgcaggccgacgggcagatcaaatccggcaaacgcggccagcatggcatcaaggaccgtcagcaggtcatcggattcgtcaacgaaagctatttggcgcaactgcgcacgcgcatccaggacgcgcaacgccaatgcgacgagaccgcgcaatcgtacgcgagcgcgaaggaacaggccgaccgcctgcagcgagagcgcgaactcgccgaccagctcgcatacaccgcatgggagaagatcgacgagaacagcgcgaaggcggcgatcgccgacatcgaacgcaccatcgcctcggtcaggaacaatcccaagctcgccgaactcgacacgttgcaggagtcgctgtccaaggagctcgaccgctcgcagcgccagcgcatcgacatcgagcggcaggccgagctcgccgatcaggcggtgaacgcagcgcaggcatggctcgacgagcatgccgcgcagccgcagccgcaaccgcagacgcggccgctcgacggggaagcggcggacgtttcgccaaaagccgtcacgaacggacggactctcctgacggacgaggtggaggaggcgctcgccgaatcatatgagcagcgtctctccggtctgggggatgcaacgacccgcgcccacatgatcatcggcgcgggggcgccgcagcgtatggctcagggggataccttcgccgaccgtgtcatcgccggcatcggcaaggacctggaggcgcgcgtctccatgctcgaaggtcgtgcggcgtcggcccgcaccgccgtcgaggcgcggatgggcgcctatatcgagatgtatgcgggcggtgacgatacgatcgccgccagcgtggacgactaccggtattaccaggacgagttggaaagcctttcgaagctcgccaccgtcgaagccaccgccgtcgaataccgcaactgcctcgacaagctgctgatgagcttcctgaccatcaaacgcgcgatagacaccgacgccggagacatccacgaccagctggaacgcatcaacgcgatgctggacggccagcagttcggcccgcgccacggcagcctgtccctgcacgcggacgtgcggcgccccgagcgcgcgttctggtcggccctgacccgcgtgatcggcaccctcaacgaccgcaaggcggcacagacggacgacgatcttgacggggcccggtgcgcgttcgcgtcctgcgccgcgatgatcgacatgctgcgccgcgagatcgggcagatcagggacgttaacggcgtgaaaagctacggcgcccgcaacctcgacccgcggtgccgatcctcgttctacgcgctcgtgcgccactcggacgggcaggtcgaacgcatcacctcgaccggcggacggtccggcggcgccctgcaggagctgacctcgttcgtgtacggcgcggcgctgatctacctgctcggcggcggaatggacaacaagctcaagccttcctacacgacgctcttccttgacgaggcgctcatcaaggccgacggccggtatacgcggcgcgcgctgtccgtactgccgagactgggtttccaggtcatcgtctccgcccctgaaagcaagacgggtgagatactggaggtctccaccaaggcatacgtgacccgcaaggaccccgacaccggctacaccacgctgcacgaagccagactggacggcatcgatgagatggacggcgcagatgagccggaaggtaccgtcgagtcggatgacgccgccgaatag

SEQ ID NO: 43288 - DNA, 1437 bp, Alcanivorax dieselolei B5
atgtttttcacggaagaccgccatcaattcttcaagccgctgaccggcaagtaccgcgagcaggtggccgagtgtctgcggctgttgcacgagcgtctgtacagcgcccaggccgattacggcgagtcgctcaagcgcgagcaggtgctggatgtgttcagtgaggcactggagcgggcgcccttgctggagggcggcgatgaagacggcggccgcttccgcaacaatcgggagcaggccgcctggattctcaatacgctggtggagcacggctggctgaagcgggacaaggacgaggcgtcgtttcagtccacctatccgttcagccgcaccgggcgcctgtttacgcagactctggcggaggtggacggccgcggcatccgcacccgccatcgcaatacccgcaatacgctcaatgcgctggccgcgtttctggatcgcggcgaggtttatgatctgctcgacgcccacgagcattccgagcgcatcatcgctgatttcaccgacatcatcgccgagctggaagagcgcaagcgggaactggtcaaggaagtggaggcccagcaactggtgcagcaggccagcgaccagttcttcgagttcatggagaagcgcttccagccggacgtggcgatccgcatgtccgccgacagcgtggagaaacaccgcgaccgcatccagaacaccatcgagcgcatccgccgcaagcccaaggcatggaagcgtaacgcggaactggagctgcggcggctggcgccggatctggtgatcaacccggaaggctcggtgctgtggcagttgctggacagcatcgaaacccgcatgcgcagcgccgccgagatcatgctgccggccctgcgccggaccctgcagggctttacccggcgggcggacattatcatccgccagctcagctatctgcacagccagcagcacagcgacattgtcggcctgtgccgggagctgtccgagctggatgacaccaccgccgccaagcgtctggaagccgccgggcaagccatggcccatttgcgtctggggctggtggatccggcccagaaccggctgcgcgagcagcgggagaaacggcaggtgcaaagccgcatggcgcacttggacgcgccggacccggccaccctgcgcgatctggcgattcaacagttgctggagaaggcgttcagcatccacggcgaaggtctgcgtgactatttgcgccaggccctgggcgccagccgccgcatcgacaaccgcgacctgccggtgaacaacgccaccgatctgctggcgctcagccatgtgatcgagctgggcagcgccgaccatcgggccagcggtttccggctgcgcatcgaacccaccgaccccatcatcggcgaaccttatttcgcccgccgtgatggtttcttgctggaactggaacacgatgacgatacgtga

SEQ ID NO: 43289 - DNA, 669 bp, Alcanivorax dieselolei B5
atgacgatacgtgacgctttggccgaggctctggaggcccgcggcgtcggcccggatcagttctccgaactgatgatccggctgctggaccggggcgtgctgtgccgcgacgaaagcaaaaaggaaacggagctctacgatcgctacctgcaagtggccgatctggtggaggattatttgagcgtgctacgcattcgcctgctgcacgaacggcgttttcattcactgcggctgtttccacccggcgccgaggtgcccggcctggccgacagcgaggacggcttcaaccagggcctgcgcgagcgcctcagccaacaggaagtggccgccattctggtgttgcgcgcggagtacgacaaagcgttgcgcgaaggccagatcgacgaacacggccaggtgatgctgccgctggaagcgttcaatctggccagcaagaatctgcttggccggccgctgccggaggcgctcaccgaacggcgcgccctgttccgccggctgcgtcagttacggctgatccgcaccgccagcgacgacggtctggaagacgccgagacctggctgaccatccgtccggacatcaccagcctggtcaccgacgcggtactcagccagctcaccggcgacgggccggacgccgaagccccttcatcggaagagctgccatcatga

SEQ ID NO: 43290 - DNA, 3651 bp, Alcanivorax dieselolei B5
atgtttttgaaacgttccatcaccgtcaattggggcaacctgcccgccgaggagctggaatacggccccatcaatctgttctccggcggtaacggctccggcaagaccaccgccgccgatgccctgcagacgttgatgaccgccgcccacgacaatctgttcaactacaacccgggccaggacgaaaccacccagcgcggccggggcggcaagcaggtgcgtactctggcctcctatattctcggctgcgacgacggcgccttcgcccgcccctatgacagcgacggttacctggccggcgtgtttcatcccaccaagggcgagaccgccgagccgttcacggcggtgattggcgtgcgcgcgcatctggaccgcgccggcgtcaccgcccaggcgcggcaaaatgaactgctgctgatgatcgtgcccggcgagatgctgagcctgtcgcacttcgtccacggcgaaggcgccgaacgccaggtggtggaaatcaccgagctgcccaatgcgctgcgccgcacgttcggtaaaaagaacgtggaaacctacgagaagaaaggcgcttatctggcccgactgtacggcgccctgcgcggccgccgcgacgcggtgtcccagcaggaagccaagaacgccgcccgcaccttcgcccgtttcatggcgtacaaaccggtggactccattgatcagttcgtcgccggcgaagtgctggaagcccaggacatgggcgacacgctacgccgcatccgcgacatgctgcgcaccatccatggcatggagcaggaggcccggcaactgcgcgccagcgtggactatctggagcaggcccgcggcctggccgggcagtatcaagagacctggctggagcgcaccgccctcgcctacggcgccgccgcgcaacgttaccgccgcaaccagcgccagtatctggagaaaaaagaggaacagtcccaactccgccagcaacaacaggcgttgcgcgaagaagcggaacaggtggaacagcgcctggagcaggcccacgacgaactggtggggctggaagcacgcatacagggcatccccgcgctgcgtgataaacagcaactgcaggcacagctggaaagcctgacccaacagttgcagcaaggcgcccgccccctgctggagcaggatcagcagcgcagccgtaacttcaccgcattacgcaatctgcgtgatctgctcaaccgtcacagcatcgagctggaactgccgttgttcgccagcaagggctggcgtgccaccagcaaggaactgctggccctggagcaacgtccgataccggacctgaatcagatgctggcgcgggactggatcgatttgtcgccgctggaaagtggcctggaacaggctcgcgccgagcagcagctgcacaactatctggcggagcagttgcacgggccggcggaaagcggcaccaatcaggacgctttgtcgctggcgcagcggctggatcgtctggtgacgcaaagagcgcaggcgctggaaaaactggacgaacagcaaaggcagattcagcaccgtatcagcacgctggaatcgaaacgggtgaactatccccgtgatgtggaagaagcgctgcaggcgatccgcgagcagtgcccccaggccgacccgcgcgtgctttgcgatcacgtggaagtacaggatccggaatggcaaatggccatcgagggttacctgggcggcgcccgcttcggcattctggtggagccggattacgaagccgaggcgatccgcgtggtacgccggctggccggccgccagcgcaacaaggcccgggtaatccagggcgagcaggcgcggcgggacgcggagaaagccgcgctgccggcggagtccatcttccacgtgctgcgtttttcccatcgcaccgcggagcattatctgaaggcgtcctacggcaatgtggtgcgggtggacgacgccgaaaccctgcgccgcacccggcgtggtatcaccagcgacggtctcggctccggcaactacgcactgttccgctgcgatctggacgacagccagttggtgttcggcgagaccgcccgcgagcgcaacctgtatgcgcagcgcaacgccctgatggacgtacaggaaagctaccgccacgccagcgatgactatcaggcggtgcggcaactgcaacagcaggtgctcgagttcaagccgctggactgggtggccaccgtcactcacctgctgcaatgccagcgccagctgtccgacaccgagcaggccctggccaatctcgacctcagtgaccatgaagagctggaacggcaacagcaggacgcccgtcagcggcacaagcagctgagccaacggcagggcgaattgaaggaagagaacggcaagctcggcgagcaacaacacgcctgcgagcgtgccatcagcgccctcgccgatcagagtgagcaactgcagcaggatcaggaagacgccgaggcgcacttgcacgcctgcacccgctactggccggatttggatgtgctgccccgtatcgaagccatggaccggcgcttacaggccgcccaggacgatattgatttcagcgttgaagagcagacacagagcaaagctctgaacctcgccgtcctcaccctggaacggcttgtcggcgactacaatcagcaggcccaaccggcggatcagatccttatcgaaaccgccgaggagctgcacagcgccccgttcttcggccatgtgcatcacctgcatcaacagctggacaacctgcacaaccggctgcgcaacaatgtcctgctgagcaaactggagcaactgggcggtctgcgcgacaccttcaacaccaccttcgtcagtgatctgtgcaaccagatccagcaagccatcaaggacggcgaacgtactctcaagaatctgaacaaggaactggagcaccattacttcggcgccgaccgggagcggttctccttcgactgggaatgggtgagggaatacaaggaatactgggacttcttccgcgacgtcaccgagattcccaacctgggcgatggcgccagcctgttcgagagtactctctccgacaaggccacggaggtgcgcgaccggctgctcgcattgctgttggacggcgacgaacagcaggcgctgcgcgaactggagcggatcagcgactaccggcgctatcgccgctacgacatcctcaaacacccggaaggcaaggcgccgatccgtctcagccagtatggcaccggctccggcggccagttggaaacgcccgcctacattatccgcgccgccgccatcaccagcgctttccgcttcaacgaaggcgacagccacctgcgcatggtaatcgtcgacgaggcgttcatgcacatggacgaaacccgctcacgccaggtgattcgttacctcaccgaaaccctgggcctgcaactgatcttcatcatgcccaccagcaaagccggccccttcctggacctggtcagcaaccagttcgtgttcagcaaggtgcccagtccggtgccggtgggcgaactcaatacccgcgtgctggtggaccgccagcaactcaaccaggaacgcatcgccgagctgtgggatcaacaccggcgcgtgatccgccagcaaggcgcgctggacttcatggaagggatttcgtga

SEQ ID NO: 43291 - DNA, 1128 bp, Alcanivorax dieselolei B5
atgagcgcgccgccctggctggaggaagagccctggttgcggcggttactgagctggttcctggaccggctggagcacccgcgcacccaggccatcacccgccgggtcaaaaaaaccacggtgccggaattgttccgcttcagcgaggacacccgctatcgctggcagttggtggaacggctggcacaggaataccgggtcttcagcatccattacgactcccggctggatccttttcaggaacactacgagaacgcccaactgcgtcttgatcccatctgcgaggcactactacgcgattggctcgatcgtccccgcgtggatccacggagacgagcctggcagaacgctctgagcggccatgaagcacatttccaggatgacggcgcggctctgctcgatgcccaaccggcactggccggtgaatcaccggaagacatggtcggccaattcgtccttgccgctaatttgctggacagcgacctcacgctgcgcgagctttcggcccgctgctttcgcggcgactccaagtttctcgatggccgccaggacctgctcgcccgcctgttcggcgagcgcgcccaacgcctccggccacgtcctttgctgctcactgcctgggcgccagccggtttcgaccgattactgatcgtggaaaaccaggacagcttcctgcgtctggtggaacaagcgcccgccggccatgccctgctctacagtggcggtttccgcgccagcgctcaacgcctcaccagcccccacacccgtttcgcctttctgtccggcagcgacggcgctgatttccaggcgcgctggctcagtgacaccttgcccgcgttcttctggggcgatctggatttcgccggcctgggtattctcgccgcgctgcgacacagcctgccgcaactgacggcctggcgcccgggctatgagcccatgctcctggcgctgaaggatggccagggccatggcgccgaacaggccggcaaggcgcgtcagaatgatcccggcaacaccggctgcccctatgcggaccaacagttgctgcccgccctccgcgactgccggcgttttctggatcaggaaggcttcctcccggttctgtcctccccccgaacaccattgtaa

SEQ ID NO: 43292 - DNA, 1461 bp, Mycobacterium hassiacum DSM 44199
gtggacgacaacagcgggctgtcggcggctgagctgctcgagctcaaccgcgacctgcagggatcgcgcgccatccggttgctggccacccacaacctcgccctgtacgccacgctgatggagcgccacctcgccgacggcgtggtcaacgagaccgagctggtggtccgcctggagcgcgacctggagtcgctggaccaccccgacgggcagagcgggctggcgctgatcaagagctgggccagccagggctggctgcaccgcatcgtcgacgaacgcagcggccagaacatctgctacctcacccaggacgcccgccgggcgctggacttcctgcgcggtatgcggcgcaacgacaccatcgccaccggcgggtcgctgcacggcatcgccgcccggctcaagcaggtggccatcaaggtcggcggcgacccggcgcggatccgcaagagcatcgaggaacagatcgccgcgctgcaggacgaactcaccgccctcgacgccgggtaccgcccggagcccgacgtcaccgactgctacgacgaggcccgcgccatcgcgctgcagatggagcggatcgtcaccgacatcggccagtacggcacgatgatcgaacaggccaccgccgcgctcgacgagccgatcgaggacaacgccgactaccgcgaacgccagcgccagctctacgacgacttccaggccgcctgggagtcggccggccgcgactcgcaccgggcgttcctgcggatggtcaacgaccccgatcagcgggccgagttcgaggccgacgtggctgcggtcgcctcggcgctgccggacctggacccggcgctgcgcaaggtgatgacgaacttcttcgagctcgtcggccagcagatcgacgaggtggagcggatccagcagcgttgcgcgcagcggatcaagcggttcaccgcgttcggcaccctcgagcagagccgcggcatcgcccgccagctcaacgacgcgatcgccgccgccagggcgctgctgcgcacctcgctgaccgactcccggctcgacatcgaggtgccgctggcccgccacaccatcacctcggtcggcgcgctgagcttcaagatcggcgacctgtcggcgcccaagccggccaaaccggccaccggcgaggtcgacctcaccagcttcgccgccctgaccacccaggtggacgcgccggcgatggccgaacgcctcaacgaggcgatcgccgccgggccggtgtcgctgcccgatgcggtggacctcatcggccgcggtggaaccggggtgtacctcgggcacgtcatcgtgctgtggtcctgggccaccagacaacccggcgccgatccgcacgccgagtcgatcccggtgcggttccggtcgctggacggccgcgacctggcgatcgaagtgccgcgcctgatgttcaccgaaccgatcagcctggcgggagccgcagcgtga

SEQ ID NO: 43293 - DNA, 729 bp, Mycobacterium hassiacum DSM 44199
gtgaccaccgaacccgacatcgacttcaacaagctgccggaggtcgaccagagcgcccggccgccgcagcagcgccgcccgcgtttcgaaggcgatgtgtcggagcttcccgaccgggcctgctgggcgctgcagcacctgctgacccgccgctacatcagcaacgagtccgacccggacctgtacgcgtgggtgatcgagtaccgcgatcaactgcgggtgcggctcagcgaactcgacctgatcctgcgcgtcgtcgacggaccgtacgagaacggcggcgtcgccttcgtcgagcaggcacgctatgaatcatcaaggggcgcaaagctgctgcgtcgcgagccgctcggcacctacgactcgatcctggcgctgcacctggcccagatggtgcgcgcggccggtgggcagaaggtggtgatcagccgggaggagatgcacgcgctgttcgccggcgtgctcaacgacaccgaccgcgacgcggtcaccttcgccgcccgtatcgacggtgcgatcgcccggctgacgtcgctggagatcctgcgccgcaaccgcgacgacgaggacagctacaccatcagcccggtgatcaccgcgatcatgaccgcctcggtgatcaccgagctgcagcagcagttcgagcagttgatgaagggcgagaccgcagccgccaccgacgacgaggcgcccgagcacgaggaggacgtcgccgacgatgacgactga

SEQ ID NO: 43294 - DNA, 3312 bp, Mycobacterium hassiacum DSM 44199
gtgttcgacgggtaccactcgatcccgttcagccgcggcggcgcgctcatcgccggcgcctcgggcagcgggaaatcctcgctgctggacgcgatctcgctgggtttcctgccgttcaaccggcgcaacttcaacgcctcgggcgaccagaccgcggccgggtcgagcgcgggccggcgcaccgtcgataagtacgtgcgcggcgcctggggtcagcgcaccgagaacggcaccagccgggtgatgtacctgcgcggcgagggcaccacctggtcggcggtggcggtcacctaccgcagcgactccggccgcaccgtgaccggtctggtgctcaaatggctcaccggcgagtcgcggtcggactcgtcgagccggttcgccatcggcgacggcgaccgcgacatcgaggaggtgtgcaaccggtgggcggcgcgccggttcgacacctcggtgttcaaggaggacggctggcggttcaccaccaaggtggagtcgcagtacctggcccagctgtacgcgaccatcggtatccgcgcctccgacgccgcccagcagctgctcggcaaggccaagtcgctgaaaagcgtcggcgggctggagcagttcgtccgggagttcatgctcgacgagccggagagcctggtccggctgccggaggcgctcaagcagatcgacccgctggtggaggcccgcgagttgctcgccgtcgcgcagcgcaagcgcaagatcctcggcgacatcgagaagatccagcagcgctacgcctccgagtcgagcgacctgggcatcatcgacctggtcgacatgccgacggtgcgcgcctacaccgaccatgtgcggctggcgcagtgccccgagcagatcgcccagctcgactcgaccatcgaacagctcgacaacgaataccaggagatcacccgtcagctgaatctggccaaggccgaggcggattcgctcaacgcgcagatcagcggatcggcggccgacctcgctccgctgcagtcgcagctgaccgccgccgaggccgaggccgagcaggtgtcgcgccggcgcgccgcctacgaggacctgctgaacgcccacggcatcgaggttcccgagaccgccgaggagttctggaacctgcgggaggaactgctcgccgaggccaccgaactgctcgcccgcgcggaacggcagcgcgaggcgtccaccgacgccgagtacgcgcagaaggccgcccgcatcgcccgcgacgaggccgccaaggaactgcggcgcgtcgaggcggtcggatcggcgctgccggagttcgcgctggccatgcgcgaacagatctgcgccgccgtcgggatcgatccgtcgcagctgccctacgtcgccgaactgctggacctgcggcgcgatcagacccgctggcgggtggcggtggagaaggtgctgcgcggggcgggtctgcggctgctggtgcccgacgagtactggggcccggtgctgcggttcgtaaacgagaccaacatgcggggccggttggcgctgcaccacgttcggaccaagttgtacggcgcggaaccggccgagctggatccgaagacgttggcgggcaagctgttcgtggtcaaccccgaccatccgtgcgcggccgaggcggtcgatgtggtggcccacgccggcgaccacatctgcgtcgacacccccgacgtgttcggccggttccgccgggcggtcaccgacaccggcctgtacaaggactccgaccggctggcgatcaaggacgaccgccgcccggtgcggccatcggagtacctgtaccagggcgatatctcggccaagatcaacgcgctcaccatggagctggccgccgccgaggagaactatcaggccgcccgccgcaaggccgacgagatcgccgcgcaacgtcagcagtggcgggaccgggccgcggcgtgcaaggccatctgcgaacaattcccgcagtggagccagatcgacaccgagaccgccgacgggcacgccgaccggctgcgggagcagtacgagctgctgctggccgacaacccggacgtcgaggcgctgacggcgcgcgccgaggactgctgggcccagatccagaagctgatgacccgccgcggcgcggtcgagacccgccgcgacgaactcgatcagcgccgcacccggctgctcgaactgcaggagcggctcgccccgccgttcgtgtccgagccgctgaccgagctgctgaaccgctacgccgcgcagctgccggtcaccctggagctgctcgacccggagccgtaccgcgaggcgctgttcgctgcaatcaaacgggaacgcgaacagctgcgggagagccggcgccgctcctacgacgagctggcccgcatcctcaacaccttcgacaccacgttcccggacgccatccccaacgactcggacgacttcgacgagcgggtgcacgactacgtcgcgttgtgccgccacatcgacgagcgcgagctgcccgccgcctacgaacggatgatgcggctggtgaccgaacaggcgccggacgcgatcctgaccctgcaccgggtggccgaacaggagtcccgccgcatcgtcgatcagatcgagcgggtcaacaccggtctgagcgcggtggagttcaaccgcggcacccggttgacgctgcgggccaccccgcggcagctgaccgcggtgaccgagctgaccgagatcgtccgcgcgatctcccggcgcgtcgccgaggtcgggctgggcgacaagcaggcgatcatggaccagtacgccgacatcctgcggctgcgcaaccggctggcgtccgccaacccggaggaccgggcctggacccgcgacgcgctcgacgtgcgcaaccggttcaccttcgactgcgcggagtgggatgtggccaccggcgagctgatccgcacccactccaacgccggcgacaactccggcggcgagcaggagaagctgatggcgttctgtctggccggcgcgctgagcttcaacctggccgacccggacagcgacgacaaccgcccggtgttcgcgcagctgatgctcgacgaggcgttctccaagtccgacccgcagttcgcccagcaggcgctggaggcgttccgccgcttcggtttccagctggtgatcgtcgcgacggtgcagaacgcgacgacgatccagccctatgtggacagcgtggtgatggtgtcgaagaccgagccgtccggccgcaatgcccgcccggtggcgtcggtgaccacgcgcaccattgccgagttctccgccctgcgccggcagatgacctccgagcccgccgccgccgcggtgtga

SEQ ID NO: 43295 - DNA, 1497 bp, Escherichia coli N1
atggaagaaaacacaaggcagcgtacagaaaattatatttcagcaaaaaaccagcatcccgcctggatactccttgccactcgccgtgctccactggtattgagttgcctgaaaacgctttttgaaaaatcacatgatggcattccccttgaggaagctattcagtctctttccagtattctcattgagcatgtgagtcaggaacagtatgacattaatcaggacaatccatttcttcaggccagtcgtgaactgcgggagtggattaaacgccgtttaattgtcgaacgggatggccgtatttttgctaccgatgcgcttgaggtcgcgattacgtttgtagagtctctggataatcgttttatgacctctacggcttcccgtttgtccaccgttcagcgagaaattgaaaacctggaaacacggcttaatcctaacccggcaaaccgggttgcaaccttacgtcgtcgtatttctgaactggaacgcgaactacaggaggcagaagccgggcatattgaggtgctggaaacgcaccaggcggttgagcatattcgtgaggtctacaatttagcttccagcctgcgggctgactttcgtcgtgttgaagactcctggcgtgaggctgaccgcgctcttcgccaatccattattggtgagcaatatcatcgcggcgatatagtagaacgcctgctcaacgatcaggacgcgctgcttaatacgccggaaggaagagttttcgacagctttcagcaacagctccgtcaatcttctgaacttaaagcgatgagtgaacgattacgtgtgatccttagccatccttctgcttctgatgcgcttaaccgtctacagcgtcacgatctgcgctggctggttaaacgtctggtcgatgaatcgcaaactgtcctccaggctcgcgcccgtagcgagcgtgatgtccgtggtttcatgaaaaccggtcttgctgctgaacatcatcgtgttggtcatttgcttaatgagtttctgaatctggcgttaaaactcgactggcagcgccagatgattcgtaaacaagaggtgccgctacctgccgttggtgtggcggtaacaggcatccccgctattgaacgtttacgttttaaagaggtggatgatgaagcagagcagacgttggatctcagtaatcatgcggcggatttaacgcagattggcgatgatttctgggatgccttcaatggcctcgatcgtgaggtgttgattcagcagacgttgcagcttcttgcaaaagaaaatcgccccgttggcctggctgaactggcggcgctgttacccccggctcacgatctcgaaacattcgccgtctggattggtatggcaagagaagcgggtattgaggttattgattcacagcgtgaatttgcagagcttagtgatggggaaggtcgccgctggcgatttaatctgcccaccaccggtctggaaagtcaggcattaatggatatcgattgggagtaa

SEQ ID NO: 43296 - DNA, 750 bp, Escherichia coli N1; identical to SEQ ID NO: 42571

SEQ ID NO: 43297 - DNA, 3288 bp, Escherichia coli N1
atgaatcaggtatctggcctggctggaaaggaatctttcattcttacccgtattgagttgttcaactggggcggttttcatggattgcatcaggcagcaatccatcaggatggtaccgccgttattggcccaaccgggagcggaaaaacaacgttggtcgatgccctgatgactctgctttgtgccaatcctcgctacaatctggcctcaactggcgggcatgaaagcgacagggatcttatctcttacgtccgcggcgtatccggtcctggcgatggcggtgaagggcaatcgcatattgccagaccaggtaaaaccgtgacaggtattgctgctacgctggagcgcgaaggaaaacaggtccgtctgggggcgttattgtggtttgattccaccagttccagcgtgacggatatgaaaaggctctggctgttcagcgataatcccgggcagacgctggagcattggctaaacgtttaccatgagggaggtacacgtttgctccgacagatggaaaaagaagccatcgggctctggacatacccgaataaaaagcagtatctggcgcgcctgcgggatttcttcgaggtgggggaaaacgcgtttacgttgttaaaccgggcggcagggttaaaacaactcaacagtattgatgagatttttcgcgagctggtgttagacgatcactccgcctttgatcgcgcggctgaagtggccaatagttttgatggtctgactgagattcatcaggaactggaaaccgctcgcaaacaacagcagtctttacaacctgtcgccctgagctgggagaagtaccaaaagcaagagcgtcaactggctgactggcagacgctggaatcgctgttacccctctggtttgcacaacaggcaaaccacctctggcgggaaaagattaaccttcttaacgcaaggctcgctgaggcacaaaccagcgaagaacagctccagtcacagcttgatttgcaaaaaaaggtggttagcgactgtatgcagcgttatctccaggtcggcggtgccaatattgatgaactgaacgagcgtatcaaggactggcaaaaaacgctcggcagtcgagaggcattggcgcgtcaatatcaacagctgacccgtaaccttggattgccgtctgatctgatccaaccacagctggaggcgaatcagcatgaagccgcggccctatgtgagcagatcgccgttgatataaagttgaaacaggaagaagcgtatcaaaaaggtgcgcttagccatcacattaccgaagagcttcgggaacgggaaaatgaacgcgccgagatcgcgcgtcgtccggattctaaccttcccgcacattatcaggcgtttcgtagcgagctggcaaaagcgttgaacgtggatgagtctgaactgcctttcgtcgctgaactgatacaggttaaaccggaagaggcgcaatggcgcggtgcgattgagcgtgctgtcgggagtaacaggctgcgtattctggttgcgcctgaatcggcacaggaagcgctgcgctgggtaaatcagcgcaacaaccgtctgcatgtgcggctactggaggtcaaattaccgcactctcccgcccggttcttcgacgatggctttacccgcaagctgttgtggaaagatcatccgtggcgagaggccgtcaaagcattactggccgaaagcgacaggcattgtgttgacagccctgaacaactgcgtgacacgcctcatgctatgacggtgcagggattaatgtctggtaaacagcgtttttatgacaagcatgatcagaaacgccttgatgaagactggctgacgggattcgataaccgcgatcgcctgaacttccttgctaaagaaattaccacgcttcaggagcaggttaaaaccgcaaacgcggcatttgagtttgcgaaaggcgaggtggggattttgcaaaatcaggctgcttccttccagaaaatagaacaaattgatttcgatagcatcgatgttcccggcgcgaagagccaactggacgcgctcagggagcggctggaaaatctgacccgcccggattctgacgccagtgtagcgaaagcaaaacttgatgaggctcaaacggttgaatctgaactcgataagcagctcagagctgccaataaagtcactaacgtgctggatacagaactcacatcagcccgtgccgcggaacgtaaggcccagcaaactgcacaacaaggtatgaaggaagaagagcgagagttgtgcgcgtcacattttccagtggtgactttggagcaattgcctgacattcgcgatttagaacgtcaacatgagcggggaattcagcatgaaattgaaagagttaaagctgaactacatcgactgaacattgagttgaccaaacgtatgtctgaagccaaacgtgtggataccggggcgctcgttgaggcagggactgatttggacgatattactgtttatttacagcgtttgcaggaactgaccgaagaagccctgccggaaaagctcaatcgcttccttgattatcttaaccgttcatccgatgacggcgtaacacaactgcttagccatattgagcatgaggtgctggtgattgaggagcgcctcaatgaactcaatgaaactatgttcagggttgattttcagccgtatcgctacctgcgtctggataccaaaaaagttgtccatgaaagcctgcgcacgcttgaaaaagcacagcgtcagctaaatgccgcccgatttgttgatgataatggcgagagccattataaggctttgcagatactggtggcgcaattgcgggatgcttgtgaacgaaaccgtaccctgggagcaaaagcgctactggatccccgttttcgactggagttcgccgtatcggtgatggatcgtcagagcggaaatgtgattgagtctcgtaccggctcacagggtggtagcggtggagaaaaagagattatcgcttcttacgtgttaacagcttcacttagctacgcactttgtcctgcggggagccgttatccgcttttcggtaccattatccttgatgaagccttctcccgcagttctcatgcggtggcgggtaggatcattgccgcgcttagagaatttggcttacatgcagtatttatcacccccaataaggaaatgcgcctgctgcgtgaccatactcgttcggcgattgttgtccaccggcgcggtcagaattccaatatggcttctctgagctgggaagagcttgaacgacactaccagcgacgggggaacgcgtag

SEQ ID NO: 43298 - DNA, 936 bp, Escherichia coli N1
gtgagttatcgggcaagtgatacatcagtattaatgccgttgcgctggattctgaatagcccttctgagtggatcaacgccgctgcggatccggttgtgagccgggaatttcgcttgctggaaggaattattgaacaagttaatcccatttttcacccgctgttggtaaagcatcgctctctctggcggcacaaagatccgcagggcgtcatcagcgccgccacgctggcctgccgattagagccgggctgcgcaaaagggctgccgttaagattgctttccgggcaaggagtggataccaaatttatcgagaataatatttcgttattaacccgactgttagacgtgcggttttcaggagaagccagcgagcagggattaacaacttttcttgatgcttttgatgagtccagtcactgggttttagttgtaccattatcacccggcttacttccttttaaaaaatgccgggtaacaacggcggaactggcagaaacaacattacctgcgtcgcaagtactggtggttgaaaatgagcagtgtctgcatcatcttccagcattatctgacactatcgcgattttaggctgtggcctggacgtgcaatggctatccagttctgttctggatgaaaaacgcgttgcttattggggggacatggatagctggggattactgatgctggcgagagccaggcgctgtcgtccgacgcttgatgccctgctcatgaaccgtgagttgtttgagcagtatgccagtcatagcgccgttccagaaccggtcatagcgaaggaagctgtacctgatggcttgcttaacgaagaggccgatttttatcgctacttaacccgtttaccgtgtggtcgtctggagcaggagtttttgccagtggggattgcggaagaggtgcttctcaggtggggaaaagagagttaa

SEQ ID NO: 43299 - DNA, 1497 bp, Simiduia agarivorans SA1 = DSM 21679
atgttttttactgattcccgcctccatttctttcgccccttggtgggcaaataccgggaagtggtggttgagtgtgtccgcttgctttatcagaagctgtacacggatctcaccggctatggtcaaagtcacgggcgtgattttgttatcgatgtctttgtcgaagcgattgcccgggcgccgcttttggatgaagaagtcggtgcacctgaggggcggtttaaagacgcgcgtgctctggcgggcttcatactgaataatttgctcgataatggctggatggagcgtcgtctcgatgaggccacactgcaaagccactatggttttacccggatggggcggggctttgcacagccgtttgtcgaatcgggcaagctcgaataccggtcgcgcaaccggaacacccggaatacgcgcaacagcctgcaggcattcgctgaaaagggcgaggtgtacgatctgctcgatgcgttggagtattcagaacgcatcatttctgattttgccgataccattgccgagctggaagagcggcgattgcagttggtcagggaggtggagtcacgtcagttgatcgagcaggctgccgatcagttttttgattttattgacacggtgtttaaacccgatcttgaagtgagactttctgccgacagcgtggaaaaataccgggaccagatagcctctctgatcaggcaggttagacggcgccggaaatacggtgaaggggagcatgcagagttgctctggcaaacagtgatggaaatgcgcttgcgcaaattacttcccggtcgggtggtcgaaggccaatcactgttggaaaacatcgtgcacaccattgaagagcgcttgcaaagcgcgtgtgacattatgttgcccgccctccggcgtgcgctcaacagttttaccgcccgtgctgacattattatccggcagctgagttatttgcaccggcaggccgacgaacccttgctggatgcctgtagccgtttacgtgaaatgtctcccgataatcaggagcaggcactgcagcggatggggcaagtgttggccggtgtgcgatcgggctggcccgcgtcggaacaatttgtcttgcgcagtcgcaaccggcgtcgaactgtccgtgcgaccctggccaatgccccgggcttggatcgcgatgcgcagaaagcgcagttcatcagccaggttctggatcaggccttccatgtttccagtcagcacatacgtgcctacgtcagcgataagctgattacccaagggcgtgtttacagtaagcatctggcggtgcaggatgcgcgccagttgctggccttggcccatgtggtcagtttggccggcgaacggctggataatggatttgaaatcctgattcatccggcgcggtcagacagtgctggcttgcaggtttttgaggccagcaattgtggtgatggctattttgacagccgcgaaaattttgaacttgaattggtggacaggcagcgcgcgtcatga

SEQ ID NO: 43300 - DNA, 729 bp, Simiduia agarivorans SA1 = DSM 21679
atgacaatgcgagaatctcttgagcaggctctggctgaaaaggatctgggcttgaaccagttccagacactgattcagcgactgttggattatggcattatctgccgcgatgaaagccaggtagaagccgagctgtacgacctgtttttacgcattgagaccctggtggatgagtatctggcttttgccggcatccgctacttccacgaaccccgttttgagtatgtgcgtctggtgccacccggctcgcaattgccgggtgtggacgatgagactgaggatgcgccatttaatcagggcttgcgtgcggcgttgccgccggcgctggtggcggtagtcatggtactggccgtggagtatgagaaagcgctgcgtgaagcgcgcgttgacgagcgcggcttggccaacctcagccttgaggcgctgagcctttctttgaaaaatctgttgggccggagtttgccggatgccttgcaggagcgcaaagccttattccgacaaatgcgtcagctgcgactggtgcgaatgagtgcggaagcggatttattgcagggcgatagttggctgcaaatccgaccgatgattctgacgctggtgagcccggatgtgttgtcacaaattgaagatcatgcaggccaatctattgtgattggcgatgcagacgacacggcgctcgagtccaccggaccgcgggataattccagcgtagactccggggcgggtgaataa

SEQ ID NO: 43301 - DNA, 3627 bp, Simiduia agarivorans SA1 = DSM 21679
atgtacctgaaaaaattcatttacgttaactggggcaatatccctcacggtgaattcgagtttggtcccaccaatttattttcaggtggtaatggctcgggcaaaaccacggcggccgatgccattcaaacggtgatgactgcggcgcatgacgggctgtttcactttaaccccggtcaggatgagtcgacccaacgcgggcgcgggggcaagcaggtgcgaacgctcgcgtcctatgtgctgggatgcgacgatggcgcctatgcgcggcccgaatcggcctttggctacctggccgcttgttttgtgcctcatccgggtgaggatgccgttgcatttactgcaatgctggcgatgagcgcgtttgtggaacaggccggtcggcaaaaaacggcgcgcatggacagcatcgatttctatctattacccgatgtttcattggtcttgggcgatctgctgaaggaagatagcgggggccgttatgtggtgcccactgatcagatacagaagttattgcgcaagcagtatggcgatgcacgggtagagaaatacgaacgcaaaaaggcgtacctttgccgactttatggcgctttgcgcgggcgcgatgatgcagtgagtgaacgcgaggccatcaatgccgcgcgggcattttcgcgcttcatggcttacaaacccattaaagcgattgatgaatttgtcgccaccgaggtgttggagccgaaggacatcggtgatgcggtaagggatgtgtcgagcatgctcaaacgcattcatgccatggaagccgatgcccgcaaagtcgcagaggcggccgatcgattgcagcaggcgcgcaatagcgcggacacgtttatcgcgcattggctggagttgcaacagcttatctatgcggtggcgcggcgtgattacgatattggacaaaagaagtatctggccgaaaagtcgcgccagaccgatctgaaaacccagctggagcagaacctgcgcgattccgatatcgcgcgcgagcggcttgaggtgttgcagcaggaaatcaacgaaatacagctgcaaaagttacaggtgcctgcattgcgcgatcgcgaacagctggcgcgtgagcagcagcaaattgaagccgccatggtgcgagccatgccgccactgatgcaggacgtggcaggtatccgtcaggcgcaggccaatgcggcacagctattgacgctgtcaaaaacggtgccatgggaaggtttcgagcgtccggcttttaaagcgctggcggcgcgtgtcgctgaaagggcctcaggagagccggccgatattcaccagctggccaatcgtgactggatcgatatcagtccactcgaatcccaactggatgcggcgcaagggttgcagcagttgcacaatgattgggtggccgcctggcatgcaaagggtggtctgcagcaatcgttacagcaggcattagataagcagttgacgcaagtcaggcaaacggagcgtcagttgcaggcgcgtctggctgaagttgcccaactggaagccaaacaagtcagctatccgtcttatgtgcgggtggcgctggaggcgttgcgcaggcaactgccagaggccgacgcgagggtcttgtgtgatcatgtggaggtggatgatccgcaatggcaggccgctatcgaaggttatgtggggggcgctcggttcggcattattgtcgatcccgattgggaggcggaagccattcggttaatccgccagttgcctgggcgggacaaccgggctcgggtcattcagggttcacaagcccgcaaggatgcagatcgcatgacacttgaagccgactccgtccttggcgtgatgagcttcagccacgataccgcgcgccattatatgcaggccagttatggtcaggtgctgcgggttgacagtgctgatgcgctcaaacaggtgcgtcgtggtgttacccaggatgccattggagcggccaactacgcattgttccgctgtgacattgatgaggctgatctggtgttcggcctgaaggcgcgggaacgcgcgttgaaggcccgtcaggcagagacgcagcaattggcgcgtgaattacaggcgcaacaagagcaggcgggtgccttgcagcaattggtcgacctgacagacggacttggccttagtcgctatgcagatagccttcagcaactgttggcccagcagcgtgagcacgaggcattgagtgcgcgtttggcgcgtctggatgtcagtgactttgccgagcttgagcagacggcaaataccctgcaggcgagttttaatgagcagaagcaggcgctggcggcattggaagagcagcgtatccaggtggaggcggagcagcggctggtgacgctgaactgccagaaagccgaccagcagcaggacgaaaagctgggtcagctggaagcagccgaggatcgattggcacagctggtgaatttatggccggacttcaatgcggatgcggcgctggagcaggccgaagactgggctcagacgcggcaggtggcgcagctgaatgagcagcaaaccgatatccgttcgggattgggccgcatagtgcgccggctcgacaacctggttcaggagcacaacctcgccgccgatctcgccgacggtattgtctatgagccggacctggcgagcctggaaagtgatacaaatttttcagcgatttgtcagctgcagcgaagccttgatggcctttataaccggcttcgcaacaatattttggcgacccgtcaaagcgaaatcagcggtatgcgcgagagctttaacaacgcctttgtgaccaacctgtgtcacgcgatttaccagtccgtcaaagaaggcgaggcgacacttgaacagctaaaccgcgagttggagcaccatcgctttggtgccgaccgggagcgcttctattttggctacagctgggtgccggagttcaatgaataccggcaatttttcaaagcggttatcgacaatccgagcatcggcgatggggaatccctgttcgacatgccactggacaaaaagcagcgccaggtgcgcgacaagttgatggcgatgttactggacgccgacgagcaaagggccctgaaggaattggcccggattgccgactaccgcaactatcgcaggtatgagatatacaaggagccagaaggtaaggaacccattgcgctgagccaatatggtaccggctccggtggccagctggagaccccggcttatattatacgctctgcagccatcacctcagcgttccggtttaatgaggggcgcaaccatcttcgcatggtgttggtggacgaagccttctccaaaatggacgagcaccgttcgaaagaggttatccagtacctgactgaaacactcggacttcagctgatgtttatcatgccgtccagtaaatccggcccctttatggatctcatcagcaaccagttcgtattcagcaaatgtgccacagagcaggctattggtgagcttcgcagcagagtgttggtggatcggcaggtattgaatcagtcggccatcaaagcgttaatgaacgaacatcgcagcactttgcggcatcaggccagtctggactttttagaagaaatggagcgggtaacgggggcgggctga

SEQ ID NO: 43302 - DNA, 1422 bp, Thermacetogenium phaeum DSM 12270
gtgggcctttttcaagtaatccccgaaaacctgttttcccttctatcatccaaaaacaaggagacctatctggacgggttgttcgtgctgcaccgagcctataaacaggagatgatcctcaccaaggaccaggtcgtatccatgctcatttcagagctggaagacaaaatcatggagatggacctggagggtgaagagatggtaccggagcgcaatttgtccgccctggctcacttcctcatccgaaagttccaccaaaccggctggatcgccctggaatacgccaccgattcctttgaggaacagattacgctgtacgactactccatcaaaatcctcaacaccctccacgatctgctggatacaacacccagggaatacaactctttggtctactccacctactcgttattgaagacggccaatgaagagagggatatgtacacatacaacgccctgatccaggcgtataaaaacacgaactcgctggtggatgaactgaaaagcctgctcaacaatatccggcgttaccaccaggcgttgctggatcagaccgaggttaaggggatcctcaaagagcacttcgacagctttaaagagatgattgaagataagatttaccatccactgaaaacctttgactccgtgccgcgctttaaagccccgatcatcaatattttaaaaggctggcttgccgacccggcaatactcgaccttttggtgacatccgcccggaggcgcaggcaggacaaagatgaagatgcattactagaagaaaccatcgtgatgatcgaggaaatcatcggcgtctatgaagggattgacatccttctcaaggagatcgacagaaaaaaggccgcttatacgcgggcttcagtggaaaagatggagtatctgctgaacaccgaccgcagcatcaaaggcaaactggtggaaatcctgaaagcagcaggggaaaaaggggaagaaagccggttgcagcaaatgatgcaggagtccctgaaccttttcccccagcgctttttggatgaagcctccctttacagcaggcaaaagccaagggccagggaaccggggcaaccgctcaagatgtcccaggcagttgacgacaccttactggagaaggaattggacgaccttttgaaccgggctaagaacagctacagcaccaggcgcatcatgaacttcatggagcggcagtttgccggtcggcaggtgatcgagaccggcgacctgatcatccggggagatgaagactttatcatggtcatactgggaatcttgaagcacgatgaggccgcggccttttaccggatcgagtttctcccaggttacctgctggttaacggatacaggctgcccatgatgcggttgagcagaaaggatgctgccccatgtggcttgatgaatacgagcagctga

SEQ ID NO: 43303 - DNA, 645 bp, Thermacetogenium phaeum DSM 12270
atgtggcttgatgaatacgagcagctgacccataccgaaaaggaagagttcattcgaatagcgaatcaactgctgagcaggacgtttatcgtcagggaccggtacagcagcaaagataagtgcctcaaattgaacccggactaccgcttcatagaaagacacctggaactcttccggcaatacctgcgcctctccgggtgggagttgcaaaaggacaacaactatggggtgatcgccctttacaaccgctttgacctgaacagggcgcgcttggataaaagaaccaccctcatcctctacgtcttgaggctcatctatgaagagaagcgggagaagctgtctttaaagcgggagattaccacctcggtaggagaggtcgtcgaaaagatgatcaacctcggtctgatcgacaaaaaaccgcccaacagggatctgctcaacgcctttggggcattgagcaggtatcagattatcgaacgcctggaaagcgatgtcacccaaccggagacgggaatcatcatctacccttccatcctgttcgtggtcaccaacgaaaaaatcagcgaaatctacgagctggcaggggcagatgcaaatgatgaagaggagaacacggaagaaatacttccggaggcggaggaataa

SEQ ID NO: 43304 - DNA, 3408 bp, Thermacetogenium phaeum DSM 12270
atgaagctgctgcaaaaactgcttctcatcaactggcactacatcgagcgggaactgatcgagttctccggcatcaactttttaacggggaaaaacgcctcagggaagtccaccatcatcgatgccctccagctgctgttcttgggggacaccagcggaaacttctttaacaaagcggcgaacgactactcccagcgaaccctgaaaggctatctgcggggagaagtggccgatgatggagggacggggtttatctacctgagagacggagtcttttccagctacattgtggcggaattcttcgacaccatcaaaaaaaagagcttctgcttcggtgtggtttttgatgtctacggagaggacaaccccactcacaagttcttcctcctggaggctccgcttcccgagcaccagttcatcctcaacaacaccccaatggactaccatacactgaggaatcacctcaacagcaccggaaagatcaaataccagtttttcgacagcaacaggagctacagggagtcctttctagggaagatgggtggcctgaacaacaaattcttcacccttttcaagaaagccgttcccttttccccgattatggacatcgaaaagtttatctgtgaattcgtctgtgatgtcagcaacagaatcgatatttccgacatgcaggccaacatccgccattataaacagttggaactagaagcggggttcgtcaaggaacggatcgagcgcctgaccgttatctcagcgaagtaccaggactaccttattgaaaaggaacgcctgctgcagcagtcctatctcatggacagggcacagctgcaggagtcggtcgacaggatcgacgccctgcgggaagcaatcaggcaaaataacgaaaaaatggtcagccttgccgcccaactagagaaaaaggaacaggaaataaaaaagctggacgaaaaaagggatcgccttctcaaggaaaaattcgagtccgacctgtacaagaaaacagaaagcctgaaaaaacagctggacgacctgaccgcgcagctgaaacagctcgacggggtccgccagcggctggccgagctgataacacgtacaggcaatacctggaaaagggcgctcaaggattacgccaaacatatcgccccggagaaggcccatgcctatgcctcattgcaaagggaagcggcgtatctgtccggcatcaaaccggacggcctgatttgtccggaaactcaaggagaacttgatgccgagcggttgcaggagatcagatcccggatgaaggccttccgcaatgaggtcgatgccctctactttgacaccagatcacggctggaagccgccagaaatcgggcggcagaactggcaagtgaaatcgccaatttaaaaaagggcatcaaaccctatgacgcgaaactcctggagctgcgccgggaaatcaaaaatcaactgcaacaacagtacggtcgagaggtgccggtggagatcttctgcgagctgatcgaggttcgcgacaaaaggtggcaggacgccctggagggctacctgcacacccaaaaattctacctgctggtaccgccggagtatttcgtcgccgctttgaaggtctacgaccggctgaaattcgagcgccagttttacgatatcggcctcgtggacataggaaagctgcaggaattgaaccccaaggtgaagcagggcagcctcgccgaagaggtggttacagacaatccatacgcaagggttttcgccgactacctgttgggccgggtgataaaatgcgagcgggtggaggacctgcgccaataccggacggccatcacccccaccggcatgctctaccataactttacagccagacagatcaaccccgaccggtggaaggtcccctacatcgggaaacaggcggtgaaaaaacagatcgaaatcaaggaacaggagctggccgggctcaaccaggagataagaaaaggcgagtttaggttcgaggtgctggaagggctgaaagagatagatccccttggagatgataccatcgcccacatcaccggcagcctgcagcagctgagaacctaccaggacctggtcggggaacgccggcaggtgcaggaggctctggaaaggatcgacctcagctatctggagaaactggaccgggaaattgaagaggtagaaaaacgaagaacagctgttgaagagcagcgggagcagttgaaaagggagaataacaagctggagtacgaaaacaacgccatcagagaagaaaaaatccccgcggaagagtcccggcgggccgactgcaagcagaggatcgacgaaaaatacgacgccgggtggatccgggaaaccggtgagccgcgcttcctgaaggaaatggaaaagagaggctccccccgcaagatcatagaggcctttcattcccagctggagagaaccaaaaaccaggcggaaaggaaatggcaggagctggtcagggcgcgctccgattacaaccgggactacaagatgtcctacgacatcaaccttccggagaacaccccctttgacgaggaactgacggaactaagggatacccacctggccgagtacgaagccaagatcaaggacgccagggaaaaggcccaaaaacagttccaggaggacttcatcagcaaactgaaacagaatatcgatacggtcagggggcagatcgaagaactcaatgacgccctgaaaaacgttgccttcggcagggagagctaccgtttcgagatcaagccgaaccccaactacaaaaggttctacgacatgatcaccgacagcatgctccttgaggggtacaacctcttttctcaggccttccaggcaaaacacagagacgccatcgacgaactgttcaaacagatcgtggatgtgggtgaaggggatctcagcgccgatcagagggcggaactggaaaggaacatcgagaagttcacggattaccgcacctacctgcagttcgatctgatttcgaaagatgaatcggggcgggagtcccgcctttccaaaaccatcaccaagaaatccggaggggagacccagacgcccttctacatctcggtgctggcctccttcgtccgggtttaccggctccagcagcgctacagaaacaaaaacaatacattgagactgatcgtttttgacgaggccttcaacaagatggaccaccagcgcatccaggaaagcatcaaactgctgcgcagcttcggcctgcaggcggtgatctgcgcccccacagaaaagatcggtgacatcgcccctctggtggaccggacgctctgcgtcaccaggctgaataatatcaccgtggtccgcgccttcgaccccagaaaactggaggatgaagatgaactaccagaacgttatcatcaacctgctgctcgataa

SEQ ID NO: 43305 - DNA, 1230 bp, Thermacetogenium phaeum DSM 12270
atgaactaccagaacgttatcatcaacctgctgctcgataaatacgagcagagccggcacttccggggcaacgctcgcgtaaacaggcgggtggcgctgaagttcgataagaagaactttcccctctacgacatcgagagggtcgatgtcaaagaggccatccaccacgccgcccttgagctgcagcagcgggggctgatcaccgtggaatggatgaagttcgaggtgggcaatatcatctcccgggtgtttctgaacctggagatggtcgccgaagcctatgccctcgtcaaccggaaagggaaaaaggacattctggtagaagcacggcgcaagctggaaaggctcagggagcaagttaccacaccctggatcaaagatttttgtagagagatgctgcaggaaatcgaggaaaagaaggaaatgcccagatacctgcccagagaagaggaaaagttcgacctcctggtgagggcgctgcaagggatagagcagaaaggggaagatgagcttttagaacggatcttcagccgccgttacctgggtggaagcaaggaatttgaaagaaagatccggagccgccttattaccattgtcaaaaactatctgctcccaggccgggacatggatgacgaagaggttctggaacacatcggcctgctcaaaacatcggaggaactctcctttttcggcccgctggtgatcgatctgcacgggcaggtgatcgatttttcccccttctgttatggggcatcgatgaacgcggaaatgatcagaaatttcgaggtatccaggctgccggtgaaccgggtggtcaccatcgagaacaaggcggcatacctggaatacatcaaaaacacccggccggagcgggaactggtggtctacctggccggtttctatagtccgctgaagcgcctgtttttagaaaaaatctataaccatctgcggaagcataccccccaggccgcttattaccactggggggatctggacctgggcggttttcagatcttcgtttacctgaaaaacctcatccccgagctgcaaccgcttcacatggatgtggcaacattaagggagaacgcccggtttgccgacactttcgacgataaataccggaagcggctggagcagcttttaaaacaggaggaatatgccgtctttttcgaggtcatcaacttcatgctgcaggcgggcatcaaactggagcaggaagccctggtataa

SEQ ID NO: 43306 - DNA, 1458 bp, Leptospira noguchii str. 2001034031
gtggactataaccttttgcaaagattatttcgttcctcttcaattcgtcttttaaaaaaagacaatgctccttttattatctattttttagaaaaatattttagaggttctgcgagaatttttgttccgtttgaggaactgaaaatactactccatcatgaattggaaaactttcgagaactcgaggaaacttttctctcaagaacagcggaagtttatataggagagtgggtcagcgaaaattttctatctcgccggattcgttctttggaaggttccgaagaaataattttggaaccgagtagcgagttagaaaaagtattttcttggatggatgatttacgttctttagaaaataaagaatcaatcggaacagaaactcgatttttttctgtgttaaataaactgaaggaaattgttgaagaaagtgtttccgatccaaaagaaaaaattagacaacttgaatctaaaagagacgaattagacgatcaaattaaaaagctaaccgaagggaaagagataatcacttttgcgagtgagagaattcgaggccaatacttatatgcaagaaaggaagcaataggtcttctctccgacttccgtcaggtggaaggtaattttacggaaataacaaaattcattcacaaaaagtatttagaagtcgttcaaaaaggggaaatattacaatttgctctcgacggtgacgaggaattgctccaatcagaacaaggtaaaagttttcaagctttctgggactttctcaggtccgaacaaagccaagaaaattttgaaagtatattagattctctttattcattaaaagacatccttgtcttggaggacagaaagttttttcgaaatttcaaacggaatctaagagaagccggatccaggataaacactgttgtttccagaatgtcggaacaactcaagaaaagtcttgtagagcgtacacttcgcgacaatcgaaggtctaaagcaattatttcggaaatcaaacatcttgttttggaaagaaagttcgatctttcggaagaaaacttttattcaatggaagaaatattcgttcatcttccgatggacaggcccctttggaaaggggattctgcggatactccaagacccattcaaatatccgggcctgacgacgaaatgatttctctagattttttagactcgattcgaggaatcaattttgaaatatacgaacaacgaattcaaacattgcttcgtagttttccagaagtttctctagaaaaagttttggaggagtttccagagaataacgggtttgaaagtatcgtagcatatgtttttatagctagcaagggggaatatcattctttggacgattcagaatcttttcttttttatcccgcgttcaatttcacacaaaaagaaactcagagtgtctatcgtgttcccaaagctacttatagagtgggtaaggatggataa

SEQ ID NO: 43307 - DNA, 564 bp, Leptospira noguchii str. 2001034031; identical to SEQ ID NO: 42851

SEQ ID NO: 43308 - DNA, 3357 bp, Leptospira noguchii str. 2001034031
atgacggatttattttcttccggcgagattactgcaaatacaggatatagattaaagtctcttgaaattctaaattgggggaccttcaacggtaaaatctggaaattgaattcgcaaggagaaacttttcttttaacgggagcaaacggatccggaaaatcgactttggtggatgcaatccttaccttactggttccctctactaaaagaaattataatttagcctcgggcttggagagtaaaaaacgggatagatcagaaaaatcctatgtggaaggacactatggccgagcttcctcaggcagcgagggaatccttaaaatccgaggaaaacaggaagaatgttattccgttctttcagccgttttcaacgctaaaggaaaatttcctattatcagaattgctcaaattttttggtttgaatccagcgacttaaaaaaaatttatctcatttccgacgaaagcttggatttcgaaaaagatttggttttaagaaatagaaccatcaaagaactccgatctgatctaaaaaattcgggcgccaggctttatgataatttcaaggcttacggggttgactttagaaagatggttggtctggaatctgagaaggcgattgatctctttaatcaaattgtagctataaaatcattaggtgttttgaatgaatttgttcgagaacatatgctcgaagcgaaagacaaaagatttagaatcgaagaattggacaggaatttttttgatttgaatgaaacatatgaaacgattctaagtgccagagaacaattacgactcctggagcctatagaaaaaaaagcattcgaatacagggattggaactctaaagtagaaggggttcaggaacttattttgtttgcacccgaatactttacgcaaaaaaaatacgaactttgtaaaaagaaagaacaggattatactctcgatttgttccgagttcaggaccacttaaaagaattaaattcgttaactgaatccttaaaaaaagaagaacgagaattgtattattcattagaaaataatgatactcgaaagcgaatttccgatttgaaaagaaaatttgaggaaattcagacaaatctaaataaacgtcgctccgaaagggaaaaatattccgagtatcttcttaaacttgatttagagaaagttttaatagaggattctttttattcgaattttcgtaaagccggcgaaaaacttcaaaaatccgattcgacccgtgattcaattagagatcgtcttacggatttaacagttaaacggaaggaatctaaagttgaatttgattcggtttattccgaattggaacatctcaaaaaaagtaaggataatcttcctagaatcgtgtcctccatgagggaaaaaatctctcaaggcctgggagtttccgaaaaaaaatttccatttgtctgtgaacttatccgtgtaaaggattccgagaaagaatggaccggcgcgttggaaagattattacataatttcggcttacgtatgttagttgacgaagaggattacaaagtgctttcctcttatgtgaattcttctcatctaggtggaaagatcgttttttccagaatgttgactcagggaggtcctattttacagccaaaggataaggacgaagttttttacaaactcgaaattaaaccttccttatctaaatttcaaaaagaatggctggaaacacagattctgaaggaatttggacatatctgcggggatctacaacgtttgcaaaaagaagaaaaagctcttactaaggaaggtctgatcaagtccggaaaaattcgtcacgaaaaggatgatcgtaaaaatataaacgacgcaagagattatattctagggtggaacaatcgggaaaaaatttctgcgcttgaatccgaatttatgagattgggcaaggtgatcgataagattgaatcggaaattaaaaaagttgaagaagagcaaaaacaaaacgacctatttagagacgacctcaaatcctttctacgcttcgaacagttctctcaaattgacgaccaaagtttggaagaacctcttgaacaaacacgaaaagaaatccaagatttggaagtcctttccgaggaatacggaaaattaaaagaacaatatgaatctgcaaaagttcgccttagcgaggcagagggcaaggaaaaagaaaccaccaaggaattgaccctcttagaagagcggttctcgaatttaaaaaaagaaatggaaaccttaaattccagaatcaaagagttcgaccctaacagacggactcgtttggaaccgatcttaaatgagcgtctcggacaagtaatctttaacttagattcgatcttagaacaagagcgaaagtttttggaagttcttattaaagaacggaatgattttattgagaaaagagattctatcggtgaagaattaaacaagggtatggatcgttatgtaaaaaaattcagggaagaagcggatcgagaagaattatcggtttctattttaaatgcagaagcatttgcagaattgacggaacggattcgtaaagataggctgcctgagttccaagataaattccgaaatctgatgtcagataaggtagctaaacaaattctagagtttaaggcggaacttgaggatgatgtttcagaaatcaaggaccggatagatgaactaaatgaatctttacgttatcttgactattctaaaggtaaatcttatattcaaatcagatacttcgaaacaaaagatcgggaaattataggaagtacaggttttaaagaattattgcggaatagtattccggatatgggagatagttctaataacgaagaaaaattttcaaggattcgagaattactcgggaaattgaaaggagagaatggatccgatcgttggtccaggctcgtaacggattctagaaattggttggacttccaggcggcagaatttcaaagagacacagacacgatcattcaggtttatgattcttcggcaggtaagtcgggtggtcaaaccgtaaaacttgcctatacaatccttgcctctgcgattgcttatcagtttaaaatccgcgagctaaattcgtttcgttttgtagtgatcgacgaaatgtttaataatttggataacgaaaattctagatacgctatggatcttttccgtcaattaggtttgcaattactcgttgtgaccccaatggataaaattacggtagtggaaccttacgtccagagtgttcattttgtaaaaaacaactcagatggtaatgattccagagtttatctaattacaaaggaaaaattagattcggagaaaatcgaaaatacagatcggaaagtgggaaatttatga

SEQ ID NO: 43309 - DNA, 1170 bp, Leptospira noguchii str. 2001034031; identical to SEQ ID NO: 42853

SEQ ID NO: 43310 - DNA, 1458 bp, Leptospira fainei serovar Hurstbridge str. BUT 6
atggattatcggattttaaatagattatttggctctcctgcaattcgtctgttgaaaaaggataacgctccttttatcttatattttttggaaaaatattttagggactctgggagaaattttgttccctttgaggaacttaagatattgctgcgtcatgaattagagaatatccgagaggtccatgatcttagtttatatagagaagcagaggtatatattagcgaatgggtgggagaaaattttctatatagaaggattcgttcttccgaaggaaatgaagaaattatattggagccgacgagcgaattggaaaaggttttctcctggatagaagacttgcgttctttaaacgaacgggaggcgataggaacggaatcccgtttcttttccgtgttaaataaattaaaggaaatcgtagaggagagcgtttcggatccgaaggagaaaatcaaacagctagaactaaaaagggatgttttagatgaacagatcggaaagctcaaattaggggatgaggtttccattttcccaagcgagcgaatccgaagccaatatgtatatgcgcgaaaggaagctttagcacttctttcggattttaggcaagtagaagggaattttaacgaaataaccaagttgatccataagaaatatttggatgtggcgcaaaagggagaaattttgcaattcgcattggatggagatcaggaattgcttcaatcggaacaaggaagaagttttcaagctttttgggattttctgaggtccgaaaaaagtcaggaaaaatttgaaagtatattagattctctttatttattaaaagatgtaatcgctttggatgatcgaaaatttttcagaaattttagacgtaatttgagagaggcgggaagcagagtaaacggggttgtttccagaatgtcggagcaactcaagaagagtcttgtagaaaggactcttcgagaaaatagaaggtctaaggaacttatctctgaaattaagaatatcgtaatcgaaagaagattcgattacgataatgaaaatttccattcaatggaggagattgagattcgtcttccgatggaacgtcctctttggacgggagacccggtagatgcttttaaatcgattcagatctcaaatgacgaagaggaatcgctgtcgattgattttttggagtcaatacgcggggtcgatttggaaatttacgaaaatagaatattaagtctacttcggagctatccggagataactttggaaaaggttctcgacacatttccagatgatatcggattcgagagcctggtcgcctatgtttggatcgccgcccgaggagaaaatcatttcctggacgatgtggaaacctttttatgttttccctctttgaaatcttctggagaccaaaaacttagcgcttatcgggttccaaaaggaatttatagggtaggcactgatggataa

SEQ ID NO: 43311 - DNA, 564 bp, Leptospira fainei serovar Hurstbridge str. BUT 6
atggataaaatagctctttttgctacagcagtattaaaactcttaaaaggaccaattggaatcgaatcggattttaaagcttgggataatcttcttacgtatgagagacaagtaagagaatactttgaaaaaatcggattatttctgcatttagatagagaggacggctatgcgtttttacgacaaacttccgaagatgagagcattgagtccgaagagaaacttcctgttttgactagaaggttgcctttaacaaaggaagaaactttatttcttgttctactacgcgaatgtatcatcgaactggaagaagcggacccatcaggatctgttgttcttagaaaaggggaaatatttgatcgcgttcgtcctttttttcctgattcttcagatgaaatcgacacccagaaaaagttcgaaaggctttttaaaaaggccgaagacatgggttttataaagcagatcgattcagatactgcacgaatagagaaaattttaaaagctaaaatcacagtttcggatttggaaagactgcgaacaaaatttaagcaaggatcagagtag

SEQ ID NO: 43312 - DNA, 3357 bp, Leptospira fainei serovar Hurstbridge str. BUT 6
atgctagatctattttcacccggtgaaatctccacaaatagcggatacagattaaaatctttggaaattttgaattgggggacctttcatggaaagatatggaagttgaattctgaaggcgagacttttctgctaacgggtgcaaatggatctggaaaatcgactttggtggatgcaatccttactttactggttccttcggcgaaaagaaattataatttagcttcaggactagaaagtaaaaagagggatagatcggagaaaacatacgttgaaggacattaccgtcggttcgcatccggtagtgagggaattctaaagatcagaggaaaacaagaggaatgctactctgttctatccgcaatattcgaagcaaaaggaaaaaatcctcaaattcggattgcccagattttctggttcgaatcgggagagctaagaaaaatctttctggtttcgaatgaaattcttgagtttgaaaaggatttgcttttaagtaacagaaccgttaaagagcttcgatctgacttaaaaaatagcggcgcaagaatttacgataattttaaagcatatgcagtagattttagaaaagcggtgggtctagcttctgaaaaagccacagatttattcaatcaaattgtggcgataaagtccttaggagttttaaacgaatttgtaagggagcacatgctcgaatccagagacaaaagagatagaatcgaagaattggataggaacttttcagatttaagcgaaacctaccaagctatcctaaatgccagagagcaattaaaactattggaaccgatagagcggaagggggcggaatatagggaatgggatgaaaaagttaggaatgtgcaggatttaatccggtttgttcctatatacttctcaaagaaaagttacgagcttcataaaattaaagaacaagagtatatcctcgatctttcccggattcaagaccgattaaaggtccttagcgaccaagttgagtcgttcaagagagatgagagggaattgtttaatgcattggaaaataatgatactcaaaagagaatttcagacctaaagagaaaatacgatgtgatctttttggagcaaaaaaggagaaggtcggaaaaggaaaaatattctgaatatcttcgaaagatcggtttgaaaaatgttttaactgaagaagtcttttactcgaattaccaaaaagcaggggaaaagctgtctgagaccgaatccactcgggaagagattcgagatcgactcggcgatttgatggttcaaaaaaaagagctggaatccgaatttcactctatacgttccgagttggaacatttgaagaaaaatagggaaaatctccccaaaactcagtccgagatacgcgccaagatgtccgaagaattgggactttccgaaaaaatgtttccttttgtatgtgagctaattcgggtcaaggattccgaaaaagaatggacgggagctttggaaaggcttttgagaagtttcggcttacggatgttagttactgaagaggaatatgaaaaagtttcggggtatgtgaattcctcctatttgggtggaaaacttgttttttctcggatgttatcatctgccggaccattattgcaacctaaagatagggatgaagtattttacaaattagaaataaagcccgacttgcagagatcccagaaagaatggttagaggctcagatcttaagggaattcgggcatatttgctctgacctacaaagattgagaaaggaagagaaggcagtcacgaaagaaggactcatcaaatctggaaaaattcgtcacgagaaagatgatcgcaagagtcttaacgacgcaagggactatatcttgggatggaataaccaggaaaaaatttccgctttggaaggcgagttcgtcaaattaggtcaagaagtatataaaatagaattggaaataaagaaagtcaaagaagaggaaatacaaaacgaccgtttgcgggacgatttgaaatcatttctgcgtttcgaacaattttctcaaatcgatgaccaaagtctcgaagaaccgatactagaaactcaaaagcaaatccaagacttggaaattctctccgttgaatacgggaaattaaaagaacaatacgaacttgcaaaagttcgcctatccgaagccgaaggtcgagaaaaggagactaccaaggaatttacaatcgttgaggagaggctttctaatttacgaaaagagatggatgaactaacttttaggatcaaagaaatcgatcccgaaatgtctgcgcaaataggcccagttatagcggaacgactgtctggcatggttattacacttgaatcaatctccgaaaatgaaagaaaatttttcgaaatgctgacaaatgaacgagacgatcatcttagaaaaagggattcgattggcgaagagttgaacaaggcgatggatcgttacgtgaaacgtttccaagaagaagcggatcgagaagaattgtcggtttccgttttaaatgcgggggcatttgcaaaattaactgaaagaattcgtaaggataggcttccggagtttcaagataagttccgagagatgatgtctgataaggttgccaaacaaattctggaatttaaggctgaattagaagacgacgtagccgaaataaaggaacggatcgacgaacttaatagttctttacggtatttggactattctaaaggaaaatcttatattcaaattcgatatttcgaaacgaaagatcgagaaatagtgggcgatataggttttaaagaaatgcttcgtgcaagtattcctgatgtgggtgattcttccaataatgaagagaaatttgccagaattcgggaacttttaggaaagctaaaaggtgaaaatgggaccgatcgttggtctagactcgtaaccgatccaagaaattggttagattttcaagcggcggaatttcatcgagagactgaagagatactgcaagtgtatgattcatcagccggaaaatccggaggacaaacggtaaagcttgcctacaccatacttgcttccgcgattgcctatcagtttaaaattcgagagcaagattcttttcgttttgtagtcatcgacgaaatgtttaataatttggaccatgaaaattccagatatgcaatggatctatttagacaattgggtttgcaattattggtcgtcaccccgatggacaagatttcggtcgtggaaccttatatacaaaatgtatattttgttaagaataatttggaaggaagcgattcgagagtctacagaataaaaaaggagaaattggatccggatgaaaatacgaatggggatcgaaaatcaggaaaattttga

SEQ ID NO: 43313 - DNA, 1167 bp, Leptospira fainei serovar Hurstbridge str. BUT 6
atgatttctttcgaagagatccgtaaaaagtcactatcttattataataagattttattccattccattttacgaatagattcttttccttgggaaattcctacaggaaaagtcgaacctgcagagttgattcggaatccttctctgcttgaagaaataaaggaaggatccaaagagcggaaagaattcgggttcagacttgtgtctgttcaaagagaaactagaaaattcggaatgcaaacacttcctgtgaaaatcgtattcgattcggaggacgactttttagctttcctgaataagcgcgatgaattcaaagactttcgatcggaatgtgagcgcatcctggcgaaaataccgcagcttaaggattggttgtcgaaaaatccactgacggttgtagaacaaaccggaaaatgggaagatctcctttctgtctgcgaatactttttaaagaaccctaaaccgaatttgtatattagggaattacctattcgagtttctacaaaatttatcgaagagaacaaagccgtgttacgaagtctcctagattttttaataccggaacacattgatcgagagggacgggattttgaatccagatatggattgaaaaaggcagaagcatctgttcgtctgcggatattagacgctgagatctcggaaaagtattgtggaggcttgacggatataagtatccccgtatccgattttttgaacttgcgcttaggcgagtgtaagcgggtatttattctagaaaataagaccaatttcgcaaatatttacaattttcttagttttccgaagctttctaacgcgatcgctattttcggacaaggattcggtttaggagtcctaaaagattgcgtatggcttaaaggaatggagatcttatattggggagatttggatgttcagggattcgagatactttccgtattgcgatcgcaatatccgcagacaaagtcgtttttgatggataaggaagtgtttcttaagtttcggaatttcgccgtcgatggggcgcattctaaatttttaaaattacagaatcttaccgaagcggagagtgaaacttggaactttctacgaacattggattctaaaaatcgtttagagcaagaacgaattccccacgattacgtaaagaaaagactgtcgactttttga

SEQ ID NO: 43314 - DNA, 1452 bp, Leptospira sp. Fiocruz LV3954
atggactataaacttttgcaaagattgcttcgttcttccgcaatccgtcttctgcgaaaagacaacgccccctttatcatctactttttggaaaaatattttagaagttctgcacgtactttcgttccgttcgaggagctgaaaattctacttcgttacgaattggaaaacttaaacgatcaggaagagatctccttacaaagaagcgcggacgtttatctgggagaatggattggagaaaattttctgacccggaggatacgatccgcggagggaatcgaagagatcatattggaaccctcggtcgaattggaaaaagtattctcctggatggaagacatacgatccttggaagataaggacgtgatcggcacggaatcccgttttttttccgtattaaataaattgaaagagattgtggaagagagcgtttccgatccggaggagaaaattcgacaattggaattcaagcgggacgaattggatcttcaaattcgaaaactcaaggcgggagaacaagtatccaaatttccgagcgaaagaattcggagccaatatgtgtatgcgcgaaaggaagcgttgggattactttcggatttccgacaagtggaaggtaattttatggaaataacgaagatgattcataaaaaatatctggaggtcgttcagaaaggggaaattttacgatttgctttggacgggaacgacgagttacttcgatcggaacagggtcgtagtttccaaaccttttgggattttttacgatccgaacgaagtcaggaacaattcgaaagtatattagattctttgtattcactggaagacgttctagatttggactcgagaaagtttttccggaattttaggagaaatttaagagaagcgggttctcgggtaaacggagtcgttacccgtatgtcggaacagctcaaaaaaagtttggtggaacgtacacttcgtgaaaaccgcagatcgaaagaacttatcgcggaaattaagaatttggtcttggagaatccactcgatttttctcagacggatttttattctttggaggaaatggatgttcgttttccgatggaaaggcctctttggcgcggcgatccggaggagacgtttcgaaccgtccggatcgaaaatacggatgaggatgaaaatgtattcgatattctggaatcgatccgaggaatcgatttggaaatgtacgaacaacggatccaaacgttgcttcgtatttctccggaggtttctttggaaaaggttttgcgggaatatccggacgacgtctgctttgaaagtttagtcgcttatgtttggattgcgggtaacggagaatttcattccttggacgattcggaaacctttgtatattccgtttccataatggatcatccttcggaaaaacttgcgtatcgaattcctaagggaacatatagagtgggtcatttatga

SEQ ID NO: 43315 - DNA, 564 bp, Leptospira sp. Fiocruz LV3954
atgaataaaccgcatatctacgcagcttctattctcaggttgttgaaaggatcgatcaacagcgagtccgatgcaaagatttggaagaatcttttggacaacgaaaaatcggtgcgggaacactttgaaaaactgggtatttttttgcacttggatcgggaagacggttatgcgtttctacgacagacttcggacgacgaaagtgcagaatcggatgagaaacttcccgtgatcacccgtaaacttccgcttacgaaagaagagactttgtttctaattctactgagggaatgtatcatagaaatcgaagaaaaagatccttccggttccatcctttttagaaaggaagagctatcggataaagtgagtccttttttctccgacctctccgatgaaatcgatcggcaaaaaagattcgaaaaattacttcgcaaatccgaagaactaggctttgtcaaacagatcgagccggaaacgattcggatcgaaaaactcttaaaggcgaaattgaccgtatccgagttagagggtttacgcggtaagtttcgactaggaacggaatag

SEQ ID NO: 43316 - DNA, 3357 bp, Leptospira sp. Fiocruz LV3954
atgactgatttattttcacccggtgaaattgccgccaataccggatataggcttgaattcttggaaattttaaattggggaacttttcacggtaggatttggaaattacgaccggaaggggaaaattttcttttaaccggagcgaacggttccggcaaatcaacgttagtcgacgcgattcttacgctgctcgttccggccgcaaaacgaaattataatctggcttcgggactggaaagtaaaaagagagatcgatcggaacgatcttatgtggaaggtcactacggtagatcctcttccggtagcgaaggaattttgaaaattcgcgggaaacaagaagagtgttattccgttttatcggcggtattcgaagcgaatggaaggttcccgcgaattcggattgcgcagatcttttggttcgaatccggagaattgaaaaagatctaccttttttccgataaagagttggacttcgaaaaagatctggttttgggaaaaagaaccgtaaaggaattgaaagcggatctgaaaaattccggggcaagactttacgatcagttcaaggcgtataacgtggattttaggaaagcggtgggtttggaatcggagaaagcgatcgacctattcaatcaaatcgtagccatcaaatccttaggagtgttgaacgaattcgtccgagaacatatgctcgagtccagggataaaagatccaggatcgaggaattgaatcgtaatttttccgatctgagcgaaacatacgaggcgattgtaaacgcaaaagaacagttgaagttgttggaaccgatcgaaaaaaaagccgccgagtatagggaatggaatcggaaggcggccgatcttcaggctttgatcgtatatgttccgtattattttgcggaaaaaaattacgagcttcgtcaaatcagagaacaggattatctttttgaattatcgcgtttgaaagacagatccgacgaactatcgactgaaatcgaatccttaaatcaagaggaacggaagttattcaacgcattggaaaacaatgatactcaaaggagaatcgccgatcttgtacgaaaacgggaggggattctctccgatctcaaaacgcggggaatcgaaaggaaaaaatattcctcctatctttccaaaatcggtttggaggaaaccttctccgaagaaacattctatacgaacctgcgcatagccggaggaatgcttacggaaaccgattcgatttgggaagaaatcagggatcgattgggaaagctgacgcttcaaaaaatggaattgcaaaaaaatttcgattcggttcgttccgaattggagtatctgaaaaaaaagcgggataatcttcccagaacccagtcggaaattcgggcaaaaattgcctccggaatcggactttccgaaaaaagatttccctttatttgcgaattgatccgcgtcaaagaatccgaaaaagaatggaccggggctttggaaaggctcttgagaaatttcggcttacggatgttagtcgcggaagaggactacgaggccgtgtcggcttacgtgaattcttcctatctgggagggaagttggttttttcaagaatggttcccttatcgggaccgatcttgcaacccaaagacaaggaagaagttttctacaagttggaattgaaatcggaattgtcgaacgtaaagaaagaatggttggaagcgcagatactgcgcgagttcggacatatctgcggggatctgaatcgtctccggaaagaggagaaggctcttacaaaagaaggtctgattaagtccggtagaattcgacacgagaaggacgatcgtaagaacatttcggacgcaagagattatattttaggctggaacaatacggagaaaatcgccgcgttggaatccgaatttgcccttctcgggcagaacatttatcggctgaattctgcaatcgatctagtcagagaagaggaaaacaaaaacaaaaacaaacgggacgacctgcttctctttctacgtttcgaacaattttcacaaatcgacgacgaaagtttaaaaggtccgcttcaggatacggaaagacaaatccgggaattggaattgcgttccgaagaatacgggaagttgaaggaacaatacgaactcgcaaaagctcgcctaacggatgttcaaggaagacaacgggaaaccgccaaggaattcaacgttttagaggataggctttccactcttcggaaggacatggaagatctacagcagaggatccgaaaagtcgaccgggaaacgtcgatttcactggagccgattctcaacgaacgactgcgggaaacgatcctaaccctggagtcgatcgcggagacggaacggaatttttcggatcgtttggttgtagagcgcgatcaatatttggagaaacgagattcgatcggagaagaattgaacaaaggaatggatcgttatgtgaaacgattccgagaggaggcggatcgggaagaattgtccgtttcggtttccaacgcggaagggtttgcgaaattgaccgaaaggattcggcaggatcgattgcccgaatttcaggaaaaatttcgaacgatgatgtccgacaaagtcgcaaaacagattttggacttcaaggcggaattggacgacgacgtctcggaaatcaaggaaaggatcgacgaactgaacgattcgttaaaggatctggattattctaaaggaaaatcttatattcaaattcgatattttgataccaaggatcgggagattgtgggcgattccggctttaaggaaatgttacgcggaagcattccggatttgggagacagttctcacaacgaggaaaaattcgctaaaatcagagagttgttgaaaaagttaaagggagagggcggtagcgatcgttggtccagactcgtaacggatcccaggaactggctggatttccaagcggcggaattccttagggataacaaccaaattcttcaggtttacgattcgtccgcgggtaagtcgggaggacaaacggtaaaactcgcttacacgattctcgcttcggcgatcgcttatcaattcaaaattcgcgaacggaattcgtttcgttttgtggtgatcgatgaaatgttcaacaatctggacggagagaattcaaggtatgcgttgaacctctttcgtcaattgggtttacaattgcttgtcgtaactccgatggataagattacgatcgtagaaccttatgtgagaagcgttcattttgtgaagaacaattcggaaggaaacgattccagagtgtatccgatttcgaaggaaaatgtatcgtccgggaaggatgaaaattcggaaaggaaagtgggaaatttatag

SEQ ID NO: 43317 - DNA, 1179 bp, Leptospira sp. Fiocruz LV3954
atgatttctccggaaattttacgcaagagatcgctggcatactatcataacgaactcttacgttccatcgtcctgggaggtgttttatttccttgggagatttcgatcggtaaagttcttccggaagagatcttaaaaaatccgtctttgttgcgagaattacgggccgaatcgaaagaaaacaaaggtttcggatttagaatcgtctttcgttcgaaagagacccggaaatacggaatacaaacgattcctacgaaaatcgtttttgataccgaagacgattttttgcgttttacaaaaaagaaagacgaattcctctcctatagcaccgattgtacgttgattctttccgttcttcccgagctgaaagattggattttaaaaaatacgttatccgtaatcgaagagtccggtaaatgggaaagtattctttcggtctgttcctattttttagaatataggaatcccggattgtatatccgagaactaccgattcgaattcctacgaaattcatcgaggaaaataaaaaggttttgagaagtcttttggattttctattgcctgagatcgcggatgcgaaggatttcgaaactcgttacggattaaaaaaagcggaacctttggttcgatttcgaattttggatctcgaaattgcaaagtcttccaccggaggtttaacggatttgagcattcccgtccgggattttagaaggttggaactctccggttgtggaagggtttttatcttggaaaataaaacgaatttcgcgaacctattcaattttttaagttttccgcaactgaagggaacgatctccattttcggtcagggtttcggattaaacgttttaaaggattgtagctggttggagaaaatggaaattttttattggggagatctggacgttcagggtttcgaaatcctgtcgcaactacgggaacaatatcctcaaagccgttcctttttaatggacctgaagacatttgttcggtttcgagactttgcggtagacggtatttcttcttctaaatcttccgaaccgaaatttctcactccatcggagcgcgaaacttggaagtatttaagttctttagattcgaaaaatcggttggaacaggagaaaatccctcacgaatacgtgcaagaagttctgtccggtttggatggatcgcagtaa

SEQ ID NO: 43318 - DNA, 1452 bp, Leptospira santarosai str. AIM
atggactataaacttttgcaaagattgcttcgttcttccgcaatccgtcttctgcgaaaagacaacgccccctttatcatctactttttggaaaaatattttagaagttctgcacgtactttcgttccgttcgaggagctgaaaattctacttcgttacgaattggaaaatttaaacgatcaggaagagatctccttacaaagaagcgcggacgtttatctgggagaatggattggagaaaattttctgacccggaggatacgatccgcggagggaatcgaagagatcatattggaaccctcggtcgaattggaaaaagtattctcctggatggaagacatacgatccttggaagataaggacgtgatcggcacggaatcccgttttttttccgtattaaataaattgaaagagattgtggaagagagcgtttccgatccggaggagaaaattcgacaattggaattcaagcgggacgaattggatcttcaaattcgaaaactcaaggcgggagaacaagtatccaaatttccgagcgaaagaattcggagccaatatgtgtatgcgcgaaaggaagcgttgggattactttcggatttccgacaagtggaaggtaattttatggaaataacgaagatgatccataaaaaatatctggaggtcgttcagaaaggggaaattttacgatttgctttggacgggaacgacgagttacttcgatcggaacagggtcgtagtttccaaaccttttgggattttttacgatccgaacgaagtcaggaacaattcgaaagtatattagattctttgtattcattggaagacgttttggagctggactcgagaaagtttttccggaattttaggagaaatttaagagaagcgggttctcgggtaaacggagttgttacccgtatgtcggaacagctcaaaaaaagtttggtggaacgtacacttcgtgaaaaccgcagatcgaaagaacttatcgcggaaattaagaatttggtcttggagaatccactcgatttctctcagacggatttttattctttggaggaaatggatgttcgttttccgatggaaaggcctctttggcgcggcgatccggaggagacgtttcgaaccgtccggatcgaaaatacggatgaggatggaaatgtattcgatattctggaatcgatccgaggaatcgatttggaaatgtacgaacaacggatccaaacgttgcttcgtatttctccggaggtttctttggaaaaggttctgcgggaatatccggacgacgtctgctttgaaagtttagtcgcttatgtttggattgcgggtaacggagaatttcattccttggacgattcggaaacctttgtatattccgtttccataatggatcatccttcggaaaaacttgcgtatcgaattcctaagggaacgtatagagtgggccatttatga

SEQ ID NO: 43319 - DNA, 564 bp, Leptospira santarosai str. AIM
atgaataaaccgtatgactatgcaccttccattcttagattgttgaaaggatcgatcaacagcgagtccgatgcaaagatttggaagaatcttttggacaacgaaaaatcggtgcgggaacactttgaaaaactgggtatttttttgcacttggatcgggaagacggttatgcgtttctacgacagacttcggacgacgaaagtgcagaatcggatgagaaacttcccgtgatcacccgtaaacttccgcttacgaaagaagagactttgtttctaattctattgagggaatgtatcatagaaatcgaagaaaaagatccttccggttctatcctgtttagaaaggaagagctatcggataaagtgagtccttttttctccgacctctccgatgaaatcgatcggcaaaaaagattcgaaaaattacttcgcaaatccgaagaactaggctttgtcaaacagatcgagccggaaacgattcggatcgaaaaactcttaaaggcgaaattgaccgtatccgagttagagggtttacgcggtaagtttcgactaggaacggaataa

SEQ ID NO: 43320 - DNA, 3357 bp, Leptospira santarosai str. AIM
atgactgatttattttcacccggtgaaattgccgccaataccggatatagacttgaattcttggaaattttaaattggggaacttttcacggtaggatttggaaattacgaccggaaggggaaaactttcttttaaccggagcgaacggttccggcaaatccacgttagtcgacgcgattcttacgctgctcgttccggccgcaaaacgaaattataatctggcttcgggactggaaagtaaaaagagagatcgatcggaacgatcttatgtggaaggtcactacggtagatcctcttccggtagcgaaggaattttgaaaattcgcgggaaacaagaagagtgttattccgttttatcggcggtattcgaagcgaatggaaggttcccgcgaattcggattgcgcagatcttttggttcgaatccggagaattgaaaaagatctaccttttttccgataaagagttggacttcgaaaaagatctggttttgggaaaaagaaccgtaaaggaattgaaagcggatctgaaaaattccggggcaagactttacgatcagttcaaggcgtataacgtggattttaggaaagcggtgggtttggaatcggagaaagcgatcgacctattcaatcaaatcgtagccatcaaatccttaggagtgttgaacgaattcgtccgagaacatatgctcgagtccaaggataaaagatccaggatcgaggaattgaatcgtaatttttccgatctgagcgaaacatacgaggcgattgtaaacgcaaaagaacagttgaagttgttggaaccgatcgaaaaaaaagccgccgagtatagggaatggaatcggaaggcggccgatcttcaggctttgatcgtatatgttccgtattattttgcggaaaaaaattacgagcttcgtcaaatcagagaacaggattatctttttgaattatcgcgtttgaaagacagatccgacgaactatcgactgaaatcgaatccttaaatcaagaggaacggaagttattcaacgcattagaaaacaatgatactcaaaggagaatcgccgatcttgtacgaaaacgggaggggattctctccgatctcaaaacgcggggaatcgaaaggaaaaaatattcctcctatctttccaaaatcggtttggaggaagcgtcctccgaagaaacattctatacgaacctgcgcatagccggaggaatgcttacggaaaccgattcgatttgggaagaaatcagggatcgattgggaaagctgacgcttcaaaaaatggaattgcaaaaaaatttcgattcggttcgttccgaattggagtatctgaaaaaaaagcgggataatcttcccagaacccagtcggaaattcgggcaaaaattgcctccggaatcggactttccgaaaaaagatttccctttatttgcgaattgatccgcgtcaaagaatccgaaaaagaatggacgggggctttggaaaggctcttgagaaatttcggcttacggatgttagtcgcggaagaggactacgaggccgtgtcggcttacgtgaattcttcctatctgggagggaagttggttttttcaagaatggttcctttatcgggaccgatcttgcaacccaaagacaaggaagaagttttctacaagttggaattgaaatcggaattgtcgaacgtaaagaaagaatggttggaagcgcagatactgcgcgagttcggacatatctgcggggatctgaatcgtcttcggaaagaggagaaggctcttacaaaagaaggtctgattaagtccggtagaattcgacacgagaaggacgatcgtaagagcatttcggacgcaagagattatattttaggttggaacaatacggagaaaatcgccgcgttggaatccgaatttgcccttctcgggcagaacatttatcggctgaatgctgcaatcgacctgatcagagaagaggaaaacaaaaacaaaaacaaacgggacgacctgcttctctttctacgtttcgaacaattttcacaaatcgacgacgaaagtttgaaaggcccgcttcaggatacggaaagacaaatccgggaattggaattgcgttccgaagaatacgggaagttgaaggaacaatacgaactcgcaaaagctcgcctaacggatgttcaagggagacaacgggaaaccgccaaggaattcaatgttttagaggataggcttttcactcttcggaaggacatggaagatctacagcagagggtccgaaaagtcgaccgggaaacgtcgatttcactggagccgattctcaacgaacgactgcgggaaacgatcctaaccctggagtcgatcgcggagacggaacgaaatttttcggatcgtttggttgtagagcgcgatcaatatttggagaaacgagattcgatcggagaagaattgaacaaaggaatggatcgttatgtgaaacgattccgagaggaggcggatcgggaagaattgtccgtttcggtttccaacgcggaagcgtttgcgaaattgaccgaaaggattcggcaggatcgattgcccgaatttcaggaaaaatttcgaacgatgatgtccgacaaagtcgcaaagcagattttggacttcaaggcggaattggacgacgacgtctcggaaatcaaggaaaggatcgacgaactgaacgattcgttaaaggatctggattattctaaaggaaaatcttatattcaaattcgatattttgataccaaggatcgggagattgtgggcgattccggctttaaggaaatgttacgcggaagcattccggatttgggagacagttctcacaacgaggaaaaattcgctaaaatcagagagttgttgaaaaagttaaagggagagggcggtagcgatcgttggtccagactcgtaacggatcccaggaactggctggatttccaagcggcggaattccttagggataacaaccaaattcttcaggtttacgattcgtccgcgggtaagtcgggaggacaaacggtaaaactcgcttacacgattctcgcttcggcgatcgcttatcaattcaaaattcgcgaacggaattcgtttcgttttgtggtgatcgatgaaatgttcaacaatctggacggagagaattcaagatatgcgttgaacctctttcgtcaattgggtttacaattgcttgtcgtaactccgatggataagattacgatcgtcgaaccttatgtgagaagcgttcattttgtgaagaacaattcggaaggaaacgattccagagtgtatccgatttcgaaggaaaatgtatcgtccgggaaggatgaaaattcggaaaggaaagtgggaaatttatag

SEQ ID NO: 43321 - DNA, 1179 bp, Leptospira santarosai str. AIM
atgatttctccggaaattttacgcaagagatcgctggcatactatcataacgaactcttacgttctatcgtcctgggaggtgttttatttccttgggagatttcgatcggtaaagttcttccggaagagatcttaaaaaatccgtcgttgttacgagaattacgggccgaatcgaaagaaaacaaaggtttcggatttagaatcgtctttcgttcgaaagagacccggaaatacggaatacaaacgattcctacgaaaatcgtttttgataccgaagacgattttttgcgttttacaaaaaagaaagacgaattcctctcctatagaaccgattgtacgttgattctttccgttcttcccgagctgaaagattggattttaaaaaatacgttatccgtaatcgaagagtccggtaaatgggaaagtattctttcggtctgttcctattttttagaatataggaatcccggattgtatatccgagaactaccgattcgaattcctacgaaattcatcgaggaaaataaaaaggttttgagaagtcttttggattttctattgcctgagatcgcggatgcgaaggatttcgaaactcgttacggattaaaaaaagcggaacctttggttcgatttcgaattttggatctcgaaattgcaaagtcttccaccggaggtttaacggatttgagcattcccgtccgggattttagaaagttggagctctccggttgtggaagggtttttatcttagaaaataaaacgaatttcgcgaacctattcaattttttaagttttccgcaactgaagggaacgatctccattttcggtcagggtttcggattaaacgttttaaaggattgtaattggttggagaaaatggaaattttttattggggagatctggacgttcagggtttcgaaatcctgtcgcaactacgggaacaatatcctcaaagccgttcctttttaatggacctgaagacatttgttcggtttcgagactttgcggtagacggtatttcttcttctaaatcttccgaaccgaaatttctcactccatcggagcgcgaaacttggaagtatttaagttctttagattcgaaaaatcggttggaacaggagaaaattcctcacgaatacgtgcaagaagttctgtccggtttgggtggatcacagtaa

SEQ ID NO: 43322 - DNA, 1452 bp, Leptospira santarosai str. JET
atggactataaacttttgcaaagattgcttcgttcttccgcaatccgtcttctgcgaaaagacaacgccccctttatcatctactttttggaaaaatattttagaagttctgcacgtactttcgttccgttcgaggagctgaaaattctacttcgttacgaattggaaaacttaaacgatcaggaagagatctccttacaaagaagcgcggacgtttatctgggagaatggattggagaaaattttctgacccggaggatacgatccgcggagggaatcgaagagatcatattggaaccctcggtcgaattggaaaaagtattctcctggatggaagacatacgatccttggaagataaggacgtgatcggcacggaatcccgttttttttccgtattaaataaattgaaagagattgtggaagagagcgtttccgatccggaggagaaaattcgacaattggaattcaagcgggacgaattggatcttcaaattcgaaaactcaaggcgggagaacaagtatccaaatttccgagcgaaagaattcggagccaatatgtgtatgcgcgaaaggaagcgttgggattactttcggatttccgacaagtggaaggtaattttatggaaataacgaagatgatccataaaaaatatctggaggtcgttcagaaaggggaaattttacgatttgctttggacgggaacgacgagttacttcgatcggaacagggtcgtagttttcaaaccttttgggattttttacgatccgaacgaagtcaggaacaattcgaaagtatattagattctttgtattcattggaagacgttttggagctggactcgagaaagtttttccggaattttaggagaaatttaagagaagcgggttctcgggtaaacggagtcgttacccgtatgtcggaacagctcaaaaaaagtttggtggaacgtacacttcgtgaaaaccgcagatcgaaagaacttatcgcggaaattaagaatttggtcttggagaatccactcgatttctctcagacggatttttattctttggaggaaatggatgttcgttttccgatggaaaggcctctttggcgcggcgatccggaggagacgtttcgaaccgtccggatcgaaaatacggatgaggatggaaatgtattcgatattctggaatcgatccgaggaatcgatttggaaatgtacgaacaacggatccaaacgttgcttcgtatttctccggaggtttctttggaaaaggttctgcgggaatatccggacgacgtctgctttgaaagtttagtcgcttatgtttggattgcgggtaacggagaatttcattccttggacgattcggaaacctttgtatattccgtttccataatggatcatccttcggaaaaacttgcgtatcgaattcctaagggaacgtatagagtgggccatttatga

SEQ ID NO: 43323 - DNA, 564 bp, Leptospira santarosai str. JET
atgaataaaccgtatgactatgcaccttccattcttagattgttgaaaggatcgatcaacagcgagtccgatgcaaagatttggaagaatcttttggacaacgaaaaatcggtgcgggaacactttgaaaaactgggtatttttttgcacttggatcgggaagacggttatgcgtttctacgacagacttcggacgacgaaagtgcagaatcggatgagaaacttcccgtgatcacccgtaaacttccgcttacgaaagaagagactttgtttctaattctattgagggaatgtatcatagaaatcgaagaaaaagatccttctggttccatcctgtttagaaaggaagagctatcggataaagtgagtccttttttctccgacctctccgatgaaatcgatcggcaaaaaagattcgaaaaattacttcgcaaatccgaagaactaggctttgtcaaacagatcgagccggaaacgattcggatcgaaaaactcttaaaggcgaaattgaccgtatccgagttagagggtttacgcggtaagtttcgactaggaacggaataa

SEQ ID NO: 43324 - DNA, 3357 bp, Leptospira santarosai str. JET
atgactgatttattttcacccggtgaaattgccgccaataccggatatagacttgaattcttggaaattttaaattggggaacttttcacggtaggatttggaaattacgaccggaaggggaaaactttcttttaaccggagcgaacggttccggcaaatccacgttagtcgacgcgattcttacgctgctcgttccggccgcaaaacgaaattataatctggcttcgggactggaaagtaaaaagagagatcgatcggaacgatcttatgtggaaggtcactacggtagatcctcttccggtagcgaaggaattttgaaaattcgcgggaaacaagaagagtgttattccgttttatcggcggtattcgaagcgaatggaaggttcccgcgaattcggattgcgcagatcttttggttcgaatccggagaattgaaaaagatctaccttttttccgataaagagttggacttcgaaaaagatctggttttgggaaaaagaaccgtaaaggaattgaaagcggatctgaaaaattccggggcaagactttacgatcagttcaaggcgtataacgtggattttaggaaagcggtgggtttggaatcggagaaagcgatcgacctattcaatcaaatcgtagccatcaaatccttaggagtgttgaacgaattcgtccgagaacatatgctcgagtccaaggataaaagatccaggatcgaggaattgaatcgtaatttttccgatctgagcgaaacatacgaggcgattgtaaacgcaaaagaacagttgaagttgttggaaccgatcgaaaaaaaagccgccgagtatagggaatggaatcggaaggcggccgatcttcaggctttgatcgtatatgttccgtattattttgcggaaaaaaattacgagcttcgtcaaatcagagaacaggattatctttttgaattatcgcgtttgaaagacagatccgacgaactatcgactgaaatcgaatccttaaatcaagaggaacggaagttattcaacgcattagaaaacaatgatactcaaaggagaatctccgatcttgtacgaaaacgggaggggattctctccgatctcaaaacgcggggaatcgaaaggaaaaaatattcctcctatctttccaaaatcggtttggaggaagcgttctccgaagaaacattctatacgaacctgcgcatagccggaggaatgcttacggaaaccgattcgatttgggaagaaatcagggatcgattgggaaagctgacgcttcaaaaaatggaattgcaaaaaaatttcgattcggttcgttccgaattggagtatctgaaaaaaaagcgggataatcttcccagaacccagtcggaaattcgggcaaaaattgcctccggaatcggactttccgaaaaaagatttccctttatttgcgaattgatccgcgtcaaagaatccgaaaaagaatggacgggggctttggaaaggctcttgagaaatttcggcttacggatgttagtcgcggaagaggactacgaggccgtgtcggcttacgtgaattcttcctatctgggagggaagttggttttttcaagaatggttcctttatcgggaccgatcttgcaacccaaagacaaggaagaagttttctacaagttggaattgaaatcggaattgtcgaacgtaaagaaagaatggttggaagcgcagatactgcgcgagttcggacatatctgcggggatctgaatcgtcttcggaaagaggagaaggctcttacaaaagaaggtctgattaagtccggtagaattcgacacgagaaggacgatcgtaagagcatttcggacgcaagagattatattttaggttggaacaatacggagaaaatcgccgcgttggaatccgaatttgcccttctcgggcagaacatttatcggctgaattctgcaatcgacctgatcagagaagaggaaaacaaaaacaaaaacaaacgggacgacctgcttctctttctacgtttcgaacaattttcacaaatcgacgacgaaagtttgaaaggcccgcttcaggatacggaaagacaaatccgggaattggaattgcgttccgaagaatacgggaagttgaaggaacaatacgagctcgcaaaagcccgcctaatggatgttcaagggagacaacgggaaaccgccaaggaattcaacgttttagaggataggcttttcactcttcggaaggacatggaagatctacagcagaggatccgaaaagtcgaccgggaaacgtcgatttcactggagccgattctcaacgaacgactgagggaaacgatcctaaccctggagtcgatcgcggagacggaacggaatttttcggatcgtttggttgtagagcgcgatcaatatttggagaaacgagattcgatcggagaagaattgaacaaaggaatggatcgttatgtgaaacgattccgagaggaggcggatcgggaagaattgtccgtttcggtttccaacgcggaagggtttgcgaaattgaccgaaaggattcggcaggatcgattgcccgaatttcaggaaaaatttcgaacgatgatgtccgataaagtcgcaaaacagattttggacttcaaggcggaattggacgacgacgtctcggaaatcaaggaaaggatcgacgaactgaacgattcgttaaaggatctggattattctaaaggaaaatcttatattcaaattcgatattttgataccaaggatcgggagattgtgggcgattccggctttaaggaaatgttacgcggaagcattccggatttgggagacagttctcacaacgaggaaaaattcgctaaaatcagagagttgttgaaaaagttaaagggagagggcggtagcgatcgttggtccagactcgtaacggatcccaggaactggctggatttccaagcggcggaattccttagggataacaaccaaattcttcaggtttacgattcgtccgcgggtaagtcgggaggacaaacggtaaaactcgcttacacgattctcgcttcggcgatcgcttatcaattcaaaattcgcgaacggaattcgtttcgttttgtggtgatcgatgaaatgttcaacaatctggacggagagaattcaagatatgcgttgaacctctttcgtcaattgggtttacaattgcttgtcgtaactccgatggataagattacgattgtcgaaccttatgtgagaagcgttcattttgtgaagaacaattcggaaggaaacgattccagagtgtatccgatttcgaaggaaaatgtatcgtccgggaaggatgaaaattcggaaaggaaagtgggaaatttatag

SEQ ID NO: 43325 - DNA, 1179 bp, Leptospira santarosai str. JET
atgatttctccggaaattttacgcaagagatcgctggcatactatcataacgaactcttacgttccatcgtcctagggggtgttttatttccttgggaggtttcgatcggtaaagttcttccggaagagatcttaaaaaatccgtctttattacgagaattacgggccgaatcgaaagaaaacaaaggtttcggatttagaatcgtctttcgttcgaaagagacccggaaatacggaatacaaacgattcctacgaaaatcgtttttgataccgaagacgattttttgcgttttacaaaaaagaaagacgaattcctctcctatagcaccgattgtacgttgattctttccgttcttcccgagctgaaagattggattttaaaaaatacgttatccgtaatcgaagagtccggtaaatgggaaagtattctttcggtctgttcctattttttagaatataggaatcccggattgtatatccgagaactaccgattcgaattcctacgaaattcatcgaggaaaataaaaaggttttgagaagtcttttggattttctattgcctgagatcgcggatgcgaaggatttcgaaactcgttacggattaaaaaaagcggaacctttggttcgatttcgaattttggatctcgaaattgcaaagtcttccaccggaggtttaacggatttgagcattcccgtccgggattttagaaggttggaactctccggttgtggaagggtttttatcttggaaaataaaacgaatttcgcgaacctattcaattttttaagttttccgcaactgaagggaacgatctccattttcggtcagggtttcggattaaacgttttaaaggattgtagctggttggagaaaatggaaattttttattggggagatctggacgttcagggtttcgaaatcctgtcgcaactacgggaacaatatcctcaaagccgttcctttttaatggacctgaagacatttgttcggtttcgagactttgcggtagacggtatttcttcttctaaatcttccgaaccgaaatttctcactccatcggagcgcgaaacttggaagtatttaagttctttagattcgaaaaatcggttggaacaggagaaaatccctcacgaatacgtgcaagaagttctgtccggtttggatggatcgcagtaa

SEQ ID NO: 43326 - DNA, 1452 bp, Leptospira santarosai str. 200403458; identical to SEQ ID NO: 42866

SEQ ID NO: 43327 - DNA, 564 bp, Leptospira santarosai str. 200403458; identical to SEQ ID NO: 42867

SEQ ID NO: 43328 - DNA, 3357 bp, Leptospira santarosai str. 200403458; identical to SEQ ID NO: 42868

SEQ ID NO: 43329 - DNA, 1179 bp, Leptospira santarosai str. 200403458; identical to SEQ ID NO: 42869

SEQ ID NO: 43330 - DNA, 1452 bp, Leptospira santarosai str. CBC1416
atggactataaacttttgcaaagattgtttcgttcttccgcaatccgtcttctgcgaaaagacaacgccccctttatcatctactttttggaaaaatattttagaagttctgcacgtactttcgttccgttcgaggagctgaaaattctacttcgttacgaattggaaaacttaaacgatcaggaagagatctccttacaaagaagcgcggacgtttatctgggagaatggattggagaaaattttctgacccggaggatacgatccgcggagggaatcgaagagatcatattggaaccctcggtcgaattggaaaaagtattctcctggatggaagacatacgatccttggaagataaggacgtgatcggcacggaatcccgttttttttccgtattaaataaattgaaagagattgtggaagagagcgtttccgatccggaggagaaaattcgacaattggaattcaagcgggacgaattggatcttcaaattcgaaaactcaaggcgggagaacaagtatccaaatttccgagcgaaagaattcggagccaatatgtgtatgcgcgaaaggaagcgttgggattactttcggatttccgacaagtggaaggtaattttatggaaataacgaagatgatccataaaaaatatctggaggtcgttcagaaaggggaaattttacgatttgctttggacgggaacgacgagttacttcgatcggaacagggtcgtagttttcaaaccttttgggattttttacgatccgaacgaagtcaggaacaattcgaaagtatattagattctttgtattcattggaagacgttttggagctggactcgagaaagtttttccggaattttaggagaaatttaagagaagcgggttctcgggtaaacggagttgttacccgtatgtcggaacagctcaaaaaaagtttggtggaacgtacacttcgtgaaaaccgcagatcgaaagaacttatcgcggaaattaagaatttggtcttggagaatccactcgatttctctcagacggatttttattctttggaggaaatggatgtgcgttttccgatggaaaggcctctttggcgcggcgatccggaggagacgtttcgaaccgtccggatcgaaaatacggatgaggatggaaatgtattcgatattctggaatcgatccgaggaatcgatttggaaatgtacgaacaacggatccaaacgttgcttcgtatttctccggaggtttctttggaaaaggttctgcgggaatatccggacgacgtctgctttgaaagtttagtcgcttatgtttggattgcgggtaacggagaatttcattccttggacgattcggaaacctttgtatattccgtttccataatggatcatccttcggaaaaacttgcgtatcgaattcctaagggaacgtatagagtgggccatttatga

SEQ ID NO: 43331 - DNA, 564 bp, Leptospira santarosai str. CBC1416
atgaataaaccgtatgactatgcaccttccattcttagattgttgaaaggatcgatcaacagcgagtccgatgcaaagatttggaagaatcttttggacaacgaaaaacaggtgcgggaacactttgaaaaactgggtatttttttgcacttggatcgggaagacggttatgcgtttctacgacagacttcggacgacgaaagtgcagaatcggatgagaaacttcccgtgatcacccgtaaacttccgcttacgaaagaagagactttgtttctaattctactgagggaatgtatcatagaaatcgaagaaaaagatccttccggttccatcctttttagaaaggaagagctatcggataaagtgagtccttttttctccgacctctccgatgaaatcgatcggcaaaaaagattcgaaaaattacttcgcaaatccgaagaactaggctttgtcaaacagatcgagccggaaacgattcggattgaaagactcttaaaggcgaaattgaccgtatccgagttagagggtttacgcggtaagtttcgactaggaacggaatag

SEQ ID NO: 43332 - DNA, 3357 bp, Leptospira santarosai str. CBC1416
atgactgatttattttcacccggtgaaattgccgccaataccggatatagacttgaattcttggaaattttaaattggggaacttttcacggtaggatttggaaattacgaccggaaggggaaaactttcttttaaccggagcgaacggttccggcaaatcaacgttagtcgacgcgattcttacgctgctcgttccggccgcaaaacgaaattataatctggcttcgggactggaaagtaaaaagagggatcgatcggaacgatcttatgtggaaggtcactacggtagatcctcttccggtagcgaaggaattttgaaaattcgcgggaaacaagaagagtgttattccgttttatcggcggtattcgaagcgaatggaaggttcccgcgaattcggattgcgcagatcttttggttcgaatccggagaattgaaaaagatctaccttttttccgataaagagttggacttcgaaaaagatctggttttgggaaaaagaaccgtaaaggaattgaaagcggatctgaaaaattccggggcaagactttacgatcagttcaaggcgtataacgtggattttaggaaagcggtgggtttggaatcggagaaagcgatcgacctattcaatcaaatcgtagccatcaaatccttaggagtgttgaacgaattcgtccgagaacatatgctcgagtccaaggataaaagatccaggatcgaggaattgaatcgtaatttttccgatctgagcgaaacatacgaggcgattgtaaacgcaaaagaacagttgaagttgttggaaccgatcgaaaaaaaagccgccgagtatagggaatggaatcggaaggcggccgatcttcaggctttgatcgtatatgttccgtattattttgcggaaaaaaattacgagcttcgtcaaatcagagaacaggattatctttttgaattatcgcgtttgaaagacagatccgacgaactatcgactgaaatcgaatccttaaatcaagaggaacggaagttattcaacgcattagaaaacaatgatactcaaaggagaatctccgatcttgtacgaaaacgggaggggattctctccgatctcaaaacgcggggaatcgaaaggaaaaaatattcctcctatctttccaaaatcggtttggaggaagcgtcctccgaagaaacattctatacgaacctgcgcatagccggaggaatgcttacggaaaccgattcgatttgggaagaaatcagggatcgattgggaaagctgacgcttcaaaaaatggaattgcaaaaaaatttcgattcggttcgttccgaattggagtatctgaaaaaaaagcgggataatcttcccagaacccagtcggaaattcgggcaaaaattgcctccggaatcggactttccgaaaaaagatttccctttatttgcgaattgatccgcgtcaaagaatccgaaaaagaatggaccggggctttggaaaggctcttgagaaatttcggcttacggatgttagtcgcggaagaggactacgaggccgtgtcggcttacgtgaattcttcctatctgggagggaagttggttttttcaagaatggttcctttatcgggaccgatcttgcaacccaaagacaaggaagaagttttctacaagttggaattgaaatcggaattgtcgaacgtaaagaaagaatggttggaagcgcagatactgcgcgagttcggacatatctgcggggatctgaatcgtctccggaaagaggagaaggctcttacaaaagaaggtctgattaagtccggtagaattcgacacgagaaggacgatcgtaagaacatttcggacgcaagagattatattttaggctggaacaatacggagaaaatcgccgcgttggaatccgaatttgcccttctcgggcagaacatttatcggctgaatgctgcaatcgacctgatcagagaagaggaaaacaaaaacaaaaacaaacgggacgacctgcttctctttctacgtttcgaacaattttcacaaatcgacgacgaaagtttgaaaggtccgcttcaggatacggaaagacaaatccgggaattggaattgcgttccgaagaatacgggaagttgaaggaacaatacgaactcgcaaaagctcgcctaacggatgttcaagggagacaacgggaaaccgccaaggaattcaatgttttagaggataggcttttcactcttcggaaggacatggaagatctacagcagagggtccgaaaagtcgaccgggaaacgtcgatttcactggagccgattctcaacgaacgactgcgggaaacgatcctaaccctggagtcgatcgcggagacggaacggaatttttcggatcgtttggttgtagagcgcgatcaatatttggagaaacgagattcgatcggagaagaattgaacaaaggaatggatcgttatgtgaaacgattccgagaggaggcggatcgggaagaattgtccgtttcggtttccaacgcggaagggtttgcgaaattgaccgaaaggattcggcaggatcgattgcccgagtttcaggaaaaatttcgaacgatgatgtccgacaaagtcgcaaagcagattttggacttcaaggcggaattggacgacgacgtctcggaaatcaaggaaaggatcgacgaactgaacgattcgttaaaagatctggattattctaaaggaaaatcttatattcaaattcgatattttgataccaaggatcgggagattgtgggcgattccggctttaaggaaatgttacgcggaagcattccggatttgggagacagttctcacaacgaggaaaaattcgctaaaatcagagagttgttgaaaaagttaaagggagagggcggtagcgatcgttggtccagactcgtaacggatcccaggaactggctggatttccaagcggcggaattccttagggataacaaccaaattcttcaggtttacgattcgtccgcgggtaagtcgggaggacaaacggtaaaactcgcttacacgattctcgcttcggcgatcgcttatcaattcaaaattcgtgaacggaattcgtttcgttttgtggtgatcgatgaaatgttcaacaatctggacggagagaattcaagatatgcgttgaacctctttcgtcaattgggtttacaattgcttgtcgtaactccgatggataagattacgattgtcgaaccttatgtgagaagcgttcattttgtgaagaacaattcggaaggaaacgattccagagtgtatccgatttcgaaggaaaatgtatcgtccgggaaggatgaaaattcggaaaggaaagtgggaaatttatag

SEQ ID NO: 43333 - DNA, 1179 bp, Leptospira santarosai str. CBC1416
atgatttctccggaaattttacgcaagagatcgctggcatactatcataacgaactcttacgttctatcgtcctaggaggtgttttatttccttgggagatttcgatcggtaaagttcttccggaagagatcttaaaaaatccctctttgttacgagaattacgggccgaatcgaaagaaaacaaaggtttcggatttagaatcgtctttcgttcgaaagagacccggaaatacggaatacaaacgattcctacgaaaatcgtttttgataccgaagacgattttttgcgttttacaaaaaagaaagacgaattcctctcctatagcaccgattgtacgttgattctttccgttcttcccgagctgaaagattggattttaaaaaatacgttatccgtaatcgaagagtccggtaaatgggaaagtattctttcggtctgttcctattttttagaatataggaatcccggattgtatatccgagaactaccgattcgaattcctacgaaattcatcgaggaaaataaaaaggttttgagaagtcttttggattttctattgcctgagatcgcggatgcgaaggatttcgaaactcgttacggattaaaaaaagcggaacctttggttcgatttcgaattttggatctcgaaattgcaaagtcttccaccggaggtttaacggatttgagcattcccgtccgggattttagaaagttggaactctccggttgtggaagggtttttatcttagaaaataaaacgaatttcgcgaacctattcaattttttaagttttccgcaactgaagggaacgatctccattttcggtcagggtttcggattaaacgttttaaaggattgtagctggttggagaaaatggaaattttttattggggagatctggacgttcagggtttcgaaatcctgtcgcaactacgggaacaatatcctcaaagccgttcctttttaatggacctgaagacatttgttcggtttcgagactttgcggtagacggtatttcttcttctaaatcttccgaaccgaaatttctcactccatcggagcgcgaaacttggaagtatttaagttctttagattcgaaaaatcggttggaacaggagaaaattcctcacgaatacgtgcaagaagttctgtccggtttgggtggatcgcagtaa

SEQ ID NO: 43334 - DNA, 1353 bp, Pseudomonas stutzeri KOS6
atggaggatgcgctgcaagcgctgtccgaaatgctggctgcttatgccagccaggagctttacgaaatcgacccggatgcaacgcatctccaagcaggtcgtgaacttcgtgaatggatcaagcggcgcctcgtcgtagagcgagagggccgtatctatgcaaccgacgcgttggagtccgccatccagttcgtcgattcgttggatagtcggatcatgacctccacggcatctcgcctttcggtggttcagcgcgagatcgaaaacctggaaacgggtctgaaccccagcccaactggccgtattgccagcctgcgccgccgaatccaggatttggagcacgagctagcgcaggtagaagctggccacgtcatcgtgctggatgaagcgcaggcgatagagggcatacgcgaggtgtataacctggccaccagcctacgcgcggactttcgacgagttgaagactcttggcgcgaggcggatcgcgcccttcgacactccatcatcagcgagcagtctcaccgtggagaaatcgtcgatcggttgttggacgggcaagatgccctactcaacacgccggaagggcgtgtctttgaaagcttccagcagcaactgaggcagtccgctgagctggaggccatgcgtgagcgcttgcgcaccatccttcgtcatccagcggttccaaaggctctgaatcgtccccagcagcgtgagctgcgttggttggcgttacgcctggttcgggagtcgcaggctgtgctccaggcgcgcgcccgaagcgagcgtgatgttcgcggcttcatgaagacggggttggccgccgagcatcatcgagtcggacagttacttaacgacttcttcaatctagcgctcagcgtcgactggcaacgtcagtcagagcgccgtaagcctgttcgtttaccgccggttggcgtagccattaccggtgtcccggcaatcgagcgtctgcgcttcaagactctggatgacgatgatacgggcgagctggatctgagtttgaagcctgcggggttggagcagattgatgatgacttctgggatgccttcgacgggctggatcgtgaaacgctgattcaggacaccctggctgtgctggcggagcaggggcgccctgtgagtctcggggagcttgcgtctttgcttccacctgctcacgacctggaaacctttgcgctctggttggcgatggcacgcgaggcaggtattgaggtgctgaaagaggagcgtcagctcgtggagttagttgacgaggatgagcaacgctggtgcttcaatctgccttatgtcggactcgaccacgaggcactcaaagacatcgattgggagttgtga

SEQ ID NO: 43335 - DNA, 750 bp, Pseudomonas stutzeri KOS6
atggcagggatcttcgatcgaattgcaggtgcctctggcaccgacgaaacggagctgacggtggagcccatagcgttggatgacggcatggatgatgaacagcctcttatgagcgccgctgttcaggtcgatgagcgccggacgccgcaacgggtacgtgaggccgtacaggaaatgctcaagtacgggctgctggaagaaagtcacaagcccaatctgtatcgctcggcgcttgccaatatcgaggcggtcgacacaatcctggaacccctcgacctggccatgggggtcgacgaggttcgcgggctggtgttcgtcaccgttcgtcagggcgagggggccgagcaggatgactggtcgcacccccttgtgcgcaggcaaaggctgaacctggagcagtccctgctgatcgccattctgcgccagcatttcatcgcctacgaacaggaaagcggtacgggtgccactcaggcactggtagctgttgatgagctgattccgcaattgcaggtttacctgggcgagctgggcagtgaggcgaaggagcgcaatcgcgtcatcacgctgctggatcagctcaaggggcatggtttggtgtcggctctggacgctcatgatcgcgtcatcatccgccccatcattacccacttggccaacccggagaacctgcaggcactggtggtttggctgcgcgagcaggtggagggcgcgactaccccggctgccgctgctgaggaggacgaggcgtga

SEQ ID NO: 43336 - DNA, 3306 bp, Pseudomonas stutzeri KOS6
gtgaagcaagcactgctctggcgtgacagcgagaccttcattctcagcagcatcgaactctataactggggcggctttcagggctatcaccgtgccgagatcgatccctcaggcaccgccgtgatcggcccaacgggtagcggtaaaacgacgctggtggatgctctgatgaccttgctgtgcgccaacccgcgctacaacctagcttccacaggtgggcatgaaagcgaccgtgatctggtgtcctatgtgcgcggggttaccggccccggggacggaggtgtagagcaatctcatatcgcgcgccagggtaagacggtcaccgctattgcagccacgctcgagcgtgatggcacgcaggttcgactgggcgctgtgctctggttcgagggcaccagctcctcggcgtccgatctgaagaaactgtggctgttaagcgagtccactgagcagacgctggagcattggctgagccagcatcacgcaggtggcatgcgggcgctgcgtcagatggagaaggatgggacgggtatctggccgtatcccagcaaaaaagccttcctggccaggctcagggattacttcgaagtcggtgaaaacgccttcaccttgctcaaccgcgctgccggcctgaaacagctcaatagcatcgatgagatctttcgcgagttggtgctcgatgaccgctccgctttcgggcgggctgccgaggtcgccagcagcttcgatgatctaactgacatccaccgagagctggaaacagctagaaagcagcagcgctcattgcaaccggtcgccgaaggctgggagcgttatagggccttgcaagaacagctgcaggataaacaagctctcgaaggcatcctcccagtctggttcgccgagcaggggtatcgcctgtggttggctgaaaccaacaggctggagacggagcacaagcaggccgaactcgatcaggagcaatgcaggagtcagcttgagatccagaagggcgtggttgatcaacatcgccagagctatctgcgtgtaggtggcgcggagatcgatctgttacgcgcgcgcatcgcggattggcttcgtgagtgtgataaacggcgcttgaaagccgaacagtatcaacgcttggccaaagggcttggactcgtggatgagttatcggccgctgcgctcgaggaaaatcagcagcagatcgcggcacgcctggaaatactggccgagcaaattaccgaggcacggcaaaaggcgttcgatgccggcatcgtccagaaagaactcaatggccgtctgcagagcttgcagcaggaacgtgccgaggttgagcgacggccaggctcgaacctgcccgggcattttcatacttttcgaggggatctggcgcaggcacttgacgtcgatgaatcggccctgcctttcgtcgccgaactggtgcaggtcaagcccgaggagttggcctggcggggcgccatcgagcgggcaatcggcagtcaccggctgcgtatcctggtgccgcagggcgcgtccgaggctgcactgcgttgggtgaaccaacgacacaaccgcttgcatgtgcgcttgttggaggtcaaggaaccgtcgtcgcgccctgtgttcttcgacgatggttatacccgcaagctgaccttcaaggagcatccgtaccgcgaagcggtaaaggcgctactggcggacaacgaccgacattgcgtggagagcacggagcaattgcgtcataccccgcacgccatgacggctcaggggctgatgtcgggtaaagaacgcttcttcgacaagcaggaccagaagcgcctcgatgaagactggctgaccggcttcgataacctcgaccgtctggccttcctgactgaacaaattcgcgaggtcaatgaacagctcgcgcctgccaagctggccttggatgctgcccagggcgatgtccgcaagttggaggatcaagcttcgctgctgcagcgcgtcgaagaactgcagttcgaggagattgatctgccgggcgccgagcgtcagctggagtcgctgcgtgctcagctggacaccctgacacgtcccgactctgacctcgcccttatcaaggctgagctggatgaagctgaggcattgctggactctctggatcgacagaggcaacaacttatcgagcagtgcggtcagttgaaaattcagttcgagcaggccgcatccgctactcgtaaggcttatcgcggcgccgaaaaggggctgagcgatacgcaacgtgagttggcgctagcgcacttcccgaccctgagtgctgatgacctcggcgatattgtcgagctggagcgcaagcatacgcatgagctgcaagggcagctcaaagcgctcggcgataaactcggcgatcagaaaacagagctagccaaacgtatgtccgacgctctgaaggtggacaccggggcgcttgcggaggtcgggcgagaactggtggacgtacccaggtatctggaacgtcttcgcgtgctgaccgaggaagccctgcccgagaaactcaagcgctttctggaatacctcaatcgttcctcggatgatggcgtcacccagttgctcagctatatcgaccatgaagtctcgatgattgaggagcgcctggatgacctgaacagtacgatgcagcgtgtcgactttcagcccggacgctatctgcgcttggtcgcgaaaaaggtcattcatgaaagccttcgcaccttgcaacaggctcagcgtcaactgaactcggcgcgtttcatcgatgatgaaggcgagagccactacaaggcattgcaggcgctcgttggcctgctcaaggatgcttgcgagcacagcaggaatcagggcgccaaggcgctgctggatccgcgcttccgcctggagttcgcggtctcggtgattgatcgcgaaagcaggagtgtcatcgaaacccgaacaggttctcaggggggtagtggtggcgagaaagagatcatcgcctcctatgtgctgaccgcttccctcagttatgcgctctgtcccgacggcagcagccggccgttgttcggcacgatcgtgctcgacgaggcgttctcgcgcagctcccatgcggttgccggtcggatcatcgcagcgctgagggaattcggcctgcacgctgtcttcatcacgcccaacaaggaaatgcgcctgctgcgccaccatacgcgttcggcagtcgtcgttcatcggcgcggcgtggaatccagtctggtttccctgagctgggaagctttggatgagcatcatcaacagcgcatcaaggccatgcatgaagtcgcccactga

SEQ ID NO: 43337 - DNA, 1158 bp, Pseudomonas stutzeri KOS6
atgaagtcgcccactgacatcagtcgcagcctggccagacaatggcagcgctccagcgtacgcttggaacgcttgctcaatcccgctagctggccgcaaagcctcaacatcggcaagccttcggcacgtctattcactgacaacatccaggcggtactccggcatgtggagaactggcggagcgtgaacgtgggtacagtcgactgggagcccgtcagctaccgagcagggctgtcccccatttccttgccgatgcgctggcacttgcatagcccttccgaatggattgccgcgaccaatgatccagcggtcagccgggaatacgctcaactcgagtatctggttgagcaggtagacagtgcctttcatgcgctgctggtagcacaacggggcttatggttgacgaagccccctgaagaagtcgtcgccacggcgcaactcgccacccgcttgtcgctaggctgtgcccgaggccgtccactgcgcctgcttgccgagcacggcgtagacaccaagtttttcgagcgtaacgccagcttgctgacccggctcctcgacgagcgtttcgaaggcgcggcgtccgagcaaggcctgacgacttttctggatgcctttgaagaaagcagccactgggttctggtcgttccccttcagcctgagctgttgcccttcaagcggctcagactcaccactgcggaactggccgaaaccccacttcccggttcgcgattgctcgtggtggaaaatgagcaatgcattcacttgctgcctgagaacttaccagacaccctggctgtgctgggctcaggactcgatttgcagtggctagcgtccgcgcacctggccgggaaacagatcgcatactggggcgatatggatacctggggcttgctgatgctggcgcgagcgagactccatcaaccagcagtcgaagcactattgatggagcaagagctgtttgaacagcactcaccggtgagcgcagtcgttgagccgaccaaagctctggattcggcaccgcctggtttgctggctgacgaagcggacttctatcggtatctgctggtgcaagaacgaggacgtcttgagcaggagtacctgccaaaggaacaagttgagcgcgctatcgagcagtgggctcgaaagatccctgtatag

SEQ ID NO: 43338 - DNA, 1461 bp, Mycobacterium abscessus subsp. bolletii 1S-154-0310; identical to SEQ ID NO: 42721

SEQ ID NO: 43339 - DNA, 750 bp, Mycobacterium abscessus subsp. bolletii 1S-154-0310; identical to SEQ ID NO: 42722

SEQ ID NO: 43340 - DNA, 3348 bp, Mycobacterium abscessus subsp. bolletii 1S-154-0310; identical to SEQ ID NO: 42723

SEQ ID NO: 43341 - DNA, 1470 bp, Nocardia brasiliensis NBRC 14402
ttggctggcgcgggagcacttatgacttcgtctcctctggcggatctgttcgagtcgaacaagaccttgcaagatgtcgctgccgtgcgactgtttgcagctaagaaccttgccccatacgtcacgctgatggaacgtcatctggacgggagcgccaaggtcgctgaacccgagctcgttttgtgcctggagcgcgacctggaggaggtcggcctggccgagcagaccggcttgggtctgattaagacgtgggcgagttcaggctggttgaaccgcgtctccgacggcgccgggcagggcgcacagaacgtgtgctcactgaccgaggatgcccgcagtgccttagcgttcctgcggaagctgcgccgcggtgacaccgtcgcaacgggtgggtcgatcgtccacatcgccagtggtctcaaacggatcgcgtcccagctcgacgaggatccggcgcggcttcgtgtagagattgaagctcagatcgaggacctgttcggccagctcacggacctggacaaggggcaccggcctgaacccaacctggtggatctcgccgacgaggctcgggcgatcgcctacaacatggaacaggtcgtcacggacatagtcagctacggcggtatgcagaacgacatcaccactaaactcattgagggggttgaagactccgacatcgagttccgcgaccgctcacggcgaatgttcaccgactacgacgccttgttcgtgtcccgggagcgggcctcgtatgccgcattcacccgcatggtccaggaccccgaccagcgggcgcggctgcgctcggacatcaacaccgtcgtggagcgtctgcctgatctggagaccggcttacgcgatgtcatggtgcacttcttccagcgggtgtcagcgcagatcggggaagtgggccgcgtcgagcagcgttgtgcactgcggatcaaacggttcttcgccgcaggcaccgccgaacaggcacgcggcctggctcgacagatcaatgcggcgctggccactgggcatgcgctgctacgtgaagcggtggtggactcacccacccgtgccgaactaccgatcagcccgtcttcggtgaccagtgtcggggcgttggtgttcgacatccaggacccctcgccgcccaagccagccaaggaagtgccgccgtctgacgatctcagcggcttcagcgggctcatcgcccaggtcgacatccctgcactaacagcgctggtcaatagagcggtgtccatggggccgattccgttgccagaggtcatcggcatgattgacgacccgtacttgggtgacgtggtggtgctgtgggcgttggcggacaagcaggatccgggcacggcggttaccgcggatactcgtcgggtccgattccgatccgtcgacggacgccagtgcctgatcgaggtgccgtgtgtggtgttccgcaggccggtcgaggcggtgagtgacctgtga

SEQ ID NO: 43342 - DNA, 723 bp, Nocardia brasiliensis NBRC 14402
ttgggggccttcaactttgacgatctacccgaggttgacctggctgctaccgccgaggcgacgacgtctccgcggtttgacggggacagcagcggcctgcccaaccaggcgtgttgggtgctgcagaatcttctcacccgccgctatctcaccaaggacgacaagcctgacttgtggtcgtggctcatcgagcaccgcaaggttctggcgtcacgcctgtgcgaactggatctgcggttgcgtatccacgaggacctcgatgtggcctacgtcgagcctgctctgctcgacaatccgaatcctcacagccgcaaggttcttcgtcgagaaccgctcggaacatacgcctccatagtggctttgcatctggccaagattgcccgcacgtcccatgacgaacacgtcatcatcagccgcgcagacatccaagacttgttcggcagtgtccgccaccgcgtagatcgcgatgaggcgatgctgcgcaaccgtatcgacgaggcgatcaccaaactcaacaaaacccagatcctgctgcgcactcgcgatgacgaggacagctacgccatcagcccggtgatcctggcgatcatgagcggccagatggtcgatgaactgagcaaggagttcgaccagttgctgcgccgggcccaagacgacgccccaggctcgtccacgctcgacagcgacgactacggggagcgggaactcggtggcgacgactag

SEQ ID NO: 43343 - DNA, 3387 bp, Nocardia brasiliensis NBRC 14402
gtggcgacgactagcgcgatacaacgacaggtgtggttgtcacggctgcaggtgatcaactggggcgtcttcgacggctaccacgacatccggttcagccgggcgggtacactcatcaccggcgcatcaggaagtggcaaatcgtcgctgctagacgcggtgtcactggctttcctatcggccaaacgccgcaatttcaacgcctccagcgacagcacggcgatcggctccaacctcggaaagcgcactgtcgacaagtacattcgtggactgtggggcgagcgacagcagccaggtgaacgccccaagccgatgttcctcagaggaaccggacctgcctggtcagccgtcgcggtgacctacaccggcagcgacgacacgatcgtgaccggcctggtcctcaaatggttggctgcgggcgcggataccgacgcctcgagttcctatcacctcatcaaacaagacgccgacatcctcgacctgtgcaacacctggcgcgacagaggctatgcgaaggcggtcttcgaatctgccggctggcagggtcggcgcgatcacgaaagctggtacctcgaccggctttacgccgccactggaatccaggggcagaccgcggcattgcaactgctcggaaaagcgaagtcactgaaaagtgttggtggacttgagcagttcgtgcgagattacatgctcgacgtcccggagtcgttcacctcgatcaaggacgcagtcaaccagatcactccactggtcgatgcacgcaacgcccttgccgtcgcccagaagaagcgcggtgttttgggcgatgtcgaagacatacacgatcgttacgtcactgaaggtgctcaactcgccagcatcgacatcatcgaccaacagatggtgcgcgactgggtcgacgagcagcggctggcgcagattgagcccgaagtcttaggactcgacaccgagatcgaacggatcggcgccgagcgccaggagttgtccaaccaacgcgacatcctgaccgccaaacgcgacgtgctcaccgccaggatcgcctccgccggtggcgatctgccgtctctgcgcgccgaattagcccaggccagtgactatgccgagaaggttggacgccaacgtacccgctacgacgaactacttttggacatgggctacccgccggtcgacaacgccgccgatttcgcgtccatgcggtcgtacagccatgcggaatcgaccaggatcaccgctgagatcaaggcattgcagcacagattgaccgaccaggaaggtcctcgccggcgcgcggcagaggaccagatgaattcctcgcgcaaggaactcaaacgggtcgagcttcttcgaacgacagtgcccgctaacgaggatcgaatccgcaccgaaatcgcccaggcgctgggcgtctcgtccaaacaccttccttacgtgtgcgagctgatggacctcgagccgcagtacgcgatgtggcgcaaagcagtggagaaggtactacgcactgcgggcttggtactcctggttcctgaccgacaccaccgcgccgtgttgcattacgtcaacgaccacaacatgcgagggctgatccggatcgaacacgttcaaggcgccgaccgccagcccagccagccacagacaggcacgcttgccgaatgcctacaggtgatcgaccgcgaccacgaatgtgccaggaccgcagcgcaggtgatctccaaggcgggcgattacacccgtgtcgggggtccggacgagttccgccggcaccgtcgagccgtgacgatcgagggtctgcgccaagaaagtgagctccgcgccgtcaaggacgaccgcagagagatccccgcctcgcaatacatttaccaaggcaacatcgaacacaagatcgctgcgctgcgtgaggagctgggtcacgccacagcggagttcgaggccagtgacgaggcggtcaccggcctacacaccacaatcgaatccctcggcgccgagaaagaacgatgggggcggctcagcgccggattcgagcactaccgcgatgtcgacgccgacagtgctgacggtgaagtgcaaaggctgcagaaccagctcgaccaattcgaagccgagcaccccgacctggccaaccttcagaagcaggccggcgactacctgaagggcatcaacgcattgtcggggcgaatcgtcatcctcgatgagcgagaaattacccacgacgctcgccgcacccagttgctggaacttcaggacacgctgcatcccggtgtcgtaggaccccaagcccgcaccacgctgcacgactacctgccgcaactatccgtgtcgctggatgttgtcgtcccggcgccatatcggcaggctctcgtcgcgctgatcgagaaggaccagaggcaactgggagaagcggtgcgcagatcgcttggtgagctgcagcgtatcgtcagccagttcgacgcacagttcccagacgacatcccaaacagcagcgacgatctcgacgagaagatccacgactatgtcgccctgtgccagcgcatcgacagccgtgagctgccccaagcttatgaccgcatgctccggttgatcaccgaacaggctcccacagcagcgctacggctctaccagctcgcagaggaagagacccagcgtatcgaggatcaggtcgccagggtcaacctcggactgggctcggtggagttcaaccgcggcacacggctgacgctgcacgccgacatcaagaagctggctgctgtcaccgacctcaacgatcgagctcgccgaatctcgggtcgggccgcagcggtctcggctggagatcaacacgcgatacacgaccagtaccgcgacatcctcgaactacgcaacctcctgtccgccgagaccccagaagcccggcaatggacccgtgatgcccttgatgttcgtaacaggttcactctctactgcgccgaacgcgaagcgacgacaagtgatttgatccgcacctacagcaacgccggcgccaactccggaggcgagcaggagaagctgatggcgttctgcctggctggagcactgagcttcaatctcgctgatcccgagaccggggacaaccggccagtgttttcgcagttgatgcttgatgaagcattctcaaagtctgatccggtcttcgctcagcaggcattgtcggctttccggaagttcgggtttcagctgcttatcgtcgccaccgtccagaacacgacaatcattcagccttacatcgacagcgtggcgatggtctccaagcgagaccagcctggaaaggatccggtcgcatcagtccggacggtgaccgtcactgagttcgccgatataggacacagcctgacagctgcgtccaagaccggggtgtcgaccaatgcttaccgttga

SEQ ID NO: 43344 - DNA, 1161 bp, Nocardia brasiliensis NBRC 14402
atgcgaatcggcctgggcgcgcccaagggtacagaattcgacaacgacgtcatcggcgtaacgaactgggctggcacctggcaagcggccatcgacaatgcgcgcatacccggcatcactgcaacagagtcccgccgggcgcgcgggctgggcgcccattttctgcccactgtctgggagattgaaggtccagaagaggcccttgttgttgcgcccgatgtggcggcgagctaccggattgccgaacaacgactccaggaggccgtcagtcttgcgggagtggtgtgggacgacatcagcatgattcccatcaagaacgctcgcacaatcgccgcgttcgacggcaaggactggacgaacgcggtcgcagtcgtgaaccacctcaccacgatcggagtcggcgaagccacgatggttcggcaactggccatccccggtgtgcacagcaagtggatcgagaggaacgccacagtgctgggcgccatgctcggcgtgcccaacgaccgtacgctcggtgacccgctaactcggctcttcaaccacattggtctgaagggcaaagacatccccctgcgcgtgaccctggcatgcccgcacctccgcacgaaggcagcgggattactgcggttcgatgcaaccattccgattctcaacagcagcaccttgtgcccctccgcagtactcgtcgtagagaacctcgaactcggccacaccctgcccactgaacttcccggcgtggccataatctgcggtctcggttcaggtgcaccgcttctcgcggcgctcggctgggttcatgccgcggcatgtgtcctctactggggcgacatcgaccgcgccggactggcgatcctcgccacggttcgccgtgccggcattcgcgctcacgcggtgatgatggacggaaccacgctcgacgcctatccatctgcgcagcatgaaaccgacacccaaatggattccgacgaggtaccgatcggacttgagggtggcgaggtcgacctctacgtgaggctcaacagattccacaacgagactggtcgagagcttcagctcgaacaggagcacataccagtagcccaggcgcatctcgcaattacgggcgcactgcgggagtgttcaacgtggagggagtcctcgatgccgccccggtcccgttag

SEQ ID NO: 43345 - DNA, 1470 bp, Xanthomonas axonopodis pv. malvacearum str. GSPB1386
atgaagcaccaggcccgtatcgccggctatcggcaactgcgcgagcagccggtatggaaactgcttgccgccgaccacgcacccgaactgatcggcctgctgcagacggtgctgatggatggcgaacgccgcctgccttcggcggtgttgcacgagcgtttgcagcgccagctcgacgccttgcgcgccgacgagctttcgcgtgaactgccgcgcaccgcacaggcgtatctggcgcattggttgtcactgggctggttggaacgccgcctgcccgaaggcgcagccgaagaagaatacgaactctcgcgtgccgcgacccaggccatccgcttcatcgtcggcctgcgcgaaagcagcagcagcgccaccgaaagccgcctgtcgctggtgatccagcaactggtgcagttggccggacagaccgaagccgatccagagctccggctggccgcgctgcgcgacgaacgtgcgcgcatcgatgccgagatcgaacgcgtggcgtccggccgcgtggcggcgctggatggcaagcgcgcgctggaacgcgcgcgcgacctgatccatctctccgacgagctggccgaagatttccatcgcgtgcgcgacgacttcgagcagctcaaccgccaattccgcgagcgcatcatcgacgacgaaggcgcgcgcggcgacgtgctcgaacaactgttcgacggcgtggacgtgattgcagacagcgaagccgggcgcaccttcgaggcgttctggagcctgctcaacgacacccagcaaagcagccagctcgaccaggcgctggatgcgctgcttgcccgtgggtttgcccgcaagctcgatcgccgcgaacgcgcttttttgcgcgggctgaccggcacgctgctggagcgcggtggcgaggtgcacacggtgatgcagcatttcgcgcgcagcctgcgcggtttcgtgcaaagccgtgggtatctggaacagcgccggctcaatcaattgctcaagcaggcgcagggcgaagccttgcaattgcgcgacagcctgcacgccaccaccgccaccggctatacgcagccgctcagcagcagccgcctgcgctcgttgtcgcaatggcggctgcacgatccacggctcacccaggtcgatggacgcgtgcaggccgccgacgcggccgagatctcgctggacagcgtgggcgatctggtcgcgcaatcggagatcgatgtgcgcagcctgcgcaacgacctgcatgagctgctcggccaacgcccgcggctgaccatcggcgacgccttgcaacaacgcccggccgtgcagggcctgggcagcgtgatcggatacctgtcgctgggcacgcgccacggcatggtgatcgaaggacagatggaaacggtgcaatgggaaggcagcgacggcgccgtgcggcgcgcgcgcattcccttggtgtggtttacccgggagaaacgcaatgaactggtctga

SEQ ID NO: 43346 - DNA, 702 bp, Xanthomonas axonopodis pv. malvacearum str. GSPB1386
atgaactggtctgaggacactggcctatacgccgacgaggacaccggggcgccggccatcgacgaccgcatgccgatggcgcaaacatccagtgccgagccgcgcggcgagctgtttttgggcgacaccggcacgctgccgttcgatgcgcggcgtgcgctgtgccagttgctggcagggcccagcatcgatgcgcaacgtcacggcgcgctgtggccggcgttgttgcgcaacgaggtggcgatccgccaggtgctgtgcgagctgtttctggagttggtgctcgaccgcgagggcggggtggcctttacccgtcaggccgacaccgcagagctggaatcgcccacgctgctgcgcagtgcgccgttgacgtttatcgagtcggtgttgctgctgttcctgcgccagcaactggccgaggccgacacgcgcggcgagcgtgcagtggtggacgaggcgcagttggtggaagccttgtcggtgtacgaaaagaacgtgtccaccgatcgggcgggcttcgcgcggcgggtgatgacggcgatcggcaagatgcgcgacaaccagttgctttcgcgcttgcgcggcagcgaggagcgctatgaagtgtcgccggtgttgaagctgttgttttcggcagaagatgtgcaggccttggtggtggcgtatcgggagctccgtgagggtgaggttgcgctggattga

SEQ ID NO: 43347 - DNA, 4014 bp, Xanthomonas axonopodis pv. malvacearum str. GSPB1386
atgaattcccagtccaatctgtcgccggcgcagccgggtgcctccttgtttgccgagacgctcgccgagcaacgtgcgcagcagttccgcatgcggcgcttgcaggtgcacaactggggcaccttcaatgggctgaccgaagtgccaatcgcgcagaagggcttcctgttcgttgggcgttcgggctcgggcaagtccaccttgctggatgcgatgtcggcattgttgacgccgccgagcatcgtcgacttcaacgctgccgcgcgcgaagccgaacgcagtgggcgcgatcgaagtctggtgtcgtatgtacgcggtgcgtgggccgatcagcaggacagcgcgtccggcgaaatcgccacgcaatacctgcgcaagggcgccacctggaccgcattggtgttggagtacgcgaacgcgcatggccagacggtgagcctgatccggttgttctggatcgccggcagcggtaacgcggcggccgatgtgcggcgccactacatggtcgcgccacgctgtttcgacgtggcgaccgagctggatggcttcgatctcgacctgcgcaagctcaaggcgcgattgggcgatgaagttgcgcatttcgatggcttcgccggctacgccgaacgcttccggcatgcgctgggcatcggcaacgagatggcgctgcggctgttgcacaagacccagtcggccaagaacctgggcgatctcaatgcattcctgcgcggtttcatgctggacgagccgcggaccttcgaagcggctgaccggctggtggaagattttgccgagctcgatggcgcgcaccatgcggtggtcaccgcccggcgccaggtggaaaccctgacccctgcgcgcgagcaccacgcggcgctgatggcgctgcgccacagcgtcggcgagttgcgcgagttgcagctgggcgtggacagctaccgcgagcagcagcggctggccttgctggaggagcggctgcaggaactggacaaccaggaccgtggactggccggcgaagaaggccagcgccgcgaatcgctggataaccacgaacaaaaactggtcggcctggagcgcgagcagcgcgccgccggtggcgagcaggtcgaagaactggaacgcgaacgcgcacgcgtcgagcgcgagcgcgacgaacgcctgcgccgccgtgcacagatcgaacaggcctgccgccagctcggtaccgccctggcggccggcgccagcggctttgccgcgcagattgcgcatgcgcagaccgtgctggataacggcaagcacgacgccagcgcgctggacgaggccatcgccgaacgcatgggcgcgcggcgcgacgacgagcgccgctttgccgaaatccgcgccgaactggaggccctgaaacgcgcgccatcgagcatgccggcaccgatgcaggccttgcgcgcgcggctgtgcgaagacaccggcattgccgaggccgcgctgccgttcgttggcgagctggtgcaggtacgcgaggaccagacggcctggcgcggcgcgatcgagcgtgtgttgcacggctttgcgcaatcgctgctggtggacgagcggcattacgcgcaggtcagcgaatgggtcaaccgcacccatatcggtacgcgcctggtgtacttccgtgtgcgccgcaacgacgagctgcattcgcggcgggtcgatcccggcgcgctgcccggcaagctgcaattgcgcgagcacgcctttaccgaatggctgcgcaacgagctgacccgccgtttcgactacgcctgcgtggacaacgccgcagcactgcgcaacgccgaccgcgcaatcacccgcgagggccaggtcaagcatcctggcgatcgctatgagaaggacgaccgccacgcggtcaacgaccgcaagcgttggctgctcggtcacgacaaccgcgacaagctcaaggtgttcgaacgcgaagcgcagacgctggctcagcgcatcgccagctgcgatgccgatgtggcagcgctgcgcaagcagcgtgagcaggaccaggaacgccaactggccgcgcacaccctggtggagcgcgactgggacgagatcgacgtcggccccaagctgcagcgcctgagcgatatcgacgaacagttggtgcagctgcgcgaaggcaacagcggcctgcgtgcgctcggccaggccatcgacaccgcacgcaccctgcgcgaccaggccaagcgcacctacgaagatgtgcggctggagcgcgcgcaactggcgcgcgagcgcgtgcggctcgaacagcagcaggcggcctgcgcgggccgcgccggttccgccacgctcacgcccacccagttgcagggcttgcgggaacggcttgccgcattgacgccgctgtcgctggacaatctggaagcgcatttccgcgtggtcgaacgtggcctggccgagcagctggccgacagccagggccgcgacagccggctcagcgcgcagttgctggagtgcttccgcaagtattgccagcaatggcccgaagacagcggcgatttcaccgtgagccttgccagcgccgacgatttcctcgcgcgtctggaccggctggaaagcgatggcctgccgcgtcacgagcatcgtttcttcgacctgttgcagacccagagcaagaacaacctgctggccttgcagcgccacaccgccgaagcccacaagggcatcaagcagcgcatggacgaggtcaacgccagtctggagcgggtgccgttcaatcgcgacaccgtgctgaccatcgaggtcggcgaccgccgcctggccgaggtgcaggaattccagcagcagttgcgcgcggtgctgtcgcatcaacagaccgaagaccgtgcccttgccgaagcgcagttttccaccttgcgtgcgctggtggcacgcctgggcgcgcaggaaccggaggcacgccgctggcgcgaacaggtgctggatgtgcgcctgcatgtggagttcatcggtgtggaactggacgcacagacgcgcgcgcaggtggagatctaccgcagcggcgccggcaagtccggcggtcagcgccagaaactggcaaccacctgcctggcggccgcgctgcgttaccagctcggcggcgaagacggcgaactgccgcgctactgcgcggtagtgctggacgaagccttcgacaaggccgacaacgaattcaccgcactggcgatgaatatcttcgagaacttcggcttccagatggtggtggccacgccgttgaagtcggtgatgaccttggagcccttcatcggtggtgcgtgctttgtcgaaatcagcggccgtcataactccggcgtgttgctgatcgaatacgacgagcaggcacagcgattgaagctgccggagcgctcgcgtggcgatgagccggcagttgccgatgccactgacgctgcgccgtcgatcgaggctgcggccgagtcagcaggagtgcagggcgctgcaagcgcagatggcatggcaaccaacggcgtcccaatgcacacggcatcgcctgcgacggaggagaccccgcccgcagcgcaggaaacgcagactggtcagcgcaagccggcagtcgcgacgacgagcaagcagaacaagaccgcatcttccacgcgtgctgcggcacagcctcaagcaaaacgcccgaagaaatcgccttcgcgcactcctgctctggctggcaagccggcatccaacaaacgcccagcgggcgtgccggcggtgtcgtcaggagtcgcatccaggtccaacgtgggcaagaccactcggtcttcaaaaacgccgggcaagccgattgcggccacaagcgcatccaacgccacatccaggaaggtcgccgccgcatctgcggcattgaaaactgccgcagccaagccacgtgcaacagccgcatcgactggtcagccagcgcgcggcgccggcaagacaacctcgacgcgtgcggtggctaaaccgtcaccggccacaacgcggggcgccaagacaggcgccccgcaggcgcgccgcaaacgctga

SEQ ID NO: 43348 - DNA, 1470 bp, Xanthomonas axonopodis pv. malvacearum str. GSPB2388
atgaagcaccaggcccgtatcgccggctatcggcaactgcgcgagcagccggtatggaaactgcttgccgccgaccacgcacccgaactgatcggcctgctgcagacggtgctgatggatggcgaacgccgcctgccttcggcggtgttgcacgagcgtttgcagcgccagctcgacgccttgcgcgccgacgagctttcgcgtgaactgccgcgcaccgcacaggcgtatctggcgcattggttgtcactgggctggttggaacgccgcctgcccgaaggcgcagccgaagaagaatacgaactctcgcgtgccgcgacccaggccatccgcttcatcgtcggcctgcgcgaaagcagcagcagcgccaccgaaagccgcctgtcgctggtgatccagcaactggtgcagttggccggacagaccgaagccgatccagagctccggctggccgcgctgcgcgacgaacgtgcgcgcatcgatgccgagatcgaacgcgtggcgtccggccgcgtggcggcgctggatggcaagcgcgcgctggaacgcgcgcgcgacctgatccatctctccgacgagctggccgaagatttccatcgcgtgcgcgacgacttcgagcagctcaaccgccaattccgcgagcgcatcatcgacgacgaaggcgcgcgcggcgacgtgctcgaacaactgttcgacggcgtggacgtgattgcagacagcgaagccgggcgcaccttcgaagcgttctggagtctgctcaacgacacccagcaaagcagccaactcgaccaggcgctggatgcgctgcttgcccgtgggtttgcccgcaagctcgaccgccgcgaacgcgccttcttgcgcgggctcaccggcacgctgctggagcgcggtggcgaggtgcacacggtgatgcagcatttcgcgcgcagcctgcgcggtttcgtgcaaagccgtgggtatctggaacagcgccggctcaatcaattgctcaagcaggcgcagggcgaagccttgcaattgcgcgacagcctgcacgccaccaccgccaccggctatacgcagccgctcagcagcagccgcctgcgctcgttgtcgcaatggcggctgcacgatccacggctcacccaggtcgatggacgcgtgcaggccgccgacgcggccgagatctcgctggacagcgtgggcgatctggtggcgcaatcggagatcgatgtgcgcagcctgcgcaacgacctgcatgagctgctcggccaacgcccgcggctgacgatcggcgacgccttgcaacaacgcccggccgtgcagggcctgggcagcgtgatcggatacctgtcgctgggcacgcgccacggcatggtgatcgaaggacagatggaaacggtgcaatgggaaggcagcgacggcgccgtgcggcgcgcgcgcattcccttggtgtggtttacccgggagaaacgcaatgaactggtctga

SEQ ID NO: 43349 - DNA, 702 bp, Xanthomonas axonopodis pv. malvacearum str. GSPB2388
atgaactggtctgaggacactggcctatacgccgacgaggaaaccggggcgccggcaatcgacgaccgcatgccgatggcgcaaacatccagtgccgagccgcgcggtgagctgtttttgggcgacaccggcacgctgccgttcgatgcgcggcgtgcgctgtgccagttgctggcagggcccagcatcgatgcgcaacgtcacggcgcgctgtggccggcgttgttgcgcaacgaggtggcgatccgccaggtgctgtgcgagctgtttctggagttggtgctcgaccgcgagggcggggtggcctttacccgtcaggccgacaccgcagagctggaatcgcccacgctgctgcgcagtgcgccgctgacgtttatcgagtcggtgttgctgctgttcctgcgccagcaactggccgaggccgacacgcgcggcgagcgtgcagtagtggacgaggcgcagttggtggaagccttgtcggtgtacgaaaagaacgtgtccaccgatcgggcgggcttcgcgcggcgggtgatgacggcgatcggcaagatgcgcgacaaccagttgctgtcgcgcttgcgcggcagcgaggagcgctatgaagtgtcgccggtgttgaagctgttgttttcggcagaagatgtgcaggccttggtggtggcgtatcgggagctccgtgagggcgaggttgcgctggattga

SEQ ID NO: 43350 - DNA, 4023 bp, Xanthomonas axonopodis pv. malvacearum str. GSPB2388
atgaattcccagtccaatctgtcgccggcgcagccgggtgcctccttgtttgccgagacgctcgccgagcaacgtgcgcagcagttccgcatgcggcgcttgcaggtgcacaactggggcaccttcaatgggctgaccgaagtgccaatcgcgcagaagggcttcctgttcgttgggcgttcgggctcgggcaagtccaccttgctggatgcgatgtcggcattgttgacgccgccgagcatcgtcgacttcaacgctgccgcgcgcgaagccgaacgcagtgggcgcgatcggagtctggtgtcgtatgtacgcggtgcgtgggccgatcagcaggacagcgcgtccggcgaaatcgccacgcaatacctgcgcaagggcgccacctggaccgcattggtgttggagtacgcgaacgcgcatggccagacggtgagcctgatccggttgttctggatcgccggcagcggtaacgcggcggccgatgtgcggcgccactacatggtcgcgccacgctgtttcgacgtggcgaccgagctggatggcttcgatctcgacctgcgcaagctcaaggcgcgattgggcgatgaagttgcgcatttcgatggcttcgccagctacgccgaacgcttccggcatgcgctgggcatcggcaacgagatggcgctgcggctgttgcacaagacccagtcggccaagaacctgggcgatctcaatgcattcctgcgcggtttcatgctggacgagccgcggaccttcgaagcggctgaccggctggtggaagattttgccgagctcgatggcgcgcaccatgcggtggtcaccgcccggcgccaggtggaaaccctgacccctgcgcgcgagcaccacgcggcgctgatggcgctgcgccacagcgtcggcgagttgcgcgagttgcagctgggcgtggacagctaccgcgagcagcagcggctggccttgctggaggagcggctgcaggaactggacaaccaggaccgtggactggccggcgaagaaggccagcgccgcgaatcgctggataaccacgaacaaaaactggtcggcctggagcgcgagcagcgcgccgccggtggcgagcaggtcgaagaactggaacgcgaacgcgcacgcgtcgagcgcgagcgcgacgaacgcctgcgccgccgtgcacagatcgaacaggcctgccgccagctcggtaccgccctggcggccggcgccagcggctttgccgcgcagattgcgcatgcgcagaccgtgctggataacggcaagcacgacgccagcgcgctggacgaggccatcgccgaacgcatgggcgcgcggcgcgacgacgagcgccgctttgccgaaatccgcgccgaactggaggccctgaaacgcgcgccatcgagcatgccggcaccgatgcaggccttgcgcgcgcggctgtgcgaagacaccggcattgccgaggccgcgctgccgttcgttggcgagctggtgcaggtacgcgaggaccagacggcctggcgcggcgcgatcgagcgtgtgttgcacggctttgcgcaatcgctgctggtggacgagcggcattacgcgcaggtcagcgaatgggtcaaccgcacccatatcggtacgcgcctggtgtacttccgtgtgcgccgcaacgacgagctgcattcgcggcgggtcgatcccggcgcgctgcccggcaagctgcaattgcgcgagcacgcctttaccgaatggctgcgcaacgagctgacccgccgtttcgactacgcctgcgtggacaacgccgcagcactgcgcaacgccgaccgcgcaatcacccgcgagggccaggtcaagcatcctggcgatcgctatgagaaggacgaccgccacgcggtcaacgaccgcaagcgttggctgctcggtcacgacaaccgcgacaagctcaaggtgttcgaacgcgaagcgcagacgctggctcagcgcatcgccagctgcgatgccgatgtggcagcgctgcgcaagcagcgtgagcaggaccaggaacgccaactggccgcgcacaccctggtggagcgcgactgggacgagatcgacgtcggccccaagctgcagcgcctgagcgatatcgacgaacagttggtgcagctgcgcgaaggcaacagcggcctgcgtgcgctcggccaggccatcgacaccgcacgcaccctgcgcgaacaggccaagcgcacctacgaagatgtgcggctggagcgcgcgcaactggcgcgcgagcgcgtgcggctcgaacagcagcaggcggcctgcgcgggccgcgcaggttccgccacgctcacgcccacccagttgcagggcttgcgggaacggcttgccgcattgacgccgctgtcgctggacaatctggaagcgcatttccgcgtggtcgaacgtggcctggccgagcagctggccgacagccagggccgcgacagccggctcagcgcgcagttgctggagtgcttccgcaagtattgccagcaatggcccgaagacagcggcgatttcaccgtgagccttgccagcgccgacgatttcctcgcgcgtctggaccggctggaaagcgatggcctgccgcgtcacgagcatcgtttcttcgacctgttgcagacccagagcaagaacaacctgctggccttgcagcgccacaccgccgaagcccacaagggcatcaagcagcgcatggacgaggtcaacgccagtctggagcgggtgccgttcaatcgcgacaccgtgctgaccatcgaggtcggcgaccgccgcctggccgaggtgcaggaattccagcagcagttgcgcgcggtgctgtcgcatcgacagaccgaagaccgtgcccttgccgaagcgcagttttccaccttgcgtgcgctggtggcacgcctgggcgcgcaggaaccggaggcacgccgctggcgcgaacaggtgctggatgtgcgcctgcatgtggagttcatcggtgtggaactggacgcacagacgcgcgcgcaggtggagatctaccgcagcggcgccggcaagtccggcggtcagcgccagaaactggcaaccacgtgcctggcggccgcgctgcgttaccagctcggcggcgaagacggcgaactgccgcgctactgcgcggtagtgctggacgaagccttcgacaaggccgacaacgaattcaccgcactggcgatgaatatcttcgagaacttcggcttccagatggtggtggccacgcccttgaagtcggtgatgaccttggagcccttcatcggtggtgcgtgctttgtcgaaatcagcggccgtcataactccggcgtgttgctgatcgaatacgacgagcaggcacagcgattgaagctgccggagcgctcgcgcggcgatgagccggcagttgccgatgccactgacgctgcgccgtcgatcgaggctgcggccgagtcagcaggagtgcagggcgctgcaagcgcagatggcatggcaaccaacggcgtcccaatgcacacggcatcgcctgcgacggaggagaccccgcccgcagcgcaggaaacgcagactggtcagcgcaagccggcagtcgcgacgacgagcaagcagaacaggaccgccaagaccgcatcttccacgcgtgctgcggcacagcctcaagcaaaacgcccgaagaaatcgccttcgcgcactcctgctctggctggcaagccggcatcggacaaacgcccagcgggcgtgccggcggtgtcgtcaggagtcgcatccaggtccaacgtgggcaagaccactcggtcttcaaaaacgccgggcaagccgattgcggccacaagcgcatccaacgccacatccaggaaggtcgccgccgcatctgcggcattgaaaactgccgcagccaagccacgtgcaacagccgcatcgactggtcagccagcgcgcggcgccggcaagacaacctcgacgcgtgcggtggctaaaccgtcaccggccacaacgcggggcgccaagacaggcgccccgcaggcgcgccgcaaacgctga

SEQ ID NO: 43351 - DNA, 1455 bp, Thauera phenylacetica B4P
atgcccctcgacttcgccaccctcgacaccctgcgcagccaccaccccgcctggcgcctgctgcgctcggaccacgcaccgctggtggcgagcttcctgcatcgggtcttcgtcacccccaacgtgcgcggcatgccggcggcggacctcgccgaggcgctggaggacgagctctacgcgctgcgcctcacgcgcggcgaggacgccttccccaaggcggcgatcgactacctcgacgactgggccgcggccgacaaggcctggctgcgcaagtactacaagcccggcaccgacgaggcccagttcgacctcaccccggccaccgagaaggcgctcgcctggctggcgcagctgagcgagcgccagttcgtcggcaccgagtcgcgcctgctcaccctcttcgcgctgctcaagcagatgggcgagggcagcgagaccgaccccgcgcggcgcatcgccgagctgcagcgcaggcgcgacgagatcgacgccgagatggcgcgcgtgctcgccggcgacatcccgctgctcgacgacaccgcgatcaaggaccgcttccagcagttcatgcagggcgcgcgcgagctgctcgccgacttccgcgaggtcgagcacaacttccgccagctcgaccgccgcgtgcgcgagcgcatcgcgctgtgggagggcagcaagggcgcgctgctcgagcagatcatgggcgagcgcgacgccatcgccgactccgaccagggtcgcagcttccgcgccttctgggacttcctgctgtcgagccggcgccaggaagagctcagcgacctgctcgaccaggtgctggcgctgcccgcggtggccgagctcaaccccgacgcccgcacccgccgcgtgcattacgactggctggaggcgggcgagcacacccagcgcaccgtggcgcagctctcgcagcagttgcgccgcttcctcgacgaccaggcctggctggagaaccgccgcatcatggacctgctgcacggcatcgagagcaaggcgctggccctgcgcgccgcgccgccgcccagcccggcgatggagatcgccctccccggcgcggcgatcgagctggcgctggagcgcccgctgcacaccccgcccacccggccggcgatcgccgagctgcgcatcgaggccggcgacgaggacgtcgacccgcacgcgctcttcgagcaggtcacggtggacaaggcgcgcctcgcccgccacatccgccacgccctgcaggaccgcgcccaggtcacgctcgccgcgctggtcgccgcgcagccgctggagcagggcctggccgagctgatcgcctacctgcagctcggcagcgacgccttcaccaccaccctcgacgaggccacgcccgagccgatcgaatggcaggccagcgccgccgacggcagcaccatcacccgcagggcgcgcctgccgcgggtgatcttcatgcgctga

SEQ ID NO: 43352 - DNA, 684 bp, Thauera phenylacetica B4P
atgaagctcacgatggacgacgaagacctcgcccccggcccgaccgagcccgcggcccccgccccagcgcccgacctctccgtgctgctgatcggcctgctcaagggcgtgctctaccgcgaagccgacgagcgccagtggtccagcctgctgcagctgcaggcgcgggtgcgcgaatacgtggccgtgctcaacctcgagctggtgctcgacgaggcagagggctacgccttcctgcgcggccgccccgagcccgccgacgacgacccggcgccgcgcctgccgcgactggtggcgcgccggccgctgtcctacccggtgagcctgctgctcgccctgctgcgcaagaagctcgccgagttcgacgccggcggcggcgacacccgcctggtgctcgggcgcgacgacatcgtcgagctggtgcgcgtgttcctgcccgaaggccccaacgaggcacgcctgatcgaccaggtcgagacccacatcaacaaggtcgtcgagctcggcctcctcgcccgcctcaagcccaccagcgccagcgccaccgcacccgccagctttgaggtgcgccgcatcctcaaggccttcgtcgacgcgcagtggctcgccgacttcgacgcccgcctcgccacctaccgcgccgccctcgccgacggcaaggagaccccctccgatgacgcctga

SEQ ID NO: 43353 - DNA, 3420 bp, Thauera phenylacetica B4P
atgaacgacccgcaatccctcggcctcgacttcgtcgccgacgacaccctctccggctttcgcctgcagcgcctggaggtgctcaactggggcaccttcgaccgccacgtgtggacgctgcagctcgacggccgcaacgggctgctcaccggcgacatcggctcgggcaagtccaccctggtcgatgcgatcaccacgctgctcgtccccgcccaccgcatcgcctacaacaaggccgccggcgccgacacccgcgagcgcagcctgcgctcctacgtgctcggccactacaagtccgagcgcaacgaggtcaccggcgccgcgcgcccgatcggcctgcgcgagcccggcagctactcggtgatcctcggcgtgttccacaacgccggctacgaccagaccgtgagcctggcgcaggtgttctggttcaaggagccacagggccagccggcgcgcttgtacctcggcgccgagcacgcgctgtcgatcgccgccgacttctccggcttcggccccgacatcacccagctgcgcaagcgcctgcgcggcgccggagccgagatcttcgacagcttcccgccctacgccgcctggttccgccgccgcttcggcatcgacaacgagcaggcgctcgagctcttccaccagaccgtgtcgatgaagtcggtcggcaacctcaccgacttcgtgcgccaccacatgctcgagcccttcgaggtcggcccgcgcatccaggccctcatcggccacttcgacgacctcgaccgcgcccaccaggcggtgctcaaggcccagcgccaggtgtcgctgctcgccccgctggtcgaagactgccaccgccacgacgcgctcgccgccgacatcggcgcgctgcggcgctgccgcgaggcgctgcagccgcacttcgccgcgcgcaagctcgccctgctcgaccaccgcctggcgctcgccgccgaggagtgggcgcgcgccgacgcccaggccaggcgcctggacgggctgcgcgaggagcaggcgctgcgcatcgacgcgctcaagcaggccatcaacgccaacggcggcgaccgcctcgagcgcctcgccgccgagatccgcaagctggcgcaggtgcgcgacgcgcgcctggccaagtcgcgccgctacgccgagctcgccgtggtgctcggcacccccgccgccgccgacggcgaggccttcgccgcccagcgcctgcacttcgccgcgggccgcgaggacgcgcgcaaccgcgacgccgagctgcagaacacgctcaccgagcacgccgtcagcctgcgccagggcaagctcgaacacgacgcgctgagcgccgagatcgacagcctcaggcgccggcgcagcaacatcgacgaccgccagatccagatccgcgccgcgctgtgcggcgcgctcggcatcgacgtcgaggacatgcccttcgccggcgagctgctgcaggtgcgcgaggacgagcgcgactgggagggcgccgccgagcgcctgctgcgcggcttcggcctcgccctgctggtgcccgacgcgcactacaaggcggtggccgagtgggtggacggcaaccacctgcgcggccgcctggtgtatttccacgtccgcccgccgcgcgccggcgagctccccgcgctgcaccccgactcgctggtgcgcaagctcgcgatcaagcccgacagcccgcactacgactggctcgagcgcgagctcgcccaccgcttcgacgtcgcctgctgcgccacccaggagcagttccgccgcgagacgcgtgcgatcacccgcgccggccagatcaaggaccccagcggccgccacgagaaggacgaccgccacgccatcgccgaccgcagccgctacgtgctgggctggagcaacaccgccaagatcgaggccctcgaagcgcagcgccgccagctcgaagcccgactcggcgaagtcggcagccagatcagccgcatcgaggccgagcgccgcgccctcgccggccgcctcgacgccctcacccggctggaagagttcatcgccttcgacgagctcgactggcacagcgtcgccagcgacattgccacgctggaagacgaacgccgcgcgctcgaagccgcctcggacctcctcaaggagctcaaccgccagctcgccgaactgcagcagatccgcggcgacaccgagcgcgagctcggcgccgcgcgcgaacgccgcgccaaggtcgagcagcgccaggccgacgccgagtcgctgcgcgcgaccacgctcgccctcgtcgacgccgcgccgatcgacccggcgctcgtcccccagctcgaggccctgtgcgccgaggtgctcggcgagcacgcgctgaccgtcgaatcgtgcgacaaccgcgagaaggaagtccgcgacctgctgcagacgcggatcgacgccgaggaccgccggctggcgcgcctggccgagaagatcatcaaggccatgtcggccttcaagcagcagttcgcgctcgagaccgccgagatcgacgccagcctggaggccggcttcgaatacgagaacctgctgacgcagttgaaccgcgacgacctgccgcgcttcctcgcgcgcttcaaggagctgctcaacgtcaacacgatcaacgagatcgccaacttcaacgcccagctcgcgcgcgagcgcgagaccatcaaggagcgcatcgcccacatcaacaagtcgctcggcgagatcgactacaaccccgggcgctacatcgtgctcgaatcccagcccagccccgacgccgagatccgcgacttccagcaggagctgcgcgcctgcaccgagggcgcactgaccggcgccggcgagggcgacgacgagcagtactccgaggaccgctttctgcgcgtcaagggcatcatcgaccgcttccgcggccgcgagggcctctcggaccaggaccggcgctggaccgccaaggtcaccgacgtgcgcaactggttcctgttcgccgccagcgagcgctggcgcgaggacgacagcgagtacgagcactattcggactcgggcggcaagtcgggcgggcagaaggagaagctcgcctacaccatcctcgccgccagcctcgcctaccagttcggcctggagtggggcgcggtgcgctcgcgctcgttccgcttcgtcgtcatcgacgaggccttcggccgcggctcggacgagtccgcgcaatacggcctgcgcctcttcgagcagctcaacctgcagctgctgatcgtcaccccgctgcagaagatccacatcatcgagcccttcgtcgccagcgtcggcttcgtgcacaacgagggcggcagcgcctcgaagctgcgcaacctgtcgatcgaggagtaccgcgcgcagaaggcggagatgcgggccgccgcccaagccgcgccgcgcgccggcggcgcagccgcatcatga

SEQ ID NO: 43354 - DNA, 1320 bp, Thauera phenylacetica B4P
atgagctggagcaccgcgtcggacctgcgggcgcaggtgatgcgcctgtgggagcgcggcgagctgctgcgcgaggggctcccgcagggaaacggcgaactcccgcgcgcgtgcttgccggaggagggcggcgagggcgcgcagccttgcgagcaaccatcagacgctgcagtggatacgaccgcgggactacccgctggccgcagccgcttcccgctgcgcctcagcctgaagacgcccggcccggacgacatcacccgccgcttcgacgccgtgcgcgcctgggtcgtggcgatctcggccacgccccatgtccgcctcgaatggcaggagacccgccaccgcgtgcagggcagccagcgcctgcccgcgagcgcctgggtcgaccgcctcgacgacgccctggcctggatcggcaggcgcgccgagcacgcgcgcttccgcgcgctgcacgacgagaccgccgcacgccagcccctgctgctgccctggctggcgaagcgcccgctgcgcgcgctggaactcgccgccgagtggtcgcgcctgctcgacgtggtcgcctggctgcaggcccacccgcggccgggcgtgtatctgcgccaggtcgacctgcccggcatccacaccaagttcatcgaatcccagcgtggcgtgctcgccgagctgctcgacctcgccctgcccgcggcggcgatcgacccggcgcgcagcggcgcgcagcagttcgccgcccgctacggtttcctcgacaagcccgtgctgctgcgcttgcgcgtgctcgacccggcgctcggcctgctccccggcgcgccctgccccgacctcgccctcgacgccgacagcttcgcccgcctgcgactcgacgtggcacgcgtcttcatcaccgagaacgagaccaacttcctcgccttcccccgcgtcgacaaggccatcgtgatcttcggcgccggctacggctgggaggcactggcacgcgccgagtggctgcagcgctgcccgatccactactggggcgacatcgacaccaacggcttcgccatcctcgcccagctgcgcgcccgcttcgcccacgtcgagtccctgctgatggaccgcgccaccctgctcgcacacgaggcgctgtggggccgcgaagacagcccgcgcccggctgacgtctcgcgcctcaccgccgaggaacgcagcctctacgaagacctgcgcgaccaccgcatctgcccgtccctgcgcctggagcaagagcacatcggcttcggctggctggaaaaatggctgaaaatcgtccacgtgatggatgattttcagccgtacggcggttga

SEQ ID NO: 43355 - DNA, 1452 bp, Leptospira santarosai serovar Shermani str. LT 821
atggactataaacttttgcaaagattgcttcgttcttccgcaatccgtcttttgcgaaaagacaacgccccctttatcatctactttttggaaaaatattttagaagttctgcacgtactttcgttccgttcgaggagctgaaaattctacttcgttacgaattggaaaacttaaacgatcaggaagagatctccttacaaagaagcgcggacgtttatctgggagaatggattggagaaaattttctgacccggaggatacgatccgcggagggaatcgaagagatcatattggaaccctcggtcgaattggaaaaagtattctcctggatggaagacatacgatccttggaagataaggacgtgatcggcacggaatcccgttttttttccgtattaaataaattgaaagagattgtggaagagagcgtttccgatccggaggaaaaaattcgacaattggaattcaagcgggacgaattggatcttcaaattcgaaaactcaaggcgggagaacaagtatccaaatttccgagcgaaagaattcggagccaatatgtgtatgcgcgaaaggaagcgttgggattactttcggatttccgacaagtggaaggtaattttatggaaataacgaagatgatccataaaaaatatctggaggtcgttcagaaaggggaaattttacgatttgctttggacgggaacgacgagttacttcgatcggaacagggtcgtagtttccaaaccttttgggattttttacgatccgaacgaagtcaggaacaattcgaaagtatattagattctttgtattcattggaagacgttttggagctggactcgagaaagtttttccggaattttaggagaaatttaagagaagcgggttctcgggtaaacggagttgttacccgtatgtcggaacagctcaaaaaaagtttggtggaacgtacacttcgtgaaaaccgcagatcgaaagaacttatcgcggaaattaagaatttggtcttggagaatccactcgatttctctcagacggatttttattctttggaggaaatggatgtgcgttttccgatggaaaggcctctttggcgcggcgatccggaggagacgtttcgaaccgtccggatcgaaaatacggatgaggatggaaacgtattcgatattctggaatcgatccgaggaatcgatttggaaatgtacgaacaacggatccaaacgttgcttcgtatttctccggaggtttctttggaaaaggttctgcgggaatatccggacgacgtctgctttgaaagtttagtcgcttatgtttggattgcgggtaacggagaatttcattccttggacgattcggaaacctttgtatattccgtttccataatggatcatccttcggaaaaacttgcgtatcgaattcctaagggaacgtatagagtgggccatttatga

SEQ ID NO: 43356 - DNA, 564 bp, Leptospira santarosai serovar Shermani str. LT 821
atgaataaaccgtatgactatgcaccttccattcttagattgttgaaaggatcgatcaacagcgagtccgatgcaaagatttggaagaatcttttggacaacgaaaaaccggtgcgggaacactttgaaaaactgggtatttttttgcacttggatcgggaagacggttatgcgtttctacgacagacttcggacgacgaaagtgcagaatcggatgagaaacttcccgtgatcacccgtaaacttccgcttacgaaagaagagactttgtttctaattctactgagggaatgtatcatagaaatcgaagaaaaagatccttccggttctatcctgtttagaaaggaagagctatcggataaagtgagtccttttttctccgacctctccgatgaaatcgatcggcaaaaaagattcgaaaaattacttcgcaaatccgaagaactaggctttgtcaaacagatcgagccggaaacgatccggattgaaaaactcttaaaggcgaaattgaccgtatccgagttagagggtttacgcggtaagtttcgactaggaacggaatag

SEQ ID NO: 43357 - DNA, 3357 bp, Leptospira santarosai serovar Shermani str. LT 821
atgactgatttattttcacccggtgaaattgccgccaataccggatatagacttgaattcttggaaattttaaattggggaacttttcacggtaggatttggaaattacgaccggaaggggaaaactttcttttaaccggagcgaacggttccggcaaatcaacgttagtcgacgcgattcttacgctgctcgttccggccgcaaaacgaaattataatctggcttcgggactggaaagtaaaaagagagatcgatcggaacgatcttatgtggaaggtcactacggtagatcctcttccggtagcgaaggaattttgaaaattcgcgggaaacaagaagagtgttattccgttttatcggcggtattcgaagcgaatggaaggttcccgcgaattcggattgcgcagatcttttggttcgaatccggagaattgaaaaagatctaccttttttccgataaagagttggacttcgaaaaagatctggttttgggaaaaagaaccgtaaaggaattgaaagcggatctgaaaaattccggggcaagactttacgatcagttcaaggcgtataacgtggattttaggaaagcggtgggtttggaatcggagaaagcgatcgacctattcaatcaaatcgtagccatcaaatccttaggagtgttgaacgaattcgtccgagaacatatgctcgagtccaaggataaaagatccaggatcgaggaattgaatcgtaatttttccgatctgagcgaaacatacgaggcgattgtaaacgcaaaagaacagttgaagttgttggaaccgatcgaaaaaaaagccgccgagtatagggaatggaatcggaaggcggccgatcttcaggctttgatcgtatatgttccgtattattttgcggaaaaaaattacgagcttcgtcaaatcagagaacaggattatctttttgaattatcgcgtttgaaagacagatccgacgaactatcgactgaaatcgaatccttaaatcaagaggaacggaagttattcaacgcattagaaaacaatgatactcaaaggagaatctccgatcttgtacgaaaacgggaggggattctctccgatctcaaaacgcggggaatcgaaaggaaaaaatattcctcctatctttccaaaatcggtttggaggaagcgtcctccgaagaaacattctatacgaacctgcgcatagccggaggaatgcttacggaaaccgattcgatttgggaagaaatcagggatcgattgggaaagctgacgcttcaaaaaatggaattgcaaaaaaatttcgattcggtttgttccgaattggagtatctgaaaaaaaagcgggataatcttcccagaacccagtcggaaattcgggcaaaaattgcctccggaatcggactttccgaaaaaagatttccctttatttgcgaattgatccgcgtcaaagaatccgaaaaagaatggacgggggctttggaaaggctcttgagaaatttcggcttacggatgttagtcgcggaagaggactacgaggccgtgtcggcttacgtgaattcttcctatctgggagggaagttggttttttcaagaatggttcctttatcgggaccgatcttgcaacccaaagacaaggaagaagttttctacaaattggaattgaaatcggaattgtcgaatgtaaagaaagaatggttggaagcgcagatactgcgcgagttcggacatatctgcggggatctgaatcgtcttcggaaagaggagaaggctcttacaaaagaaggtctgattaagtccggtagaattcgacacgagaaggacgatcgtaaaaacatttcggacgcaagagattatattttaggctggaacaatacggagaaaatcgccgcgttggaatccgaatttgcccttctcgggcagaacatttatcggctgaatgctgcaatcgacctagtcagagaagaggaaaacaaaaacaaaaacaaacgggacgacctgcttctttttctacgtttcgaacaattttcacaaatcgacgacgaaagtttgaaaggcccgcttcaggatacggaaagacaaatccgggaattggaattgcgttccgaagaatacggtaagttgaaggaacaatacgaactcgcaaaagctcgcctaacggatgttcaaggaagacaacgggaaaccgccaaggaattcaacgttttagaggataggcttttcactcttcggaaggacatggaagatctacagcagaggattcgaaaagtcgaccgggaaacgtcgatttcactggagccgattctcaacgaacgactgcgggaaacgatcctaaccctggagtcgatcgcggagacggaacgaaatttttcggatcgtttggttgtagagcgcgatcaatatttggagaaacgagattcgatcggagaagaattgaacaaaggaatggatcgttatgtgaaacgattccgagaggaggcggatcgggaagaattgtccgtttcggtttccaacgcggaagggtttgcgaaattgaccgaaaggattcggcaggatcgattgcccgaatttcaggaaaaatttcgaacgatgatgtccgacaaagtcgcaaagcagattttggacttcaaggcggaattggacgacgacgtctcggaaatcaaggaaaggatcgacgaactgaacgattcgttaagagatctggattattctaaaggaaaatcttatattcaaattcgatattttgataccaaggatcgggagattgtgggcgattccggctttaaggaaatgttacgcggaagtattccggatttgggagacagttctcacaacgaggaaaaattcgctaaaatcagagagttgttgaaaaagttaaagggagagggcggtagcgatcgttggtccagactcgtaaccgatcccagaaactggctggatttccaagcggcggaattccttagggataacaaccaaattcttcaggtttacgattcgtccgcgggtaagtcgggaggacaaacggtaaaactcgcttacacgattctcgcttcggcgatcgcttatcaattcaaaattcgtgaacggaattcgtttcgttttgtggtgatcgatgaaatgttcaacaatctggacggagagaattcaagatatgcgttgaacctctttcgtcaattgggtttacaattgcttgtcgtaactccgatggataagattacgatcgtcgaaccttatgtgagaagcgttcattttgtgaagaacaattcggaaggaaacgattccagagtgtatccgatttcgaaggaaaatgtatcgtccgggaaggatgaaaattcggaaaggaaagtgggaaatttatag

SEQ ID NO: 43358 - DNA, 1179 bp, Leptospira santarosai serovar Shermani str. LT 821
atgatttctccggaaattttacgcaagagatcgctggcatactatcataacgaactcttacgttctatcgtcctaggaggtgttttatttccttgggagatttcgatcggtaaagttcttccggaagagatcttaaaaaatccctctttgttacgagaattacgggccgaatcgaaagaaaacaaaggtttcggatttagaatcgtctttcgttcgaaagagacccggaaatacggaatacaaacgattcctacgaaaatcgtttttgataccgaagacgattttttgcgttttacaaaaaagaaagacgaattcctctcctatagcaccgattgtacgttgattctttccgttcttcccgagctgaaagattggattttaaaaaatacgttatccgtaatcgaagagtccggtaaatgggaaagtattctttcggtctgttcctattttttagaatataggaatcccggattgtatatccgagaactaccgattcgaattcctacgaaattcatcgaggaaaataaaaaggttttgagaagtcttttggattttctattgcctgagatcgcggatgcgaaggatttcgaaactcgttacggattaaaaaaagcggaacctttggtccgatttcgaattttggatctcgaaattgcaaagtcttccaccggaggtttaacggatttgagcattcccgtccgggattttagaaagttggagctctccggttgtggaagggtttttatcttagaaaataaaacgaatttcgcgaacctattcaattttttaagttttccgcaactgaagggaacgatctccattttcggtcagggtttcggattaaacgttttaaaggattgtaactggttggagaaaatggaaattttttattggggagatctggacgttcagggtttcgaaatcctgtcgcaactacgggaacaatatcctcaaagccgttcctttttaatggacctgaagacatttgttcggtttcgagactttgcggtagacggtatttcttcttctaaatcttccgaaccgaaatttctcactccatcggagcgcgaaacttggaagtatttaagttctttagattcgaaaaatcggttggaacaggagaaaattcctcacgaatacgtgcaagaagttctgtccggtttgggtggatcacagtaa

SEQ ID NO: 43359 - DNA, 1470 bp, Xanthomonas translucens pv. graminis ART-Xtg29
atgaagcaccgcgcccgcatcgcccgctaccgcagcctgcgcgagcagccgctgtggaagctgctcgccgccgatcacgcgccggaagtcatcggactgctgcagtcgctgctgctggaatccgaacgccggctgccggcggcggtgctgcacgaacgcttgcagcgcatgctcgacgaactcaatgccgagcagctgtcgcgcgagctgccgcgcaccgcccaggcctatgtggcgcactggctggcgcagggctggctggagcggcggctgccggacggcgcgcagcaggaagaatacgaactgtccacccaggccacgcaggcgatccgcttcgccgatgggctggagcatgcgcgcggcgcggccaccgagagccgcctggccttggtgatgcagcagctggcgcagcttgcggcgctgaccgagaccaatcccgatgcgcggctgtcggccttgcgcgacgagcgcgaccgcatcgatgcggagatcgcgcgggtgtccaagggcaaggtggcggcgctggacggcaagcgcgcgctggaacgcgcgcgccaggtgatcgcgctggccgacgaactgaccgaggatttccgccgcgtgcgcgacgatttcgagcagctcaaccgcgacttccgcgagcgcatcatcgacgacgagggcgagcgcggcgagatcctgggcaagctgttcgaaggtgtggacgtgatcggcgacagcgatgccgggcgcagctttcaggcgttctgggccttgctcaacgatgccgagcagagcgcgcagctggacgcggcgctggagacggtgctggcgcgctcgttcgcgcgcaagctcgaccgccgcgagcgcggcttcctgcgcgggctgaccggcaccatgctcgagcgcggcggccaggtgcacgacgtgatgcagcatttcgcgcgcagcctgcgcggtttcgtgcagagccgcggctacctggagcagcgccggctcaaccagctgctcaagcaggcgcaggccgaggcgctggcgttgcgcgaccatattcccgcccaacgcagcatcggccgcgatctgaacctgactaccagccgcctgcgctcgctggcgcaatggcggctgcatgacccgcgccagcagcaggtcgagggcagcatccagcgcaacgaggcggcggcgatttcgctggacagcgtcggcgacctggtggcgcagtcggaaatcgacttccgcagcctgcgccgcgatctgttcgacctgctcgccgagcagccgcaactgtccatcgcccaggtgctgacccagcgcgaggccagccagggcctgggcagcgtgatcggttacctgtcgctgggcacccgccatggcgtggtcgctgccgggcagcacgagatcgcgcaatggcgcggcggcgacggccagtggcgccgcgcgcgcattccgttggtgtggttcacccaggagaaacgccatgaactggcatga

SEQ ID NO: 43360 - DNA, 705 bp, Xanthomonas translucens pv. graminis ART-Xtg29
atgaactggcatgaccacgaatgggatgccgagcaggaacgcctgccggacgcggccgacaacgcggcgcccgacgccggtagcggcctgttccccggcgacagcggccggctgccggtggaggcgcggcgcgcgctgtgccagctgctcagcggccccagcgtggacgcgcagcgccacagcaagttgtggccggcgctgctgcgcagcgaggcggcgatccgcagcgccctggccgacctgttcctggaactggtgctggaccgcgacgccggcatcgccttcacccgccaggccgacaccggcgaactggaagcgccggtgctgctgcgctcctcgccgctgaccttcatcgattcggtgctgctgctgcacctgcgccagcaactggccgaagccgatgcgcgcggcctgcgcgcggtggtggaggaagcgcagctgggcgaggcgctggcggtgtacgagaagaacctgtccaccgaccgcgccggtttcctgcgccgggtcggcaatgccgtgcagaagatgaaggacaaccacatcctgacccgcctgcgcggcgaagacgaacgctacgaagtctcgccggcgctgaagctgctgttctcggccgaggacgtcgccgcgctggcgcaggtgtaccgccagctgcgcgaaggcccgggtagcggcgaggacgccgccgaagctgcgcaggacgcctag

SEQ ID NO: 43361 - DNA, 3537 bp, Xanthomonas translucens pv. graminis ART-Xtg29
atgcgccgcctgcaggtgcacaactggggcacgttttccggcctgaccgagatcccgatcgccgcgcgcggcttcctgttcgtcggccgctccggctcgggcaagtcgaccctgctcgatgcgatgtcggccttgctgacgccgccgagcatcgtcgatttcaacgccgccgcgcgcgaggccgagcgcagcggccgcgaccgcaacctggtgtcctacgtgcgcggcgcctgggccgaccagcaggacagcgagtcgggcgagatcgccacccagtacctgcgcaagggcgccacctggaccgcgctggtgctggaataccgcaacggcgaggaccgcgtggtcagcctggtgcggctgttctggatcgccggcaacggcaccgccgcggccgacgtgcgcaagcactacatggtggccgagcgcgcattcgacatcgccgccgatctggacggcttcgacctggacctgcgcaagctcaagcagcgcctgcacgacgtgcaccatttcgacagcttcgccggctatgccgaacgcttccgccaccagctcggcatcggcaacgagatggcgctgcggctgttgcacaagacccagtcggcgaagaacctcggcgacctcaacgcgttcctgcgcggcttcatgctcgaggagccgaagaccttcgacgccgccgagcgcctggtcggcgacttcgccgagctcgacggcgcgcatcaggcggtggtgaccgcgcgccgccaggtcgagaccctgctgccggcgcgcgcgcaccacgccgagctgatggcggtgcgccgccagcgcagcgagctggacgaactcaagctcggcatcgacagctaccgcgagcagcgccgcctggcgctgctggatgcgcggctgcaggagctggacacgcaggatcgcggcctggccggcgaggaagggcaacgccgtgccgcgctggagaaccatcagcggcgcctggacgacctggaagcgcagcgccgcgcgcaaggcggcgagcgcatcgatgcgctggaacgcgagcgcggccagcaggaaaccgagcgcgaccgccgcgccgccaagcgcacccaggcggagcaggcctgccgccagctggagcaggtgctggccggcagcgcgcatggcttcgccgaacaggccgcacaggcgcgcgcggcgctggaggacggcacgcgcgcggccgccgaactcgacgaggcgatcggccagcgcatcgccggcaaggccgaggacgccaggcgcttcgccgaggtgcgcgccgagatcgacgcgctcaagcgcaacccgtccaatatcccggcgccgatgcaggcgctgcgcgcgcgcctgagcgccgacaccggcgtgcccgaggcggccttgccgttcgtcggcgagctgctgcaggtgcgcagcgaggacgccgactggcgcggcgccatcgagcgcgtgctgcacggcttcgcgcaatcgctgctggtggacgaacgccattacgccgacgtggccgactgggtcaaccgcacccatctgggcatccgcctggtctattaccgggtgcgcgacaacgagcacgccttgcctgggcgcgcgccggccgccggctcgctgctgcacaagctggaactgcgcgagcacgccttcgccggctggctgcgtcgcgaactgggcaagcgcttcgactatgactgcgtggacagcgccaaggcgctgcgccatgccgagcgcgcgatcacccgcgaaggccaggtcaagcatcccggcgagcgctacgagaaggacgaccgccatgcggtcaacgatcgccggcgctggctgctgggcttcgacaaccgcgacaagctggccttgttcgaggaagagggcctggcgctggcgcagcgcatcgccgcctgcgatgccgacgtggccgcgctgcgcgcgcgccgcgaacgcgacggcgcgcggcgcctggcccagcacaccctggccaacctggcctgggacgagatcgacgtggccgcgccgctgcagcgcctggaggacatcgccacggcgctgcgccagttgcgcgagggcgatgccaacctgcgcgcgctgggcgaggcgatcgaccatgcgcgcgccgacatcaagcaggccgagcgcactttcgatggtgtgcgcaccgagcggatcactctcggtgccgagcgcgcgcggctggagaagcagcggctgtcctgcgccgacgcggacgcgcgcgtggtcacaccgctgcagcggcagggactggacgaacgcctcgctggcctgggcgtgctgagcctggacaatctcgaggcgcattttcgccagatcggcaatgccatcgtcgagcagaccagcgccagcgacaaggaacacaaccgcctggagcaactgctgctcggctgcttccgccgctactgccagcaatggcccgaagacagcggcgatttcaccgtcagcctgagcagcgccgaggatttcctcgcgcgcctgcagcgcctggaacgcgacggcctgccgcagcacgaggcgcgcttcttcgagttgctgcagagccagagcaagaacaacctgctggccctgcagcggcataccgccgaggcacgcaagtccatcgcccagcgcctggacgaggtcaatgccagcctggagcaggtgccgttcaaccgcggcaccttgctgaccatcgaactgggcgaccgccgcctgccggaggtgatcgatttccaccagcgcctgcgcgacgtgctcggccaccaccagaccgagcagcgcgaactggccgaacaacagttcgcggtgctgcgcgaactggtgcgccggctcgggtcgcaggacggcgaagacaaacgctggcgcgagctggtgctggacgtgcgcctgcacgtggaattcgtcggcgtcgagctcgatgccgccacccgccagcaggtggagatctaccgcagcggcgccggcaagtccggcggccagcggcagaagctggcaaccacctgcctggccgcggcgctgcgctaccagctcggcggcgaggacggcgaactgccgcgttactgcgcggtggtgctggacgaagccttcgacaaggccgacaacgagttcaccgcgctggcgatgaacatcttcgagaacttcggcttccagatggtggtggccacgccgctgaagtcggtgatgaccctggagccgttcatcggcggcgcctgtttcgtcgagatcagcggccgccacgattcgggcgtgctgctgatcgaatacgacgagcaggcgcgccggctcaagctgcccgagcgcacgcgtggcgcgaatgcggcggacgccgccgcggctgcaccggacgagcaggaagcgccggaagcggagcaggcgcagccggcgccgcagcgcctgcgtgcgggcgccgtggcggtcgtgcgtggcactgcggctgatcctgcgcttgccgatgctgccgccgccacggcagccacgccgcagcgcacgccgcccaagtccaagccgacgtccaggacgaagccgacgtccaaacccaaacccaaacccaaaccgaaggcctga

SEQ ID NO: 43362 - DNA, 1179 bp, Xanthomonas translucens pv. graminis ART-Xtg29
gtggcgcgcgctaacgcgatgctgctgcccgacgccgcgctggccgcgctgcgcgggcaatggcggctgcaccgcggcgcctggctgctgggcgaggccgcgccgcagccagtggcgctacgcatgccgactcaggcccaggccagcgccggattcgaggcgttcggcgcctggctgcgcgcctggcacgccacgccgttgccgggacgcgtggaatggcgcgatgtgaaatggccgcagctcggcccgcaatgtctgccgcaggcctggcagccgaacgccgacgaggccgcgctggcgcttggcgaacatccgcgctggcagcgcgcacgccagcgctgcgcaacgctcgtcgcgcgctggccgcaggcattggggtttgccgcgcgcctgcgccggcagttcgacctgctcgccgatgcgccggaagcggacttcgtgcgcctgctcgcggtggtcgagtggttgcacgcgcatcgcgacagcggcctgttcctgcgccagttgccgatcgccggcatcgacagcaaatggatcgagccgcgccgcggaatcatcgccgactggctggccgggctgcgcggcatcgccgaaccgcgcggcttcgacagcctgtccgggctgcgccacgcgcccgaccgggtgcgcctgcgcctgctcgatccggacctgcgcgcgcggctcggcgggctggacgacatccaggcgccgatcgcgcagattgccgcgctgcagctgccggtgcggcaggtgctgatcgtggagaaccgcgagaccggcctggcctgcgaggacctgcccggcacgttgctgctgatggcgcgcggctacgcggtggactacgtgcgcgccatcgactggctgcaggcactgccgctgtactactggggcgacatcgacacccacggcctggcgatcctgcatcgcctgcgccggcatgtgccgcggacgctcgcactgctgatggacgaaaccaccttgcgcgctacgccatccgaactgtggggacacgagcggcgccagcatcgcgcgcagcggctggacgcgctcagcaccgccgagcaggccttgtacaccgacctgcgcagcggccgcttcggccccgcgccgcgcctggagcaggagcgcatcgcctgggactacgcatggccgcgcatccacgccgcgctggccggataa

SEQ ID NO: 43363 - DNA, 1464 bp, Brevibacterium casei S18
atgtctgccctgagttccgcactcgcctacaagcgactgctcgagtccgatgagactctgcgcatgctccgggccgaccaccttcccgtgatggcagtgaccctcgatgcccacctcggccggccgggcacgcgtatgatcaccgaggacctccatgagagcatcgactccgacctcgaggatctgcgcgaccacttcccgctcggcacccgcaccgcgaaggcctactgcgacgactggcggcgcgcgggcatcctcgtgcggcggccggccacctcggcgcgcggggagacctacgagctctccgccgcgggcttcgatgcgatccggatgctcgaacagctgcgcaccccaccgcagacggcgaccgaatcccggctggtcagcctcgcccaggcggtgcggcagctcgcgatcgacaccgaccccgacagcgcccgccgactcgccgcgctccacgccgaacgcgaccgcatcgacgccgagatcgcccgcgtccgccgcggcgacccccgctcgatcgtgctcgaccggcgccgcgccaacgagcgcgtcgccgacatcctccagcaggcccagggcatgcccgccgacttcgcgcgcgtgcgcgcccggttcgaagagctcaaccaggacctgcggctctcgatcctctccgccgaggactcccagtcgaaggtcctcgacgaggtcttccgcggcgtcgacctcatcgaatcctccgacgaaggtcggacgttcgccgcattctccgccctcgtccgcgaccccgagcaggcagcggccttcgacgaggacatcgcagcgatcctcgaccgcgacttctccgcagccctcacccccgagacccgccggtccctgcgcaccctgatgcggcagatgaaggacggctcccgcgaggtctccgacatcctcaccgaattcgcccgcggcctgcgtcgctacgtccactcccacgaattccaacgcgaccgcgtcatgcgctccctcctccaggacgcgctcgccaccgccgccccggtcgccgccgtgcggcggccctacgacgacgtcggcgtcgaactcgagctctcgagcgttcccctcggcagcctcggcgaggtcatcctccacgatcccgccgagttcgacgccggagacgaactcgccgaggcgggggaggccgacgtcgacttcgccgagctcatcgccatcgcccgcgagtccgagatcgacttcgccgagctcaccgacaacatcaaccgcgccatcgccgggaccgactcggtcaccgtcgccgaggtgctcgagacctacccggccacgcagggcctggccagcgtcgtcggccttctctcgctcgcgagcacctacggcaccgtcgatcccgaggccagggagaggatcacctggtccggcgtcgacggcgtcgaccgccacgccatcatccgccgccaccgtttcaccgaaggcatccgactatga

SEQ ID NO: 43364 - DNA, 741 bp, Brevibacterium casei S18
atgacagacacccccgacacccgcctcgacgccgaccggcaggcgaccgacagccccgacggactgtggaccggggacacgggaacgctcggtgagaacacccgccgagtcctcctcgaactcctcaagggcccctacgtctcgggcacgcagagcccgcagctgtggtccgccctcgtcaccgacgaggccctcgtccgttcccgcctccacgagctcttcctcgaccttgtcatcgacaaggtcgacgagttcgccttcacccgcaaggtcgtcaccgacgaactcgacgtcccggccgccgtgcgcagcgaacgcctgaccttcctcgacaccgcgatgctcctcgtcctgcgccagctcctcctcgccgcccccggagaacgccgggtcatcgtcgaccgcgacgaggtctacgagcgcctcgcgatctaccgcaccggcgacgagtcgaccttccagcgcaacctcaacggcgcgtggggacggatgagcaaccgcctgcgcgtcctccacaaggtcggcgacgaccgcttcgagatctcgccgatggtgaggttcctcatcgacgaggaccgcgtccgcgagctcatcgacgtctacgaacgcatcgccggcaccggggaggccggcaccgccgacacagataccgatgaccccgccgaggcggtcgctgacacccggaacgcaggcaccggcgaccccgccacgaatgtcgcccacggaaaggtcgacgcatga

SEQ ID NO: 43365 - DNA, 3402 bp, Brevibacterium casei S18
atgaccgaggccctcttcccgctcgacgccgccctcatcgccgaccaggcccgcgcccgcggggcgcaccggcccgacgtcggcagccagtggcggctctcggagatccagatcgcgaactggggcaccttcgactccgacatccaccggatccccgtctcccaccgcggccatctcatcactggaccctccggctccgggaagtcctccctcctcgacggcatcgccgccgtcctcacccccgacaagtggctgcgcttcaacgtcgccgcccagaccgccggcagccgcgtcgaccagcgcagcctcgtcagctacgtccgcggggcctggacgcggaccgcggactccgacgaggaccgagtggtgagcaagtacctgcggccccgtgccacgtggagcggcatcgtgctgcgctacgacaacggctccgaccgtccgctcaccctggcccggctcttcttcctcaagggatcgagcacgaccgcggccgacctcgccgacgtgtgcctgctcgaacgcgccggcctcgacctcgccgacctccagcagtacgcgcgcaccggactcgagacccgcagactcaaggccgatcaccccgaggcggtcatcacctcgaacggcatgcacgcgaagttctacgcccggatgcgcaaggtcttcggcatggccagcgatgccgccctccagctgctccacaagacgcagtcggcgaagagcctcgacagcctcgaccgactcttccgcgaccacatgctcgaggtccccaacaccttcgccctcgccgacacggcggtgagcgaattcggtgacctcaaggacgcccacgaccacgtcgtcgaactccgtcgccaacgcgaccacctcctccagctgcgcgacgccgcgacacgctacgactcggcccacgaggccgaagcccaggccgtcgccctcaacgacgccctcctgccgttccagaagcgccgcgagctcgacgtcctgcgcaccgagctgagcgcccgcagccgcgacctcgtcgaactcgaggttgccgccgatcgcgccaaacgcgactacgacaccgccgtcgacgactacgacctcgcccgccgggccaccctcgaactcggcggcgccgaagccgagcacctccagcagcgcatcgccaccgccgagaccgaacggcgcgccgtcgccgaccgctgggccggcctcgaacgccgactcgaacaggcgggcatcgaccacgcacccacctcggcggccgagttcgccgcactccaggagcagatcgccgccgccctcgacgacgactccgagagcggacccagccacgccgatcacgaccgcttctcgacggcacgccgtcgggtcagggacctcgaggccgagatcgactcgctgcggaagtccgggtcgaccgtgcccggcagcctcctcgagatccgccgcgaactcgccgagggcaccggcctgagcgagaaggcgctgccgttcgccgccgagctcatcgaagtcgaccccgcccacgcgcagtggacgggagcgatcgaacgcgtgctccgacccttcgcgctcaccgtcctcgtccggcaggagaacctcggcgccgtccgctcctgggtcgacgcccaccgggtcaggggacgtctcgtcttcgaggagatcccggccaaggctcccaagccgcgacccgcgagcagcgagaagtccctggtcaacaagatcgacgtcgccgaatcgggattcggcgaatgggtccgctcggccctgtccgaacgcttcgacgtcgcctgcgtcgaccgtccggacgacctcgacgactacgcccgcgccgtcaccctggccggtcagatcaagtcctcacgcacccgatacgagaaggacgaccggcgccgcatcgacgaccgcagcaactgggtgctcggcaaccgggacgccaagctcgacgcgctcatcgactccctccgcgacgcgcagacggagctggctgcagccgaggagatcgtccgcgccgcgaccgcggagaccgccctggccaaccgccgcaagggcatcctcgccggcatccgcgaacagtcgtggcgtgacatcgacactgccggcgccgaggcggcgatcacggcgctcgagaagcagctgagcgacctcgaggccgccgacggcgacctccagcaggcgatcggcgccgaacgtcgggcccgtgcggccaaagagtccgccgaggcgcagacccgtgacgccgactatgcgctgcggcgggcgaacgagcagatcagcgacctgcgtgccgacatcgaccgcctcaccgaggacatcgacgccggccgcatcctcgaggtcgaccccgccctcgccgacgccctcgatgcccgcttcgggaaggtcgagggcagcatcggccgggagaccctcgccgaggcgggccagcaggtgtcccagaccctgcaggcagagaaggaccgcgcgcaggcggcggcgagcgaggccggtcaggccgtgacccggttggccgcggagttcaaggcggcctggccgtcggtggccgtccagctcacggccgaggtcgctgaccgccacgactacctcgtcatgctcgacgagatcgaagcccacggtctgcccgaccacgagaaccggtttcgcgacctcctgcgcgagcgctcccgcgacctcatcggggagctcctcaacgagatctacgccgcctcgcacgagatcgaggaccgggtcgccccgatcaactcctccctcctgcgctcccgattcgacgaaggccgctacctccggctcaaggtcaagacccgccgcagcgagaccgtcaacgccttcatcgccgacctccgccggatcgtcggcggcggctggaacgaagacgacagcgagactgcggaagagaggtacgcgaccctcgccgaggtgatgcgccgcttcgcctcgagcgagcacgtcgatcgggtatggcggacccagtgcctcgacacccgactgcacgtgagcttcctcgccgaggagatcgacgaccacggccgcgcgcacgcgacttacgactcgggagcggcgatgtccggcggacagcagcagaagctcgtcatcttctgcctcgccgccgccctgcgctaccagctcgccgaccccgacgaggcgatctcgaagtacggcacgatcatcctcgacgaggccttcgacaaggccgatgcccggtacacgcggatggcgctcgacgtcttcctcgaattcggcttccacatggtgctcgcgaccccgcagaagctgctccagacgatcgaaccctacgtcggtgctgcgacctcgatcgagaacccgagccggcagaagaccctggcctcgacgatggtgtgggagaccggcgacggcagccacggtgaaggtgcgcgagccgagacgccggtgacctga

SEQ ID NO: 43366 - DNA, 1455 bp, Massilia timonae CCUG 45783
atggattaccagcagcttctcgcccagcgccgcgcgcacccatcctggcggctcctcgccgccgaccacgcgccgatgatcgccagcttcctgcaccgcagctttgtcgcgcccaatgtgcgcacgattgcccgccagcagctggtgtcgcaactggacgatcacctgtaccagcttcatgagctgaccggcgaacagctgtttcccaagcccgcggccagctatctggacgactgggcgtccgacgaccgcggctggctgcgcaaatactatccaccaggcgaagacgaaccgcactacgatctgacctcgcctgccgagcaggccctggaatggctgcagggcctgggccagcgtgctttcatcggtaccgagtcgcgcttgatgaccgtgttcgacctgctcaagcagatcgccgacggcaccgagctcaatccccgtgcgcgcattgccgaactccagaaacgcaaggcggacatcgacgccgaaatcgcgcggatcaaggagggccacctgaccctgatggaaccgacccaggtgcgcgaacgcttcctgcaaatggcggccaccgcgcgtgaactgctgtccgattttcgtgcgctcgaccagaacttccgcatgctcgaccgcagcgtgcgcgaaaggatcgccacttgggacggcggcaagggcgaactgctgcagcagatcttcggctggcgcgacctgatcaccgaatccgacgaaggcaagagctttcgcgccttctgggacttgctgatgtcgccgtcgcgccaggatgaactgggcaagctgctggagcaggtgatggcgctcgcgccgatccgcgaactcgaacccgacggccgcctgcgccgcatccactacgactggctggaagccggcgaggttacccagcgcaccgtggcgcgcctgtcggagcagctgcgccgctatctggatgaccaggcctggctcgagaaccgccgcatcatggagctgatccggcaggtcgaacagaaagcgctgtcgctgcgcgggcaggttcccgatgcggccttcgccgacatcgacgacgccgggccggagttcgccttgcccatggagcggctgctctacacgccgccattcaaggccgacattcgcgcggtggaagtcgaggaggccggcgcgaccgccttgtccgatgcgctgttcgaacaggtttacgtcgaccaggtgcgcctggcatccaacgtgcggcgcgcactgcagacccgcagccaggtatcgctggcggcggtcgtgatggacaatccgatcgagcagggcctggccgaactggcgacctacctgaaactggcgacccaggacgtggccgccgtgatcgacgacgagcgcgatgaatgcgtccgctggaccggcgccgatggccaccagcgtcaggcgacgctgccgatggtaatctttacactacgggaacgagaggacgaatga

SEQ ID NO: 43367 - DNA, 597 bp, Massilia timonae CCUG 45783
atgattgacgacgaccagctgggacaagtggtagtcaccctgttccagggcgtgctgtatcgcgaaaacgccgagccgcaatggcaggcactgctcgacctgcaggcgcgcgtgcgcgactattgcagcgtgatcgggctcgaactgatccttgacgaggcggagggctatgcctatctgcgccagcgggcgtccaagcccgagacgccggacttgccgcgtctggtccagcgccgccagctcagcttcccagtcagcctgatcctggtcctgctgcgcaagaagctggccgagttcgacgcgctcagtgcagatacccggctggtcgtcagccgcgaggacatcgtcgaccagatgcgcctgttcctgcccgataccgccaacgaagcgcgcctgctcgaccgcatggatacgcatctcggcaaggtcgtcgacctcggcttcctgcggcgcctgcgcggtcaggacgggcagttcgaagtgcggcgcgtattgaaggccttcgtcgatgcccagtggctcgacgacttcgcccagcgcctggacggctatgccaggcatgccggggcgagcgccggcaaggagggcgtcgaatga

SEQ ID NO: 43368 - DNA, 3369 bp, Massilia timonae CCUG 45783
atgaacgccggacccgatcccgagctggcgacggcgaccgagcaggccggcttccgcctgcgccgcttcgaagtgtacaactggggcaccttccaccagcgcgtttggaggatgcagccgcacggcgccaatatgctcctgactggcgatatcggatccggcaagtcgaccctggtcgatgcgctcactaccttgctggtcccgttcaacaagatctcgtacaacaaggcggccggcgccgacgcgcgcgaacgctcgctgcgcacctatgtgctgggccacttcaagtccgagcgcggtgacaccggcctctccgcgcgtgcggtcgcgctgcgcgaccagcacagctactcggtgctgctcggagagttccataacgaaggctacgaggagaccatcacgctcgcgcaggtattctggttcaaggacccgcgcggccagccggagcgattctatgtggtcgccgaaacggcgctgacgatcgccgatgatttttcgggcttcgccgacatcaatcagctgcgcaagcgcctgcgagcgcggtccggcattgctctgcacgacagcttcccagcctatggcgccgatttcaggcgccgtttcggcatcgcatcggaacaggcgatggacctgttcaaccagacggtgtcgatgaaatcggtgggcaacctgaccgagttcgtgcgtgagcacatgctcgagccgttcccggtgcaggcccgcatcgacatgctgatcacgcacttcgacgacttgaaccgggcccacgagacggtgctcaaggcgcgcgcgcagatcgagcgcctgcaacccctgaacgccgactgcgatcgccacgcggcgctggtgacgcagatggatgagctgcggatctgtcgcgaagccctgcggccctggttcgcgctgctcaagaccgagctgctggacaagcgcatcgccaacctggcagcggacgaggaacgcaccgccacccgcctggcccagttggagcaggagcggcgcgaacacgcccgtacccgcgacgaactgaccgccgccatctcggccaatggcggcaaccggatcgaacagatcatgggcgagatcgcgcgcgtcgacgccgctcgcagcgaaaagaacgcgcgcgcgcagcagtacgagctgatcgcctcggcgctcggcttgccggcgccgcacgatgccggcgccttcgatgccaaccggggcgccattgacacaggccaggccgcctgcgtcgcgcagcgcgacgagcgcagcaaccgcctgaccgaggctggcgtgacggtgcgcgagctgagaaagctgcacggcgaactgaccgacgaactcgaatcgctgcgcaagcgccggtccaatattccgcgccagatgctcacgctgcgcgaggccttgtgcgacgcgctaacgatcgcgcctgatgcgctgcccttcatcggcgagttgatccaggtgcgcgaggacgagcgtgcctgggaaggggcggccgagcgcttgctgcatgccttcggcctgtcgctgctggtgcccgaacagcattacgcgcaggtggcggcatgggccgagcgtacccaccttggcgcgcgcctggtgtattaccgggtgcggccattgtccccggccgagccgccatccctgcatccgcattcattggtgcgcaagctgtcgatccagccggattcgccgttctatgcctggatcgagggcgagctggcgcggcgtttcgactatgcctgttgcgactccatggaactgtttcggcgcgagcagcgcgcgatcacccgtaacggacaggtgaagtcgggcggcgagcgtcacgaaaaggatgaccggcgccagatcggcgaccgcaccagctatgtgctgggctggtcgaacgaggcgaagatcgcggcgctggagaagcaggagcgcgacctgtccacgcgtatcacggaacataccaggcaaatcctcgagctcaagcgcgaagctgccgaatggggcagagtgctcggtctctggcagcagttggcggtgttcgccagcttcgctgatctcgactggaagccgctggtggcgatgatcgacaggctcgagcgcgagcagcaggagctggcggcatcgtccgacctgctgcgcaccttgcagcagcagttgcgcgatctcggagacgtccaggccggcatcgatgcgcagcatgcacaggccaatgccgcgctggcgacgctggtggagaaattgagccaggcccgcagcctgctgggcgagagcgaggcgcttgccggtgcgatcgacgacgccatgcgcgccactacgctgccggtgctcgagacgctgcgcgagcaggccttgggcgagcacacgctgacggtcgaatcatgcgataaccgcgagcgcgacatgcgtgaattcgtgcaggcacgcatcgacgccgacagcaaacgcatcgcgacactgcgcgacaggatcatcaccgccatgcaggactatgcgactacctggccgctcgatgcgcgcgaggtcgatgtgagcatcgaggcggcgcccgagttccggcgcatgctgcaggtgctggaagccgacgacctgccgcgcttcgccggcaagttcaaggagctgctcaacgaaaacacgatccgcgagatcgccggattccagtcgcagctcaagcgcgagcgcgaaacgatccgcgagcgggtcgagaccatcaacacctcgctgcatgcgatcgactacaacccgaatcgctacatcgccctggaggcggaaccgagcctggacgccgacctgcgcgacttccagcaagacctgcgcagctgtaccgaaggcgcgctgaccgggtcgagcgacgaggagtacaccgaggcgaaattcctgcaggtgcggcgcatcatcgagcgctttcggggccgcgaaggctgcgccgagatggaccggcgctggacccgcaaggtgaccgatgtgcgcaactggttcgtgttctcggcgtccgagcgttggcgcgaggacgacagcgagcatgaacactacaccgacgccggcggcaagtccggtggccagaaggagaagctggcctacacggtgctggcagccagcctggcctaccagttcggcctcgaatggggcgccgtgcgttcgcgctcgttccgcttcgtggtcattgacgaggcgttcggacgcggttccgacgaatctgcgcgctatgggctggagctgttccggcgcatgaacctgcaactgctgatcgtgacgccgctgcagaagatccacatcatcgagccatacgtcgccggcctggggttcgtgcacagcgaagaaggtcggcagtcgatgctgcgctacctgagcatcgaggagtaccgcgccgagcgcggtgcgcgggccggatga

SEQ ID NO: 43369 - DNA, 1203 bp, Massilia timonae CCUG 45783
atgatggcggcgcgcagcgcatggtcgtcgccgggcgacatcgtcgccagcgtccagcgcctgtgggacagcggcgctatcctggcggcgcgcctggacggcgtcgccttgtttccgcatgaagtccggctgcggcaaccttcggtcgcagccatgggcgagcagttcgacctcgtgcgcgactggatcggcgccttgcgcagcagcagccgtccagaacgcggcgatggctatgagctggtctggcgcgacatcaaccaccgccagctggggcgcaaccgcatcccggttgccgccatcgtggagtcggaagcgtcggcgctgcgcatgatcggccgtggcgcggacacgcggcgcttcgacgaattggtcgccatgaccctcggcgcgtttcccgtccttcgtccctggctggccaggcagccgctccgcctgctcgagcacggggatggatgggagcgcgtcctggccgtgctgcgctggttcgtggcgaatccacgtccaggcatctatctgcgtcagctcgatatcccgggtgtcgacacgaagttcatcgaagtgcgcaaggggctgatggccgaactgctcgatcaggtgctgcctgccgaatcgatcgatgccggcgccgtcggcgcgcggcagttcgacacgcgttacgggctgctgggaaaaccagcgcaaattcgtttccgcatactcgaccagcggcactatgtcggcggttgctccgacctgatggtgcctgtggcgcagttcgccgcattgcgcacgggcgtggaccgggtctacatcacggagaacgaggtgaatgcactggcatttcccgatgtggagtcgagcatggtggtgttcggtggcggctatggcatcgaccgcctggcgcaggtggactggttacgcagccggcgcgtcctgtactggggcgatatcgatacgcatggctttgcgatcctcgatcgcctgcgggcgtcgatcccgggcgcggcatcgctgctgatggatgccgacacgttacaggcacatcgccatgtatgggggcaggaggatggcgacaaacgttgcctggcagacctgatgaggctgacggagcaggagcgggagctgtttctgcagttgcgcggcgatatccttggggagcgcttacgcctcgagcaggagcgcattggctacacatgggcggtcgacgcgattcgacaaacatga

SEQ ID NO: 43370 - DNA, 1530 bp, Sphingobium yanoikuyae ATCC 51230
atgctgttcggccaactccattccgatatcttcgcgctgttcgccgggtcgaaccgctttctctacgagcgcgtgctgatcggcctctatgaaggcttctaccgttccgacctgcatttcccgacccagggtgaggtcgtccagctgatctatacgctgctgggcgacaatgcggagctgtggcgcgaggatgaaagcccggtggtgctggacaagctggccgcgcgaccgggccgccgcgtgcgccggcacaagctggaagccgccgacgcacaggcgaccagcgcggcgatgatgcgcgcccggcacatctacaaccggctgcaggcaaccggctggatcgaggaaagccgctatggcctgaaggtcacggtcgacatgtccgccggcgccatgcgtctggccgaatttctctgcagcctgcgcgaaggcctgtccgaccagcttggcggccttgtcatccaggtgaagaacgagctggaagcgctgcagcgcaatgcgcgggaaaatgcccccggcctgcacaaggcggcgcgcgatgccgccagcttcggccgctatctgcgcagcgtgctgagcgcgctgcgcgacatcgacaagcgggtggtggaaagcgacagcgtgggccgccggctgcgccattatttcgaggatttcgtcgagaagctgctgctgcaggattatgcggccatctcgaccacctcccacccctatcgcttccgccatcgcatcttcaccgcgctggacgcgatcgaggattcgatcgccgacgtcgccgccatcgccgaagcctatcatgaggcccggctggcgcccgatccgtccgccgcccgcgatctggtctatgacgatctgcacaaggtgcggcgcgtgttcgaccagatagaggaggctttcgagcgcatccagcagcatcgcagccggctggagacgcggctgcgcaacaccgtccgctatgccggacggcgcggcaacagctttctccagcgcagcgagccgatgctgctgcaactcgaccggctgctcgcgcgcacggatgggcaggatatggcgccgtccatgtccggcctgctggaaccgcgccggtcctattggtcccccgccctgctcgcgcggccgcgcacctatcgttcgacggtttcgggcggcctgctggtcctgccgccgcccgatcccctgcgcgaatggcgcaaacggctggaccgggactatctggcccgccttgccgtcacgcccgaacaggtcagtcgattcctcgaacggcgcgtggcgcccttcggatcgggcgaggccagccgcttcgcgatcgagacggtcgatgatttcctgacgctcgaagccctgcgcctgtccgtgctggccgctgatgccgacggccggggcaatgccatcgccaaccatctggcgccccatttccgcttctcggtcgataccggatcgaccatcgacaatgactggctgcactgcgcgggcttcaccgtctcgcgcatcggcgatgccgtgaccccagagatacaagatgctcagtga

SEQ ID NO: 43371 - DNA, 669 bp, Sphingobium yanoikuyae ATCC 51230
atgctcagtgaatttcagaccctggaggcgcgcgatccgcgccggatgcaccgcgtgacccaggcgatcagccagttgctgcgccatcagttcctgcatgtgcaggatcgcggttcatcggccctgctcgaagtcctgctccgccccgaggtcgagcggctggtggcggattatttcgaagttgcgggctatcggctggtggtgcgcgaaagcgaaggctgggccggcatcctgcccgataccgaacagatcggccatccgcgcatgcggatcgacgagacgctggtgctgctgctgttccgccgattgtgggaagagggcatccaggaaggcgatgtcgaacgctatggcagcgtgatggtgacgctcaacgccgcctatgacgcctatcaggacatggtcgcccgcgcccgccgcgcgacgctgggcatcaacgagttcaaggcgctggtcaccgcgctcgaccgccgggcgatcgtccatatgggcgacatcgacgaagagctggaggacatgccgatcaccatccgcgcgctgatcgcgaccgtcgcgggcgaggagttcatggcccatctcgaacaattgctggccggcggcgactatcaggaaagcgagacggaggagcccgtcatcgatctggatgatgccgacgaggaggaggtcgcatga

SEQ ID NO: 43372 - DNA, 3444 bp, Sphingobium yanoikuyae ATCC 51230
atgatgcagcttgcccatatcgcactggtgcaatggcatctgttcggtcgcgaggacctggccgtcggcggcgacaccgccgtgctgggccagaaccgctccggcaaatcgacgctgatcgacctcatccaggcggtgatgaccggcggctcgcggcgctggtatcagttcaatcgttccgccggcgaaaccggcagccgcaagtcggaacgcacgctgcgcggctattgcctcggccagctcaacgaacatgaatttctgcgccaggaatccgtcacccacatcgtgctgacgttcgacgaccccgatggtgtgcgcccgccggtgagcgtgggcctgtgcgtcgaggcatccgcgatcgaggatgcacaggtggtcggccgctatatcgcgcccggcgtgcgggtggataccgacctgctgatcgagcatctggatagcgggcagcagcgctcggcgccctggagcctggtgcgcgaacggctggagcaggcctgcgcagcggccggcacccagctcattcgccccgacggcccgcgcaaccatatccgcgaatatatgcgccagctgttcaccggccggcgccacagcgatccggatcgcttcatccgcgccttcgtcatggccctgtcgttcgaggacatgcgctcggtcgagggcttcgtgcataatttcctgctcgcccggaacgacatcgacatcggcgagctgcgcgagggcatccagcgctatcgcgacatccagaaggatgtgcatgagctggaacggcggctcgacgcgctgcgggcgctggccgaactcgtatcccgcttcgtcaccttgctggaacgggaggatgtcgcccgcggcaccgcccgcctcgccgccatgatcgaggcgggcgccgcgctgatcgccaatctgcgcgaacggcgcgacacgctggcggaactggatgacatccagcaggatatcggccgctgcgatgcggagatcgcggcactgggcgatcggcaggacagcctgctcgcccagtccgtggcggagggcgccgccggcaagcgtgccgtggtcgcgagcgaactcaaggccgtggacctggcccgcaccggcgtggtgcaacggctcgaagcccgtttccgtgcggccgcgctcggcgccagcctgctcgaccatcgcgagcggctcgcgcccctgaagctcggcgccctgttccaggcgctggaggcgctgcggcagcacagcgacgggctggagccgccaacatggccgcgagatccgctggcgatggaggacctgatcgccagcgcccgccgcagcgccatcgatagcatcgccaagatccaggaacgacgcgaccaggcgatcgcccagcggcgcggcctgcaggacgagctggccgatctggtcgcgcgccgcgacaaggcgcgcgccggccaggtgagcctggatgatcgcaccatccgcctgatgggcgcgctggagcgggagaatatgcgcccgcgcacgctctgtcaggtggccgaaatcgtcgatccgcaatggcgcgaagctgccgaggccctgcttgggcgcgaccgcgaggcgatcctggtcgatcccgaacatgcgtcccgcgcggttgagatcgtgcgcgccaaccgtgacggcttccgcggatgccgggtcatcaacagccgccgcctcgccgaacagccgcccggcttcgacaccgattccctcgccaccgtctttgccagcgacgacccattggcgatcgccttcctgcgcttccgcaccggccaggtgcggctcgccggcacccaggcggaattgctggcgggcggccgcgcgatcatgcgcgatggcgcctataatagcggcatcgtggtcgaggtgctgcgcacccgcgacctcaagatcggccgggccgcagccccgctgatggaggccgaactgctcgcccggatcgaggatcggcaggcgctgatcgccgtccatgccgaaaccgagcggttccatgacgatattcatcgcaagctgctgccgctgatggccgatgtcgatccggccgaccggctcgacctgctggtcgccgcgatcgaccagcatgaggaaagccgctccgaattgcagcaccggctcgacaagatcgcgatgacggtcgatccggcaatccagcacaatctggacaaggtgaagctgcaactgcgcagcgccaccgaggaaaaggaagaactgatcggccggcgcggccagcttggccaggccaggatcgaaatccagcggcggctggatgcgggcgatgcccagcccggctcctggctctgcctgcgctcgcggcgcgccctgttcaaggatcgggtgcgctcatcggccagcctctcgatcctgcgcgaggcctatcgccagcagcgcggacgccccctgacccggctggtgcaggagatgatgaagcgcgcggacgaggcccgcgacgcctatcaggcgttgcagggcgaaattcgcgagacgctgggccattaccgcgccgatttcgacaatagcgcgcccattgccctgcccggcgcgatcgcgaccgaagtgaagccctggctcgccgccaatatcgcggcgctggaggaaaatgagctgatccagtatcggcgccaggccgacgaagccgccgagcagatcggccagctgttccgcaccgccttcatccatgagctgaacgcccgcttcaacgatctgcgttcggagctggacaacctcacccgcgcgctgcggatgcggccgcttcacggcgagatctacacgctccacgcccgtcccaaggaggagtttgccgcgctccaccggctggcgcgcgagagcgagcatgacgaactgaccttcgacgccctctttggccgggccgccccgcgcgacgccgaacatgcccaggcactggcggaggtcgaacggctgctgagcgacgagtccctcgatttctccgcctatcaggattatcgcaactatttcaccttcgacctgcgcatggaggatgtgaacaagggccgcaccaccagctatgacaagcgcaaggggacggcgagcggcgcggagcggcaggtgccctattatgtggtgatcggcgcggcgctggccagcatctatcatggcgcgcgccggcaatatgagcgggcggaactgggcctgggccttgccgtgttcgacgaggcgttcagcaagatggacggccccaaccagcgcaccctgctcgaattttacgacgatatcgggctgcaggtggtgatcgctgcgccatcggaaaagcgcgcggtcgtctatgaaaatctcgacagcgtgatcgacgtgttccgccatggcgacaatgccagcgccgaagccgtccgcatcaagccccacgcccgcacccagatgcgcgccgccaacccgcaacatctcgacgatgccgcgctggccgaacggctcgacctcttcgcgctggacagcgcggaatag

SEQ ID NO: 43373 - DNA, 1473 bp, Pseudomonas sp. M1
atggcactggaccacctcacgctcacgacataccgcgatcggcatcctgcatggcgattgctcgcctcgccacatgcgccattggtagcaagcttcctgtaccgggtgttcgttgcaccgaacgtgcggctgacgagcgaagcggatctggccgaaatgctggaagacgagttgtttgccctgcgcgaacagctcggtgccgaggcgtatccgaaagccgcaaccgaatacctgaatgactggtgcgcgccggacaagggctggctgcgcaaattctacaagcccggcaccgacgaggcccagttcgatctcacccctgccacggaaaaggccatcgcctggctggtgtcgctgaccgaacggcctttcgtcggtaccgaatcgcgcctgctgaccttgttcgcgctgctggagcagatcagcaccggaagcgaggccgatccagccaagcgcctggaggaactgcgccgcaagcgcgatgagatcgacgccgagattggccgcgtcctgtccggcgatgtgccgctcatggatgacacggccatcaaggatcgcttcctgcaattccagcagttggcgcgcgaactgctgagcgattttcgccaggtggaacacaacttccgccaactcgaccgcagcgtccgcgagaagatcgcgttgtgggacgggagcaagggggcgctgctcgacgaggtcatgggcgagcgcgacgccatcggggattccgaccaggggcgcagcttccgtgcattctgggacttcctgatgtccagccgtcgccaggaagaactgtccgcacggctcgaccagatcctcggcctgcccgccgtggttgcgctcaagccggagccgcgcacccgccgggtgcaccacgattggctggaagcgggcgaacatacccaacgcacggtagcgcagttgtcgcaacaactgcgccgcttcctggatgaccgggccttccaggaaaaccgccgcatcctcgaactcttgcacggcatcgaaaccaaggcgctggccttgcgcgacatgcctccggccggcgacgtgatacgcctcgacgagatgggcgcggacatcgccttgccgcaggaacgccccctgttcgcgcttcatgccaagccacgcctggcggaactggtccttgaggacggtgacgacgacatcgacaccgcacgcctgttcgaccagcacgtcgtggacaagacccgcctgcgtcaggccctgcggcaggcattgcggcagcagtcgcagatcagcttgcgcgcgttgctggagacgcagccgctgcaacagggattggccgagctggtgacctggctggaactggcgcacgcgggcagccgcgggctggatggcctcagggccacggtggatgacgatgtgcaggagatcgtcgaatgggccatgcaggacagcgatggctcaacggtacgacggcgggcgcgaatgccccgcgttatttttgcgcgttga

SEQ ID NO: 43374 - DNA, 675 bp, Pseudomonas sp. M1
atgaacgacatgcaccaggatgatccagaaggcagtaccgagtcccgcccgcccgttgtcgcggaactctcgcaactgatggtgcatttgctcaaaggcgtgttgtaccgtcaggacgacgagcgcctgtgggccagcctgctgagcctgcaagcgcgggtgcgggagcaggcggcggtgctgttgctggatctggtactggacgaagccgagggttacgccttcctcaaaagtcagccggagccggagcatgcggacgccacaccccgtccgccacgcctgatcgcgcgacggccgctgtcctacccggtcagcctgatgctggccttgctgcgcaagcgcatggccgaatccgacgccagcggcggcgatacccggctggtgctgtcgcgcgaggagatcgccgaattgatgcgcgtgttcctgccggacggcaccaacgaggcgcgcctcatcgaccaagtggattcgaccatcaccaaggtggtggaactgggttatctgcgcaagctcaagcccgctgctggcgcagctcagcaggcaactcgctacgaggtacggcgcatcctcaaggcgttcgtcgatgcacagtggctggccgacttcgatgcacgcctggagggctatcgcaccgcattgtcaggtgccgatcgcgacaaggaagccggccgatga

SEQ ID NO: 43375 - DNA, 3378 bp, Pseudomonas sp. M1
atgaacgatttttcgccacaggagctcgatttcgtggccgacgacagccgcgtcggctttcgcctgcagcggctggaagtcctgaactggggcacattcgaccggcgtgtctggcgctatgaactcgatgggcgcaacggcctgctgactggcgacatcggttcgggcaaatccaccctggtcgatgccgtcaccacgctgctggtgccggcgcaacgcatcgcctacaacaaggctgcaggcgccgagacgcgtgaacgatcactgcggtcctacgtgctgggccactacaagagcgagcgcaacgaaaccaccggcagcacccgcccggtggcgctacgcgacaccaccagctacagcgtgatcctgggtgtattccgcaacgaaggctacggccaggcggtcacactggcgcaagtcttctggtttcgcgaaccacagggccagcctgcgcgcttgttcgtggctgtagagcgggaactgtccatcaccgagcacttttccggattcggcagcgacatcaacggcctgcgcaagaagttacgcgcgatgggctgcgaactgaacgacagcttcccgccctacggcgcctggttccgccgccgcttcggcatcgagcacgagcaggcactggaactgttccatcagacggtttccatgaaatcggttggcaatctgaccgatttcgtgcgcagccacatgctcgaaccgttcgacgtagggcgccgcatcgaggcactgctcggccatttcgatgacctcgaccgcgcccaccagtcggtactcaaggccaagcgccagatcgagttgttggctccgctggtggaggatggccttcgccacgggcaaatcaccggcgagatccaggcgctgcgccaaggacgcgatgcattacgcccgtactttgccggtttgaaggcagcattgctggagaggcgcctggaattgttgactcaggatgcgacgcgctgggatgcccgcatcaagcaattgggagagcaacgagacaacgcccgaatcgagcaggggaaactcgaaggcgcactgcgcgagaacggcggcgaccggctgcaacaactcgctgccgccattcagcagcaggaggccgagaaacagcaacggcaggagaaagccgacgcgtacaccacgctattgacgcgcattggcgaagcagcgccgggagacgaagctgctttcatgacacaaagatccaccatcggagaacacgccgaagcgctgcgtacaagcattgcggaccacgatacgcagatcaatgaagacggctatgcgctgcggcggggtcaggaagaacacaaagcgctcagcgacgagatcgacagccttgcgcgtcgcaagagcaatatcgacgcggcccaagtgcgtatccgcgaggcattgtgcaccgccctgtccatcgcagaggaagacctgccctttgccggtgaactgatccaggtgcgcgaggacgaacgcgactgggagggcgcggccgaacgcctgctgcatggcttcggcctgtccctgctggtgccggatgtgcactacaaggacgtggccgattgggtggaacgccagcaccttggcacgcgtctggtgtacttccacgtgcgtgcgcgcaagtccacgcaggccgtcagcctgcccccccagtcgctggtgcgcaagctgctcatcaagcccgacacgcagcactacgattggctggaacgcgaactgcaccaccgcttcgacctggcctgctgcgacaacaccgagcagttccgccgcgagacccgcgccatcacccgcgccggacagatcaaggacccgagcggacgccacgaaaaggacgaccgccgccgcatcgacgaccgcagccgctacgtgctgggctggagcaacgccgacaagctgcgcatcttgcgcgacgaacgcgagggcttggaacagcaactgggcgacatcggtctgcgcattgccaacacacagcgattgcgcgggcaatgccaggcgcaactggaggccttggccaagctcgaagtcttcacccgctacagcgaaatcgactggcaggcaccggcacgcgagattgcccggctgaccgaggaacgcgaccgcctcaaggcggcctccgataccctgcgggaactggaaagccaactggcgcaggtcgttgagcgcctgaaggagatcgaagacgatcttggcgaggcacaaggcaaacgcggagaaatccgcagcaaacacgaaactgcccaggcacagcatgcgcaggctctcgaaatccagacgcaagccgcactcgacgacatgttgctgcaatctcttgagggctggcgcgccgaagtcctgggcgaccaccagctcacggtggaatcctgcgacaaccgcgaacaggacgtgcgcaatggcttgcaggcgcgcatcgatgccgaagacaagcgtctctcacgcttgaccgaacgcatcatcaacgccatgcgcggtttcaaggaggccttcaaggcagagaccgccgagatcgacatcagcctggccgcgctgcccgagttcgagcgactgatgaaggatttgcagcacgacgacctgccgcgcttcgaagcgcgtttcaaggaactgctcaacgtcaataccatcaacgagatcgccaacttcaatgcccagctcgcgcgcgagcgggaaacgatcaaggagcgggtcgatgtcatcaaccaatccttgcaggtgatcgactacaaccccggacgctacatccggctgctggcgcaacccagccccgatgcggagatccgcgacttcctgcaggatctgcgtgcctgcaccgaaggcgcgctgagcggctcggaagacgaacagtattccgagaccaagttcctgcaggtcaaagccatcatcgaccgcttccgggggcgtgagggactggccgagatcgaccggcgctggatgcagaaggtgaccgacgtgcgcaacggcttcctgttttccgccagcgagcgctggcgcgaggacgatgccgagcacgaacactattccgactccggcggcaaatccggcgggcagaaggagaagctggcctataccgtgctggccgccagcctggcctaccagttcggcctggaatggggggcggtgcgctctcgctcgttccgttttgtcgtgatcgacgaagccttcgggcgcggctcggatgaatcggcccagtatgggctggaactgttccgccagctcaacctgcaactgctgatcatcacgccgctgcagaagatccacatcatcgagccatacgtgtccagcgtcggcttcgtgcacaacgaaggcggccgtgagtcgcggctgcgcagcctgagcatcgaggaataccgggcacagaaggctgccgccaggggcggcgctgtatga

SEQ ID NO: 43376 - DNA, 1206 bp, Pseudomonas sp. M1
atgacatggagccagcccgccgaccttcgcgcgcagatcgaacggctgtggcagcgcggcgagttgctgcgtgccgtggtcggcgacggcacgctgggctggccgttgcgtctgtcgctgaaatcgccgtccgccgccgatctcagcaaccgtttcgatgccgtgcgcggctgggtgcgcgacatcagcgccatgccactcgtgcgcatcgaatggcgcgagtggacgcaccgggtgcagggacggcagcgcctgccggatacgctctggatcgatacgctggaagacgcgctggcgatgatcggtaagaccggcgatgcccaccgattccaggcgctctggcagcaaactgccgaagcgcaacccgcactgctgccgtggctgcacagagcaccgttgcagaccttggcactggccgaacactggccgcgcctgctggccgtggtggcctgggtgcaaacccatccgcgccccggcgtctatcttcggcaggtcgatgctccgggcgtggacagcaagttcattgaagcgcatcgcggtacgctggctcagtggctggacctggccttgccgactgaagccattgagcctgctgcaaccgggatgaccgggtttgcccgtcgctacggctttctggaaaagcccgttcgcatccgcctgcgcttgctcgatccgcaactgccccaacttcccggctgcaccggcctgaccgacatcaccctggatgaggacagcttcgccgcgctcgcactgcctgcgcagcgtgtcttcatcaccgaaaacgaggtgaacttcctggcctttccgccggtgtccggtgccatcgtcgtgttcggtgctggctatggctggggagcgctcgcccgggccgactggctgcatcgcgcctctctgcactattggggagacatcgatacccatggctttgccattctggacagcctgcgcaagtatttcccgctggccgcttcgtttctcatggaccgctccaccctgatggcccacgcacttcaatggggtgaggagcccctcgacaaacgccatacgttgcccttgtcccgactggtcgatgatgaacccgctctctacgacgacttgcgcggtgatcgaatccggccacaactgcggctggaacaggaacgcatcggctatcgctggctgtgcgcggcgttggtcgcaacagtccgggacgatttccggccgtag

SEQ ID NO: 43377 - DNA, 1413 bp, Mycobacterium neoaurum VKM Ac-1815D
atgcgtgagttactcgatgccaatcgcgaggtgcaggcgtcccgcgcgctgcgcctgctggccacgtcgaatctcgcggtctacgccacgctgatggaacgccacctcttcgacggactggtcggcgaaaccgacctcgtcgtccgcctcgagcgcgatctggagaccctgcacgaggcaggagaacagtccggcctcgccctgatcaaatcgtgggccagccagggctggctgcaccgggtcgccagccaacacgcgggtgtcgagcgcaacgtctgctatctgacccaggacgcccgccgggcgctggacttcgtgcgcggcgtgcgtcgcaacgacaccatcgccaccggcgggtccatccacggaatcgccgcccggctcaagcaggtcgccacccgcgccggggatgatcccgatcggatccgggccggtatcgaggccgagatcgccgccttgcacgccgaactcgacgaactcgccgcgggaacccgcccggagcccgataccgtcgccatgtacgacgaggcccgcgccatcgccatgcagatggaacggttgatcaccgatatcggcctgtacggcaacatgatcgagcaggccaccgccgcactcgacgacccgatcgacaccaacctggaataccgcgaccggcagcgccagatgtacgccgactatcaggccgcctgggactcagcgggccgcgactcccatcgcgcgttcctgcacatgatcaacgatccgcagcagcgcgccgagttcgaggccgatatcgccaccgtcgcttcgcaactgcccgagctcgacccggccctgcgcaaggtgatggccaacttcttcgaactcgtcggccaccagatcgacgaggtggaacgcatccagcagcgctgcgcacagcgggtcaagcggttcaccgccttcggcaccctagagcagagccgcggcgtggcccgccagctcaacgaggccatcggcgccgcgcgcacgctgctcaaggagtcgctgaccgactctcgcctggatatcgaggtgccgctggcccggcacgccatcagttcggtcggcgcgctcagcttccgcatcaacgacctgtcctcgccgaaaccggccgagatcgcccagggcgaagtcgatctgagcacgttctcctcgctcaccacccaggtggacgcacccgcactgaccgaaatgctcaattccgctctgccggtatcccttccggacgcgtgcgcgatgctcgacgcgccctacctgggtcatgtcatcgtgctgtggtcctgggcgctcaaacaaccggcccccgcggtcaccgagtcggtgaccgtgcgcttccactcgttggacgggcacgaccgcgagatggaggtcccgcacctgatgttcaccgaacccgtcaccgaggttgcttcatga

SEQ ID NO: 43378 - DNA, 672 bp, Mycobacterium neoaurum VKM Ac-1815D
atgaccgacgccacgacctccacaccggaagtcgatttcgcctcgctgcccgatgtcgaccgctccgggcgcagcaccggcacacgcagaccacggttcgacggtgatgtcagcgtgctgcccgaccgcgcctgctgggcgctgcagcatctgctgacccggcgctacgtcagcggcgaggccgatccggacatctacagctggatcctggagtaccgcaacgatctggccgtccggctctccgaactggacctacaactgcagatctcggcgcaggtcgacatcgcctacatcgaacaggcccgctacgaaccgacacggggcgcaaagcttctgcgtcgggaaccgctgggcacctacgactccatcctggcgctgcatctggcgcagatgatgcgcgccgggggtgacgtcagcttcctgatcacccgcgacgaggtgcacggcctgttcgccggggtgctcaacgacaccgaccgcgacaccgtcacgttcaccgcgcgtatcgacgccgcgatcgcccggctggccggactggacatcctgcgccgcacccgcgatgacgaggattcctacaccgtcagccccgtcatcaccgcgatcatgaccgcgtcggtgatcaccgaactgcagcagcagttcgagcagttgtcgaaaggtggtgccgaatga

SEQ ID NO: 43379 - DNA, 3372 bp, Mycobacterium neoaurum VKM Ac-1815D
atgagcgagcagttccatctgtcccgcctgcaggtcatcaactggggtgtcttcgacggctaccactccatcccgatcaacgccggcggctcgttgatcgccggatcgtcgggcagcggtaaatcctctctgctggatgcgatctcactgggcttcctgccgttcaaccggcgtaacttcaacgcctcgggcgataacaccgccgcgggctccagcgccgggcgacgcaccgtggacaagtacgtccgcggcgcgtggggtcagcgcagcgacggtggcaccagccaggtgatgtatctgcgcggtgacggcaccacctggtcggcggtcgcggtcacctacacctccaacaccgggcgcaccatcacgggtctggtgctcaaatggttgaccggagagtcccgttcggattcgtcgagccggttcgtgctcggtgacggcgatctggacatcgagggtgtctgcaatcggtgggcggcgggacgtttcgacagcaaggtcttcaccgactcccggggcgagcgaagcgacggggcgtcacacggttggcggttctccaccaaggtcgaatcgcagtacctggcccagctctacgccgccatcggcatccgcgcctccgaggcggcccagcagctgcttggcaaggccaagtcactcaagagcgtcggcggcctggaacagttcgtccgcgatttcatgctcgacgaaccggacagcctgagccgacttcccgaggcactcaagcagatcgacccgctggtcgaggcacgcgagctgctggcggttgcccagcgcaagcgcaaggtgctcggcgatatcgaggcgatccagctgcgttacgcctccgaatcctcggacctgggcatcatcgatctggtcgatatgccgatggtccgcgcgcataccgatcaccagcgcctgcagcagtgcccggcccagatcgaatcgctggacggcaccatcgaccagctggagaacgagtacggcgacatcacccgccagctcaatctcgccaaggccgagggcgacgccctcaacgcgcagatcagcggggccagcgccagcatcggtccgctgcagtcccaggtcgcggccgccgaggcacaggccgaggaggtcacccgccggtacgccgcctacgcggagatggtccgcgcgcacggtgccgaggtgcccgagaccgccgacgaattctggaatctgcgtgaggagctgtccaagcaggccgccggtctggccgtccagctcgaccgcggccgggagtcctccaccgacgccgaatacgcccagaaggccgcccggatggcccgcgatcacgcggccaaggaactcaaacgcgtcgagcatgtcgggtcggcgcttcccgagttcgccgtcgccatgcgcgaacacatctgcaccacactgggtatcgacccgtcggcgctgccctatgtcgccgaactgatggaccttcggcccgaggagaaccgctggcgcgccgcggtcgagaaggtgctgcgctcggtcggactgcgcctgctggttcccgatcagcactatgccaaggtgttgcgcttcgtcaacgagaacaacatgcggggcaggctggcgctgcatcaggttcgggtcaatgcccccgatcggcgtcccgagccgaacacgttggcgggcaagctgttcgtggtgaacccgagccacccgtgtgccgccgaggccctggatgtgttggccgccgccggtgatcacatctgcgtggacagcccggatctgttcgccaggttccgccgcgcggtcaccgacaccggtctgtacaaggactccgaccggttggccatcaaggacgaccggcgcccgctgaaaccctcggagtacatctaccagggtgatatcaccgccaagctggatgcgctgaccgcagaactggccgaggccgaggaggtgttcgcggcggcccgcacggcggccgacgagatcgccgcgggccggcaacactggcgcgatcaggccgccgcctgcaaggccatctgtgaacagttcccgcagtggagccatatcgacaccgagaccgccgacgggcacgccgaccggttgcgtgaacagtacgagttgctgctcgccgacaatcccgatgtcgaggcgctgagcacgcgggccgaggagtgctggaacgatattcaggttctgatgacccggcgcggcgccatccagacccgccgcgacgatctcgattcgcgtcgtacccggctgctcgacctgcaagaccgcctcgatccggcggcagtgtccgagcaggccaccgagctgctcaaccgctatgcggcgcagatcccggtgagcctggagctgctcaaccccgagccctaccgcgaggccctgttcaacgcgatccggcgtgagcgggatcgactcaccgagagccgcagacgttctcacgatgaactggcccgcatcatcgccacctacgactcgtcgttccccgatgcgatacccaacgattccgatgatctcgacgagcgggtgcacgactatgtcgcggtgtgccgccacatcgacgagcgcgaactccccgatgcctacgagcggatgatgcggctgatcaccgagcaggcccccgatgcgatcctgacgttgcaccggatcgccgagcaggaggcccgccgcatcgccgagcagatcgagcgggtgaacaccggtcttggcgcggtggagttcaaccgcggtacccggctgacactgcgggccacgccccgcagtctgaccgcggtgaccgagctgaccgagatcgtcaaggccatctcgcggcgcatcgccgaggtcggcctcggtgacaagaaggcgattctcgagcagtacgccgacatcctgcggctgcggaaccggttggcgggcaacacccccgaggaccgggtgtggacccgcgatgcgctcgacgtgcgtaaccgattcaccttcgactgcgccgagtgggatgtacgcaccgaggagttgatccgcacgcacagcaacgcgggcgacaactccggtggtgagcaggagaagttgatggcgttctgcctcgccggagcgctgagcttcaacctcgccaatcccgacagcggtgacaacaagccggtgttcgcccagttgatgctcgacgaggcgttctccaaatccgatccccagttcgcccagcaggcgctgcaggcgttccgcaagttcggtttccagctcgtcatcgtggccaccgtgcagaacgccaccaccatccagccctatatcgacggtgtggtgatggtgtccaagaccgaggccagcggccgcaatgcccggccggtcgcgcatgtcaccaccaagacaatttccgatttcaccgcgctcaagcgcgaactcaaggtcccggagcccgtctga

SEQ ID NO: 43380 - DNA, 1470 bp, Streptomyces ipomoeae 91-03
gtggatttcgacgaggtcacggcgcttgtccgccatccggcatgggtgctgctgcgcgcggacaacgccgccttggtgttgtccttctgcggcacggtgttcgtcgacgagaacgcgcgcggtgtgccggagaccgtgctggagtcccggcttgacgaccggctctacctcctcaacgaggaaaagcccggctcgtttccccggtccgccgacgcctatctggcggaatggacgaagaacggctggctgcgcaagtactacccgcctggagaggacgaggcgcatttcgacgcgactgcggccctcgagaaggccgtggcctgggtgcgggacctgcccgcacgttcgttcatcggaaccgagtcccgcctgaacaccatcgtcgcgctcctgcggcagatggcgttcggaacggaaaccgatccgcagacacgcatcgacgaactgcgccgggagcgtgacgcgatcgacgcccagatcgcccggctgcgcgccggtgaggtcgacatgctgtccccgctcgcactgctggaccgctaccagcaggtggagagcaccgcggtcgaactcctgcgggacttccgcgaagtggaggccaatcttcgggaactggacgtacgtctgcgccaccaggtcgccaccgccgagggcggcaagggagagcaactggccgcgttcctgctggaccgcgacgagatcgcccggtccgatcagggacagagcttccaggcgttcttcgactacctcctctccccccgccgccagcaggaactacgggagctgctgcaacaggtcaaccagctgccacagttggaaggcagggccaaccagagcctgctcaagatccccttcgcctggctggaggcagccgagaacacccaggacacggtccggcagctgaccgagcagctgcgccgcttcctggtcgaccgcagccgagcagaggaccgccgcgtcctggcactggtgcgctccatccagcgtcacgtcaccgccctggaaggccgggccgacctgcccggcatggcgctggacatccctcaggcacatctgacgctgccgatggagcgacggctgtacatgccggccgaacgcatcgagctggacaccgccgcggtggaggaatccgacgacgcggaggtggacatctccgagcttttctccggcgtccacgtcgacaccgaggcgctgaccggtcatgtcctggaggcggtcgccgcaagcccgagcggccaggcgaacctggccgccatcgtcgacgaccacccgctgaccctggggctcgcggaactgctcgcctacttccaggtggagcaccccggcctggacatgatcgtggacccggaccgcaccgacctcctggtctacccgcgcgtccacgtgcccgggcacacgcaggcgagagtgccgcacgtgacgttcgtacgcgacgaaggcggcaccgccgccggaaaggcggagcaggagtga

SEQ ID NO: 43381 - DNA, 591 bp, Streptomyces ipomoeae 91-03
gtgagcgacgccctgaccgtccccgtggtccacctgctgaaagcgggcgtgctctatcagagcgatgcccctgccgtctgggagcagatcgtcagccagcaggcggcgatcggcgactacctcagcgtgatcggcctcgacgtcgtcatcgaccgcgccgagggctacgcctacgtccgacagcaggatctcgattcccgtgacgacggcgtcccggtgccccggctggtcacccgccaccggctctcgttccccgtcagcctgatgctcgtcctgctgcgcggacgactcgcggacagcgacgccgactccgccgacccgcgcctggtactcacccgcgacaacctggtcgagatgatccgcggcttcctcccaccacgcagcaatgaagcccagctcgtcgaccagatcgacgcccacatcaagaagctcgtcgacctcaaggcactgcgccagacgaaacagaccggcgcctacgaggtccgccgccacatcaaggccctggtcgacgcccaggccctcaacgacttcaacgacctcctcgccacctaccgcgacgctgcctccaccacggccaaggacgacacatga

SEQ ID NO: 43382 - DNA, 3438 bp, Streptomyces ipomoeae 91-03
atgaccctcaccaccgacccggcagcgctcatcccacggcaggcaacgaccgcagagcctgccggcacgttcgacgtcggccccggttaccggctcgcccgcctggaggtgctcaactggggcaccttccaccgcaccacctgcaccttcaccatcgacgggcactgcgccctgctcaccggaggcgtgggatcgggcaagtccaccctcgtggacgcgctcaccacgctgcttctgcccgcccacaagatcgcctacaacaaagcggcgggcgccgacgccaaggagcgcgacctgcggtcctacgtcctcggccatcacaagaacgagcgcgtcgaggcctccgacaccacacgccccgtgggactgcgcgaccacacgtcctacagcgtgatcctgggcgtcttcaccaactacgccctcggcacccacctcacgctcgcccaggtcttctactggacatccccgaccagcaccggacagcccgagcggttctacctcaccgccgaggcaccgctgtccatcgacaccgacttcaccggcttcggcaccgacatcaccgacctgcgccgacagctgaagcagcgcggggccaccatccacggcagcacatacacccagtacggcaaggcactgctgagaggcctgggcatccccagcctgcaggccctggacctgttccaccagacggtgtcgatgaaggccgtgggcagcctggacgagttcgtccgcgagcggatgctggagccgttcgatgcgaagacggccgtcgacaagatcgtcgcccacttcgacgcgctcaccgccagccacaacgaagtcgtccgggcccgtcggatgatcgaggacctgacgccgatcgtggtggcatgcaaccggtacgacaccgtccagggggagatcaccgccctggacaagcgccgcagtgccgtccccgcgttcttcgcccagcaccgccaccggctcctcacgacacgtcacaccgcgcttatgtccggtgcggcggaactggaggaactgcagtccactcgcgagcggcagctagagcagctgcgtgggacggccgacggcctgcggcgccgtatcgacggcgtcggcggggagaagctcatctccctgaccggccggatcgaagagctcggccgcgaacgcgaacggcgccgcaagcgcgccaccgagtacggcacctggctcgcgcaggccggcatggatcccgtcaccgacgccgcctccttccgcgagcgcaccgaccagatctccaccgcccgctcccgggccgaggaacaagagcagcaggcccgcgggaaactcgacgatctcgccatcgcgcgccacaacaacaccatctcgaccgacgcgctgcggcgcgagatcaccagcctgcagcagcagcgctccagcatccccgcccagttgctgaccctgcgtcgcgaactcgccaccgccacgggcgtctccgacgaggtcctgccgttcgccggcgagctgatccaggtccgcgacgacgaagccgagtgggccggtgccgccgagcgcgtactgcacgggttcgccttgtccctgctggtcccacatgcccactacgacaccgtctcggcctgggtcaacgaccgtcacctgggcctcaggctggtctactaccaggtccccgcccacacacccatcaccacgctgccggacgaccccatcctgctgaccggcaaactccggctcaagtccgacagctgggcccgcgactggctcgccgcgcggctgcgctcgcgtgccgactacctgtgcgccgaagacctggacgcgttcgcccgcgccacccggcccgccgtcacccggcagggccttgtcaagggcggcggaggccgccacgagaagaacgacacccaccgcatcgacgaccggcgcaactgggtgctgggttggagcaaccaggccaagctcgacgctctcctcgccgaggccacccgcctcacccgcgaaagcgccgacatcactacggccgcccgggaactcgagaagcagcagcgggcccgcgccggaaccagtgccgccctcaccctgctgggcagcgtcggcacctacgcggaactcgactggcggagcaccgtcgcgcacatcgagcagttcgagcagcagaagagcgccctggaagcagaagccggtctggacaagctcaccgcgcagctccggcggaccgaggacgagatcgtacagagcagcaagacgttcaccacggggcaggaggagctgggcggcctgcgccgcgacgtccagcacatcgccgacctgctgggcaggaccaccacgttcctcgcgaagtgcgacctcgacggcatggcggagcacgaggaagccctgcggaagttcctgcccgcagccgacggcgacggcctcctggagatgctggacgacgccgagcgccatgccgaagcacgtctgctgcgcagcagcggcagtcgccacgacgccctgcgccacgctggcagccaggcagcggggctgatgaccgccttccgcggcaggtacccggtccacaccgccgagctggacaacaccatcgaatccgccagcagctaccgcgcgttgcacagccggctcaccgacgaggacctgccccggttcgaggagcagttcctcctgtacctgcgcaccaacgtcatccgcgacatcgcttccttccaggcccatctcggcgctcaggagcagcagatccgcgagcgcatcgatgtgatcaacacctcgctggccggcatcgactacaacccgggccgctacatccggctcaacgccgcccccacgccgaacaaggaggtccgcgagttccagcacgacctgcgggcctgcaccagcgaagcgctctcgaacgacgccgatgacgcgtacaccgaagagaagttcctccaggtcaaggcgctcctcgaccgcttcaagggccgtccggagcacacccgtctcgacaaggagtggaccgcccgggtcaccgacgtgcggcgctggttcgtcttctccgccagcgagctcaaccgcgaggacgacgccgagtacgaggtccactccgactccggcggcaagtccggcggccagaaggagaaactcgcctacaccatcctcgcggcttccctcgcctaccagttccgcatcgaccccaccgccgccaaacccaagaccttccacttcgtcaccatcgacgaagccttcggacgcggtgacgacccctccgcccacttcgccctcgacctgttccagcgcctgggcctgcaactcctcgtcgtcaccccgctccagaaactccatgtcatcgagccccacgtcacccgcgtcggctacgtcgaccgccccgacaagacccgctcccgcctgaacaacctcaccatcgaggagttccgcgcccacaagcaggcagcagcccagcaggcgaaccagcccccgaaggagcagtcgtga

SEQ ID NO: 43383 - DNA, 1179 bp, Streptomyces ipomoeae 91-03
gtgaccccggcagaatggacccgccccgagcatgtggtggaaaccctgcgccgcaagtggaccagcggccgctacctcaccgccgccgcgggcggtcaccccttcgaacccatcggagtgccgctgaagggcccgaccgcggccgatgccctgcagcactacgagcaggcactcgcctgggcccagtgctgggcccccgaccggaacccccatctgcgcatccagaccaaatccatcggaggccgcaacggcaccccgtcgaataccgttccggcccgagcctgggtcgacacccgcgaccgcctctggacgctgctccgcgtcactacccaggtcgaccgcttccacacgctgcacgagcagaccgcacgccaggaccccggcatcgcacggtggatggccgaccatcccatgaaggtcctcgcccacgctgcagactggcaccggctcgtgcgcaccacgtgctggatccgcgaccacgacaccgaggcggtctacctgcgcgagatcgacaccccgggcgtggacaccaagttcatcgagaccaacaaaggaatcctcgccgaactcctcgactgtgtgctccctgaaagccgcgtcaacaccagcgcaccgaagagcgatctcgtcgcccgctacggcttccgcaccaagcccatctacatccgcctgcgctacctcggcacctctcccctgcccttcagcgaactcaccgtccgcgccgaggaactggccgactggtccctgggggtgcgcaccgtcttcgtcctcgagaacgagatcacctacctctccctgccgccggtccccgacgccatcgccatcctcggctccggatacgccgccgccctgctgcgtcatctgccctggctcgacgatgtcgacctctgttactggggcgacatcgacacccatggcttcgccatcctcgaccaggtccgaggacgcttcccgcacaccacgtcactgctcatggaccgcgccaccctcctcgcccacgagtcccactggggccaggagaagacacaggcacgcggcggcctgacacacctcacccccgaggaggcccacctcgaccgggacctgcggaccggcgtctaccggccgcacctgcgcctggagcaggagcgcatcgccatcaccgccgtgcgagaggctctgacgcggcaccagggatga

SEQ ID NO: 43384 - DNA, 1596 bp, Corynebacterium durum F0235
atggcctggaatggggagttgattgtgtcctcggtaaatgctgtcgcggatgcgttgcagtgtcaacgggtggcgtcggaaagttcggcgtggtcgctgttgcgttcgtccaacgcgccagctattgccgccgcatttagatctgtttttgatggtcagcggcgcagtgtgacgggcacggaatttgtggaagaactgaatccgcttctcgtggaactgcgggaggaggggtttgatctaccacgaaatgccgtggggtatatcagcgactgggtgaaagctggctttcttattcgtcgaagcccgcaggggatgcaggaggaattttacgaactctctacagatgcgatcacggcattggattacatctctgtgctgctgaaaccccggaagtcggcaacacggtcgcgtttgagcacggtcgcggaacgcctgaccagcctagccatcgacaccgaccctgacgaatcgcatgttctagctcgccttgaagaagaaaagaagcagatcgaacgccgcattgcgttggtgcaggaacgcggcgtggatgtgatttcggaggatgaggcactggagcaagtggagaacattttgtcacttgttgcagatattcccagtgatttcgcacgcgtgcggcaggccacggaggagttggatcagaatttacgtgagcagatcctggtcgacgagctgtcggcggccgaggtcctagacaatgtattccgtggcgttgatgtaatccaggattcggacgagggaaaatccttcaacggtttttacgagttgttgtttgatcgtgagcaatcgacgcgtctggaatccactttggaaagtattctctcccgtccgtttgtggaggatctttctaccgatcagcgggctgaactgcgctggttgctgcgcaaccttgaggaacattcagatgaggtccataactcgatgaccagcctcgcgcggtcattgcgtcgtttcgtgcagtcccgcgaggtggaatcccagcaggcgctggccagcgccattaaccacgcacaagcattggcgctgcggcttggacaccaggtaaacccatccacaaaaattggtgtggatctggagctgacctcacgacatcccagttccatgtccacgtgggtactgcacgaccctgctgatttccacattgaaggtgacatggaagtggctccggctgacgtagccaatttggcagaactgcaggccagagtgcgagattcggagattgactgggcggaactgcagtccaacattgtttcggtgctgacgcaacaccagatagccactgttggggatgtactgaaagcccatccggcaacccagggactggctagtgtagtgggagtgctgaaattagctatgcaacatggtgaacgcgttggcggcactgaatatgtaacgtgggacacctcccaagattcccagtatgacgagggtgccgataccacgcggactaaacgtgcaaaggttgtgcggtatcgctttaccccgaagagccttgcggaactaggccagactcaacgccatgtaagactagtacctgtgagcgaaactgcgaccaaagggatgcatactgatggctaa

SEQ ID NO: 43385 - DNA, 657 bp, Corynebacterium durum F0235
atggctaagcatggagtagagaaaacctcgtcggggccagaggtatcgcagcttcacgaaactgacacgggtaccctcaccgcagctcagcggcaggcttttgcgaccctgttgcgtggcccgtttatttcggtagataagcaaccggaaatttttcgcactgtgtcggcgaaccgcgaggtgctggcgcagcagctggacaacctgtttttaacgctaattgtcgatgattccgctggcgtggcctacgcaaaaaattgggatacggacattgagggctcgcgcatactcatgcgcaaacaccccctgacgttcatggagactgttgtgctgctgcatctgcggcacatgttggtgatgaccagcccgaatgagcgcgctgtggttggggaggaagaggtgtttgaagcaacactgccctaccaatccgcaacgggtaatgacaaggccgcgcagaggaagaagtttcaggccgcatggaacaagatgaaggatcggtccattgtgcgcactaccaccacggaagaccggtttgaaatttcacccgtgttgcggctcattttcacggcagaggaagttgcggcggtgtcggatagtttcgcatcgttgctggatgatgacgatgatgacagtggggagaccgtaactcatgaataa

SEQ ID NO: 43386 - DNA, 3336 bp, Corynebacterium durum F0235
atgaataaaatcgcaggtcaattccgcctttcatcaattcaggtgtacaactggggcacattcagcggcgtgcatacagttccggtggcacgggaaggctacctggtcaccggtgcgtccggatccggcaagtccacgcttatcgacgccgtgtctgccgtcctcgttccgcccagcaccatgcgttttaatgcggccgctcaggatcccggcactaaatcgggccgtaacttgattacctattgccgcggtgcatggcgtcgcgagcattcggaggacattgacgaactcacccagtcctacctgcgtaccggcgcgacctggtctggggtggcgttgacttacgaggacggtgaaggcgcggcggtgaccgccctgcggttgatgttcctcagtgcgcattgccatcaacccaccgatattgtgaacctgtttgtgcttgtaccccgcgttgctgaattgtgggaatttaatgacctcgcaaaagaaggtcttgacctgcgcaaggccaaacaacagcataaggatgcattggctgttcaacgcagccactccccctttatgaacgtcttccgcagggaactcgggatcgccgaccaagcggcgctcaccctgctccatcgcacacaatcagcgaagtctctgggggatctgaatgcgctcatgcgagacttcatgcttcccgaaccaccgaccctcaaaacggcagctgatgccgtggaaaagttcacagaactcaacgccgcctaccagggggtacatacggcacggatgcaaattgaggcactggagcccattcgcagcgctgacgaggatattgcacgcctcacagcagaaacaacgctccgtgaggaagaacaaacccatcttgatgcatacgtcacccaccatcggctcgccttggaacgaacaaaatgggagagaatcaccggtgacattgccgtgcagcaagccaccttggaggatatttccgcccaggctgcggatctgaaaaccacctatgatcagctccaagtgcagattcatgggcatgaaaatattgggttgcttcaagcccagcatgacctcacccaagccaagcagcagctagaaagcatccaatctgctcgggaactattcgaaaaatcaaccagggtggttggtgctgttgttcccaacaccagtgaagacttcactaatctgcgcctgcagttgcaggaactcaccacggaactggtcctcaaggcatcaaaatacagcgaacgcaggcaggcgctgtatggggcattaaacaccacgcaggaaacggtcacacgcctgcaacaagagctagatttcgtgcgtacctaccggtcccccatggaccagcgtttgctggaggcgcggcgtcgagtagcggaatttgtagggatcgaggaaaacgagctgccttttgtggctgatttgctgaccatgcgtgacagcgaaaccgattggcagcctgcggcggaacgcgtgcttggtggctttgcccgcacccttattgtgccggaggagtactatgcccgcgtcagtgatgccattgatgcgatgaacctggaggcaaggctggtctacatccggtttacctccgatctggcgcggcgcatcccgtcttcctttgccgcgggtagcttgggttctaaaattgacgtcacaccggggcggttttttacctggctgcaatccgaactgtcttcccgcttcgactacgagtgtgtggacacggtggccgagttgcgcaaaacgcgcagggccgtgacgcgaaacggccagttcagagacgatttccgccacgaaaaagacgactgtacgcagatcgacgaccgctccagctgggtgctcagcacaagttacgatgacaaaatcgattccctgcgcgagcagattcggctggcaaaagccgaactggctaaacgcttcgcggattccgagggattcgaggactccgtcaaagaagaggcaacccgccaccacgcctgtgacacccttcttgctgtggaaaactttgcggcgattgacacaaccgcagccgcacaggccgtcagccagcggcaaaccgtggtggatgaactcaccgacagcaacccagaattaaaggacctccaagaccagcgggatcgcgtggtgtttgagcaggagaaactcaaacagcaagaagatgaggcgcgtgacgtgttgggtggtttacgcagggaactccgccaagccgaggagttgattgcccaactggaggaacgccaaaaaatcaacagaaacgtccctgaggaagtcgtacagcgccttaacgagcttgttggaaccttcactcgtaaaattcgtgccgataacgtcgtggacgtgcagaagaagatgctggatgcgttgaattccgcacaacaggcattggccaggcaactccacgagcaggagcggaaaactgcacaggtgatgcttgaattcctgcaacaatggccagaacggcgaggagatctgttccctgaacaggagtatcgcggggatttcatcgcgttgctgcatcgcttggaaaacgatgatctccctgcattcgaggcacgcttcttggagttgttgcgttcccaaacgcaaaacaacctgaaccgtttgctgctacagattcagcgtgccacccaggccattcgcgatggtatcgaacccatcaatgcgtcgctgatggccgccgagttcgagccggatactcacctgcaaattgaagttcgggaatctcagcctgccgaggcacgtgagtttatggccaagctcaaagaagtggtggatggtgtgctaaatgatgaatccaccctggccagtgaagagcgctttctcaagctgcgggcggtgatcgagatgctgaaaatcaccgatgaaacccccgaacgcatttaccgcctgcgcttggacacccgcaagcatgtgacgttcctgggagtggaacacaatgccgacgggactcgtggcgctgtgtatgactccgcccaagggctctccggcggacaggcacagaagctggtcttcttctgtcttgccgctgccctgcggtatcagctcactggtgctgggctgagtaccagtcgcgcgaagaactgcacgattgagcacgacggcaagcagttctcccgttttggcacggtcatccttgacgaggcattcgatcgcgccgattcacagttcacacgccgcggtatggatgtgttcaacgagtttggcttccacatggtgctggccacgccggaaaaaatgctgcaaactattcaggactacattggaggggctgcggtggtgcagtgctttgatcgcaagcactctaccctcgctcttctggagattgaggatgcctaa

SEQ ID NO: 43387 - DNA, 1212 bp, Selenomonas sp. oral taxon 138 str. F0429
ttggcgaaggatgccggcgcggaggagtcgcgcgccaaggcgaatcacatgatccgtcgcatgaaggaattcggctggctggactatgagcagcgcgagaacttcaaaatatttattttgctcccacattacagcagccgcttgtgggggctttttgcaaatctctgcgaggggcgggcggtggagtatcagcgctttgccttcacgacctatcaggttctctcaggcgaggcggcaaaggcgcagccgagcatggctgtgctcgaggcggagcggctcgccgaggagttcgtcgaggaactgcgcattctgctgaataatatcaagagcaagatggaacaggtctccgcacagacgagtctgcaggacgtgctgtcccatcatttcgtcgaatatcgtgcggatatcgtggatcgcagctatcatcgcctcaagacctcggatcacgtctcgcgctatcgtatccgcatcctacaggaagtgcaggagatacggcagaacaaggagcgtctgcgtgccctctgcgacgatgccgtgcgccgtcagcttgccgactcggtggaggctgcggaataccgcatgaacgcatcgctgcagacgattgaggagatctatcggggacttgatgatatgtttgcccagatcgaccgtcgccacaatcagtatgtgcgcgcgtcctacgagcgtgcgctgtacttgcagcaggcgggcagtgctcgaacggaaagcatgattgcgggcgttctcctcgccatagccgaggcgcgcgaggaggggagcgaggtcggcgggctgtcgcgtctcttccgtctgcaagcgatggatatgctactgcctgcatcccgctatgtaccgcgtaagaagcgcattctggaaccggctgcggcaacgcccgtgcgcagcgttgacgaggagctgcgtcagcgtgtgcggcgtgagagtgcggagcgcgttgcgcgcggcatctcgcggcagaaaatcgaggcgtggattctggaggtgctcggacagcgcggctcgatggagatcgaggaactgctgaccatcctccgtgagacggcggagcccgacctcctgcagctgctctacgtctatctctacgggcatgacgagctggcacgatatcagctgggcaggcacaaggagatacgcgagcaggatacgatacgatacagcaaccgcacgctcaggcgcagggagaagagaagatga

SEQ ID NO: 43388 - DNA, 600 bp, Selenomonas sp. oral taxon 138 str. F0429
atgaagctggaactgctgaacgaagaggagcgcacacgcatccagagcgtcatacagtcgcttttggcgtgcaattttttgacgcgcgaacacgatgcggcactctacattgcggcgcggcgctaccgcgaagagcttgcggagtactttcaggtgatcggctgggagttccgcgtggacgagcgctatgagatcgtgtggctcctctccacggggatggcgcacaggcgatccctgacgttggaggagagcatatggctgctcgtattgcgcctcatctatgaggaaaagcgtacagggctgaacctgagcacctttccaatgaccacgctcgcggagatccgtgccaagtatctggcactgcatctgcccgacctcaagaaaacagcgctgcagcgcctcacacagctctcgaagcaataccgcctcgcagatgtactcgatcgggagctgtccgaggaggcgcgcatccgcctcttccacacgcttgtgcttgccgtcgacggggaggagctgtcggaactgcacaagagactggagatctatcggcagagaaaggaggaggacgatgaagaagctacggaaaatgaaggtcattaa

SEQ ID NO: 43389 - DNA, 696 bp, Selenomonas sp. oral taxon 138 str. F0429
atgaaggtcattaattggcattatttcgatgaggacgagatttccttcggctcggcaaccatgctctcggggcacagcggcgcgggcaagtccacactgctcgacgccttgcagtacatcttcattgggagtcagacacaggcgcggttcaacgctgcggcgacgcaggaggctcggcggacgctgctgcactatctgcgcggcaagatcaaggcagaaggggtacagtatctgcgcgcggatgaattcacctcctacatcgtgctggaattctatgacgatataaaaaaagtttcctttcttgcaggatatgtggtcgatgtcttccgcgatgacagcttgcaggaggaattcttcctgctcgatcgacgtgccctctcggaggtcgagtttcgtggggaggacggcgcgctctatacacgggaggcatttcatcggcgctatgcacacggcagcagcgtcttcgagacggggaagaagcagtggcagcggcgcctgatgaaccgtctggggcagctttctgcacgcttcttgccggctttttcacgcgcgctcgcctttcgccccatcaatcaggtgcgcgattttatctatgagtacatcctcctcccgcgcgatctgaaattggacgtcctgcgcgaggtgttctactcctaccagaaattcgagcgcgatctgcaggggctgcgcgcgtag

SEQ ID NO: 43390 - DNA, 1464 bp, Thioflavicoccus mobilis 8321
atggtgacgcccgtgcaagaggcagcggtgctgcgcaacctgcgcgccgcgccggcctggcggctgctcgcagcggacctcgcggcaccgatcgccgccctgctgaaggcgcacctgctcggcaaggagcgcaagctgccggcctcggtgctcgtcgagcggctcgggcgggatctggagcgcctgcgcgccgagggctgggagctgccgcagccggccagcgcctacctggccgactggctgtccttcggctggctggagcgcagctacgccgggggcggcgaggaggaatacgagctcacgacggctgcgatccaggcgattcgtttccttcaggggctcgcagcccagcgggccgtggccaccgagagtcggctgaacgtcgtcatccagcagctcgtgcagctcgccgagcagaccgagacggatccggaggcgcgtgtcgagcggctcctgcgcgagcgagagcgcatcgatgccgagatcgcggcgatccgggccggacacatcgagacgctgccggacgagcgggccctggaacggctgcgcgaggtgttcgggctcgccgacgagctgatcagcgacttccgccgcgtgcgcgacgagcttcgcggcctgaatcgggagctgcgcgagcgcatcgtcgacagcgagggcagccgcggggaggtcctcgaggcggtcttcgccggtgtcgatctgatcgccgacagcgacgccgggcgcagctttcgcaccttctggcggctgctgaccgatccgcgcgagggtgccgagctcgagtcggcgctggacgcattgatggcacggcccttcgtcgccggcctggagcgcagcgagcgccgctggctgctcggcctcacgcggctgctgctcgagcgcggcggcgaggtgcacgaggtcatgcagcatttcgctcggggcctgaagcagttcgtgcagagccaggcctatcgcgagcagcggcgcatgacgcggctggtcaaggccgcccagcgccgcgccttgcagcacaaggatcggatacggccctatcagtcgatcgggacggacctgcagctcacgggggcgacctgccgttcgctcgcgcagttccgcctctacgacccgagcctggaccatgtcgacgccggcatcccggcggccgaggctgcggagatctcgctggagggcatcggcgagctggtcgcccactcggagatcgacttccgcacactggaggcgcatgtcgatagcctactcgaggagcgcgagcaggtctcgatcgcggaggtgctggaggtctatccggcggagcagggcctcggcagcatcgtcggctatctggccctcggcgggcgctgcggcgtgcgctcggaggccagcgaccacatttcctggcgcgggctcgacggcgcggagcgcgctgcccgcatcccccgaatctattttgtgcgagacgatggatccgatggagaggcctga

SEQ ID NO: 43391 - DNA, 696 bp, Thioflavicoccus mobilis 8321
atggagaggcctgagttcgccgacaccgatccccaatcggctgaggcgccgggggaacgcacgggcgagaccgggggcctctacccgaacgatacgggcgtgttgccggaggcggcacggcgcgccctcgttcagctgctctccggcccctcgctcgagggccgtcgtcatccgcgcctctggccggcgctggtgcagcatcgcgaggagatccggtcgcgcttggcggagctgtttctagagctcatcgtcgacgccgaccgacaggtcgccttcacgcgccaggccgacaccggcgagctggaggcgccaattctgctgcgccgatcaccgctgaccttcctcgactccgtgctgctgctctatctgcgcggcaccctcgtcgaggccgacacgcaaggtgtcgcggcgctcgtctcgctcgacgagatgatccagcagctcgggctttacgagccccaggccagcaccgatcgggtcggcttcgagaagcgcgcccgtgcggcgatcgagaaggccaagaaaaacagcctgatcagcagcattcgcggtagccccgaacgcttcgaggtgtcggcgagcctcaagctgatgctcggccccgaagaggtcgaaagcctgggacggatctatgaccgactcgcgatgaccgatgctggttcgaaccggccggatgacgcggaggatgacgcgtaa

SEQ ID NO: 43392 - DNA, 3393 bp, Thioflavicoccus mobilis 8321
atgagccaactcccgctcgacctcaccgcacgtgcccagcagttccggctgaggcgcctgcaggtcttcaattggggcaccttctcggggctgcacgatattccgatcgcgatcgatggctttctgttcgtcgggcgctccgggtcgggcaagtcgacgctgctcgatgccttcaccgcgctgttggtgccgcccttgtggcgcgacttcaacgccgcggcgcgcgacggcgatcgcggccgtgccgaccgcaacctggtcacctacctgcgcggtgcctgggccgatcagtcgagcgccgattcgggcgagatcctcacccgcatgctgcgcccgacgactacctggtccgccctggccgccgagtatgggaacgacctcggccaggtcgtgagcctcgtgcagctcttctggatcaagggcaccagcaaccgtacgaacgatgcgcgccgccatttcctgatcgccgagcgtcccttcgcgatcggccgcgagctcaagggcttcgccgaggacctggacttgcgccgcctcaagcaggccctgtccgactgcgcccacttcgagcgtttcgagccctacggtgaacgcttccgccgcctgctcggcatcgaatccaagatggcgctcaagctcttgcacaagacccagtcggcgaagaatctgggcgacctcaacgtcttcctgcgcgaattcatgctcgaccagccggagacctttcaggtcgccgagcgtctcgtcgaggagtttaccgagctcgacgccgcccaccaggcggtggtcacggcccgccgccagatcgagatcctgagcccggcacgtgacgcccaccgcgagcaccaggccgcggcgcagggcgtcatcgagctcgatcagctattgtccaacgtggacggctatcgggatctgcgccgtcgcgagttgctggaggcgcagagcgtccggctcgcgaccgaggctcagggccttgccgggcgcgagacgcaacagggcgagctggtgtcggcccagaagggggcgctacgctcgctcgaggaacgtcaccgcgcccaaggcggggcgcgtatcgaggcgctcgaggacgaggtccatgccctcggcgagcggcgcgatcagcgtctgggccggcgcagcgaggcggagcgcctctgcaggtccttgggttgggcgttgccgacaggtcccgaggccttcgccgagttgagcgcccgggcgcgctcggtcgtcgagggttggcccgtcgagcaggagcgcagcgaggctcggcgcgatgcgctccgcgaccgccggcgcgacctggccgaagagcagggcaccgtcggggccgaggtggccgcgatgctccgccagccctcgaacatcccggccgagcagctcgccctgcgggcccggatcgccgaggcgctcgggctcaccgagccggatctgccgttcgtcggcgagctgatcgaggtgcggcccgaggccgccgagtggcgtggggccatcgagcgggtcctgcacggcttcgctctgtcgctgctggtcgaggagcgccgctacggtgccgtcgcccgctacgtcaacgagacccacctgggacagcggctggtgtacttccgcgtcggcgaggcggagacgacgacccgtgcccgggccggtccccagtcgctggtcctcaagctcgccctcaaggagaccagcttgcgcccgtggctgcgcgccgagctccatcgccgcttcgattacgcttgcgtcgagggcgtgcgcgccttccaggaccacgagcgggcgctgacccgcgaagggcaggtcaagcagggcagggcgcgccacgagaaggacgatcgccaccgcatcgacgatcgtcgtcgctgggtgctcggcttcgacaaccgcgacaagctcgcgctgttccagcagcgcgccgaggagctgcgccgcgagctggccgggatcgatcgggagctgcagcagctcagcgaccaacgtacccaggcccagcagcgcgcgctcgcctgccagcgcctcgcgaacctccagtggtccgatatcgacgtggcgagcctgctcgatcggatccaggctctcggtgtcgagctggagcgtctcaggcgcggcgacacggtgctgcgcgccctcggcgaggaggtcgccgcggcccgcacgcgactcgatgaggcagaggagcggctgcgccagatccaggtcgcgcacggcaaggtccaggatcggctcaacgaccaccagcaggagcttgccgccctcgatgcccgtctcggcgacctggtgctgagcgagacccagcacacgggcctcgccgagcgcttcgcgcgcgacccggcgccattgacgctcggcaacctcgacgagcgcagccgcaaggtcgagcgcgccctgaacgaggatcgcagggccctggtcgatcgccaggccgcggccgcgcgcacggtgcaacgcggcttcgccgccttcaagcgcgagtggccgatggaggccagcgagctcgacgacacgctggcctcggcgcccgagttcttgaagctcctgcagcgcatcgagcgcgacggactgccgcgcttcgaggagcgcttctttacgctgctcaaggaccagagcagccagtcgctcgccgagctcaacagccgcatcaacgaggctcgcaaggagatccgcgaccgcatggagctggtcaacgagagcctcgccgaggccgagttcaaccccggcacccacctgcagatcgaggtcagcgagcgccaactcccggacgtgcgcgccttccgcgaacaggtccgccaggtcctggagcacgcctggacgctggagcacgacccggccgcggccgaggcgcgcttcgcgaccctgcgcgcgctggtcacgcgcctggccgggcgggagagcgagcaccagcgctggcgggaagaggtgctcgacgtgcgccgccacgtcgagttcgtcgggcgcgagcaggacggcgaggggcacgagatcgaggtctaccgctccggtgcgggcaagtccggcgggcagcgcgagaagctcgccaccacctgcctcgccgcggcgctgcgttaccagctcggcggcagcgacggcggcctgccgatctacgccccggtcatcctcgacgaggccttcggcaaggcggacaacgagttcaccgagctggcgatgcggatcttcgagcgcttcggcttccagatgatcgtcgccacgccgctcaagtcggtcatgacgctggagcccttcatcggcggtgcttgcttcgtcgacatcaccgcgcgcaaccgctcggcgaccctgcagatcgcctacgatcatgcccatcatcgcctcgatctgcccgatcgcgacggtctgctgagcggggctgaccagccgacgcacgatggccgccgcgcgacggcttga

SEQ ID NO: 43393 - DNA, 1170 bp, Thioflavicoccus mobilis 8321
atggccgccgcgcgacggcttgacccggaggccgtcacccggcggctgcgtcggcacttcgagcgccatcgtgggggctggctcgaggggcggggcgactggccgctcgaggtcccgctgcacccgccgaccgagcgcgaggcgggccgggatttggccggcgtgcgggcctggatcgccgaatggcagggctggcgcggccccggggaggtcgtctggaccgagcgggcctgggcgagcctcgggcggcagcgggtgccggagcggctgcggttgcaggcaccggagcagattggcgactgggtcggcgagggcgagcgctggcgtcgtgcgctcggccgggccgagcggatcgcagccgagttcccggcgctggccgggcacctcggccgccatttcgactggctcgcggatagcttggacacggagctcgagcgcctgaccgccgtcctcgccgagctctcgcgaggtgtcgccgccggcctttacgtccgccaactcccaatcgccggtgtcgacaccaagtggatcaacgccaaccgtgcccgcgtcaccgagttgctgcgggcattgctcgatgccccggccgaccgcgatctctggtcgctcaccgggctgcgccgcgaggcgccgctgctgcggctgcggctgctcgatccggcattgcggcagaaggtcggcggtctcgaggatctcacggcgccggtcgaacagctcgcggcgctggcgctgcacccggcgcgggtcttcatcgtcgagaatctgcagacggggctcgcgtttaccgatctgcccggcagcgtcgtcttcatggggcagggatacgcggtcgagtgcttcggacaaatcccgtggctgcgcggggcggcctgttggtattggggcgatctggacacgcacggcttggcgatcttggaccggctcaggcgttatctgcccgaggcacgctccctgatgatggatgaagcgatcctgatggcgcaccgcgcgctgtggacgatcgaggcgaggccgcgccaggaagagacgttggcgcgactgacggcggaggagcgggccgtctacgaagccctcaccgaggaccggtggggcaagggggtgcgtttggagcaagagcgcatcgagtggggcggtgcctggcgaaaggtccgggaaacgagcgatcgctga

SEQ ID NO: 43394 - DNA, 1521 bp, Gordonia rubripertincta NBRC 101908
atggagatttctgccttcccggctcagcgcgaggccgggcgacctgccgtaccgtcggaatcggtgcaggtcacgctgggtgacgccctcgaagcgaaccgtgcgctgcagaagtcggcggcggtcaagctgttcgccgcaaacaactcggccctctacgtcaccttgatggagcgtcacctcgactacggcaccaagatgtccgaggtcgagctgacgatgcgactcgaacgcgatctcgccgagctcgacctcaccgacgaccagcccaccggcctggaactggtcaaactgtgggcccgccagggctggctgcaccgcgtcaccgacaccaccgaccccgacgcccccaacctctgccacctgaccagcgaggcccgcacggtcctggacttcatgcgccgccagcgccgcgaggactccatcgccaccggcggctcgatcaccggcatcgccgccgaactgcgacgcgtcgccggacaggtcagcaacgaccccgagaccatccgcctcgagctcgaggcgcagatgtccgacctcgacgccgagctcgccgacctcgaagccggccgccgcccgccggtcgacctacgcgtcgccgaggactccgcccgcgccatcggctatcagatggagcagatcatttccgacatcggccagtacggcacgatgctcgatcgcatcaccaccgcgctgctcgacgacccgggcgactccgacctcgcctaccgcgaccgtcagcgccagctcttcgacgactacgaggcactcctgcagtcgtcgcagtcggcgtcgtaccaggcgttttctcagatgatccaggacccggagcgccgcgctcgcctcaaggccgacatcgacaccatcatcgagaactttcccggcatggatgccggcctgcggtcggtgatggacaacttcttcgggctggtcacccagcagatggccgaggtcggccgcacccgtcagcgctgtgctcgtcgtattcgacgcttcgtcgcgtcgggcaccctcgagcagagccgcggtctggcccgtcagctcaacgacgccctcgccaccgccaacgacctcctcaagtcctcgctcgcggaccgtcgcctcggctacgagctgccgctggccgcgccgacgctcaattcgatcggccgcctcgccttcgagattcgcgaacacgtgccacccgcaccggcattgcccgccggcggcgccgacgccgacctctcggccttcgcctcgatgaccggccaggtcgacaccgtcgaactcaccgaaaccgtcaacaacgccgtcgcggccggacccgtcccgctcaccgaggtgatcgaaagtctcgacgaggcgtacctcgcgcacgtcatcgtgctctggtcctgggctcaaaagcagatggcggcaggggagaaggtgccaatgaccaccgtgcgcttccggtccctcctcggggaggaccacgccatcgaagtccccgacctgaccttcaccgaaccgattccgactgcggaggtcgacgccgaatga

SEQ ID NO: 43395 - DNA, 873 bp, Gordonia rubripertincta NBRC 101908
atgacatctttgccccctgaggtgcgagcggagcgagccacgaagggcgcccctgaggtgaacgcggacaccgacccctcgctccctgaggtgcgagcgcagcgagccacgaagggcgccgaaaccgacctcctcgacgagttcgccggcttcgacgatctccccaccgtcgccaaccgcaccacctcgcacgccccgagcgcgcctcgcttcgacggcgacgtcagcgagatgcccgaccgggcctgttgggcgctgcagaacctgctggcccgccgctatgtcagcggtgaccggcagccgcagctgtggtcgtgggtgtcggagtaccaggacgtcctgcgtatccgcttgtccgaactcgacctccgcctgcgcctcgtcgacgaactgcaggtcgccttcgtcgagcaggccggctacgactcccgttggggccgacgcattctcaagcgcgagaccgtccacacctacgacgcgatcctggcgctgcatctcgccaagtacatccgcgccgcccgtgacgaggatgcgctgatcacccgcgaggagatccacgagctcttcgccggcgtcaccaacaccatcgaccgcgacctcgcgctcttcgacaagcgcatcgagcgggccatcgacaagatggaagagctcgagttcctgcgcaagcagcgcgacgacgccgacaccttcaccgtcagcccagtgatctccgcggtcatgacggcgtcggtgatcaccgatctgcagcgacagttcgagcagttcatcggctccggcgacacgggggaggagccgccggaggctgccgccgccgatgcgaccgaccttgacgccgaggacgcctacagcgacgacgaaggagacaactggtga

SEQ ID NO: 43396 - DNA, 3345 bp, Gordonia rubripertincta NBRC 101908
gtgagcgggcaggtcgaccagtaccacctgtcccggttgcagctgatcaactggggcgtgttcgacgggtatcactcgatcccgttcagctccaacggttctctgatcaccgggtcgtcgggttcgggcaagtcgtcgttgctcgacgccatctcgctggcgttcctgcccgaccatcgccgcaacttcaacgcctcgggcgatgccacggccgccggctcgtcgagcggtaagcgcaccgtcggcaagtacgtgcgcggcgcgtggggtgagcggcgcgacggcaccaacgcgcaccgcgagatcatgtacctgcgcggcaccggaccggcgtgggcggccatcgcggtcacctacacctcctcctcgggaaccgctatcaccggcctggtcctcaagtggctggccgcgggcaagatgaccgacgcgcacagctcgtacttcatctacgacggcgacgccgacatcgtcgaggtctgcaacgagtgggccgccgccaactacaactcggccaagttccgcgaccgcggctggcgcggcggacccggcgagggcaagtacctctcgacgctgtactcgctcatcgggatccgcggctccgacgccgcgcagcagctcctcggaaaggccaagtcgctcaagagcgtcggtggtctggcgcagttcgtgcgggagttcatgctcgacgccccgacgtccattgtcggcatcgccgacgccctcgagcagatagacccgctcgtcgaggcccgtgagctgctcgacgtcgcgcgccgcaagcgcaccatcctcggcaacatcgaagaagtgcaagagcggtacgcgaccgagtcggccaccttctccgtgctcgacaccatcgacagcaacaccatccgcagctacgtcaacaacctgcggatccgtaacgcgcagcccgaggtcgccgacctcgacgaccagatcacccgcctcgacggtgatctcgccgcgctgaccactcagcacgaccagctgcgccaggaccacagtctgctgctggcccgcatcgccacctccaccggcgacctcgccccgctgcgcgaacagctcggcggcgcacagaaactcagcaccgaggtcaccgcacgacgaaacgcgtacgaggacaaggtctccgcgctcggattcagcccgccgaccaacgccgagggcttctggtcgctgcgagaggagctgatcgaggaggccaccaagatcgacggccagctcgaggccggacgcgcccactacgccgaggcgctggcccgcgaggtcgccgcccgcagccgccgcgacaccgcccaggaagaactcggccgcgtcgaacaggccggatccgcgctgccgcgcaccgaacacgagatgcgccgcgtcatcgcgcacgcgctgcagatcgacgagtccgagctcaagtacgtcgccgagctcgtcgaactcgaccccgacgaggaacgctggcgcctggccgtcgagaaggtactgcgcaacgccggcctgcggctcctcgtgccggacaagcatttccgctccgccctgcgtttcgtcaactcgcacgacatgcgtggccggatccagctgcaccaggccgagacccgcccgatgcccgtcgtcgagccgggcaccctggcgtccaagctgcgttcggtcgacccgggccatccgtgtgcggccgaggcgatgaccgtgctctcgaagctcggcaaccacatgtgcgtcgacaacccgggggagttctcccagtacgccaaggccgtcaccgaccagggtctgcgcaaggactcggcgaagctggccgtcaaggacgaccgtcagcagctgcgccggtcgcagtacatcttcgtcggtgacgtcgaatccaagatcaccgcgctgcgcgacgaactcgcctacgaggagcgcgttttcgaggatgcccgcgaggactgtgccgaactcgaccgcgaacgttccgccaaggagaagcgccgcgacgcgtatcgccgtgtgtgcgagcagttcacgcagtggaacgagatcgatgtcgactccgtcgatgaccgcgtcgaccagctcaccgatcagtacgacctcctcatggaggagaaccccgacgtcgaagccctgcagcgcaaggccgaggacctctgggagcaggtgcgccacgcgatctcgcaggccgcactggtcaaggacaagatcgcccggcaggacgagcgccgcacccagctgctcgacctcatcgaccggcttaagcccgacgacgttcccgcacaggcggagaagaccctcgacggcttccgcgaggatctctcggcgacactcgacgtgctcaaccccgagccgtaccgacaggagatcgtcaaggccgccggccgcgagcgtgaccgcatgcggtccgatgcgcgtcgatcgcgtgatgaactggcccggattctcgacacctacgacgaggaattcccggacgcgatccccaacgacagcgacgacttcgacgagcgcatccacgattacgtcgccgtctgccgccgcatcgacgaacgcgagctgccgtccgcctacgagcggatgcgccgcctgatcaccgagcaggcgcccggcgcgatcctcggtctgcacatggccgccgacgccgaggaacgacgcatcgtcgaacagatcgaacgcgtcaacaccggcctcggggcggtggcgttcaaccgcggcacccgcctgcggctggtaccgggccgcaagaagctcgccgccgtggaggagctgacggagaaggcgcgtcagatctccaaccgcgcaacggcggtcagcttcggcgacgagcaggccatcctcgagcagtactccgacatcctgctgcttcgcgaacgcctcgccggcaacaccccggaagaccgccagtggacgcgcgacgccctcgatgtgcgcaatcgcttcgacttctactgcgaggagcacgacgccgagagcggcgagaccatccgcacctactcgaacgccggcgacaactccggtggcgagcaggagaagctgatggccttctgcctcgcgggtgcgctgagcttcaacctggccagcccgcacggcaacgacaaccggccgatcttcgcccagctgatgctcgacgaggcgttctccaagtccgaccctcagttcgcccagcaggcattgtcggcgttccgcaagttcgggttccagctgatcatcgttgcgacggtgcagaacacgagcacgatccagccgtacgtggacaacgtggtgatggtgtcgaaggtcgaagcaggtccggatctgcggccggtggcgacggcgacgtcgacgacgatcaaggcgttctcggagttgcggcggtcggggagtcagttgtcggtctag

SEQ ID NO: 43397 - DNA, 1443 bp, Arthrobacter crystallopoietes BAB-32
atggacttctacgccgttaattctctgcgcgagaaccatgcaggctggtccttgctgcgtgcccagaacgggccgttggccatcgcatttttcatggctgccttcaccggccccaaccagcgcaacattggcaggcaggctctgatcgacacattggacgatgtgctcttcggcctccgggatgggctgggcgaggacaggtttccccgcccggcggcagagtatctcgatgattgggcagccccggaaaaagcctggctgcgcaagtactatgccccgggcgaggatgaaccgctgtatgacctcaccgccacggcagaggacgtggtccggtgggtggagaacctgcgcggacgggacttcgtggccacccaatcccgcctgaccagcatcttccagctgctcaagaccctcgtccaggagtccgaaacggacccggaagtcaggctcgccgaattgcagaagcagcgcgatgccatcgacgcccagatgcagcagatccgggacggcaggatccaggtgatgagcgggccggaggcgctggaccatttccagcagctgaccgccctggccaaggacctgttgtccgacttccgcgaggtggaacagaacttcaggcagctggaccggcaggtccgcgagcagatcgctacctgggacggcagccagggcgaactcctcgagtccatttttgccaaccagcaggacatttccggttccatccaaggccgaacattccaaggattctgggactacctcatgtccccgcaactgcgttccgagctgcaggacctgctggaccgggccacccaaatcgaggctttggccggtttggacaacattcatgccatcggcgagctgcaccaggactggctgccagcggtggaacagacccagtcaacggtccggcagctgtcccagcagatgcgccggctgcttgatgacaaggtgttcctggagaacaaacggatcatgcagttgatccggtccatcgaaggaaatgctttggcggtgcgcaacgaccgcccgcccgcaacgttcatggaggtttccgcacaggcagtggacgtggtgctgccgttcgaacgcccgctctatgaaccggcacgccgggtcgcggtggacgacgaagtcttcctggccgaggacggggacgtggacccagccgccctgttcgagcagttccacgtggacaaagcacgcctgcaggacaacattgacgccgtgcttgacggcgctgaccaggccaccctggcggatatcaccgatgccttcccgctcagtcaaggcctggcggagatcgtcacctacttccagctggcctcggattcaccgtgggcgagcatcagtccggatgtgacccagcagctggtttggaccctgccggacggcagcatccgcgaagccaccgtcgaacagatcatctttgcgaggccctcatga

SEQ ID NO: 43398 - DNA, 645 bp, Arthrobacter crystallopoietes BAB-32
atgaccgcagaacccaactccgcaccggcccacccggacgaacttcccgccgtcgtgacccggctgttccgcggcgtactctatgccgaagccgacgagaaggcctggcagtccctgctgccgctcgcctcgcatgtgcgcgactacgtggctgtccttggcctggagcttttcctggacgaaagtgaaggcttcgctttcctgaagtcccgccccgacgccgacggcacgctcccgcgcctggtgccgcgccggcagctgacgttcaatgtgagcctgctgctcgcgctgctccgcgcacgcctggccgagttcgaccagcgcgccggcgaatcccggctggtcatgaccgaacaggacatcgcggacatggtttccgtgttcctggccgactccagcaacgaggcccgcatcttggaccagctcggagccaacatcaagaaggtcgtcgaattggggttcctgcgaaaactccgcggccagcaggggacctacgaagttgcccgcatcctgaaggctttcgttgacgcgcagtggctcgaagagttcgacgcccggctggcggactaccgagcctcgctggacggcggatcgggcggcgggcaggctccggagaccaaccgcccgaagggggcctcgaagtga

SEQ ID NO: 43399 - DNA, 3396 bp, Arthrobacter crystallopoietes BAB-32
gtgacgatcgatctgcaggacagcctgttctcgctggaagacatcgacgacggcgccggtccggcaccggggttccgccttcgccgtttggagctgctgaactggggcaccttccaccaaggcgtccggaccttccggctcgacggcgaaaacagccttttgaccggtgacatcggctccggcaaatcgacagtggtggatgccatcaccacgctgctgctgccagccaaccggatcgagtacaacaaggcagccggcgcgcagaagaaagagcgcagcctgatgtcctatgtgcggggctaccacaagagcaccaggaccacagccggggacaattccaagcccgtggcgctccgtggaccgggttcctactcggtggtgctgggcgttttccaccatgccggcctggacaagaccgtctccctggcaatcacgctctgggctgtgcaggaagcaggacagcccaaccgcttctactcgcttgccgagacggagcaggcgattgcccgcgacttcgccgattttggcaaggatccggcgaagctcaagaagaagctgcgcgccgcgggagtaaccgtgcatgactccttcgagccctacgcggccgcgttccgccggcagttcggcatctccgggagccaggcgatggaactcttccaccggaccgtttccatgaaacaggtggagaacatcacgcacttcgtgcggaccaacatgctggaacaggatgacattgcgtcccggatcaagaacctgatcggccacttcgatgatctgaagaaggcccatgacgcggtcctgcgggccaaggaccagatccagcggctgacgcccatccgggacggcgccgccaggcatgaggacctggcccagcgcgagcagcgcggcaggctccagcgggaccagctgcatccgtggttcacggcccggaagctcgagctgagcctggcgcacgagcaggaactcgaacgcaccggcagccggctggaggatgaacaggaaaaactccaggcagagctgacccggttggcccacgagctctccggcatccaggaggacatccgcaccaacggcggcggacggctggctgccctggacgcggacatctcgcggctggccgaggaggcccgggcccagcggtcacgcttcgacagctacacgacggctgccgaggcactcggcctgcgcacgcccgaagaccaggtactgttcgacggcaacgcggcccggctggcggaggtcgaggacagcctccgcgcggagaacacgggtctccaggacagcagaaccgccgcctcgcaacagcggaacgaggcctccgcccgtgcggatgagctgcgcgccgagctcaagagcctgcagtcccggcaaaacctcatgccgcgcacccaactggagctccgccgtcgtctgtgtgaaggaaccggcatcccggaagcggagctgccgttcgccggtgagctgctcaaagtgcgggatgaagaggctgcctgggaaggagcggcggaacggacgctgcgcggcttcgcgctctccctgctggttcccgccgcgcattacgccgcggtcaccggttgggtcgacaggactcacctgggcaaccggctggtgtacctgaaggtcggtccggccggggcacatcggacggcggagcccgggacactcgcggccaagatcgtcctcaaaccggctaccgaattccgcaatttcctgctggaggaactggcaacccggttcgaccatgtctgctgcgattcgctggaggacttccgccgctatcccaaggcggtgacgctgaacgggcaactcaagggcgggcgcggacggcacgagaaggatgaccgccaggcgctgtcggaccggcgccactacgtgcttggctgggacaaccatgccaaaatcagccggttccacgccgaactggaagaggcccagggccagctccgcagcgcagaaaaccggatcgccacgctggatgccgccctggggcagctcggccggcaatggcagcatctggggaccgtgcgcggcgtgcaggatttcggggcgatcgcctggcaattgacttcgcggcggatcgaggagctcaagaccgagaaggcggccctggaggccgccagcaacgtgctgcagcagctcaccgcacgggaagcggaaacccggcagcacctggaccgggcaaatgccaaggcccggaccatgtacgagcggatcggacgcaataagtcggatctggacaagatccgggaggccattgccgagtgccggaccatcctggtggagactccgctgactaacgacggcggtttgctcggagagctgcaagacctcgccttgcgtgcactgggcgaagcggaactgacctacaagaacaccgaccgcacagaggccgctgtgcgcagcgacctcagttccgccatcgacgcgttggcaaaacagcttgcccgggcggccgaatcaacggtccggctcatggcggagttccggaacaagtacccggaggaaaccaccgagatcgacgctgccctggacgctgccggcgagtacaaccggctgctggaccagctggtggacaacgacctgccgcgcttcgaagcgcatttcaaggactcgctgaaccagaacacgatccacgaggtcgtggccttcaacgccttcctcgagtcccgccggcaggatatcgtcaagcggattggggagatcaaccagtcactggccggcatcgagtacaaccccggccggcacatccagcttgagcaccagaacaccaccgacatggacgtgcgggagttcggggccgacctccgggcctgttccgaagggaccttgggcgacgaggaccagtattcggagcagaagttcctccaagtggagaagctggtcagccgcttccgcggccgcgaaggcctgaccagcctggacgagcgctggaccgccaaggtcacggatgtccgcaactggttcaccttctccgcctcggaaaagtggaccgaaaccggtgaggaacacgagcacttcaccgattccggcgggaagtccggcggccagaaggaaaagctcgcctacactatcctggccgccgcgttggccttccagttcggcctgggccgagtgccaggacacggttcccggaccggcgccggacggagcttccgcttcgtggtcatcgatgaagccttcggccggggatcggacgagtcggcacgctacggcctggaactgttcaaacggatgaagctgcagctgcttatcgtcacgcccctgcagaagatccacgtgatcgagccgtatgtggccaatgtgggcttcgtcgcgaacaccagcggcgaagattcccagctgcgcaacatgaccatccaggaataccgcgaggaacgcgatcggcgtgccggctag

SEQ ID NO: 43400 - DNA, 1305 bp, Arthrobacter crystallopoietes BAB-32
gtgccggctagcggcggaaaggccgctgctcaaagcagcggctggaccacgctgtctgcgcttcgccagcagtccgaacgagcctgggacaaaggcgacctgctgcgcgaactgctggcgcctacgggcgcctatccccgccgtcgtccgttgaagcaccccaccgcagcccaattgcgcgacaactacggcgctgcacgggactgggccgcggaactgcacgtcggggctacggactttaccttggaatcagtcagcatcggccgcacgacgatcggggccaacaaagtccctgccggcgcgctgttcgccgcggcagacgacgagatcgcgttcctcgggcaccagcggaaggcccggcgcttcctcgaactggcggcacggctggaacagctcgacccgaccctgcgacattgggccctgaagcggccgctggcccttctggaactggatgaggccgccctcaccgccgcggccgtggcggcgtggctccgggaccatccggcgcctggcatctacgtgcgccagctcagcttgcccaacgtccacacgaagttcgtggcgtcccaccgccggaccatcgacgaaatggccatcctcctccgttcggatgctgccggcacgtcgtccgttcccccgcctcctgccgcgggaaccgccacggcggccggggagcctgacgcattgatggaaccaggggcgccgccggcagccggccctgtcagcgggccgggcaccggcttcgccgcgcgtcacggcttcctgagcccaccggagctggtccgcttcagggtgcttgatccgtccatcccgctgttgggtgctgccagggatctgtcggtcacggccgaagccttcgccagcctcgagctgcccgtgcagagaatcatcgtcacagagaacctggtcaacttcctggccctgccggagctgcccgggacaatggccctttttggtgccggctacggattctctgcgctgcgccacgcggcctggctgaagcggtgcgagaccatctactggggcgacatcgacactcacggtttccagatcctggaccagctccggtccggtcacccgcatgtgcgaagcgtcatgatggataccgggactttcctcgcccaccggcagttttggggacgggaggccaaaccttccagcgcccggctcacccgcctgacagcggacgaggcggagctgtataccgcgctcgtcaacgatgagcacggaccggccctgcggctggaacaggaacagatcccgtgggactgggcgctggggcggctggcctctgcccgcaggtaa

SEQ ID NO: 43401 - DNA, 1443 bp, Mycobacterium canettii CIPT 140070017
gtggaatacgcaacgatcgacgcactgcgggagcggcatcccgcttggcgactgctgcgtgctggcaactccacgctgatcctgtccttccttgggatgtttttcgtcgagggcaaccgtggcgcctgcccagtgagccaggtcgcggccgcgctggacgaccacctgtacgcgctgaacatcgagatctcgaccgagaacgggcaggaacggttcccgaaagacgctcggtcctatttggaggactgggcggccaccgacaccgggtatctgcggcggttctacccaaccggcgatgacgaagtccactacgaggtcacaccggcgttcgagaaggcctacacgtgggtcatgggcctcaaaggcaggtcgttcgtcgggaccgagtccaggctgcacaccgtggtcgagctgctgcgacagatcgtgcacggaacagaagtcgagcccgatgcccggctggccgaattgcggcgccgccgcgacgaactcgacgccgagatggcggccgtcgaggccggggttgttcaggtgctggacgcgaccggagtccgcgaccgctaccaacagctcgccaccaccgcgcgggaactgctctcggactttcgcgaggtcgaagagaacttccggctcctggaccgggccgcgcgcgagaagatcgcggcctgggaggggtccaagggcgaactgctcgccgagctggtcggaagccgctccgagatcacaggctcagaccagggtcggagcttccaagcgttctacgacttccttctctccgagtcgcgccaggccgaacttgccgaactcctggccaaggtttctaccctcaagaccatcgaagccgacgatcggattcgtggcattcaccacgattggtctgaagctgccgatcgcgcgcagcgcactgtccggcagatatccgaacaactgcgccgcttcctcgatgaccagatctgggtggagaaccggcgtgttctcgacctggtccgcgcagtggagagtgttgctttggaactccgcgacaacccgccgaccttcgggcttgaagtcgatcagccaggcatcgagatcgtgcttccgtttgagcgtccgctctatcagccgcccgcggtggtcgcggtcgagagcgtcatcccgtcggcgtccgaggaggtcgacaccgacctcctctttacgcagactttcatcgaccaggcacgcttgatcgagaccatccgcgatgttctgcctgagaattcatcggctctgttgtccgacgtcgtcgcggtgcaccccatcgagcagggtgcggcagagatcgtcggctacctcgcactcaacgacgaggacgtggcggtcgagatggacgacgccgatgagacgctcctggagtacgccgaccccgccgacccggatttcaccaagcgagcgaggctgccgaaagtgacggtgcggcgacgatga

SEQ ID NO: 43402 - DNA, 579 bp, Mycobacterium canettii CIPT 140070017
atgagtaacgagcatgcaatcgccagcgccatcatccggctgatgcaaggggtcgtctaccgcgagtcggacgaggacacctggctgacactggaacgttccggcgccggtgtgcgagatcatttcggcaccatcggcgtcgaggtggtggtcgatgatgccgagggctacgcctatctgcgctcccggccatccgaagacggtgatgaggtgctgccgcgtctggtgcgcaggcgggcactgacgtacaacgtcagcctgctccttgtgctgttgcgtaaacgactcgtcgagttcgagacgacaggcggtgagggtcgattggttctcaccaccgaccaaatcgttgagatgctgcggcttttccaagccgagtcgaccaacgacgcgcgaatcgtggagcaggcggagacgacagtcaagaaggccgccgaactcggcttcttgcgtcagttgcgcggtcaacgcgaccaatgggaggtacggcgaatcctcaaggcgtacgtcgacgcccagacgctggcagacttttcggccaagctgcgcgagtacgccggagcggtggccagcgatgagtga

SEQ ID NO: 43403 - DNA, 3399 bp, Mycobacterium canettii CIPT 140070017
atgagtgaaacaccctctgccaccgtcgaactcggggacacgcgacgggcgggctaccgcttgcagcgcgcggaggtgttgaactggggcacgttcgactcccaggtctggcgatttactcccaacaccgataccgcgctgctaaccggtgacatcggctcgggcaagtcaacgatcgtcgatgcaatcaccacgttattggtgccgtcccacaaggccgcctataacaaggccgccggtgccgacgccagggaacgcaccctgcgctcctacgttgaaggccactacaagtcggagcgaaacgaggccaccgggaaatcccgcgccaaagggctgcgcgagaaccggcgaacatactcggtgattctcggggtcttcaccaaccacggctacgacgagacggtcaccttggcccaggttttccagcagcgcgaaagcaccggacagccctaccggttcttcgtcaccgctacaaaagaactgtcgatcgcgacggacttcgccgactttggttccgatctgcgtgatctgcgcaagcggctgcgtgccgccggagcggacatcttcgacgaattccccaagtacgcaacctcgttgcgtcggctactcggaatccgatctgagcaagcactcgagctgttccaccaaaccgtctcgatgaagtcggttggcaacctcaacgacttcgtgcgcgaccatatgctggaaccgagcgattcgaccgaccgtgtccgcgacatcatcgcccacttcgaggacctcaccaaggcacacgatgcggtcaagcgggcgcgggagcaactcgacgctcttgagcccgtagtacagacgacggcgaagtacgacgcggccctggccgagcgcgacactcgggagcgcgagcgatccgccgcccggctctatatcgccgagcttcggtcgaatctgcttgccggcgagatcgaacggctcgacgcggaaggatctgccctgtggcagcagcaggacgccgccgaagccaaacaacagaagctcaaccatgaacgcgaatccctcatcgaggaacgcgccaaggccggcggggatcggatcggggaactggagcgacttgccagcgaggcccgggtccaggccgaaacacgccgtcgcacacggacgttgttcgacgccgcggtcttcgacgcagggctggaaccggtcgccggcagcgaggagttcgcggcgctatcggcgctggtctccgccgaacgctcgcggcttgccgctgacaaacgagctgtggacgcagcctctgccgacgcgatcgggcgtgagcgagagctgcaacggaagtgcgacgtcgtcgccgaggaactcactagcctggagcaacgcaccagcaacctgcccgtcgagcaggtcgaggtgcgcgcagagctgtgcgcggcactgcggctgacacccgaggacctgccgtacgcgggcgaactcctcgacgtattcgacgagcactccgattggcggggcgcagccgaacgagtgctgcgtgggttcgccctctcgctcttggtgccacagcaacactatgacgctgtcgccgcgtgggtgaacggtcgacggctgacgttccatggccgcggtggcaaggtgactggagccaagctggtctatgaaagggtgcctcggcaacgggttcgcctccagccaccggagcatgacgggctgctactagccgagtgcgtcgacgtcaaggatggccctttccgcgaatacctcgttaatgaactcacgaaacgggccgacttccgttgcacagcaagccttgaggagttccgcagtcagcggcgggctgtcacccgtgagggtcaagtgcgctccggcgagcgccacgagaaagacgaccgccatcgtgtcgacgacccccggcggtgggtcctcggctgggccaacgaacgaaagatcgccgcgctgcgtaccgagctcgccgagctagaggtagagcgcgaaacggctgagactcagctcgcgaggctcaccgagcagagaaccgctctgcagggaaaactggacgcgcttcttcgtgtcgaaggatttcgctcctggctggaccttgacgttgacgaggcggaggcacgcgcgaacgaccatgacgccgaacgggcccggctacagaccggctcctcgcgactggaggagatcacccacgcactgaaccgcaacgccgagcaggctgccgtcgtagcgcagttgatcaaaaaactcaccggcaggctcgccaccacggccgcggagaaaaaccaagcagagcaagacaaaaggcgcgacgacgagtttgttgaaggacagccggagcaagagctggcaactgcccgcgcttcgtacgcggccctcgatgaacgcctcgggcaacaccgtccgacgcgcgcggcggactgtgccgagaccgagacgaacctgtctgccgatctccatcggcgtatcgagaaactcacccgggaactcggcggctacggacaaagcctgggtcagcacatggctgaagtcttgcgccgctggcctgagctgcgcgcggacatggacgccaatgtcgaggcccgccatgacttcctggcgttccgcgaacgtgtcgcgaccgacgacctgccgcggttcgagagcgagttcaaagaacagctcaacaagaacgccatccaggaactggcggggttcaacaactggctcaaccggcaggcgtcggtgatcgacgaacgggtccaccgcatcaacgaggcgctcggcgcggtgccctacaaccccggtcatgtcatcaaactggagaaggaacccaccaccaatcaggatgtcgcccagttccgttcagacttgcgcaacctgaccaacgacagccttgcggtcgacggcgaccagtactctgagcagcgtttcctcgacgtgaagcggatcatcgagcgcttccgcggccgcgacggctacgccgaggccgacaagaactggacccgacgggtcaccgacgtacgcaactggttcgtcttctcggcctccgagcgtgacgtcgagaccgacctcgagtgggagcactacagcgactccgacggcaagtccggcggccagaaggagaagctcgcctacacgatcctcgcggcgtcgcttgcctaccagttcgggctcaagtggggggccgagcagtcacgcgacttccggttcgccgtcatcgacgaagcattcgggcgcggttcggatgtctcgacacgctacgccctcgatctcttcgcgacgctcggactgcaacttctcatcatcaccccgttgcagaaggttcacgtcatcgagccgtacgtgaaggcgatcggattcgtcgacaatccgaccggaacatactcgcgtctgcagacgatgacgatcgaggagtaccggaaacgacgtgacggacggcggccatga

SEQ ID NO: 43404 - DNA, 1194 bp, Mycobacterium canettii CIPT 140070017
atgagcgccaggtggaccacaccagatgacatcgcagccagggtcaggcgccggtgggacgacggatcgctgttgcgtggttacgccaacggtgatccctttgagccgatcgaagtgccacttcgtggccccaaaccatcccaagtcggtgacgacattgccgcggcacgcgactgggtggctgcgctcgacgccggccgtcgcgacgacggccggtataccctccagtggcaatcgatcggcggcaggcagatcggccgtaatcggctgcccgtccgcgcggtggtgtcctcaaacgagcaggcttgggcactgttgggcgtggggagcttggtccgtcgtttcgacgagcttctggttctcgcacagcaacatccgcgggtccgcgagtgggtcgtcgaccatccgcatcgcgcacttagcctcggacctgagatgtcacagctgatcgctgcttacgtttggctcgacggtcaccgtcaatcgaatcggtatctgcgcgagatcagtgcacccggcgttgacaccaagttcgccgagaggcaccgaccggtgttggcggcgatgcttggcgtttcgtcgacagcctcgggattccttgcgggtctgggccttcggtcgaagcccggattggttcgtctgcggccctcgccctcgctgggcttccccggcccgacgctcactgagctggcggtgcgttccgacgagttggcacagctcacggtcgagccgcgggtcgcggtcatcgtcgagaatgagatcagctatctgagtatcaacgtccccgaagacggcgtcgtgatttggggaaagggcttcgaagtcgacaacgtcggtcggctgcgatggctggcggaagccgacattctgtactggggagacatcgatacccacggattcgccattctcgaccggctacgggcgtggctcccacgagcacgctcggtgttgatggaccgtgagacgctgctcgcccatcgcgaccgttgggtgaccgaagaccgtccggccaaatcggttctcacgcgactgacgcctgacgagcaggacctctattcggaacttgtcggggacggattgggggaacgagtgcgcctcgaacaggagcgaatcgactggcattgggtcgagcaacggctaccagggtgtcaacagcgcgcggatttgattggtcatcgaaccgatgtcggatga

SEQ ID NO: 43405 - DNA, 1488 bp, Streptomyces turgidiscabies Car8
atgcgatcggggggttgtgtggatttcgaccaggtcacagagctcatgcgtcatccggcgtgggtgctgctgcgtgcggacaatgccgctttggtgctgtcgttctgcggcacggtgttcgtcgacgaaaacgcgcgcggtgtgccggagaccgtgctggagtcccggctggacgaccggctctaccttctcaacgaggaaaagcccggctcgtttccccggtccgccgacgtctatctggcggagtggacgaagaacggctggctgcgcaagtactacccgcccggggaggacgaggcgcatttcgacgcgactgcggcgctcgagaagggggtggcctgggtgcgggagctgcccgcacgttcgttcatcggaaccgagtcccgcctgaacaccatcgtcgcgctcctgcggcagatggcgttcggcacggagaccgatccgcagacacgcatcgacgaactgcgccgggagcgtgacgcgatcgacgcccagatcgcccggctgctcgccggtgaggtcgacatgctgtccccgctcgctctgctggaccgctaccagcaggtggagagcaccgcggtcgaactcctgcgggacttccgcgaagtggaggcgaatcttcgggaactggacgtacggctgcgccaccaggtcgctaccgccgagggcgggaagggagagcagctggccgcgttcctgttggaccgcgacgagatcgcccggtccgatcagggacagagtttccaggcgttcttcgactacctcctctccccccgccgccagcaggaactgcgggagctgctgcaacaggtcaaccagctgccgcaactggacggcagggccaaccagagcctgctgaaggtccccttcgcctggttggaggcagccgagaacacccaggacacggtccggcagctgaccgagcagctgcgccgcttcctggtcgaccgcagccgagcggaggaccgccgcgtactggcgctggtgcgctccatccagcgtcacgtcaccgccctggaaggccgagccgacctgcccggcatgacgctggacgtacccaaggcggatctgacgctgccgatggagcgacggctgtacatgcccgtcgaacgcatcgagctggacaccgccgcggtggaggagtccgaggacgcggaagtggacatctccgagcttttctccggcgtccacgtcgacaccgaggcgctgaccggccatgtcctggaggcggtcgccgcaagcccgagcggccaggcgaacctggccgccatcgtcgacgaccacccgctggccctggggctcgcggagctgctcgcctacttccaggtggagcaccccggcctggacatgatcgtggacccggaccgcgccgacctcctggtctacccgcgcgtccacgtgcccgggcacacgcaggcgagagtgccgcacgtgacgttcgtacgcgacgaacgcggcaccgccgccggaaagacggagcatcagtga

SEQ ID NO: 43406 - DNA, 465 bp, Streptomyces turgidiscabies Car8
gtgatcggcctcgacatcgtcatcgaccgcgccgagggctacgcctacgtccggcagcaggagctcgattcccgtgacgacggcgtcccggtgccgcggctggtcacccgccaccggctctcgttccccgtcagcctgatgctcgtcctgctgcgcggacggctcgcggacagcgacgccgactccgccgacccgcgcctggtactcacccgtgacgacctggtcgagatggtccgcggcttcctcccgccacgcagcaacgaagcccagctcgtcgaccagatcgacgcccacatcaagaagctcgtcgacctcaaggcactgcgtcagacgaaacagaccggcgcctacgaggtccgccgccacatcaaggccctggtcgacgcccaggccctcaacgacttcaacgacctcctcgccacctaccgcgacgctgcctccaccacggccaaggacgacacatga

SEQ ID NO: 43407 - DNA, 1695 bp, Streptomyces turgidiscabies Car8
atgaccctcaccaccgacccggcagcgttcatcccccggcaggcaacgcccgcagagccggccggcacgtccggcgtcggccccggttaccggctcgcccgtctggaagtgctcaactggggcacctttcaccgcaccacctgcaccttcaccatcgacgggcactgcgccttgctcaccgggggcgtgggatcggggaagtccaccctcgtcgacgcgctcaccacgctgcttctgcccgcccacaagatcgcctacaacaaggcggcgggcgccgacgccaaggagcgcgacctgcggtcctacgtcctcggccatcacaagaacgagcgcgtcgaggcatcggacaccacccgccccgtggggctgcgcgaccacacgtcctacagcgtgatcctgggcgtcttcgccaactacgtcctcggcacccacctcacgctcgcccaggttttctactggacatccccgaccagcaccgggcagcccgagcggttctacctcaccgccgaggcaccactgtccgtcgacaccgacttcaccggcttcggcaccgacatcaccgacctgcgccggcagctgaaacagcgcggggccaccatccacggcagcacatacacccagtacggcaaggcactgctgagaggtctgggcatccccagcctgcaggccctggacctgttccaccagacggtgtcgatgaaggccgtgggcagcctggacgagttcgtccgcgagcggatgctggagccgttcgacgcgaagacggccgtcgacaagatcgtcgcccacttcgacgcgctcaccgccagccacaacgaggtcgtccgggcccgtcggatgatcgaggacctgacaccgatcgtgacggcatgcgaccggtacgacaccgtccagggagagatcaccaccctggacaagcgccgcagcgccgtccccgcgttcttcgcccagcaccgccaccggcttctcacgacacgtcacaccgcgctgatgtccggtgcggcggacctggaggaactgcagtccacccgcgaggggcagctggaacagctgcgcgggacggccgacggcctgcggcgccgtatcgacggcgtcggcggggagaagctcatctccctgaccggcaggatcgaagagctcggccgcgaacgcgaacggcgccgcaagcgcgccaccgagtacggcacctggctcacgcaggccggcatggatcccgtccccgacgccgcctccttccgtgagcggaccgaccagatctccaccgcccgctcccgggccgaggagcaagagcagcaggcccgcgggaaactcgacgatctcgccgtcgcgcgccacggcaacaccctcgcgaccgaagcgctgcggcgcgagatcagcagcctgcagcagcagcgctccagcatccccgccgagttgctggccctgcgccgcgaactcgccaccgccgcgggtgtcttggacgaggtcctgccgttcgccggcgagctgatccaggtccgcgacgacgaagccgagtgggccggcgccgccgaggcgtactgcacgggttcgccctgtccctgctggtcccccacgcccactacgacaccgtctcggcctgggtcaacggccgtcacctgggcctcagactggtctactaccaggtccccgcccacacacccatcaccacgctgccggacgaccccgccctgctga

SEQ ID NO: 43408 - DNA, 1488 bp, Streptomyces turgidiscabies Car8
atgcgatcggggggttgtgtggatttcgaccaggtcacagagctcatgcgtcatccggcgtgggtgctgctgcgtgcggacaatgccgctttggtgctgtcgttctgcggcacggtgttcgtcgacgaaaacgcgcgcggtgtgccggagaccgtgctggagtcccggctggacgaccggctctaccttctcaacgaggaaaagcccggctcgtttccccggtccgccgacgtctatctggcggagtggacgaagaacggctggctgcgcaagtactacccgcccggggaggacgaggcgcatttcgacgcgactgcggcgctcgagaagggggtggcctgggtgcgggagctgcccgcacgttcgttcatcggaaccgagtcccgcctgaacaccatcgtcgcgctcctgcggcagatggcgttcggcacggagaccgatccgcagacacgcatcgacgaactgcgccgggagcgtgacgcgatcgacgcccagatcgcccggctgctcgccggtgaggtcgacatgctgtccccgctcgctctgctggaccgctaccagcaggtggagagcaccgcggtcgaactcctgcgggacttccgcgaagtggaggcgaatcttcgggaactggacgtacggctgcgccaccaggtcgctaccgccgagggcgggaagggagagcagctggccgcgttcctgttggaccgcgacgagatcgcccggtccgatcagggacagagtttccaggcgttcttcgactacctcctctccccccgccgccagcaggaactgcgggagctgctgcaacaggtcaaccagctgccgcaactggacggcagggccaaccagagcctgctgaaggtccccttcgcctggttggaggcagccgagaacacccaggacacggtccggcagctgaccgagcagctgcgccgcttcctggtcgaccgcagccgagcggaggaccgccgcgtactggcgctggtgcgctccatccagcgtcacgtcaccgccctggaaggccgagccgacctgcccggcatgacgctggacgtacccaaggcggatctgacgctgccgatggagcgacggctgtacatgcccgtcgaacgcatcgagctggacaccgccgcggtggaggagtccgaggacgcggaagtggacatctccgagcttttctccggcgtccacgtcgacaccgaggcgctgaccggccatgtcctggaggcggtcgccgcaagcccgagcggccaggcgaacctggccgccatcgtcgacgaccacccgctggccctggggctcgcggagctgctcgcctacttccaggtggagcaccccggcctggacatgatcgtggacccggaccgcgccgacctcctggtctacccgcgcgtccacgtgcccgggcacacgcaggcgagagtgccgcacgtgacgttcgtacgcgacgaaggcggcaccgccgccggaaagacggagcatcagtga

SEQ ID NO: 43409 - DNA, 591 bp, Streptomyces turgidiscabies Car8
gtgagcgaccccctgaccgtccccgtggtccacctgctgaaagcgggcgtgctttaccagggcgacgcccctgccgtctgggagcagatcgtcagccagcaggcggcgatcggcgactacctcggcgtgatcggcctcgacatcgtcatcgaccgcgccgagggctacgcctacgtccggcagcaggagctcgattcccgtgacgacggcgtcccggtgccgcggctggtcacccgccaccggctctcgttccccgtcagcctgatgctcgtcctgctgcgcggacggctcgcggacagcgacgccgactccgccgacccgcgcctggtactcacccgtgacgacctggtcgagatggtccgcggcttcctcccgccacgcagcaacgaagcccagctcgtcgaccagatcgacgcccacatcaagaagctcgtcgacctcaaggcactgcgtcagacgaaacagaccggcgcctacgaggtccgccgccacatcaaggccctggtcgacgcccaggccctcaacgacttcaacgacctcctcgccacctaccgcgacgctgcctccaccacggccaaggacgacacatga

SEQ ID NO: 43410 - DNA, 1695 bp, Streptomyces turgidiscabies Car8; identical to SEQ ID NO: 43407

SEQ ID NO: 43411 - DNA, 1431 bp, Mycobacterium smegmatis MKD8
gtggattacgacgcgatcactgcactgcgtgaccggcacccggcgtggcggctgttgcgagcgggcaatgcctcgttggtcttgtcgttcctgggggagttcttcgtggaggccaaccgcggtgcatgcccggcaggccaggtcgccgaggcgctggacaaccatctctacgcgctcagtgccggatccggggagagtcgctatcccaaggagccgcgcgcgtatctggaggactgggcggccaccgatgccggctatctgcgtcggttctacccgccgggtgacgacgaagtgcactacgaggtgacaccggctttcgagaaggcatacgcctgggtcgtcaaccttcagagcaggtccttcgtgggaaccgaatcccggctgcacaccgtggtcgcgctcctgcgccagatcgtgcacggcaccgaggtccaacctgatgtccggctggccgaacttcgtcgccgccgtgctgaactcgaggcggagatcgcggctgtcgaagccggcgacatcgccgtgctggatccgacagcggtacgcgaccgctaccagcagttgtccaccaccgcgcgtgaactgctgtcagacttccgcgaggtcgaggagaacttccggctgctggaccgagccgcccgcgagcggatcgccgcgtgggagggctccaagggcggcctgcttgaggaactggtgggcagccgttcggagatcaccggctcagatcagggacgcagctttcaggcgttctacgacttcctgctgtccgagcagcgtcaggccgaactcgccgagctgatcgccaaggtgtccgcactcgacgtcctggaagccgacccgcggatacgtcgcatccatcacgactggtctgaggccgcagaccgagcgcagcgcacggtgcggcagatctccgaacagctgcgccgcttcctcgacgaccaggtgtggctggagaaccggcgggtcctggacctggttcgggcggtggagagcatcgcgctggaagttcgcgatgccccgccgaccttcgggctggaggtcgacgaaccgggcatcgagatcgcgctgccgtttgagcgtccgctgtatcaaccgccgacagaggtggcggtagagagccacgtctcggcggcgaccgaggaggtcaacgcggacctactcttcgcgcagacatacatcgaccaggcacgtctggccgacaccatccgcgccgtgctgcccgaggactcgtcagccctgctgtccgatgttgttgcggtgcacccgatcgagcagggggctgccgagattgtcggctatctcgccctcaacgaggacgacctggcaatcgacgtggatgacaccgaggagaccgtcctggaataccccgacccagccgacccggacatcaccaagcgggcgagactgccgaaggtgacggtgcgacgtcgatga

SEQ ID NO: 43412 - DNA, 579 bp, Mycobacterium smegmatis MKD8
atgagcaacgaacgtgcagtggcaaccgccatcattcgtctgatgcagggcgtcgtctaccgcgatgcggatgaggacacgtggctgacgctggaacgtgcgggggccggcgttcgggaccacttcgccaccatcggaatcgatgtggtggtcgacgacgccgagggttacgcctacctgcgctcccggccttcggaggacggtgaggaggagttgccgcgcctggtgcgcaggcgcgcgctgacctacaacgtcagtctgctgctggtgctgctgcgtaagcggctcgtcgagttcgagaccagcggcggcgacggccgtctggtcctgagcaccgaacagatcgtggagatgctgcggctgttccaagccgactccaccaacgacgcccgagtcgtggaccaggcggagaccaccatcaggaaagccgcagagctcggcttcctgcggcagctgcgcgggcagcgcgaccactgggaggtgcgacgcatcctcaaggcctatgtcgatgcccagaccctgtcggacttcgcggccaaactgcgccaatacgctggagcaggagcaggcgatgagtga

SEQ ID NO: 43413 - DNA, 3384 bp, Mycobacterium smegmatis MKD8
atgagtgaaacgatctctcggacagccgaactgagcgtgcgtcccggggcgggatatcgactccagtacgccgagatctacaactggggaacgttcgacggccagatttggcggttcactcccggcgccgagaccgcattgctgaccggtgacatcggatcgggcaagtccacgatcgtggatgcgctcaccacgctgctggtgccgtcgcacaaagccgcttacaacaaggctgccggcgcggacgccaaggaacgcaccctgcgctcctacgtcgaaggccattaccgatccgaacgaaacgaggccaccggaaagtctcggccgaaggggctgcgggagaacagacggacctactcggtgatcctcggtgtcttccgcaaccacggccacgacgagacggtcacgctcgcccaggttttccagcagcgtgagagcaccggacagccctatcggttcttcgtcaccgcaaccaaggagctgtcgatcgccgtcgacttcgccgacttcggctccgatctgcgcgaactgcgaaagcggctgcgatccgcaggagcggagatcttcgacgagttccccaagtacgcgacctcgttgcgacggctgttgggaatccgatcggaacaggcactcgagctgttccaccagacggtctcgatgaaatccgtgggaaacctcaacgatttcgtgcgcgaccacatgctcgagccgagcgactcgaccgaacgcattcgcgagatcatcagccacttcgacgacttgaccagggcccacgacgccgtcaagcgggcacgtgagcagctcgaagcgcttgaaccgattgccgacactgcggccaaatacgatgccgcactggctgaacgcgacggcctggagcacgaacgatcggcagttcggctcttcatcgccgaactccgttccggacttctcgccgatgagatcggtcggttagaggccgacggcgccgctctatggcagcaacaggatgccgccgaagccgaccagcgcagactcaaccacgaacgcgactccctgatcgaggagcgtgccaaggccggtggggatcgcatcggcgagttggagcggctggcccacgaggcccgtgcccaggccgagtcacggcggcaggccaggacattgttcgactccgcggtcggcgaggccgggctgacgaccgtcgccgatgaagaggcgttcctcaacctgcccactctggtcgctaccgaacgcaccaggctggccgccgagaagcgcgaggtcgatgccgccactgtcgacgcgatcggccgtgagcgtgactgtgaacgcaagtgcaccaccctcagcgcggagatcgagagccttgaacagcgcaccagcaacctgcctcatgagcaggtcgtgatgcgcgaagagttgtgtgccgcaatcggactgacaccggagcagctgccctacgccggtgagctcctcgatgtgtacgacgaacgcgccgagtggcgaggtgccgctgaacgagtgctgcggggcttcgcactctcgctgctggtgccgcagccgcactacgacgccgtgacccgatgggtcaacgaacgcaggctcaccgtcgccggcaggggtgccaaactggtctatgagcgggtcgctgcgcgccgcgtgcggctgcagccggcggagtctgacgggctgctgctggccgactgcatcgaagttcgggagggcccgttcgaggagtacctccgcaacgaactgatgaagcgcgccgacttccggtgcgccaccacactccaggagttccgtgacctgcgacgcgcggtcacccgagaggggcaggtgcggtccggtgaccggcacgagaaggacgatcggcaccgcgtcgacgacccacgccgctgggtgttgggctgggtcaatgaacgaaagctcaccgccctgcgcgacgagctcgccgatctggaacgcgatcggcaggaggccgctgccgccgcggccaccctgggtgcgcgcagggaagtgctgcagcatcggctggacgcccttgtgcgagtcgagggctttcggtcctggactgagctcgatgccgacgaggccgaagaccgcgccgacgcgcacgacgcggagcgggcgcggttgcagtccggatcctcgcgactggaggagatcacgaaggcgttggaatgcaatgccgaagaagccggcgttgtcgccgagcggatcaggcaactcaccggtcagctcgctaccacggccgcagccgtgcagcgcgcgcagcaagaccgaaaccgagatcaggagttcgtgactgcgcagtcacccgagcaacgcgaggtggctcgggcgtcgtacccggccctcgaccgccggctcgctgcgagccggcccacccgagccgacgactgcgccgccgccgagtcggcgctgtcggcagatctgcaccggcgtatcgagcgactgacccgtgagctcggcgggtatggccagagcctggggcagtacatgctggaggtgcttcgccggtggcccgagctgcgcgcggacatggacgccaccgtcgacgcgcgcggcgacttcctggcgtttcggcaccgcgtggcgaccgacgacctgccgcgattcgagtcagagttcaaagaacagctcaacaagaacgccatccaggagctggctggcttcaacaactggctcaaccggcaggcctcagccatcgacgaacgcatcgaccgcatcaacgaggcgttgggcgcagtgccctacaacccaggccgcttcatccggttggagaaggagcccaccaccaatcaggatgtcgcacagttccgttcagatcttcgcaacttgaccaacgacgcgctggcggtcgatggcgaccagtattccgaacagcgcttcctcgacgtgaagcggatcatcgagcgtttccgaggtcgcgagggctacgccgaatcggaccggaactggacccggcgggtcaccgatgtccgcaactggttcgtgttctcagcctcggaacgagacgtagacacgggcgccgagtgggagcactacagcgactcggacgacaagtccggcgggcagaaggagaagctcgcctacaccatcctggcggcgtcgctggcctaccagttcgggctcgaatggggcgccgaggagtcgcgtgacttccgcttcgccgtcatcgacgaggcgttcgggcgcggatcggacgtgtcgacacggtacgcgctcgatctcttcgcgactctcgggctccaactgttgatcgtcacaccgctgcagaaggtgcacgtcatcgaaccgtacgtgaaggcgatcggcatcgtggacaacccgaccggaacgtattcgcgtctgcagaccatgacgatcgaggagtatcgcgcccggcgcaacggaactcggccgtga

SEQ ID NO: 43414 - DNA, 1170 bp, Mycobacterium smegmatis MKD8
gtgagcaccatgtgggccacacccggtgacatcgcggccaaggtcaggcgccgctgggacgacggctccctgctgcgcgcctacggaaagggggagccgttcgcgccaatcgagctgccgcttcgtggtcccaccccggcgcagatcggtgacgacgtcgcgcgtgtgcgcgactgggtgacggctctcgacgcggggcggcacgacgatgcgcggtacatgctggaatggaagtcggtgggcggcaagaagttcggccgcaacatgcttcccgctcgtgcggtgatctgctcatacggccaggcgtggacactgctgggggtgacggcggctgttgggcgtttcgacgagctgctcgcgtcggcgcacgatcatccccgaattcgtcaatgggtgatcgccaacccgcaccgggcgctggcactggcggcggacatgccgaagctgatcgcggcttgcgagtggctcgaccgaaaccggcactcgcagcgttacctgcgcgagatcagtgcgcccggcgtggacacgaagttcgttgaacgccgccggtcggacttggccgggattctaggcgtgccatcctcggcccagggattcctcaccgaactcgggctaaggtccaagcccagccttattcggctgcgaccaggatcgtcgctggggctgccggcacctctctcggagatcgcggtccggcccgaggaattggcgcagctcgacctgcggccacgcacagcggtgatcgtcgagaacgagatcagctatctcagcgtcgacgtccctgaagctggtgtggtgatctgggggaagggcttcgatgtcgacaacgtcgggcggctgccgtggttggccggtgtccgcgtcgtgtactggggcgatatcgatacccatggatttgcgattctcgaccgacttcgggcgtggctgccgacagtagagtccgttctgatggacccagccaccctgatcgcccatcgtgaccgctgggtggtggaggaccgtcctgctaggtcgatcctgcctcgactgtcacccgaggaacagcagctctaccgggaactcgtcgaggacagcctcggcgatcgcgtacgcctcgaacaggagcggatcgactggggctgggtcgagggccgattgaaggcgatctatcaaggtcgtatagattcatga

SEQ ID NO: 43415 - DNA, 1467 bp, Mycobacterium smegmatis MKD8
atgcccgacgctgatgtcggtcgtccgtcgttgcagcggctccacgagctcaaccgcgaggtggccgagtcgcggtcggtgcggctgctcgtggccaacaacctggccggatacctcacgctgatggaacgtcacctcgatcgcgggaccaagctcaccgagcccgaactcgtcgcccggctcgagcgcgatctggccgatctgggcgccgacggcgagcagtcgggactggcgctcatcaagtactgggcgagccagggctggctgcaccgcatcaccgaacaggccggcgacggtgagcgcaacgtctgctacctgacctacgaggcccgtgcggtcctcgactttgcccgccggatgcgccgcgaggacaccatcgccaccggcggctcgatcgcgggcatcgcggcgggtctgcgccgggtggccggacaggtcagcaacgaccccgagcgcatccgcgccgacatcgaggccgagatcgaccgtctgcgtgccgaactcgacgcgctcgacgagggccgccgccccgagccggacccgctggacgtcgaggacgaggcgcgcgcgatcgcgctgcagatggagcagatcatctccgacatcgggcagtacggcgcgatgctcaaccgcatcaccacacgcctgctcgacgcgtcggccgacagcgacgtgggctaccgcgaacgccagcggcagctgttcgacgactacgaatcgctgttcgcgtcgcgcgagagcgcgtcgtacaccgcgttcacgcgcatgatccaggatcccgagcagcgcgccgcgctggtggccgacatcgagctggtgaccagccagctgccgcagctggacccgagcctgcgtgaggtgatgtccgggttcttcacgctggtgtcggcgcagaccgccgaggtgggccgcacccgtcagcggtgtgcacgccgcatcaagcgcttcgtggcgtcgggcacgctggaggagagccgcggcgtcacccgtcagctcaacgatgccctcgcggccgccaacgccctgctgagcgtctcgctggccgacagccgcgtcgggttcgaggtcccgctggcgcgtgccgacttcaactcgataggcgcggtggcgttcaagatccgcgacgcggtgccgcccacgcccgcgcagccgtcggagggcgaggtgaacctgtcggcgttcggcgcgctggccgcgcaggtcgacgccaccgaactcgccgaactcgtcaacgacaccgtcgtgtcgcggccgctgccgctcgacgaggccatcggcatgctggactcggcgtacctcggccacgtcatcgtgctgtggtcgtgggccctcaagcagcctgccggcggcaacgccgaatcggtgcgggtgcggttccgctctctggaaggccccgaccgcgaaatcgaagtgccgaaactggttttcaccgaaccgatcccgatcgtcagcgagagtctgttatga

SEQ ID NO: 43416 - DNA, 723 bp, Mycobacterium smegmatis MKD8
atgagcgacacgtccatcgacttcgacgcgctaccgagcatcgacgcggtcgaacgttccgcaccggaacgccgcgccccgcgtttcgacggtgacgtctcagagttgcccgaccgggcgtgctgggccctgcagcacctgctgtcgcggcgctacatcagcaagcacaaccacaccgaactgtggtcgtgggtcacccggtaccgcaccgaactcacggtgcggctgtccgaactcgacctgcggctcgtggtgtccgatgaccacgagatcgcctacgtcgagcaggccgaatacgaatcgcactggcgccgtaagctgttgcgccgcgagacactcaacacctacgactcgatcctggcgctgcacctcgccaagctcatgcgcagcgcgaaccgcgacgagaacgtgctgatcacccgcgaggacatccacgagttgttcgccgccgtgaacaacgacaccgaccgtgacgtcgcgtcgttcgaccggcgcatcgacaacgcgatcgagcggttgaccgacatcgagatcctggtccgcaaccgcgaggacgaggacagcttcacgatcagccccgtgatcaacgcgatcatgaccgcgtcgacgatcaccgaactgacccagcagttcgaacaactcaggcgcgccgcgagcggcgacccggatccagaccccgacccagccgcagccgaggatgaagtggacgccgatggcatctga

SEQ ID NO: 43417 - DNA, 3375 bp, Mycobacterium smegmatis MKD8
atggcatctgaaccgaccaaccagttctatctgtcacgtctgcaggtcatcaactggggcgtgttcgacggatatcactcgatcccgttcagcccggcgggcacgctcatcaccggctcgtccgggagcggcaaatcctctctgctggacgcgatctcgctggcgttcctgccgtcacaccgacgcaacttcaacgcctcgggtgacaccaccgcggcgggttcgggcaccggcaagcgcacggtcgacaagtacgtgcgcggcgcgtggggcgagcgcagggacggcaccagccgtcagatcatgtacctgcgcggcaccggaccggcctggtcggccgtggcggtcacctactccgaccgcacggggcgtgcggtgaccggccttgtcctcaaatggcttgccgccgagaagacgtcggatccgggcagccgctactacctcatcgacgacgaccgcgacatcttcgacctgtgcaaccggtgggctgcgggcgggtacgacgcctcggtgttccgcgaggcgggttggaacggcggccgcagcgagagccagtacctggcgcagctgtactcgatcatcggcatccgggcctccgaggcggcgcagcagctgctcggcaaggccaagtcgctcaagagcgtcggcggtctcgagcagttcgtccgcgagttcatgctcgacgagccggccagcctcgcgggcgtcgatgaggcgctcgagcagatcaacccgctcgtcgaggcgcgcggcatgctcgacgtggcgcggcgcaaacgcaacacgctcggcaacatcgaggccgtgcaggcacgctacgccgacgaggccgccaagttcggtgtgatcgacacgatcgacaacgccatggtgcgcgattacgtcgaccagttgcggctgcagcaggccggcccggagatcgagaacctcgacgatcagatcaaccagctcggtgcgcagcgcgacgacttcggcgcgcagcagcgccagctcaagaacgagcacaacgcgttgatggcgcagatcaactcggcctcggtcgatctcgtgccgctgcagcagcggctcagcgaggccgagaagctcgccgacgaggtgggccgcaggcgcggggcctacgaggacaaggtcaccgcgctgcagctcacaccgccggacacggccgaggagttctggtcgctgcgcgagaccctcatggaggaggccgaccggctgcaccgcgagctgttcaccggcaaccaggcctacgtcgaggcgtcggcgaaagaggtgcgtgcccgcgaggcgcgtgacgccgtccagaccgagctggaacgcgtgcggcgcctgggctcgtcgctgcccaagaccgagtacgagatgcgggcccgcatcgcgcgcgcgatcggcatccccgagcgcgacctgatgtacgtcgccgagctcatggagctcaagcccgacgagagccgctggcgcatggcggtcgagaaggtgttgcgcggcgccggattacggctgctcgtgcccgaggcgcacctcgactcggccctgcggttcgtcaacgagaacgacatgcgcgggcgcatccagttgcagcacgtcaagcacgacgcccatcccggccatccgatgcggttgcgcacgccccccgaggggacgctggcgtccaagctgcaggtcgtcgaccccacgcacgacagcgcggtcgaggcgctcaacgtcatcgcgtcggtcggcgaccacatgtgtgttgacagtcccgacgagttcacgacgcacacccgtgcggtcaccgatcagggcctgcgcaaggacagcgggcggctgtcgatcaaggacgaccggtccaggctgcgtccgtccgactacatcttcgtcggcggtacggaggcgaaagtggccgcgctgcaggcggatctggccgcggcggaggatgtctacgcggcggcccgcaaggcgcgtgagcggctggaccagcaccgcgcggcgctgcaggcgcgggaacgggcctgccgggcgctgtgtgaccagtacatgcagtggaccgacatcgacaccgactcggcggacgaggcgctgacccgtctgcaggacgaactcgatctgctggtgtccgacaaccccgacgtcgagaagctgcagcagcgcgccgacgaatgctgggagcgcgtcgagaaggtcatccagcagatcggctcgctcaacgaacgcgagacgctgctggacaaccggcgcaccgcacttctcgagctcaccgagcggctcaggcccggcgagatctcgcagcatgcgcgcgacaccctcgacgggtacgcggcagacatcgcgctgccgctcgacctgctcgattccgagccgttccgcaacgaactcgtgcgcgtcatcggccgcgaacgtgaccggttgcgtgccgaccgcaaccgcagccacgacgagctcgcgggcatcatggcggcctacgacagctcgttccccgacgcgatccccaacgacagcgacgatttcgacgagcgcgtgcacgactacgtggcgctgtgccggcgtatcgacgagcgtgagctgcccgacgcctacgagcgcatgcagcgcctcatcaccgaacaggcacccggcgcgatcctcaacctgcacatgatcgccgacaacgaggccaggcggatcaccgagcagatcgcgcgcgtcaacaccgggctcggcgcggtcgagttcaaccgcggcacgcggctcacgctgcacgcgggcacgcgtcacctcgcggccgtcgacgagctcaacgagatggcccagcgcatctcggcacgggtgtcactcgtgagcttcggcgacgagaccgcgatgttcgagcagtacacggacatcctgcagctgcggaaactgttggcgggcaacacgcccgaggatcgtcagtggacgcgcgacgccctcgacgtgcgcaaccggttcgtgctgtactgcgaggaacgcgacgccgagaccggcgaggtgatccgcacctacagcaactccggggacaactcgggcggtgagcaggagaagcttatggcgttctgtctggcgggcgcgctgagcttcaacctcgccagcccgggcagcgccgacaccaggccgatgttcgcgcagctgatgctcgacgaggcgttctccaagtccgatccgcagttcgcgcagcaggcgctgtcggcgttccgcaagttcggattccagctggtgatcgtggcgaccgtgcagaacaccaccaccatccagccgtacatcgacagcgtcgtgatggtgtcgaagtccgacgcctctgcgcccaacgccaggcctgtggcctcggtgaccgcggcgtcgatcgcggagttcggcgaactccggcgcggggccgagcccgaggcggtcccggccccgtga

SEQ ID NO: 43418 - DNA, 1410 bp, Photobacterium marinum
atgaacttttcttcactgaacacgcatctattcagacccattgcaggtgataatggccctcatatgcttgctctgctggtggagcttgatgcctttttagatccagcccaactaatagatgaaccgaccccatcgcaagtgcgggtttttatcagagactatatcgctaatcataatttgcgaattgagatagagtctggtgaatcgaatgagtccaagtctgcaccagagcaatacacttattcacgtttgcgtgatacagggtggctaagggaagagcgagaaagcgggtatcgttatgttgtatggatgtcacaagatggacgtcgattactaaactttttgcaatcgatgagcgccgagcatccctcactaggaattgtatgcttgtcagtgcgatctaacttagcagaggtagttaaagatcctactagtggttcattgatacgaaaagcagctgacgatatggagagcttcttaaatcgaatgcgtgctttggtggggaatattcgtgaaattcatcatcaactaaatcatggtagctcacaagttcatggccgatttgagttttattttaatgaatatttaggtgagctttttctcccaaacattgaaaaattagcactcaaaggcaaccctaagcttcatggcaacaagattcttaaactggctaataaaatccgttttgactctgatcttctcgaagaatgtgtaaaagcgtacaagcgaagtgatattgctaattcatctaaggatttagtggagaacgaccttgaccgactgagtaaagcttttgaagggattgaaccgttgtttgccaaaacacaagattacgctaggcgtatcactcgtcgaattcatgaacaaatcaaatatacggttcatacaccaagtaacatcggtcaacaaattcaatttttgcttgagaagatcggacaagatgactcagtcgataaactccctagcttgtctattggtgaagaactgatttctggtagccgccttgctaaaccgaagactaaaccaatcgagccttctgaatcatcacgacggcaacaaaagccgctatgggaaaagcgagcctacaaccagctcaaacaggaacatatcgactttcagaagtgcaacttagagcgtgtagataagtacttagaagattcattgagaggacgtacacaagtcactactgatgagctgacgattaaaagtccagatgaaatgatggctgctcttcacttacgcttgcttgctcaaggaatatccaaaacgcatgtgttgcatccgcttcaagaaaaatatcaagtgtcgtttgatgatgaagaggcatggacaactttagaggctatggcagggcgacgtttggttatccgccgcattaaagatatagaggacgcatcatatggcaagtga

SEQ ID NO: 43419 - DNA, 651 bp, Photobacterium marinum
atggcaagtgaaataatccttagagagctgaaagatatcgagttaaaaaaatctgctgactatatcgatagcttgcggaaaacttcagcctatttgattcggaatcaatgggtttggaacgaaaaacgaggtcataaagagcactttaagcggtgcgaagaaaatcaaacttactttcataaactgttcgatagcttagatatgacatggcactttgatcgtaattttggctatgcgggagtccttccaagaggtgcaggaaaacggcttgatgttactactacgcttttcttattaattttacgcaagatgtacgataccgaagcttcaatggggcgtacagagcttgggcgtgtaaaacctccagccactgaacttattaaccaatatgagttaattagaggggatcgaccaccagttacagaaacctcttatgcattggaaaatttgaaaaggaaaggcgtcattgaacttggagagagggatggggataccaagttgtatgaaattacagtactccctaacattacgagagtagtaagtgcagcctatttgggtgtcttagagcagtttatggatagttattctgatgccgtgttaaaagaagactcagcagaatgtgacgaagcaatggagatgtctaatgattag

SEQ ID NO: 43420 - DNA, 3408 bp, Photobacterium marinum
ttgttttctggtgataatggagcaggcaaaacaaccatctttgatgctatacagtttacgctcatgggaggagaccaacggctcactcgctataatgcagcagcagacggtaggacttcagagcgtacagcccgaagttatgcgcttggtgagtttcaagataatgactcaactagtttgctgcgtgataatgccaactcctacattttcctcaatttttatgatgagttaaagcgtccatacagttttggtctcaccttctatgcctctaagcaatcccctagtgttgagaaaatacgcggccatataataaaaggttatcatgtaactgagtctgatcttctgtccgatgaaggcaactttttaccttgggttgatttcgtggaacatatgaagcgcacagccaagggactaaatggagcgatgagttatgaaacggttgatggggcccgtattattcgagaaaaaattgcagagttaatgtctcgcaatcaaacaagaacagggaagatagagtccaacttattggtcaaaacactatcgagcgcactgcaactgaaaatggacagccctattgacgtgttcattcgcgactttattttacctccgatgcctattgagactgagcaactgcgtgaggatcttattgctcatcaacgtattgaagaagaaatagagcgagcagagagtcataaaagtgaaagggaagctcttttgaaggagtgcgaaaatatctccaactttcgtgttgctacccatcatgctaagtgggtgtctcaagaggccgaaatatcacgacttaaccaagaatgtgatgtaaatgaagatgaaaaagaaaaacagtgtcgacgtttaaagcatgcaaaaagtacgcttgaactgcaatcaccgcgcttaccaaaacttcaagcagattatgatgatgctgtaatagcatggaataactcggattctgctagtttgaatagaacggtatctcatgcgagtcgaacagttgaagagtataagaatcaactccactcaaatttggagtccatacaagctataactcgcaatattcggtcattccaatttcccgatacacttaatctacaaagttttgagttatttgcgcagcagtggggaagttgtttaaatgcgattgaacggtctggaatacaccaattatcaatatctgcaccaggtgatattgtatctgttgcagataaactcaatgagtcccaatcacttatatcttctataggtaatttagtagaagttgctgataaagatgtaagtaagctggtgatggatttaagagtacgaggtgaatctactcagaagcgccttgaccgtttatgtcaagggttatcggatattaatcaagcaacagctatcacgattcacttgttgcaaggtgcaggaatttcggcaactcctgtatgtgatgtttgcgaaattagtgataaagcttggcagcaagctattgaatcatacttaggtacgaacagagaagctctattggtatcgccagatgactttgaacaagttcttgagctatatgaaattgcacagcaacatgatggacgaattaaacgtgctcgaattattaaccccgatcacgcattaaagcaaagtagaagtccttcagctggtatggtgtcgtccttggttgagacctccgaccctgtggctcgcggttttatgaatattgtgcttaaccgtactcgaattgcaaaaacactcagtgatttacgaagggagacgaaggccctgatggcttctggtcttgctactggtggtggtaccgtgggggggacctccaatattagtggccttatgataggtaagagtgccaaattggatcagcagaaactattagagatcgagatacaggaggtgactaaacttcttgttagtgctaaagatccggcagtgtcgctaagtaagctcaaccagcaatgggcaaaactttcctcagagttatcacaaagactaatagatgctcaaaatattagctcacaatacctacacgcattgaattcgcttaaacaagctcaagagcagttaaaacctctctcatctgaagatatgcagctagagttagcaaagaagcaagcagaactagaattaagcaattgtaacgtattgattatacaggctaattctgatgttgagagtatatcgccagcattggagaagttggatgaagtcatcgggttattgtcaactaagcgggaggaggcagagcagcatcgaacccaaatggaacagtctgccttgcatgatgatacaaaagcagaccaattttggcagaaatacgaagaaaaattcgatgatggaatcaacgcctactctctaattcgtattgaagcggaaaaagaagctcaaaagcttcatgagaaagaaatacgtgcacggggtgtattgcgagaaaaaattattgccttcactaactactactctgaggacattgccaatagacaggagttgctggaggcggcaaggcaagataacaataacgttgaagcctacttgtttattgaggcagattgtcgtgattggatagaacgtattttgtcagttaagcttttgcaacaccgccaagctgctcaggcagcagcagaacagatggagcaaaattttagaggtattattgttggagagttgcagagtcggtttgagcagatgaaattcacttttaatcagctcaacaatttactgaaaaaaatcccattccacgacaatatttatagctttcactacagcgtcgtagaatcaaaaagcttaaaagaagtatatgactacatcaccacagcagatcgtgaagaaacagagctcgtagggactatgtttgatttaccttctgagcatgaagccattgggttgttaaagagtgcgcttatcaatggggatgatcttattaacgagataaaagattatcgaaacttctttacttatgacatgaaaatgaaaaataaagaaacaggagaggaaaatcgcataagtaagatgcaaggtacgggttcaggtggtgagcaacaaactccagcgtatatagcgctggctgctagctttatgaatgtctacaaaataggtagtgaatcagggcaaggggcatcaatagttttacttgatgaggcattcaataatatggatgctggcaatgctagcgccgctgtagcatttctcaaagagatcggtttacagctattaattgcagctcccccagaggttacgttaaagataggcaaagagatggatcagatttatacaatttgtcgtgaaggaagagatgtcgccatcgatcatactaagatttatgaacgtggtcaggagttcattgatcaaagtaatccagcatatcaccctgaattgattagtgagagagttgctgaactgaaaacaaaggctacatctgatgtttga

SEQ ID NO: 43421 - DNA, 1251 bp, Photobacterium marinum
atgtttgagatgagccaaaacctcaagaggtttctgacacaattaagtaagaagattgacctttcgggagaggtcaaatctggggtcactatacgtataaccgatcatgcctataagtggtactttgctctaagcgatactaccaaagatgcgttacatcgagagatggagaatcttgggtttgttcgcctctgttatcgcaaaaaggtgatgcttggagcatttaaacatattgaatccattcatgtggttgatggtggcgttttgcttgatagtttaggtattacaccgagaacgaagcttataggtgatttgagcgctcaacttgaaaatgtatctttccaggtatcatggtgggaagaaacgcgtgacaacgttattattgcatggtcgcagagcaaaactttccatggtatcaggcctgcgcaaatcgaactgattttggacgctatgaagttggtagagctcatttcatcatcatcgctttctgcgtctctaccagatatgcgaaccctgagtgttaacctctattacgactcaaagcggttggagaataaaacgcttgttaatcttgtttataagttgatgtcgccgcatttagatcctgacgttgctgagatgattgaaactggggaagagttgctagagcactttggtatttgtaagtacccagtcccgatgcgttttaaagccaaaggaacattgatctgccaaggcagaattgatttatcagctttgcaatacggtattggtgtttcaccggatgaggttttgggagttgagtgggcacaggatgtaccttatgttctttttattgaaaatagaaccagctttgaacgatatgtccgagaagttgatgatgatgggcttgtcatttataccgcaggattccctcctagcgcatggatgagagccattaaccttctggtgaagaatcttataaaccatgtgccagtatatcattggggagatcgtgatgtcggaggatataggatcttagcgtttttagccaagtggcttaatgctgacatcaccccatatttgatggggcttgaattggagttagatatcgaatttgatgaagccaacactacaagacctgtctctgaacttattctcgctttggagtctgcgagaggttacccatcgatatcagtactttatgatcagcttgtagcattgaatcaaagagaactgatttggatagagcaagagaaaatctcccctaggagtccagttcctccatcctga

SEQ ID NO: 43422 - DNA, 1437 bp, Myxococcus stipitatus DSM 14675
atggacttcgcgacgctggagaccttgcggctgaaacaccccgcctggcggctgttggtcgcgggcaatgcctcgctcatcgcgagcttcctgcacccggtattcgtggcatcgaatgcccgcgccatcccgcggcgggagctggtgttgcgtctggaggaccacctccacgccctccgcgagcagcgaggggagacggcctttccccgagccgcccacgtctatctcgacgagtgggccgccgacagcgcggggtggctgcgcaagttctatccccccgacaccgatgagccacacttcgacctgacccccgcggcggagcgggccctccggtggctgagtcagctcaccgagcaacccttcgtgggcaccgagtcccgattgctcaccgtgtttcatctcctccaggagatgacggagggaacggagccggacccaggcgcgaggctcgcggagctggagcggcgcaaggcggaggtggaggcggagatggctcgggtgcgcgcgggccacctggacctcctggaggagtccgcgctcaaggaccgcttccagcagatgtccgacaccgcgcgcggattgctgtccgacttccgagccctggaggacagcttccatgcgctggaccgccgggtgcgcgagcgcatcgccacgtgggaaggcacgcggggggcgctgctggagaccgtgctgggagagcgagacgccatcagcggctcggaccaggggcgcagcttccgagccttctgggacttcctcatgtcccccgagcgcaaggacatcctcacgaagaacctggagcgcatcctcgcgcacccggcgattcagtcgctgcagcccgacccgcgactcttgcgcatccacttcgactggctggaggcgggcgagcacacccagcgcaccgtggcgaggctctccggccagctccgccgcttcctggatgaccgcgtgtggtgggagaaccgccgcatcctccaggtcctgcgaggcatcgagaagcacgccctcgccctgcgagcgagcccgccggaagggcccttcatggagctggacgacctggcgcccacgctggacctcccgctggagcgcccgctgtacgctccgccgtcgcgcgcacggatggtggacgaagaggtgatggatgcgacggaggacgtgccctcggacgcgctcttcaacctcgcgtacatcgacaagacacggctgcgctcgaacgtccgtcaggcgctcctggaccgtgagcaggtctcactcgcggacctggtccgcagccatcccctcgagcacggcctcgccgagctcgttgtctacctgagccttgcatcggaggaccgcaaggcctctgtcgacgaatcgcggacgcaggaactcttctggaccgatgcgcgagggctccctcgccgcgcgacccttcccctggtgctctttctccgatga

SEQ ID NO: 43423 - DNA, 612 bp, Myxococcus stipitatus DSM 14675
atgaccgctcccatgtctcatgtcgccgaagccccggatgccctgtcgctggtggtcgtctcgctcctgaagggcgtggtctaccgggaggagaacccgtcgctctggcaatccctgctcaagctgcatgcacgggtcagtgaccacgtgtccgtgctgggattgggattggctttggatgagccggagggctacgcctttctccgccagcgggcggagggagaaggagccggggagctgcctcggctcgtcgctcggaggccgctgggctatggctcgagcctgctgctcgcgctcctgcgcaagcgcctggcggacgcggatgccgcggcgggaggaacgcgtctggtgatgcgccgccatgagcttcaagacctggtgcggctgttcctcccggagggcacgaacgaggtgcgctggggggagcgcgtgaatcaagacatcgagcgagcggtgggcctggggttcctcaagcccctggccgaggaggacaccttcgaggtccgccgcatcctcaaggcctttgtcaccgcccactgcctggaagggctggagcagcggctcgcggcctatcgcgcacaactcatcgaggaacaaggaggtcgggaatga

SEQ ID NO: 43424 - DNA, 3384 bp, Myxococcus stipitatus DSM 14675
atgagcacggtacgtcctctcctgcaggcggacctgttggacgtcggcacccccaacgcgcgagcggggttccgccttcgtcggttcgaggtcttcaactggggcacgttccaccagcgctcatggcacctggacctgctgggggagagcgggctgctcacgggggatatcggctcgggcaagtcgacgctggtggatgggttggtgacgctgttcgtcccgccgcagaagctggcctacaacaaggccgcgggggcggaggcgcgtgagcgcacgctgcgctcctacgtgcgaggccagtacaagtccgagcgaggagagacggggcagggggctcggcccgtcttcctgcgcgatgcgccgacctactcggtgctgctcgctcacttccacaatgaggggtacggacaggacgtcacgctcgcgcaggtgatgtggatgcgcgaggcggagggacagccggcgaagctgtacctcgtcgcggatgggaagctctccatctccgagcacttctcgcgctgtggctccgacctgaatgcgctgaagaagcgcctcaagtcgctcgctcgggaggtgcatgagacatttccgccgtatcaagccgcgttccgccggcgcttcgggctggagaatgagcaggcgttggacctgttcctccagacggtgtcgatgaagtccgtgggcaacctgacggacttcgtgcgccagcacatgctgccgcccttcgatgtggagtcccggctggcggcgctcatgggccacttcgacgacctgcaccgtgcccacgaagccgtgctcaaggcaaagcggcaggcggggatgctcgagccgttggtggcggaccacgagcgcttcaccacgctgtccgcggagctggaggacctcaaggggggccgtgaggccctgcggccgtggttctccgcgcggaaggcggggctgttcgaggcccggctggcggagctggaaggggagcgcgagaagctgcgcgcgaaggcggagcgaatccaggagacacgagcgcggcacctcgccgacagggagcggctccgtcagtccatctcggacaacggaggcgaccggctggagaccgagaaggcggagctggtccggcgccggcacgagcgggacgagcgcatgcggaaggcggaccagtacgcgcgaatggcccaggccgtggggctccccgcggcgacggagctggaggtcttcgtggccaacacgcgcgacctcaagcgcgagcgcacccgcaccgcgaacgagctgtccgaggcccagaactcgcgcaccgagctcgcgatgcgcctgcgtgacctcgagagggagcacgagacggtctcggtcgagctggaggtcttgcgccgccagcgctccaacatccccgcgcgcttccttcacctgcgcgcgaggttgtgcgcggacctgggcctgcccgaggagcggttgcccttcgcgggggagctgctgcgagtgcgcgatgaggcgcgggactgggcgggcgccatcgagcgtgtgctgtacccgctgggggtctccctgctcgtccccgacgacgactatgcgcgggtaagccagtgggtggaccgcacgcatctgaatgcgcgcttcgtctacttccgcgtccgggaagaagccgcgtcccgcgggggggcgtcgcggccagagtcgctgctgctcaagctcgcattcaagccaggtgccccgcagtcggcctggttggagacgcatctggcccgtcagttcgactacgcctgctgtgagacctccgagcagttcatgcgggcacgtcaggccctcacccggatgggtcaggtgaagacaggcggggaccggcattcgaaggatgaccggagccgcatcgacgacccgtcgaactgggtgctgggctggacgaacgacaccaagcggaaggtcctggagtccgcggctcgctcaagggagctgggagtccaagccgcctctgcccggtgggcggcactggagcaagagtgtgcgcgattgcagctgcggacggagcagctgggacagctcggggtcttcgagaacttcagtgagctcgactggcgtctggtggcgggtgacatccatcggcgcgaggagcggctcaaggcgctccaggcggagtccgatatcctccaggggctctcgcggcagctcgacgcggtcgagaaggacgtggccacggtggagacgaccctgaaggccgtggagaaggagcagacgcgaaacgaggagcgagaagcgacgacacgaaagctcctcctggcctgccagcggaccgtgagcgaatgccccgacacgctccggtcttccttcccgcgagtcgcccggttcagtgaagaggtgctcgccggggcggccctcgaagcggacacgtgcgacgagcgcgagcggcaggtgcgagaccgtctccaggcgcgaatcgacggggatgggcgcaagctggagcgggtgcgggactccctgctcgcggcgatgcacgcctaccgcaccgcgttccccttggagtcccaggagctgggcgcgggcctggagggtgcaccggagtatgtgacgctcctggcctctctgcgcgcggacgacctgccgcgcttcgaggcgcgcttcaagagcctgttgaacgagaacaccatccgcgaggtggcgaacttccaggcgcagctccaccgcgagcgccacgacatccatgagcgcgtggagaccatcaatcgctccctgcgggccatcgactacaacccggaccgctacatcgtcctggagctggtgcccacggtggacctcgacatccgtgcgttccagcaggacctgcgcgcctgcaccgaaggctcgctcaccggcgctgaagacgacgcctactccgagcagaagttcctggaggtgaagcgcatcatcgagcgcttccagggccgcgaagggcagggggagctggacgcgaagtggacgcagcgggtgacggacgtgcgcaactggttcagcttctccgcgtcggagcgttggcgcgcggacgaccaggagcacgagcactacgcggactcgggcggcaagtcgggaggtcagaaggagaagctcgcatacacggtgctggcggcgagcctcgcgtaccagttcggcttgcagtggggagagacgcgctcgcgctcgttccgcttcgtcgtgattgacgaggcgttcggccgaggctccgacgagtcggccacgtacggcctggagctcttccgccgcctggacctgcagctgctcatcgtgaccccgctgcagaagattcgagtcatcgagccgtacgtggccagcgtgggctacgtccacaacgaggaaggtcgctgctcgcgggtgcgcaacctcaccctcgaggagtaccagacggagcgcgcggctcggagcgcctga

SEQ ID NO: 43425 - DNA, 1437 bp, Clostridium stercorarium subsp. stercorarium DSM 8532
atgatactctttgaaaaagatgaatttgataaattttttaatccgctttgttgtaagaataaaaaagtatattatgagtgtattctacagcttattgaaaaatctaaaacagttcccttgctttatgaaacagaggcaagagatacattagtattatacctcagaaattgtacttatgctattgaagatgaggaagggttaagtgtcgattatgcagaaataagtaataaaaagtctgaatttgaaaatgcaagtgaaattctcaggtatttcagacagtgcggttggatttcggagcgggagttagggcgaagcggagataatattgccacggttacgccccagtgcagaaagatgatagaagccattgaacggatttttaacagagataacagagcagcactgaccaatcatatatttgcaatctatgacattttgcattctgcatttgtgaccgatcacggaagaacccataggccatatgtaaatatcttagtacctgtttgtgatagtgtggaggatctgaagaatgagctgttaattttaagagacagtatcgaatccattatgcggatggttattaaaatgactgaagcaaaccagttagggcagttcttgataagagatgaaatgatggagtctttttttaatgactatttttttataaaaaaggacgggttaattccgggttatattgaagaaattgaaaagatgcttaggattataccggagacagatgtttataagaatatgattaaagaatatcaggagttttataaagtagatgagagtactgctaaaagcgtaatagacaatcaattgaacggcataatgagcttcattagttatgattatgttaaagagatggattatattgacaagaaaataaataaatattacagtctctatgcaacaagaattcttatggtattaagcaacaatgtaaatttgcagacatacttaaataaaatactgatgactattaaagactttgacatggatgtaaagaaagaatttctggagcgtttatcagtatcttttaatttaacggaacataaatacgtcggaaagaaatcaattgaaagaaggaaaaaacgtaaacccaacactaaaagtggtgcaataattacaagcgggttatccgatgacgagaagctgaaacttactgaagagattttatacgcatatcctgacaaatatggtgtaaaacaagccaaaaattattttgacaggttattaaagaacagagatgaattaattcctgatgaatcagttgtaaaatcaagagatgacgccatgatggtagcggcgagtattatatattctggcagtatggaatttccttatgaagtagaatttttgggcggaactgttgaaacaggggtcgcgacaataagtaaagtaaaaattaagaggaaggtaagtgaaaatgggtga

SEQ ID NO: 43426 - DNA, 648 bp, Clostridium stercorarium subsp. stercorarium DSM 8532
atgggtgaaattaaattgaacctttctatcaaggaagaaaacatgccgctgtttaaacgatgtgtacgtaagttattgggctcaacgtttattgtcggggataaagatgaaaatttatatgcttttatctcaagggagtcaaacaggcaggatgtttctgactatcttcgtatgataggttttgatgtattagtggatgaaaaggtgcgtattgcaatgctgaaaccatatgaaggtgatgaagagacacctggattaaaacgttctaatgttgtggtattcacttcagagcaatatcatcttttattggttttatgggaagcttatttagaaagtcttgggtatagcgagcaaaacattgtatttttaggtgatttaatagataaaatgaaggcgtacaatgtagatatggacggaagtaaactgttcgccgctttaaaaatatttaaaaagtatgatcttatagattttgatccgaataacaaatctgaggatgcaatcattacattatatccttctttgcaattcgggtggaatattgaacagttcaggacagttgttgaggagtatatgaaagagaatcagtatgaagtgagtccggaagatgaaaatatagattttgaaagtggagaggacgatacagaatga

SEQ ID NO: 43427 - DNA, 3288 bp, Clostridium stercorarium subsp. stercorarium DSM 8532
atgattttattgaacagacttagattaatcaattggtatgcatttaacaatgttacggttcctattggaatttttactttaattgcaggaaagaacgggaacggcaaatcagttttgttagacgcaattaagtacgcgctttatggagatactgtatttaataaatctacggaaaataaaggcagcagaactgtagtttcatataccagggggttattggacgttaccgcgggaacatacatgagacctgccgatagaataccaaatgtttatacgcatattgtcctggaaatgtcagaagctgagcttaatcgtaatttcatacttggaacggtaattgaaacggattcaggaaatggatttaggacccaaagatatgtcatcgaaaacaagacattggatgatattaaacatacgtatgagcttgacggaaaagaatttccttatagtgctgctgaactgcagaaagaatacgggcttaagatgatggatgcaacaaacgggcttttaagatttatgcaaaggactggtttacattttaataatcaacagatggccacgtttagaagaaagcttcgaagtattatgtcatacgatcctgaggctaagatagatcagttcatacgtgagaatgtccttgaggagaagaaggttgatctttcaaaattaattgaagtaaagagcaatattgatgatttaaataaaaattttgagctgattgacaaagaaattacagaacttgatgagattattaatactttcagagaattaaagcaaaaagaaaacagattattggcagacgatgtaaaaattgcataccaaaaatatttggagtgtgaggaaaggctcaaggattgtaagcataatatggagattgctgaacagcaaatgaaatttgacatacaaatgttagaaaatctggaagtgcatgaagaagaaataagagagctgtacaataatgcaagggaacatttgaattccatggattgtgcaaaggccatagaagatgcgaaaaaagctttagataacgcattggctgaaaaagaacggttaaagaaagaaaaagacgcactttgctgttttcagacaaaaattaatgaactgctatcctggttcgataaaatgcagtttgatgtaattaataaaaaaatactttcatcattgacttacaatacagtaaccaaagctgagaaacaaaacgcagtaagaatgtttttatcacaaattcaggaatatagagataagttaatagaaaacagagccgaaattaataattttttagctgaaaatcagaaagagcagaacaaatgtttgaaaattatagatgcttatgaagataaaagggttattttttctgaaattccggaatatgtagcacttaaaaatgaaattaaccgggaattcacaagaagaggaattaattctgaggcaaagtttgcatttgagtatgttataggaattagcgatgaggagtggcgtgatgcaatcgaggcatatcttggaaaccgcaggtatacgattttggtagagcctgaatactatgatatagcagatgatgtgttaaatgtgtcaaataataaatacgcacatttatttaacaccaaacttttgatgaaaaaggacattaagcctgagccagactcagtagtacattttattgaagtgaagaatccggtagcgaagaaatattttgaatggcagcttggaaaattgcatgcgaccgctgtagataaggttagaaattatgaaaacgctatatcaaaagaaggaagagtatctgtagcaatggacagttactttttgcgttttgacaggattaagttttattgtttaggtttaagtgctatggaattaaacagggcaagggcaaagaaaaatttggagaagttaaggcaggaatacatggcggtacaggagacactaaatgatgtgaatgctaaaatagcttatcttgataaaatgagaggatttttcctcgattacaattatgatgcatgcgaagaatatgacaaagctgtatcagaatgtatgaaaaaggaaacagaacttaaagtcttagaggaagcacagaaaaataatatagaatatatggaacttgttcagagagtggaaattcttaaaaaggagttggagaatatagagaatgaacggggcagacttcaagaagacaaatttagggttaaggtaatgtatgaaaagtatagtaaggaaaaagaaaatattgaaacagaaattgtgagtgtaaaagcaaaacttcaggaatatgaatgcaaaaatagtgaggtgtatagtaaagctatagaagattacaaaaaatatgttgataacggaaaaacaggacctggtgggccgcttaaggatagacagcgtttggaacgtgaggtcaatgaagcgagaagacaattaataagtaaacaagcaacatataatgcgttacgagcaactgaaaagccattgccagagacaattgagtcagttgctgagtatcaaaaaagaagagaacgaatttgggtggacaacagacaagaaatacaggctaagttaaaagaacagacacagcgttacgaagaaatttttaagaacgagtttgtacttacaatattaaaatattgtgaaactgcgcgaaatgatataaaacttattaatgcagaattagctaatttgaaattcaaatctcattatgaatttgacgttaaatatgtaaaagacggttcagattatgaaaaaattattgaatatgcaaaatatttaaaagaacgtgagaaacttggagtatcaacagaacagatgtcaattgaagatatggtattaaattctgacaacaaaggcaaggaattagagcaggaaataaagaggattgtaaatcatattacggagaacggtgacaaggagcaaattgatagttatgccgattatcgtaactatatgacatatgaaatcttattaactaatgatgttctttcaaaagctaagttatctaaacaatcaggttacaattcgggcgcagaagtgcagattccttatatgttgatactcttgtccgctttgttgatgatttataatgagaagaataattcaacacgcttggtattcattgatgagccgtttgcaaaaatggatccgattaatgtaaaaatcatgttggattttatgaaaaagcaaaatcttcaaatgattttctgcgcacctgataaaacagagttaatcggtaatgaatgtgatgttatattgcctgtccttagaacaaaaccagatttaatggaaattggcatagtaaaaatacattaa

SEQ ID NO: 43428 - DNA, 1221 bp, Clostridium stercorarium subsp. stercorarium DSM 8532
ttgagttatgaagaaaaaatccttacgtgtttagtaaacaaataccgtagcagtaaaaaagattcaggtaccaataaaatttataagagaacacagataaagccagaaaagatttataaaaagtatagtgcaaatgatggggattttgatgaaataaatagattaaatgccactgtggaattactggagaaaagagggtacataaccagcgtcagggaatcttttggcacacaaattaaatgtatttatcttattgatgagaaggtagacgaaattgaaagatatctggaggaaaaatatggttttgtatctaagaatacacaacttgaatatgtcaagaatttaattaaactatataaagaggcttcgcctatatgtaaggaagagtgcaaacttttagaacaggctgttctcaacagaaaattaccaaagaatataaagttgcttgatgacatttttaaagcaatagcgtttattgaaaacaatcaggaacaattatacatccgagaagtatcgatgaaaatatacggcgattctaaatattttgaaaaagtaacgttgcagccggtatgttcaatattacgaaaatataccaataaacctttagaagactcagaactgttggatgaaatattattatattatcatattctgagagaaccccagaaaatatgtattaagggaaatgctgttatttacatgttcggaactgaagttgatataagcagattttcagatggaatagaaataatggcatcggatttagtcaatatagagtctgtaattttacatgcatctaagttcatgactattgaaaacagaacatcttatttaagatacaaacatcccgatgttgtaacattttatttgggaggatatgcaaaccgttatcagcgggattttattaaaatggtttataaggcaaatccaacaataacatatttacattttggtgatattgatcctgggggattttggattcattataatttgtgtcaagttacggggatagaatttggtatgttttgtatgtctgttgaggagcttaggaataatgtctaccaaccatatttacgcaaacttacagataatgacatcataagacttcaagaacttaaagatatggatatttatgcaaaaacagtaaagtttatgctggataacaatgttaagctggaacaggagattgtgagttatacattgatgaatacgaagaaataa

SEQ ID NO: 43429 - DNA, 1455 bp, Xenococcus sp. PCC 7305
atggaacatgagaaaattcaatatgatttagaaaattccccaaatattaaactgctaaaaagtcggaatgcaccgctgattgttagctttttgtatcagcatttcaaaaaaaagcagcaaatctcaattccagaatctgagctaaccaagaaactagaagattatttagagtttttacgagacagcgaaccagatctctatccgcgatcgcccagggaatatttaaatcaatggtgtaatgatgactttctgcgcaaaacctataaagctgatagtgacgatcctgtattcgaactaacccctgcaaccgaacaagtaattacctggctagaagatttagagcaaagtgaatttattggcgcagaatcgcgttttttgcagatctttagcttgctaaaagagattagagataacagtaccgaagatttggaaaccagaatatcccaactagagcaagagcgcgatcgcattcaacaggaaatcgacaaaatcaaacaaactggcattgtcgaaaattataatcagacccaaattcaggaaagatttgaattcgccaattctattgctcgtcaattagtggccgattttcgtaccatagaaaaaaattttcgcgagttgaccaagaaaatcaccaccgcaagattagaagtcaaagcgaacaagggatctatcttggatcgcgtcttggatgccgatgaagaattacgggaatcaaaccagggaaagagtttttataccttcttcaacttcctgcaatcagatagcaaacaacaagaattagaaattttaatcgaagccgtttataatttggaagatttatctgcttcgggttcaagatatgaatcattacgtcggattaaaagtagattagttaacgaagcccaatatattatgcaatccaactatcgtctggcagagaagatacgccagcttttggatgaaagtaacctagaggaaaatagacgagttggcgaactaatcagagaaatccaaggcttggctttaaaaataaccgaatctcctcccttagagccgaatttttggatatttgaaggaaaacccgagttgaatatctttatggatcgtcctttccattctttgcaagaatctcctagccctagttttgctctagatttagataatctaccggaagttgacttaaggcaagatttaaacgaaatttatcatcaagtttacgtagacgaagacttattacgtgatcgccttgagctaattttggccacaagagcggaaattaccctagtagaattaatcaggctatatcccattagccaaggattagcggaaattgtcgcctatatagtgattgccaaacaagaccaacagcatgaagtcaatctgagaaaatttgagtacatcgatatagatagcttagaattaggagataagttatctctcaacatgccggaagtcatttttaggcgattacattaa

SEQ ID NO: 43430 - DNA, 594 bp, Xenococcus sp. PCC 7305
atgtcgactcaacctcgcccagcctatgcgccagttattattaaacttttcaaaggcgttatctacagtaacgactctcattggaatcagttacaaagctatctaaccccgcttaaagagttttttggtcagcttggtttagaaatacgtaattacgaaaccgatggatttgcctatcttacacaaccagaagccgatccagaagatgaatctgaacctttaccccgcctgacaactcgccatcccctaagctttaaaatgactatcttatgtatcttactaagagaagagttgcgacagtttaataccagtgaagccacaggccaattagttattagcatcgaaaaaattcgggatttacttcagccttatctcccagaaagtaataacgaagaaaagtttcggcgtaatgttaatagtctagtcaagcaagccgaaaatttggaattcctcagacaactatcgggacaagatgataaatacgaaataagagccattctcaaagcaaaacttgatgcccaaacccttactaacctcaaacaaaaactggcagaatatgcagcaaactccacttcagctgaaactgactcctga

SEQ ID NO: 43431 - DNA, 3381 bp, Xenococcus sp. PCC 7305
atgcagcaaactccacttcagctgaaactgactcctgattcagaacataactcgtcgggatatcgtttacaaagatacgaagttcttaactgggggacctttgataaccgcccttgggcgctaaacttgcagagtaaaacatccttgctgactggggccaatggttctggaaaatcgactttagtggatggcttattaaccttgctggttcccaacagaggacgtaactacaatttggcttctggtgatacagggaaaagagaacgcaacgaaaaaagttatgtcttgggggcctacgatcgcaccagtttagaagaatcctatggttctaaatcaaaatttttgcgggaagaaggcattcctacaatcttactggcttacttttgcaatacagataaccaacagcaagtgaccttagctcaagttttatgggttaaagacggatcggttaaaaagttttttgttgtttccaaagatgagttgagcattgagaaagattttaataattatcagaatgtttctgaactcaaaaaaaaactcaaaaaaaataaggcaacgacaacttttgaaaatttcaataagtatagtgccagctttcccagacttttgggtttgcagtcagacaaagccttagatttattcaatcaaactgtcagcatcaaagagatcagaagtctgaatgaatttgttcgcaagcatatgctagaaaaaactgatgtccaggcaaaaattgaggagttgcaaaaaagctatgaagacttaactgtttgtcataatgtaattgaacaatcgcgacaacagctagaaactttaattcctcttacagaagaagacgagaaatataatcggttaacccaggaaattgtcaatttacagcaaaatatcacggtcgctcccgcctattttgcgaaggaaaaatttggattattaaccgcagaaatcactaaaattgagcagcaacttgcccagaggaagctcgatcaagacaatagcgagcagcagctcgacagcctgcgtcagcaagaacaagatttaaagattgcgattagtcaagatagtgtgggcagaagactagaagaattaaaaagagagattaaacaagatactcaagaaattagtcataaaaaacatcaagcaacagaatatgatcgtctggcagaattgctccaattacctctatatagggataaagagatattttttacagcacgagagcaaggagaaaatctcaaacaaaatattattgctgcgctacgagatttagaaattgaacgtgacgagctggtaggtcagcgcaaagaattggagagtcaatgccaagaattgcaatcagaattagactcgcttcggcaacgtaagagccaaattccccaaagaaatttagacattcgtgatcgcattgccgatgctctcaatttagagcagtccgatttgccctttgtgggagaactgcttaaagttcgtgatgatgcagctgaatgggaagccgcgatcgaaaggcttttaaaaggttttggcctgtgtattttggtttccgagcaatattatagtaaagtcaactcctatgtaaatagtaataatttaaaagggcgcttagtttactatcgagttgcaccgtcgccaacccaagcaactcaacgggctctcgctcctgataaagtaccttccaagttagaaattaagcctgacaatcgaatttttgcccaatggttgcaacataagttagttcagtcctatagctatacttgttgtgatacagtggaactttttctgcaacaaactcgtgccatcacctccatgggattgattaaacatagtggagaaagacatgaaaaagatgatagctcgcgcataggcgatcgcagaaactatattttgggttgggataatgccgaaaaaattgcggcaatagaaacagaattatcttcacttaaccaagacctacaggaattgattcaacaagttaaggaactagaactaaaacgtagccaacgccagcgacaacaatcttggttacaagactttatgaattttacagactttaactccatcgattggcgtttggtagaacaaggaaaacaaaggcgggaacgagagctagccgaattaaccgcaagtagcaatcacctacaacaattggagacccaactaaaggaagttcaacaacaaattatcaccgctaattcactacgagataatttaattagacaaattcagactctagaagataatcgtcgaaaagccgaggcggcaaagtcaaaatgtcaagaaaaattcagacattctatagaatctcaacttgaaaattttgcaaaaaaacatcttaggaaattacagcacaataacttaaacttggaaaatattgatgaaattgaagaccaagtaaataacaagttcggtgagcagattcagaaaaagatcaatcaacaaaattcttgtagaaatagtattgaaaaacaaatttacaactttaggcgaaattttacccaagtaacaattgatatgggaagtgattttgagtcactcccagaatatattaaactcactcataaaatagaacaggatgatttacctcgccatcaaaaaagattcaaaaagctgatgacagagaaaattgtcgattctataatcatgtttaaaacttctctagaacagacagaagaagaaattaagcaagatattgataatctaaataattctttgcgaacaattgactacacaacctcaacttatattgaattgcagtatcataaaaatcgcgatcgcgaaattacagattttagacataatctaaaaacttgtttgggagatgttgcaagacaaactgctgaagataacgaacaaagattcaaaaatattcaaaagtttttaatcgaacccctaaaaaataatgaagttcgttggcaaaataaggttacagatgttcgtaattggttagatttttctgtcagtgaacgcgatcgctcagataatcaagaacaaagaactcacactgactcggcggctttgtctggaggacagaaaaataaactagcttgtactattctagccagtgcgatcgcctaccaatttggtttacatcgagccaattctagtgggaaatcatttaggtttgttgtaatcgatgaagcatttagcaaattagatgataaaaatgctcgatatgctatggagttatttaaaaacttagatttgcagttattaatgattacacctcaagacaaaataaacattacagaaccttatatctccagtcttcatgttgtttccaatacagaggccagagactattctagtgttgtttccatgactattgaggaatttcaacacaatcgtcagattgaattagcgaaaaatcgtgattactcccaatcaaattaa

SEQ ID NO: 43432 - DNA, 1155 bp, Xenococcus sp. PCC 7305
gtgattactcccaatcaaattaagcaaaaagcaaaacgtaaatatacgagttttcttcagacaataattaaaaaccagattttttttcctttggtcttacctatcggtaaaattccccaagagtatatccaactgcgggatgaactcacctgtttaatcaatcaatcaaaatcaactttaggttatggatatactgtcaaattgacaactaagaataccagaagttatggatcacaatctttacctactaaaattactattgaaaccaaaaaagactatctagtattacttaataagcaatcagaatttagtaaatttaaagccaatattgaattaattagggtttcgatacctcaacttgaagaatggatatttaaacataccaaacaagttattgatcatgcagggcaatgggaagatttattaaaagtttgtcactattttcagcaaaatcctggtcctaatctttatcttcgtgaactaccaattgaagttaataccaaattcattgaacaaaataaagctattattgattcccttttatcagcaatcttacccagcgaagttattcaaccagtcgataaacagaaaaaatacagctttgaacaaaaattctcccttagatatgaagagcctttagtcagattcagaatcttagacaagcagctcaaagaaaaatattgctttccagtttttgatctgacgactcccttatcagaatttcaacaacttgatctcaaaaaatatcattgttttataactgagaataaaatgaattttctcactttgcctaatcttcaagatagctttgctatttggggcagtggttataaaactcaggtgttaaagtctgtgagttggttggccgattgtcctatcttttactggggagatatcgatgccgatgggtttaaaatactgcatcaattaagaatatattttcctcagactatttctgtaatgatgagtcaagatacttttaataaatttgagcaattttctgtagaagtaaccagctcggaacctgaaaatttatcgaatttaaccaaagaagaatatttattatatgctcatgtatcccgcgagggaataagattagaacaagaacatataaatcaaaatgttgcgattaaacatctcaaagagtgcaactaa

SEQ ID NO: 43433 - DNA, 1452 bp, Leptospira santarosai serovar Shermani str. 1342KT; identical to SEQ ID NO: 43355

SEQ ID NO: 43434 - DNA, 564 bp, Leptospira santarosai serovar Shermani str. 1342KT; identical to SEQ ID NO: 43356

SEQ ID NO: 43435 - DNA, 3357 bp, Leptospira santarosai serovar Shermani str. 1342KT; identical to SEQ ID NO: 43357

SEQ ID NO: 43436 - DNA, 1179 bp, Leptospira santarosai serovar Shermani str. 1342KT; identical to SEQ ID NO: 43358

SEQ ID NO: 43437 - DNA, 1452 bp, Leptospira weilii serovar Ranarum str. ICFT
atggaatattctaaaatcaaatacttgctgaagtcgtctgcaattcggattttgcgaaaggatttcgccggggtaatcgtatcgtttctttacgaccaattcaaaaccggaaaccgattttggattcccacagccgaaatgagtctaaacctacgaaattttttggaagatctcaaagacgagggagacgtggaaccgaccgattttgtcaggagttcggacgtatatataaacgaatgggttaacgaaggttttttaaccaaccgcgtacaaatcgtggacgggtcggaggaaattatcctggaactcacgcccgaaatggaaaaattattttcctggttggaagacttaagggatttggaaagtaacgagatcgtcggaacggaatcccgatttttttcgatactcaataaactcaaggaaatcgtagaggagaccgtatccggacccgaggaaaaaattcgacaattggaaaagaaaaaagaggaactggatttggaaatagcacaaatacgggagagcggtcgtgtggacgtttttccgagcgaaagaattcagagtcaatttttgtacgcaaagaaggaagccttaagtctgttaggcgattttaaacaggtggagagtaatttccacgatatgacacaatccattcatcgaaagtatttggagatcgccgaaaaaggggatattttggaattcgttttgggagaagatacggaactgttaaaatccgcacaagggcgaagctttcaaactttttgggagttccttcgttccgaaaaacaccaggactttttggaaaagctgattcaaactttgtattcgatgacggatgttcttacggtggatcccgaatatttttttaaaaagttaagaaaaaatctcagggaagcgggcgccagagtcaatacggtcgtttctcagatgtcggaacaactcaagaaaactctcgtggatcaaactatattaggaaatcgtaaagttaaggagttgataaacgaaatcaaaaattccgcgttgaactccgatttttcttccgagtttgccttttacggtttcgaggagccggaagttcggcttacgatggaaagaccgatttggaaaggggatgattttgattcttcccgaaccgtatttgtggaagaacagcaggaaagtttttttgattgggaaacgttgtatccgatgattcgaggaatcgatccggaagaattggaagggaatattcgatccttattacggtataaaccggagatcgggttggaagaagttttacggcagtatccggatcagacgagtttggaggaaatcgtgatttatctttggatcgcgagcgttcgggagacacattccatcgacacacaggatttctttcgatggatccgagatcgggaaaaggaaatcgtatatcgaattcctaaagtgatttatagagtgagggaagatggataa

SEQ ID NO: 43438 - DNA, 594 bp, Leptospira weilii serovar Ranarum str. ICFT
atggataaaccgctcgtttatgcttcttcgatcctgaaacttttacgcggaccgatcagtctggacgaagacccgaaagcatgggatcaattgtacggtaaaaaggaagaggtccgcaaatatttcgaacagatcggactgatcctttatatggacgaggtggattgttacgcatttttaaggcagacctcggacgaagacgacgatgatgataaggaaaaacttcccaaactcacgagaaaaatcgcgatcaatcgaagggaaactttacttctggtacttttgcgggaagtgattttggaaagggaggaaaaggatccgtcttcttccgcgatcgtccgaaaagaagacatatacgaacttttgaaaccgtattttccgaaaacgaccaacgaagtggatctttacaaggatttcgatcggatgatccgggccgtggaaaatctgggatttatccgaatgatggacggttcgggaatcaaaatccgaaagattttaaaggcgaaactctccgtggccgacttggaacgaatcaaatcgaaatttcgggaaggaggcgccgatgacgagtctattcaatctcaaaacgagtga

SEQ ID NO: 43439 - DNA, 3366 bp, Leptospira weilii serovar Ranarum str. ICFT
atgacgagtctattcaatctcaaaacgagtgaacttccgagcggctttcgtcttcaaagtctggaagtactcaactggggaacattcaacggcaaagtttggaaactcactccggaaggggataactttcttttgaccggagcgaacggctcgggcaaatccacgttggtcgacgcggttcttactctattagttccttctaataaaagaaattataatatagcttccggatttgagagcaggagaaaggaccgaagcgaaaaaacctacgttgaaggacattacggaagggaaacctccggcgtggaaggaattttgaaggttcgtaaaaatcaggaggattgttattcggtactttccgcggttttttccgaaccggaaaaaaaagtctttgtcgctttggctcaggttttttggtttcagggaggagagttaaataagttttttctaatctcggacaaacccctttccgtccgggattctcttctgctcaatcgacggtcgataaaaaatttgaaagcggatttgaaaaacgacggggttcgtatattcgataattttaaagcgtattcggctgaattccgcaacttagtggggcttcgttccgaaaaggcgatcgatttgttcaatcaaatcgtaggaatcaaatcgctcggcgtattaaacgacttcgttcgggaacatatgttggaacgtatcgacgttcggtccaaaatcgaagagttggataaaagttattctaatttgacggaagcgtatcaggcgatcgtcaaagcgcgggagcaattgaaacttttggagccgatcggagaaaaggccggggatttgcgtcaggttcggacaaaaataaaatttgcggaaaaactcctaaaatccctggtcccttacttttcaaaacttcatctggaaatattagccaaggacgaaaaggaaaaagaattagaactttctaaaattcaagatcaattgtattcgatccgtgcggacgtcgagcgacttcgggaggaggaactcaaaatcgcaatcagtctggaaaataacgatacggttcgaagaatcgccgacctcaaaaaaagaatcgaggatttgcaaaaggaaaaatcgattcgagaccagtcttggaaacaatattccggccttgcttcccgattgaatctgccttatgaaagaaaggaaaccgatttttacgaagtgtttcgactttccggagttcgtctggaagaaaacgaatcacacaaggaaattctccgaacgcagatcacggaattggaagtggaaaatgataatttgaaaaagcgcaatcgaattacggaagaggagattgcccatctgaaaagaaacaaacatctgcttcatcaagacaaggtgaaaatcagaaatcaaatttccgaaactttgggaatttccgttcaggaactcccctttgtctgcgaactcattcaagtaaaggaaacggaaagaccttggctcggcgcgatcgaaagattacttcatagtttcggattgcgtatgcttgtaccggaaattcattatataagaataacagaatatgtaaatcggacttttttaaattccaaattcacttattttcgaatgttacccgtctccggatattcgaacgaatcacccgcaaataaaaacgaattgttttataaactcgagatcaagccggaattggattcggagaaaagacgatggatcgaatcgcagattctacgggattataactatgtttgttgcgatatcgattctttctataactacgataaggcgataacgaccgaaggattgatcaaaaccggaaagatccgtcatgaaaaagacgatcgttccaaggtaagcgacggaagaaatttcattttaggctggaacaacctggaaaagatccgcgctttggaggaggaatttgtggagaccggaaaacgaatctacgagctgactcccaagttaaaagaatatcgaacacaagaggacacaaactcgcaggaacggtcggatctgaatcggattcgggagttcaacgtcttttccaaaatcgacaccgaggggatcgaatccgatttgcaaaagtcgaacgcgcatttggacgagttggaacgttcctcggaagattacaaaaagcttaagtcccaacacgatacggtcaaaaaacgtttgggcgaatcggtcctactggaaaaagaagccgaaaaaacgatcaccgttttggaacaaaggatcgcccaaatccgcgaaaaacgttcggagttgttacgaaccgtttccgaatattccctcgaagaactttcggacgctttcgaggaaatctccgaaagaacgttagacgaaactctcaccggcgaaaatctctatacgattcgtaaaaaattggaaggacggatggaatccgaaaaaaccgagttggtttcggaagaagctaaaatcgccgacgctttaaacaaacaattggataagtacgtaaaaaaattttccgaggattcggaaaggatcgggcttgtcggtaacgtcgattatatcgaatcctttgaagaggagttggaaaagatcagaaaagaaagattgcccgaatttgaaaacagatttcgaaccatgatggacgataaggtttcgaaacagatcatagaatttaagatgggactggaagacgacgttttggaaatcaaagaacggatccaagagttgaacgaatcccttcgttggttggattacgtaaaagataaaacgtacattcaactggaattctcggatacgaaaaacaaggagatcgtcggagagaacgggtttaagtttttattgaaagaatgtataccgaatgtgggagacggatcttccaacgaggataaatttcagaaaatcagagagctcttggatcgactgaaagttcaggacggaaacgatcgttggtccaagtcggtaacggacacaagaaactggttggactttcgggttgtggaattcgataaggaaaccaataaaccgaaggaagtgtacgattcatccgcgggaaagtcgggaggtcagaccgtaaaattggcttatacgattcttgcgtccgcgatcgcctatcaattcggtttcagaaataagaaatcgtttcgattcgtggtcatcgacgaaatgttcaataatttggacaatccgaattccaaatacgcgatggacttatttcaacaattgggcctgcaactcctggtggttactcccatggatagaatcggggtggtggaaccttatatatcctccgcaaatttcgtaagtatcaattccgaagggaacggttcgagtgtggttccgattacgaaagaaaaattaaaaaataataaattagaaaattatgttttagaaaacggtaacgttttatcatga

SEQ ID NO: 43440 - DNA, 1170 bp, Leptospira weilii serovar Ranarum str. ICFT
atgatctcccccgaagagatccgaaaaaaggccgaaaaatatttccccaccgtactaaaaaattccatcttaaacgtaacctcgtttccttgggagatttccgtcggaaaggttttgccgggcgagttgttgcgttttgccgaacctctcagagttttggaaaaaaactccaaacaagaaaccggattcggatatcggttgttttctcttccgaaagaaacccgtaaattcggaactcagaccttgcccgaaagtatcgtattcgatacacaatcggactttttgatttatatcggaaaggaacaagagttcgagtcctatcaaaaaaacgtaaagttaatcctgaattccattcccgaattacacgattggattttggagtttccgatgtttgtgatcgaaaaggaaaatagttggaaagaactattggaggtttgcgattactttcgaaaaaatcctaagtcgggactttatatcagagaactgcccgttcgtgttcatacgaaatttatagaagagaataaaacgatcttaagaaaactattggattttttaataccgaacgaagtcctcgtagagagttccgtattcgaggacagatacggattaaaaaaggaagaggggctggttcggtttcggattttggattcggaaatatccaaaaattgtttcggaggtttgtcggatatcagcgtaccgatcggagaattcagatcgcttcggatggaaggttgtaaaagaattttactgatcgaaaataaaactaatttttcgaatattcataatttcttaaccgttccgagattacaaagaaccgtcgccattttcggcaaagggtggggattgggaattttaaaggattgtgaatggctgaaaacgaaggaacttttttattggggagatttggacgttcaaggttttgaaattttgtccaccctcagggagatttttccggcggctcgttcttttttgatggatcgaaaaacatttcatacctttcgcgagtttgcggtcgacggagttctcggaaggatcggcgaacttcgttttttaaacgaggaggagcgcgccacctgggaatttctaacttcgctttccgaaaaaaatcgtttggaacaggaaagaattccgaattggtacgtggaagaggttttgaacgagttattttaa

SEQ ID NO: 43441 - DNA, 1452 bp, Leptospira santarosai str. ST188
atggactataaacttttgcaaagattgcttcgttcttccgcaatccgtcttctgcgaaaagacaacgccccctttatcatctactttttggaaaaatattttagaagttctgcacgtactttcgttccgttcgaggagctgaaaattctacttcgttacgaattggaaaacttaaacgatcaggaagagatctccttacaaagaagcgcggacgtttatctgggagaatggattggagaaaattttctgacccggaggatacgatccgcggagggaatcgaagagatcatattggaaccctcggtcgaattggaaaaagtattctcctggatggaagacatacgatccttggaagataaggacgtgatcggcacggaatcccgttttttttccgtattaaataaattgaaagagattgtggaagagagcgtttccgatccggaggagaaaattcgacaattggaattcaagcgggacgaattggatcttcaaattcgaaaactcaaggcgggagaacaagtatccaaatttccgagcgaaagaattcggagccaatatgtgtatgcgcgaaaggaagcgttgggattactttcggatttccgacaagtggaaggtaattttatggaaataacgaagatgatccataaaaaatatctggaggtcgttcagaaaggggaaattttacgatttgctttggacgggaacgacgagttacttcgatcggaacagggtcgtagtttccaaaccttttgggattttttacgatccgaacgaagtcaggaacaattcgaaagtatattagattctttgtattcattggaagacgttttggagttggactcgagaaagtttttccggaattttaggagaaatttaagagaagcgggttctcgggtaaacggagtcgttacccgtatgtcggaacagctcaaaaaaagtttggtggaacgtacacttcgtgaaaaccgcagatcgaaagaacttatcgcggaaattaagaatttggtcttggagaatccactcgatttttctcagacggatttttattctttggaggaaatggatgttcgttttccgatggaaaggcctctttggcgcggcgatccggaggagacgtttcgaaccgtccggatcgaaaatacggatgaggatgaaaatgtattcgatattctggaatcgatccgaggaatcgatttggaaatgtacgaacaacggatccaaacgttgcttcgtatttctccggaggtttctttggaaaaggttttgcgggaatatccggacgacgtctgctttgaaagtttagtcgcttatgtttggattgcgggtaacggagaatttcattccttggacgattcggaaacctttgtatattccgtttccataatggatcatccttcggaaaaacttgcgtatcgaattcctaagggaacatatagagtgggtcatttatga

SEQ ID NO: 43442 - DNA, 564 bp, Leptospira santarosai str. ST188
atgaataaaccgcatatctacgcagcttccattctcaggttgttgaaaggatcgatcaacagcgagtccgatgcaaagatttggcagaatcttttggacaacgaaaaaccggtgcgggaacactttgaaaaactgggtatttttttgcacttggatcgggaagacggttatgcgtttctacgacagacttcggacgacgaaagtgcagaatcggatgagaaacttcccgtgatcacccgtaaacttccgcttacgaaagaagagactttgtttctaattctactgagggaatgtatcatagaaatcgaagaaaaagatccttccggttccatcctttttagaaaggaagagctatcggataaagtgagtccttttttctccgacctctccgatgaaatcgatcggcaaaaaagattcgaaaaattacttcgcaaatccgaagaactaggctttgtcaaacagatcgagccggaaacgattcggatcgaaaaactcttaaaggcgaaattgaccgtatccgagttagagggtttacgcggtaagtttcgactaggaacggaatag

SEQ ID NO: 43443 - DNA, 3357 bp, Leptospira santarosai str. ST188; identical to SEQ ID NO: 42868

SEQ ID NO: 43444 - DNA, 1179 bp, Leptospira santarosai str. ST188
atgatttctccggaaattttacgcaagagatcgctggcatactatcataacgaactcttacgttctatcgtcctgggaggtgttttatttccttgggagatttcgatcggtaaagttcttccggaagagatcttaaaaaatccgtctttgttgcgagaattacgggctgaatcgaaagaaaacaaaggtttcggatttagaatcgtctttcgttcgaaagagacccggaaatacggaatacaaacgattcctacgaaaatcgtttttgataccgaagacgattttttgcgttttacaaaaaagaaagacgaattcctctcctatagcaccgattgtacgttgattctttccgttcttcccgagctgaaagattggattttaaaaaatacgttatccgtaatcgaagagtccggtaaatgggaaagtattctttcggtctgttcctattttttagaatataggaatcccggattgtatatccgagaactaccgattcgaattcctacgaaattcatcgaggaaaataaaaaggttttgagaagtcttttggattttctattgcctgagatcgcggatgcgaaggatttcgaaactcgttacggattaaaaaaagcggaacctttggttcgatttcgaattttggatctcgaaattgcaaagtcttccaccggaggtttaacggatttgagcattcccgtccgggattttagaaagttggaactctccggttgtggaagggtttttatcttggaaaataaaacgaatttcgcgaacctattcaattttttaagttttccgcaactgaagggaacgatctccattttcggtcagggtttcggattaaacgttttaaaggattgtagctggttggagaaaatggaaattttttattggggagatctggacgttcagggtttcgaaatcctgtcgcaactacgggaacaatatcctcaaagccgttcctttttaatggacctgaagacatttgttcggtttcgagactttgcggtagacggtattccttcttctaaatcttccgaaccgaaatttctcactccatcggagcgcgaaacttggaagtatttaagttctttagattcgaaaaatcggttggaacaggagaaaatccctcacgaatacgtgcaagaagttctgtccggtttggatggatcgcagtaa

SEQ ID NO: 43445 - DNA, 1446 bp, Leptospira alstonii serovar Pingchang str. 80-412
atggaatattctaaaatcaaatacttactcaaatcgtccgccattcggatattgcgtaaggattttgccggggtaatcgtttcgtttctttacgaccaattcaaaaccggaaaccgattttggattcccacgaccgaaatgagtctaaacctacgaaattttttggaagaccttaaagacgaaggggatgtggatccgtccgattttgccaggagttcggacgtatatataaacgaatgggtcaacgaaggctttttaaccaaccgcgtgcaaatcgtggacgggtcggaggaaattatcctggaactcacgcccgaaatggaaaaactattttcttggttggaagatttaagggatttggaaagtaacgagattgtcggaacggaatcccgttttttttcgatactcaataaactcaaggaaatcgtagaggaaaccgtatccggacccgaggaaaaaattcgacaattggaaaagaaaaaagaggaactggatttggaaatcgcacaaatacggaagagcggtcgtgtggacgtttttccaagcgaaagaattcagagccaatttttgtacgcaaagaaggaagccttaagtctgttaggcgattttaaacaggtggaaagtaattttcacgatatgacccaatccatacatcgaaagtatttggagatcgccgaaaagggagatattttggaattcgttttaggagaggatacggaactgttaaactccgcacaagggcggagttttcaaactttttgggagttccttcgttccgaaaaacaccaggattttttggaaaagctgattcaaaccttgtattcgatgccggatgttcttacggcggatcccgaatatttttttaaaaagttaagaaagaatctcagggaagcgggcgcaagagtcaatacggtcgtttctcagatgtcggaacaactcaagaaaactcttgtagatcaaactatattaggaaatcgtaaagttaaggaactcatcaacgaaatcaaaaattccgtgttgaactccgatctgtcctccgatttcgcctttcacgatttcgaggagccggacgtccggcttacgatggaaaggccgatttggaaaggggacgattttgattcttcccgaaccgtatttgtggaagaacaacaggaaagttttttcgattgggaaacgttgtatccgatgattcgaggaatcgatccggaaatattggaagggaacattcgatccttattacggtataaaccggagatcggattggaggaggttttacgacaatatccggatcagacgagtttggaggaaatcgtgatttatctttggatcgcgagcgttcgggagacctattccatcgacgcacgggatttttttcgatggatacgggataaggaaatcgtatatcgaattcctaaagtaatttatagggtaagggaagatggataa

SEQ ID NO: 43446 - DNA, 594 bp, Leptospira alstonii serovar Pingchang str. 80-412
atggataagttaatcgattgcgcttcctcggtcctgaaacttttgcgcgggccgatcagtctggacgatgatccgaaagcctgggatcaattgcgaagatatgaaaaagaagtccgcgaatatttcgagaagatcggactgattcttcatttggacgaagcggattgttacgcgtttttaagacaaacctcggacgataccgacgagggcgataaggaaaaacttcccgtaattacgagaaagatcgcaatcaatcgaaaggaaactcttcttttggtacttttgcgggaagtgattttggaaagggaagaaaaggatccgtcttcttccgtgatcgtccgaaaagaggacatatacgaacttttaaaaccgtattttccgaaaacgaccaatgaagtggatctttacaaggaattcgaccggatgatccgcgccgtggaaaatttgggatttatccgaatgatggacggttcgggaatcaaaatccgaaagattttaaaggcaaaactctccgtggccgacttggaacggatcaagtcgaaatttcgggaaggagactccgatgacgagcctattcaatctcagaacgagtga

SEQ ID NO: 43447 - DNA, 3366 bp, Leptospira alstonii serovar Pingchang str. 80-412
atgacgagcctattcaatctcagaacgagtgaacttccgagcggcttccgacttcaaagtctggaagtgctcaactgggggacgttcaacggccaggtttggaaactttctccggaaggcgataatttcttattaaccggagcgaacggctctggcaaatccaccttggtcgacgcggtcctcactctattagttccttctaataaaagaaattataatatagcttccggattcgaaagcagaagaaaggaccgaagcgaaaaaacctacgtggaaggacattacggaagggacgcgtccggcgcggaaggaattttgaaggttcgtaaaaatcaggaggattgttattcggtgctttccgcggttttttccgaaccggaaaaaaatacgttcgtcgctttggctcaagttttttggtttcagggaggggagctgaataagttttttctaatcgccgacaaacccctttccgtccgggattctctcctgctaaatcgacgttcgatcaaaaatctgaaagcggatttgaaaaacgaaggcgttcgtatattcgaaaattttaaagcgtattcggctgaattccggaatttggtgggattaaggtccgaaaaggcgatcgatctgttcaatcaaatcgtagggatcaaatctctcggagttttaaacgacttcgttcgggaacatatgttggaacggatcgacgttcggtccaaaatcgaggaactggataaaagttattccaatttgtcggaagcgtatcaggcgatcgtcaaagcccgggaacaattgaaacttttggagccgatcggagaaaaggccggggatttgcgtaaggttcggacaaaaataaaatttgcggaaaaacttttaaaatccctcgtcccttacttttcaaaacttcatctggaaatattatccaaggacgaaaaggaaaaagaattagaactttctaaaattcaagatcaattgtattcgatccgcgcggacgtcgaacgacttcgggaggcagaactcaaaatcgccgtcagcctggaaaacaacgatacggtccgaaggatcgccgaccttaaaaaaagaatcgaggatttgcaaaaggaaaaatcgattcgagacgggtcctggaaacaatattccgatcttgcttccagtttgaatctgccctatgaaagaaaggaaaccgatttttacgaagtatttcgtctttccggggttcgtctggaagaaaacgaatcgcacaaggaaattctccgaacacagatcacggaattggaagtggaaaataagagtttggaaaagcgcaatcgaatcacgggagaggagattgcccatctgaaaaaaagcaaacatctgcttcatccagacaaagtgaaaatcagaaatcaaatttcagaaacgttgggaatttccgttcaggaactcccctttgtctgcgaactcattcaagtaaaggaaacggaaaggccttggctcggcgcgatcgaaagattgatgcatagtttcggattgcgtatgcttgtaccggaaattcattataaaaggataaccgaatatgtaaatcggacttttttgaattctaagttcacttattttcgaatgttgcccgtctccggatattcgaacgaatctcccgcaaataaaaacgaggtgttttataaactcgagatcaagccggaattggattccgagaaaagacgatggatcgaatcgcagattctacgcgattataactatgtttgttgcgatatcgattctttctataactacgataaggcgataacgacggaaggattgatcaaaaccggaaaaatccgtcatgaaaaagacgatcgttccaatgtgagcgacggaagaaattttattttaggttggaacaacctggaaaagatccgcgcgttggaggaggaattcgtggagaccggaaaacgaatctacgagctgacttccaaattgaaagaatacagaaaacaagaggacacaaactcgcaggaacggtcggatctgaatcggattcgggagttcaacgtcttttccaaaatcgacatcgaagggattcaatccgatttgcaaaagtcgaacgtgtatttggaggaattggaacgttcctcggaagattacaaaaagctcaagtcccaacacgatacggtcaaaaaaagtttgggcgaatcggtcctgctggaaaaagaagccgaaaaaacgatcaccgttttggaacaaaggatcgaccaaatccaagaaaaacgttccgagttgttacaaaccgtttccgaatattcccttgaggaactttcggacgctttcgaggaaatctccaaaagaacgttagacgaaaccttgaccggcgaaaatctttatatgattcgtaaaaaattgaaagaatttatggaatccgaaaaaaccgagttggtttcggaggaattcaaaatcgccgacgatttaaacaaacgactcgataagtacgtaaaaaaattttccgaagattcggaaagaatcgggctcgtcggtaacgcggattatatcgaatcctttgaagaggagttggaaaagatcagaaaagaaagattgcccgaatttgaaaaccgattccggaccatgatggacgataaggtttcgaaacagatcatagaatttaagatgggattggaagacgacgttttggaaatcaaggaacggatccaagagttgaacgaatcccttcgttggttggattacgtaaaagataaaacgtacattcaattggaattctcggatacgaaaaacaaggagatcgtcggagaaaacggttttaagtttttattaaaagaatgtataccgaatgtgggagacgggtcttccaacgaggataaatttcagaaaatcagggaactcttggatcgactgaaagttcaggacggaaacgatcgttggtccaagtcggtaacggacacaagaaactggttggacttccgggttgtggaattcgataaggaaaccaataaaccgaaggaagtgtacgattcttccgccggaaagtcgggaggtcagaccgtaaaattggcttatacgatccttgcgtcggcgatcgcctatcaattcggtttcagaaataagaagtcgtttcgattcgtggttatcgacgagatgttcaacaatttggacaattccaattccaaatatgcgatggacctatttcaacaattgggtctgcaactcctggtggtcactcccatggatagaatcggagtggtggaaccttatatatcctccgcaaatttcgtaagtatcaattccgaagggaacggttcgagtgtggttcccattacgaaagaaaaattaaaaaataataaattagaaaattatgttttagaaaacggaaacgtttcatcatga

SEQ ID NO: 43448 - DNA, 1170 bp, Leptospira alstonii serovar Pingchang str. 80-412
atgatctccccggaagagatcctaaaaaaggccgaaaaatacttccccaccgtactaaaaaatttccttttaaacgtatcctcgtttccttgggagatttccgtcggaaaggtttcgccgggtgaattgttgcgttttgcggaaccgctcagaattttggaaaaaaattccaaacaagaaagagggttcgggtaccggttgttttcttctccgaaggaaacccggaaattcggaactcaaaccttgcccgaaagtattgtattcgatacgcagtcggactttttgatttatatcggaaaggagaaggagttcgcgtcctatcaaaaaaacgtaaagttaatcctgaatttgatgcccgatttacgcgattggattttggaatttccgatgtttgtgatcgaaaaggaagacggttgggaagaactattggaggtttgcgattacttccggaaaaatccgaagtcgggactttatatcagagaactgcccgttcgagttcatacgaaatttatagaagagaataagacgatcttaagaaaactattggattttttaataccgaacgaagttctcgtagagagttccgtattcgaggacagatacggattaaaaagggaagaggggctggttcggtttcggattttggattcggaaatatccaaaaactgtttcggcggtctgtcggatatcagcgtgccgatcggagaattccgttcgttgcaaattcaaggttgcgaaagaattttactgatcgaaaataaaactaatttttcgaatattcataatttcttaaccattcctaagttgcaaaaaaccgtcgccattttcggcaaagggtggggattgggaattttaagggattgtgagtggctgaaaacaaaggaacttttttattggggagatttggacgttcaaggattcgaaattttatccacgctccgggagatttttccggccgttcgatcttttttgatggatcgaaaaacgtttcatacctttcgtgagtttgcggtgaacggagttctcggaagagtcgccggacttcgttttttaagcgaggaagagagtgcgacttgggaacttctaacttctcttcccgaaaaaaatcgtctagaacaggaacgaatcccgaattggtacgtggaagaagtcttgagcgagttattttaa

SEQ ID NO: 43449 - DNA, 1458 bp, Arthrobacter nitrophenolicus
gtgccccgctccgccaggtcatcagctgacgccatcagcgcccggctccgggacctcgaactcctcaccaaagggcccgcctgggccctgacgcgctcggcgccctgggtgatcgcggtgctgcaggcatccttcacccgcacccgtccgcaggctccgcttgaggagttccacgccgacgtcgactccttccttgaagagctgcgccggcaggatcccgggctgggcggcggagccaacggcaaatccttcggcgatgagtggacgcgccgccagttcctgacccgacggaaccagtcaggccagatcgtgtacgaggtgaccgagcctgccgcccgcgtcctcgccttcctggacagcctgtccagcgaacgctcaaccctcaacggctcccgcctgggcaccctcctgggggacgtggaaaagctcgccaacgagacaaacccggaccagagcgcgcgcctcgaatccctggaagaggagatcgaggaacgccagcagctgatccaggacatcagcagcggcgagttcgacgggctgctggacgatgacgaagcggtggaggccgccggcaacatccttgacctcgccgcgagcctgccggcggactacaagaagatgcgtgaccggatcgaggagctggtgggtgagctgcgcaaccagatcatcgaggaatccctgaccaagggcgccaccatggcccaggtgctggaggcggacaagcggctccgccagagcccggagggcaggaccttccgctcgttcacggccttccttgaggatccccagcagcaactgcggttccgctccgccatcggcgaggtgctgagccggcagttcgcggacgagctttccgccgaggaccgcgaaaccctgaagaacctggtggctgaactgcgccagcagcacagccagatccagcgcatctacggcaagctcagcgaaagcctcaacacttacatccagagcgacgacttccgccaatccctccgcctccgccaggtcctgcgcgaggccgagcaggccatccgcgccctgccttatgagcgcgaccgcccggggctggtgccgggacccgtgctctacaacgcgggcttcgagtccctctccatggtgaaactcttcgaccccgacgagttcgccgccccgccaaaactcgcggaccccatcgccttcagcgactcggacagggtgcgctccgtgcggacgggcaaggccaaaccccaggccatccgcttggcaatggcaggtgccgaaaccctcgcggaggcgtggcagaacctgccgcccgaggagcagcacatcaacagcatccgtgccctcctgtcggaagccctgcacgccggggccgacttcaaccgcggggcctgggatggcctggatttcgaacagatagacggcaccacgcgcagggcctacctgcccatggtcacgctcgcaaaggattcaaatgactga

SEQ ID NO: 43450 - DNA, 804 bp, Arthrobacter nitrophenolicus
atgactgaagaaatcacgacgccggtggttgagcccgtcgaaaccagggaagccccgatttcgactggctcaatcaccggagcagtcactccgcgcgacacgttcgttgacggtgctgccctgttccccggggacaccggcgtgctgtccatgaaggtgcggcaggcgctggtgaagctcctgaagggcccgtacatcgacggcggccgggacgagaagctgtggacggtgctgctggacaaccaggtgatcctgcggagcaggctttccgagctgttcctggccatgcagctggaccatgagcgcaagatcgcggtcctgcgcccggtggatccggaggtgatcggcggcggcgcccgctccagcatcctgcggcaacaacgcgcactcagccgggtggagaccatcgtgctgctccggctgcgcctgctgctggaccgacacgtcacggcccagacggatcccaccatcacccgcgaggagatcgccgacctggtggcccactaccagcccgccggccagcaggacgccctgcgcgactctgacgtcgtcacccgcgccgtcaccaagctcctggcccgccagctcctgcttcccacgggcctggatgatgtctacaccatctccaacgccctgcccctggccctcccgttcgaaaacatcggcgacatcccggcccacatcgaagccctggtggcagcatcagcagaccagtcaggaacagaacccctcctcgacctcgacgccgatccggtggttgagcccgtcgaaaccgaggaagacgaagcggagtcagcacagtga

SEQ ID NO: 43451 - DNA, 3465 bp, Arthrobacter nitrophenolicus
gtgagtatcgccagcatgcttccgatgggcgaggtgaccaacccgggccagatgcggcttgcgctggtgcaggtggtcaactggggaaccttccacggggcgcacaccatgcacgtggaccgggacggcacgctgctcaccggcaactccggcgtgggcaagtcgacgctgttcgatgccatgctccgggtgttcgatgcccggccgcggtccaacgaagcggcggcgcagcgttcgggcggggccgtggaggacaagcggaccaccttcacctacatgcgcggcaaggtgggtgacaaggccgtgggcgagggatcggcgagtgcgttccagcgcccgggtgccacctggtccgccgtcgcgctgacgttcgacaacgcggccggcaccagggtgacggtctcggcgctgttcgacctgccgaagaacggcacggaatccagcgtgggccggttctacctgatcgacagcacgcccctggacctggaggccgtggagggcatcgccgacaagcggttcaccaaggctgtgcttgagtcgacgttcccgcacgcccaggttttcgacgtgcacaaggctttcgccgagcgcttccgccgcctgctgggcatcaactcggaccaggcgcttccgctcctgcgcgtcatccaggcgggcaagggactgggcggcagcgtcaacacgttcttccgcgaccaggtgctggatgcgcccgccacccttgccgccgcggacgacgtggtggaggagttcagcaacctgatgtccatccggcagcggctggaggacgtacggcagcagcgcgaccagctggctcccgttccagggctgaaccgtgagtatgcgcagtcgctcctggacgcgaaccggctgcgggagcttgccggcgaggagttcgaggcgtaccggcagcggctggccgtcacggtccacgagaagacgctggtccggttcaaggagctggcccaggcgaaggccaaggagcttggggccgagcgcgccgtccgggacggcctggccaaggaactgcgccagctggagaccgactacaacagccagggcggcaacgcgatttccgccatcgagcagtcgctggaaaacgcccgggtggggttgaagctccgccagcaggtggaggaatcggcccagcaggcgctcgccgacgccgggttgcggcttgagtggacggccgggggctgggagcaggcgcatgagcaggcggcggcacggtctgccgagctgaaggacgattcgcaggccctgcaggagctgcggttcgaggccttcgacgcccacgcgacgaagaaacgcgaactggcagcggctgagcaggaactcgtctcactgaagacgcgcaagtccctgctgccgccgtcgagcattgaaaaccgttccgcgattgctgccgccaccggcatcccggaagagcggatgccgttcgccggtgagctgatggacctggctgagggggaggagcgctggcggccggcggccgaacgcgcgctccgcagcctggccaccacgctgctggttccgggcgagcacttcgccgccgtcacgcggtacctgaatgacaacaaggtgcgcggcgccttgcgggcagtggatgtctccaagccgctggccggcggcgcgctggccgtggaggacgtgcgcgacggcgacctgctcaccaagctggacatcctcgccacgggtgcggctgctgaaccaggggcatggatccgggaacggatcgccctcgacttcgcctacccctgcgtggaggaccccgacgaactggccgggctggacaagggcctgagcctgggcggcgtagtcaagcgaaaccgccacaccgtggaaaaggacgaccgcttcaccagccggcaggattacgtcctgggcttcgacaacgccgccaagctggaactcgtggccggccaggtggaggatctccggcaggaagtggccaaggccgccgaactcgcacaaagccgcgaggattcgcaccagggcatgagccggcagcttgacgccctgcgccgcatcgcggaggacgaccgcccgtgggaacaggtgtctgccgcggtggcagcggatgagctggcgcgcattgagcagcggctcaaggacgcccttgccgcccaggccgaccttgaacccctgcgcgccaccatcgaggaggtacgccagaagcaccagtccagcacggaggccgccgcggtcctgcagagtgagtacaaggcactggaccggcagctgaccgccgccgattccatgctggaaggcgcgcgtgaacgcctggcccagtcgccgccgtcggacgccacggttgccgcgctggaaccgtacttcgccgactttggcgacgtgaccgaaatgcacgaactggacaacctggccaaccgggtgcggactgcgctgctgggcgagctgcatgcggccgagtcccgcgggcaggccaccgccgagcggctgacccgtatcttcgagggcttcgtacgggactgggggagtgccatctccgccgaccacggcacttccatcggtgctgccagtgaattcgaaagccggtaccacgcgattgtgagcgacgggctgccggcgcaggaagccgagttccggcagttcttcaaccagcgcacgcacgagtccttcagcaccctgctgcacctcctggacgaggagcgccgctccatcaccagccggatcctgcccctcaacggcatcctgtcgcaggtgaacttccacgagggcagctacctggaactggacatcaagcagaccctgccgcccacggccaagcagttcaaggacgccatccagaacgcgctcaaggcccgccacgcccggccttcccgtcccgatgccgcgggcggggacaagaacgacgacgacgagctcaccgcgcgctacaagtcgctggagacgctggtgaagcggttgggttcgcaggcgccggaggaccggcgctggcgggccgaggtgctggacgtccgtggacacctgttcatccagtgcaaggagcaccgtgaggtggccggaaccccgtcaaacgggaaaaacagcggcaagaagaccgacgtcttcatgcatgcggacacgggctccatgtccggcggtgagcggcagcgcttcaccgccttcatcatggccgctgccctgagctaccagctgggcatcgccgaacaggggttcaccacgtacggcactgtgatgatggatgaggccttcgtcctggcctcggaggaattcgccggtgccggcatcaaggcgctgcacgagttcggattccagctgctgctggctgccccggaaaacgtgattgacctgtcccggcacctgggctcggtgaccgagatcctccgggaccggcgcaccaaccggtccggcgtcctgacagccccggtgatcaagccccggcctggtgaggagggggcctggcggtccgaagccaacccggtggatatcgtcctccgctga

SEQ ID NO: 43452 - DNA, 1470 bp, Arthrobacter nitrophenolicus
atgactgttctccgcgccgccctcacggcctcccgccttttgagcgaggaccctgcgtggcgtctgctccgtgcgaacaacgcagccatcgccgtggctatgctgagcaagcatctgggcggcgagcaacggcggttggcggcgccggcgctctttgagcaggtggaggaggacctggaggagctgcgcggcaatggcttcgacctgccgcagacggctcaggcatactgcacggcatggcgtaatgatggcatcctgatccgccgcaccgcagagggatcccgcgaggagaccttcgagttgtcgctcggttccctgcaggccattcgctttgtcaccgagttgtctgagccacgacaggccgtgaccgaatcgcgtcttgccaccatcctggacagggtgcgcgtactggcccgcgaaacagacccggacagtacgtcacggctgcgcgcactgcatgatgaacgcgcccgcatcgatgcccagatcgagcgtgccgccggcggggacgtcgacgtgctgtccgcagagcaggccgctgaacggctgcgcgacgtactgtcgctcattgaagaaatacccagtgattttgcccgggtccggtgcgagcttgagcaactcaaccgggacctgcgggaacggctgatcgaacaggatggcccgcgcggcagcgtcctggatgacatcttccgcggtgttgatctcctggccgagtccgaggctggacggagcttttccggcttctatgctctactgcttgacccggaacaaggacgtgatttcgaggacagcatcgacaccatcatggacagggaattcacgtcccggctctccgcggcgcaagtgaggatcctgcgccggattctgcccacgctccaggaccgtagctccgagatccatgccgtcatgactgcgttcagccgaagcctgcgccgctttgtccagtcccaggaactcgaacaggaccggctgatcaaccagcggctgcgttctgcattgcggcaagctttagagacctcgcaatcggtgaagccctatgccaagacggaattgtcgctggacctgaccagtgttccgctcaattcagtggccgctttaaacctgcacaatccggccgacttcgaagccgctggcgagatcaccgagcatgacgccgagacagtggacattgaggaactccgggctttggcccgcgcctccgagatcgacatgatcgaattgaccgggaatataaatgccgtgctgagtcggcaaagctccgccaccattgccgacgttttggctgatcgtccggccacccaaggtgtggcaagcgtcgtcggactcctagtgctcgccgaagagcacgccaccgcgctgagcggccgtgaagacgtcacctggcagcctccggactccaccaacgacgccggcaccacgcgccgcggcaccgttggccgctacctcttcactgaaaggatccacccgtga

SEQ ID NO: 43453 - DNA, 675 bp, Arthrobacter nitrophenolicus
gtgagcgaatcaggtgtaaccggaccggccggaggcgaggagttggtgtccgacgtcgtgctgtgggatggcgacaacggcaccctgcgcgagccctcccgccgcgtcctcgtacagcttctgcggggcccctatctctccgcatcccggcacgggaacctctggacggcgctcttatccgacgaggacgccgtccgttccagcttggccgacctgttcttggaccttgtcaccgatcacgccgcccaggtcgccttcgtccgcaacacctacgcggacgttgacgcgccaaaggtcatgcgcaccgccacgctgacgttcctggacacggcgctgctgctccacctgcggcagacgctactgcaggaaagcggcggtcggaaaaccatcgtcggggcggacgaggtggccgatcagctacaggtttaccgagggaaagacaacgccgacatcgcgggattctccaaacgaatcaactcgtcctggcagaaaatggtcaaatacgggctgttggccgcaaccagcacggagggccgtttcgaggtctcgcccgtcctaaggctcgtctttggtgcggaggagatcgcagccgtgcaggcggagtacaggcggctggctgcggaggtggagcccggctccgcagaactgcccgacaccgatgaggagtcagaatga

SEQ ID NO: 43454 - DNA, 1125 bp, Arthrobacter nitrophenolicus
atgcctgtgactcctgcctgggcggccgcgctggcgctcaagaaatacaaccgccacgttggctcgtgggccgtcggcgacgacgcgtcgcttcccttcgccatccctttgcatccgcccaccgaagcacaggcattggcctccgtgtccgctgccgttgattgggccaagtcatgggaaggaacagccgacgtgttgtggacggaacgccgctgggccagcctgggccagcagagaattcccgaccgtgtgcaactcgacaccccggtggctgtcgcggcatttgccggcaaaaccacccactggcaacgggcattctccagggcaacgtcactgctcgactcggtgccactgcctcatacggaccggtttgcgaccgcggtggcccgcagtgtcgaggaactcgccgccttggctcccgaagacttcactcggctctttggggtactggaatggctcagagtccatccggcgtccggactgtacatccgccagttgcccatccgcggagtcgacaccaaatgggtccagaagtacaggcccctcgtcacgcggctgcatgaagcagcaaccggtgaaagcggtttgggactggcggacaaaccggacctggtccgcgtccgtttcctcgaccccgctctggcgccgggcgggttggcggatctggctgcaccggtcacggagttagccgccatggacctgagccctgaggtggtctacgtgttcgagaacctggagtccgtgttggccatgccacctctaccgggtgctgtggtggtccatggctccggctacgccgtggaccggttggcccgcatcccgtggattcgcgaccttggagttgtgtactggggcgacctggacagccacggttttggcattttgaaccggttacgggcccagggcatcgctctgagcgctgcgttgatggacctggacacattagagaaattcaaagacctgtgggggcacgagcccaagccggccgttgggaccatgcagcaccttctgccggaggagcttgccgtggtggaacagctggcaacacgcggcaacgtgcggctggaacaggaacggatcgactggacgacagccatgacagtgcttatttcgacacggcgctga

SEQ ID NO: 43455 - DNA, 1359 bp, Anaerostipes hadrus DSM 3319
atgaaatttgcctatgatatcccagattcattctggagtttatttcgttcgatgaacagagaactttatatggaagctttgctgaagatcaacgaagaatatgaatataacaattattatttaagtaaagaagtatgccttcaggtattagaagactggaacgaaagccagcggatctggttatctcctgaagaatttgaatcagaaaatgatgcaagccagacaccgccaaacaggattttaaactggctgatcaagacaggctggttaaagaggatcgaagatttctcaacattaactaccaatatcatcattcctgattacgcagccgtatttttaacagcatttgaagagttagtcaacccatcaacagatgacacagagatctatatccagaatgtatacgcaacactgttttcattctggcatgataagaagatgaacttagccatgttaaaaacagcgcttgttaatacaaagaaattaaataaagccttgcaggatatgttacacaacatggaccatttctttagccgactgctaaaacagaaatcatatgaagaagtgttggcagaacatttggaaggttacgttgaggaaatcgttgagaagaaatatcatatcttaaagacaaatgataacttctatttatataaaaatgatatcaaacgatgtttaagagaaatgagagaagatattccatggatggaacaggtacagaagaaagcagataaagaaaaaggcgaagatgtgctaagcatcatcaatgcgatcgaacgtggatttgatgatattgaacatcgaatttccaacatggataaagaacattctaaatatatcagggcaacagtaacgcgtatgaattacatgctgaatggagaatccgacacaagaggtctgatgatccagctgttaaagacgatcggggattctaaggacagcgaggaaaagatcgagaaggtcggacagagtatgaatctctctcattttgaagtgctttcagagaagtctttgtataagaagagaaaacgaagagattttgcaagtcaggtggaagaagaaaagcagcaggaagaattatcaagagaagatgtcctaagattaaataagattcatacaagataccaacaggctgagattgaagatttcattgaatcttatatgcaggatgaccatatggaagttaaggatattgatatcagggatgaagagtcctttgagaaattaatccttgcctacgattacagtacgagaagaaacagtaaatataaagtgatcgagagagacgataaattgattgataatggaagttaccgctatccggcattaacttttgtaaggaggaaaccgaaatcatga

SEQ ID NO: 43456 - DNA, 657 bp, Anaerostipes hadrus DSM 3319
atgataccgtattatgaagaattgaatgacgaagaaaaaaatgcggtcacgaaagtgatccgtacgttgttaaaacagacatttgtattagaaagaaaatatgataaaaagagcggaagacttgtatacaataaagaatttagaaccattgacctgcatcaggaatttttaagagaatattttaagatttcaggaatcgaattaagagaaaatctgcatctgggagtcttttatattgaaggagaaactttgatcggagagaagatttccagattatcaaccatttatcttctgatcttaaaattattgtacgatgaacatatggcagaggcttcatcaaatacaagtgtgtatacatcattaggagaaatccatgaaaagatcaatgatttccatctgatgagaaccttgccatccatcactgagatgcgtcgttccatcgcattattaaagaaatatcagatcatcgaaccactcgatgtattagaagagttaaatgacgagacaagaatgatgatctatccatgcgtgaatgtcgtgttactaggagatgacatccgcagattgatcgaaagtttcagcaaggaggaagtagacagtgagtttgacgaagacgaagcagccatttctggcattatcgaagatatgcctgaataa

SEQ ID NO: 43457 - DNA, 3216 bp, Anaerostipes hadrus DSM 3319
gtgatcgatgcgatgcagatcgttttatatgcgaatacagatggtcgtggattctttaataaggcggcagcagacgattccgatcgaaatctgatcgaatacctgcgaggaatggttgcggtcggagagaaagatgaagttacttatttgagaaataaaaacttctccacaacgatcgttctggaatttacacagacagaatctgacgaaaaagaatgtctgggagttgtatttgatgtagatacagcaagaaatgatacatccagattatttttctggcacaaaggcggcattttagagaatgcttaccgtacggaagagcatgcgatgacaatttcggaactccgcaaatatatgcagaaaaacttcaaaaaagaagatttctattttggaacaagcaacgagagatttagaaaacagatgtatgacatctatcttggcggtcttgatatggagaaattcccaagactgtttaaacgcgcgatcccatttaaaatgaatatcaagctcgaagattttgtgaaagaatacatctgtatggagcaggacattcatattgaagatatgcaggaaagcgtgatgcagtatggaagaatgcgtcagagaatcgaagatacattaaaggaagcaaagagcttagaagagatcaaagaaagtttcgttaaattcaagaccaaaaaagaggaacaggattattgccagtaccgcatgaacaaactggatgtcctgaaactaaaatcagatattcatttgttacaacaaaagattgaagatggagaaaaagatctaaagacgcaggaagagaatgaaacagttcttgagaagaaactagagaaactcgccaaagaatacgatgcattagtagcacagatcgcaggaagtggatacgaccagatcgcaacaaggaaaaaggatgttcaggagttgttaggacagttaaatcattccgtacagcgttgggaacagacatcaaaagatttaaaaaaatggtgtgatctcgatattacgccaaatcaggcaatctgggatatcgagaaatttgaacagggagatatcacagaagatgatctgaatcgattaaaacatacattggatatcttaagaaaagaaactgaggaagaacgacaagataatgcgtctgcactaagagccttaaagaaacaggagaaatctatttctgatgagttgaaagaactgaaaaagggtaacaaagcatatccaaaagaagttctggatgcaagatatgaattacagacgaaattaagcgaaaaatgtggtgattttgtaaaagtaaatgtgcttgccgatctgttagacatgaaagatgagaaatggcataaagcggtcgaaggatatttaggatcgaataaattaacactgatcgtggaaccaaaatacgtcaaggatgccatggaaatctaccgtgatatggatcagaagaaatactggagaatttcgatcgcagacacacaaaagattgataagcaggacatgaaggttgagggaaatgcattgtcagaagaagttcttgcagaacagtcttatgtgaaaaagctgatagaatccttgatcgggcgtgtgatcaaatgtgagacgatcgatgaattaagaaattgccgtactggtatcacaccagatggaatgctttataaaaatttccagttaaaacgattagatccaaaacagtacacaagaaattcctacattggagacaacagtttacgccacaggatcaaagaattagagaaagaaaaggataagatctttgataaaaaagatccattagaaaaagaagttttaagtgctgttgttattttagactatgaatatcttccacagtcagccgaagaatatttaaaacagcaagaaacactggaacgtgcgaaagaacgtcaggaagaatacgaagatttagaaaatcagctgacaaaattaagagaaggtgccttaaaaggtctggaagaggaaagagaccagaacaggttaaaacaggaagattgcaaacaagagatcaatgcaatgaaagaagcaatctgggcaacacagaatgcattaaaagaatgcagacagcagatcattgaccagaatgaagcattgatccgtgcacagaatgaattaccggaaaatggagagtacgagcagcagtttgcacaagagatcgagaagacagacacagaagactatgaacgtctcaaaaaacgtgcagcaaggaaatactatgatgccggaacgaagaaggaagaagaatatagaaagcttgtggaagtcagaactgcatatttaagggaatatccgaaccgcacattctcagcagtagatgagaataatgatgtgtatgacaagctttataaggaattatcatctgatcacatggaaatgtatcgtgaaaaagctgcaaaacaggccaaaacagcaatggaacatttcaaagatgactttgtatacaagattcgaagcgcgatcagggaagcttatcagcgcagggatgaattaaaccgcatgatcagtggactcgactttgggaaagacaaatatcaatttaagatcacaagaaatacaggagccgatggaaaatattatccaatgtttatggatgattctctgaatatcgatccatctgtcttaaatacaacgatggatgaccagatgaatctcttctctatggaacatgagaataaatacggggaactgatgaatgaattgatcgagatctttatcccgccagaaggtgcaaccggtgaagaacttgagaatgcgaaacgtgatatgcagaaatattctgattatcgtacgtatctgtcctttgatatggaacagattgtggatggtgatgaaaaactgacgatcggattaagtaagatgatcaagaaaaactctggtggagaaggacagaacccattatatgttgcattactcgcaagttttgcacaggcctatggaattcatctttcaccaaaagtacgaagaaatccaagcatccgtctggttgtcttagatgaagcgttctctaagatggatgcagagaaagttgcaagttgtattgacctgatcaggaatctaggattccaggcaatcatcagtgcgacaaatgataagattcaaaattacctagaaaatgtagataagacttttgtatacgccaatccaaacaagaaaaatatttccattcaggaattcgaaaaatgtgaatttgataatttactcacagaagaatag

SEQ ID NO: 43458 - DNA, 1545 bp, Gordonia aichiensis NBRC 108223
atggcgaactctgccgtggatggggcgcggacgctgaccgacacattcgaggccaatcgctcgatccagcgctcggcggccgtccgtttgttcgcagcctccaactccgcgctgtacgtcacgctcatggagcgccatctggacttcggaattcgtcacaccgagtccgaactcgcgatccgtctcgaccgcgacatcgtcgaactgggtgtcgacgaccagccgccgggactcgatctcatcaagtcctgggccaagcagggctggctgcatcgcgtcaccgacatcgcgtcaccgtcggcgcccaacgtgtgctttctgaccaccgaggcccggtcggtgatcgcgtacatgcgacggctgcggcgcgaggacagcgtcgccaccggcggctcgatcatcggagtcgcagccgggctgcaccgggttgccacacaggtgaccgacgatccggaacgcatccgcgaagacatcgagcaccagatcgacgaactcgacgccgagctcgtcgagttgagcgagggtcgtcgccgccctttcgacctgcgcggcgcggaggacgaggcacgggcgatcgcctaccagatggaacagatcatcaccgacatcggccagtacggggcaatgctcgatcggatcaccacggcgttgctcgacgatccgcacgattccgacctcgcctaccgcgagcggcaacgccagatgttcgacgactacgagtcgctgctggagtcctcgcagagcgcgtcctaccacgcgttcacgcagatgatccaggatcccgagcagcgggcacgactcatcgccgacatcgagctcgtcgtcgaccgactgccgagcatcgacaccggcctgcgcaccgtcatggagaacttcttccccctcgtcgctgagcagatggccgaagtcggtcggatcagacaacggtgcgcccgacgaatccgccggttcgtcgcatcgggaacgctcgaacagagccgcggggtcgcgcgacagctcaacgacgccctcgcgaccgccaatgcactcctcagggactcgcttgccgatcgtcgcctgggttacgaactgcccgtcgccaccccgcaggtgacgtcgatcggtcggctggccttcgagatccgcaatcctgcgccacccgaacaggcgcggcctgcggacggacacaccaacctcgcgtcgttctcctcgctggcaggccaggtcgacaccgtcgaactcgccgaagtgatcaatgaccgactcgcggcgggcccggtctcgttgagcgatgcgatcgccgcgttggacgagccgtacctcgggcatgtcatcgtgttgtggtcgtgggccctgcgccagcctcgggaaacacagcgccagcctcgggaaacacagcgccagcctcgggaagtacaggggcccggcgactccacgttcgtccgcttccggtcgctcgagggcgaggaccgcgccatcgaggtgccgatcctgatgttcagcgagcccatcccgtcccagtacagcgacaccgattcgattctcagcacggaagccgacgcctga

SEQ ID NO: 43459 - DNA, 882 bp, Gordonia aichiensis NBRC 108223
atgacgagtaccgactccaccaaccccagcacctcgcccaaccccagcacctcgacggccgaggtccctaccggcacctcagctgatacggcagcccaggtgtcgacggtgcccgccgacgagtacgccggctacgacgacctacccaccgccgcgacgcacggacgtgtcgacgggccgcgtgcgccccgattcgacggtgacgtctcggcgatgcccgaccgggcgtgctgggcattgcagaacctgctcacccgcagacacatcagcggcgaccgcaacccgcagctgtgggcctgggtcatcgagtaccaggacatgttgcgcagccgcctgtcagaactcgacctgcggttgcgtctcgtcgacgagctacaggtcgccttcgtcgagcaggccggatatgactcacgttggggcagaaaaattctcaagcgcgagaccatccagacttacgacgcgatcctcgcgctccatctcgcgaagttcctccgctcgtcgcgtgaggagaccgcgatcatcacccgcgaggagatccacgagatgttcgcgggcgtgaccaacacgatcgatcgcgatctcgcgttgttcgacaagcggatcgagcacgccatcgacaagctcgaagaaatcgacttcctgcgtcgtcatcgcgacgaccccgacacgttcaccgtcagccccgtgatcacagcggtgatgacggcttcggtcatcaccgacctccagcgccagttcgagcagttcatcggtgcgggcgagaccggcgacgacgtcatcgccgacaccgatacagccggcggcaacgaggattcggagtcgagtcacccgcaccccgccgacgacaccgacgactacgccgacgaaggagacgagtggtga

SEQ ID NO: 43460 - DNA, 3405 bp, Gordonia aichiensis NBRC 108223
gtggtgagtgatctcgacaacgtcgaccagaccgatcgggtcggtcgtcggcacggacccggcgggcataccgaggagcagtactatctctcacggttgcagttgatcaactggggcgtcttcgacggctaccattccatcgccttcagccccggcggcgcgctcatcaccggctcatccggcagcggcaaatcctccctcctggacgcgatttcgctcgcattcctgcccgatcaccgccggaacttcaacgcctcgggagacaccacggccgcgggctcgtcgggaggacgacgcaccgtcggcaagtatgttcgtggcgcatggggcgaacgccgcgatgcgacgggcgcgcaccgcgagatcatgtacctccgtggcagcggtccggcatgggcggcgatcgccgtcacctacacttcgacgtcgggcactgccatcaccggactggtgctgaaatggctggcggcaggcaaactcaccgatgcacacagtgcgtacttcatccacgacggcgacgttgacatcgtcgacgcgtgcaatgaatgggcggccaacaactacagcgccgcacgtttccgtgatcgcggctggcagggcgggccgggggagggcaagtacctgtcgaccctgtactcacttatcggtatccgcgcatccgatgcggcgcagcagctactcggaaaagcgaagtccctcaagagcgttggaggactcgcgcagttcgtccgggagttcatgctcgacgagcccacgagtattgccggtatctccgacgctctcgagcagatcgatccactcgtggaggcccgcgaacttctcgacgtctcgcgtcgcaagcgtacgatcctcgacaacgtcgaagcactccaggagcgatacgcggcggagtcggccacgttcaccgtgctcgacacgatcgagccggaggtcgttcgctcgtacgtgaccaatctgcgtctgcgcaacgccgaacccgagatcgccgatctcgatgaccagatcgcccgtctggatgccgacctcgccgcgctcacctcgcaacacgatcagctccgtcaggaccacagccacctcctcggtcggatcgccacgtcgacaggcgatctcgcgcccctccaggaacaactctcgaccgcgcagaaggccagtaacgaggcgtcgatccgccgcgccacctacgagcacaagatctcggctctcggattcgacgtcccggaggatggcgaatcgttctgggagctgcgtgagcacctgatggaggaggcgacgcgcctcgacggtcagctcgaagccggcaagccccatttcgccgagaccctggccaccgaagtcgccgcgcgtgcccagcgcgacgccgcacgtgacgagctcgaacgagtgcgtcacgcaggctcggcacttccccgtgccgaacacgagatgcgtcgaatcctggcgaacgcgctgcagctcgacgagtcagaactgcgttacgtcgcagaactcgtcgaactcgatccgtccgccgagcggtggcggcttgcggtcgagaaggtcctgcgaagcgcagggttgcgtcttctggtgcccgacaagcacttcgcagccgcgctgaagttcgtcaacgaccacgacatgcgcggtcggatcgcgcttcaccatgccgaggcacgaccggcgccgatggtcgagcccggcacactcggagcaacattgcatgcggcagagcccgaccacccgtgcaccaacgaggcgctgaccgttctcgccagactcggcaactacgtgtgcgtcgactccacgtccgacttcgtggaccattcgaaggcagtaaccgatcgcggcctgcgcaaggattcagcgaagctggccatcaaggacgaccgcagccagctgcgtccgtcacagtacatcttcgtcggaaacgtgaccgcgaagataactgctctgcaagaagaactcgacctcgagaacgatctctacgagcaagcacgcgcacgcagcgctgaactcgaccgagaacgcaccgccaaagagcaacgtcgcgacgcctaccgccgggtgtgtgagcagttcaccggatggaacgagatcgacctcgactccgccgacgaccgcgtcgacacgctcaccgagcagtacgaactcctcatggaggaacatcccgacaccgaggccctccagcgcaaggccgaggacatctgggaacaggtccgcgcggcgatctcacaggccgcgttggtgcgcgacaagatcgcgacacacgacaagcggcgcacccagctgctcgacctcgtcgacagactgacgatcacaccgatcccaccgcatgcggaggcgacactcgatcggttccgcgaggagtcggccgcggttctcgacgtactcgccccggaccccttccggcaggagttgctcaaagcggttggccgcgagcgtgatcggatgcgggcagacacccggcgctcccgcgacgagctcggacgcatcctcgacgcctacgacaaggagtttcctgacgcgatacccaatgacagcgacgatttcgacgagcgcgtccacgactacgtcgcgctgtgtcgccgcatcgacgagagggagttgcccgctgcctacgagcggatgcgacgactcatcaccgaacaggccccgggtgcgatcctgagcctgcacatggcagccgaggccgaggaacgtcggatcgtcgaacagatcgaacgcgtcaattccggactcggatcagtggcattcaaccgaggtacgcgtctgcggctgtgcccgggccgtaagacacttgccgcggtcgcggagttgaccgacaaggctcgacagatctccgcgcgcaccgctgccgtcggattcggcgacgaggaggccattctcgagcagtatgccgacatcctgctcctgcgcgagcgacttgcaggcgccacgccggaggacaggcagtggacgcgagacgctctcgacgtgcgtaaccggtttgatttctactgcgaggaacgcgatgcagagaccggcgagaccatccgcacctacagcaacgccggcgacaactccggtggcgagcaggagaagctgatggctttctgcctcgcaggtgcgctcagcttcaatctcgcgagtccgcacggcaacgggaaccggcccatcttcgcgcagttgatgctcgacgaggcgttctcgaagtcagacccgcagttcgcgcagcaggcgctcgcggcgtttcgcaagttcggttttcagctgatcatcgcggcgacagtgcagaacaccagcaccatccagccctatatcgacaacgtcgtgatggtctccaagaccgaggatgtcaacagcagaccggtcgcgaccgcgatctcgacgtcgatccagacgttctcggatctgcggcgcacaagcaccagccgtctccctgtgtga

SEQ ID NO: 43461 - DNA, 1443 bp, Gordonia amicalis NBRC 100051 = JCM 11271
gtggacttcgacgcattcggcagcctgtgggaacggcatcccgcctggcggctgctgcgcgcgcacaactcgccgctcatcctgacgttcctcggcaactatttcgtcgagggcaaccgaggcgccggctcggcaagtgacctggccacagcgctggatgacctcctctacaccctcaacatcgcctcatcgaccgaagacgggcaaccacgctttcccaaggaaccgcgcgcctatctggaggattgggccgccaccgacgccggtttcctgcgccgcttctacccgcccggcgacgacgaggtccactacgaggtgacccccgccttcgagaaggcctacgggtgggtcgtctcgttgcggggccggtcgttcgtcggcaccgagtcgaggctgcacaccgtcgtcgagctgttgcgacagatcgtgcatggcaccgagtccgacccggagatccggttggcccagctacgtcgccgtcgcgcggagatcgacgccgagatcgaggcggtcgaagccggtgatgtgtcggtcctcgacgaggtcggtgtgcgcgatcgctatcagcagctctcgtcgaccgcccgggagctgctctccgacttccgcgaggtcgaggacaatttccgtctgctcgaccgagccgcccgcgagaagatcgcctcctgggacggcccgaagggtgagctgctcgccgaactggtgggtggccgctcggagatcgccggctccgatcagggccgcagcttccagtcgttctacgagttcctgctctccgacgaacggcagaccgaactgtcggacctgctcgacgcggtgtcgtcgatggacatcatcgacgccgaccggcccatccgcggtatccaccacgactggtcggaggccgccgatcgcacccagcgcaccgtgcgacagatctccgaacaacttcgccgattcctcgacgaccaggtgtggctcgagaaccgacgcgtcctcgacctcgtgcgctcggtggaggccaccgctctcgaggtccgcggccgggaaccgggtttcggcctcacggtcgatcagcccggcatcgagatcgtgctgccgttcgaacggccgctctatcagcaaccggcagccgtcaccgtcgagagccggctcgacgacgccaccgaggaggtcgacgcggatctcctgttcagccagacctacgtggatcaggcgcgactggccgccaacatccgaaccatcctcccgcagcgctcgtcggcgctgctgtcggatgtgatcgagatgtacccgatcgagcagggcgcggccgagatcgtcggctacctcgctctcgatgacgacgacgtcagtgtcgacatcgacgacaccgaggaaacgctgctcgagtatcccgaccccgacgacccggacaccaccaaacgtgcccggctaccgagagtcacggtgaggcgacgatga

SEQ ID NO: 43462 - DNA, 579 bp, Gordonia amicalis NBRC 100051 = JCM 11271
atgaccgacgaacgcgctgtcgcgagcgcgatcatccggctgatgcagggcgtggtgtatcgcgaatccgacgaggacacctggagcaccctcgaacgttccggtgccggggtacgcgaccacttcgccatcatcggcgtggatgtggtgctcgacgactccgagggttatgcctacctgcggtcccgtccggcagaagaaggcgacgaaccacttccgcggctcgtgcgccgacgtgcgttgacctacaacgtgagtctgctgctggtgctgctgcgcaaacggctgctggagttcgagatcaccggcggcgacgggcgcctcgtgctgtcgaccgaacagatcatggagatgctgcggctgttccaggccgagtccaccaacgaggcccgactggtcgaccaggccgaggcaaccatcaagaaaaccgtcgaactcggcttcctgcgccagctccgcggccagaccgatcagtgggaggtccggcgcatcatcaaggcctacatcgatgcacagacactgtcggacttcgccggcaagctgcgcgagtacgcggggacggcgagcgccaatgactga

SEQ ID NO: 43463 - DNA, 3402 bp, Gordonia amicalis NBRC 100051 = JCM 11271
atgactgagggcctgttctcttcggtcgaactggccgccccggccggcggcgccggattccggctgcaacatgtcgaggtcctcaactggggcaccttcgaccggcaggtgtggcggctgagccccaataccgacaccgccctgctcaccggcgacatcggctccggcaagtcgactctggtcgatgcggtcacgacgctgctgatgccggcccacaagatcgcctacaacaaggccgccggcgccgaggccaaggaacgcacactgcggtcctatgtcgaaggccactacaagtcggaacgacaagaggcgaccggccgatcacgtgcgaaggggctgcgccaggaccgcagcacctactcggtgatcctgggagtgttcaccaatcccggctacgacgagaccgtcaccctggcacaggtcttccagcaacgcgacagtgccgggcagccgtaccgcttctacgtcaccgcgagcaaacagctcgccatcgccaccgatttcgccgacttcggttccgacctgcgcgatctgcgcaaacgcctgcgatccggcggcgccgacgtggtcgacgagttccccagatactccaccgcgcttcggcggctgctgggcatccggtccgaacaggccctggagctgctgcaccagacagtgtcgatgaagtcggtgggcaatctcaacgatttcgtccgcgggcacatgctcgaaccgagcgactcgaccgaccgggttcgcgacatcatcgcccacttcgacgacctcaccaaggcgtacgacgcggtcaagcgggcgcgcgagcagctcgagttgctcgacccgatcgtcgcgaccgcgcagaagtacgacgccgcgctggccgaacgtgacgccctcgaccggcagcgggcagcagtgcgactgttcatggccgagcatcgctccggtctgctcgcccacgagatcgccaccctcaccgccgaaggcgaacgcctgttgcgtgagcaggacgaagccaaagcgcggcaacggactctgagccgcgaacgtgaatcgctcatcgaggaacgggcccgggccggcggcgatcgcatcggtgagctggaacgtctcgcgtcgaccgcccgcgacgatgtggacaaacgccgccacggccgcgcactgttcgacaccgcggtgaccgccgccggcttcgagccggtgatcacggcagaacagttcacctcgctgcgtggtctcatcgccgatgaacgtccgcgactggcggcgacgaagcagtcactcgacgcgtcgaccgccgacgccatcggacgggagaaagaagtcgccagacggtgcgacgccatccgcgacgaactcgacgacctcgccaatcgcaccaccaacctgccgcccgatcaggtccagctgcgcgacgagctgtgcaccgatctcggcctctcccacgaggaggtgccctatgccggtgagcttctcgacgtcgccgaggagcatgccgaatggcgcggcgcggccgaacgggtactgcgtggtttcgcgctgtcgttgctggttccgcagcagcactacgaggcggtcacccagtgggtcaacggccggcgcctcacgttccggggtgccggcgggcgcaccgtcggcgccaaactcgtctacgaacgggtgccggcacgacgaattccgttgcagcggcagggttccgcgaccctgctgctcgccgaccgcctcgatgtcaaagccggtccgttcgctgattatctgcgcgacgaactgatcaagcgtgccgaccaccagtgcgcggcgacccttgaggagttccggtccgccaagcgggccgtcacccgtgaggggcaggtccgttcgggcggtcggcacgaaaaggacgatcggcatcgggtcgacgatccccgccgctgggttctcggatgggcgaacgagcgcaagatcgccgcgctgcgcgaggatctcgccgacctggaccggcaacgtgcgaccgccgccacggaagtcgaggcactgtcgtcggagcgggaccaattgcagacgcgccgcgaggcgctcgcccgtctcgacggcttccattcgtgggccgatctggacgtcgacgaagcgcaacgccgcgccgaccagtatgcggccgaacgagcacggctggaatcaggttcctctcgtctgcaggagatcacgaccgctctggaacgcaacgccgagctggcggccaccgccgacaccgccatcgacgagctcaccggcaagctcgccaccaccgccgcgacccgccatcgcgcggagcaggaccgcaaacgcgacgacgagtacgtcgccgagcacaccgacaccgacctcgcgacggcccgcacctcgtatgccgcactgacgcaacgactctccggatcactgccgacccgggccgccgagtgtgccgccgcggagaacacgttgtcgtcgacgctgcatcaacgaatcgaacggctcacccgtgagctcggcggtttcgggcagagcctggcccagcagatggccgaggtgctgcggcgctggcccgatctgcgggccgacatggacgccgacgtcgatgcgcgcgccgacttcgtgacgttccgcgaacaggttgccaccgatgatctgccgcgcttcgagttcgagttcaaggagcagttgaacaagaacgcgatccaggagctggccgggttcaacaactggctcaaccggcaggccgcctccatcgacgagcgcgtcgcccggatcaacgaggcgttgggggcggtgccgtacaacccgggacgctacatccggctcgagcgggaggccaccaccaatcaggacgttgcacagttccgggcggacctacgcaacctcaccaacgacagcctcgccgtcgacggcgaccagtactccgagcaacgattcctggacgtcaagcgcatcatcgaacgattccgcgggcgcgacgaccacgccgactccgacaagaactggacgcggcgggtcaccgatgtccgcaactggttcgtgttctccgcatccgaacgagacgtcgacaccgacgtggagtgggagcactacagcgactccgacggcaaatccggtgggcagaaggagaagctggcatacacgatcctcgcggcgtcgttggcgtatcagttcggcctggaatggggtgtggagaagtcccgcgacttccgcttcgccgtgatcgacgaggccttcggacgtggctcggatgtgtcgacaaggtacgcgctggacctgttcgccaagctggggctgcagctgctgatcgtgacgccactgcagaaggtgcacgtgatcgaaccgtacgtcaaggcgatcggcttcgtcgacaaccccaccggcaccttctcgcgcctgcagacgatgacgatcgaggagtaccggtcacgccgcgacggtcggctcaagtga

SEQ ID NO: 43464 - DNA, 1143 bp, Gordonia amicalis NBRC 100051 = JCM 11271
gtgacccgacgatggacctcgcccgacgacatcgccggcaaggttcgccgccggtgggacgacgggacgttgttgcgtgcccacgccgacgcaaagccgttcgaacccatcgagattccgctccggggaccgaccgcctcgcagatcggcgaggatctgggcgcggcccgcgactgggtgaccgtgatggacagcggccgtcagggcgaccgacgctacgcgttggtgtggcagtcggtcggcgggcggcacgtcgggcgcaaccagttgccgtcgcgcgccgtggtgtcgacgttcgatcaggcgtgggcactgttgggggtctcaccggcggtccggcagttcgacgaactcctcgaatcagcctccgctcatccggcagtccgcgactggatgctccgataccccttgcgtgcactcgaattgggaccggagatgccgcgactcatcgccgcctacgcgtggctgaacacccatcgggactcgcaccgctacctccgggagatcagcgcccccggcgtcgacaccaagttcgccgaacgccatcgcccggtgctggctgcgatgctcggggtgtcgtcgacggcatcgggcttcttgtccggactggggctgcagacaaagcccgagtccgtacggctgcggccgtccgcatcgatgggtctacctgcagcactcaccgagatcaccgtccgcaccgacgaactcgcgcgtctcgcagtgcagccacgaaccgcgctcgtgatcgagaacgagatcacctacctgtgtgtcgatgtccccgacgacggtgtggtgctgtggggcaagggtttcgaggtggaccggatcggacgtctcccctggctcgccggcgtcccaatccgctactggggcgacctcgacacccacggcttcgccatcctcgaccggttgagagcgtggctgccacagaccgagtcggtgttgatggatcgcgaaacgcttgtggcccatcgagatcgctgggtcatcgagcaacgacccgcttcatcggatctggtccggctgacacctaccgagcgcgatctctacacagatcttgtgatggatgctctcggcgagcgggtgcgactcgagcaggaacgtatcgactgggcgtgggctcaggaacgtctggggtga

SEQ ID NO: 43465 - DNA, 1521 bp, Gordonia amicalis NBRC 100051 = JCM 11271
atggagatttctgccttcccggctcagcgcgagaccgggcgagctgtcgcgccgaccgaatcggtgcaggtcacgctgggtgaagcgctggaagcgaaccgtaccctgcagaagtcggcggccgtacgactcttcgctgccaccaactcggcgctctacgtcaccttgatggaacgtcacctcgactacggcaccaagatgtcggaggtcgagctgacgatgcgcctcgaacgcgacctcgccgaactcgacctcaccgacgaccagccgaccggcctcgaactggtcaaactctgggcccgtcagggctggttgcaccgtgtcaccgacacctccgaccccgacgcgcccaacctctgtcacctgaccagcgaggcccgctcggtcctggacttcatgcgccgccagcgtcgcgaggactcgatcgccaccggcggttcgatcaccggcatcgccgccgaactccgacgcgtcgcgggacaggtcagcaacgaccccgagaccatccgcctcgagctcgaggcacagatgtccgacctcgacgccgagctcgccgatctcgacgccggccgccgcccaccggtcgacctccgcgtcgccgaggactccgcccgcgccatcggctaccagatggagcagatcatctccgacatcggccagtacggaacgatgctcgaccgcatcaccaccgcgctgctcgacgacccgggcgactccgacctcgcctaccgcgatcgtcagcgacagctcttcgacgactatgaagccctcctgcagtcatcccagtcggcgtcgtaccaggcgttcagccagatgatccaggacccggagcgccgcgcccgcctcaagaccgacatcgacaccatcatcgagaacttccccggcatggacgccgggctgcgatcggtgatggacaacttcttcgggctggtcacccagcagatggccgaggtcggccgcacccgccagcgctgtgcccgtcgtatccgacgcttcgtcgcgtccggcaccctcgagcagagccgtggtctggcccgtcagctcaacgacgctctggccacagcgaacgacctgctcaagtcctcgctcgccgaccgtcgcctcggctacgagttgccgctggcggccccggccctcaactcgatcggccgtctcgccttcgagatccgcgaacacgttccgcccgcaccggcgctacccgccggtggcgccgacgccgatctgaccgccttcgcctcgatgaccggccaggtcgacaccgtcgagctcaccgagaccgtcaacaacgccgtcgccgccggacccgtcccgcttaccgaggtgatcgagggcctcgacgagccgtacctcgcgcacgtcatcgtgctgtggtcctgggcgcagaaacagctggcagcaggggagaaggtaccgatgaccaccgtgcgtttccggtccctcctcggggaggaccacgccatcgaagtccccgacctcaccttcaccgaaccgattccgactgcggaggtcgacgccgaatga

SEQ ID NO: 43466 - DNA, 894 bp, Gordonia amicalis NBRC 100051 = JCM 11271
atgacatctttgccccctgaggtgcgagcgcagcgagcctcgaagggccctgacgtgcaagcagagaccgccccctcgctcccagaggcgcatgcagcggccgccccctcgctccctgaggtgcgagcggagcgagcctcgaagggcacccctgacgagttcgccggcttcgacgatctccccaccgtcgcgaaccgcgccacctcgcacgccccgagcgcaccccgcttcgacggcgacgtcagcgagatgcccgaccgtgcctgctgggcgctgcagaacctgctggcccgccgctacgtcagcggcgaccggcagccgcagctgtggtcgtgggtgtccgagtaccaggacgtcctgcggatccgcctgtccgagctcgaccttcgcctccgcctcgtcgacgaactgcaggtcgccttcgtcgagcaggctggctacgactctcgttggggccgtcgcattctcaagcgcgagaccgtccacacctacgacgcgatcctggcgttgcatctggccaagtacatccgcgccgcgcgcgacgaggatgcgctgatcacccgcgaggagatccacgagctgttcgccggcgtcaccaacaccatcgaccgcgacctcgcgctcttcgacaagcgcatcgaacgcgccatcgacaagatggaagagctcgaattcctgcgcaagcagcgcgacgacgccgacacgttcaccgtcagcccggtgatctccgcggtgatgacggcgtcggtgatcaccgatctgcagcgacagttcgagcagttcatcggctccggcgacacgggggaggaaccgcccgagggtgcggccgacgaacccacccagcccgacgacgccgagaatgcgtacggcgacgacgaaggagacgactggtga

SEQ ID NO: 43467 - DNA, 3339 bp, Gordonia amicalis NBRC 100051 = JCM 11271
gtgagcgtcgaccagtaccacctgtcccggttgcagctgatcaactggggcgtgttcgacgggtatcactcgatcccgttcagctccaacggttctctgatcaccgggtcgtcgggttcgggtaagtcgtcgttgctcgacgccatctcgctggcgttcctgcccgaccaccgccgcaacttcaacgcctcgggtgacgccaccgccgccggctcgtccagcggtaagcgcaccgtcggcaagtacgtgcgcggcgcgtggggtgagcggcgcgacggcaccaacgcgcaccgcgagatcatgtacctgcgcggcaccggcccggcgtgggcggccatcgcggtcacctacacctcaacgtccggcaccgccatcaccggtctggtcctcaagtggctggccgcgggcaagatgaccgacgcgcacagctcgtacttcatctacgacggcgacgccgacatcgtcgaggcctgcaacgagtgggccgtggccaactacaactcggccaagttccgcgaccgcggctggcgcggcggacccggcgagggcaagtacctctcgacgctgtactcgctcatcgggatccgcggctccgacgccgcgcagcagctcctcggaaaagccaagtcgctcaagagcgtcggcggtctcgcgcagttcgtgcgggagttcatgctcgacgccccgacgtccatcgtcggcatctccgacgccctcgagcagatcgacccgctcgtcgaggcccgtgagctgctcgacgtcgcgcgccgcaagcgcaccatcctcggcaacatcgaggaagtccacgagcggtacgcgagcgagtcggccaccttcagcgtcctcgacaccatcgacagcaccacgatccgcagctacgtcaacaacctgcggatccggaacgcgcagcccgaggtcgccgacctcgacgaccagatcacccgcctcgacggcgatctcgccgcgctcaccacccagcacgaccagctgcgccaggaccacagcctgctgctggcccgcatcgccacgtccactggcgacctcgccccgctgcgcgaacagctcggcggcgcacagaaactcagcaccgaggtcaccgcccgacgaaacgcctacgaagacaaggtctccgcgctcggtttcagtccgccgaccaacgccgagggcttctggtcgctgcgcgaagagctcatcgaggaggccaccaagatcgacggccagctcgaagccggccgcgcccactacgccgaggcgctcgcccgcgaggtcgccgcccgcagccgccgcgacaccgcgcaggaagagctcggccgcgtcgaacaggccggttccgcgctgccgcgcaccgaacacgagatgcgccgggtcatcgcgcacgcgctgcagatcgacgagtccgagctgaagtacgtagccgagctcgtcgaactcgaccccgacgaggaacgctggcgcctggccgtcgagaaggtgctgcgcaacgccggtctgcgactcctcgtaccggacaagcacttccggtccgctctgcgcttcgtcaactcgcacgacatgcgcggccggatccagctgcaccaggccgagacccgcccgatgcccgtcgtcgagccgggcaccctggcgtccaagctgcgttcggtcgaccccggccatccgtgtgccgccgaggcgatgactgtcctcgcgaagctcggcaaccacatgtgcgtcgacaacccgggggagttctcccagtacgccaaggcggtcaccgatcagggtctgcgtaaggattcggcgaagctggccgtcaaggacgaccgccagcagctgcgccggtcccagtacatcttcgtcggcgacgtcgaatcgaagatcaccgcacttcgcgacgaactcgcctacgaagaaagagttttcgaggacgcccgcgaggactgtgccgagctcgaccgcgaacgctccgcgaaggaacgacgccgcgacgcctaccgccgcgtgtgtgagcagttcacgcagtggaacgagatcgacgtcgactcggtcgacgatcgcgtggaccagctcaccgaccagtacgacctcctcatagaggagaaccccgacgtcgaggcgctgcagcgcaaggccgaagacctgtgggagcaggtgcgtcacgcgatctcgcaggcggcgctggtcaaggacaagatcgcccgccaggacgagcgtcggacccagctgctcgacctcatcgaccgactgaagcccgaagacgttcccgcacaggcggagaagactctcgacgggttccgcgaggacctctcggcgaccctcgacgtgctcaaccccgagccgtaccgccaggagatcgtcaaggccgccggccgcgaacgcgaccgcatgcggtcggacgcccgacgctcccgcgacgagctggcccggatcctcgacacctacgacgaggagttccccgacgccatccccaacgacagcgacgacttcgacgaacgcatccacgactatgtcgccgtctgccgccgcatcgacgagcgcgagctgccgtcggcctacgagcggatgcgccgcctgatcaccgagcaggcacccggcgcgatcctgggcctgcacatggcggccgacgccgaggaacgacgcatcgtcgagcagatcgagcgcgtcaacaccggcctgggtgcggtggcgttcaaccgcggcacgcgcctgcggctggtcccaggtcgtaagaagctcgccgcggtggaggagctgaccgagaaggcccgccagatctccaaccgcgcaacggcggtcagcttcggcgacgagcaggccatcctcgagcagtactccgacatcctgctgctgcgcgaacgcctcgccggcaacaccccggaggaccgccagtggacgcgcgacgccctcgacgtgcgtaaccgcttcgacttctactgcgaggagcaccacgccgagaccggcgagaccatccgcacctactccaacgccggcgacaactccggtggcgagcaggagaagctgatggccttctgtctcgccggtgcgctgagcttcaacctggccagcccgcacggcaacgacaaccggccgatcttcgcccagctgatgctcgacgaggcgttctccaagtccgaccctcagttcgcgcagcaagcgctgtcggcgttccgcaagttcgggttccagctgatcatcgtcgccacagtgcagaacaccagcacgatccagccgtatgtggacaacgtggtgatggtgtcgaagacggaggtcgggccggagttgcggccggttgctacggctacgtcaacgacgatcaaggcgttctcggagttgcggcggtcggggagtcagttggctgtttga

SEQ ID NO: 43468 - DNA, 1503 bp, Gordonia hirsuta DSM 44140 = NBRC 16056
atgatctctaacgaccgcttcatcatcaggggagacatcatggccgcgctcggcgatgtgtaccggctcgccggattacgcaccgacgatgcggcctggcgtctgctgcgtaccgatcacgccccggtgatcctaggactactcggtcgccactttacgcacggtgctcgccctctgccggcaccggaactgttcgcgctcctggatgccgatcttgaagaactccgcgacaacggctgggatctgccgcagaccggtcggggttactgcgcggcctgggtccgcgacggcttcttactccggcgttccagcagtaccgcgcgcgaggaattcctcgagccgaccgaaggaactctggctgcactcgacttcgctggcgctttgcaggcaccgatccgggcggtcaccgagtcgcggctcaccacgctggcgagtcaattgagtgccttggctcgagactccgatccgagcgcccagtcccgcctggctcgcctgcaggtggagcgcgccgctctggatcgacagatcgcggcagtcgaatccggggacttcccggtactcggaggggaacgcgcgttggagcgtgggcgcgagatcctcgcgctggcctcggaagtgcccagcgacttcgctcgtgtccagagcgctttcgatgagttgaaccgcagtctgcgcgcacggatcctcgacgatgagagcgatcgcggagacacactgggggatgtcttccgcggggtcgacctgattgccgactccgaagccggccgcagtttctccgccttctacgacaccattctcgatccagcgcgcgccgcccagatcgacgatgcgatcactgccgtcctcgatcgcccattcgccgccgagttcaccggtgaacagcaccgccggctccgcggcctcctgaccgatatggaggtcgccgctggtgaggtgcacgcggtgatgacatcgctgtcccggtctctgcgccacttcgtgcagtctcgagcctacgaggaacaccgccggatccagcagctcatccggtcgacccagcagcaggcccgcaccgtggccaccgtgcgccgccccttcgatgtcctcgatctcgagctggttcgggtcgggatggccatcgaatcggtctccgcgctccgtctgcacgacccggccgacgatcgcgtcaccgacgaggtggtggtgcacccggccggacatgccgacctggagtcactgcggcagctgattcgcgagtccgagatcgatttcgacgagctcaccggcaatatcgctgccaccctgacacagcggggccaggcgagcatcgccgatgtgctggtcgaacaccccgcgacccagggcctggccagtatcgtcggactgctggtgctggcagggcgccacggtcatcgagtcgacggaaccgaacggatcggctggacatcgcaggccggactgacacgctcggtcgtcattcaccgtcaccagttcgacccgaccgctccggagttgcagccatga

SEQ ID NO: 43469 - DNA, 690 bp, Gordonia hirsuta DSM 44140 = NBRC 16056
atgagttcacccgagcctggttttcctgaccacggcgagctgggcgcggcagcgtccgagtccgtcggccactaccccggcgatctgggcaccctggcgccggcgagccgccgcgccctggtgcagctgctgaaggggcccctgatcacctcggctagacatccggagatctggaggaccgtgatcgccgatcagcggctactgagatcgcgactggcggatgtctttctggacttggtgatcgacgatgagaacgaaatcgctttcacccgcccggctgataccggtgatgctgtggctgcaccagtggtgctccgcaccgaacgactgaccttcatggacaccgttatgttgctggccctgcgccaactgctgctgcgagcccagccgggcgagcgcgtgatcgtcgaccgtgacgaaatcgccgaacaactcgagatctaccggcgccgcgccgataccgatccggcaggcttccgcagacgtatcaacgcctcgtggtccaaactcaccaagtattcgttgctgtcgagtacgaccaccgaagatcggatggagatttcaccggtggtgcggcagttgttcgacgccgatcaggtcgcgctggtcgctgccgaattcgatcggatcctcgccgaggagaaacccgctgacggcacccccgccgacgacgtcccggacatcgaatga

SEQ ID NO: 43470 - DNA, 3288 bp, Gordonia hirsuta DSM 44140 = NBRC 16056
atgagctccaccgccgggcaataccggctggcccgcatccaggtggtgaactggggcaccttcgacggctaccaccagatcccggtcgcccgcgacggctatctgatcaccggcggctccggttcgggcaagtcgacgctcctcgatgcgatctccgcggttctgatgcccggtgatcgggtgaagttcaacgcagcggcgcaggagtccgacagatccgggcgcagtctggtcagctacatccgcggcgcctggcgccgggacaccgacgccgactccgatgtgctggtcagcagctatctgcgcgacggcgccacccgcagcgccattgcgctgacgtatcggacgcaggatccccgtatggcggtcaccctgatcaaactcctccatctgggacgcggcaagaatgcggccggcgaggtcgtcagtctgcatcttctggtcgacggcgagttcgacctcaccgatgtgctgccttacctgagtaacggcatcgaccggcgagggatccgtaagcgctggccgaatgccgacgtgaacccgtcatactccccgttcgcccgcaagttccggtccagactcggcatctcgtccgaggctgcacagcggctcctgcacaggacgctctcggcgaagagtctgggcagtcttgatcgtctgttccgtgattacatgctcgatgttccggcgacgttcgcgctggctgaacgtgccgtcgagcagttcgaggacttacgcgaagcccaccgggtcgtcgtcgatgcgcgagatcaggtgcagaccctggatccgcttgtcgacctggaccggctccgccaggagtcgttgtctctggtcgaagccaccgcggaggaggcctcgttcctcgatatcgcgcacgcgcagcgaacactggagatactgcaacgggagttaaccgagctggaaggccgaacgccgctcatcgaggaagcccaaaccgctgctcagggccacgacgagcgtgcccgcgatgccgtcctggacgcaaaggtcgcgatcgagcacctcgacgccggccgcctgtcggtcctgaatgcccagcacgatgaacaacgacgtgccgtcgcacgcatcggcactcggcgcgagcggattcagcaggccgtcgccgtctgggacgggactgtccccaccgatgccgaaggtttcgcccgattgcggggacagctggaggatcagctcgccgaatcgaccggcggtcacgagcagcgacgcggcgaacagtatgcgatctcggctcggcgggaagccgcgcgtacagagatccgccggctcgaagccgaccgggaggccctggccagacgccgttccaatcttgacccggccctgctgcgcgcccgcgaactcatctgcgcaacagcctcgctgaccgaggatcaactcccctttgccggcgagctcctgcaggtgcgtggtgaccagtccgactggaccgggccgatcgaacgtgtactcggcgcattcggacgcacgctgctggtaaccgatgagctctaccgccgggtgtccgccgcggtggacacacaacacctgggcacgcgcctggtctaccgccgcgtcgtaccggccccagagcaccggacgcggcgcaccggttcgtcgtcactggttcgcaaactcgaagtggctcccggtccgttacacgactggctgcaacaacagcttgccgaccggtacgactacgcctgtatccccgatgtggccggtttcgccgaccacgagcgcgccgtcacccgagccggtcaggtcaagcattcggcgcagcgccacgaaaaggatgaccgaagcagcgtcgatgatcgacggcgctgggtgctcgggttcgataacgaagccaaactcaacgatctgcgacaccgtatcgaccagttgcacagtgaagtggacggtctttcggcacggctggatgctctggaccgccgtgaacagcagatcgccgctcagaaccgtgccgcacagtcggtgctggacgtgcagtgggccgagatcgatgtcgcgaccgcccagaccgaactcgataccgtcgcagcccggatcgcacgatggcagcaagaccaccccgaacacgccgccctggcacttgcgctgacgcaggcacagcaggccgccgaacaagccgccggtgctcttgcggccgccacggctaaagccctgtcgcatcgcagtgaactcgatcggtaccgtgacctggtcgccgcgagcacttccgacgctcactcctcggtcccggaagccgtcgccgaacgactcgaccgacgttaccaggctcagactcgacggatcaccagcgccaacatcgacaaggtcgtgcacgaggtgagcaaggcgatcaccggagagaatcaacgtgcggcgcgggaactgtccaaagccaacgacggtatcgtgagggtgctgtcgcgatatctcgcccgctgggaagctcgtgccggggagctccgggccgaacccgaattctccggtgacgcgctggcggtcctgcaccgacttcgagccgacggcctccccgagtacgagacacggtttttcgaactactgaacgagcagtccacccgcaacctcggtcagctggcgatcaatatccgacgcgctcccggagagatccgggcacgcatcgatccggtgaaccaatcactgcggacctcaccgttcgataccgaccgatggctcaagatcgacgtgcgggaacgtcgctcaccgctggcggccgaattcctcgacagcctcgccgaggtgtcgtccggctcgtgggcacaggagacgcgcgaagccgccgagggcaggtacgtacggatggcgcagctgctcgaacggctggggtcgagagaacccgctgatgagcgctggcgcaagcacgttctcgatacccgtctgcacgtcggcttcatcggcgtcgaatacgacggtgacgccgagccgcgcaactatcacgattcctccgccggcctgtccggtgggcaggcgcagaaactggttttcttctgcctggctgctgctctgcgctaccagctcagcccggacggcagtggggtgcccggttacggcacggtcatcctggacgaggcattcgaccgcgccgacgccgcctacacccgccgcgcacttgatgtcttcgcccaattcggtttccacctggttctggccacaccactcaagttgctacagaccctggaggattacatcggcggcgcggcgacgatcagtatccgggaaggaaagtactcgcagatcgatctgttggagtggtcagacgatgacccgcaatga

SEQ ID NO: 43471 - DNA, 1179 bp, Gordonia hirsuta DSM 44140 = NBRC 16056
atgacccgcaatgagatcactccggcacagacccgcgagcgtgctcacgccgccgttcgttcccggctgcgcgactggctcaccgatccggtggctgcacaggccgatgtgctgaacatcgccctgaagccaccgaccgaacgacgcctcgccacccagtccgagagcgcccgcgactgggtgcggctttggcacgagtaccacggtccgggggccgtcgactgggaaccgcggcgatggccgagcttcggcacacagaacgtaccggtacgtctgcggctcagcggcgccgaccagatctgccgtgcagccgagcaggcgactcgctggcgacgattgctgagccgccgcgagaagctcgtggcgttgggccggtccgacggccttccgggtgcggtcgccgcaacctttccacgatgggagacgctggacgacgacgatttcatccgcctgatcgctaccaccgactggctcctgaagaatcctcgttccggactgctgattcgtcagctgcccatcgaaggcgtcgacaccaaatggctccgcgcgcaccgccggctggtcgagaacctggtcgacggtgcccgcggctccaccgatctgggtatcggcaacctgccttcgctgcgggagatagtgctgctcgaccccgcactgctccccggtatgccgaaagttctggccagcaccgtcgccggactggcggagctgcccattaccccgtcgacggtgctgatcctggagaaccgggagggagtgcatgcgctcccaccgattcccgggaccgtggcgatcgccggcggcggcaatgcggtcactgacctgaccgcaatcgaatgggttcggcacgccgacatcgtctactggggcgatctcgatacccacggcgtggtcatcctcgaccggctacgacgccgcctgccgcaggtgcggagcctgctgatggatcctgcaaccttcactcgcttccggcatctgtgcgtacccgaaccggcaccggcgaccgaggatccctccaccctgaccgacaccgaattcgcggccctgctcgcgatccgcgcgagcgggcttcgcttggagcaggaacggatcccctggccgtatgtgctgcagcaattggcggcggccggtctgccggtcgtccattcagatgggtccgacctgatcgccgggaactga

SEQ ID NO: 43472 - DNA, 1512 bp, Gordonia sihwensis NBRC 108236
gtgcaattcgacgagatcgtcgccgtccggaggagcaatgcggcctggcgactgctgagggccgacaacgcgccgctgctgctgtcgttcctgggacgggtcttcgtcgacgacaacgtccgcgagatctcggagtcggcactggtcagcctgctcgacgaggagttgtactcgttgaacgagcggctcggcgagggaacctatccgcgatcgccgaaggcctacctcgacgagtggtcggccgccgatactgcgtggctgcgcaagtactacgtgatcgagagcgacgagccgcactacgacgcgaccccggcggtcgagcgcgccgtggcctgggtccggtcgctgcgcgaccgcgacttcgtgggcaccgagtcacgtctcaagaccgtgctggaactactgcggcagatcgtctacggcaccaccaccgacgccgaggtccggctcgccgaactgcgccgccgtcgcgccgaactcgacgcggagatcgaggccgccgagcggggcgagttccaggtcctcgacgccaccagccgacgggagcgctaccagcagttcgccgacatcgcccgcgcgctgctctccgacttccgtgaggtggagaccaacttccgcaccctcgaccgccagatgcgggagcgcatcgccacctggcgcggcaccaagggcgaactgctcgacgagatcgtcggcagccgaaacgtcatcagcgactccgaccagggccgcagcttccaggccttctacgacctcctgctctccgccgaccgactcgacgagctcgacgaactggtccggcatgcgcagggcctcgacgaggtcgccgactccgacatccggctcaccaacatccaccacgactggctcgacgccggaacccgcgcgcaggacacggtccgccggctgtcggagcagctgcgccgcttcctcgacgaccaggcgtggctcgagaaccgccgcgtcatggacctgctgcggagcatcgagtcgtcggcctacgccatccgcgaccgccgcgtcgacgacttcgcccaggagatcgactccccggcaccgagcgtgaatctgcccctcgagcgtccgctgtaccgtcccgccgcggcggtcgaggtcgccagcgagggcatcgaggagggcgaggctcagggggcctcggaagcgctgttcgagcagatccacgtcgaccccgcgccgctgatcgacggcgtccgacgggcgctgcgccgctccggccaggtcacgctcgccgaagtcctcgccgaacgtcccctcgaacaggggctcgccgaactggtcacctatctgtctctcaccgacgacggcttcgggaaggtcttcgacgaaagcgccgacgagacggtctcgtggactgacgagagcggtggccgccgtgtcgctcgcgtcccgcgcgtgatctacacccggccgtcccctaccgcgagccccaccgcgggccccaccgtgaatccgaccgccgaccccaccgcccccgaccaggagactcgatga

SEQ ID NO: 43473 - DNA, 600 bp, Gordonia sihwensis NBRC 108236
atgagccgccccgtcccccgcgacgagctgaacctctcgctcgcggtcacctcgctgatgaagggcgtcgtctaccgcgacaccgccgagaccgcctggcgccacgtcctcggcctggccgcgcaggtgagcgattacgtcgccacgctcggtctcaccgtcgtgatcgacgaggccgagggatatgccttcctgcggtccaagagcgacgacgagctggccgacctcgggatcgggcgtctggtcgcccgccaccaactgccgctgcatccgtcgttgctgctggccctgttgcgcaagaagctcgccgagcacgacacctccgatgcgggcaaccgtctgatcgtgaccggtgcgcagctgcgtgaaatggtcagccccttcttccccgccaccaccaacgaagctcggatcgccgaccaggcggacaccgcgatccggcgcgtcgtcgaactcggcttcctgcgccgcatgcccggccaggacggcgagtacgaggtccggcgggtcatcaaggcctacgtcgacgcccagtggctgtcggatctggacgcccacctggccgagtacgccgagatcgccaccgaggagcgacgatga

SEQ ID NO: 43474 - DNA, 3405 bp, Gordonia sihwensis NBRC 108236
atgaccggactgttcgcgcccaccgaactcgagaacgccgattcggcacggtcgggattccggctccagcgcttccaggtgctcaactggggcaccttcgaccagcgtgtgtggacgctggtgctcgacggccagaacggattgctcaccggcgacatcgggtccggcaagtcgacgctggtcgacgccctgaccacgctgctcctgccggcccaccgggtggcctacaacaaggccgcgggcggcgagtcgcgcgagcgcgacctgcgctcatacgttctgggctactacaagtccgagcgcaacgaggtgaccggcgcgtcgcgtccggtggcactgcgcgggatgtcgaactattcggtgatcctcggcgtcttccacaacgaaggccacgacgaaacggtcacgctggcgcaggtgttctcgatgcggcacgacagcggccagcccgagcggttcttcaccgtcaccgaccgcgccctggacatcgccaccgacttcgccgacttcggctccgacctgcgcgccctccgcaagcgcctcaaagacggcgacacccgcatccacgagcacttcccggagtacgggcgcgattaccggcgggcgctcgccatccgctccgagcaggccatggaactgttccatcagaccgtgtcgatgaaggcggtcggcaacctcaacgacttcgtccgcgaccacatgctcgagccgttcgactccagcggatgggtcgacacgatggtctcgcatttcgaggacctgaccgccgcccacgacgcggtggtcctggcacgcactcagctcgaggaactcggaccgctgctcgccgacgacgaccgctaccgccgtcacgtcgagatggccgccgagctcaaggcccggcgcggcgccctgcgccactacttcgcccagcagcgccacgaccttctcgccggtgaactggagaaccacaaccgtgacctcgcggccacccgcgcggcgctcgaagcggtcgaccgtgatctggccgacctgcggatcggcctgcgggagctggagctgcgccaggcgggtctcggcggcaccgacatcgcggcgctcgaacagcagatcgtcgacgctgcgcgccaacgcgaggaacgcgccgcggcacacgagcggtacacccggatgatcgaggacgccgggctggcgccggtctccgaccgcggacagttcgaacagcgccgcaccgaggtcgcggacgccgtcgaggcgctggacgccgaggccgcggaggtcgacaacgcgctcaacgaggtccggtacagccgcaggcagttggacggcgaggggcggcgcgtcgccggcgagatcgccagcctgcgcgggcggaccagcaatatccccgaacgcaatctgcggatccgcgagctgatctgccagggcgtcggccttccgcacgacgagctgccgttcgtcggcgaactcatcggcgtccgcgcggacgagagccgctgggagggcgccgccgaacgggtgctgcgcggcttcggcctgtccctgctggtcgccgccgacctgtacgacgaggtctcggcatggatcgacgcgaatcatctgggcgggcgcgtcgtctacttcaaggtgtccgatcacgtctcgtcgaagggtgcgccgacgccgccgccgaccgcgctcgcacacaagatcgacatcaaggagggacgcttcgagacctggctggaacgccggctgttcgagcgggcccggcatgtgtgcgccgagacgctcgaggagttccgcgccgcggactacgcggtgacggtcaacgggcaggtccgctccggcggcgggcggcacgagaaggacgattcccagcgggtcgacgaccgtcggaacttcgtcctcggctggagcaacgagcagaagatcaccgcgctcttcaccgccggccagcgggtgcaggacgacctcaaccgggtcgatcaggagatcgccgatctcgaggatcggcggcgagccctgatggaccgccgcaatgcgctcaccggtttggacgcctacccgagcttcgatgtcatcgactggatgagttcggcggcccggatcgccgaaatcaccgagcgcaagaccgagctcgagcattcctcgaccgaactcgcggaagtcaccgacgccgtcgccgccacgcgcgaacagctgtcggccgccgacgcgactcgagacggattgcgcgacaaggtctcccgcctggagatggcgcgcgatcaaggagagaaggcgcgcaatgcggcgcaggcggtgctcgccgaaccggagttcgccgaggccgaagcctacttcgaagcgatcgccgaggcggtccaggcctaccgagccaaggtcgacggcggtgccgaccaagtgctcaccgtcgccgaatgcgcagagttggaggcgtcgctgaccgagaagctcacggacgaatccgagcagcacacgagccgtgcgggaacgtacgagacgcgtgtggtgaaccggatgtcggagttcaaccgcaaccatccggttctcaccacggagttcgacgcggacatcgcatcggccgacgagtaccgcgagttgcatcgtcggctggcggaggacgatctcccccgcttcgaatcggagttcaagaactatctgaacaccaatgcgatccgcgacatcgcgatcttcgccgccaagctcaacaaagaagtccaccagatccactcgaagatcgacacgatcaacgagtcgctggccgggatcgagtacaacccgggacgctacatccggctcgacgtgaatccgacggccgcgcaagacattcgggagttccgcgccgatctgcgcaagtgcagtgacggttccttcgattccggcggcgacgatcagtacgccgaggagaagttcctcctcgtcaaggctctggtggagcgcttccgcggccgcgagggtttcaccgacctcgatcgcaagtggaccgagcaggtcacggacgtgcgcaactgggtcaccttcgcggcgtcggagcgatacctcgacggcgacggggagtacgagaactacaccgactccgacggcaagtccggcggccagaaggagaagctcgcgtacacgatcctggccgcatcgctcgcctatcagttcgacctcaagtggggagccacccgctcgcgcgatttccgtttcgtggtgatcgacgaggccttcggccggggctcggacgattcggcccgttacgcgctgtcgctgttcgcgcgcctcggcctgcagttgctgatcgtcacgccgctgacgaagatctacacgatcgaacccttcgtctccgcggtcggatacgtggagaaccgcggcggcagctactcacagctccagtgcctcaccatcgagcagtaccgcgagaagcgtgcggtgcgggagttggtgcacgaggcctga

SEQ ID NO: 43475 - DNA, 1470 bp, Xanthomonas translucens DAR61454
atgaagcaccgcgcccgcatcgcccgctaccgcaccctgcgcgagcagccgctgtggaagctgctcgccgccgaccaggcgccggaagtcatcggcctgctgcagtcgctgctgctggacagcgaacgccggctgccggcggcggtgctgcacgaacgcctgcagcgcatgctcgacgaactcaacgccgagcagctgtcgcgcgaactgccgcgcaccgcgcaagcctatgtcgcgcactggctggcgcagggctggctggagcggcggctgccggacggcgcgcagcaggaggaatacgaactgtccacccaggccacgcaggcgatccgcttcgccgatggcctggagcatgcgcgcggcgcggccaccgagagccgtctggccttggtgatgcagcagctggcgcagctggcggcgctgaccgagaccaatccggatgcgcggctgtcggcattgcgcgacgagcgcgagcgcatcgatgcggagatcgcgcgggtctccaagggcaaggtcgccgcgctggacggcaagcgcgcgctggagcgcgcgcgccaggtgatcgcgctggccgacgagctgaccgaggatttccgccgcgtgcgcgacgatttcgagcagctcaaccgcgacttccgcgagcgcatcatcgacgacgagggcgagcgcggcgagatcctgggcaagttgttcgaaggcgtggacgtgatcggcgacagcgatgccgggcgcagtttccaggcgttctgggccttgctcaacgatgccgagcagagcgcgcagctcgacgcggcgctggagacggtgctggcgcgctcgttcgcgcgcaagctcgaccgccgcgagcgcggcttcctgcgcgggctgaccggcaccatgctcgaacgcggcggccaggtgcacgatgtgatgcagcatttcgcgcgcagcctgcgcggtttcgtgcagagccgcggctatctggagcagcgccggctcaaccagctgctcaagcaggcgcaggccgaggcgctggccttgcgcgaccacatccccgcgcagcgcggcatcggccgcgacctgaacctgaccaccagccgcctgcgctcgctggcgcaatggcggctgcacgacccgcgccagcagcaggtcgagggcggcatccagcgcaacgaggcggcggcaatttcgctggacagcgtcggcgacctggtggcgcaatcggaaatcgacttccgcagcctgcgccgcgatctattcgagctgctcgccgagcagccgcaactgtccatcgctcaggtactcacccagcgcgaggccagccagggcctgggcagcgtgatcggttacctgtcgctgggcacccgccatggcgtggtcgccgccgggcagcacgagatcgcgcaatggcgcggcggcgacggccagtggcgccgcgcgcgcattccgttggtgtggttcacccaggagaaacgccatgaactggcatga

SEQ ID NO: 43476 - DNA, 705 bp, Xanthomonas translucens DAR61454
atgaactggcatgaccacgagctggatcccgagcagggacgctcgaacgatgcagtcgacagcgccgcgcccgacgccggtaccgacctgttccccggcgacagcggccgcctgccagtggaagcgcgccgcgcgctgtgccagctgctcagcggccccagcgtggacgcgcagcgccacagcaggctgtggccggcgctgttgcgcagcgaggcggcgatccgcagcgccctggccgacctgttcctgggactggtgctggaccgcgaagccggcatcgccttcacccgccaggccgacaccggcgaactggaagcgccggtgctgctgcgctcctcgccgctgaccttcatcgattcggtgctgctgctgtacctgcgccagcaactggccgaagccgatgcgcgcggcctgcgcgcggtggtggaggaagcgcagctgggcgaggcgctggcggtgtacgagaagaacctgtccaccgaccgcgccggtttcctgcgccgggtcggcaatgccgtgcagaagatgaaggacaaccacatcctgacccgcctgcgcggcgaagacgaacgctacgaagtctcgccggcgctgaagctgctgttctcggccgaggacgtggccgcgctggcgcaggtgtaccgccagctgcgcgaaggccccgattctggcgaggacgccgccgcggctgcgcaggacgcctag

SEQ ID NO: 43477 - DNA, 3609 bp, Xanthomonas translucens DAR61454
atgaaatcctccgcttccacgcctggcctgttcgccggcgatctgcccgatccgcgcctccagcagttccgcatgcgccgcctgcaggtgcacaactggggcacgttttccggcctgaccgagatcccgatcgccgcgcgcggcttcctgttcgtcggccgctccggctcgggcaagtccacactgctcgatgcgatgtcggccttgctgacgccgccgagcatcgtcgatttcaacgccgccgcgcgcgaggccgagcgcagcggccgcgaccgcaacctggtctcctacgtgcgcggcgcctgggccgaccagcaggacagcgaatcgggcgagatcgccacccagtacctgcgcaagggcgccacctggaccgcgctggtgctggaataccgcaacggcgaagaccgcgtggtcagcctggtgcggctgttctggatcgccggcaacggcaccgccgcggccgacgtgcgcaagcactacatggtggccgagcgcgcgttcgacatcgccgccgacctggacggtttcgacctggacctgcgcaagctcaagcagcgcctgcacgacgtacaccatttcgacagcttcgccggctatgccgaacgcttccgccaccagctcggcatcggcaacgagatggcgctgcggctgctgcacaagacccagtcggcgaagaacctgggcgacctcaacgccttcctgcgcggcttcatgctcgaggaaccgaagaccttcgacgccgccgagcgcctggtcggcgacttcgccgaactcgacggcgcgcatcaggcggtggtgaccgcgcgccgccaggtcgagaccctgctgccggcgcgcgcgcaccacgccgagctgatggcggtgcgccgccagcgcagcgaactcgacgaactcaagctcggcatcgacagctaccgcgagcagcgtcggctggcgctgctggatgcgcggctgcaggaactggacacgcaggaccgcggcctggccggcgaggaagggcaacgtcgtgccgcgctggagaaccaccagcggcgcctggacgacctcgaagcgcagcgccgcgcgcagggcggcgagcgcattgatgcgctggagcgtgagcgcggccagctcgaagtcgagcgcgaccgccgcgccggcaagcgcacccaggccgagcaggcctgccgccagctggagcaggtgctggccggcagcgcgcagggcttcgccgggcaggccgcacaggcgcgcgcggcgctggaggacggcacgcgcgcggccgccgaactcgacgaggcgatcagccagcgcatcgccggcaaggccgaggacgccaagcgcttcgccgaagtgcgcgccgagatcgacgccctcaagcgcaatccctccaatatcccggcgccgatgcaggcgctgcgcgcgcgcctgagcgccgacaccggcgtacccgaggccgctttgccgttcgtcggcgagctgctgcaggtgcgcagcgaggatgccgactggcgcggcgccatcgagcgcgtgctgcacggcttcgcgcaatcgctgctggtggacgaacgccactacgccgacgtggccgactgggtcaaccgcacccatctgggcatccgcctggtctattaccgggtacgcgacaacgagcacgccctgcctgggcgcgcgccggctgccggctcgctgctgcacaagctggaactgcgcgagcacgccttcgccggctggctgcgccgcgaactgggcaagcgtttcgactacgactgcgtggacaacgccaaggcgctgcgccatgccgaacgcgcgatcacccgcgaaggccaggtcaagcatcccggcgagcgctacgagaaggacgaccgccacgcggtgaacgatcgccggcgctggctgctgggcttcgacaaccgcgacaagctggccttgttcgaagaagagggcctggcgctggcgcagcgcatcgccgcctgcgacgccgacgtggccgcgctgcgtgcgcgccgcgaacgcgacggcgcgcggcgcttggcccagcacaccctggccaacctggcctgggacgagatcgacgtggccgcgccgctgcagcgcctggacgacatcgccacggcgctgcgccagttgcgcgagggcgacggcaacctgcgcgcgctgggcgaggcgatcgaccatgcgcgcgcggacatcaagcaggccgagcggacctacgagagcgtgcgcgaggagaggatcggactcggtgtcgagcgtgtgcggctggagaagcaacggctgaattgcgccgatgcgaatgcgcgcgtggtcacgccgttgcagcgccagggactggacgaacgtctcgctggcctgggcgtgctgagcctggacaatctcgaggcgcattttcgccaaatcggcaatgccatcgtcgagcagaccagcgccagcgacaaggaacacaaccgcctggagcaactgctgctcggctgcttccgccgctactgccagcaatggcccgaagacagcggcgatttcaccttcagcctgagcagcgccgaggatttcctcgcgcgcctgcagcgcctggaacgcgacggcctgccgcggcacgaggcgcgcttcttcgagttgctgcagagccagagcaagaacaacctgctggccctgcagcggcataccgccgaggcgcgcaagtccatcgcccagcgcctggacgaggtcaatgccagcctggagcaggtgccgttcaaccgcggcaccttgctgaccatcgaactgggcgaccgccgtctgccggaggtgatcgaattccaccagcgcctgcgcgacgtgctcggccatcaccagaccgagcagcgcgaactggccgaacaacagttcgcggtgctgcgcgaactggtgcgccggctcggttcgcaggacggcgaggacaagcgctggcgcgagctggtgctggatgtgcgcctgcacgtggaattcgtcggcgtcgagctcgatgccgccacccgccagcaggtggagatctaccgcagcggcgccggcaagtccggcggccagcggcagaagctggccaccacctgcctggccgcggcgctgcgctaccagctcggcggcgaggacggcgaactgccgcgttactgcgcggtggtgctggacgaagccttcgacaaggccgacaacgagttcaccgcgctggcgatgaacatcttcgagaacttcggcttccagatggtggtggccacgccgctgaaatcggtgatgacgctggagccgttcatcggcggggcttgtttcgtcgagatcagcggccggcacgattcgggcgtgctgctgatcgaatacgacgagcaggcgcgcaggctcaagcttcccgagcgcacgcgcggcacggccacgccagccgatgcggcgccagcgccggaagcggaacaacccggcaccgcgccgagccgcctgcgcgccgacactgcggccgtggtgcgtggcgatgccggcgagccagcggtttccgatggcgccgccgccatggcgcccgtgccgcatcgcgcgctgccaaagtcaaaggcaaaatccaagcccgagtccaagcccgagtccaagccagggtccaagccagggtccaaacccaaatccaaggcctga

SEQ ID NO: 43478 - DNA, 1209 bp, Xanthomonas translucens DAR61454
atggcgcgcgccaacgcgatgctgctgcccgatgccgcgctggccgccttgcgcgggcagtggcggctacaccgcggcgcgtggttgctgggcgatgcggcgccgcaaccgatctcgctgcgcatgccgacccaggctcaggccagcgccggattcgatgcgttcggcgcctggctgcgtgcctggcgcaccacgccgttgccggggcatgtggaatggcgcgatgtgaaatggtcgcagctcggcctgcaatgtctgccgcacgcctggcaaccgaacgccgatgaggccgcgctggcgctgggcgaacacgcgcgttggcagcgcgcgcgccagcgcagcgcagcgctcgtcgcgcgctggccgcaggcactggggtttgccgcgcgtctgcgccggcagttcgacctgctcgccgatgcaccggaagcgggtttcgtgcgcctgctcgccgtcgtcgagtggctgcatgcgcatccgcacagcggcctgttcctgcgtcagttgccgatcgccggtatcgacagcaaatggatcgagccgcgccgtggggtcatcgccgactggctggccgggctgcgcggtatcgtcgaaccgcgcggcttcgacagcgtgtccggactgcgccgcgcgccggaccgggtgcgcctgcgcctgctcgatccggacctgcgcgcgcggctcggcgggctggaggacgtgcaggtgccgatcgcgcagattgccgcgctgcagctgccggtgcggcaagtgctgatcgtggagaatcgcgagaccggcctggcctgcgaggatctgcccggcacgctgctgctgatggcgcgcggctacgccgtggactacgtgcgcgccatcgactggctgcaggccttgccgctgtactactggggcgacatcgatacccacggtctggcgatcctgcatcgcttgcgccggcatgcgccgcggacggtcgcgctgctgatggacgaagccaccttgcgcgatacgccatccgagctgtggggacacgaacgccgccagcatcgcgcgcaacggctggatgcgctcaccgctgccgagcaggccttgtacaccgacctgcgcactggccgtttcggccccgcgccgcgcctggaacaggagcgcatcgcctggaattacgcgtggccgcgtatccgtgccgcactggccgaagagcgcgccgaaccgtgcgcgatcgtgcgctga

SEQ ID NO: 43479 - DNA, 1542 bp, Brachybacterium muris UCD-AY4
atgtccgcgatcgcccgtgcactggagaaccgggacctgttcggcggggaaggcgtcctcgcgctgctgcgaaccgacaacgcccctgtcactctcggcctcctgggaacgcatctcgcaggggatgtgcgaacccgtaccgccgctgacctgtacgacctcctgtctgcagacctcgcggaactgcgcttccacggcatcgacctgccccgcacggcccagcagtactgtgcgacatgggtagagcagggttacctcacacgccgcgctgcacggaccgaacggacggaggagttcgccctcaccgagaactctcagagcgccctgcgtctcatcgaacagctgcacaccccccgcgatgccgtgacacgctcccggctcaccctgctgaccgaacgtctgcgcacccttgcccgcgacaccgatgctgactcggctgggcggttggaggcactgcataccgagcgcgaccgcctcgacgaggccatcgcacaggtcatggaactgggtgcagaaccgcttccggaggctcaggcactggagacgatcgacgagctgtactccctggccttggacgtaccgtccgacttcacccgggtgcgcggtgaactggagaggctgcaccggagactgcgcctggacctggtggagcacgagggctcgcagggggagatcctcgaccaactgttcctgggcgtcgacgcgatcgaggactcggaggccggacgctccttcgccgcgttccatgacatggtgatcgaccccgtccaggaagcgaggttccacgatgccgtggatgcgcttgccacccgtcccttcgcgcaccggttcggtcgcgaacggatcgtgtacctgcagtcgtacctcgcccgtctgcaacgggaatcccaccaggtgcggcacgccatgatcgacctgtcacggtccttgcgcgaattcgtccgctcccggcagttcgaggagttccgggcccttgccgatcggctccgcaggccccagcgcatcggtctggagatcgcgccccaggtgaggcctcacaccaggatcggtgtggagctgacgctgtcgaccttcaccccgcgctcggtcggccagctgcatctgctcgtaccctcggacgtcacagcgcaggacgatctcgagctcgcgtcgaccgaggtgctcgatctcgaggcgatgcgcgcagcgatccgtgaatcggagatcgatatggctgaactggtcgatgcagtcgacgatgtcctctctcgccgctccacggcgactgtcggtgaggtgctcgaggagcatccggcgactcagggactcgcctcgatcgtgggcctgctggtcctcgcccatcggcacggtgaacgggtcgaggggccgtccgacaccgtggagacggtgcgatggcgcctggtcgggagaagagcaggtgccgagcgcgaagccggtgtcggacgagccgaacacaacggcggcaatggctggcgcagcgctcggatcagtcgcagccggttcacccgccccctcggaaaggacagtcatgtcggagagtga

SEQ ID NO: 43480 - DNA, 744 bp, Brachybacterium muris UCD-AY4
atgtcggagagtgacgatcatgtggtgctgtggcccggtgacccggggaccctgccgctggacgtgcgccgagcactggtcgcgctgctgcgcggaccgtacatctccttccgccgtgatcctctggtgtggtcggcgctgctggcacacgaggcggtggtacggcgccacctcggcgacctgctgctggatctggtgatcgacgccgatgccgaggtcgccttctcccgcaacctcgagcccggccccgacttcgaccaggccgtcccgagcgtgctgcggaaggcaccgctgagcttcatcgactccgcgctgctcctccacctccggcatctgctgctccaaggcgctgcccaacaggagcggatggtggtggggcgcgatgagatcgaggcgcacatgcaggcctacgccacctcctccggtcatgaccaggcgcagttcggcaagaggctcaccgcgagcatcaagcggatgcgggagtggtcgatcctgctccccacggacaccgacgatcggtgggaggtgtcctcgatcctcgcgctgatcctgacccccgaggtgatcgaggggatcgaggtggagtacgaacgcctgcggcgcggagggaccggtgacctgcccagtgccgacgggatgacagaagaagacgcagagtccgacgacgcagattccgacgggccggaccctgacgagccggacaccgatgagacaggtctcgacgagacggagagcgcgacgtga

SEQ ID NO: 43481 - DNA, 3354 bp, Brachybacterium muris UCD-AY4
gtgagccagaccagcctcgacctcgaccccaccgcagcgggagtctcccatcccgggcagatgcgacttgcccgcatccagctgcacaactggggcaccttcgacaagcgccacgacctcaccgtgccccgtgcaggtctgctgctcaccggggagtccggctctgggaagtcatcgatcctggatgccatcagtgcagtgctcatgaaacccggtgagacgcgcttcaacgccgctgcccaggacggaccggccggtgaccgtgaccgctcacccatgagctacgtgcgcggcgcctaccgtcggcataccgacgaggccaccggcgaggtgcgccccggctacctgcggcagtcgacgactgtctccggcatcgcgctcaccttcgaggacggtctggggcgcgccgtcacggcgatgcgagtgatgcacgtggcgggtcgttccgctgcagccgtcgatctccgttccgccttcgtcctgttcgatcggccgacagaactggccgacgtcctccgactgtgcgacacgggcatcgatcgacggcgcctgaagcagcagctctccccgcaggcagccgaggacagctacaccaggttcggcgtgcacctgcgacggctcaccgggatcggcagcgaggacgcccagcggctactgcaccgcacccaggcagcaaagtccctgacctcgctggacgacctgctgcgcggcttcatgctcgagacgccatcgacattcgccctcgcggaccaggctgtcgaacagttccgggctctgcaggacgcgcacgccaccgtcatcgatgcgcgtgagcagatcgaggcgctgatccctcaaagggagcagtggcaggtccaccgtgctgccactgcggaacaggaacagctctccgcactgctggcagccgtcgggacgtaccggtacacccgcttggctgaactcgctcagagtgacctgagcgcgagcgagatcgagctcgctgccgccgcacacgagcgggacaggacccggcgcgcggaggacgacgcccgggaggcggagcgtcgcgcccgacaggccctcgatgaccgcggcggcgccgccctgcaggtgctcgagagccggatcgagcaggccgaggaccgccaggaacgggttcggaaccacatcgaccgcatcgccccggtgctcgaccgcctcggctccccgatgccaggcaccgcggaggagctcgccactgcccaggcccaggcccagcgcgaacaacagcgcatcgatcacgagacaggtggcctgacccggacctccggtcccgttcacgtggagcacgccgaggccacacggcgcagggacgatctgatcgcggagatccgatccctcaacgctcggcgatcgaacctgccggcatcgttggtggaagtgagggaccagctcgccgaggccgccggcgagtccccggcctcacttccgttcgccggcgagctgatgaacgtccgcgatgagcagtggcagggcgccgtcgagcgactgctggcaggactctccacgaccatcctggttcctgagcgtctctaccctgctgtggcccgggctgtcgatgcgcggcactggaaccggcgcgtctcctacgaacgggttcgggaaacggatcgacaccggcacgatgccgatgcggtctcgcatcgcaccgtcctgtccgtactggagctcgcaccgtctccctttcagtcgtggctgcggggccgcatctcctcgggattcccgcacgtcctggtcgacgatgcgcagcagctggctcggcatgagaaggcactcagtcgcgccgggcaggtgaagaaccgtgatcgccacatcaaggacgaccgccatcggatctcggaccgggaccactgggtcatcggtaccgacaacgcggctctgctcgaggtgcgcaggcagcagctcgagcaggccaacgcggagatcgcgcagagccagcaacgccttgcagacatggagcggcagcggcgggccctccgggaccgggacctcgaccttgctcagctgctgcagctgaactgggaggacatcgacgccgtcgacgtcgatcagcgcctcgggacgttgcggcagcagcgacaggacctgctgtccgacgccgacatggcccgcctggaggtcctgctccgcactgctggggaggaccatgcgcaggcccgggacgatgccgagcaggctcgcaaccggcaccacgatctgtccgctgcggtcgagtccgcgaccgccgatctggaacgagctcggggggaactcgccgatgcgcaccttgacctcgtgcatcgcgagcagctcgatcgacgggtccgggccaggcggcgcacgctggcgcgtgagcaactgcccgacgtgatcagtgaggtctccgggcagatccgcgatgagctcgatcaggtcaaggaccagatccgcagtgcggagagtgcgctggcgctcgcccgcgctcggtacctgcgtcagtgggccgagagatcggtgaacctggtcgacgacatcgcggccaccccggacttcctcgcgcagctgggtcgcctggagtccgatcggttgccggagttcgagcatcgcttccgggacctgctgcgcacccagtcccagaacaacatcggtcagctccgcgcggacatcgcgcacgccatccgcgacgtccagcagcgactgggaccggtggatgagtcactgcgtgccacccctttcgacaccgaacggcgcacctggctgaccttgatagcccatcagcgtctgagcgacgaggcgaaagcgttcctgggggagctgatggagatcacccacggtgctttccaccaggacgatgagagcgtcacagcggccgaggagcggttcgcgcggatggaccacgtcctgcgccggctgggctccgcggagagcgcagatcaatcctggcgcaagcgggtgctcgacacccgtcgccatgtggagttcgaggcgcgcgagatcgacgccgagggcatggtggtcgacgtgtacaaggggtccgacgggcggtccggtggccagcggcagcgcctcgtgacgttctgcctcgctgcggccctgcgctaccagctcacctccagcgccgatgggttcccgccgtacggtctggtggtgctcgatgaggccttcgacaagaccgatatccacttcactcgggccggactggaggtcttccgctccttcggcttccaactgctgctggcgacacccctgaagatgctgcagacgatcgaggagtatgtcggtggagcggcggtcgtctccaaccccaccggtcgggcctcgcggctcacggcagtcgccttcaccgacatgggatcaggtccacatgcgcacacctga

SEQ ID NO: 43482 - DNA, 1215 bp, Brachybacterium muris UCD-AY4
atgcgcacacctgaggacgtccgagcgaccttgcgcaccaagtgggatcgcaacctgcccgcatggctcgctgagccttcgaaggcgaccgtgagcgtgcccctgcaccctcccacggctgcgcaggcacttgccgacccgcccgcggtctccgagtgggtccagctgtggcgtcgcgcccccgaaccgctgggcctccacgtgcagtgggaggagcgccgctgggcacacctcggctcccagcgagttcccgtgcgatggggtgcaaccggtgctgacgtgctcaccgagtgtgccggcggaccgacccaggcggaggcggagctcctgcgtgtccgctacgaagcggcggtgtcccacctggcccaccatgaggagactccccacctggccaatcaccccggggtggggggcgaggctctgcgtcactcggtcgctgcggggatggaccggtcgcgcgcgcagtggctgcggatgtctccgacagatgccgatctgtcgatcgcggtggcggcctggctgttgtcccacccccgctcggggctacgcatccgccaggtgccgttcccgggtatgcacacgaagtggctgcgggatcaccggtcactggtgagcaggctcgtcggcgccgcccgcgccgacgggtcggaggacctcggcctcgccgcggaccccgtcttccacgacgtcctggtcctcgatccccgacttcgacagggacaccccggcttccctcgaagctcccggatcgccgtgaggcagctgcctgatctggagctcaccccccgcgtggtcatcgtgtgcgagaacgctgagaccgtccaggtgctcccggacatccccgaggcggttgccgtgagcggttccggatacgcgatccccagcctgctcgacgtgccctggatacgagacgtcccggtcatctactggggggatctcgacgcagacggcttccggatcctggaccgggcccggcaccaccatgacgacgtcaccagcattctcatggacgccaacaccctcgaagaccatcgagcgctcgccgtcaccacgtccgtgcgtccggtggtcacgctctcacgcctgaccgggagcgagcagatcctgcacgatgaactcgccacgggcggcacacggctggagcaggaacgcatcgagctcggctacgcggtcacgcaccttgaagcggccgtgatgattgaccggtcatgctga

SEQ ID NO: 43483 - DNA, 1401 bp, Corynebacterium urealyticum DSM 7111
atgcttcgtgcccataacgccccagctgttctttctgtcttaagtgctgtcttcgaaggaagtaatcgccagatcgccggaaccgatctcactctcgcagtggaatcgttgctgatcgatattcgggaacaaaccaatttggaactgcccaagtcggccgttgcttatatcaacgactgggtgaagctcggatacctcacgcggcgcagtccacagggctcgagggaggagttttacgagctcactacggacgctcacgttgccatcgattatgtgcagcagttgatcagtcctcagcgggtggtgaccaaatcccgcctcggcaccctattcaataatcttcaggatctcgcagctgaaacagaccccgacgaggcgagggcgattagccgcctggaggcccagcgggatcagatccaatctcgtatcgacaacatccgcatcaacggtgtcggcgtgatttctgacgaggaggcagtggagagggcgcgggaaatcctcgccctggctagggacttgcccaccgacttctcccgcgttcgagaggaggttgaaaatgtcgatcacgaacttcgagaatcgctcgtcgaagggcaactcaacgctggtgaggtgctggacaatgtcttccgcggtgttgatctgatcgcagagtcggaggcagggcgagccttcaactccttctatgagcttttccttgatccggagcaatcaaagcagctcgatgccgtgatggatgccgtgcaatctcgggacttcatgaagcagctaggcccggaagagcggattgagatcgctcaattagttgacatgctggattcctcctcggggcaggtacatacctcgctcacgggcctatctcggtcgctcaggcgtttcgtgcagtcccgagaagcagaatcgcagcaggcgctcacgcgggcaatcaatcaggcgcagcagcaagcactcgagctcgcaaaacgagggatcgcgccctacgagaaggtcggctacgagcttgagctgacgacgcggcaaccgacgtcgctgtccagttgggaactacacaatcctaaggaatatcgcatcgagcgctcgatggaagtcaacgagtcgggcgagatcgatttcgaacagatgcgtcagcgcatccgggaatcagaaattgactggcaggaactgcgcgtcgcaatcaacgatgtggtcggtagtaagggacaagcatcgattcgggaagttttggaagaacatcctgctacccaggggctagcgagtgtggtggggctcatcaaacttgcgcatgatcacggtgaaaggtccgacggtacggaaatcctgcagtgggagagaccaagcgggaaaaggtaccaagcacggtatgaacgtttcgtatttcggaggaaggttgggcgcatttag

SEQ ID NO: 43484 - DNA, 588 bp, Corynebacterium urealyticum DSM 7111
atggaaaataaactgtatgaaggcgataccggaaccctgacaggtttgcagcgtcgtgccctggcggaactcatccgtggcccatacgtgtcgagcgtgaaatcgccggaggtcttcactgcgatatccaactcacgggaggtccttgcccaacagctggataacctcttcctcaccctcatcctcgatgagaacgcgggggttgcctatacaaaggcgtgggaagcggatgtccctgaaaagcgtgcgttgctgcgtaaacagtcattgactttcatggacacggtggtgatcctccacctgcgccgtgaactggtgacgacgagccccaacgagcgaaccatcgtggatgagggcgaggtttttgaggcgaccctgccgtatcaagggcacgccggcacagataagtccacgcagcgtaagcgttttactgcagcgtggaacaagctgaagaactactcgattatcgccagcaccccgaccgaggggcgtttcgaggtatctccggtgctgcgcatcatcttttctagcgaagagatcgctgctgtcaccgagtctttccgtgctctcctggaggaagaagaatga

SEQ ID NO: 43485 - DNA, 3351 bp, Corynebacterium urealyticum DSM 7111
atgacgacgactctgcctggccaattccggctttcccaaatccaggtttataactggggaacgttcgacaacctccactgtgtcgaggtgccacgggaaggcttcctcattacgggcccttcaggttccggtaaatcgacgctaattgatgcgatttcgacgattcttgttccacccggcaagattcgtttcaacgctgcagcggataaccaagcgcactcgggtcgtaacttggttacctactgccgcggcgcctggcgccgcgagcattcgatcgaggcagacgaacttacgcagtcttatctccgaacaggtgcgacgtggacaggcgtcgctctacgctacagcgacggggcgggggagactgtaacagcgtgccggttgatgtttttgcccgcaaatgcttactcgcgccaggagatcacagacctatatattttgcttcctcgggacgccgatctgacggagtttgaggatctggcgcagaagaacctgccggttaccgaggcgaagaagacgtacggtgatgccctgcacgttagtcgaaatcacccgaagttcagcttggcactgcgccgagcagtggggatcgcggatgccggcgctttggacctgctgaaccgaacgcaatcagccaaaacactcggcgatcttaaccacttgatgcgtactttcatgctgcccgaaccagaaaccttcgagatcgcggagcaagcagcggagaacttcacagacctacgtacggcgtatgagtcggtggtgaaaactcgtaagcagatcgagcaactggtaccggtacgcgtggcggcagagaagcgcgcagaggtcgaagacagcctgaccagggtgaaagaagaccgggacggcgtcgaaacattcgtcgacgagtggcggcagcgctttgccgaacaagaacgggatcagcggacctccgagatcaaagcagtcagcgcgacgatcgaagaagccaccggggtgcgggatgtgcaccgagcgcaagcagatcagttgcgcgcgttgattcatggcgcgcaggattcggccttggtttctgcacaagctcgtcgcgaccgtctgcaagaccggctggagcgagtgaccaaggaggaagaggcattcaactcccggctcaaatccattggggctacaaagcccgggagcgcggaggaattcaccaacctcgttcttcagttgcgtgaagagcgggagcggttgagcgttgcgtatgaaacggaagacggaaagctagcccaagcacatgtgcgagttcacgagctgggcgagaacaagaaagagcgcatcgcggagcttgaagcgttgcgtaaatacgaatcggccatggataaccggctgctccgggcgagagccttgattgcggagcggtctggggtgcgagaatctgatcttccattcatcgctgacctcgtgagcatgaggcctggtgaaggccactggcagggaaccgcagaacgggtgatgggtggttttgctcggcggatcctcgttccagatgaacattatgaccaggtttcttcggctattgatgggacctaccttggtgcgaaggtgagctacacccggttcacgcaggatctggaagaacagcgcccatcgcgttttgtgccgaactcgctggggctgaaaatcaacgtgaaacccgggcggtatcacgactggatccagactcaactttctaagaatttcgattacctgtgctgtgactctatggaagagtttcgtgccgcccggcgggcggtgactgcaaaggggcaggtgaagcataaccgcaatgaccacatcaaggatgatcgccgccgaatcgatgaccgttcgaactgggtgctgtggggcaacctcgctgacaagattgatgctctccaagcatcggtgcgctccactgtggcgaaacttgaagacgctgaacgtcaacgcaagaccatcgcggctggccaggagaaacggcgtgcccaaatagctacgatcgagcggctattggagacggagcgttttcaggatatcgacgtgtcatcggtggcccaggagcttgcggaagcccagcgcgacgtggatgaactcactgatgggaacgccgagctggctcagctgaaggcgaagttgaagagtgtcgaagctgctctcgacaaagttgaggagcaggtcatggcgctgcgtaatcagctcagcggcttcaaaattcgcctggagcaggcagaggaaacgcttgagagggttcggaatcgccgaggtgggaagaccgtctccgaggacgttgcggctcgtctggcagaacgttgcaaggctatcgatcgcaccatccggtccgataacatcgatgcgctcagcactcagctcgttcgcggtattgaggatcaacttgcagagctcaatgctcggtttaccaaacatggtggcgacttggtgaacgcgatgaacctctacttggtgcgctggccggatcgagcgggcgacctcaaggcggacatggagtgggagcaggactttctccaggaactgggcaggcttgaggcagacgatttgccacgtttcgaacagcgtttccgggacatgctgcaagacgaaacccacaagcatcttgggcgcctgcggcggctgatccgtgatgcggcagcaaagacgcgcagctcgatccagatgattaatgattcgctcgctgaggttgagttctatccgggtgcttacctgacgatcgaggtgcgggaagcacagcctgcgatcgcccgcgatttcgttgagctgctggattctgcgttggctgggattatcaatgatgctgatcaggaggagagcgagcaacgattccacaagctgcaggcggtgatcgacgcagtgacggtctcggacggtacatcaactcgtgatcgccagttgcgcctggacacgaggcaacacgtgaagttcctgggcgtggaatatagcgaggatggagcgcgtggtgcggtctatgactcatcggaaggtctttcaggtggccaagcccaaaagctgtcctccttctgcttggctgctgccttgcgttaccgactgactgggatgggcctgccgaccgcgcaagaaaagaaatccattgtccgggtgggggaggatatttacccgcgattcggcaccattgttctggatgaggcttttgaccgtgcggatacggagttcacccgggctgcgatggaggccttccgccgctttggttttcacatgattctggccacgcccgagaagctgctgcagaccgtgcaggactatatcgggggtgtgctgatggtggaatgcccagaccggaagcgatcgcgaacgagttctttgacgatcgaggaggtgcaggatgaagactcctga

SEQ ID NO: 43486 - DNA, 1116 bp, Corynebacterium urealyticum DSM 7111
atgaagactcctgatcaggtgcgccaacgcgctgcggtcttttactcgcgtaaccatcgcagctggttggccggggaattcaagacgctgaccattaacctggatccgccgactggaagggcggcagagcgcgatgacggcgctgccgtgcgagcatgggtggcacagtggaaccgcagttcaattaccgctgagtgggaggataaaaagctcagctacttggggacgtattcgctgcctcggcgtgttgttctctccgatgcggatactgcggctcgcgtggcgggcaagcttgatcattggcaacgtcttcaggcggtcttgggccgtttctgcatggagtttggggaaagcgttcgcccagaactcatcaggcacctttcttcatgggaagactggggcgacgtgaccgtggaacagttcatcgctgttgtccggtgggtccacgaacatgaggtcagcgacttttatattcgcgaactgccaatctttggcgtcgatagcaagtggttcgaggcgcatagggcggtcgttgaagcggtagtcggcccattgaattttaagtcgaaaccccagttggtagaggtccgcagccttgacccggcgctggatattagcgggatgcgatatctagcgtgcccggtggctgagctgggtgaaacgcctggggagcgggttcttatcgtcgaaaatcaccagagtttccttgccttgcccgacttgcctgcgacagtggcgatcttcggtggtggattgaacgctgccaggatcgtccagcagatcccatcgttaggggagatagacgttctttattggggcgatctggattcgtatgggttctacatcctggaaatcgtgaggcgatacgtgcctcacgcgcgttctgttctcatggacctggatacggttcgggatcatgttgatcttgcggtggaggaaccgcaacctagccggtttgatcctgagctgttgagttacggggagcgcttggctttggattatctccgggggcggtctgcaggcggatgcttgcgcattgagcaggaaagaatcttgttcgactatgcgcagcagcagctatgccacgcagcgagccccaatggtgcgggtgcatag

SEQ ID NO: 43487 - DNA, 1530 bp, Rhodopirellula europaea 6C
atggaaattgagagattggtcgcgtttttggattcctcgccaacggttcgtttgctgcgcgccgatcaggcagcgtttgtggtttgctttctccgccattcgttgaagttgaccgggcaagattcggcgatctcgttgtcgcatgacgaactgcaacaccgactgaccgtctttcaagaacaactgcgagacgatgggtacgaggccttctccggttccgcggatcgctaccttcgcgaatggtcggatgcggggtggctgagacgcttcctgccggctgaatcgtccagcccgcactaccaattgactcgctatgccgaagacgcgatcgggtttctcgaacagtcgatctctcgcgaaagtcgaatggtcggcaccgaatctcgattgcggatggtcatcgacacgctgactgacctggtccaaggcgcttcctcggatcgtgaacagcgtctgcaaaccctgatcgaacaacgggacgatttgaatcgccagatcgacgcgattcgcgggggcgccgagatcgagacctatcatcccgcgcaggttcgagaacgtttccacaccgctgtcgacctgctgaagaccttgcaaggtgatttccgggcagtcgaagatcgctttgaagaaatcgctcgtgatgtgacccgcggggctctcgatacagaacgcggtcgcggtgacattttggctggtgcactcgatgcggaggacttggtcaaacaacaagacgaaggtgtcagcttcgatgcctttgtcgccttcctcttttcgccccaggctcaagccaaactacgagagacgatcgcggaagtgacacggttggaagccatcgccgatcaacgcggcgcgatcgaacatgttcgggcaatggttccttcgttgttggcggaagccgagaatgtgctgcgtcaaactggacgtttatcgcaaacactcagacgcttgctggacagtcaatccaccagccatcgcaaacgcactgccgaagttttgcaagaggttcggaccttggcagcgaaaatgaaacaatccacgatgcagacgggagaacccgttccaagtgaaatcggtttgcgagtcgacacgacgttgggcgtcagttcgccattgacccgaccgttttggactcccccgcaggtctttgacattgccgtggaagccaacgagattgactgggaaacagcgaagcaacaagcccgcaaactatcgggtctgaaacgcttgcaatgggatcgcatgcgagagttggtgcaccgggtcaccgatttgcaaaccaacatcacgttgtcacagttgctggaacatcgtccacccaatgtcggcgtgattgagttggtcggatggatgcagattgctcacgaggacggtcatgaaatcgatacggaagggacggaacaggtgacggtgacgacggaagatcccttgaccggtgaatcaagcacggtgcatgttcgtgttcctctggtcaccttctcaaagacgcatcaaaccgaaaatgaaaccgtccggaagggaaagccacgatga

SEQ ID NO: 43488 - DNA, 666 bp, Rhodopirellula europaea 6C
atgacagaatcctcttcggaaacggatcctacggccgacgacacgttttccgacacgatgccgcctccggtcccctgggcacccgcggcagttcggttgttgcaaggcattgtctaccatgacgacgccggcgacacgtgggaacggattctgtccggcgtcacgccgctgacggactacttcgctcggatcgggttgcaattgattgtcaacgaagaagacgggatggcctacctgcgtcagatcgatcctgagtcactgccgccggagtacccgtcgattccaaagttgtttcgcagtgtgcgattaacctttgaggcgtcgttgttatgcgtcttgctgcgcgaagagttgcgtcaattcgaggaagagattcatcgcgacggtcggtgcgtggtgactcaagcggcgctactcgaggtttggcaatcgctcgtcccaacggagacagatgacgtgcgagccaatcgacttttgggtgggcaacttcgcaaactggaagagctgaaattcgttcgccagttcgaaaaggatccacccagttgggaagtccgtcggatcttaaaagcaagattgccgttgcaggaattggaacggttgcgagcggatttggaggccgagttgaaacggagagatgcaggtatggttcagggagaagaaaattga

SEQ ID NO: 43489 - DNA, 3423 bp, Rhodopirellula europaea 6C
gtgctgcgtttctcagtctctcgaattttgacgccaaccaacatgaagccctctcaaccactcgaattattcgctgacgacgatgaagtgtcggaacgtttgaaacctggtttccgtctggcgacgtttgaggttttcaactgggggacttttgatggccaagtccactcgatctcgcctcaagggacgtcctgtttgttggtgggggaaaacggagcgggcaagtcaacgcttgtcgatgcgatgttgacgttgttggttcgtcccggggttcgaaactacaacgtcgccgctggggcatctaagaaagaacgcgacgaacggacctacattcgcggcgcgtacgaccggaccgccggcagcgatgagaagcccaggattcagtacctccgggaagggacgggattctacacggcgctgttggctacgttcgccagcgctcgttcgggcgagtcgttcacggtttgccaggtgatgtatttgacgtcgagcggtgatcggaaaatcttctacgcgtttgatcggaaacctcgcagcatcgcaggtgacctgggcgacctgacctccaccggtgacatcaagaacacgttgatcgaccgcggatttgatgtcaccgagaacttcaaaacctatcacgggtggatgaaacggttggtcaaatttcgttccaaggcaatggacatcttcaaccagaccgtcgcggtgaaggatgttcagcgactcgatcagttcattcgcgatcacatgctggaaaagaaatcgtggaacgacaaagtcagcaaactgctcgaacactttgctcaattgagtgaggctcatcgtgcactcgtgcaggtgcgtcagcagtcggagttgctggtcccgatcttaagaacaggcaagcggttccaagagacaaacgccaaactgcaatcggctcgcgaagaactcgctgcatcaggtttgttctttgacattcaaaccagcgaacttttgcgtccgctgtgtcagcaatggaaactgcgaatggaacatcttgatgaacagatcagtctgctggatcactcattgaaatccaaacgtggtgaagccgcgtctgttgatcatgagattcgtcacagtggtggagccagactgcagcaacttccctttttgatcgaaaaggaaggacagcatgcggcgtccaaaagagagaaacgcctcttgtatgaatcgaaactgaagcaagttggtatcgacgaacccatttccagtcccgagcaactggaaaaggttcaccggcaaataggcgatcagcaacaacgaatcgcgattgaaaaacaaacggccaccgaccagctcgaatcactcaactatgaaatcggtgttctgcgtcaggaactcgccactgacgaaagcgaactggaatcacttcgtcaacgaaaaggcaatttgcccgacgcgttcatcgaaatccgcaccgagctttgcgctgcctttcgtctgtcgccaaccgatcttccgttcgcggccgagttaatcgccgtcaacccagatcatggccgctgggaatcgtcgattgaacaggtgcttcattcctttgcgagaacactgttggttccagacgacctttacgcgaaggtttccggctatgttgattctcagcgtctgacggattcacgcggtcgagggttgcgattgacttacgatcgtgtcggatctcgccagtccgctccgtcgcaacggtcgacggacctgagcctgccggagatgttgctctaccgggaggaccatcccttggttccctatgttcgcggcgagatcgtttcacggtttgatcacctggcatgcgaatcgattcaggattttcagatggcgggtcgccgagcgatgaccatccatcggcacgtcaaacaaaaccttcggcaacattcgaaagacgatcgcggtggtcatggtgatcgcaagcacttcgttttgggatgggacaatcgcaccaagcgagaagcactggaacgatcgatcggagaacaaagggcggtgcttgatcgcagagtgtcatcggcggggtcactgcgtcgtagcagtgatcaggcgacgcgaaggctgagtctgctggacgagctatcggcggtgacgcagttcgacaccatcgacgatcaccggcacgattatgaagcctctcaattgaggctcgaaaagcaaaagctggaggagtcgagcgatcaagttcgacagctcaaggcaaagctggcggcactcaatgcggaaatccaggggctggaatccgaacgagatcgatttgtgggggaacgctccaacctgcagacggaggtcgggagaagcgaagggatcttgaaacaagttgatgcgaaagtcgaggaggctcgctcgaacgatcgattcgcttccgcccaagcgttcttcgacgggatcgtccatcaactgggggaacgtaaactgacattggagaatcttgggatgttgccgcgagatattgcggatgaactgaacgtccgagtcagcgagttggaggagcgaatcgttccggtccgggacaacctgaccaaggcgatgagcaaactgttgaatcgattccctgtcttcgagtcggaactcgatccaacacctcaagcattgccgagcttcgaacaactcgctgagcgaatcaacaaggatgacctgcctcgccacgagcgccggttcaagcaacgtctcaaagagaaggtgcttcaagagatcggattgcttcatggatctctggaggacgagcgcgaagaaatccgcagcaagatcgaaacgctgaatcaggcccttcgtcaactcgattggaatccaagctcgtacatgcgtttggaaccgagcgacacgtcggatgccgagatccgagatttccgacgtgaactggcgggctgcctcgaaggcaccttggatgggactgacgatgcgaacgaggcaacgtttaaaaaaattgaaaaattggtggatcgacttcgcgacgatgcgaatcttcgctggcgagaaaaggtgatcgacgtccgcaattggttcaagttcgctgcccgtgaatacgacgctgcgtcaggcgaaccaggcagctactacgacggaggtaccgggcagtccggtggggagaaaggcaaattggcgttcttggtgttggtggccgcgattgcctatcagtatgatttgcaattggatgatccgaacagcgaacgatttcaatttgtcatggtggacgaaatgttttcacgcagcgatgacacccgggccaagtacgcactggatctgtttgaacgttttggattgcaattggcaatcgttgcaccgttggacgccaaggcacggatcacggagagctatgttggcacgtatggtcacatcatcaaggatcccgacacccaccgcagccagttgattagcctgacgaccgagcaatatcgagccgcggatcaggaagcatga

SEQ ID NO: 43490 - DNA, 1158 bp, Rhodopirellula europaea 6C
atgatcacagccgaacagattcgggtcaaagcaaagcgactgtttgggaaggcgatcaaggcttggttgaaccacgagctggacgcgttcttcccgcaccgaattcccgccaacctgacaccctcgaaggatttgtcaaaagcaatcgcggaagtcgagtctctacgcgagcacagcaagcaggcgatcggatcagggtaccgaatcgaatggagatcccgtcgaagtcgcacgcatgggcggaatgactttcccgatgcgatcttcgtggacacgatggatgacttggttgaaatgagtcaccgggtgagtgactggaagtcgcttcagatggccgttgccacacttcgggatcgacaaccgaggcttgacgagtggttgcgaactgggacgaattggaaattgattttggaactgtccgacgtgcttccggatttgctcagcattctcgatcacatgcttttgcatccgcgtcccgactgtttcgctcgtgagttgccggttcctgtttccaccaagctgatcgagcaacatcgtcgtcggctggcaatctggctggatacgctgttgccgcccgacgcgattgatttccggtttggccacgaccaattcgagccgcgatacgggcttcgctacgcgcggccgcactacctgcttcgagtcctcgacgaggagttgcagcgagatctgggcttgcctttcgacgagctttcattgcccgccgaatccattgacaagctgcctgcaagtgaccagcgagtcatcatcgtcgagaacaaagtgagtctattgtcgctgccctcgatgcatcgaacgctcgccctgggaggcctgggaaacggggtgactcaactttcggatatctcctggctgtcggaatgcaaagtgatctactggggcgatttggatgccgacggctttcgcattctcgatcgactccgagcggttctaccgaacgtggaaagccgtttgatggaccgatccatcgtggaccaatttgccaatttggctaccaaaggtaacggggacgaagctcaagcggtggaacatctttgtgagggtgagctgcagtgctatcaccacctgtgcgcaaacaaccttcggatcgaacaagaacacttgccgagcgaatggatcctgaaagcactttcaatctga

SEQ ID NO: 43491 - DNA, 1443 bp, Mycobacterium haemophilum DSM 44634
gtggacgacaacgcggggctgtcggccgtcgagctgctcgagctcaaccgcgacctgcagaactcccgcgccatccgcctgctcgccacaaccaacctcggcctctacgcaacattgatggaacgccacctcgccgaaggcgccatcgccgagaccgagctcgtcgtgcggctcgaatatgacctcgacgatctcgacgacccgcagtccgggctcgcgctaatcaagtcctgggccagccagggctggctgcaccggatcgtcgacgaacgccacgaccagaacgtctgctacctcacccaggacgcccgccgcgctttggactttctccgcggtatgcgccgtcacgacaccatcgccaccggcggctcgatcaccggcatcgcctcgcgcctcaagcaggtcgccgtaaaagtcgacagggacccggcccgcatccgcaaacacatcgaagccgaaatcgcggctctgcacgaggaactcgatcaactcgatgccggccagcgcccccagcccgacgtcaccgactgctacgacgaggcccgcgctatcgccctgcagatggaacgcctcatcaccgacatcggccagtacggcaccatgatcgagcaggccaccgccgccctcgacgaacccatcgattccaacaccgaataccgcgaccggcagcgccagatgtacaccgactaccaggccgcctgggactcccagggccgcgactcgcaccgcgccttcctgcgcatgatcaacgaccccgaccaacgcgccgaattcgaggccgatgtcgccgccgtcgccgaggccctgcccgccctcgaccccgctctacgcaaggtcatggccggcttcttcgaactcgtcggccaccagatcgacgaggtcgaacgcatccagcagcgctgcgcccagcgcgttaagcggttcaccgccttcggcaccatggagcagagccgcggtgtcgcccgccagctcaacaacgcgatcggcgccgcccgcgcgctgctgaagtcgtcgtttaccgactcccgcctcgacatcgacgttcccttggcccgtcacgccatcagttccattggcgcactgagctttaagatcggcgacctgtccaacccaaagcccgccaagcccggcaatagcgaggtcgacctgaccagcttcgccgcgctaggcacccaggtcgacgcccccgcgatgtccgacatgctcaaccacgccatcaccaacggccccgtctcgctgcccgatgccgtcgccatgctcgacaccgcctacctcggccacgtcgtcgtgctctggtcctgggccctccagcagcccaaccccgaaagctccgagtcgacccccgtccgattccgctcgctcgatggccgagaccgcgaaatcgccgtcccccgtttgacattcatcgaacccatcaccaccctcgccggagccactgcgtga

SEQ ID NO: 43492 - DNA, 717 bp, Mycobacterium haemophilum DSM 44634
gtgaaaacagaccaaccgacccccgatcctgatattgacttctcctcccttcctcaggtcgaccagaacgcccgaccacccgttgcgcggcgaccgcgctttgacggcgacgtctccgaactccccgaccgcgcctgctgggcccttcagcacctgctcgcccgccgcttcatcaccgccgaagccgacgccgacgtctacagctgggtgctggaataccgcaaggaattgtctgtccgactctccgaactggatctgctgctgcgtatcgcggaggtcggctatgaaacaaacggagtcgcgttcgtcgaacaggcccgctacgaatccgcaagaaacatcaagcttttgcgccgcgagccgctcggtacctacgactcgatcctcgcgctgcacctcgcccaaatgatgcgcgccgccggcggccagaccgtgctcatcagccgcgaagaaatgcacggcctgttcgcgggcgtgctcaacgacaccgaccgcgacgccgttaccttcgccgcgcgcatcgacggcgccatcgcccgcctagccggcctcgagatcctccgcaagagccgcgacgacgaggacagctacaccatcagcccggtgattaccgccatcatgaccgcctcggtgatcaccaaactccagcagcagtttgaacaactactcaccggcggcaccccgcaggacacagaagagatcgcgctcgatgactga

SEQ ID NO: 43493 - DNA, 3363 bp, Mycobacterium haemophilum DSM 44634
atgactgaacagttccacctctcccggctgcaagtcatcaactggggcgttttcgacggttaccactgtatcccattcagcgcgggcggcgcgctcatcgccggcgcctctggtagtggcaaatcctcactgctggacgcaatttcactcggattcctgccgttcaaccgacgcaacttcaacgcctccggcgacaacaccgccgccggatccagcgccggccggcgcaccgtcgacaagtacgtacgcggcgcctggggccagcgcagcgacggcggctccagccgcgtgatgtacctgcgcggcgacggcaccgcctggtctgccgtggccgtcacctacgccagcgactccggccgcaccgtcaccggcctggtcctcaaatggctcaccggcgagtcccgcaacgactcgtcgagccgctttgtgctcggcgacggcgacctcgacatcgaagacgtctgcaaccgctgggccgcaggccgcttcgacgccgccgtgttcaaggaagactggcggttttccactaaggttgagtcgcagtacctggcccagctctacgccaccatcggcatccgcgcctccgacgccgcccagcaactgctcggcaaggccaagtcactgaaaagtgttggtggacttgagcagttcgtccgcgagttcatgcttgacgaacccgacagcctgtcccggttgcccgaggccctcaagcagatcgacccactggtcgaggcccgcgaactgctggccgtcgcccagaagaaacgcaagatcctcggcgacatcgagaccatccagcagcgttacgcttccgagtcgtccgacctcggcatcatcgacctcgtcgacgcgccgatggtccgcgcgttcaccgaccacgtccgactcgcgcaaagccctacccagatcgccaccctggacggcaccatcgaccagctcgaaaacgaatatgaagacgtcacccgttgcctcaatctggctaaagccgaagcggattcgctcaatgcgcagatcagtggctgcagcgcgaatatagccccgctgcagtcgcaagtcactgccgccgagaccgaagccgaacaggtcacccgccgtcgcaccggctacgaaggtttgctcaccgcccacgacatcgaaatcccggacacggccgaggaattctggaacctccgcgaggaactgctcgcccaggccaccgagctgctcgctaaagtcgaacgcaaccgcgaggcgtccaccgacgccgagtacgcgcagaagtccgcccgcatcgcccgcgatgataccgccaaggaactcaagcgcgtcgagcacgtcggctcggcactgcccgaattcgcgctcgcaatgcgcgaacacatctgcgccgcagtcggtgccgacgccgccgaactgccctacatcgccgaactgctggatctgaagcccgaccagacccgctggcggctcgcggtcgagaaggtgctgcgcggcgcggggctgcgactgctggtgcccgaccaacactgggccgcggtgttgcggttcgtcaacgaaactgacatgcgcggccggctgcaactgcaccacgtccgcgcgaaattcctcggcgccgaacccgtcgagaccaacccgaacaccttggcgggcaagctgttcgccgtcgacccccagcacccctgcgccgccgaggccgtcgacatcatcaccgccgccggcgaccacgtctgcgtcgacacccccgacgtgttcgatcgcttccgccgcgcagtcaccgacgccggactgtacaaagactctgaccggctggccatcaaagacgaccggcgacccgtcaagcagtccgagtatctctaccagggcgacgtgtcggccaagatcaacgcgctcacgctcgaactggccggcgccgaggaggcctaccagaaagccaggcgcaccgccgacgacatcgccgcccagcgccagcaatggcgcgaccgtgcggcggcatgcaaggcgatctgcgagcagtacccgcagtggagccagatcgacaccgagaccgccgacgggcacgccgaccggctgcgtgaacagtacgagttgctgctcgccgacaaccccgacatcgaggcactcaatgcgcgcgccaacgaatgctggtcacagatccagaaactgatgacgcgccgcggggcaatccagacccgccgcgacggcctcgacgagcgccgcacccggctgctcgaactgcaggatcggctgtcaccgacgttcgtgtccgagccgctgaccgacctgctgcgccgctacgccgcaacgatcccggtctcgctggaactgcttgaccccgaaccgcatcgcgacgcgctgtttgccgcgatcaagaaggaacgcgagcagctgcgggagagccgtcgccgctcctacgacgaattagcccgtattctcaacacatttgacacgtcgttccccgacgcgattccgaatgattcggacgattttgatgagcgcgtgcacgactacgtggcgttgtgccgccacatcgacgagcgcgaactgcccgaggcctacgagcggatgatgcggctggtcaccgagcaggcacccgacgcgatcctgacgctgcaccgggtcgccgagcaggaggcgcggcggatcagcgagcagatcgaccgcgtcaataccggtttgggcgcggtggagttcaaccgcggcaccaggctgacgctgcgcgcgacgccacggcacctgctggcggtcaacgagctcaccgagatcgtgcgatccatttcgcggcgcatcgccgaggtcgggctcggcgacaagcaggcgatcctcgatcaatacgccgacatcctgcggctacgtaaccggctggcatcgaccgcaccggaggacagggcgtggacgcgcgacgccctggacgtacgcaaccggttcaccttcgactgcgccgaatgggacatcagcaacgaagagctcatccgcacgcacagcaacgcgggcgacaactccggcggcgagcaggagaagctgatggcgttctgccttgcgggagcgctgagcttcaacctggctagccccgaaagcaccgacaacagaccggttttcgcgcagctgatgctcgacgaggcattctccaagtccgacccgcaattcgcccagcaggccctgcaggcgttccgcaagttcggcttccagctggtgatcgtcgcgacggtgcagaacgccaccaccatccagccctacatcgacagcgtggtgatggtgtccaagaccgaggctaccggccgcaacgcccgacccgtggcatcggttgcgaccaggacgatctcggagttcacctcgctgcgccacgaaatgcgcgcggcagtaccgcgagtgccggctagggcgtga

SEQ ID NO: 43494 - DNA, 1464 bp, Microbacterium sp. UCD-TDU
gtgacaggaacacgagcagaagcggcattctcccgcgctgtcaccgctttcagcactccgacgctcgatctgctgcatggtcgcttcgcgcccttcgtggtggcgtcgctctcgcttctgttcaccgccgaccgggcatccatcccgatcgccgatgcgcaggccgagctctccgagatcctcgacgagttgcggggagcgggcgacgaggaggacgaccgtcgcgtgccggcggggacgggacgcgacgtcgccaggaactgggtgcgtctgggctggctggtgcagcagatcgatgaggacatcgaggtgtaccggctgtccgcgcacgcggtggaggccctcgagatcgcgggacgcacgggcggaggccgcacgcgtgtctccaactcacgggtgcgcacgctcctcgaagccgtggagcatctggccgacagtgccgaggccgatcccctccgccggctcgcccgtctgcgtgaggagcgcgccgcgctcgacgccgagatcgaccggatcgaggaggcgggccgggccgatccgctggacgacgaagagctctacgaggaagccgagaacgtgctgcatctggcgcgcgagctcccggccgacttcacgcgggtcgccgagtccctcaagctgatgcagcgcgacgtcgtcgcccatctgcgccgggacgagcggccgacgggtgaggtgctccgcgaatatcttcagcgcgcgcaggacgtgatgaactcgacgccggaggggcgcgcgttcgccggtgccctgcgactcatcggcgatccggaccgcatcgacgcgctcaccgaacagctgcacggcctgctccggcagcccttcgcccgcatgctcgacgccacccagcgtgccgaactggatgcgatcgggcgtcgggtggaactcggcgtcgaggaggtcctcgccgcgcagcggcgggcatcccacgtcatcaccggccaggtgaagacccatgatccgctgcgcgaccgtcagatcgacgacctgctccgcgacgtcatcgccgcgctccacgtctgggacggcacgggggcgagcgccgcgccggtgcgcagtctcccgctcatcgacctggggcacctcagacagacggtgagcagcatccgccctcccgccgtccccgccccgctcgcagatgcggacgatgtcgagttccctgacgtcgacacgcgagcgtggggtggtccgaggtacgcggagctcgaagaatacgtcgcgggtctcggcccggagttcgacctcgccgccgcgttcgaggacgccgccgacgacacccgccggcccgtcgacctcgtcggactgctcgagatcgctcatcgcaacggcatgaccgagagcgatgcggtctcggtcgtcgaggcgctgcgtcccgacggctcgacacgacgttttgcgttcggcgccgtcacagcgcgcaacccgaaggaagaagcacatgcctga

SEQ ID NO: 43495 - DNA, 663 bp, Microbacterium sp. UCD-TDU
atgcctgaagagagcctcgtgacgcaggcgccggtggacgatgcgttcatcgcccccgtcccgatggaagacgacatcgaggagcatttcgcgggtgatcgaggaacgctcgatcccgagatccgacgactgctcgcgcacatcctccagcgtcgtttcatcgccgcggagcgcaatcgtcgggagtggacgctcctgctcgaccaccagcaggtgatcgagtcgcggctgaacgacctctacctccgcctggtcgtcgaccacggtcgcggattcgcctacaagcagcagctgcgctccgatgagatcgacatgccggtgctgctgaaggacgcgccctacacgcgagccgagaccctggtgctggtgcatcttcgcacggtgtatcagcgcgagtccgccgccggcgaggcatccgtgcgcatcgacatcgaagacctcgagcagacggtgctcagctacttcaccgacgtcgacggaggtacggcccgacagcagaaggccatccgcaacgcgatggaccgtctggatcgagaaggcatcgtccaggaggagaccagtgggcgctatcggatcagtgcgctcgtcgaggtcgttctcagcgccgagaccctgaaagagcttcgcgattggctgcggtcgcaggaagaggtggaacgatga

SEQ ID NO: 43496 - DNA, 3360 bp, Microbacterium sp. UCD-TDU
atgaccatggtcgacacgctcttcggactcatccccgcgggttcgcggggacagcagtgggtcgcggaggagctgcagctgatcaactggggcggatacgacgccggcccccatcgtgtgcgcttctcacccgacgcgaccctgctctgcgggggttcgggctccggcaagtccactctcatggatgcatacatcgccttgatgatgccccacacgacgccgttcaacggcgcctcgaacggcggagtgacgggtcgccctcgcggcgacgagcagcggaacatcctctcctacgggcgcgggaagatcgacgaatcccgcaccgaggacggcacgaagctgcgtgtgctccgcggcgacggcgaagacacatggagtgcgatcgcgacgacgtggctcgatcacgacggatcgcgtttcaccgcggtgcgcgcgtggtacatccctgcggatgcccgcactctggaggacacgaccagggtgagggccaccgtgaacgggtcattcgatctggggcttctggagagggcggccacgcagaggctctccgatgcgtcggtacgggcgacgggactggagaccctggcgacggaccgcgagttctcggcgcgtctgcaggcggtgctcggcatcggggcggcaggttccggtgcgaaggcgatcagcctcctggcgaggatccaggcggggcagcagatcacgacggtcgacgatctgtacaagaagctcgtgttggaagagcctgagaccatggccaccgccgacgccgtcgtggcgcatttcgacgagctcgagagcacgcgcacgagaatgctcaccgcgaagcagcaggtgagcgcgctcgagccgatccgcgggatcaaggaccgcatcgccgcggccgccgaacgcgtgcgggtgatcgacgaggtcggcgtcttcaccgatccctcctcgctcgccgcgctctggaacgcgcagcggcgtctggacctgctgcgcgaggtcgaggtcgagctgggggatcgcacccgcgcgctcagcctcgccgtccgcgagaaacgcgcgctcgtcgatgccgccgatctcgagcgtgaaggtctcctcgatgtgctgcggcagtccggcggcgaccgcctggagaccgcacagcgtgagctgcgcgtggccgagcgtcgtctggaagacgtccggcgggagagggcgaagttcgacgcgatcgccgaggagctcggggtggaggtcgaaaccgccgcgcagttcgatgccttcgtggccggcgcccgtggctcgtcgccgaagtccgacatccgcgacgcgcgtgcggccttcgcggatgcggagacggcgcgcaggagcgccgagtccgagatgcggcgtctgcgcgacgaacgcgagaggaccgtccgcgtgcgcggcagcatccccgcgcacctcgacgaatcacgcgcactgctcgcacaggcggtcggactctcgccatcggatcttccgttcgtcggggagctcatcgaggtgcgcacggagttcgagccgtggcgcgaggccttcaacctcgcgctcggcggcttcgcgaggacgcttctgatcgacgccgagcatctggcagagttccgttccgccatcaacgcggtgcgcaccccggaacggctcaactacgagggcgtccagacagggctccccgagatgcggggcgccgacccgaagacgctccccgggcggctcgaccacctgcccacgcccttcaccggctggctccagcagagactccaggaccgcttcgggtacgtctgcgtggactcgtcgtcgcagctgagcgcgcatcagagagcgctcaccatcagcggtcagatctctcaggggagtcgcggcgcgcacggtgggcagggccgcgccaacatgctgggcttcaccaacgaccgtcgtctgcgtgagatcgacgagcagctgcggcagctgagcgctcggcatgacgagtgcgccgcctctgcggcggacgccgaggcggccctcgaccggatcgaggcgcggtcgaccgcgttcgcgaggatcgatgacctgacctgggagcagatcgatgtcgccgcggtggaggcggagcgagagcgctgggtcgccgtcgaagccgaggtcaccacggccagccccgagatcggccagctccggcgccaagccgacgaactgaggactcgggcggcccggctccgcgacgacgaggcgcgactgagcaatgagctcgcacagacgcaggatcactggggccaggtcaccgacgacgtcgatgcgtgtcagagcgtcatcgatgcggctgcggcatcgggactcgagatgggcgagcggcacgcatcgttcctcgatggtcgattcctgcattccgagacgggggacaccccgtccgcggcggagcgactggcgcacctggacaccgcgctgagaaccgcggcccaacgcctgcacgaggatcgccgcgaggccgccgaggcgcacgagcagcagcgtgagagcatgcggcgactcatgaccgggttcctggagcgatgggacaatctgacgctcctgccggatccggacgcgtcggtcggggagttcgagagcattctggaggcgctccagaccaatggactgcatgagctggagaccgagtggcgcgacagcctcctcaagctctccggcaacgatctgacgagtctcgactcgacgctcagccgttcgctgcgcgagatcaaggatcgcatcgatcccatcaaccgcatcatggaggagctgcccttctacgatgacgaccaccgcctgcagatcaccccgcgcgagaatcagacggaggcgcgcaagcgcttccgacgtgagctccgcgaggtgcgggggctgatcgatgcggcctcgaccgacgcggaacgggaggccgtgtatcgcaagatgagccgcctcatcgcccggatgcgtcggacggcgcccgatttcgccgaactcatcgacgtgcgaaaccacgtgcgggtgagcgcggagcgggtcaccgccgcgacacgcgagcacgtcgcgctctacgatcacatcggcgagaaatccggaggggaatcccaggagctcgtcgcgttcatcgtcggcgccgctctgcgctaccagctcggagacgcgggggcggcacggccgcgctacgcgccggtcttcatggacgaagctctgatcaaggcggatgcccacttcaccaagcgcgcgatcggcgcctggagaggactcggcttccaactcgtgatcggtgcgccgaacgacaagtacagcgcgatcgagccgcacgtcgatgtcgagtacaacatcctcaaagacacgcgcggtcgctcctgggcgaaggcgaaggtgggtcttccgcaggcggcggtctga

SEQ ID NO: 43497 - DNA, 1440 bp, Desulfocapsa sulfexigens DSM 10523
atgaatcttgattacgaaactctttcctctttaaagaaggtgcatcccgcctggcgactccttgatgctgcccttgcacctttgatcgtgagtttcctctatcgtgtctatatcagcgagaatgttcgcaacatatcccagattgaacttatctcaaaacttgaggatgagcttttttttctcagagaggttgaaggtgaagaaaaatatcctcgctctgccgctgattaccttgaagaatgggctcaaaacgataaaggctggttgagaaagttttatccagcggggtcagatgaaccctcctttgatatcacctcggcaacggaaaaggtcattggctggttggagagcttaacgagcaggaagtttgtcggtaccgagtccaggcttatgatggtgtttgaacttttgcggcaaatgattgaggggactgaggttgatcccgaaaaacgaattgtcgagttgcagaaaaagaaacgtgaaatagatgcggagatagacaacatccgaaatggcgatgtcagccgtatgagcaatactgctttgagagatcgcattcaacaggtggaaagtacagccagggatttattgcgggacttccgtgaagttgagaataattttcgccagctggataaagaagtgcgagaaaggattgctctctgggatggccggaaaggtgaattattggaggagattctcagcgagcgggatgccatatcgagttcggaccagggaagaagcttccaggccttttggaatttcctcatgtcactcagcagacaggcagaactgactgaaatgctgacaaaggttctggggtttgaagcggttaaagaattaaaaatagatccccgcctcaaacggatccattatgattggcttgaggccagtaaccatacccagaggacagtagcaaagttgtcccatcagttgcgtcgttaccttgatgacaaagcctatcttgaaaataaacgcattattgatatcttgcagaagatacaagccactgccatagaagtacgagacaacatgcctgcgggattttttatggaggtggatgaggctgccgccacaattgccctgccgtttgaaagacccttgttttcacctccggtaaagccggtaatagccgcagatgtggtcgatgcagatatttcagacatgaatgctgatgtgctgtttgaacaatttgtggtggaccgattaaaattggagagtcaggtcaatcaacttttgcagcagaacgagcaggtttcactccatgaggttaccaaggtataccctgtggaaaaggggcttgctgagctggtcacctattttgcaattgctgctgacagaggggcggtgtttgatgaggagcggcaggaagaaatcagttggctggagcaggactctagcagaaaatgcgtacacatacccagaataattttcagcagatga

SEQ ID NO: 43498 - DNA, 654 bp, Desulfocapsa sulfexigens DSM 10523
atgcgtacacatacccagaataattttcagcagatgagcatgaccaatatgagcaatccagaaccaggaatttcaaaaatagtcatcaacctgctgaaaggagtcgtgtatcaggaggctgaccctgcactttggcagcatttacttaccgtacagactgcggtttctgaatatgtatctgtccttgggttattccttctgctcgatgagtcggaggggtatgcctttttaaagtataaagaaccggagggcgaggaggagcctcttccccggttggtggggcggaggcagttatcctatcccgtcagtctgctacttgctctttttcgctatagacttgccgaatttgatgcatcaggggacgatactcgtttgattatgagccgggatgatgtggtggatatggtgagcacgtttctgccgtcgggggtaaacgaggccaaatttgttgataaaatcgatgcccatatcaataaggtggttgaactgggttttattcgcaggcttcccgggaaagaaaatatgatagaagtgaaacgtatactcaaggcgtatatcaatgcacattggctcaatgaaatggatcaacgcctgaaggagtataagacccacctgcagggtgaaaattcctgcgatgaagaagaggtggagtaa

SEQ ID NO: 43499 - DNA, 3378 bp, Desulfocapsa sulfexigens DSM 10523
atgcaagctcctctttttgattttgccggcagcgatacatatgcagggtttcgccttgagaggttagaagtctataactggggaacttttgacaaaaaggtctgggccttacaaccaaatggagatacctgtctgctgactggtgacatcggctccggtaaatctaccctcgttgatgcggttaccaccctttttatgcctgcacatagaattgcatttaataaagcagcaggagctgaaaagaaagaacggtccctgcgttcatatgtgcttggtttttacaagaccgagcgaagcgattttggaggctccgccaccccggttgctctgcgggaccacaattcctattccgtaattttgggagtattttttaataaaggctacaatcagaaaatcaccctggcacaagttttttggtgcaaggataagcaggggcaaccggagaggtattatgtggtttctaagcagccactgacaatttcccataatttttcaggctttggatcggatcttggcaacctgcgcaaacgtctccgtgaggaaagcggtgtagaaatctttgatagcttcactctctatagtgccgaattcagaagacagttcggaattaagaatgaacaggctttggatctttttcatcaaactgtttcgatgaaatcagtgggaaatcttaccgaatttgttcgtcaacatatgcttgaatcattcgatgtagagtcggatatcaccgcccttataggacattacgatgatcttaaccgggcccatgatgcggtgattaaggccaaggagcagatacggcaactttccccactggtagaaaattatacagagtatcagcaggtagttaaaaaaaatgaacatctgcgctcttgccgggaggcgctgcatggctatttcgcttctttgaaaacagagcttcttaaaacccgattgcagaaacattccgaggaaaagaaatggctggagaataggattggcgaggccgaaaagacaaaaattgaacaggcgaacaaccgggatgccctcacaaaagcgatcgctgaaaacggtggtgaccgtttggcgcaacttgcaagagagatcgatgctgtccttgagcgaaaaaggtcaagaaaagagaagtcagatcgttacaaaagtctcgtgattgacgtgggattgtcacaggctgaatctttagaggcattcctggagaacaactcccacctgccggatatattgaaggataaagatacggaaagtaaggatctgcaggacgcgataacaaaagatgcggtacgacttgatcgtaagagagaagagcatcgggagctcagtcgtgaactggattcattacgccagaggcaaagtaatatcagcgcaaaccttatcagcattcgaaaagacttatgtggtgccctgcagcttgatgaagagaatataccttttattggtgagttactgcagataaaagaggaagaaaaacagtgggaaggtgctgcggaaagagttctccacaatttcggtttgtcattattggtcccggagattcactatgccagagtggccgagtatgttgatagcacccaccttaagggcaggttagtttactatagggttcgtccggaacagattcctgggacagtcgattgtggacaacaatcattagtaaataagatagcaattaagccacagtcagagttttactcgtggctggagcatgaaatagtgcaccggtttaattatatttgttgtgaggatgtttctcagtttcgtcgagaaaagcaggctgttacgcaggctggacagattaaatcaggcggccggcgacatgaaaaagatgatcgccaccttctcagtgatcgaagccgatatattcttgggtgggataacaggcagaagattaaagccatcactgttgatgttgaaaaatgtgaaaaggttattcagaatattggtggagacattgctcaaactgaaaagttgaaaagaaaagttgataccgtcctggaaaagttgcatcgcctcgaggagtttccaaatttcagtgagctggattggcagagcgatgcacgtaaggccgagaacctcaaacaagagaagatagctctggagtcgacatctgacaaattagcactactgaccgaccagttgaaaaagttggagattgaactccgttctaccgaacgagaccaccaggaattgattcgcaaggaggctactcttgcagaaaagcagacccaggcagagaatgaactcaagcaatgtttacaagatatagaacgtgtagacgaatcagtcaggtcggagctgttttcttatctggagtcggtaagggaagaggctctgggaccacataagttaaccgtggagtcctgccaaaaccatgaacaggagatgcgtttttggttcaagcggcacatcgatgataatgcagagcggttcaagcgtctggaagtcaagatcacttcggcgatgcatacctattgcaatgatttccctgctgagactcaagaagttgataaaaccattgaggccgcttttgaatatgaaaagatgctggaggcacttagagctgataaccttccaaaatatgaacagaagtttaaggagttactcaaccagaatacgatccgcgaggtggttcaatttcaagctcagctggagaaacagaaccgaacaattaaggaacggattgaacagattaaccagtctcttgctaccattgagtacaaccctggacggtatatagagttggagaatgccaagactgtagatcaggagattcgcgaatttcagcagcagcttcgtatctgtattgagggtactgttactggttctgaggacgagcagtacgctgagaagaaatttgttgaggtgagtaagctcatagatcgttttaagggcagagctgattcgatagacttagatagaaagtggatgaaaaaggttacggatgttcgtaactggttcacatttgcagcttctgaacgttatcaggaggatggtagtgaatatgaacattacaccgataccggtggtaaatccggtggtcagaaagagaaactcgcgtatacggttctagcggcgagtcttgcctatcaatttggccttgagcgtggagagataaaatcgaggagttttcgtttcgtggtgattgatgaagcctttggccgtggctcagatgagtcaacgagatacgcccttaagttgtttaaagagctgaatttacaattgctgattgtcactcctctgcagaaaattcatatcattgagccatatgtttcctcggttggctttgtccacaataagggtggacaggaatcccagttacgaagcctcaccatagaagagtatcggcaagagagagccgctcgagaggcacggacggcttga

SEQ ID NO: 43500 - DNA, 1179 bp, Desulfocapsa sulfexigens DSM 10523
ttgagcaactggagcagcattaaagatttacgaaagaagctcgagcgggagtgggagcagggcaagttgctttcggcccggttacgtggtgaagatctctgtcccaggcgaatcacattgaaaagaccacttggaaatgagtgggctgagaagtgggatactgcaaaggcatgggtggatgaactgattgaggcagaaacacatggagctttcacaatagagtcacaggaagtgaaccatcgtcagttagggcgaaacagctttccccaagcagttctttttaagacggacgagtccattctttcgttcattggaaaactgagtgcggcccgaatatttgacgagttatgctgtcagattcttgctgatttcccagaactgaggtcctggctggaaaagcgtccgcttgttgctctccagtatcaaaaacagtggccaagactattggctgtgttgaagtatcttaagagtaatcctcgtccaggaatttatgtacgtcaattggaaattcctgaagttgataccaagttcattgaaaaacataaaaaacccctaagtgagttgctggatcttattctgtcgaaagaaatgatcgagagtagtgcaaccggagcaaaaaggtttgaggaacgttatgggttcctctctaaaccggttcaggtccgctttcgaatcctcgatcctgatctatatcttcatggattgtcggatcttcatgtaccggtatccgagttttgtgcattgaacctggaagttgatcatgtcttcattactgaaaatgaaatcaatggcttagcgtttccaaatgtgaaaaacgcaattatcatctttggactggggttcggactggatcgtttggccaatattcaatggctactgggtaaaaaaatccattactggggtgatattgatacacacggctacgtaatgcttgaccagctccgctcttactttcctcaggccagttcttttttgatggatagagaaacactaatggctcatgaatcactttggggccaagagagtaaacctacaagacggagcctgactcgccttgatgaaaaggaactaggcatttatgagtttctggtaaaaaaccttctccgggatgctttaaggcttgaacaggagagaatctcatattcatttgttttaaaaatacttaaaaaattggtgtga

SEQ ID NO: 43501 - DNA, 1482 bp, Rhodococcus ruber BKS 20-38
gtgtccaccgccgacctgcaccgtctgacgcgtctgcgtcaggagcacccggcgtgggcgctgctgcggtcggacaacgcggccgcggtgctggcgctgctgggccggcacttcgaccgcggcacgcgccggctgccggccccggagctgttcgcccgcctcgatgcggacctgcaggaactacgcgacgagggcttcgagctgccgcgcaccggtcaggcctattgcgcggactgggtgcgcgcgggttacctcctgcgccgtgcgagcgccgacgcccgcgaggaaaccctcgagccgaccgaggcgacgttcgccgcgctcacgttcgtcgagggactgacgacggccaccagctcggtcaccgagtcgcggctgaccaccctgtcgagccagctccaggcgctggcccgggattcggatccccgcagcgagagccgcctggcggcgttgcgggccgagcgcgacgagttggaccggcagatcgccgccgtcgaatccggtgactttcccgtactcgacgggaaccgcgcggtggaacggtctgcggagatcctggccctggccggggagatcccgggtgacttcgcgcgggtgcgcgccgagttggaggcgctcaaccgggagctgcgggcgcggatcctcgacgacgagggcgaccgtggcgacactctcggcgaggtgttccgcggggtcgatctgatcggcagttccgacgccggccgcagcttcgccggcttctacgacatgatcatcgacccggagcggtcgtcgcagctcgacgactggatcgaggcggtgctgcaacgcccgttcgcgcagcagctcaccaccgaacagcgacgacgcttccgcaccctgctcaccgagatggaggacgccggcggcgaggtgcacgcgacgatgacctcgctgtcgcgttcgctgcgccacttcgtgcagtcccgccactacgaggagcaccggcgtctgcagcggctgttgcgctcggcccagcagcaggccctgcaggtggcgcagcgccgcaaaccgtacgacctgctggacctcgagctggtgcgggtcggcatgagcatcgattcggtggcggcgctgcggctgcacaacccggccgacgacctggtggccgagccggtagtgacgcaaccggtcggcgaggtcgatctcgcggagctgcgccgcatcgtccgcgaatcggagatcgacatggacgagttggccggcaacgtcgccgccacgctgcgttcccgcggcagcgccacgatcggcgacgtgttgcgcgatcatcccgccacgcagggactggccagcgcggtaggtctgctggtgcttgccgcggagcacggtcaccgcgtcgacggcacagaggagatcgcgtggacgtccccgtcgggcgcgacccgcgtcgcgacggtgcgccggcacctgttcgacccgaccgaccccgagttcaccgcccgcgtcaccgaggatgcgtcatga

SEQ ID NO: 43502 - DNA, 594 bp, Rhodococcus ruber BKS 20-38
atgaccgaatcgaccacccgcacgggcgacaccggcgaactcgacctcgacacccgccgggcgctggtgcagctgctgaagggaccgctcgtcaccgccgacaagcacccggaggtgtggcggacggtgatccgcgacgagcgggtgctgcggtcccggctcgcggacgtgttcctcgatctcgtcgtcgacgaggacgatcagctcgcgttcacccgccccgccgacacgggcgatcacaaggccccgacggtgctgcgcaccgagcgcctcacgttcatggacaccgtgatgctgctggcgttgcggcaccggctgctgcgtgcccagccgggcgagcgggtgatcgtggacttcgacgaggtggcggggcagctggagatgtaccgcgcggcgacgagcaccgacccggccggcttccgcaaacgggtcaacgcgtcgtgggagaagctgaagaagtacacgctgctggcgtcgacgtccacggagggccggatggaggtctcgccggtgttgcggcagttgttcgatgccgatcaggtcgccgccgtcgaggccgagtttcggcgcatcgtcgaggaggacgcgccgtga

SEQ ID NO: 43503 - DNA, 3300 bp, Rhodococcus ruber BKS 20-38
gtgagcgccgcgccgattcaccccggccagttccggctcgcgcgggtgcaggtggtcaactggggcaccctgcacgggcatcacgacattcccgtggcccgcaagggttttctcatcaccggggcgtccggctcgggcaagtcgacgctcatcgatgcgatctcgacggtgctcatgccgggcggcagcgtgcggttcaatgcggccgcgcaggagtcggcggccgggtcgggccgcaacttcgtcagctacatccgtggggcgtggcggcgcgaggccgacgccgacaccgacgcgctcaccgcctcgtatctgcgcaccggcgccacgtggagcgcggtcgcactgacgtacagcgccgccgacggcacggccccggtgaccctggtcaagctcatgcacctgcgccggggcgccaacgccaacaacgagatctcgcacctgcacctgatcctcgacaccgacgtggagttgaccgacctcgaaccgttcgtcgcgcggggaatcgacacccggggcatccgcaagcgctggtccgatgcggtcgtgaaccccagctacgcgccgttcgcccgcgcgttccggtccaagctcggcatctcgtcggaggccgcgcagcggctgctgcaccgcacgctgtccgcgaagagcctgaacagcctcgaccaactgctgcgcgactacatgctcgacgagccgccgaccttcgcgatggccgagcgggccaccacccagttccgcgagctgcgcgaggcgcatcgcgtcgtcgtcgacgcccgtcgtcaggttgagacgctcgagccgctcgtcgcgctggccgatgcccgtcgcaccggcctgcaggcccagcgcgaactgcaggacgagaccgatcacctcgacgcggtgcacgcccggatgacggtggacctactcagcgaccggctcgacgagacgcgggcgcaaaccggtctgttgcaggctgccgcggacaagaccggcgacgaggccgaccacgccggcgaacgcaccctcgatctgcgggtgcgcgccgagagtgccggcgacggccggctcgcgaccctccgcgtgcacaaggagaccgccgagaccgcactcgaacgaatcatccagcagcgcagacggttcgacgtcgccctcgcccactgggaggcagaagcaccggccaccgcggacgacttcgcgcatctgcaggcccagctcgagcgggaactgcgtgagctcgacgcgaccgccgacacgcgcagggccgaactgtacgaggtggccggtgcgctcgccgaaagccggaagacgatccgcgcgctgatcgccgaccgggaagtcctggcccggcgccgctcgaacctcgatcctgacctgctgcgcgcccgggaactggtgtgctcggcggccgggctcgaggaggacgccctgcacttcgcgggcgagctgatcgcggtgcgtgccgagcacgccgagtggacgggcccgatcgagcgggtcctgggcggattcgggcgcaccctgctggtgcccgacgagctgtatccgcgggtggccgccgccgtcgacacccaccatctcggtgcccgcctcgtgtaccggcgggtccgcaccggcgtcggcgcgccggacgcacccaccaccgccgacggctcgctcgtccgcaagctcgaggtgcgccccggcccgctcgccgcgtggctgcaccaccacctggcggaccgtttcgactacgcgtgtgtcgacaccgccgacgacctgcgccgcgtcccgcggggcgtcacccgggccgggcaggtcaagcacggcggcgaccggcacgagaaggacgaccggcgtcgcatcgacgaccgcagccgctgggtcctcggcttcgacaacgaggccaagctcgccgacctgcgtcggcgcatcggcgacgccgagaccgatgtcgacgcgctgcagcggcggcaggaggctctcgagcgtgccgagtccgcgatccagcagcgccggcaggccgccgcggtgatccgcgagtccgcgtgggccgacgtcgacgtcgcggccgcggggaacgcggtggacgcgatcgaggagcggctgcgcgagtggatgcagggcaacaccgaatacgccacgctcaccgcggatctggctcgcgccgagagcgaggaacgcgccgcccggcaggcgcacaccgcggcgcttgccaagctcgaacagcaccgggacgagctgacccgggtgcaggcgcggctcgacgaggcacaggcgcacgccggtgccgcggtgaccgagccgatcgccgcgcgcatccgggcccggttcgccgcggcggtccggcgcgtcaccgtcgacaacatcgaccgggccctgagcacggtgggtcgcgcgatcaacgaggagacgcgggccgcgcagcgcgacaccgcggacgccgagcgccgcatcaccgcgatcctcaccggctacctcgccgagtgggaggcgcgccgcgccgagatgcggtccgaggccgagtacgtcgacgacgccctcgcggtgctcgcccggctgcgcagcgacggcctgcccgcctacgaggacgagttcttccggctgctgcgcgaacagtcgcaccgcaacatcggggagctggcgcgcgcgatccgcaaggcgccgggcgagatccgctcgcgcatcgagccggtgaacgaatcgctgcgccgctcgccgttcgacaccgaccggatcctgcgcatcgacgtgaaggaccggcgctctcccgccgcgtcggagttcctggcggagctgctgcagatcacgagcggcgcgtggaaggaggaggaccgggccgcggcggagcggcggttcgaccagatggcggcggtgctcgaacggctcgactccggcgagcccgccgacctgcggtggaagcgcctcgtgctcgacacccgcctgcacgtcggattcatcggggtggaggtcgacccggagggccgcgacgccaactatcacgactcgagctccggcctgtcgggcgggcaggcgcagaagctggtgttcttctgcctcgcggccgcgctgcgctatcagctggccgccgccggcgaggagttgccgcgctacggcacggtgatcctcgacgaggcgttcgaccgcgccgaccccgcgtacaccaggcgggcactggacgtgttcacccagttcgggttccacatggtgctcgcgaccccgctcaagctgctgcagaccctcgacgactacatcgacggcgtggccgcggtgagcatccgcgacaagcgctactcgcagatcgccctgctgccgatccgcgaggacggcacgtga

SEQ ID NO: 43504 - DNA, 1149 bp, Rhodococcus ruber BKS 20-38
gtgagcgcactgtgcgtgccgccgtccgcggtcgccgccaaggcccaggccgcgtaccgcagccgccgcgcccgatggatcaccgatcccactgctgccgaatcggattcgctgacgattgcgctgcatccaccgtccgaacggcgggtcgcgcaggatcccgacgccgtcgtggcgtgggtgcgggcctggcacggctaccggggcggcggccgggtcgagtgggagacacgacgctggccgagcttcggcacgcaggaagtgccggtgcgcctggtgctttcgggcgcgaccgagatcgccgccgcggccggacgcgcagccgagtggcgcaccctcaccgcacggcaggcgtgtctgctcgacggactcggccccggcacggcgaccctcgcgagcgcgatcgccgcgacgcacactcgctggctggagctggacgagccggacttcgggcggctcgtcgcggccgtgcggtggctggccgagcatccgtcgtcggggctgttcatccgccagctgccggtgcccggcgtcgacaccaaatgggtgtcgcggcaccgcggcctcgtcgagacgctgctcgagggggtgcgcggcgaccgcgacctgggggtgcggtcgctgccgcggatgtgcgaggtggccgtgtgcgaccggacgctgctggcggcgccccggatcttcgcgacgtcgctcgacgagctggcggcactgccggtgacaccggcccgcaccctgatcctggagaacaaggagggcctgcacgcgctgccgcagttgccggcgacggtggccgtgcacggcggcggctacgcggtacacgaactcgcggacgtgccgtggctcgccacctccgacgtcgtgtactggggtgacctggacacgcacggcttcgcgatcctcgaccggctccgcggccacctcccgcacgtgcgcagcctgctcatggaccgcggcaccgtcgagcggtggcgcgaactcgccgtgcccgaggcggcccctgcgccgcacgtacccgcgcacctgaccgggccggaacgcgacgccttcgacgcggtgcgcacggatgggctacggctcgagcaggaacggatcccgtggccgtacgtcgtcgaacagcttgcacggatgtccgaggcacaaccctga

SEQ ID NO: 43505 - DNA, 1524 bp, Gordonia malaquae NBRC 108250
gtgcaattcgacgagatcgtcgctgtccgacggaccagtgcggcgtggcgactcctgcgcgcggacaacgcgccgctggttctgtcgttcctcggccgggtgttcgtcgacgacaacgtccgcgagatctcagagtcaggactgatcagtctcctcgacgacgagctgtactccctcaacaaacgactcggcgacgggacgtacccccgaacgccgaaggggtatctcgacgagtggtcggctccggacaccggctggctgcggaagtactacgtcgtcgagagcgacgaacctcattacgacgcgacgccggcggtcgaacgtgcggtcgcctgggtccggtcgctggccgatcgtgagttcatcggcaccgagtctcgattgaacaccgtcttcgacctcctccgacagatcgtctacggcgccaatgccgacccggacgtgcgcctcgccgagctcaggcgccgtcgcgccgagatcgacgccgagatagaggccgtcgagcgcggtgaggtcagcgtcctcgacgcatcgcggcgacgggaccgctaccagcagttcggtgaggtctcgcgtgcactcctctcggacttccgcgaggtcgaggccaacttccgcacgctcgaccgacagatgcgcgaacgcatcgcgacgtggcggggcaccaaaggcgaactgctcgacgagatcgtcggcagccgcaccacgatcaccgactctgatcagggccgcagcttccaggccttctacgacctgctgctctccgcggaccgcctcgacgaactcgaccagttggtgcgtgaggcacagtccatcgacaccgtcaccgatgcgcgcctgaccaacatccaccatgattggctcgacgccgggacgcgcgcacagacgaccgtccgacgcttgtcggagcaacttcgtcggttcctcgacgaccaggcctggctggagaaccgccgcgtgatggatctgctgcggagcatcgaggcgaccgcgtacacggtccgcgaccagcgcatcgacgacttcacacacgagatcgactcgccgtctcccggcgtccacctgccgatggaacggccgttgttccgccccaccgcgagcctcgaggtcgattccgacggcatcgaggacggcgagtccgacggtgacgccgacgcgctgttcgagcagatccacatcgacccggctccactcatcgacggcgtccgtcgtgctctgcgacgaaccacgcaggtcaccttggccgatgtgctcgcggtgacgccgctgacgcagggactcgccgagctgatcacgtacctgtccctcaccgacgacagcttcaccaagatcttcgacgacacctccaccgagtcggtcacatggaccgacgacgacggcgatgctcggaccgcccgcgtcccccgcgtcatctacacccataaccgatcatcgaacgattcgcccagctcatcgagcacctccccccggtcatcaagcacttacccccggtcatcgagcgcagtcgagatggagaccccatga

SEQ ID NO: 43506 - DNA, 600 bp, Gordonia malaquae NBRC 108250
atgagccgcaccgtccgacgagacgagctgaatctgtctctcgcagtcacgtcgttgatgaagggcgttgtctaccgcgactcggggcagaccacatggcagcacgtggtcggcctcgccgcccaggtcagcgactatgtcgccacacttgggctctcggtcgtgatcgacgaggccgagggctacgcgttcctccgttctcgcagtgacgacgagctcgccgacctcggcatcccccgtctcgtcgcgcgtcatcagctgccgctgcacacgtctctgctgttggcattgctgcgtaagcgtcttgccgagtacgacaccaccgacgcgggcagccgtttggtcctcaccggcgatcaactccgtgaactcctcgcaccgttcttccctgcgaccaccaacgaggcacgcacgacggaccagaccgacaccgcgatccgtcgggtcgccgagctcggattcctgcggcgcatgccgggtcaggacggcgagtacgaggtgcgtcgtgtcatcaaggcatacgtcgacgcgcagtggctggccgacttcgacacccacctggccgagtacgccgcgatcgccggagaggaaacacgatga

SEQ ID NO: 43507 - DNA, 3396 bp, Gordonia malaquae NBRC 108250
atgaccggcctgttctccgccaccgaactgcagtcgaccgagtccgcgaggtccggttttcgactccagaggttccaggttctcaactggggaaccttcgaccagcgggtctggacactcgagttggacggcgagaacggcctgctcaccggagacatcggctcgggcaagtcgactctcgtcgacgccttgaccaccctgctcatgccggcgcaccgcgtcgcctacaacaaggcggcaggcgccgagtcgcgcgaacgcgacctgcggtcgtacgtgctcggctactacagatccgagcgcaacgagggcagcggggcatcgcgtccggtcgcgttgcgcggcatgtcgaactactcggtgatcctcggagtgttcgccaacgagggatacgacgagaccgtcactctcgcgcaggtcttctcgatgcggcacgacagcggacaacccgagcggttcttcacggtcaccgaccgcgctctcgacatctccgccgatttcgccgacttcggcaccgacctccgagcgctccggaagcggctcaccgcgggcggcacccgcatccacgagcacttccccgagtacggtcgcgactaccgtcgttcgctcgccgtccgctccgagcaggcgatggagttgttccatcagacggtgtcaatgaaggcggtcggcaatctcaacgacttcgtccgcgaccacatgctggagccgttcgactcgagcggctgggtcgacacgatggtcgctcatttcgaagatctgaccgcggcacacgacgcggtggtcctggcccggcgtcagctcgacgaactcacgccgatgctcgccgaccatgaccggtacaccagccacgtcgcgatgtcggaggagttgaaggaacgtcgttcggccctccgctactacttcgcgcagcgtcgtgtggacctgctcggagacggcctcgacacctacaatcgcgacctcgcggcgacgcgcagcgcgttggacgccaccgagcgcgacctcgccgaccttcggatcagcgtgcgggaactcgaattccagcaggccggtctcggcggcaacgacatcgcgacgctcgaagcacagatcgcggacgcacagcgtcaacgcgaggagcgggccgccgcgttcgagcggtactccgcacttctcgacgactccggcctcggccccgtcgaagatcgtggacagttcgatcaccgtcggtcggaggcgtccgccgcgatcgacgaactcgacgccgaggtcgcggacgtcgccaacgccatcaccgagctggtcgtcgatcgtcgtcagctcgacggcgaagggcggcgcgtcgcaggcgagatcgccagcctgcgtggacggaccagcaacattcccgagcgcaatctgcggatgcgtgacatgatctgcgccggtgtcggcgtcgggcacgacgacctgccttttgtcggcgaactgatcggggtccgcgccgacgagagccgatgggagggcgccgccgaacgagtgctgcgcggattcggcctctccctgctggtgtcgacggaactgtacgacgcggtgtcgagctggatcgatgcgaatcatctcggtggtcgtctcgtgtacttcaaagttcccgaacgcatgcaggccaagggcgccgcgactcccccgccgaacgccctcgtgcacaaactcgacatcaaagagggaccgttctacgcctggttggaacggcgactcttcgaacgtgcgcggcatgtgtgcgcggactcgctcgacgagttccgatccgctgaatacgcggtcaccgccagcggtcaagttcgctccggcggcggccgtcacgagaaggacgactcgcgccgggtcgatgatcaccgcgactacgtgctcggttggagcaacgagcagaaggtgaacgcgctgttcaccgccgggcagcgagtccaggaggagctcaatcgaatcgacgcggagatcaccgagctcgaagacagccgacgccgctcgatggaccggcgcaatgcgctcaccgggctcgacgcctatccgacgttcgacgccgtcgactggatgtccgtcgcgtcccggatcgccgacctgacgcgccggaagtccgacctggagcactcgtcggacgagttggtcgagatcaccgagacgatcgcatccacccgcgagcagttgtcggcggtagacgcgactcgcgacggtctccgcgacaaggtgtcgcgtctggagatggcgcgcactcaggccgagcagtccagggacacagcgcgcatcaccgtcgaagagcccggcttcggggacgcctcgacccacttcgacgcgatcagcgcagcggtcgacgactaccgcgccaaggtcgacggcggaacagacaccgagctgaccgtcgacgaatgcggagagttggagactgcgctcggcgagtcgttgaccgatgcgtccgagcagcacacgtcacgcgccgggacctaccagactcgcgtcgtgaatcggatgtccgagttcaatcgaagccatccggtgctgaccaccgagttcgacgcagacatcaagtcggccgacgagtaccgcgaactgcatcgtcgactgtccgaggacgatctgcctcgcttcgaggacgagttcaagaactacttgaacaccaatgcgatccgtgacatcgcgatcttcgccgccaagctgaacaaggaagtgcatctcatccactcgaagatcgacacgatcaacgagtcgctgtcgggcatcgagtacaaccccgggcgctacatccgtctcgaggcgaacccgaccacatcgcaggagatccgtgatttccgcgccgatctgcgtcgatgcagcgacggcgagatggagatcggcaccgaggaggagcagtacagcgaggagaagttcctcctcgtcaaagcgatcgttgaacgattccgcggtcgcgagggcttcgccgatatcgatcgacggtggaccgaactggtgaccgatgtccggaactgggtgagcttcgcggcgtcggagcggtacgtcgacgacgacgccgagtacgagaactacaccgactccgacggcaagtccggaggtcagaaggagaagctggcctacacgatcctcgcggcgtccctcgcgtaccagttcgacttgaagtggggcgcgacgtgctcacgggacttccggttcgtcgtgatcgacgaagcgttcggtcgcgggtcggacgattcggcccgctacgcgctgaccctgttcgcgaagctcggattgcagctgttgatcgtcacgccgctcacgaagatctacacgatcgaaccgttcgtgtcggcggtcggctacgtcgagaatcgcggcggcaactactcccagctccaatgtctgacgatcgagcagtaccgcgaatcgcggcgatcccgcgagtcgtag

SEQ ID NO: 43508 - DNA, 1521 bp, Gordonia paraffinivorans NBRC 108238
atggagagttctgccttcccggctcagcacgaggtcgggcgcgcagctgcgccgtcggaatctgcgcaggtcacgctgcacgacgccctcgaggcgaaccgttcgctgcagaagtcggcggccgtccggctgttcgcggcgtcgaactcggctctctacgtcaccttgatggaacgccacctggactacggcgccaagatgagcgaacccgagctgacgatgcgtctcgatcgcgacctcacccagctcgaactctccgacgaccagcccaccggcctcgaactggtcaagctgtgggcgcggcagggctggctgcaccgcgtcaccgacaccagcgaccccaacgcacccaatatctgccacctcaccagcgaggcccgctcggtcctggacttcatgcgccgccagcgccgcgaggactcggtggccaccggcggctcgatcaccggcatcgcctcggagctgcgccgcgtcgccggacaggtcaccaacgatcccgagcagatccgctcggagatcgaggcccagatggaggagctcgacgccgagctcgccgacctcgaggccggccgccgcccgccgccggacctgcgggtcgccgaggactccgcccgcgccatcgcctatcagatggagcagatcatctccgacatcggccagtacggggcgatgctcgaccgcatcaccaccgcgctgctcgacgacccgggtgactccgatctcgcctaccgcgaccgccagcgccagctgttcgacgactacgaggcgctgctgcagtcgtcgcagtcggcgtcgtaccaggcgttcgtgcagatgatccaggatccggagcgtcgtgttcggctgcaggccgacatcgacaccatcatcgagaacttcccgggcatggacgccggactgcggtcggtgatggacaacttcttcagcatcgtgtccgagcagatggccgaggtcggccgcacccggcaacggtgtgcgcgtcgtatccggcgcttcgtcgcgtcgggcaccctcgagcagagccgcggcctggcccggcagctcaacgacgcgctggccaccgccaacgagctgctcaagtcctcgctcgccgaccgccgcctcggctacgagctgccgctggccgccccgaccgtcaactcgatcggacgcctgaccttcgagatccgcgagcacgtgccgcccgccccggcactgcccgcggcccacgacgccgcggacctctcggcgttcgcatcgctgaccggccaggtcgacaccgtcgagctcaccgagaccgtcaacagcgccgtcgccgacgggcccgtcccgctcaccgaggtgatcgaggggctcgacgagccgtacctcgcgcacgtcatcgtgctgtggtcgtgggcgcagaaacaggcgaaaccgggggagaagataccgatgaccaccgtgcgattccggtccctcgtcggggaggaccacgtcatcgacgtccccgacctgacgttcatcgaaccgattccgactgcggaggtcgacgccgaatga

SEQ ID NO: 43509 - DNA, 867 bp, Gordonia paraffinivorans NBRC 108238
atgaccaccaccgacgagaccgtcaacgagggtcccgagaccgccgaggccgatacgccggagacggaggccagggaaaccgacgccttgtcatccgagtacgccggcttcgacgacctgccgaccgtcgcggcgaccgccgcgcagtcgcacgccacgagcgcaccgcgcttcgacggcgacgtcagcgagctgcccgaccgcgcctgctgggcgttgcagaacctgctgacccgtcgctacatctccggcgaccggcagccgcagctgtggtcgtgggtggccgagtaccaggacgcgctgcgcgtgcgcctctctgagctggacctgcgcctgcgcatcgtcgacgagctgcaggtcgcattcgtcgagcaggccggctacgagtcccggtggggccggcggatcctcaagcgcgagaccatccacacctacgacgccatcctggcgctgcacctggccaagtacatccgcgccgcgcgcgacgagccggtgctgatcacccgcgaggagatccacgagctcttcgccggcgtcaccaacaccatcgaccgcgacctcgccctgttcgacaagcgcatcgagcgcgccatcgacaagatggaggaactggagttcctgcgcaagcagcgcgacgacgccgacacctacgtgatcagcccggtgatctcggcggtcatgaccgcctccgtcatcaccgacctgcagcagcagttcgagcagttcatcggctccggcgaggagggggaggagcccccggagggcgccgccgatcccggcgagttggataccgacgatgcccgtgatcacgacggccgggactttgacgacgcggacgcctacggagacgaaggagacgactggtga

SEQ ID NO: 43510 - DNA, 3345 bp, Gordonia paraffinivorans NBRC 108238
gtgagcgggcaggtcgaccagtaccacctgtcccggttgcagctgatcaactggggcgtgttcgacgggtatcactcgatcccgttcagcgccaacggatctctgatcaccggctcatcgggtagcggtaagtcgtcgttgctcgacgccatctcgctggcgttcctgcccgaccaccgccgcaacttcaacgcctcgagcgacgccaccgccgccgggtcgtcgagcggcaagcgcaccgtcggcaagtacgtgcgcggcgcctggggcgagaagcgcgacggcgcgggtgcgcaccgcgaaatcatgtacctgcgtgggaccggtcccgcgtgggcggcgatcgccgtcacctacacgtccacctcgggcacgtcgatcaccggcctggtcctcaagtggctggccgccggcaagatgaccgacgcccacagcgcctacttcatctacgacggcgacgccgacatcgtcgacgtctgcaacgagtgggccgcgtccaaccacaactcggccaagttccgcgagcgcggctggaagggcggccctggcgagggcaagtacctgtcgacgctgtactcgctgatcggcatccgcgcctccgaggccgcccagcagctgctcggaaaggccaagtcgctcaagagcgtcggcggtctggcgcagttcgtgcgggagttcatgctcgacgccccgacgtccatcgtgggcatctccgacgcgctcgagcagatcgacccgctcgtggaggcccgcgagttgctcgacatcgcccgccgcaagcgcaccatcctcggcaacatcgaggagatccacgagcggtacgcgggggagtcggccacgttcagcgtgctcgacacgatcgattccgccaccgttcgcgcgtacgtgaacaacctgcggatccgcaacgccgagccggagatcgccgacctcgacgaccagatcgcccggctcgacggcgatctcgcggcgctgaccacccagcacgaccagctgcgccaggaccacagcctgctgctggcccgcatcgcgacgtcgaccggcgacctcgccccgctgcgcgagcagctcggtggcgcgcagaaactcagcaccgaggtcaccgcgcgacgcaacgcctacgaggacaagatctctgcgctgggcttctcgcccccgaccaacgccgagggcttctggtcgctgcgcgaggaactcctcgaggaggccaccaagctcgacaaccagctcgaggccggccgggcccactacgccgaggcgctcgcgcgcgaggtcgcggcgcgtacccgccgcgacaccgcgcaggaggagctgagccgcgtcgagcaggccggtagcgcgctgccgcgcaccgagcacgagatgcgccgcatgatcgcgcacgcgctgcagatcgacgagtcggagctcaagtacgtcgccgagctcgtcgaactcgaccccgacgaggaacgctggcgcctggccgtcgagaaggttctgcgcaacgccggactccgactcctcgtgccggacaagcacttccgcgccgccctgcgcttcgtcaactcgcacgacatgcgcgggcggatccagctgcaccaggccgagacccggcccatgccggacgtcgagccgggcaccctggcgtccaagctgcgtcccgtcgacccgaagcatccgtgtgccgccgaggcgatgacgatcctggcgcgcctgggcaaccacatgtgcgtcgacagccccaacgagttcggtcagcacgccaaggccgtcaccgaccagggcctgcgcaaggactcggcgaagctcgccgtcaaggacgaccgccagcagctgcgccggtcgcagtacatcttcgtcggtgacgtcgagtccaagatctccgcgctccgcgacgagttggcctacgaggaaagggctttcgaggacgcgcgtgaggactgcgccgagctcgaccgcgaacgctccgccaaggagaagcgccgcgacgcctaccgccgggtgtgcgagcagttcacgcagtggaacgagatcgacgtcgactccgtcgacgatcgcgtcgatcagctcaccgaccagtacgacctcctcatggaggagaaccccgacgtcgaggcgctgcagcgcaaggccgaggacctgtgggagcaggtgcggcacgcgatctcgcaggccgcgctggtgcgggacaagatcgccaagcacgacgagcgccgcacccagctgctcgatctgctcgaccggctcaagcccgaggcgatctccgcgcaggcggagaagaccctcgacggcttcgtcgaggacctgtcggcaacgctcgacgtgctgcacccggagccgtaccgtcaggagatcatgaaggcgtgcgcccgcgagcgtgaccggatgcgctcggacgcacggcgttcgcgcgatgagctggcccgcatcctggacacctatgacaaggagttcccggacgccatccccaacgacagcgacgacttcgacgagcgcatccacgactacgtcgcggtgtgtcggcgtatcgacgagcgcgagctgccggccgcttacgagcggatgcgccgcctgatcaccgagcaggcgccgggcgcgatcctgggcctgcacatggccgccgacgccgaggaacgccgcatcgtcgaacagatcgagcgcgtcaacaccggcctcggtgcggtggcgttcaaccgcggcactcgtctgcggttggtgccgggccgcaagaagctcgccgcggtggaggagctgaccgagaaggcgcgtcagatctccaaccgggcgaccgccgtcagcttcggcgacgagcaggccatcctggagcagtactccgacatcctgctgctgcgtgaacgactcgccggcaacaccccggaggaccgtcagtggacgcgggacgcgctcgacgtgcgcaaccggttcgacttctactgtgaggagctcgacgccgagagcggcgagatcatccgcacctactccaacgccggcgacaactccggcggtgagcaggagaagttgatggcgttctgcctcgccggcgcgctgagcttcaacctggccagcccgaacggcaaggacaaccggccgatcttcgcccagctgatgctcgacgaggcattctcgaagtccgacccgcagttcgcccagcaggcgctgagtgcgttccgcaagttcgggttccagctgatcatcgtcgccaccgtgcagaacaccagcaccatccagccgtacgtcgacaacgtggtgatggtgtcgaagaccgaggccggggcggattcacggccgactgcgtccgcggtgtcgacgacgatcaaggcgttctcggagctgcggcggtcggggagtcagttgtcggtgtga

SEQ ID NO: 43511 - DNA, 1470 bp, Stenotrophomonas maltophilia EPM1
atgaagcatcgcgaacgcattgcccgttaccgccacctgcgcgaacagccccagtggaagctgcttgccgccgaccacgctccggaaatcatcggcctgctgcagggcctgctgatggacggcgagcgcacgctgccgtcctcggtactgaacgagcgactgcagcgcgcgctggaccagctggccggcgatgaactctcgcgcgagctgccgcgcaccgcccaggcctacatcgcgcactggctggcccagggctggctggaacgccgtctgcccgaaggcgccgaccaggagcagtacgagctggcgaccgcggcactgcaggcgatccgcttcgccgacggcctcgagcaggcccgcgtggccgccaccgaaagccgcctggcgctggtcattgagcagctctcggcgctggctgcgcagaccgaagccgatcccgatgcgcgcctgtccgcgctgcacgacgagcgcgaccgcatcgatgccgaaatcgcccgggtcggcaccggccgcgtggttgcgctggacggcaagcgcgcgctggaacgcacccgccagatcatcggcctggccgacgagctgaccgaggacttccgccgcgtgcgcgatgacttcgagcagctcaaccgcgatttccgcgaacgcatcatcgacgacgagggcgagcgcggcgatgtgctgtcgcagctgttcgaaggtgtggatgtcattggcgaaagtgacgccgggcgcagtttccaggccttctggcgcctgctcaacgacgccgaacagagtgcccagctcgatgccgcgctggaagcggtgctggcgcgcggcttcgcccgccgcctggaccgcaacgaacgcaacttcctgcgcagcttcaccagcaccatgctcgagcgcggtggccaggtacacgacgtcctgcagaacttcgcgcgcagcctgcgcggcttcgtgcagagccgtggctacctggaacagcgccgcctcaaccagttgttgaagcaggcgcagtccgaagcgctggccctgcgcgacgaattccccgcacaacgcggcatcggccgcgacctgcagctgaccaccagccgcctgcgctcgtggtcgcagtggaagctgcatgatccgcgcagcgcccaggtcgacggcaatgtcgagtacaacgacgcggccgcgatcagcctggagagcgtcggcgacctggtcgcttcgtccgaaatcgacttccgcaccctgcgccgcgacctgcacgacctgctcgatgcacagccgcggctcagcatcgcccaggccctgtcgcagcgcgaggcgccgcaaggtcttggcagcgtcatcggctatctgtcgctgggcacgcgcttcggcaacgtggtcgccggcgagcaggagcttgcgcaatggcgtggtggcgacggccaggtccgtcgcgcccgcatcccgctggtttggttcacccaggagagacgccatgagctggcatga

SEQ ID NO: 43512 - DNA, 702 bp, Stenotrophomonas maltophilia EPM1
atgagctggcatgaagatcccatcgacgcagcgcaggccgacgtggcggaagacgcctacgaggccgaaccggtggcggccgtggcgcagccccgccgtggcaacgacgtctattacctcggcgacaccgggcgcctgccgctggatgcgcgccgcgcgctgtgccagctgctgatcggccccagcatcgaccagctgcgccacgccaagctgtggccggcactgatccgcagcgaatcggccatccgctcgtcgctggcggacctgttcctggaactggtgctcgaccgtgacagcggcgtggcgttcacccgccaggccgataccgaagacgtcgacgcgccggtgctgctgcgcacctcgccgctcaccttcatcgactcggtgctgttgctgtacctgcgccagcagctggccgaagccgatgcgcgcggcaaccgcgcggtggtcgccgatgccgaaatggccgaagcactggccatctacgaaaagaacctgtccaccgaccgcgccggcttcaaccgccgcgtcgcctcggcggtgcagaagatgaaggacaaccacatcctgacccgcctcagcggccaggaagaccgccacgaagtctcgccggcgctgaagctgctgttctccgccgaagacgtgtcccagctctcggcggtctaccgccagctgcgcgaaaccccggccgccgaggcctga

SEQ ID NO: 43513 - DNA, 3381 bp, Stenotrophomonas maltophilia EPM1
atggctatctccaagcacactcccgccctgttcaacgaaggcctgccggacccgcgcctgcagcagttccgcatgcgccgcctgcaggtgcacaactggggcaccttcaacggcctgaccgaagtaccgatcgccgagcgcggcttcctgttcgtcggacgttccggctcgggcaagtcgacactgctcgatgccatgtccgcgctgctgacgccgccggccatcgtcgacttcaacgctgctgcgcgtgaagccgagcgcagtggccgcgaccgcaacctggtgtcctacgtgcgtggcgcgtgggctgaccagcaggacagcggcaccggcgaaatcgccacccagtacctgcgcaagggcgccacctggaccgcactggtgctggaataccgcgccggcgatggccgcgtggtcagcctggtgcgcctgctgtggatctccggcaacggcacctcggccggtgacgtgcgcaagcactacatgattgccgagcgcccgttcgacatcgccaaggatcttggtgggttcgacctggacctgcgcaagctcaagcagaagctgtccgacctgcaccacttcgacaccttctccgggtacgccgagcgcttccgcgacctgctcggcatcgacaacgagatggcgctgcgcctgctgcacaagacgcagtcggcgaagaacctgggcgacctcaacgtcttcctgcgcgacttcatgctcgacacgccgaagaccttcgacgccgccgagcgcctggtcagcgacttcgccgagctcgatggcgcgcaccaggcggtggtcaccgcccgtcgccaggtggagactctgctgccggcacgcgcctactacaacgacctgaaggaaatgcaccgccggcgcggcgacgacgaagccctcaagctcggcgtcgacagcttccgtgaaagccgccgccaggcgctgatcgaagcgcgcctgcgcgagatggacgtgcgtgaccgtggcctgctcggcgaagaagcccagcgccgtgccgcactggacaaccacaccgagcgcctggccgaactggaactgcagcgccgccagcagggcggtgagcgcatcgaagaactggaacgcgagcagggccgcgccgaagccgagcgcgaccgccgccaggccaagcgcgagcaggcaagcctggccgcgcagcagctgggggccgaactgccggacgacgcacacggcttcgccgaactggtcgagcgcgcacagaacgagctgcaggaccgccagcgcgcctcttcggcgctggacgatgcgatcagcgatcgcctgggtggcaagcgcgatgacgagcgccgcttcggggaagtccgtgcggaactcgaagcgatgcagcgcacgccctccaacatcccggcgccgatgcagaagctgcgcgcgcgcctggccgaggaaaccggcatcgctgaagcggcgctgccgttcgtcggtgaactgatccaggtccgctcggaagagcagggctggcagggtgccatcgagcgcgtgctgggtggcttcgcgctgtcgctgctggtcgacgacaagcattacaacgacgtcgccgagtgggtgaaccgtacccacctgggcatgcgcttcacctactaccgcgtgcgccgcaacgatgatgcgttcgcccgtgagccgtcggcgaagtcgctgctgcacaagctggaactgcgcgaacacgtgttcgaaagctggctgcgccgcgagctcggcaagcgattcgactacgagtgcgtggatgccaagcagctgcgcaacgtcgaccgcggcatcacccgcgaaggccaggtcaagcatccgggcgaccgtttcgagaaggatgaccgcagtgcggtgggcgaccgccgtcgctggatcctcggcttcaacaaccacgacaaggtgggcgccttcgagcgcgaagctcaggaactggccaagcgcatcgccagctgcgagaccgacatcgcgcgcctgcgtgggcagcgtgaccgcgacaacgaacgccgcctggcctgccacgagctggtcagcatcagctggaacgagatcgacatcgccgccccgcagcagcgcctgagcgacatcgaggccacgctgcgcgacctgcgcgaaggcaatgccgacctcgccaagctggccaagcagattgacgccgtgcgcgccgacatcgagcaggcccgccgcacctatgaagacgtccgcgtcgagcgcgggcagctggtcaaggaacgcgaccgcctggaccgcgcgcgccagcagagccgtgcgctggtgctgccgagcctggcccaggagcaggaagccggccttgccgagcgcctgcaggagcagggtccgctcagcctggaaacgctggaagcgcacatgcgccaggtcagcaacgcgctgaacgagcagctgtcgtcctcgcagcaggacctcaaccgcatcgagaaccagctgatcggctgcttccgtcgcttcatccagcaatggccggaggaatcgggcgacttcaccgtgtcggtggcctcggccgaggacttcctcgcacgcctcgaacgactggagcgcgatggcctgccgcagcacgaagagcgcttcttcgatctgctgcagaaccagagcaagaacaacctgctggccctgcagcgccacagcgccgaggcccgcaagtcgatcggccagcgcctggacgaagtgaacgccagcctggaacaggtgccgttcaaccgcggtacgctgctgaccatcgaactgagcgaccgccgcctgccggaagtcggcgagttccacctgcagctgcgcgaagtgctgtcgcagcagcagaccgagcagcgcgagctggccgaatcgcagttcaccgtgctgcgccagctggtcaaccgcctgggctcgcaggaaggcgaggacaagcgttggcgggagctggtgctggacgtgcgcatgcacgtggagttcatcggcgtcgagctggatgcggaaacgcgccagcaggtcgagatctaccgcagcggcgccggcaagtccggtggccagcgccagaaactggccaccacctgcctggccgcggcactgcgctaccagctcggcggtgccgacagccagctgcccagctacgccgcagtggtgctcgacgaagccttcgacaaggccgacaacgagttcaccgcactggcaatgaacatcttcgacaacttcggcttccagatggtggttgccaccccgctgaagtcggtgatgacgctggaaccgttcatcggcggcgcctgcttcgtcgaaatcagcggtcgccacgactccggcgtgctgctgatcgagtatgacgaggaaggcaagcgcctgaagctgcccgagcgcagccgccagcaggccaacgaaccggaagaagccgaggcctga

SEQ ID NO: 43514 - DNA, 1485 bp, Rhodopirellula sp. SWK7
atggatgaacaggctcagcgattgattcaactacgacggcatcatccggcttggatgttgcttgcctcgaccaatgggccgttgatggcggctagcatgaagtcgttgattgatgcgcatccagccgggattgagctggagtcggctgttgagcatttggctctcgcgatggccgattatgccaacgacacccagttcgacattggcgaagatcatgccttgtccgcgaggcgggaacttcgatcctggattcgccgtggtttgatcgtcgaacgcggtggtgaattattggcgaccgacgcgttgcaaaaggtatgtgattttgtcgactcgctgagcgatgaaacgatgacgtcaaccgcgtcacgcttggcaaccgtgcagcgagccatcgaggaactgcagtcaaagctcagttccagccaatccgggcgtgagcgtattctgcgtgaacggatcgagaaccttcaagagcagctggcggaggtgcggtcaggccgctttgaagtgctccgtggcaaacccgccgaggaaggcatccgcgaagtctatcaactggcgatcagtttgcgtgcggattttcgtcgcgtggaggattcctaccgcgaggctgatcgaacgcttaggcaacgtgtgctgagtgagcagcagaaccgtggccaagttgtcgacgaattgcttgatggtcacgatgcgctggtggcgacaccggaagggcaagtgttcgagagctttcacgaacaactcgtcaagtcagcggaacttgcccgcatgaaagagcggctacgggcgattcttgacaatgagaatacgaaccggtcgctgacgcgtcggcaacgagccgaccttcgtaaattggtcagccggttggtcgccgaatcggaacgggtgatccaagcccgggccagtagtgagcgtgacgtgcgcggattcctcaagtctgggttggcggacgagcaaattcgtgtcggagcgatcttgcaagacatctttcgcgccgccctggacgtcgattggaagtcgcaggcgatccgccgaacacccggaccgttgccgccgatcggcgttgccattccaggcttgcccgtgatcgagcgtttgttggtcaaacaaattcatggcgacagcggcgatgatctggacctgacagtgtccgaaggcgatcccgcagcgatggatgacgagttctggcaagcttttcactcgttggatcgtgccaagctatttgaggaaactctcgatcggctacagaaggcgggaaaaccgctaacgattcgcgaattgtccgacgccctgccgccaacgcacgatttggaaacgctgtcttattggttggcactcgcacgcgaggcaagtgtttcggttgatgaaacaaccgagtcgattgaacttttcaatgatggcatcgccacgcgttttcatgtgccgctggttgagattgatgcccacgccaccgagcaactcgacccaggacgtttggaatga

SEQ ID NO: 43515 - DNA, 726 bp, Rhodopirellula sp. SWK7
atgagcaatatcttcgattcaatggtgcccgatccagactcgcagcgaaccgaatcggatttggtgacgcaggctgacaatccggatcacgatgcggaccaccgtgttacgttcggtacgccgtcagacatcaagcaagtaattggcgaattgctgaagtccggcgtgattgacgagtccgcgaagacggacttatttcgacgttgcgtgacacatcaaacgatcatcgacgagaaactggaacccttggatttgtcggtgcgtcttgatgaacaccgaggcgttgccttcgttgtcgtggcggattctggcaaggatgccgttgaatcacaggatgcggatgaatggtcgcatccgctggtccgccgacaacggctgacgcttgagcagtccttgctgatcgcgatccttcgtcaagcctttgtcatgcacgaacaggagatgggggttggtcagaccatggtcaaggtcgccgtcgatgagttgctaccgcagttcatgacatacctcggcgattcaggcagcgaccaaaaaaatgagagccggctgttaaatcagctcgatcacttaaagggctatggcgttgtctcagcagtggacaaaaaccaagaagtgacgattcgtccgctcatcgcccacttagcgaatccgcagtcgttgaaggcgctcttagaagtcttaatcgcccaagccgatgccgtcggtggtgaggaatcttctcaatga

SEQ ID NO: 43516 - DNA, 3330 bp, Rhodopirellula sp. SWK7
gtgccaacgcagaaaccaactcaacaagaaacgctattcgccaacgagcccgaaccggcgcaggacgacaccacttaccggttgacgcaattggaagtcttcaattggggtccgttttctggattgcatcgggccgattttgacatcggcggcacagcggtcattggccccaccggcagtggcaagaccacactgatcgatgcgttgatgacgttgctggtagcacagccacgctacaacctcgcctcaaccggcggggtcgaaagcgatcggtcgctcgtgtcttatgtgcgaggtgtcttgggtggcgatggaagtggcggcaatgaagatgtttcgagaccgggcaaaacgatgacgggcatctgtgcctgctatcagtcgcagcatgaaaccgacgaaccccaaacactgcgattgggcgggctgctgtggaccgatggaccgagcgattcaacctcggatttgaagcgtcgttggatgttctcgctggccggcgatcaaacgctggaggggtggcttcaagtgctgcacgaagaaggtgcacgcgggatttccaagctcggacgcgagactccgcagttgcgagtattcgacagcaagaaaccgtatcttgcgcacttgcgaaagttctttgacgttagcgaaaacgcgttcacgttgctcaatcgtgccgctggtttgaagcaactcaatagcatcgacgaaatctttcgtgacctcgtgctcgatgacgctgcggcgttcgaccgcgcgctggaagtggccggtgagttcgataacctcgccgacattcacgccgaattggaaaccgcaaagaagcaacatcaatcgctgttgccaattcggcatgaacatgacgaactgaagaagctgaaccaaaagaccaccgcactgcagacgctcaagcgaattctgccaacgtactttgcgattcgatgtgaattggcttgggccgcggagctgcagcgcatcaacacggagcgtgatgcagccaacacgcggctatatgcacgacagaatgacttggcgatccagcaaaccaagacggacacgctgaaagagagttatctgaagctgggcggaaacgtcattggtgaattggagaagacgattgaagtgctgcgacgcgtagtggtcgaacggactcggcacgcagatgactaccgccgcctgatgcggtcattcgacttgagcgaggatctgacagcagattcgctacaaaagaatcaaatgatcctgaaagaacgtcgcaaggaggtgcaaactgctcgcgaagcccaggaagaacgaactctgtcggtgcttgcatcgcaacaaatccaaaacaaggaagttgccgaactttcggagtcgcttcgcaaggtgaaagaacgtcccgcatcgaacattcctcctcgttttggcgactttcggtctgaattggcgattcagctcaatctacccgacgaggaccttccgttcctggccgagttagttgaagtaaaggctaatgaatcggcttggcgcggcgcgatcgagcgggcacttggttcggaacgattgcgggtgttagttcccgaaaagcatttgaacgaagcactgcgcttcgtgaattcacgaaacaatcgcctgcacgttcgtttgcagcgagcacgaaccgacgagccatcgcccaattttttcgatgacggatacgctcgcaggctgaactttaaatcgcacccgctgattgaaacggcgaaatggttgattggcggtcgcgacttgcactgcgtttcttcgcccgagcgtttacgcaacatcgagcacggcctgaccgtcgagggaatgatgtctggacgagccggccgattcgacaaacaggaccgtcgccgaattgatgaagattggatgacgggtttcgacaaccaagctcaacttaaaatgctggtcgaacaattgaccaccttgcaggcaaacattcagcaatttgaatccgaggcgaagcgagagcgaagcaaactgaacgaaatcgacggcaggttgaccatcatcgaccaacttctattgcttgagtttacgacgattgattcgcccaatgccacagcggagctcgaaagcagcgaatcgcgattgcagcgtctgttggatcccgactcggatgcaagccgagcaaaggccgagtacgagatccagcggaaagaactcgacacaatcgcaggcgaagtttcgtcgatgcaaagtcagatcgcggttctcgcaagagacgccgacgaatcagacaagcaacgcgagcgggcaaagtcccgcgtcggttcgggactatcaccggaggaaaccgctctggcggatcgcaaattgagcattgattcggccgccagtgcggctgacctgtccgacatcgaacggcactacttcaaactggtcgatgacaagctgcacaaatcgcacgacaaggtccaggaccaacaacaacgcttgatccgcttgatggctgcggcgaaacaggtagataccggagctttggtggagagcggtaccgagatcagcgatatccccgattacctcgaccgactgcgggtgctcagcgaagaagcgttaccagagaagcaaaagcgatttcgcgaataccttaaccagtcttccgaccaaggcgtgactcagatgcttgccgggatcgaagaggaagtcgatgcgatccagcaacgcatcacggaactaaatcacacgttggcggaggtcgactttcgatcgcatcggtatttgcaactgctgccgcaaaagatcaagcacgagcgtttgcgtgctttggaaacggcgatgcggaaagtccgttcgtcggccttgaaagacgacgagggcatcagccactacaaatcgcttcgagaacttgtcgaaatcctgcgttccgctgccgacaatcggcgacaacttggttcgaaggcgttgctggatccgcgataccgcttggcgttttttgtcgtcgaagtcgaccgaaagacgggagaccgaagccagccacgcacgggttcccaaagcggcagtggcggcgaaaaggaattgatggccagccatatcctgacggcttcgctcagttatgctctttgccccgccgaagcgtcgcggcctttgtacgggaccgtcgttttggatgaagcgttttcgaaaagttcaccatcggcggccaaccgcatcatcgatgcgctacgaatctttcacttacatcccatctttgtcacgcccaacaaagaaattggattgctgaagaagcacactcgacgtgtcatttgtgttcagcgacaggggacatccagcacgctggcgtcaatctcttgggaagttcttgagggcttggcaaccaaatcatga

SEQ ID NO: 43517 - DNA, 1152 bp, Rhodopirellula sp. SWK7
atgaagtcccccgaagacctccgcggcctgctgagacgtcagtgggaaaacgccgatcatcgcgagcgtcggttactgggcgatagcgatgcgtggccgatctcattgtcgatcggcgtcccgtccgcgagtgaactgacgtcgaagttggacgccgtcaagaagcatgtggaagcgtggcgaaacgtcaaagtcggagaagtcgcatgggagccgaagcaatatcgcgcctccgacgatgctgtcgacgttcctgtacgctggttgatcaaaaaacccagtcactggcttgccgcttgtggcgattcggcaatgaaaaatgagtttgagacgctcgccgaattgataagcaacagcgatccgctttttcattcagccttcattcgtcgacgttcgctctggcaaagcaaacccgtacacgaaatcgtgcttgccgcaaccgttgctatgcaacttaatccgggcgccgcggcgggaaagccgctgcggttgctatcgcttgaaggcgtcgacaccaagttctttgaacgcaatgaaagcctagtccgtacgttgctcgacattcgttttgacggcgaagtcagctgcattggattagaaaccttcctagacgcattcaacgaaaaggaccattggctattggtccttgatctcgacggcggactacttccctttcgttcgcagcgcgtcagcgtgaaggaactcggtcgttgccggttgcccggtcaaaacttggtcgttattgaaaacgagtgctgtagccaccttttacccgcagttcccgacacgctcgcggtcttgggtgcaggctttgacctggcctggcttgccaacccgttgctaccggagaagcaaatcgcctactggggagacgtcgacacgtggggtttgagtttcttgtcgagagctcgtggtttgcttccgcgaactgctgttctgctcatggacagcaaaaccttcgaagaccatcgcgaccgcgccgtcccagaacccatcacggccagtccagaccctgctgaatcactgacaccagccgagcaagcactttaccgaaggttgctaacagaaagtcggggaagattggaacaggaatacctaccaagaagactggtgcatgacgccatccattcgtggttagcaacctcacgataa

SEQ ID NO: 43518 - DNA, 1470 bp, Stenotrophomonas maltophilia AU12-09
atgaagcaccgcgaacgcatctcccgttaccgccatctgcgcgaacagccccagtggaagctgctcgccgccgaccacgctccggaaatcatcggcctgctgcaggggctgttgatggacggcgagcgcacgctgccgtcgtcggtgctcaacgagcgcctgcagcgtgcgctggatcagctcaacggcgacgaactgtcgcgcgagctgccgcgtaccgcgcaggcctatatcgcacactggctggcccagggctggctggaacgccgcctgcccgacggtgccgaccaggagcagtacgagctgtcgaccgcggcactgcaggcgatccgattcgccgacggcctcgagcaggcccgtgtggccgccaccgagagccggctggcgctggtcatcgaacagctctcgcagctggccgcgcagaccgaatccgatccggacgcccgcctgtcggcgctgcgcgacgagcgcgaccggatcgacgccgagatcgcccgtgtcggcgccggccgtgtgatcgcgctggacggcaagcgcgcgctggaacgtgcgcgccagatcatcggcctggccgacgagctgaccgaggacttccgccgcgtgcgcgacgacttcgagcagctcaaccgcgagttccgcgaacgcatcatcgacgacgagggcgagcgcggcgatgtgctgtcgcagctgttcgaaggcgtggacgtgattggcgaaagtgatgccgggcgtagcttccaggccttctggcgcctgctcaacgacgccgagcagagcgcccagctcgatgccgcgctggaagcggtgctggcgcgtggcttcgcccgccgcctggaccgcaacgaacgcaacttcctgcgcggcttcaccagcaccatgctcgagcgcggtggccaggttcacgatgtgctgcagaacttcgcgcgcagcctgcgcggcttcgtgcagagccgtggctatctggaacagcgtcgcctcaaccagctgctcaagcaggcgcagtccgaagcgctcgctctgcgcgacgagttccccgcacaacgcggcatcggccgcgacctgcagctgaccaccagccgcctgcgctcgtggtcgcaatggaaactgcacgatccgcgcagcgcccaggtcgatggcaacgtcgaatacaacgacgcagccgcgatcagcctggaaagcgttggcgatctggtcgcttcgtccgaaatcgacttccgtaccctgcgcggcgacctgcacgacctgctcgatgcacagccgcggctcagcatcgcccaggccctttcgcagcgcgaagcgccgcagggtcttggcagcgtcatcggctacctgtcgctgggcacgcgcttcggcaacgtgatcgccggcgagcaggagcttgcgcaatggcgtggtggcgacggccagatccgtcgcgcccgcatcccgctggtttggttcacccaggagagacgccatgagctggcatga

SEQ ID NO: 43519 - DNA, 702 bp, Stenotrophomonas maltophilia AU12-09
atgagctggcatgaagatcccatcgacgcaccgcaggccgacgtggcggaagacgcctacgaggccgagccggtggcggccgtggcgcagccccgccgtggcaacgacgtgtactacctcggcgataccgggcgcctgccgctggatgcgcgccgtgcgctgtgccagctgctgatcggccccagcatcgaccagctgcgccacgccaagctgtggccggcgctgatccgcagcgaggcggccatccgctcgtcgctggccgacctgttcctggaactggtgctcgaccgcgacagtggcgtggcgttcacccgccaggccgataccgaagacgtcgatgcgccggtgctgctgcgcacctcgccgctgaccttcatcgactcggtgctgctgctgtacctgcgccagcagctggccgaggccgatgcgcgcggcaaccgcgcggtggtcgccgacgccgagatggccgaagcgctggccatctacgaaaagaacctgtccaccgaccgcgccggcttcaaccgtcgcgtcgcatcggcggtgcagaagatgaaggacaaccacatcctgacccgcctcagcggccaggaagaccgccacgaagtctcgccggcgctgaagctgctgttctccgccgaagacgtgtcccagctttcggcggtctaccgccagctgcgtgaaaccccggccgccgaggcctga

SEQ ID NO: 43520 - DNA, 3381 bp, Stenotrophomonas maltophilia AU12-09
atggctatctccaagcacactcccgccctgttcaacgaaggcctgccggacccgcgcctgcagcagttccgcatgcgccgcctgcaggtgcacaactggggcaccttcaacggcctgaccgaagtaccgatcgccgagcgcggcttcctgttcgtcggccgctccggctcgggcaagtcgaccctgctcgatgccatgtccgcgctgctgacgccaccggccatcgtcgacttcaacgccgctgcacgtgaagccgagcgcagtggccgcgaccgcaacctggtgtcctacgtgcgcggcgcgtgggccgaccagcaggacagcggcaccggcgaaatcgccacccagtacctgcgcaagggcgcgacctggaccgcgctggtgctggaataccgcgccggcgatggccgcgtggtcagcctggtgcgcctgctgtggatctccggcaacggcacctcggccggcgatgtgcgcaagcactacatgatcgccgagcgcccgttcgacattgccaaggacctcggcggcttcgacctggacctgcgcaagctgaagcagaagctgcccgacctgcaccacttcgacacgttctccggctacgcagagcgtttccgcgacctgctcggcatcgacaacgagatggcgctgcgcctgctgcacaagacgcagtcggcgaagaacctgggcgacctcaacgtcttcctgcgcgacttcatgctcgacacgccgaagaccttcgacgccgccgagcgcctggtcagcgacttcgccgagcttgatggcgcgcaccaggcggtggtcactgcccgccgtcaggtggaaaccctgttgccggcgcgcgcctactacaacgatctgaaggaaatgcaccgccgtcgtggcgacgacgaagcgctgaagctcggtgttgacagcttccgcgaaagccggcgccaagcgctgatcgaggcgcgcctgcgcgagatggacgtacgtgaccgcggcctgcttggcgaagaagcccagcgccgtgccgcactggacaatcacaccgagcgcctggccgaactggagctgcagcgccgccagcagggcggtgagcgcatcgaggaactggaacgcgagcagggtcgtgccgaagctgagcgcgaccgccgtcaggccaagcgcgagcaggcacgccaggcggcgcagcagctgggggccgaactgccggacgacgcccatggcttcgccgaactggtcgagcgcgcacagaacgagctgcaggaccgccagcgtgcctcctcggcactggacgacgcgatcagtgaccgcctgggcggcaagcgcgatgacgagcgccgcttcggcgaggtccgtgccgaacttgaagcgatgcagcgcacgccctccaacatcccggcgccgatgcagaagctgcgcgcgcgcctggccgaggaaaccggcatcgccgaggcggcactgcccttcgtcggcgaactgatccaggtccgctcggaagagcagggctggcagggtgccatcgagcgcgtgctgggtggcttcgcgctgtcgctgctggtcgacgacaagcattacaacgacgtcgccgaatgggtgaaccgtacccaccttggcatgcgcttcacctactaccgcgtgcgccgcaacgatgatgcattcgcccgtgagccgtcggcgaagtcgctgctgcacaagcttgaactgcgcgagcatgtgttcgaaagctggctgcgccgcgagctgggcaagcgcttcgactacgaatgcgtggatgccaggcagctgcgcaacgtcgaccgcggcatcacccgcgaaggccaggtcaagcatcccggcgaccgtttcgagaaggacgaccgcagtgcggtgggcgaccgccgtcgctggatcctcggcttcaacaaccacgacaaggtgggcgccttcgagcgcgaagcacaggagctggccaagcgcatcgccagctgcgagaccgacatcgcgcgcctgcgcgggcagcgtgaccgcgacaacgaacgccgcctggcctgccacgagctggtcagcatcagctggaacgagatcgacatcgccgctccgcagcagcgcctgagcgatatcgaagccaccctgcgcgacctgcgcgaaggcaacgccgatctcgccaagctggccaagcagatcgacgccgtgcgcgccgacatcgagcagtcccgccgcacctatgaagacgtccgcgtcgagcgcggccagctggtcaaggaacgtgatcgccttgaccgcgcacgccagcagagccgcgcactggtgctgccgagcctggcccaggagcaggaagccggcctcgccgagcgcctgcaggaacaggggccgctcagcctggaaacgctcgaagcgcacatgcgccaggtcagcaacgcgctgaacgagcagttgtcgtcctcgcagcaggacctcaaccgcatcgagaaccagctgatcggctgcttccgtcgcttcatccagcagtggccagaggagtcgggcgacttcaccgtgtcggtggcctcggccgaggacttcctcgcacgcctcgaacggctggaacgcgacggcctgccacagcacgaagagcgcttcttcgacctgctgcagaaccagagcaagaacaacctgctggccctgcagcgccacagcgcagaggcccgcaagtcgatcggccagcgcctggacgaggtgaacgccagcctggagcaggtgccgttcaaccgtggcacgctgctgaccatcgaactgagcgaccgccgcctgccggaggtcgctgagttccacctgcagctgcgcgaggtgctgtcgcagcagcagaccgagcagcgcgagctggccgagtcgcagttcaccgtgctgcgccagctggtcaaccgcctcggctcgcaggaaggcgaggacaagcgctggcgcgagctggtgctggacgtgcgcatgcacgtggagttcatcggcgtcgagctggatgcggaaacgcgccagcaggtcgagatctaccgcagcggcgccggcaagtccggtggccagcgccagaagctggccactacctgcctggcggctgcgctgcgctaccagctcggcggcgccgacagccagctgcccagctacgccgcggtcgtgctcgacgaggccttcgacaaggccgacaacgagttcaccgcactggcaatgaacatcttcgacaacttcggcttccagatggtggttgccaccccgctgaagtcggtgatgacgctggaaccgttcatcggcggcgcctgcttcgtcgaaatcagcggccgtcacgactccggcgtgctgctgatcgagtacgacgaagagggcaagcgcctgaagctgcccgagcgcagccgccagcaggccaacgaaccggaagaagccgaggcctga

SEQ ID NO: 43521 - DNA, 1458 bp, Leptospira noguchii str. Bonito
gtggactataaccttttgcaaagattatttcgttcttcttcaattcgtcttttaaaaaaagacaatgctccttttattatctattttttagaaaaatattttagaggttctgcgagaatttttgttccgtttgaggaactgaaaatactactccatcatgaattggaaaactttcgagaactcgaggaaacttttctctcaagaacagcggaagtttatataggagagtgggtcagcgaaaattttctatctcgccggattcgttctttggaaggttccgaagaaataattttggaaccgagtagcgagttagaaaaagtattttcttggatggatgatttacgttctttagaaaataaagaatcaatcggaacagaaactcgatttttttctgtgttaaataaactgaaggaaattgttgaagaaagtgtttccgatccaaaagaaaaaattagacaacttgaatctaaaaaagacgaattagacgatcaaattaaaaagctaaccgaagggaaagagataatcacttttgcgagtgagagaattcgaggccaatacttatatgcaaggaaagaagcaataggtcttctctccgacttccgtcaggtggaaggtaattttacggaaataacaaaattcattcacaaaaagtatttagaagtcgttcaaaaaggggaaatattacaatttgctctcgacggtgacgaggaattgctccaatcagaacaaggtaaaagttttcaagctttctgggactttctcaggtccgaacaaagccaagaaaattttgaaagtatattagattctctttattcattaaaagacatccttgtcttggacgacagaaagttttttcgaaatttcaaacggaatctaagagaagccggatccaggataaacgctgttgtttccagaatgtcggaacaacttaagaaaagtcttgtagagcgtacacttcgcgacaatcgaaggtctaaagcaattatttcggaaatcaaacatcttgttttggaaaaaaagttcgatctttcggaagaaaacttttattcaatggaagaaatattcgttcatcttccgatggacaggcccctttggaaaggggattctgcggatactccaagatccattcaaatatccgggcctgacgacgaaatgatttctctagattttttagactcgattcgaggaatcaattttgaaatatacgaacaacgaattcaaacattgcttcgtagttttccagaagtttctctagaaaaagttttggaggagtttccagagaatatcgggtttgaaagtatcgtagcatatgtttttatagctagcaagggggaatatcattctttggacgattcagaatcttttcttttttatcccgcgttcaatttcacacaaaaagaaactcagagtgtctatcgtgttcccaaagctacttatagagtgggtaaggatggataa

SEQ ID NO: 43522 - DNA, 564 bp, Leptospira noguchii str. Bonito
atggataaacttctttcttattctatttccatattaaggcttttgaaaggttcaatcggaatcgattcggaccctaaggtttgggaaaatctagttacctacgaaaaacaagttcgggaatactttgaaaaaatcggaatatttttacatttagatcgagaagacggttatgcttttttgcgtcaaacttcggacgaagatgatgttgagttcgatataaaacttccggttttaacgaggaagctacctttgacaaaggaggaaaccttgtttcttattttactcagagaatttattatcgagatggaagaaaaagatttatccggatcgattattctgagaaaagaagaattattcgaccgtattcatccattttttcctgactctttcgacgaagtcgatactcaaaaaaagtttgaaagattacttcgtaaatccgaggacctgggttttataaaatacatcgattctgaaaccttacgaatagaaaaaattttaaaagcgaagatcacagtatccgatttggaacgactacgaattaagtttaaaccggagaatgtatga

SEQ ID NO: 43523 - DNA, 3357 bp, Leptospira noguchii str. Bonito
atgacggatttattttcttccggcgagattactgcaaatacaggatatagattaaagtctcttgaaattctaaattgggggaccttcaacggtaaaatctggaaattgaattcgcaaggagaaacttttcttttaacgggagcaaacggatccggaaaatcgactttggtggatgcaatccttaccttactggttccctctactaaaagaaattataatttagcctcgggcttggagagtaaaaaacgggatagatcagaaaaatcctatgtggaaggacactatggccgagcttcctcaggcagcgagggaatccttaaaatccgaggaaaacaggaagaatgttattccgttctttcagccgttttcaacgctaaaggaaaatttcctattatcagaattgctcaaattttttggtttgaatccagcgacttaaaaagaatttatctcatttccgacgatagcttggatttcgaaaaagatttggttttaagaaatagaaccatcaaggaactccgatctgatctaaaaaattcgggcgccaggctttatgataatttcaaggcttacggggttgactttagaaagatggtcggtctgggatctgagaaggcgattgatctctttaatcaaattgtagctataaaatcattaggtgttttgaatgaatttgttcgagaacatatgctcgaagcgaaagacaaaagatttagaatcgaagaattggacaggaatttttttgatttgaatgaaacatatgaaacgattctaagtgccagagaacaattacgactcctggagcctatagaaaaaaaagcattcgaatacagggattggaactctaaagtagaaggggttcaggaacttattttgtttgcacccgaatactttacgcaaaaaaaatacgaactttgtaaaaagaaagaacaggattatactctcgatttgttccgagttcaggaccacttaaaagaattaaattcgttaactgaatccttaaaaaaagaagaacgagaattgtattattcattagaaaataatgatactcgaaagcgaatttccgatttgaaaagaaaatttgaggaaattcagacaaatctaaataaacgtcgctccgaaagggaaaaatattccgagtatcttcttaaacttgatttagagaacgttttaatagaggattctttttattcgaattttcgtaaagccggcgaaaaacttcaaaaatccgattcgacccgtgattcaattagagatcgtcttacggatttaacagttaaacggaaggaatctaaagttgaatttgattcggtttattccgaattggaacatctcaaaaaaagcagggataatcttcctagaatcgtgtcctccatgagggaaaaaatctctcaaggcctgggagtttccgaaaaaaaatttccatttgtctgtgaacttatccgtgtaaaggattccgagaaagaatggaccggcgcgttggaaagattattacataatttcggcttacgtatgttagttgacgaagaggattacaaagcgctttcctcttatgtgaattcttctcatctaggtggaaagatcgttttttccagaatgttgactcagggaggtcctattttacagccaaaggataaggacgaagttttttacaaactcgaaattaaaccttccttatctaaatttcaaaaagaatggctggaaacacagattctgaaggaatttggacatatctgcggggatctacaacgtttgcaaaaagaagaaaaagctcttactaaggaaggtctgatcaagtccggaaaaattcgtcacgaaaaggatgatcgtaaaaatataaacgacgcaagagattatattctaggctggaacaatcgggaaaaaatttctgcgcttgaatccgaatttatgagattgggcaaggtgatcgataagattgaatcggaaattaaaaaagttgaagaagaacaaaaacaaaacgacctatttagagacgacctcaaatcctttctacgcttcgaacagttctctcaaattgacgaccaaagtttggaagaacctcttgaacaaacacgaaaagaaatccaagatttggaagtcctttccgaggaatacggaaaattaaaagaacaatatgaatctgcaaaagttcgccttagcgaggcagagggcaaggaaaaagaaaccaccaaggaattgaccctcttagaagagcggttttcgaatttagaaaaagaaatagaaaccttaaattccagaatcaaagagttcgaccctaacagacggactcgtttggaaccgatcttaaatgagcgtctcggacaagtaatctttaacttagattcgatcttagaaaaagagcgaaagtttttggaagttcttattaaagaacgagatgattttatagagaaaagagattctatcggtgaagaattaaacaagggtatggatcgttatgtaaaaaaatttagggaagaagcggatcgagaagaattatcggtttctattttaaatgcagaagcatttgcagaattgacggaacggattcgtaaagataggctgcctgagttccaagataaattccgaaatatgatgtcagataaggtagctaaacaaattctagagtttaaggcggaacttgaggatgatgtttcagaaatcaaggaccggatagatgaactaaatgaatctttacgttatcttgactattctaaaggtaaatcttatattcaaatcagatacttcgaaacaaaagatcgggaaattataggaagtacaggttttaaagaattattgcggaatagtattccggatatgggagatagttctaataacgaagaaaatttttcaaggattcgagaattactcgggaaattgaaaggagagaatggatccgatcgttggtccaggctcgtaacggattctagaaattggttggactttcaggcggcagaatttcaaagagacacagacacgatcattcaggtttatgattcttcggcaggtaagtcgggtggtcaaactgtaaaacttgcctatacaatccttgcctctgcgattgcttatcagtttaaaatccgcgagctaaattcgtttcgttttgtagtgatcgacgaaatgtttaataatttggataacgaaaattctagatacgctatggatcttttccgtcaattaggtttgcaattactcgttgtgaccccgatggataaaattacggtagtggaaccttacgtccagagtgttcattttgtaaaaaacaactcagatggtaatgattccagagtttatctaattacaaaggaaaaattaaattcggagaaaatcgaaaatacagatcggaaagtgggaaatttatga

SEQ ID NO: 43524 - DNA, 1170 bp, Leptospira noguchii str. Bonito
atgatttctctggaagaaatccgtaagaaatgtttattatattatcataaagttttaaatcgagcggtcttaggtgagaagtcttttccttgggaaatttccacaggcaaaatagatcccggagagataatacacaacccgtctttactagaaaaaataaaaaaggaatctaaggaaaaaaaaggatttgggtttctgctcgtttcttttcaaaaagaaacgagaaaatttggaacgcaaactctaccttcgaaaattcgattcgaagacgaaattgactttttacgttttttgcataaagaacaagaattttctttctacaaatcagattgtgatatgattttatttaaaattcccgcacttatggaatggatattaaaaaatccttttctagtcattcaagaatctgggaattgggaagacctactttcggtgtgttcctactttttaaaaaatccgagacctggattatacatccgtgaattgccgatctctgttcctacaaaatttatcgaagaaaataaaaaagtactcaggaatcttttagattttttggttccggaaaatattgattacgaaggaaaagatttcgaatctcgattcggattgaaaaaatcggaagccttggttcgtttccgtatattggatccgatcattgccgagaaatctagcggtggtttattcgatataagtgttcccgttgatgaattccgtaatttacatctatttggttgtaaacgaatttttattttggagaataaaaccaatttttctaatatcgatcattttctaacttttccgaaactttcgggatcgatcgccattttcggacagggatacggtttaggtattttgaaagactgcgtttggctgaataaaatggaaatcttatattggggggatatagatgtccaggggtttgagattctttctttattaagggagcaatactcccaaaccaaatcctttttgatggataaagaaacttttttaaagtttcagaattttgccgtcgacggtaaatattcaaaattttctaaattagattatttgacagaatctgaaaaggagacttgggaatatctacggtctctgggttcgaaaaatcgtttggaacaagagcgtattcctcaagaatatattgaaaaaactttacattcgcaattttga

SEQ ID NO: 43525 - DNA, 1452 bp, Leptospira sp. Fiocruz LV4135; identical to SEQ ID NO: 43314

SEQ ID NO: 43526 - DNA, 564 bp, Leptospira sp. Fiocruz LV4135; identical to SEQ ID NO: 43315

SEQ ID NO: 43527 - DNA, 2433 bp, Leptospira sp. Fiocruz LV4135
atgactgatttattttcacccggtgaaattgccgccaataccggatataggcttgaattcttggaaattttaaattggggaacttttcacggtaggatttggaaattacgaccggaaggggaaaattttcttttaaccggagcgaacggttccggcaaatcaacgttagtcgacgcgattcttacgctgctcgttccggccgcaaaacgaaattataatctggcttcgggactggaaagtaaaaagagagatcgatcggaacgatcttatgtggaaggtcactacggtagatcctcttccggtagcgaaggaattttgaaaattcgcgggaaacaagaagagtgttattccgttttatcggcggtattcgaagcgaatggaaggttcccgcgaattcggattgcgcagatcttttggttcgaatccggagaattgaaaaagatctaccttttttccgataaagagttggacttcgaaaaagatctggttttgggaaaaagaaccgtaaaggaattgaaagcggatctgaaaaattccggggcaagactttacgatcagttcaaggcgtataacgtggattttaggaaagcggtgggtttggaatcggagaaagcgatcgacctattcaatcaaatcgtagccatcaaatccttaggagtgttgaacgaattcgtccgagaacatatgctcgagtccagggataaaagatccaggatcgaggaattgaatcgtaatttttccgatctgagcgaaacatacgaggcgattgtaaacgcaaaagaacagttgaagttgttggaaccgatcgaaaaaaaagccgccgagtatagggaatggaatcggaaggcggccgatcttcaggctttgatcgtatatgttccgtattattttgcggaaaaaaattacgagcttcgtcaaatcagagaacaggattatctttttgaattatcgcgtttgaaagacagatccgacgaactatcgactgaaatcgaatccttaaatcaagaggaacggaagttattcaacgcattggaaaacaatgatactcaaaggagaatcgccgatcttgtacgaaaacgggaggggattctctccgatctcaaaacgcggggaatcgaaaggaaaaaatattcctcctatctttccaaaatcggtttggaggaaaccttctccgaagaaacattctatacgaacctgcgcatagccggaggaatgcttacggaaaccgattcgatttgggaagaaatcagggatcgattgggaaagctgacgcttcaaaaaatggaattgcaaaaaaatttcgattcggttcgttccgaattggagtatctgaaaaaaaagcgggataatcttcccagaacccagtcggaaattcgggcaaaaattgcctccggaatcggactttccgaaaaaagatttccctttatttgcgaattgatccgcgtcaaagaatccgaaaaagaatggaccggggctttggaaaggctcttgagaaatttcggcttacggatgttagtcgcggaagaggactacgaggccgtgtcggcttacgtgaattcttcctatctgggagggaagttggttttttcaagaatggttcccttatcgggaccgatcttgcaacccaaagacaaggaagaagttttctacaagttggaattgaaatcggaattgtcgaacgtaaagaaagaatggttggaagcgcagatactgcgcgagttcggacatatctgcggggatctgaatcgtctccggaaagaggagaaggctcttacaaaagaaggtctgattaagtccggtagaattcgacacgagaaggacgatcgtaagaacatttcggacgcaagagattatattttaggctggaacaatacggagaaaatcgccgcgttggaatccgaatttgcccttctcgggcagaacatttatcggctgaattctgcaatcgatctagtcagagaagaggaaaacaaaaacaaaaacaaacgggacgacctgcttctctttctacgtttcgaacaattttcacaaatcgacgacgaaagtttaaaaggtccgcttcaggatacggaaagacaaatccgggaattggaattgcgttccgaagaatacgggaagttgaaggaacaatacgaactcgcaaaagctcgcctaacggatgttcaaggaagacaacgggaaaccgccaaggaattcaacgttttagaggataggctttccactcttcggaaggacatggaagatctacagcagaggatccgaaaagtcgaccgggaaacgtcgatttcactggagccgattctcaacgaacgactgcgggaaacgatcctaaccctggagtcgatcgcggagacggaacggaatttttcggatcgtttggttgtagagcgcgatcaatattggagaaacgagattcgatcggagaagaattga

SEQ ID NO: 43528 - DNA, 1497 bp, Leptospira kirschneri str. JB
atgaaacccagcgaaatttccatcttactcaaatctccggcgatcaaagtcttacgtaaagataccgcggccattgtactttctttcctattcgaacaatttaaaattaagaataatttttgggtattggaggaggagttacgttccaatctccgccattttctcgaagacagcagggaggaaggtaatctttccgaatccgactttttgcggagccccgaaacttacattcaagaatgggtaaacgacggattcctctccaatcgaattcgaacttccgaaggttttgacgaggtgattttggaactcactccggaaaccgaaaaagttttttcttggttggaagaaataaaggaactacaggacaaggaagtcgtaagcactgaatcccgctttttttctattttaaataaacttcaagaaatcgtcgaggaaacgatatcctcaccggaagacaagatcgctcagttggaacaaaaaaggaaggatatagatatagaaatcgaacggattcaaaagaacggcagggtggatgtgttcccgagccaaagaattcaaagtcaatatctttacgctcgaaaagaagcgcacggactcatttccgattttaaacaagttgaaggaaacttttacgatctcacacaagcgattcaccgtaaatatttggatatcgtgggcaaaggtgaaatcctggcgtccgttttggaacaagacgcggcattattggattctccccaaggccgaagttttcaagcgttctgggattttctacgctccgacagacatcaggaattcttggaaaaaacgatacgcgcactttatgatataccggacgtcttggaagtcgatacggatcgattctttaaaaaatttagaaaaaacctgagagaggcgggcgcccgagtcaattcggttgtttcgcaaatgtccgaacagctcaaaaagacattggtagatcgtactttaaaggaaaatagaaaaacaaaagaactcatcgccgaaattaaaactcaggccttgaattccgatttgtcttccgaagaaaacttttactttttggagaggattgaaattcgtttgattatggaaaaacctctttggaaaggagatgatatcgatacgattcgtgaaattcaaatcgacgatcaagaagtggaagacttcgattggaaagatctatcttcttcgatggtcggtgtggatccggaaattctgatagaaaacgttcaaacgttgcttcgatacaaaccggaagtcgacttggaggaaatacttcaaacctttccgatctcctccgaactggaggaaatcgttacttatttatggatcgcgggaaacgatgaaaatcattcgatacaggaaaatcattttttccgatttgccgtagacaaagaaaatatatatagaatttataatattccgaaaacaacctatagagtgggaaaaacggaaatcggtttgaaggagtccgaatctctcggattcgatacgtattga

SEQ ID NO: 43529 - DNA, 588 bp, Leptospira kirschneri str. JB
atggattttaaattcgcttcttctgttttgaaattattgaaaggaccggtcagtttggagaacgaccccaaaggatgggatcagctgaaatcacaagcggagagggttcgcaatcatttttcggagatcggtttaaccttgcatttggatgatgtggattgtttcgcattcttgaaacaaacctccgatgaagaggaggaggatgaaaaagaaaaacttcccgtgttgaccaaacggatcgcaatcaatcgaaaggaaactcttttgctcgtactcttgcgagaggcgatgttagaaaaagaagaaaaggatctttcttctcccgttttacttcggaaagaggaaatctacgaacgtctccggcctttttttcaaaaaactacgaacgaagtggatcttttaaaagacttcgatcggatgatccgatccgtggaaggtttcggattgattcggatcttggacgatttcagcgtcaaagtccaaaagatattgaaggctaagatttccgtagccgaattggaaaggatgaaggcgaaattccaagaaggagaaggtaatgtcgacgttattccatctcagggagaatga

SEQ ID NO: 43530 - DNA, 3369 bp, Leptospira kirschneri str. JB
atgtcgacgttattccatctcagggagaatgaactcccgacgggattccgtatgcggaaactcgaggtgttcaattggggaacttttaacggaaagatatgggttcttgaaccgaacgagaagaactttctcttaaccggagcgaacggctcgggtaaatcgactcttgtagacgcaattttaactttattagttccttctaataaaagaaattataatatggcaggaggagtggacactaaaaagaaggataggaccgaaaaaagttacgtagaaggccactacggtagagaggcgtccggagccgaaggaatccgaaaagtccgcaataaacaggaggattgttattcagttcttctgaccgttttttcggagcccgaaaaggatacgtccgtaaccgttgcacaggtattttggtttcaatcgggcgagttaaacaagttttttctcattgcggaccggtccatgtccatacaagagtctctgattctgaagggtcgttccgtaaaggacttgaaatccgatttaaaaaaagacggaattcgcgtatttgacaattttaaagcgtacgcctccgaatttaagaatttggtcggacttcgatcggataaggctatcgatcttttgaaccaaatcgtaagcattaaatcattaagagaactgaatgaattcgtaagggaccacatgttggaacctttaagagtaaacgccaaaatcgaggaattagacaaaagttattccaatctgacggaaacgtatcaggccattgtcaaggccagggaacaattgaaacttttagaaccgatcggggataaggcgggagaatacagagaggttcttatccaagagcgacgaatcgaaagaatactcggctccatcgttccatacttcgcaaaactggaatttgaatcgctcgtcgaagaggaaaaaaacgaaattctcaaacaaaagcagaccgaagatcaattaatttccgttcgagaagagaccgaaaatttcagagaggaggagcgaaaggccgcaatcacattagaaaacaatgatacggttcgtcggatggaggatctgaaacgaaaaatcgaagatctcggaaaagaaaaaacgattcgagatttgtcatggacgaaatattccgaactggctttgagtatcggtctttcgacggaaagagaagaaacagcattctatgataactttcgaatttctgggccgcgtatggaagagaacgaacggagaaaggaatcgcttcgatctaaaagtgccagattggatatggagaaagcaaagttagaaggtcgaaacgaggaagtaaaggaagagatagaacatctacaaaaaaatagggatcttcttccgcaacatcgggtaaaaattcgaaaacaaatcgcggacgcgttgaacgttccgttttcggaaattccttatgcttgtgaattgattcagatcaaagagacggaaaaacactggagaggtgcgatcgaacgtctgttaaattccttcgggctcagacttttggtgccggaaaaacattatcaaaagattacggactatgtgaaccgtacttttttaggcgatcgacttgtctattcgaggatgttattttcttcggaaaattactccgggtctccgaagaacagagacgaagttttctacaaattggaaatcaaaccggatttggataaggaaataaaaacttggctcgaatttcagatattgcaggattacaattacgtttgctgcgatatggctactttctatcgacaggaaaaggcgatcacagaaagcggacttataaaaacgggaaagatccggcacgaaaaagacgatcgttcttccgtaaatgacagcagaaattatattctaggttggaacaaccgagagaaactagaagcgctacaaaaagaatttgcggaaaccggacaaaagatgtacgaacttgattccgaactcaaagagttgaagtcggaagaggataaaaacggaaaagagttcagaaatctggaccgctttcgagaattcgattcctttagcgttttggatataagcggattacaatccgatctggaaagatccaactcaaatttggaggaattggagcgatcttcggaagactaccaaaatctcaagacacaacatacgatcgtaaaggaaaaatgggaacattcggccaaaagagaaaaggaactggaaagaacgatcacacaaatcgaatcgcgcatccaacaaaaccgcataatgcgatcgaagttggaacaaactctcgccgaatattctttggatgagttggagccttttttcgatgaaatccggaaaagaacgttagacgaaattttaaaaaacgaaaatttagatcgccttcaaaaaaagacggaggaacatttccgatccgaaaaagaccaaatacaaaccggaaaattgaaaatcgccgacgacctcatccgtaaaatggatcgttacaataaaaagttttcggaagactgcgatcgcgtggggctcgtcgtcgggatcgattatttggacgcttttgaagaggaattggaaaagattcggaaggaacgacttcctgagttcgaaagcagattcaaagcgatgatggacgacaaggtaaccaaacagatcaccgagttcaagtcgggattggaagatcacgtttccgagattcaagagagtattcagaaattgaacgaatctcttctccatctggactatgtaaagggcaaaacctacattcagttggattatacggaaaccaaaaataaggagatcgtgggagaaaacggttttaagattctattgaaagagtgtattcccgatgtgggagacgcaggttccaacgaggaaaaattcagaaagattcgcgagttgctggatcgtttgaaagcggtcgacggaaacgaacgttggtcgaaatcggttacggatactcgtaattggttggattttagggcagttgaatatgaaagagaaacgaatcggattaaggaagtatatgattcttccgcgggaaaatccggcggtcaaacggtaaaattggcgtatacgattctcgcttccgcgatcgcttatcagttcggttttaataacaagaaatcgtttcgattcgtagtcatagacgagatgttcaataacctggacggtcagaactccaaatttgcgctcgaactgtttgaacgtttaaaactccaacttttggtggtgacacccatggataagattgcgatcgttcaaccatacgtttcctccgtacatttcgttcgcatcaatccggaggggaatttttctaaggtggttcccatcacacaagaggaattattaaaagataaattaggagattctaattcttcaaaagaagaaggaatcccggtataa

SEQ ID NO: 43531 - DNA, 1176 bp, Leptospira kirschneri str. JB
atgatctctccggaagagatccgcaaaaaagcggaaaaatactatattagcgttttaaaaaattctatcctaactcaaccctcttttccttgggagatagccgtaggtaaggttttaccccaggacttattgcagtcttcggaaccgcttcgtatattagaaaaaagttctaaagctgaaaacggtttcggctatcgattattctcctccaagaaggagactagaaaattcggagcacaaactctaccgcaaagaatcgtattcgacactcaaaccgatttcctcctttatctggataaagcgagagagtttgaagaatttcaaaaaagtgtgaatctgattttggaaaagattccggatctgagagaatggattctctcagatccgttaaaagtatccgaatatgcggatcgctgggaaggattgctggaaatttgtgaatacttccgggtaaaccccaggccgggtttgtatatccgggaattgccggtgcgggttccgaccaaattcatcgaggagaataaatcggttttacgggaacttctggattttcttctttcagccgaaatgcgttcggatgtgccggttttcgaggatcgtttcggattaaaaaaagcggaggatttgattcgattccggattttagattcggaaatcgcaaaaaacggattttcaggacttaccgatctgagcgttcccatccatgaatttcgttctctttgtttagaaaaatgtgatatagtttttcttttcgaaaataagaccaatttttcgaacatctataatttcctaacgattccgttgcttcgaggtgcgattgcgatttttggaaaaggttggggtgtgggaagtctgaaaagttgtgaatggttgaaaaccaaaagattattgtattggggggatttggacgttcagggattcgaaatcctatcgtcgttgcgggaaacttttcccaagacggaatcctttcttatggatcggaatacgttttttaaatttcaagaatttgcggtagacggcgttcccggtcggatttccaatctcccttttttaaacgaggaagagagagctacgtgggagttgctgagttctttacaaggacaaaatcgtttggagcaggaaaaaattccgaactggtttgttcaaaactgcatccattcgatttttgatttctaa

SEQ ID NO: 43532 - DNA, 1452 bp, Leptospira santarosai str. HAI1349; identical to SEQ ID NO: 42878

SEQ ID NO: 43533 - DNA, 564 bp, Leptospira santarosai str. HAI1349
atgaataaaccgcatgactacgcaccttccattcttagattgttgaaaggatcgatcaacagcgagtccgatgcaaagatttggaagaatcttttggacaacgaaaaatcggtgcgggaacactttgaaaaactgggtatttttttgcacttggatcgggaagacggttatgcgtttctacgacagacttcggacgacgaaagtgcagaatcggatgagaaacttcccgtgatcacccgtaaacttccgcttacgaaagaagagactttgtttctaattctactgagggaatgtatcatagaaatcgaagaaaaagatccttccggttccatcctttttagaaaggaagagctatcggataaagtgagtccttttttctccgacctctccgatgaaatcgatcggcaaaaaagattcgaaaaattacttcgcaaatccgaagaactaggctttgtcaaacagatcgagccggaaacgattcggatcgaaaaactcttaaaggcgaaattgaccgtatccgagttagagggtttacgcggtaagtttcgactaggaacggaatag

SEQ ID NO: 43534 - DNA, 3369 bp, Leptospira santarosai str. HAI1349
atgactgatttattttcacccggtgaaattgccgccaataccggatatagacttgaattcttggaaattttaaattggggaacttttcacggtaggatttggaaattacgaccggaaggggaaaactttcttttaaccggagcgaacggttccggcaaatcaacgttagtcgacgcgattcttacgctgctcgttccggccgcaaaacgaaattataatctggcttcgggactggaaagtaaaaagagagatcgatcggaacgatcttatgtggaaggtcactacggtagatcctcttccggtagcgaaggaattttgaaaattcgcgggaaacaagaagagtgttattccgttttatcggcggtattcgaagcgaatggaaggttcccgcgaattcggattgcgcagatcttttggttcgaatccggagaattgaaaaagatctaccttttttccgataaagagttggacttcgaaaaagatctggttttgggaaaaagaaccgtaaaggaattgaaagcggatctgaaaaattccggggcaagactttacgatcagttcaaggcgtataacgtggattttaggaaagcggtgggtttggaatcggagaaagcgatcgacctattcaatcaaatcgtagccatcaaatccttaggagtgttgaacgaattcgtccgagaacatatgctcgagtccaaggataaaagatccaggatcgaggaattgaatcgtaatttttccgatctgagcgaaacatacgaggcgattgtaaacgcaaaagaacagttgaagttgttggaaccgatcgaaaaaaaagccgccgagtatagggaatggaatcggaaggcggccgatcttcaggctttgatcgtatatgttccgtattattttgcggaaaaaaattacgagcttcgtcaaatcagagaacaggattatctttttgaattatcgcgtttgaaagacagatccaacgaactatcgactgaaatcgaatccttaaatcaagaggaacggaagttattcaacgcattagaaaacaatgatactcaaaggagaatctccgatcttgtacgaaaacgggaggggattctctccgatctcaaaacgcggggaatcgaaaggaaaaaatattcctcctatctttccaaaatcggtttggaggaagcgtcctccgaagaaacattctatacgaacctgcgcatagccggaggaatgcttacggaaaccgattcgatttgggaagaaatcagggatcgattgggaaagctgacgcttcaaaaaatggaattgcaaaaaaatttcgattcggttcgttccgaattggagtatctgaaaaaaaagcgggataatcttcccagaacccagtcggaaattcgggcaaaaattgcctccggaatcggactttccgaaaaaagatttccctttatttgcgaattgatccgcgtcaaagaatccgaaaaagaatggaccggggctttggaaaggctcttgagaaatttcggcttacggatgttagtcgcggaagaggactacgaggccgtgtcggcttacgtgaattcttcctatctgggagggaagttggttttttcaagaatggttcctttatcgggaccgatcttgcaacccaaagacaaggaagaagttttctacaaattggaattgaaattggaattgaaatcggaattgtcgaacgtaaagaaagaatggttggaagcgcagatactgcgcgagttcggacatatctgcggggatctgaatcgtctccggaaagaggagaaggctcttacaaaagaaggtctgattaagtccggtagaattcgacacgagaaggacgatcgtaagaacatttcggacgcaagagattatattttaggctggaacaatacggagaaaatcgccgcgttggaatccgaatttgcccttctcgggcagaacatttatcggttgaatgctgcaatcgacctgatcagagaagaggaaaacaaaaacaaaaacaaacgggacgacctgcttctctttctacgtttcgaacaattttcacaaatcgacgacgaaagtttgaaaggtccgcttcaggatacggaaagacaaatccgggaattggaattgcgttccgaagaatacgggaagttgaaggaacaatacgaactcgcaaaagatcgcctaacggatgttcaatggagacaacgggaaaccgccaaggaattcaatgttttagaggataggcttttcactcttcggaaggacatggaagatctacagcagagggtccgaaaagtcgaccgggaaacgtcgatttcactggagccgattctcaacgaacgactgcgggaaacgatcctaaccctggagtcgatcgcggagacggaacggaatttttcggatcgtttggttgtagagcgcgatcaatatttggagaaacgagattcgatcggagaagaattgaacaaaggaatggatcgttatgtgaaacgattccgagaggaggcggatcgggaagaattgtccgtttcggtttccaacgcggaagggtttgcgaaattgaccgaaaggattcggcaggatcgattgcccgagtttcaggaaaaatttcgaacgatgatgtccgacaaagtcgcaaagcagattttggacttcaaggcggaattggacgacgacgtctcggaaatcaaggaaaggatcgacgaactgaacgattcgttaaaggatctggattattctaaaggaaaatcttatattcaaattcgatattttgataccaaggatcgggagattgtgggcgattccggctttaaggaaatgttacgcggaagcattccggatttgggagacagttctcacaacgaggaaaaattcgctaaaatcagagagttgttgaaaaagttaaagggagagggcggtagcgatcgttggtccagactcgtaacggatcccaggaactggctggatttccaagcggcggaattccttagggataacaaccaaattcttcaggtttacgattcgtccgcgggtaagtcgggaggacaaacggtaaaactcgcttacacgattctcgcttcggcgatcgcttatcaattcaaaattcgtgaacggaattcgtttcgttttgtggtgatcgatgaaatgttcaacaatctggacggagagaattcaagatatgcgttgaacctctttcgtcaattgggtttacaattgcttgtcgtaactccgatggataagattacgattgtcgaaccttatgtgagaagcgttcattttgtgaagaacaattcggaaggaaacgattccagagtgtatccgatttcgaaggaaaatgtatcgtccgggaaggatgaaaattcggaaaggaaagtgggaaatttatag

SEQ ID NO: 43535 - DNA, 1179 bp, Leptospira santarosai str. HAI1349
atgatttctccggaaattttacgcaagagatcgctggcatactatcataacgaactcttacgttctatcgtcctgggaggtgttttatttccttgggagatttcgatcggtaaagttcttccggaagagatcttaaaaaatccgtctttattacgagaattacgggccgaatcgaaagaaaacaaaggtttcggatttagaatcgtctttcgttcgaaagagacccggaaatacggaatacaaacgattcctacgaaaatcgtttttgataccgaagacgattttttgcgttttacaaaaaagaaagacgaattcctctcctatagcaccgattgtacgttgattctttccgttcttcccgagctgaaagattggattttaaaaaatacgttatccgtaatcgaagagtccggtaaatgggaaagtattctttcggtctgttcctattttttagaatataggaatcccggattgtatatccgagaactaccgattcgaattcctacgaaattcatcgaggaaaataaaaaggttttgagaagtcttttggattttctattgcctgagatcgcggatgcgaaggatttcgaaactcgttacggattaaaaaaagcggaacctttggttcgatttcgaattttggatctcgaaattgcaaagtcttccaccggaggtttaacggatttgagcattcccgtccgggattttagaaggttggaactctccggttgtggaagggtttttatcttggaaaataaaacgaatttcgcgaacctattcaattttttaagttttccgcaactgaagggaacgatctccattttcggtcagggtttcggattaaacgttttaaaggattgtagctggttggagaaaatggaaattttttattggggagatctggacgttcagggtttcgaaatcctgtcgcaactacgggaacaatatcctcaaagccgttcctttttaatggacctgaagacatttgttcggtttcgagactttgcggtagacggtatttcttcttctaaatcttccgaaccgaaatttctcactccatcggagcgcgaaacttggaagtatttaagttctttagattcgaaaaatcggttggaacaggagaaaatccctcacgaatacgtgcaagaagttctgtccggtttggatggatcgcagtaa

SEQ ID NO: 43536 - DNA, 1446 bp, Leptospira alstonii serovar Sichuan str. 79601; identical to SEQ ID NO: 43445

SEQ ID NO: 43537 - DNA, 594 bp, Leptospira alstonii serovar Sichuan str. 79601; identical to SEQ ID NO: 43446

SEQ ID NO: 43538 - DNA, 3366 bp, Leptospira alstonii serovar Sichuan str. 79601; identical to SEQ ID NO: 43447

SEQ ID NO: 43539 - DNA, 1170 bp, Leptospira alstonii serovar Sichuan str. 79601; identical to SEQ ID NO: 43448

SEQ ID NO: 43540 - DNA, 1443 bp, Gordonia sp. NB4-1Y
atggacttccacgcattcaccgcactgtgggaccggcatcccgcgtggcggctgctgcgtgcgcaccactcgcccctcatcctggccttcctgggaacctacttcgtcgaggacaatcgaggcgcgagtcctgccggcgagctggccgcggcgttggacgacctgctctacgagctcaacgcggtgctgcccaccgacgacgaccacgttcggttcccgaaggaaccacgcgcatacctcgaggactgggcggccaccgaggcaggttttctccgccgcttctaccccaccggcgacgacgaggtccactacgaggtcaccccggccttcgagaaggcctacgcctggatcatctccctgcagggcagggcgttcgtcgggacggaatcgcggttgcacaccgtcgtcgaactgcttcgtcagatcgtgcacggaacggaagtcgatcccgagatccggctgaccgagctccgacgccgtcgcgccgagatcgatgccgagatcgccgcggtcgaggccggcgacatcaccatgctcgaccgagccgggattcgtgaccgctaccagcagctgtcgtcgaccgcccgcgacctgctcgccgacttccgggaggtcgaggacaacttccggctcctcgaccgcgccgcccgcgagaagatcgccgcctgggacggcccgaagggtgagctgctcgccgaactggtggacgaccgctcggagatcgcttcctccgaccagggtcgcagcttcgggtcgttctacgagttcctgctgtcggactcccgccagtccgagctcgccgacctactcgccaaggtgtcgtcgctcggcatcgtcgacgccgacccacgcatccgcggtatccaccacgactggtcggaggctgccgaccgaacccagcgcaccgtacgtcagatctccgagcaactacgccggttcctcgacgaccaggtctggctggagaaccgacgcgtcctcgacctggtccgttcggtcgagagcagtgccctcgaattgcgtggaaacacacccgatttcgggctcgaggtggatcagcccgggatcgacatcacactgccattcgaacgaccgctctatcagaaggccgccacggtgaccgtcgagagccgcatcgacgatgcgaccgaggatctcgatgccgagctgctgttcgcccagacccacatcgaccaggtccgcctggccgccaacatccggagcgttctgccgaagagatcatcggcattgctgtccgacgtggtggacatgtacccgatcgagcagggggcagccgagatcgtcggctatctcgcccttaccgacgatgatctcagcgtcgacatcgacgcgaccgacgagacgctgctggagtatcccgatcccgacgacccgaccacgacgaagcgcgcccgcctcccgaaggtcacggtgagacgacgatga

SEQ ID NO: 43541 - DNA, 579 bp, Gordonia sp. NB4-1Y
atgaccgacgaacgcgcggtggcgagcgcgatcatccggatgatgcagggggtgacctatcgcgagtccgacgaggacacctgggccaccctcgagcggtccggcgccggggtccgcgaccacttcgccaccatcggcgtcgaagtggtcgtcgacgactccgaaggatatgcctatctgcgctcacgccccgaagaagagggcgaggaaccgcttccacggctggtccgccgacgcgcgctgacctaccacgtgagcctgctgctcgtactgctgcgtaaacggttgctggagttcgagatcagcggaggcgatggacgactggtgctgtccaccgatcagatcgtggagatgctgcggttgttccagaccgagtcgaccaacgaggcccggctggtcgaccaggccgagtccaccatcaagaagaccgtcgagctgggcttcctgcgccagctgcgtgggcagaccgaccagtgggaggtgcggcggatcatcaaggcctacgtggacgcacagacgctgtcggatttcgcgggaaagctgcgcgagtacgcgggacggaaggactgcgatgactga

SEQ ID NO: 43542 - DNA, 3402 bp, Gordonia sp. NB4-1Y
atgactgacggcctgttttcgacggtcgaactgacggcgccggccggtggcgcaggattccggctacagcacgtcgaggtgttgaactggggtaccttcgaccggcaggtgtggcgactgaccccgaacaccgagaccgcgctgctcaccggggacatcggatcaggcaagtcgacgctggtggacgcggtgaccacactgctgatgcccgcccacaagatcgcctacaacaaggctgccggcgccgaggccaaggagcgcacgctccgctcctacgtcgagggccactacaagtccgagcggcaggagtcgaccgggcgctcacgcgccaagggtctacggcaggaacgcaacacgtactcggtcatcctcggcgtgttcaccaaccccggctacgacgagaccgtcacccttgcccaggtcttccagcaacgcgacaccgccggacagccctaccggttctatgtgaccgcgaccaagcagctgaccattgccgccgacttcgccgacttcggttcccagctcggtgatctgcggaagcggctgcggtccggtggtgcggacgtccacgacgatttccccaagtactccacgtcgctgcggcggctcctcggcatccggtccgagcaggcattggaactgctgcatcagacggtgtcgatgaagtccgtcggcaatctcaacgacttcgtgcgcgaccacatgctcgaacccagtgacgccagtggccgggtacgcgacatcatctcccacttcgacgatctcaccaaggcccacgacgcggtcaaacgcgcccgcgaacagctcgaggccctcgaccccatcatctcgacgacccgtagatacgacgccgcactggccgaacgggacaccctggaccgacaccgtgcggcggtgcgtctgttcatcgcagagcatcattcggcgctgctcgccgacgagatcgccgaccacaccgtccagggcgagcggctgctgcgcgaacaggacgaggcccgcgcccgtcaacgcgatctgtcccgcgagcgtgagtcgctcatcgaagagcgggcgcgcgccggcggcgatcgggtcggcgagctcgaacgcctcgctgccgccgctcgtgacgacgtggcaaaacgtcgtcacggtcgggaactgttcgatgccaccgtcgccgatgcggctttcgatccggtcggtaccgcagagcagttcgctgcgctccgtggcctcatcgacgacgaacgcacgcggctggccgagaccaaacgtgcgctggataccgcgatcgccgacgccatcgggcgcgagaaggatgcagccagacgcggcgacgccatccgcgccgaactcgacgacctgcgcaaccgcaccagcaacctgccgcccgaccaggtgcagatccgggatcagctgaccaccgacctcggtctcacccacgacgacctgccctatgcgggtgagcttctcgatgtcgatgaggaacacggtgagtggcgtggcgcggccgaacgggtgctgcgcggattcgcgttgtcattgctggtgccgcaacagcactatgaggcggtgaccgagtgggtcaacaaccgcaggctcaccttccacgcctccggcgggcgctccgtgggtgcccggctggtctacgagcgggtgccggcacggcggattcggctgcaacgtccggacttcggagtacccgtactcgcggactgcctcgaggtcagggacggccccttcgaaggctatctgcgcgacgaactgttcaagcgcgccgaccatcagcgaacgacgacaatcgcagagttccgcgcgacgaagcgggcggtcacccgtgagggtcaggtgcgttccggcgggcgccacgagaaggacgaccgacaccgtgtggacgacccccgccgttgggtgctcgggtgggccaacgaacgcaagatcgccgcactggtcgatgatctcgccgatctcgaccgtcaacgcacggccgccgtgggcgaggtgacgatgctgtcggggcaacgtgatgcggtgcagcgccgcggcgaggccctcgcacggctggagggtttccattcctgggccgagctcgacgtcgacgaggcccggcaccgtgccgatgcacacgaagccgagcgggctcgcctgcaatcgggttcctcacgcctgcaggagatcacggcggcgttggatcgcaatgccgaactcgccaccgccacgacggcgacgatcgaagggctgaccggcaggctggcgacctcggccgccgcgatgaaccgggccgaacaggacaagcggaccgacgacgagttcatcgcagcacacaccgacaccgaactcgactccgcacgtgcctcatacgacgccctgacccaacgcctcgacggcacccggccgctccgggccgacgactgcgcggcggccgagtcggtgttgtcgtcggcactccaccaacggatcgagcgactcacccgcgagctcggcggctacgggcagagcctggcgcagtacatggccgacgtgctccgacgatggcccgacctgcgcgcggacatggacgccgacgtcgatgcccgcgccgatttcgtcgcgttccgagaccgggtcgccaccgacgacctcccgcgtttcgaatacgagttcaaagagcagttgaacaagaacgccatccaagagctcgccgggttcaacaactggctcaatcggcaggccgcgtcgatcgacgagcgcatcgcgcgtatcaacgaggcactcggggcggtgccctacaacccgggccgattcatccggctggaacgcgagtccaccacgaatcaggatgtggcccagttccgtgtcgacctgcggagcctgaccgacgacagtctcgccgtcgacggcgatcagtactccgaacaacgcttcctcgatgtcaagcggatcatcgaacgattccgcggtcgcgacggccacgccgactccgacaagaactggactcgccgcgtcacagatgtccgtaactggttcgtcttctccgcatccgagcgggatgtggagaccgatgtcgaatgggagcactacagcgactccgacggtaagtccggcggccagaaggagaaactcgcctacacgatcctcgcggcatcccttgcgtaccagttcggattggagtggggtgtggagaagtcccgcgacttccggttcgcggtgatcgacgaggccttcggacgggggtcggatgtgtcgacccgttacgcattggatctgttcgccaagctcggactgcagctgctgatcgtcacgcccctgcagaaggtgcacgtgatcgaaccgtacgtgaaggccatcggattcgtcgacaaccccacgggcactttctcacggctgcagacgatgacgatcgaggagtatcgcagccgccgcgacgggcagctgcggtga

SEQ ID NO: 43543 - DNA, 1149 bp, Gordonia sp. NB4-1Y
gtgagccgacggtggacctcacccgacgacatcgccaccagggtccgccgccgttgggacgatggaagcctgttgcgtgcgtatgcgaacggagattcgttcgagcgcatcgagatcccgctgcacggccccaccgtgtcgcagatcggtgacgacctcgacgccgcccgcacctgggtgacagccctcgacaggggacgtcgtgacgaccggtgttacaccctggtctggcagtcggtcggtggccggcgcatcggtcgcaacacccttcccgcccgtgctgtggtgtcgtccttcgaccaggcctgggcgctgctgggcatggcggcctccgtccgggaattcgacacggtggcacacctcgcggccggccacccgcccgtgtacgcatgggtgctccggtatcccctgcgtgcgatcgacctgctccccgagttctctcggctgatcgccgcccacacatggcttgacacacaccgggattcacaacaccacctgcgggagatcaccgcacccggggtcgacaccaagttcgccgagcgccatcgtgtggtgctggcggcgatgctcggggttccgtcgacggcagccggattcttgtccggcctcggcctgcggtccaagcccgacttcatccggttccggccgtcgccgtcgttggggcttccgcctcaactcaccgagatgagtgtccgggcagacgaactcgcacagctgacgctgcagccccacgacgtcctcgtggtcgagaacgagatcacctacctgagtgtcgaggtacccgaccacggtctcgtgctgtggggcaaggggttcgaggtcgatcggatcggacggctgacctggctggccgatgtgcaggttcgctactggggcgacctcgacacccacggcttcgcgatcctcgaccgattgcgtgcctggctgccgcacaccgagtcggtcctgatggatcgagaaaccctgctcgcgcaccgtgatcgatgggtcggcgaggatcggccggcgacctcgacgctgacccggctctccccagccgagcacgatctctacgccgacctcgtcgacgattcactcggcgagaaggtccgcctcgaacaggaacgggtcgactgggcctgggcccgccggcgcctcaccgggtcgtga

SEQ ID NO: 43544 - DNA, 1530 bp, Bifidobacterium thermophilum RBL67
gtgagcgacgtgagggcgcaactggaacggctgcggccggtctatgaaacgggcgtgcttcgactgctgctgcgcaaccacgcgatgacgtatgtcgctctgctgcgcacctgtttcaaaccgttgaccgccgaactgcccaaagagacgcttgaggtacggctcgccggcgcgcttgaggagcttgcgcacgacggcgaatggcagttcaaagatggcgaagccgcgcaggacagcgcccatcagacgcttgtcgaactcactcgagaaggcgaaggcgattacgcgtggctcgcgaactcgtatgaccccgcttctcaccattatctgtaccgtttgacagcccgcgcccaccgcgcgatcgacgcgctgtcccagcttgaggacacgacccgcgcactgtccggcgcccaggcgaattccatcattatggaggtcgagaacgcccgcaaacgtctgaccgtcgatccaagcgagcgcatcgctctgcttgagtccgaagtcaaggaacgcgagcaggaaatcagccggctccgcaacggtgaatccgtggagtccctgagcgacaaggatgtcgaggatatcatcgccgtggtgcacaacaccttgcgcggcgtaccggtcgacctgcatgagctcgcgcttgaggaacgcgacaacggcgacgcgctgcgccgacgtatgcaggagaactcaatgagcgttgacgagattcttactgcataccatgagcgctaccgccgctcgatgcgcgagtcggacagcgggcggcgtttcgaggacgcgttccaggtgattgtgaccgacgagggtcggcggcaaatcgatgacgcggtgcaggatatcgcaaaaagcccgtacctgcacggtgagccgaatcagctgctcaatcaggtgcgggcggaattgaagcggatttacgaaggcatcgaggatgtccgccatcaggtgcgcgtctcggacgaagcggtgagccgtctggtccggcagcgcagcgacacccggtatcgcacggcgttagacacgttcaaccggctgttcgcgacaatcagccaagagatcaaggccggcgcgtcttctcccagcccgtattcgtttgatgtgggcgacgccacgctgcttgcactacctacacggccggcacgcccgatggctttcgccgcgccgccgagtctggatgccgtgtcgtcggttcaggatgatgacaatcccggcttcgccgacgtggatttgcgcgcgatggtcgaggcgggcggaccgcggttgcggcatatgctgtcactgatcgtgcaagacccgatcatgcgcgacgggcgggttgacgtcgcggcgagtttcaaccagttgagcgattcggaacgccgcgaaagcgaactggtcggtttcctggggaccttgcgcgtggacgataacgggcagttctcgacatggcgatgcgtgtccgcggacggtacgacacgcgcatggcgtacacggccggtacttgcagacgttggcgtgttgcatgagattatcgaagaagacgcatga

SEQ ID NO: 43545 - DNA, 897 bp, Bifidobacterium thermophilum RBL67
atgaccgacgaacttgatgacatgatggccgccatgggcactgctcgcatgggcggcgacgccgatgccgtggtggatgcccatgaagacggctccggcgagaccgacggtgtgtcgaatgccggcagggacactgacaccataggggatatcgaccctgcggacaatccacatgcgctgttccccggggacacgagcacgatggacgccgaagcacgcgcggtcgccatcgcgctgaaacgtgaccggttcatcaccggtgacgcgtatgagacggcgttggaccatatggacgaggtacgccgctcgctcaacgacgacctgcttgaactggttgatgttccgcggtaccaagtgatgtacgccagaccggtcacagcggacggattggggatgcgatccttgaaaacccgggcatcgctgacacgcgaggaggcggcgatgctggctctgctgcgcattcgtgtgctcggctatgagagctcacgcgaatcgtccaaagactggatcatcagcacggacgacatccgcgccgcgctgaccacaggcgccggctggcttgccgcacgcaatgacgaagaaggcgtgatgaaacgcatcggcatcgcgatttcacggtgcgtgacctacggatatctcgcccccgttgaagacaccgatgacatgtactgcatcacgccgctggtccccgccgtactcaccaccgagcttgccgaacagtggctgggcgaaagcgagaacagcgccgcgggtagtgcggatgaccccgaagaagacgtccagataaccgcgaataccgatacgtctgatattgccgacacgacatacacgaataccgctgacggtttgaatgccggcgctactgccgcccaaaccggcgaagaaacgaggttgtga

SEQ ID NO: 43546 - DNA, 3609 bp, Bifidobacterium thermophilum RBL67
atgaccgacgaagcgctgatggccgaccactggatgcttgccagccgccaactggtcaattggggatcgtatgagggctaccacgtgttccgcccgtccatggacccggacatgccaatcaccttgctcgcgggtgccagcgaatccggcaaatccacgctggtggacgcgcagaattccctgctctaccctgctggcacggcgttcaacaaggcctcgaattccgggcgttccgaacgcagcgactacacgtatctgcgtggcatgaccgccgtggcggatgacgcggagggcgggacggccgtctatctgcgcggttctgccgaggacggcaccccgagtgcggtgtggggcgcgattgtggacacctatgtcaaccgtatgggcggcgagatgctctcatgcgcgaagttcctgtacctgtcccccggcgacgagcgcggcaacgtacggcgccaatacgtgtcctggaaccatgaaatcgacccgcgaaagatggacggctaccggtcctcaccgttcaccgccgaccaattgcgcaaggtgtatccggggtgcgcggtgtattcgaacgcggaaaacttccatgaatccgtgtggacacgcatgggattgaaagccgcagcatgccggttgctgtacaaaatccagtcggcggatgcgccttcgcggcttgacgatattttcaagcagggtgtgctcgatgtcccgaacgccctgaccaaggcgcgcgaggcggttgaggattacgaccggtatgccgagaacttccgcagtatggaagaaaacgcccgacagatggacgccttgcgtgaaatccgcgacgaacacgccgaatacgataaggcggccaggcaggcgcgtgatctgcaggtcaccgatccgcaagatgacgccggattgaccaccttgcgctcgtgggtgttctcccggttggcgtccgcggtacgcgaccagctgccgcaagatcgccgcgagctggagaggcagcaggagcaatgtcacaaagccgatacgacagtcgaaaacgtgcaacgcgaactcggcgaagtcaccgagatgatgcacggcgccggcggcgacaccctgacccatctggaaaacgagcatgagcaggcgttgcaggagctggaacggatgcgtcataccgtcgggcgcatccgacaggcgttcgctcgagcagacgagccgatgccccgatccgaggcatcgtgggaacagcgccggcaggaagcccaggatttcattgaggacgcgaacgtgcaacgcgatgagctccagcgacagcgggacgcttgcgtggttcgccgcaaaggcatcaccgaccgtcttgacccgatcaagcgcgatttcgaacggcaaagccgcaagcgcacccgtatcacgcaagacatggaagacgaccgcgcggcgattgcgcaggcgaccgggctgagcgagcgcgatcttccctatgtcgccgagctgatggacgtgcgcaaaggcgaagagcggtggcgtaccgcgatgaacgtggcttatggccccattgcgcagatcattttggtcgaccgccgttacgagcggggattcgcccgaaaagtcagcaccatcgacccgtcaaccatgttccgccgcacttggcagttcattgatatcgacaatatcgattatcaaagcggcacccaggaacacggggaggacggcgagcacgacgaccggctgtccggaaaactgcggttccgcgaggattctccattcttgggatggctgcgcgagcaaaccacatcccggcggcttgacgcgctgtgtgtagaacatatcgacgacgccgacaccccccggcaaatccaaccggacgggcaaatcaaagccggtcagcgtggctcgtatggcaccaaaggcatcaaccaggtcatcggtttcgccgacgaagcgtacctgcgcgggctcaaacagcaaatcgaccgcctgtccgaacagctcaggcaatgcgagttggatggggaggacatcaagcgccagcaaagccatctggacgaactgcgtaccttgtcatcgcaaatcgccgatctttcttggacggaggtcgacgaagccggcaccgaagcgaatgtggaacgccttgagcgcgacatcgacacgctacgcaacgacccgaaactcgcccagctcgccgagcgacgcgaccaactccagcacgcgctgcgggacgcgctggactcgcaggcgaacgcccggttcgccgtcgccaacacacagcaggccgtcgacgccgccgaagcgtggctgactgaacgcgcggggcagatcgccgacaccgcggaacagccgacgctaccggataccgtcaccgaactgctgtccaccgcgtacagcgcggcgaccggttctgtggccggcgaactggcccatatgactgttctgccagggcaacccggaatccgccgattcgacgagcgggtgctcggcatggtaggcaatgcgatcaccaagcgcatcagcgaggcgtccactcaagccaacaaggcacgggcatccgtcgaacggcgcatgtccgactatcttgcccgctgggccgccgacgacacgaccgtcacccccacggtggacgactaccggtattacgaggacgagttgagagacctgtccaaaatcgtggcgaaggcggctacccctgaggaaatcgccaacagcgtggacaagatgcaacgcgacttcaatgagctgagtatgagcctcgaaaatgaccagcgcgaggtgcgtgaacaactcgaccgtatcaactccatgctgcgcgaccagcagttcgggccacgccacggcagtctcaccctcgacgtcaccatcaggccacgcagcgcggccttcaacggcacgttacgccggaccatcgggcgactcaacagctggcaggcggagcagccctccggcggcgcgtccgacagccgcaccgcaaaacgggcgttcgacagctgcaaaccgatggtcgaactgttgcgtagcgagctgggcaaagtgcgcgataccgcgggaatccgccaatatggtgcccgcaatctcgattctcgcgcccgcagctccttctacgcggtcgtccaccatgatgacggccccgacgaacgcatctcctcgaccggcggcaaatccggcggcgccttgcaggagctcacatccttcgtgtacggagctgcgctcatctacctgttgggcggcgatatcagcgggcaccccacctacaccacgctgttcctcgacgaagcgctcatcaaggcggacggccggtacacgcagcgcgcacttgcggtgctgccacggctgggattccaagtcatcgtatccgcgcctgaaagcaaaaccggcgaaattcttgagatggcgacgcgcggctatgtggtgctgaaagacgagcggctccattcgcatctgcaggaactcgatctggtcggcgcacatgcggacggcggaccattcgagcagcgcaatccgtcagctggcaaatcgtcgacaggcacggcggcttccagcattccggctgatgccgggaacgccgacgataccgtggaaaccagcaatgttacaaacagcggcgattccacagcctcaagcagcggaaagccacagtcatga

SEQ ID NO: 43547 - DNA, 1263 bp, Bifidobacterium thermophilum RBL67
atgaccggcatacgcgcacgtggcgtgaacgcccggacagcgcccacggaaatccgcgatgccgtcaccagatatctgcaacggcgtcgatatgatgccgaaccgcgatggccgttggttttctccgtgcggtggccggaccagcgcacgctgaccgcccaagcgcccgactggcataaggccaacaatgcgttgcgcgaatgggcgcagcgtctaggttgtccggtcacgaacaagcaccggctgatggtcacgccggtggagttgatcgacacggttacggttgcggatgagcagaccgcgttgcgcatcgcggaccggacgagcgcccggcactaccgcaaggcgcgccagcgcatcgacctgttggccgacgagtgctcgattcctcgcgacaccgcggcatccgtggcgaaaatgctggacagtgaatcagatgtggatgtcacactggtgattcgcgccgcgcagttcttcggcgcgcacgatgcaaccgggttgactccacggcaagtcccgctcgcggggttcagcgcgaaatggctcgatcagacgcatcgccgcaacgtcatctgcaccttgtgcggcaaggattcgctgggattgtctgaccgccctccggagcttcgcatgcgctggcttgacccggcctactcgaacgaaccggaaatgatgatcaccaggccgtggcggcccggtggcgagcgcgatatccgctatgtcatcatcgtggagaataaggatacctaccaatccatgcccgacatcgcgcacggattgtgcgtttggggagccggtaaggcgattttggcatcaatcgcgctgctactgccgtggcttaccaccgcaagaccggacgacggggatgattccagcccgcaggtcgtctattggggcgatatggacgccgacggcttggaaatcctcgacgccgtacggcacaccggggtacgctgccaatcgctattcatggatttagaagcctaccagcgctactcatggttcggcaccaatctcgcctcaaccagcacaccgctcacttcgcgcgagcccaaggcgacgcccacacttgactttggcgagcgtgagctctatctgctcacatgtggcgaggccgtcgggcaatccgacgaatccggtttgtccgacggtccaacccatctgcgcgtcgagcaggagcgaatcccgctcattgacacggccgatgcgctccgctcgcttggatggccgatcgccgccaataatgacaaggagacacaatga

SEQ ID NO: 43548 - DNA, 1482 bp, Rhodococcus ruber Chol-4
gtgtccaccgccgacctgcaccgcctgacgcgtctgcgccaggagcacccggcgtgggtgctgctgcggtcggacaatgcggccgcggtgctggcgctgctgggccggcacttcgaccgcggcacgcgacggttgccggccccggagctgttcgcccgcctcgatgcggacctgcaggaactgcgcgacgagggcttcgagctgccgcgcaccggtcaggcctactgtgcggactgggtgcgcgcgggcttcctgctgcgccgcgcaagcgccgacgcccgggaggagaccctcgagccgaccgaggcgacgttcgccgcgctcacgttcgtcgcgggcctgacgaccgctaccagctcggtcaccgagtcgcggctgaccaccctgtcgagccagctccaggcgctggcacgggactcggatccacgcagcgagagccgcctggcggcgttgcgggccgagcgcgacgagctggaccggcagatcgccgccgtcgaatccggggactttcccgtgctggacgggaaccgggcggtggaacggtccgcggagatcctggcgctggccggggagatcccgggcgatttcgcgcgggtgcgcgccgagctggaggcgctcaaccgggaactgcgggctcggatcctcgacgacgagggcgaccgtggcgacactctcggcgaggtgttccgtggggtcgatctgatcggcagttccgacgccggccgcagcttcgccggcttctacgacatgatcatcgatccggagcggtcgtcgcagctcgacgactggatcgaggcggtgctgcaacgcccgttcgcgcagcagctcaccaccgagcaacgcaaccggttccgcaccctgctcaccgagatggaggacgccggcggcgaggtgcacgcaacgatgacgtcgctgtcgcgttcgctgcgccacttcgtgcagtcccgccactacgaggagcaccggcgtatgcagcggctcctgcgctcggcccagcagcaggccctgcaggtgtcgcagcgccgcaaaccatacgacctgctggacctcgaactggtgcgggtcggcatgggcatcgattcggtggcggcgctgcggctgcacaacccggccgacgacctggtggccgagccggtggtgacgcagccggtcggcaaggtggatctcgcggagctgcgccgcatcgtccgcgaatcggagatcgacatggacgagctggccggcaacgtcgccgccacgctgcgttcccgcggcagggccacgatcggcgacgtgttgcgcgatcatcccgccacgcagggactggccagcgcggtgggtctgctggtacttgcctcggagcacggtcaccgcgtcgacggcaccgaggagatcgcgtggacgtccccgtcgggcgcgacccgcgtggcgacggtgcgccggcacctgttcgacccgaccgacaccgagttcaccgcccgcatcaccgaggacgcgtcatga

SEQ ID NO: 43549 - DNA, 3300 bp, Rhodococcus ruber Chol-4
gtgagcgccgcacccattcaccccggccagttccggctcgcgcgggtgcaggtggtcaactggggcaccctgcacgggcatcacgacattcccgtggcccgcaagggttttctcatcaccggcgcgtccggctcgggcaagtcgacgctcatcgatgcgatctcgacggtgctcatgccgggcggcagcgtgcggttcaacgcggccgcgcagaagtcggcggccgggtcgggccgcaacttcgtcagctacatccgtggggcgtggcggcgcgaggccgacgccgacaccgacgcgctcaccgcctcgtatctgcgcaccggcgccacgtggagcgcggtcgcactgacgtacaacgccgccgacggcacggccccggtgaccctggtcaagctcatgcacctgcgccggggcgccaacgccaacaacgagatctcgcacctgcacctgatcctcgacaccgacgtggagctgaccgacctcgaaccgttcgtggcgcggggcatcgacacccggggcatccgcaagcgctggccgggtgcggtcgtgaaccccagctacgcgccgttcgcgcgcgcgttccggtccaagctcggcatctcgtcggaggccgcgcagcggctgctgcaccgcacgctgtccgcgaagagcctgaacagcctcgaccagctgctgcgcgactacatgctcgacgagccgcccacgttcgcgatggccgaacgggccaccacccagttccgcgagctgcgcgaggcgcatcgcgtcgtcgtcgacgcccgacgtcaggtcgagacgctcgagccgctcgtcgcgctggccgacgcccgccgcaccgggctgcaggcccagcacgacctgcaggacgagaccgatcacctcgacgcggtgcacgcccggatgacggtggacctgctcagcgacaggctcgacgagacgcgcgcgcagaccggtctgctgcaggccgccgcggacaagaccgccgacgaggccgaccgcgccggcgaacgcaccctcgacctgcgggtgcgcgccgagagcgccggcgacggccggctcgcgaccctccgcgtgcacaaggagaccgccgagaccgccctcgaacgaatcacccagcaacgcagacggttcgacgtcgccctcgcccactgggaggcggagacaccggccaccgcggacgacttcgcgcatctgcaggcccagctcgagcgggaactgcgcgagctcgacacgaccgccgatgcgcgcagggccgaactgtacgaggtggccggtgcgctcgccgaacaccggaagacgatccgcgcgctgatcgccgaccgggaggtcctggcccggcgccgttccaacctcgatcccgacctgctgcgcgcccgggaactggtgtgctcggcggccggactcggtgaggacgccctgcacttcgcgggcgagctgatcgcggtgcgcgccgagcacgccgagtggacgggtccgatcgagcgggtcctgggcggattcgggcgcaccctgctggtgcccgacgagctgtatccgcgggtggccgccgccgtcgacgcacaccatctcggcgcccgcctcgtgtaccggcgggtccgcacgggcgtcggcgcgccggacgcacccaccaccgccgacggctcgctcgtccgcaagctcgaggtgcgccccggcccgctcgccgcgtggctgcagcaccagctggcggaccgcttcgactacgcgtgcgtcgacaccgccgacgacctgcgccgcgtccctcggggcgtgacccgggccgggcaggtcaagcacggcggtgaccggcacgagaaggacgaccggcggcgtatcgacgaccgcagccgctgggtcctcggcttcgataacgagaccaagctcgccgacctgcgccggcgcatcggcgacgccgagaccgacgtcgacgcgttgcagcggcggcaggaggctctcgagcgcgccgagtccgcgatccagcagcgtcggcaggccgccgcggtgatccgcgagtccgcgtgggccgacgtcgacgtcgcggcggcggggaacgcggtggacgcgatcgaggagcggctgcgcgagtggatgcagggcaacaccgaatacgccacgctcaccgcggatctgactcgcgccgagagcgaggaacgcgccgcccggcaggcgcacaccgcggcgctggccaagctcgaacagcaccgggacgagctgacccgggtgcaggcgcggctcgacgacgcgcaggcccacgccggcaccgcggtgcccgacccgatcgccgtgcgcatccgggcccggttcgccgcggcggtccgccgcgtcaccgtcgacaacatcgaccgggccctgagcacggtgggtcgcgcgatcaacgaggagatgcggtccgcgcagcgcgacaccgcggacgccgagcgccgcatcaccgccatcctcaccggctacctcgccgagtgggaggcgcggcgcgccgagatgcgctccgaggccgagtacgtcgacgacgccctcgcggtactcgcccggctgcgcagcgacggcctgcccgcctacgaggacgagttcttccggttgctgcgcgagcagtcgcaccgcaacatcggggagctggcccgcgcgatccgcaaggcgccgggcgagatccgctcgcgcatcgagccggtgaacgaatcgctgcgccgctcgccgttcgacaccgaccgggtcctgcgcatcgacgtcaaggaccggcgctcccccgccgcgtcggagttcctggccgagctgctgcagatcacgagcggcgcgtggaaggaggaggaccgggccgcggcggagcggcggttcgaacagatggcggcggtgctcgaacggctcgactccggcgagcccgccgacctgcggtggaagcgcctcgtgctcgacacccgcctgcacgtcggcttcatcggggtggaggtcgacccggagggcaacgacgccaactatcacgactcgagctccggcctgtcgggcgggcaggcgcagaagctggtgttcttctgcctcgcggcggcgctgcgctaccagctggccgccgccggcgaggagttgccgcgctacggcaccgtgatcctcgacgaggcgttcgaccgcgccgaccccgcgtacacgcggcgggcgctggacgtgttcacccagttcgggttccacatggtgctcgccactccgctcaagctgctgcagaccctcgacgactacatcgacggcgtggcggcggtgagcatccgcgacaagcggtactcgcagatcgccctgttgccgatccgcggggacggcacgtga

SEQ ID NO: 43550 - DNA, 1137 bp, Rhodococcus ruber Chol-4
gtgagcgcactgtgcgtgccgccgtccgcggtcgccggtaaggcccaggccacctaccgcagccgccgcacccgatggatcaccgatcccgctgcggccgagtcggattcgctgtcgatcgcgctgcatccgccgtccgagcggcgggtcgcgcaggatcccgacgccgtcgtggcgtgggtgcgggcctggcacggctaccggggcggcggccggatcgagtgggagacgcggcgctggccgagcttcggcacgcaggaagtgccggtgcgcctgatgctttcgggcgcgaccgcgatcgccgccgcggccgcacgcgcacccgagtggtgcaccctcaccgaacggcgggcgcgactgctcgacggactcggccccggcaccgcgacgctcgcgacagcgatcgccgcgacacatgcccgctggctggagctggacgaaccggactttgcgcggctcgtcgcggccgtgcgctggctggccgagcatccgtcgtcggggctgttcatccgccagctgccggtgcccggcgtcgacaccaaatgggtgtcgcggcaccgcggtctggtcgagacgctgctcgagggtgtgcgcggcgaccgcgacctgggggtgcggtcgctgccgcggatgtgcgaggtggccgtgtgcgaccgggcgctgctgcccgcggcgccgcgggttttcgcgacgtcgctcgacgagctggcggcactgccggtgacgccggcccgcaccctgatcctggagaacaaggagggcctgcacgcgctgccggagctgccggcgacggtggcggtgcacggcggcggctacgcggtacacgaactggcggacgtgccgtggctcgccgcctccgacgtcgtgtactggggcgacctggacacccacggtttcgcgatcctcggccggctccgcggccgcctcccgcacgtgcgcagcctgctcatggaccgcggcaccgtcgagcggtggcgcgacctcgccgtgcccgaggcgtcccccgccccgcacgtgcccgcgcacctgaccggaccggaacgcgacgcgctcgcggtggtgcgtgccgagggtctgcggctcgagcaggagcggatcccgtggccgtacgtcgtcgcccatctcgaggcgctgtag

SEQ ID NO: 43551 - DNA, 1452 bp, Leptospira santarosai str. CBC1531
atggactataaacttttgcaaagattgtttcgttcttccgcaatccgtcttctgcgaaaagacaacgccccctttatcatctactttttggaaaaatattttagaagttctgcacgtactttcgttccgttcgaggagctgaaaattctacttcgttacgaattggaaaacttaaacgatcaggaagagatctccttacaaagaagcgcggacgtttatctgggagaatggattggagaaaattttctgacccggaggatacgatccgcggagggaatcgaagagatcatattggaaccctcggtcgaattggagaaagtattctcctggatggaagacatacgatccttggaagataaggacgtgatcggcacggaatcccgttttttttccgtattaaataaattgaaagagattgtggaagagagtgtttccgatccggaggagaaaattcgacaattggaattcaagcgggacgaattggatcttcaaattcgaaaactcaaggcgggagaacaagtatccaaatttccgagcgaaagaattcggagccaatatgtgtatgcgcgaaaggaagcgttgggattactttcggatttccgacaagtggaaggtaattttatggaaataacgaagatgatccataaaaaatatctggaggtcgttcagaaaggggaaattttacgatttgctttggacgggaacgacgagttacttcgatcggaacagggtcgtagtttccaaaccttttgggattttttacgatccgaacgaagtcaggaacaattcgaaagtatattagattctttgtattcattggaagacgttttggagctggactcgagaaagtttttccggaattttaggagaaatttaagagaagcgggttctcgggtaaacggagttgttacccgtatgtcggaacagctcaaaaaaagtttggtggaacgtacacttcgtgaaaaccgcagatcgaaagaacttatcgcggaaattaagaatttggtcttggagaatccactcgatttctctcagacggatttttattctttggaggaaatggatgttcgttttccgatggaaaggcctctttggcgcggcgatccggaggagacgtttcgaaccgtccggatcgaaaatacggatgaggatggaaatgtattcgatattctggaatcgatccgaggaatcgatttggaaatgtacgaacaacggatccaaacgttgcttcgtatttctccggaggtttctttggaaaaggttctgcgggaatatccggacgacgtctgctttgaaagtttagtcgcttatgtttggattgcgggtaacggagaatttcattccttggacgattcggaaacctttgtatattccgtttccataatggatcatccttcggaaaaacttgcgtatcgaattcctaagggaacgtatagagtgggccatttatga

SEQ ID NO: 43552 - DNA, 570 bp, Leptospira santarosai str. CBC1531
atgaataaaccgcatatctacgcaccttccattcttagattgttgaaaggatcgatcaacagcgagtccgatgcaaagatttggaagaatcttttggacaacgaaaaatcggtgcgggaacactttgaaaaactgggtatttttttgcacttggatcgggaagacggttatgcgtttctacgacagacttcggacgacgaaagtgcagaatcggatgagaaacttcccgtgatcacccgtaaacttccgcttacgaaagaagagactttgtttctaattctattgagggaatgtatcatagaaatcgaagaaaaagatccttctggttccatcctgtttagaaaggaagagctatcggataaagtgagtccttttttctccgacctctccgatgaaattgatcggcaaaaaagattcgaaaaattacttcgcaaatccgaagaactaggctttgtcaaacagatcgagccggaaacgattcggattgaaagactcttaaaggcgaaattgaccgtatccgagttagagggtttacgcggtaagtttcgactaggaacggaaaaacgatga

SEQ ID NO: 43553 - DNA, 3357 bp, Leptospira santarosai str. CBC1531
atgactgatttattttcacccggtgaaattgccgccaataccggatatagacttgaattcttggaaattttaaattggggaacttttcacggtaggatttggaaattacgaccggaaggggaaaactttcttttaaccggagcgaacggttccggcaaatcaacgttagtcgacgcgattcttacgctgctcgttccggccgcaaaacgaaattataatctggcttcgggactggaaagtaaaaagagagatcgatcggaacgatcttatgtggaaggtcactacggtagatcctcttccggtagcgaaggaattttgaaaattcgcgggaaacaagaagagtgttattccgttttatcggcggtattcgaagcgaatggaaggttcccgcgaattcggattgcgcagatcttttggttcgaatccggagaattgaaaaagatctaccttttttccgataaagagttggacttcgaaaaagatctggttttgggaaaaagaaccgtaaaggaattgaaagcggatctgaaaaattccggggcaagactttatgatcagttcaaggcgtataacgtggattttaggaaagcggtgggtttggaatcggagaaagcgatcgacctattcaatcaaatcgtagccatcaaatccttaggagtgttgaacgaattcgtccgagaacatatgctcgagtccaaggataaaagatctaggatcgaggaattgaatcgtaatttttccgatctgagcgaaacatacgaggcgattgtaaacgcaaaagaacagttgaagttgttggaaccgatcgaaaaaaaagccgccgagtatagggaatggaatcggaaggcggccgatcttcaggctttgatcgtatatgttccgtattattttgcggaaaaaaattacgagcttcgtcaaatcagagaacaggattatctttttgaattatcgcgtttgaaagacagatccaacgaactatcgactgaaatcgaatccttaaatcaagaggaacggaagttattcaacgcattggaaaacaatgatactcaaaggagaatctccgatcttgtacgaaaacgggaggggattctctccgatctcaaaacgcggggaatcgaaaggaaaaaatattcctcctatctttccaaaatcggtttggaggaagcgttctccgaagaaacattctatacgaacctgcgcatagccggaggaatgcttacggaaaccgattcgatttgggaagaaatcagggatcgattgggaaagctgacgcttcaaaaaatggaattgcaaaaaaatttcgattcggtttgttccgaattggagtatctgaaaaaaaagcgggataatcttcccagaacccagtcggaaattcgggcaaaaattgcctccggaatcggactttccgaaaaaagatttccctttatttgcgaattgatccgcgtcaaagaatccgaaaaagaatggaccggggctttggaaaggctcttgagaaatttcggcttacggatgttagtcgcggaagaggactacgaggccgtgtcggcttacgtgaattcttcctatctgggagggaagttggttttttcaagaatggttcctttatcgggaccgatcttgcaacccaaagacaaggaagaagttttctacaaattggaattgaaatcggaattgtcgaacgtaaagaaagaatggttggaagcgcagatactgcgcgagttcggacatatctgcggggatctgaatcgtctccggaaagaggagaaggctcttacaaaagaaggtctgattaagtccggtagaattcgacacgagaaggacgatcgtaagaacatttcggacgcaagagattatattttaggttggaacaatacggagaaaatcgccgcgttggaatccgaatttgcccttctcgggcagaacattgatcggctgaatgctgcaatcgacctgatcagagaagaggaaaacaaaaacaaaaacaaacgggacgacctgcttctctttctacgtttcgaacaattttcacaaatcgacgacgaaagtttgaaaggtccgcttcaggatacggaaagacaaatccgggaattggaattgcgttccgaagaatacgggaagttgaaggaacaatacgaactcgcaaaagatcgcctaacggatgttcaatggagacaacgggaaaccgccaaggaattcaatgttttagaggataggcttttcactcttcggaaggacatggaagatctacagcagagggtccgaaaagtcgaccgggaaacgtcgatttcactggagccgattctcaacgaacgactgcgggaaacgatcctaaccctggagtcgatcgcggagacggaacggaatttttcggatcgtttggttgtagagcgcgatcaatatttggagaaacgagattcgatcggagaagaattgaacaaaggaatggatcgttatgtgaaacgattccgagaggaggcggatcgggaagaattgtccgtttcggtttccaacgcggaagggtttgcgaaattgaccgaaaggattcggcaggatcgattgcccgagtttcaggaaaaatttcgaacgatgatgtccgacaaagtcgcaaagcagattttggacttcaaggcggaattggacgacgacgtctcggaaatcaaggaaaggatcgacgaactgaacgattcgttaaaggatctggattattctaaaggaaaatcttatattcaaattcgatattttgataccaaggatcgggagattgtgggcgattccggctttaaggaaatgttacgcggaagcattccggatttgggagacagttctcacaacgaggaaaaattcgctaaaatcagagagttgttgaaaaagttaaagggagagggcggtagcgatcgttggtccagactcgtaacggatcccaggaactggctggatttccaagcggcggaattccttagggataacaaccaaattcttcaggtttacgattcgtccgcgggtaagtcgggaggacaaacggtaaaactcgcttacacgattctcgcttcggcgatcgcttatcaattcaaaattcgtgaacggaattcgtttcgttttgtggtgatcgatgaaatgttcaacaatctggacggagagaattcaagatatgcgttgaacctctttcgtcaattgggtttacaattgcttgtcgtaactccgatggataagattacgattgtcgaaccttatgtgagaagcgttcattttgtgaagaacaattcggaaggaaacgattccagagtgtatccgatttcgaaggaaaatgtatcgtccgggaaggatgaaaattcggaaaggaaagtgggaaatttatag

SEQ ID NO: 43554 - DNA, 1179 bp, Leptospira santarosai str. CBC1531
atgatttctccggaaattttacgcaagagatcgctggcatactatcataacgaactcttacgttctatcgtcctgggaggtgttttatttccttgggagatttcgatcggtaaagttcttccggaagagatcttaaaaaatccgtctttattacgagaattacgggccgaatcgaaagaaaacaaaggtttcggatttagaatcgtctttcgttcgaaagagacccggaaatacggaatacaaacgattcctacgaaaatcgtttttgataccgaagacgattttttgcgttttacaaaaaagaaagacgaattcctctcctatagcaccgattgtacgttgattctttccgttcttcccgagctgaaagattggattttaaaaaatacgttatccgtaatcgaagagtccggtaaatgggaaagtattctttcggtctgttcctattttttagaatataggaatcccggattgtatatccgagaactaccgattcgaattcctacgaaattcatcgaggaaaataaaaaggttttgagaagtcttttggattttctattgcctgagatcgcggatgcgaaggatttcgaaactcgttacggattaaaaaaagcggaacctttggttcgatttcgaattttggatctcgaaattgcaaagtcttccaccggaggtttaacggatttgagcattcccgtccgggattttagaaggttggaactctccggttgtggaagggtttttatcttagaaaataaaacgaatttcgcgaacctattcaattttttaagttttccgcaactgaagggaacgatctccattttcggtcagggtttcggattaaacgttttaaagggttgtagctggttggagaaaatggaaattttttattggggagatctggacgttcagggtttcgaaatcctgtcgcaactacgggaacaatatcctcaaagccgttcctttttaatggacctgaagacatttgttcggtttcgagactttgcggtagacggtatttcttcttctaaatcttccgaaccgaaatttctcactccatcggagcgcgaaacttggaagtatttaagttctttagattcgaaaaatcggttggaacaggagaaaattcctcacgaatacgtgcaagaagttctgtccggtttgggtggatcgcagtaa

SEQ ID NO: 43555 - DNA, 1470 bp, Xanthomonas axonopodis Xac29-1; identical to SEQ ID NO: 41638

SEQ ID NO: 43556 - DNA, 702 bp, Xanthomonas axonopodis Xac29-1
atgaactggtctgaggacactggcctatacaccgacgaggacaccggggcgccggccatcgacgaccgcatgccgatggcgcaaacatccagtgccgagccgcgcggcgagctgtttttgggcgacaccggcacgctgccgttcgatgcgcggcgtgcgctgtgccagttgctggcagggcccagcatcgatgcgcaacgtcacggcgcgctgtggccggcgttgttgcgcaacgaggtggcgatccgccaggtgctgtgcgaactgtttctggagttggtgctcgaccgcgagggcggggtggcctttacccgtcaggccgacaccgcagagctggaatcgcccacgctgctgcgcagtgcgccgctgacgtttatcgagtcggtgttgctgctgttcctgcgccagcaactggccgaggccgacacgcgcggcgagcgtgcagtggtggacgaggcgcagttggtggaagccttgtcggtgtacgaaaagaacgtatccaccgatcgggcgggcttcgcgcggcgggtgatgacggcgatcggcaagatgcgcgacaaccagttgctgtcgcgcttgcgcggcagcgaggagcgctatgaagtgtcgccggtgttgaagctgttattttcggcagaagatgtgcaggccttggtggtggcgtatcgggagctccgtgagggcgaggttgcgctggattga

SEQ ID NO: 43557 - DNA, 4023 bp, Xanthomonas axonopodis Xac29-1; identical to SEQ ID NO: 41640

SEQ ID NO: 43558 - DNA, 1476 bp, Bdellovibrio exovorus JSS
gtgaaaattcgccatgaaattacattcgagcaattacatcatctacgcaagtttagtgcagcttggggattgctatcttcaactatggctcctttcgttgcgagctttctatatagagtatttatacaaactaatcgacgatctattactgtttctgaaataatagaagctctagataattatttgtacgtcattcgtcaaaagtatccagatgatgctccaccaaagtctgctaaagaatatattgaagattggagttcgcctgataaagcctggttaagtcaaagatacacaggccgtggagacatgcctgaagttgaccttacgccagatgctgagcgagcaattcgatggctggaaactcttaacccaagaaattttgtagggacggagtcgagattacttaccatatttcaattattaaacgaacttaatcaaaaaattgaaacagatcctaataaaattttagacgatctttataaaaagaaaaaagaaatcgaagaccaaattgataaatttaaatcaacaggtaaaacggaaagacctgatgctactcaaattaaggagcgttactaccagttagatgatacagcaaatacattgctatctgattttcgtcaggttgaagaaaattttagaaagctagatcgggaagtcagagaaaagatgacattatcggtaaaaaccaaaggtgattttctagatgacgtatttggtggagaagatgaaatttcagagagcgatcaaggaaaaagcttccgagctttttgggaatttttaattcacagtgaaaagcaaaatgaatttgaggaactattagaaaacgtattaaaacagcctgaaatcgccacacttgaagataaaggggttctgcctttgtttagagacttcctcctcgatgctggaaataaggtctatatagttaataatcaactgactagccagttaactaaatacttgtctgaaaaatccattgccgaaaacaaacgtattgttgaaatgatttctgaaatggaaaaaactattattgaattgcggggtgcggactttgataagtatttcttttctgtaccttttttgaagccgactttaaatctaagcgcaagtcgtcccttgtttgaaataccagatatgattccactgaatgagccggtagacagcacagatgagaccattctgtctgaaaatgacatgagcaagctcttctcacttaatatagttgatgaacaactgttagaaagaattattgaaagttcactggttcaaaatgagcaaacctccctagaagatatcttaaaagaaaatccaccaagcaaggggttatctgaagttatcagttacttaaaaattgctgagcgtcgcaaacatactcatgtctatgaagacaagttcttcatagctgaaatgttgaatgaaaaaggaaataaaaaaagagttaaatgtccacaggtgatttttcaaaggatgctattatga

SEQ ID NO: 43559 - DNA, 588 bp, Bdellovibrio exovorus JSS
atgagctttgacattaaaaaaacaaaagtacttgtccagctattaaagggaccaatttatcgtgattcaatgccagtcctgtggcaagactttttgatttataaagagcaagttcacgactattttcaacatataggtcttaatgtttttgttcacgatgactttggttttgcatttttgaggcagcctctagctagtgaatctgttgatgacgacaaagtagtgccacgacttatccagcaaagggagctttcgtttgagttaagtgttttgctcatattacttagaaaacgtttggcagagcatgataattcatcaagcgaagctcgtgtcgtattggatgagcgtgatataattcaaatgatgaaagtatttttaccagaaactaataatgaaactaaacaaaagaaagatgtcgacagccttattgaaaaggcagtggatatgggtgttttacgaagaatgactcacgatcaaagaaaattagaagtgttaagaattttagcggccctatttgatgcttctaggttggctgagctgcaaaatcgaatagaggaatataaagagtatgcacaaagatcaacttga

SEQ ID NO: 43560 - DNA, 3396 bp, Bdellovibrio exovorus JSS
atgcacaaagatcaacttgatttattcgttaaaggtcagcgacctggatttcggttaaagcatctcgaagtatataattggggtacttttcacaataaagtatggacactattcacaaacggaggccaaaatcttttaacgggtgatgttgggtctggtaagtcatcattagtggatgcattaacaactttgctagttccgcataataaaattacatataacaaggccgctggtgctgataagcaggaacgcagtctttatacttacattaaaggtgcatatggaaatgaacaggacgaagaaagtcaaacgagtaagcttttaactcttagagatgaaacttcttactcagttattttgggtgtatttcataatgaggccatgcaaaggtcaataacgttagcgcaggtctttcgtttgcgaaaaaacgataaaaatccagatagattttacgttcttgccgaaaatgaactttcaattaaaaacgacttttttgctgtcaaaaaagatatttcagatatcaaatcgaatttgaagaaaaaagatgggtgtgaagtttttgacagctttaaagaatatagcattcgctttagacaagaatttggaattaaaagcgatcaagcgctagatctgttttatcaagccgtgtctatgaaatcagttggcaacctgactgagtttgtaagaacgcatatgcttgaaaaaactgaagttgaaaaccacattgaagagctgtgtagttcttttgaagacttgcgtaatgcacacgaggcagttattaaagctcgtaaacaaattgaacatctagagccaatagttgaattgggtaaaaaatataatgaagatcaaaaaataaaatctgaaaacatactatatcgtagtcacacagaatcctatttagcaaaaattaaatttcaattattagaagagtcgcttctaaatctaaatgaaaaaaaagaaagaaccgaatctaatttaaccaatgtgcaaaatctaagacaagcggagtctaaaaatcttattgatttacaggtttctttgcagtcggcaggtggcggacgtatccagtctttgaagagcacaatagaagaaaaatctaaagaaaaagatcgcagactaagtcagcataatagatacgatgaaccttgttcgtttttaggattgccaacgcctaagagcgtagatgagtttataaccaataaaaatcaagctcaagtaatacaagatgaaacaaagttggccaaagacaaaattgaaacagaaatcctgaatctaaatatagatgtttcaaagcttaaaacgcaagaaagttcaataattgaagagattgagtctctaaaaagtcgtcagagtaatattccaaaacatagtttggatttacgagctaacatggcgagagaattaaatctcaatgagcaagatttgccatttgtaggagagcttttgcaggtcaaatcgagcgaaaaaaagtggcaaggttcaattgagcgggtcttaagaagtttcggtttaagtatactggtttcggaaaaagattatctggatgtatctgcttatgtaaataggacacacctgaaggataaacttgtatattttagagtaaatgaagctagaagaacaattaactcaaaaccagcgcaagataccttattaggaaagcttgatatcaaaaaagactctcagtttactgcatggctcaggcaggaactagaagggcacttcaatttcatatgctgtgagtctgtagaggatttccaaaaacaagtacgggcgatttcgattagtggtcaaataaaatcctttaataaacgccatgaaaaagatgatagatttagaatagatgataaaagtagatacattctaggctggtcaaataaagaaaaaattgaatctttaaagaatgatcttaaattgcttcagcatgaagggcagaagttaatcgataaagttttacaaaataataaaactaaatctgaattagattcacgaatgtcgaactgccaaagaattttacactttttgtctttcgaggacatcaactggtatgacatatcgcagttaattttaagcattgaaaaagaaatcaaaaaactaacggctgagtcaagcaatcttaaagcaattgaggacttaattaaagtttctaatgataaaatacaagaattcgacaataaactgaacgaaatgcagaaaagttggggtgctcttgacagcactattaaacagcaagaagaatccaaagttaactgcttagagcaattaagtactttagattcagaagtgactgaaaaagtatttcctcatttagatgaaatttgtcagacgttaaaattattttcagatgttaatttggcaaatttaggtaaaaaacaaaatcaactgcgtgacagtattcaaagtaaaatagatgcactttcaaaaataactgaaaaagatcaagaacgaattgtcaggttgataggtggatttttaagtcagtttccagaatttacaaccaatatagatgcttcaccaaaaagcttatttgaaatttcaaatattcttaaaaagttgaaagacgaagatttgccacgtcatgagcaacggttttataaaaaattgaaagaagatacaattaaaggcatggcgatgtttcaagagttacttgaaaaagagaaaagaaatatcgagggtaagattaagacaatcaatgtttgtttaagagatattgattacaatgaaggtacttacataagtattcttttaaacaaaagtgcagatcaagaaattgtaacttttagaaacgacttaagacaaattttatctaataccgcaggggtagaaaatgtctataatgaacaaaagtttactcaagttaaaactttgattgataggttcagaggaagacaacaatttagtgatatagataaaaggtggacagctaaagtaacagacgtaagaaattggtttacatttgcggcgtcagaaaaatttcacgctgataacactgaaaaagagttctatccagactcaggtggtaaatcaggaggccaaaaggaaaaattagcctatactgtgcttgcgtctgctttggcataccagtatggaatagattcgatgcaggaatcacctaaatcatttaggttcgtaatgattgatgaggcatttgggcgaggctctgacgagagtgctaggtatggtcttactttatttgaaaaactaaacttgcagttattagtggtgacaccacttcaaaaaattcatgtaattgaagactacgtcagtcatgtgcattttgttcataatgaagcgtctaaagaatctcgattgcacacgctaactatagagcaatttcgagaaagtaaaaattctcatcgcaacaagcaagctaatgttggagatgtggttgatgcttga

SEQ ID NO: 43561 - DNA, 1146 bp, Bdellovibrio exovorus JSS
atgcttgaagatttaaaaaagaaagcacaaaggctctatgagtcaaaagaaatattcagatcctacttgttaggtgaaaataagtttccattggaaatttctttacgtaatgtttccagtgctcaattaagagatcagtttgtaacggtcgggcagcaaatagatgaactggctaaagaatgtaaaaagttttctttagaagttgtttctactgaggttaacaataggcagcggggaactcaaagcattcctgataaagtagtttttccaaatcttgaatcttatttgaagtttatttctaaagttaaagattatcagttgtttaaaaacacaatagatgagctattactaattgataactcaaagcttagagagttttttgtgaaatcacctcagttggcaatagaatacaattctgtttggtcgaagattttggcagtaactagatttttaataaataatcccaaaacaaatttatatatacgtcagttagaaattcctgatgtagacactaaatttattcaaaaccataaaaagataattttacaggttgtaagtgctcttaccggtgacgatgaagccattcttgaaaatttagaatttgaagaaaggttgggtctaagaaaagaatcgggaagagtcaggtttagaattttagatccaaatattcaaaaacttttttatggattagaggatatcgaaacttcgattgaaaaattagctgaaacagaaataccatgtgaaaatataattatagtagaaaataagattacggggttatgtcttcctcattacgataagacaattgtattttttgaactcggttacaaagctgctttacttaaacaaatcccatggatctcgaataagcgaattgtttattggggtgatattgatacttatggtttttcgattctttctaatattcgtgaggcctttccaaaggctgagtcaagactgatggatcttgatacattattttcatatcagaatttgtgggttgaagagaaagttcagtatcagggggcttgtggtggtttgtcacaagccgagttagaattatttaacgatttaagaagcaatagatacggtcaaggggttcgcttggagcaagaacgtattaaaatttctgattttaaattgtag

SEQ ID NO: 43562 - DNA, 1458 bp, Paeniglutamicibacter gangotriensis Lz1y
atgcgacctacccaccaggcgagcccgctgtggagtcagacgcaacaatttagatcgtccgcagcttggaaattgctttccaccgccccttgggccgtggcattcctgcgcgccgaattcaccagtgccaagccccgcgtgggcttggaggttttccatgcctccctcgaatcattcctcaaggtcgtgcgttccgaggacccttccttcaacgactcaatgagtgccagccaatatgccgacgcttgggtgcgcaaccagtttctggcccgcccgctggtcgatggacacttcgtctacgagcccaccgcccagacctcgcgtgtgctcaagttcttggctgacttctccggggatcgcaccaacctgaactcctcacgactcaatacgctgctgacttctctggagtctctggcccatgagacggatccggacccggaagcacgcatccgtgcactggaggcggaaatcacccagcgacaggaaaagatcgcttccctgcgcgatggcaccaccccggcggtgctgcctcgcgaaggtgctcttgcggcaacccgttcggtgctcgacatggcttctgggctgcccgctgatttcaagcgcatgcgcgacggcgtccaggaaatgctccacgccttgcgcggagaaatcatggaatcctcttctgtgaagggcgtcgcggtcggcgcggtgctcgagggtgacaagcaactgcgtagtaccccgcagggcgagaccttccgtggttttaccgagttcttgaattctcccgaagctcaggtgcgttttcgcgaggccgtcaacgaggtgctcgaacgcgacttcgtcgattccttggacgcccaggaacgtcacacgctggcgaatctcctgcgtgagctgcgccgccaggcctcagaggtccaccagtcctacggccggctgtccgagtcgctgcacgcctacgtgcaatcggccgagttcaaggaggctgcgatcctgcgcgaggcggtgcgtgcagcggaaatcgctgtctcctcctcccgggtcctgcactcccgcaccccggtggccccgatcaagctctatgccccgcggttcacgtccattgctgccctgggtatttacgatccggacgagcatgtggccccaccgaagcttgccgcgcctccccaattgtcggtggccgacatccgccgtaccccctcgaccccgagtcccaacatcccggtcctgcaccgggccatcaccgactcgcgggccaaagccggcggcacggtgaagttggcggacacctacaattccctcgacgccgaacaccgacacctgaataccctccggtacctgatcgagaccgcacgcaacggcggggattccatcgatgaatccacttgcgaggaaatcagcttcacccaggtcaacggcaccacacgcatcgctttggttccggccatgagcttcacaaaggatccagcatga

SEQ ID NO: 43563 - DNA, 660 bp, Paeniglutamicibacter gangotriensis Lz1y
atgagcagcacccttcctaccggcgcagtcgatgagcgccgcctttttgcgggcgacaccgggtctttcgagctgccgctgcgccagcttttggtgcgcctgctgcgtggtccctatttggatggggtcgccgagccccggctctggcaactggtgttggaccggcgtgcggagatctccgcctacgttgccgagatcttcctggaactcgaggtcgatgccaaccgcaagatcgcgttgttgtccccggtggatctggaggcggcgcacaccaccgcaatcgctccgcgccgcgccctgaagcgagaagaaactctgttggccctgcggttgcgactgctgctcgaacgccatgcaggctccggcaccgatgcggtgatcagccgggaggcggcccgcgagatcctgctcgagcaccgcacccccggggacaccgatgacaagaagctcgaggaaaacaccgacgcgtccctgacccggttgctgaacctcaaactcatcctgcccaccgaactcaccgacgaatacaaggtatccggggctttggccctcgccctgccctttgccggtatcgaggaaattcccgattacatcaaggccattgaacgtgttggcgtcgatgacaccgaagaattcgacttggagacagaagagctatga

SEQ ID NO: 43564 - DNA, 3324 bp, Paeniglutamicibacter gangotriensis Lz1y
atgagcattgaaatgaccctcccgctctccgacgcggtcaatcccggacagcaccgactcacccagatccaggtcatcaactggggcaccttccacggccggcacaccctctacgtggaccgttccggcaccttgcttaccgggcaccccggcgtgggaaaatcgacccttttcgacggcatcgggcacattttccatgccgcaccgcgactgaacgaatccgcgcacgaggcctccactcgcaaggaccgccgcaccacttattcctatatgcgcggacgccgcttcaagaccgaggccgggaccctgtaccagcgccccggcgccacgtggagtgccttggccctggtgtacgaagacgggcttggctcctcggtgtgcatcggtgcgatcttcgatttgccggccaacggcctcgaaggccaagtcggcaagcactatgtgatgggtgacagggtgctggacactgcagccctggaagatcacggagccagacgtttcacgccctcctcattgcagaaatcgctgccaggttttgaagcgttcgacgtgcaccgttcctttgccgagaagttccgccgccgcctaggcatcgacaacgacaaggcgttttcactgctgcgcaccttgcagaacggcaagggactggacaagggcgtgaaccagttcttccgctacgaggtgctggaaatacccgccacgatgaaggctgccgccggggccatcgaggacttcagccaccttcgcggcatccaccgccagctcgaagaggcccgcgcccaacgcgatgcactctccgacgtacctgaacaaaagctgcgcatcgacgagctcaacggtgaactggcaacgcttaacgccttggtctccacccagctgccggcctacggcgcacaattggcgacccgtgccctgcagggccaaaccagctctctgacttcggcggtggaaacgaacgccgcgctgatcgaggaaagtggcgtccgcaaggcaacgcttgagaccaaggtagcgtcgctggccgaacagcatgaagccgacgggggtgccggtgtggcgttgctggaacgcgaggccgagtccgcacgcaagcacctggccgaccgcgaagcggtgttgcagaccctgcgcgataatttcgaagcggtgggcctgaccttcaccttcactgcctccgggcttcaggccatgcgccggcaagcagcggtcagcgccgagaaccttgcctccattgccaaagatgcgcgcaccatggaatacgaagccatggcctcggtgatgaatctcaaggaccgggccaagaagctgcggcttcagatcgattcctatgccaaacgcggctccaacatcgatgaccgttccatcgccgcccggcgtgccatcgccgcatccaccaacctggacatcgaagacctcccgttcgccggcgagctgatcgatctttccccgtcccacgggcagtggcgtccctcggcagaaaaggcgctgcgttccctggccacgacactgctggtgcgcggggaagacatcaaatccgtcacccgagccatcgattcgctgtccggcttgggccggatccgttggatggacatctccaggaccccgcgcgaggtagtttccggtcccggagacctggtcggcaaactcgacttcaagcattcggccgccgggacctggcttcgtgccaagatcgccgccgattatccgttggcgtgtgtggagtccgacaccgggctgcacgtccatgacaaggccatctcgcttgccgggaccatcaagaccggctcgggcactttcgaacgtgacacccgcccggtcgccgcctcggattacctgctggggttcaccaacgcggagaagatctccgagttgcaaaccaaacttgcggctctcgaggaagacaccgcccgcgccgccgcggtggccgatgaccgcaccgcggccaaggaccaattggccgccaagtttgcgctgctaggaaccctggccagcgacaaccgctccttcgcctcgctagatgcctccggagccctgcataccctgcaggacctggaagcgcgcatggccgaggcgctgtcgaagtccggggatctctcccacgtccgccgtgcactggatgcggcccgcaaggagctcgaggagtgtgtgggcaccctggccgtagcaagagccgaggccaccacgctttcggcttcgctagacagagccagcaatgcgttgcgggcttcctcggtgcgcgaggcactcaccgaagactgggcggtggagaagctttccgccagcgagcagttggccccgctcatcaaacgtctggacgagggttcggcggtcgacaccgccgaattggaagctgccttgaacgcactggcgttgtcactgtccgagtcgggggccgaactcaaacgcgaggcctataccctcgaagcggcactgaaggacacgttcaaggccttcgcacgcgaattcgggaactctgccgctgccagctacggcaccgggatcgaggcggccgaacactatgtttcactgcatcagggcatcatcgaacagggattgccgcagcacgaagaggagttccgcgagtacttctccaaccgctcctacgaacgtttctcggaccttttgcagctgttggaggaggaacgccgctcaatcgccgagcgcatctccccgctgaaccagatcctcgccgacgtgcccttcgaacatggctccaagctggcgctggaggtatccacaaccgtccccgacgaggcacgggccttccgccaagccctgaaagaggccttggccggtgcgtattcatcacgcggggcaggaaccttaagcgaaagctacaaggcgctcgaaactctggtggatgcgctggatgattcgtcgcgtgccgcctggcgcgacaccgtgctggatgtgcgccagcacgtgaccattgcctgcaacgagcacaagcccaacggggagatcgagaccgggctggaacccggcacgctctccggcggtgagggccagcgcttcacctccttcatcatgggcgcggccctggcctaccagttgggctttgccactgctgggttcaccgcctatggcaccgtgatgattgacgaggcgttcatccaggcaaactcggagtatgccgcggcaggcatcaatgcgctgcaggagttcgggttccagttgctgctcgcggccccggaggacaagatcgacctctccaggcacttgggttcggtgtgcgacatcatcaaacaccccgagtccaacgtctccggattcgtagcctcgggccgctccccggccgtggccacgagcatcattttgcgctag

SEQ ID NO: 43565 - DNA, 1470 bp, Xanthomonas citri subsp. citri Aw12879; identical to SEQ ID NO: 41638

SEQ ID NO: 43566 - DNA, 702 bp, Xanthomonas citri subsp. citri Aw12879; identical to SEQ ID NO: 43556

SEQ ID NO: 43567 - DNA, 4023 bp, Xanthomonas citri subsp. citri Aw12879; identical to SEQ ID NO: 41640

SEQ ID NO: 43568 - DNA, 1566 bp, Curtobacterium flaccumfaciens UCD-AKU
atgaccgacgtcgacctcgagttcgcccgggtccgagcggtcctcgaccgtccgaccctgcggctcatgtcccggccgaccagcgccacggtcctcgccgtgttccgcacggtcttcgaccgcgacgtgcagtacgtccccgccgaccgcatgcacctgcaggtcgaggagcacgttgcgcgcctgcaggcagcgggtgcccgcgtgcccgccagcgaccaggcggtgccgacggccagtagacaagccgacaccgaacagtccgacggtgagcaggaggcccgcccgaacggccgcgccctgtgccgcgagtgggtcggcgcccagtggctcgtccgctcgaactcccccgacggcgacgagcagtactccctgacgagccacgcgctcgaagcgctgagcctcgtcgacgccctgtcggccgaccgcgccctgatcagcgagagccggctggcgatgatcgtcgacgcggtgcaccggtgggcggcccgtgccgagccggaccccgacgtgcagatccgacggatcgacgcccagatcgccgagctgcagtccgagcgtgcacgcctggagcacggtgacgacgtcgtggcggtggacgacgaccggatgcgcgacgggtacaccaacatctccgacctgatccggcagctcccgagcgacttcaagcgcgtggaagaggcggtcgcgacgatgcaccgctcgatcgtcgaagacttccggcaagaggtccgcccgatcggcgagatcctcgacgactacctggcccgcaccgacaacctgatggaggcaacacccgagggccgtgccttcgagggcgccttcgaactgctgcgcgacgacgcactgctcctgcggctccgcgatgacatcgcgacgatcctggcgcacccgttcgcgcagggcctcggagctagcgagcgtcgagccttccgcaacaccgtgacgatcctgcgccagggcatcgaggacgtgctcgcccagcgccgtcagctcaccgccacgctccgcgaccagatcgtcgcccacgacgtggtgcgcgaccgcgagctcgacgccgtgctccgctcgatcaaccgcggcctcgccaccctgatggaccagggcggcgcacgtgaccggatcccgctgccgctcctgcctgcggccgccgaggtcggcacgctgcgcgagcgcttctacgatccggacgccgagtccgtaccgccgccgatcgaggagcccgacgacgacgtcttcgaggacctcgacgtcgagatgctccgcaagcacggcgggccgctgctgaccgagctgcgcgcggcgctgcgcttcgccgaggccgactccagcgtcgacgcgttccacgggctgccacccgagcagcgccggccggtcgagctcttcggcctcgcgcacctgctgacggggcacgaggacttcgagtcggccgcccacgtcgccgagcactggacggtgcgtcccgacggcaccgcgatcaccttccagatgcccatcgctgcgctcgacgacgagcgcactccggtcggcgacgcacacgacgagaacgcacaggaggcacggtga

SEQ ID NO: 43569 - DNA, 789 bp, Curtobacterium flaccumfaciens UCD-AKU
gtgagcgacacgacgccggcaccggtcgacgacacggtcccctacgacgaccccgcatccgtgatgcaggacgacgagcgtgacgagtccagcttcgccctcttcgagggcgacgagggccggctcgacgagcaccagcggcgcgccctggtggcgctgctccggcactcgtacgtcagctcccgcacgcaccccgacgagtggcgtgccgtgctcgacgccgagtaccagctgcggtcgcgcctgaacgacctgttcctcgagctgcacgtcgaccgtgaccgcgaggtcgcctggaagcgccaggcccggtcggagagccagcgccgcacgttcccgacactgctccgcgacctgccgtacacccgcgaggagacgatcgtcctcgtctacctgcggatgcgtctgcgcgccgacgcccgaccgggcccggaccaggtcgtcgtcgaccgctccgagatcctcgggcacgtggcgggcttccgtccggcgaccgcgacggaccgcacccgcgacgagggccgggtcgcgaaggcgatcgagcgcctcgtgacggcgcgcatcctgatccgcacgtcagacccggaccgcttccgggtggcgagcgtcgtcgaggtgctgctccccctggagcgcttgctcgaactggacgcctggttgcggaccaccaccgcgcaggacgaggcgaccgccccgggcggcgagccgaccgacggggacgacccgggcctcccggcagacggcgaagccgagaccgacaccgacgacgaaggcgagacggaagcgtga

SEQ ID NO: 43570 - DNA, 3369 bp, Curtobacterium flaccumfaciens UCD-AKU
gtgaccgacacgttcgagatcccggcgctcttcgacacggtcgcgcagtggcgcgccgagtcgatgcaggtcgtcaactggggtgggttccacggccaccggcaggtcgaactgtccggcacggcgacgctcatctccggtgcctcgggcaccggcaagtccacgctgatggacgcctacctggccgtgatgatgccgtccgacgtgccgttcaacggcgcctcgaacgacgccaccaccggccgcgcccgcagcgccgaccagcgcaacctgctcacgtacctgcgcggcaaggtcgacacccggcgcgacccggagaccggcagcctgcgcgacgtgaacctgcgcggcgacgaccagaccacgtggggcgcggcggcggtcacgttccggaacgacgacgagcgacgcttcacggtgctgcgcgcgtacatcgtgccgaagcgtgcccgcggggtcggtgacatccagatgaccatggcgacggtcgacgacaccttcgacctgcgccggctcgaggagttcgtgccgtcgcggttccaccacctcgagctgaccggccgcgtgccggggctcgtcatccgcgacacctaccaggagctcgcgtacacgctgcagacgcggctcggcatcggtgactccggtggcggcaaccgggcgatgcgcctgctcgcgcggatccaggccggccagcacctgccgacggtcgacgcgctgtacaagtcgctcgtgctcgagacccccggcacgtacgaggcggccgaccgggcgctcgcgcacttctccgccctcgacgaggcgtacgaggcgatggacaccgaggagcgcaaggtccgcatcctctcccccatcaccgacctgcacgacgagatctcgcgcgcgaccgaggccgcagcggccctggacggcatcgccaccggtgccgaggtgtcgccgttcgcgcactggacggcctcgcggaagcgtgacctgctcgacgccgaggtgtcgcgcaacgctcgcgagcgcacggcatcgcgcgccgaggtggccgcggctgaagcccggcacgccgccgtcgagatcgagctgcgcgacgccgaggcccgactccgcgaccagggcggcaacgcgctcgcccagctcgaggaccgcatcgagcggctcacccgggagcgcgacggggtcgtccggacccgggcgacgttcgacgaacggaccgccgtgctgggcacgtccgtcgcgaccgaggccgacttcactgccgcgcagcgcagctcgcacgagttcctcgggtcgtacgccgacgcccgcaccgcgctcgatgagcggcgcgacgccctgacccgcgaggagtacccgctcctcgaccgcgaacgttccctgcgccaggagcgccagtcgctcgagcaccggcagggcgccatgccgctgccgatgcacgaggcccggctcgcgatggcgcgtgccgccggcatcgacccggccgagctgcccttcgtggcggaactgctcgacgtgctgcccggcgaggagcgctggcgcacggccatcgagtccgtcctggcgcccgtcgcccgcacgctgctcgtcgaccaggaccgcctcggcgacttcagtgaggcgatcgacgcactgcgcctgcccgttcgcgtgcagttcgagggtgtgccgaccggcccgcacctcgacctcgacggcgacccggccatggtctccggcaagctcgcgatcaagccgtcgccgttcagcacgtgggtgcgcgagcggatcgagtcggaccgcaccgatgcccgctgtgtcgcctcggcatcggacctgggcggtggtggccgccgggtcaccgagtccgggcagctgcgcgacggccgtcgtggcgcgcacggtgaccgccggcaatcgaacgtcatcgggttcacgaacgaggcccgtgtcgccgcggtcgagcaggagctcgcctcgatcgccgaggacctcgcgacgctcgaggcacgccgcaccgacgtcgcacaggacctcaccgcgctcgacgtgctccgcgccgcccaccagcacgtggtcgacgccacgtgggccgcgatcgacgtcgacgggttgggcgcctccctcgcccggctcgacgaggaacggcaggcactgctcgccgccgacgacggcctccggacgctccgggcctcggtcgcgcggctgcgcaagtcgctggacgaggctgccgaccgccgctccgccgcacggctgtccgtgcagcggctcgaggagcgccacgcggtgctcgtcgacggccaggacgccgccgccgagatcctggagcgcttcgagtcctcgcccggttcgctgccggacgaccagcagtcccgtctgctcgaggagaccttcgaggagatcggtgcgccggacggcgtcgacgggttcgacgacgccacccgacggctgaagcgccggctcgaggagcggctctcccaggccctggacggcgctgcggcggcctcgacctcgttgacgctgacgttccagcggtaccaggacgcctggcccgacccgaacctcggcacgggcgtcgcgtcgtacccggactaccacgcgatcctcgaccagatcgtggcgaccggcctgcacgcgcgtcggagcgaatggcgtcgacggctgtcgcagtggagcggcgaggacctcgtcccgctcgccggcgccttcgaccgcgccgtcgtcgagatcgaggagcgcctcgagccggtcaacgagatcctgcgggagctgccgttcggcgcgaaccgggaccgcctgaagatccagatccgccgggtcacccgcgaggacgtcaccgcgttccgccgcgagctccgcgccctgtccgcctcggtcgacaccgagctgaccgacgacgtgctcgagacccggttccgacggttccggcgcttcatggcggtcatccggcccgacccggacgccgcccgtggccgcaccacccagcgcgacgcggtgctcgacgtccggcggcacatggagatcacggcggtccggtacgacaccgacggcaacgacctcggcgtgtactcgtcgctcggtgacaagtccggtggtgagacgcaggagctcgtggcgttcatcgtcggcgccgcgctgcgctaccagctcggtgacgagacccgtccccggccccggttcgcgccggtcttcctcgacgaggcgttcatcaaggcggactcggagttcgccggccgtgccgtcaccgcgtggctccggctcgggttccagctcgtcgtgagcgcgccgctcgacaaggtcacggcgctcgaaccgtcgatggagcggctgctgtcgatgcggaagcaccccgagacgggccactcgtccatcaccgagatcgcccgggtggagccggtcgccgtctga

SEQ ID NO: 43571 - DNA, 1434 bp, Dietzia sp. UCD-THP
gtggactacgcggcgatcgacgcgttgcgtgaacgacatcccgcgtggcgaatgctccgcgccacccatgcgccgctgctgctctcgtttctcggacggttcttcgtggatgaggggcacggtgccagcccggagggggagatcatcgacgccctcgacgacgagctctacttgcgcaacggcgaggatcccgagaacccgcggttcaagcgggccgcagccgactatctggccgagtgggcgtcgatcgactcggggtttctccgtcgcttctatccgctcggcaccgacgagatccactatgacgccacacccgcgctggagaaggcgtactcgtgggtccagagcctgcacgcgcggcctttcgtcggcaccgagtcgcgactgcagaccgcgatcgaactgctccgccagatcgcccagggcaccgaagtcgacccggagatccgtctcgccgagctgcagcggcgaaagcaggagatcgagcgggagatcgagcagatcgaggccgaccctgaagccggattgctcgacatcaccgccgtgcgcgaccgctaccagcagttctcctccaccgcccgcgaactcctcgccgacttccgcgaggtggaggagaacttccgcgcactggaccgctcggcccgcgaacgcatagctacgtgggagggcagcaagggcgatctgctggaggagctcgtcagcgggcgtagtcgcatcgactcctccgatcagggacgcagcttccaggcgttctacgacatgctcctgtcctcgtccgggcaggaggaactctccgccctgctcgagcggctcaccacgatcgatgagctgaaggcggaccgcagcatccgcaccgtgcaccacgggtgggccgaggccgccgagcgcacccagctgaccgtccgccagatctccgagcagctccgccggttcaccgacgatcagatctggctggagaaccgtcgcgtcctcgacctggtccgcgagatcgaagggaccgcgttggcgctgcgcacaggcgcacccccggaattcggtctcgagttggagcaggccggcgtggacgtgtcgctacccaccgaacgaccgttgcacagtgtgcggcccgcgtccgaagtggacagtctcctgccgccggccgagcaggaggacgtcgacacctccgtgttggccgagcaggtgatcgtggaccccgcccgcctcgccgccaggttgcgcaacctcgtccccgaacgcggtacggcattgctcgaggacgtcgtcaccatgtaccccgtcgagcacggcgccgcggaactcgtcggctacctcgctctggacaccgacgacatcgaggtgaccaccgacgagcaggaggagacggtgatcgagtacgacgaggccggccggtcgatgcgggcccggatgccgcgcgtcgtggtgagacgccggtga

SEQ ID NO: 43572 - DNA, 576 bp, Dietzia sp. UCD-THP
gtgaacccggacgagagggcggtcgcgaccagcgccatccgcctcatgcagggcgtcgtctaccaggaatcggacgcatgggaggaccttctccgccatcgtggcgccgttcgcgaccacttcgcggtgatcgggctcgacgtggtgatagacgacgacgagggctacgcctatctgcgcaccaccgagccgcaggacggtgacgaaccgctcccgcgtgtgatcagacgccgcgcgctcacctacgccgacagccttgtgctggtgctgctgcgcaaacggatggtggagttcgaatccgccggcgaccagggccaactggtgctcactcaggacgagatcatcgagatgatccggctcttcctggctcacagcaccgacgaggcccgagtgctcaagcaggtcgacacgtcaatcaaccgcctggtctcgatgggattcctgcgccagctccgaggccggcgggacacctgggaggtgcgccggatcctcaaggcctacgtggacggtcagaccctgtccgacttctccgccaaactggccgagtacgccgacgggggtgcagacgatgagtga

SEQ ID NO: 43573 - DNA, 3387 bp, Dietzia sp. UCD-THP
atgagtgagggcctgttctcctccgtcgacctcgctccacagggacgtcccgggttccggttggtccggctcgaggtgctcaactgggggaccttcgacaaacgcgtctggcaactggaaccggatggggagacattgttgctcaccggcgacatcggcagcggcaagtccacgctcgtcgacgcggtaagcaccctcatgctcccctcgcaccggatcgactacaacaaggctgcgggcgccgcgcgcaaggaacgcactctgcgctcctacgtggaaggccaccacaggaccgagcgcaacgagtccaccggcagcgtgcgaccggtggggctgcgggaccgacggtcgtattcggtgatactcggcgtctttgtcaacgaggggtacgacgacgaggtgaccctcgcccaggtctttcagcagctggacgccacaggacaaccctggcgacgcttcgtcaccgccgaccgggcgatgtcgatcgagtcccacttcaccgacttcggctctgatctgggcgacctgctcaagcgcctccgacgcgacggcgccacggtggagaaagacttcccgccctacggtcgtgccatgcggcgcctgctgggcatccggtccgaacaggccatggaattgttccaccagaccgtctcgatgaaggccgttggcgatctcaacgagttcgtccgcacgcacatgctcgaacccgcggatgcctccgagcggatcgaggggatcatccggcacttcgaggacctcacccggtcctacgatgccgtccaacgggcccgcgcccaactcgaggcactggaaccactggtcgcctcgatcagccggtacgagagcgcggtcgagcgcctggaccgtctccacgaggaacgcgtggcgatccgcccctacttcgccgaactacggatcgagctgcgccaggcggagatcgagcgggtccgcgccgaggtcaccaccatcgccgcccagctggagcaggtgcgcaccgagttgcaggccctcggggcggagcgcgaccagctcctcgcggcccgggccgaggcgggcggtagccgcatcggcgagctggaacgcgcagcccgcgacgcgggcgcgcaggccgaggagcggagaacaaggcgagagcggttcgaggacgccgtcgcgagggccggcctcgacccggtcggcgacgccgccggattcgcggacctcgccgtccaggtcggtcgggcgcaggcagagatcgagacgcagatcgccgagctcaaggagcggtacgacgcgctggtcctcgggcacggtgaggagaaagcgcagctccgcgaggtgcaggaagagctggacagcctcgcgacccgccgcagcaacctgccgaccgaacaactccaggtgcggtccgccctctgcgcggaactcggagtgtcggaagaggagctcccgttcgccggcgagcttttggacgtgtccgaagaacacgcgcagtggcggggagccgccgagcgcgtgctgcgcggattcgcggtgtcattgttggtgccgcagcggtactacgcggacgtcgccgaatgggtcaacgcccgccggctgaccgcccggcgctccgacggtcgcgagatgggggtccgcctgacctacgagcgggtcccggagcggcacctgcccttgcagcgcccccattccgacggactgctgctcgccgacacggtggagatcgccgacacaccgctgcgcgggtatctgagcaaggagttgttcgcccgggcggaccatctctgcgccaccacggtggaggagttccggcacgccgagcgggcggtgactcgcgagggccaggtgcggtccagaaatcatcacgtcaaggacgaccggcggtccgcggccgatccccgcggctgggtgctgggctggcgcaacgatcagaagatcgccgcactgcaggatcggcgcggcgacctcacccgttcagtggagcggctcgccgcccaactcgagtcggtgtcgcgggagcagaacgaggtgggggagcggcgcaccgcgctctcgcgggtggcggactatccctcgtggcgggatctcgactgggaggacgcccggtcgcgggcggatgccgccgatgccgagcgtcgtcgcctgctcgagggcagtagtgaactggccgagatcgacagacgcgtggcggaggtcgacacacgagtgaacgagctcggccagaccaaggacactctcggcgaggcgaagggcagtggagaaagccgcatcgcccaggagagcagtcagatcgaccgcgaccggcgcagcctcgacgagctgacggcggacatccgcgcagcagcggcggacatctaccccagactccggacacgacagggccgcgcggggtcgacgaccgcggatcaagccgaactccacgaacgacgactgtctgacgaaatcgacaaggagaccggccagacccagcgcgaactcaacggctacaccaccagtttgcagcagggtatggcggagatccggcgacgctggccggagcagaccaccgagatggacgcctcggtcgacgcgcgcggggagtacatccgcttccacgcgcaggtggcccaggacgatctgccgcgcttcatcgcggagttcgaggagcagctcaagaagaacgccatccgcgaactcgccggcttccacaactggctgcagcgccaggccgatgacatccagcagaagatcgagaagatcaacgaggcactcggagcgatcgacttcaatcccggacgcttcgtgcgcctggatcgggagaacacggtcaaccaggatgtgcgggagttccgagccgacctgcgagcggtcaccgacgacaccctcggtggcgacgaccgctactccgagcagcggtaccaggaggtgcgggctatcctcgagcgactacgcggccgtgagggccacagcgataccgacaagacgtggcgggcgcgagtcacggacgtgcgcaactggtacaccttctccgcctcggagcgcgaccgcgagaccgacgaggagtgggaacactaccgcgactcggacgggaaatcgggcgggcagaaggagaagctcgcctacaccatcctcgccgcgtcgctggcgtaccagttcggcctggagtggggcgcggagaaggcccgcgacttccgcttcgcggtgatcgacgaggcgttcggtcgcggctccgacgcctccacccggtacgccctcgagctgttcgccaagctcgggatccagctgctgatcgtcacgcccctgcagaaggtgcacgtgatcgcaccgtatgtgcgctccatcgggtacgtggacaatgtggagggcagatactcgcggctcgtcatgatgtccaccgaggagtatcaccgccagcgcggcagcgcgtga

SEQ ID NO: 43574 - DNA, 1164 bp, Dietzia sp. UCD-THP
atggtcgccggcgcgcggaaatgggccacaccggagatggtccgggagaaagtgcacaggcggtgggtcgacggcaccctgctccgggctttcgcccgcggtgaggctctgatcccgcttgaggttccactgggaccgccgagggcggcagagatcggtggacgcttcggtgaggtgcaggactggatggcagcactcgaggcgggcagtcgcgacggcagccgatacaccctgcggtacacggcggtaggcggccggagagtcggacgcaatcagatccccactcatgcagtggtgacccggttcgaccaggcctgggcgttgctgggagtccggtcgcaggtgtccatcttcgaacagatgctggcggaggccccggacgccgcggtggcggactggctccttgccagacccgtcgctgcgctcgagtatgcacaggagtggccgcagatcctcgcggcgtaccgctggctcgagggcgcccgcgggtcgggcaggtacctgcggcagatcgatgtccctggggtggacaccaaggtcgtcgagagtcaccggacggtgctcgcaggactcctcggggtgtcgcgcaacgccacctcgttcctcgaggatctgggtctgcgcaccaagccccagtacgttcggttccgcatggcagggagcgtcgcgccggcttcggtcaccgaactgtccgtgcggccggaggagctcgacggactcggcatgtccgtgaccactgccgtgatcgtggagaacgagatcacctacctcacgctgcccgtcccggacgccggggtgttgatctgggggaagggattcaacgtggcccgtctcggtcgctgggacgctctgcgtgaggccgacgtgcactactggggcgacctcgacacccacggcttcgccatcctccatcggctgcgcacgcatctaccgccggtgcggtctttcctcatggatctcgagaccctccacgcgcaccctcgacgatggggacaggagtcctcacccaccagcgctacactcgatcgactgacggcggcggaggcggcggtctacgacgacctggtctccgatcgctacggcgagcgcgtccggctggaacaggagcggatcgactgggcctgggtcctggagcgattgccataccgaccagacgaggcatga

SEQ ID NO: 43575 - DNA, 1437 bp, Clostridium stercorarium subsp. stercorarium DSM 8532; identical to SEQ ID NO: 43425

SEQ ID NO: 43576 - DNA, 654 bp, Clostridium stercorarium subsp. stercorarium DSM 8532
gtgaaaatgggtgaaattaaattgaacctttctatcaaggaagaaaacatgccgctgtttaaacgatgtgtacgtaagttattgggctcaacgtttattgtcggggataaagatgaaaatttatatgcttttatctcaagggagtcaaacaggcaggatgtttctgactatcttcgtatgataggttttgatgtattagtggatgaaaaggtgcgtattgcaatgctgaaaccatatgaaggtgatgaagagacacctggattaaaacgttctaatgttgtggtattcacttcagagcaatatcatcttttattggttttatgggaagcttatttagaaagtcttgggtatagcgagcaaaacattgtatttttaggtgatttaatagataaaatgaaggcgtacaatgtagatatggacggaagtaaactgttcgccgctttaaaaatatttaaaaagtatgatcttatagattttgatccgaataacaaatctgaggatgcaatcattacattatatccttctttgcaattcgggtggaatattgaacagttcaggacagttgttgaggagtatatgaaagagaatcagtatgaagtgagtccggaagatgaaaatatagattttgaaagtggagaggacgatacagaatga

SEQ ID NO: 43577 - DNA, 3288 bp, Clostridium stercorarium subsp. stercorarium DSM 8532; identical to SEQ ID NO: 43427

SEQ ID NO: 43578 - DNA, 1221 bp, Clostridium stercorarium subsp. stercorarium DSM 8532; identical to SEQ ID NO: 43428

SEQ ID NO: 43579 - DNA, 1416 bp, Clostridium termitidis CT1112
atgcagatatttgatattgttaatgaagatttattccggccattaacgggaattaacaaaagaagatatgtagatgtactaagtttactatgggataaatgtaaacgcatgccaatgtatgcagtcgaaaaaagtacaattattgatgaagtggaatcctattttataggtcttggcgagagaatcctattagatgaatctgataatatggatgatgctgagttagcatattcttctgattgcagagtaattgctacagtatttttgaggaaacttaaaagtactggctggttggatgaaaaagaaggcgaatatgaaaatgagtcatcacttgcaataaattataagataattccaatcatcagcgcttttattgaaatagttaatcctaaatttgttacatataaagggaaactatttaaaatcttcacactgctaaacagtattgaaaagcatagtagcccttatgaagctgtgttaaaagaagtatcagaagatatggttgatcttaacctatcccttcgtcaattggctgcttcgattgaagaacatattgatgtgcttacaaaaggaaaaactccagaagaggttctgaagttttttgaaaaatacgaagaaaaaattgtaataggagcataccatcgtttcaaaacaaatgataacctgttttattatcgaacgagtttgtatgagcagttagatctgtgtgagacagattatttgaatatgttggtcaaggacttttcagtggttgagcaaaaagatgaaattgattcagtttttgaagtaaagcgcttgataagtaaaatgcgtgaagacgttcaagaaatggaaagtatcatgagagtgattgataataggcatatcttatataggacaagggctgtccagcgggcacagttcttactgttatcagatggaagtgtaaaaggtaagataaatggacttttacagtactatgcaacccaaataagagacaaggatgaattgtttgaatatgacgaaacaacggcaaactcaatgtttcagatttatggccaaaattactacagttatgaatctttagcaactccgagcagtaggaagaaaccaactgaaatagaattaatgacaagtatagaagcactagatgctaaaatagttgaaggtgaacaaaataagttacttgaatacgcaaaaaatgctcttacatctgaaaatgttaatagttatgcaaaggaaattttgcacaataaaaaagcggtatcagcgggcagtatttttaggcaagatgaatcttgcctggtaaaaataattggattgtttacttattcccaggcctatgacagaacatttgatattataaccaaggacaactatgtagtccatgcgggtgtgaagtttaaagactttattattgaggaaaggaagaaatag

SEQ ID NO: 43580 - DNA, 582 bp, Clostridium termitidis CT1112
atggcaggagatataagacaagaaattgcaaactacttattgaataattgttttattattggcaatgtggatgctactagagaaaagtattattatatcattaaccacgaagaagctttccgcgaagtttttcagccactaggttatagtgtagtaattcatagaaacctgagagtagtacagttagtaaatagtcttggagcaggaagacttatacttagaaaatatgaaagtataattttattgatactacgacttatatacatacaaaaacgcgaaagtttatcaaccaatgaagctatggttactgctagtgttgaagaaatcaagaacgaatatgataagcttaatttaccaagaaagcttgataaaaaattacttgaggattctttggtaaatattaaaaagtacaatttagcaatgccactagataaacttaatgatacagatgctaaaattcaaatatacccttctgtcatgcttgctatgccggattcgggaataacaaatgcatacgatgcaacgaaagaatttttgttaaaatacaagaattcaagagatagtgaggaggacaaggtatga

SEQ ID NO: 43581 - DNA, 1209 bp, Clostridium termitidis CT1112
atgagagattattacaaattaattttaaatggattcatagagatatatgaacggcgagaactatatataaatagacaagagaatgtacgcgtagtccaagttgttcctgaaaaagaatttaaagaatatacggatagatataatcatgagtcatacagagagataaatgcagcaatagaaaaaatagtacgagaaggattggcagaagctgtttgcaatgcttctggaaaatatttaaaaataaaactagttgcttctaaaattgatgaaatctatgaaatactgaaaaagaaaccaattcctttgctatgtgaaaaaatgaggaaaacgctgctaaaagttgattttcatggaaataaattaataatggatttctgtaaagatcaatgggcattgatggaagaatgtaaggatattccatatgggattgggtatgataatgaacagcttgcaaaagtagttagaactttgcaggccattatggatttgaaacaagagacatacgtaaggaatttttctacagcattatatagggattcaaaagagtttcaaaagaatatgcgtaatactattcaaagtattttatatgattatagcgatattgttgttgaaaaagagagagttttggaaatgtacaatctctttgataatccaacttatgttatgattaagggaaatgctgttattgagattggtacaaccaaaattattttgtcagaaattgatggcggcattgcgattcccaatgctgcgttaaaaaatataattaattgtaaaatatgtacagataaagtaattacagtagaaaatcttacaacttttcatgacacagatgaaaaaaaaggggttactatttaccttggtggatttcataatgaaacaaagcagaggctattagaattaatatacctgcagaatggggaggtaaagtatttccataaaggcgatttagatgtctatggttttgctatattagagaatctcaaagaaaaaacaggtataccatttgaaccattagaaatggacattgaaacactaaaaaaattctatcagtgcggattatataaaaaattaacttctgctgataaaagagctatgaaattgaacaatcttataaaatataaagatgtttttgattttatgattttacatgattgtaaggttgaacaagaatctgtaaaggcattgatgctaatttgtaaggaataa

SEQ ID NO: 43582 - DNA, 1443 bp, Desulfotignum phosphitoxidans DSM 13687
atggatgtcgactatgacacactccaggccttaagaaagacccatccggcctggaagctgctggtggcggatcacagcccgctcattgccgcatttttgcagcacacctttattgtgcccaaccagcggcggctcagccgggcagacctggcctcggccctggaggacctgttgtttaccctgcgggaaacccagggtaaggatgcctttccccggtcggcccaggcctatctggatgactgggccggcgaggacaaggggtggctgagaaaattctatccacaggggtctgatgaggtgcattatgatctgatgccggcggcggaaaaagccctgtcctggctggaaagcctcatccagcggccatttgtgggcacggaatcgcgcctgatgaccatttttgacttgctgcgccagatggtggaaggcacggaaaaagatgtgcaggtgcggatccaggagctggaaaaaagaaaggctgccgttgaaaacgagctggcgttggtaaggtcgggccgtgtggacatactggatgacacggcggtaagggaccggttcctgcaggtgagccagactgcccgggaacttttgggagatttccgggaagtggagtacaatttcaggcgcctggacagaaagatccgggagcagatcaccttgtgggagggcagcaaggcgcagctgctggctgattttttcggggagcgggacatgatcgccgaatctgaccaggggaaaagttttaccgcgttctgggacctgctcatgtccccggcccggcaggaggagctgaccgggatgctggaaaaggtgtttgacctggcagcggtcaaggcactgtctccggaccggcgcctcaagcgggtgcattatgactggctgtccgccggcgaacatacccagcgcactgtggccaagctgtccgggcaattgcggcggtacctggatgaccaggcgtttctggaaaacaaacgcatcatgcaggtgatccagcagatcgaggcccgggcggtcaagctcagagaccagatgccacagggcagcatcatggagatggacgaggcatctccggatattcatctgcccatggaacggcccctttataaaatcccggtcaaaccccggatcacggacacggtcacgctgggggacgggtctgacattcctgcggacatgctgcatgacattgtgtttgtggaccggctgacgctcaaacaacggatccgcaccgccctgcagacccgtgaccaggtcaccctggcacagatccttttcgaccatcccctggaaaagggcctggccgaactggtgacctacctgaccctggcagccgaagatgacaacgcctggtttgacgacaccttgacccaccgggccgtgtggaccgatgccggcggcatccgccggcaggccacattcaacgccgtgattttcagcaggtaa

SEQ ID NO: 43583 - DNA, 690 bp, Desulfotignum phosphitoxidans DSM 13687
atggacataacacaaccttatccatctgacatctcccgccccctggtggcattgatgaagggcgtggtgttcagggataatgatccggccctgtggcaccttctggaagagagccagatggccgtccgggactatgtccgggtcatgggcctggatttgatgctggacacggccgaagggtatgcctggctggccacccgggaaccggaacaaggggaagaccccctgccccggttggtgggaaggcggcagctgtcctatccggtgagcctgatcatcgcactcttacgcaaaaaaatggcggaacaggatgcagccggagaagacccccgcctgatcctgtccgtggaggagattacggacatggtccgggtgtttttgccggcatcgggcaacgaggcaaagatgatggaccggatcaacacccatctgaacaaaatcgcggacttaggctttatccggcggctcaagggcgaaaaggacaaaatcgaggtgatccgcattctcaaggcgtttgtggatgcccagtggctcagtgaactggaggatcgactcaaagaataccaggcccatctggaagatggcaatgattccggttcggccgatgtcagtcacacagatccttcgggtggcagcgacatggacggaaacattgattccacccccaccggggaccggggcggtggctga

SEQ ID NO: 43584 - DNA, 3378 bp, Desulfotignum phosphitoxidans DSM 13687
atggaacagcagcttttggactttgcatcggatgatgctctggccgggttccggcttcacaccctggaagtcttcaactggggcacctttcacaaacaggtgtggcgactggatctggacagccgcaacagcctgctcaccggggatatcgggtccggcaaatccaccctggtggatgcggtgaccaccctggtggtgccggcccaccgggtggcctacaacaaggcggccggggccgacacaaaagaaaggtccttgcgctcctatgtcctgggatattacaaatcagaacgcagcaccacgggtcatgcggcaaaatcggtgtctctgcgggatcacaacagtttttccgtgatcctgggggtgttcaaaaacgctggatatctacagaaagtcaccctggcccaggtgttctggatcaaagatgcccaggccccgccggaacggttctatgtggtggcggaccaggcgttgtccattaccgggcatttcagcggattcggcacagacatcgggcagctgaaaaaacggctgaaaaaaatgaaagatgtggccgtgttcgacactttccccaaatacggggccgccttccgaaggcggttcggcattgacaacgaacaggccctggccctgtttcaccagaccgtgtccatgaaatccgtgggcaacctcaccgattttgtcagggaacacatgctggaaccttttgatgtcaccccccgcatcgatgccctgctgcaccattttgacgacctgaaccgggcccatgccgccgtgctcaaggccaaacagcagatcgagcggttaacccccctggtggcggactgtgacacccacacccagctggaaaaggaggcggaacagctgcgggaatgccgggaggcgttggccccgttttttgccgtgcacaagaaaaaactgctcaaaaaaagaatggccaatctaactgacgaacatgcccggctgacacggaaagcaacggccctggagagcgaacacaaagaacaaatggcccggcgggatgacatccggcaggccattgccgaaaacgggggcgaccggctggaaaggctccgggctgatatcaagcgatttgccgaccagaaatacaagcgccaggcccaggcacagcggtatgcagatctggcacaggatctgtcattcaagcccgtacacacccggacggattttgatgacaacgccgctgccatccaggaccggcagcagaccttgaaaaaaaaacaagccgattttctcaaccggcgcaccgagctttccatgcagttccgggatttcaaaacagaccatgacgagctgacaaaagaactggcttccctgtccgcccgcaaaagcaacatccacgcccggcagatcagtatccggcagacattgtgtcgccatcttgacatggatgaaaccgacctgccctttgccggtgaactgatccaggtcagagaagatcaagctccctgggaaggagcggccgaacggctgctgcacaatttcgccctgtccctgctggtgccggaatcccattaccgggccgtggccgcctgggtgaataacacctttctgcaggcaagactcgtgtattacctggtgagaccggtcccctcaaataaatccgttgatcttcatccggattccctggtgaaaaaactggccgtcaagccgaacaacaaatgttacgactggctggaacaggaactggcggcccggttcaactatgcctgctgcacggatatgcaacggttccaacaggaaccctgggccatgacggaaaaaggacaaatcaagtccgggggacggcgccacgaaaaagatgaccgccgggatctcacagaccggtcccattatgtgctgggctggaccaatgaggccaaaatccgcacattgaaaaaacagcaccggcacctggaagaacagatgcagaccaccggcattgacatatcccggctggaatcccgtcagaacaccctcgaagaacagctgtccaacctgatccgcctgggggaattccaggatttttccgatttggactggcacgcgtcagccgaagcgatcctgcacctggaagcggaaaagcaggaactggaaacccggtccgatatcctccagaccttggggatgcagctggaagccctggaaacagagataaatgacacggaaacagccctgaaacaggccagagacgacctggccggaaaccgggaaaaacagaaccagacccggcacatggcagacacctgtgaacaggatctggccggctgggccgccatggaccctgaccaggccactgctttgtaccggcatctggaatctttgcgcataaacgaactgcctgcccacaccctgaccattgaatcctgcagcaacaaggaaagagaaatgcgggagcttctccagaaccgcatcaacaacttagacaaacgcatcgccaccctggcggcccggatcatcagagccatgcacgggtaccgcagggattatcaactggaaaccagggaagtggatgatgccgtgtcatccggtccggaataccgggccatgctggatcagctgcgctcggacaatctgccggaatttgagaaacggttcaaggaactgctcaatgaaaacaccatccgggaggtggccaatttccagtcccagctgctccgggaaaaagagaccatcaaagagcgtatcgagcgcatcaaccggtctttgtccgacattgagtacaacccgggccggtacattgtgctggaggcggaactcaccccggacatggagatccgggattttggccagcagctgcgggcctgcactgaaggggcgttgaccggatctgaagaagaccattactctgaagccaaattcctgcaggtacgacgcgtgattgaacggttccggggcagagagggcacggtggacctggaccggcgctggacaaaaaaggtgacggatgtgcgcaactggttcgtgtttgccgcctcggagcgctggaaacaggatcacaccgaatatgagcattacaccgattccgggggcaagtccggcgggcagaaggaaaaactggcctacaccgtgctggcggccagcctggcctatcagttcggcctggaatggggagcgatcaaatcccgtaccttccggttcgtggccattgacgaagctttcggccggggttcggacgattccacccggtacagcctggaactgttcaaaaaactcaacctccagctgctcatcgtgacccccctgcaaaagattcacatcatcgaaccctatgtatcgtccgtgggactggtgtactgcccggacggcacagaatccctgctgcgcaacatgagcgtggcagaataccgggactgccgggaaaggactgaaacgtga

SEQ ID NO: 43585 - DNA, 1209 bp, Desulfotignum phosphitoxidans DSM 13687
gtgaccgctgcctggacccggatccaggatctcaaggaccggctggagaaaaaatggcgcaaagggatatttctggcccagatgatcacgccggaaaacttcacccccctgcgcatcccgctgaaacatcccacggcccgggaactggcccatgattttgccgcagcccgggactgggtggcccactgggcttttcatgaaagcgccccgggccgggccggatttgacattgaatggcatgcattcacccaccggagtttaggaaaaaaccggctgccggcagcggtgatatttcccacgctggccgatgtggtgtcttttctggggaaaacccggcaaactgagcgatttcacaccctgttccatatcatcacggaccggtttcccccactggccggcctgctgctggatcaccctttgaccgtgctccagcatgacaaagtgtgggaaaagctgctggccatcctggatttcatgaccggtcatcctttgcccggcatctacatccggcagctggaaatttccggggtggacaccaagttcattgaaacccacaaagcctggctggtgaaactgctgacctgtgtattgccggaaacagccgtggatgacacagccaaaggaccggccgcctttgaaaaccggtttggttttctgtcccggcccgcccgggtccggttccggtgcctggatccggacctgtccatcaagggattgtcagacctggaaataccggcacatgactttgcgtgcctgcctgtgcagccggacacggtctttattgtggaaaacgacatcaccgccctgtcatttcctttttttcccaacgctctggtgatcttcggccggggctacagcctgtcggttctatccgaagcacggtggctgacgaacaaaccggtctggtactggggggatctggacacccacgggtttgccatgatcgacatgatccggcattactttccccggacccgttcttttctcatggatgaagccaccttgctctcccataaacccctgtggggcaccgaaccctcccctgtgagccgggatttgcccttgctcaccccggatgaagcccgggtctatgatgccctgcgcaaccatacccacaccccgaacctgcgcctggagcaggagcggatttcgttcaccctggtacgccgggtcgtggaagatatccggatgaacaggtatttcaggtaa

SEQ ID NO: 43586 - DNA, 1458 bp, Leptospira noguchii str. Cascata
gtggactataaccttttgcaaagattatttcgttcttcttcaattcgtcttttaaaaaaagacaatgctccttttattatttattttttagaaaaatattttagaggttctgcgagaatttttgttccgtttgaggaactgaaaatactactccatcatgaattggaaaactttcgagaactcgaggaaacttttctctcaagaacagcggaagtttatataagagagtgggtcagcgaaaattttctatctcgccggattcgttctttggaaggttccgaagaaataattttggaaccgagtagcgagttagaaaaagtattttcttggatggatgatttacgttctttagaaaataaagaatcaatcggaacagaaactcgatttttttctgtgttaaataaactgaaggaaattgttgaagaaagtgtttccgatccaaaagaaaaaattagacaacttgaatctaaaaaagacgaattagacgatcaaattaaaaagctaaccgaagggaaagagataatcacttttgcgagtgagagaattcgaggccaatacttatatgcaaggaaagaagcaataggtcttctctccgacttccgtcaggtggaaggtaattttacggaaataacaaaattcattcacaaaaagtatttagaagtcgttcaaaaaggggaaatattacaatttgctctcgacggtgacgaggaattgctccaatcagaacaaggtaaaagttttcaagctttctgggactttctcaggtccgaacaaagccaagaaaattttgaaagtatattagattctctttattcattaaaagacatccttgtcttggacgacagaaagttttttcgaaatttcaaacggaatctaagagaagccggatccaggataaacgctgttgtttccagaatgtcggaacaacttaagaaaagtcttgtagagcgtacacttcgcgacaatcgaaggtctaaagcaattatttcggaaatcaaacatcttgttttggaaaaaaagttcgatctttcggaagaaaacttttattcaatggaagaaatattcgttcatcttccgatggacaggcccctttggaaaggggattctgcggatactccaagatccattcaaatatccgggcctgacgacgaaatgatttctctagattttttagactcgattcgaggaatcaattttgaaatatacgaacaacgaattcaaacattgcttcgtagttttccagaagtttctctagaaaaagttttggaggagtttccagagaatatcgggtttgaaagtatcgtagcatatgtttttatagctagcaagggggaatatcattctttggacgattcagaatcttttcttttttatcccgcgttcaattttacacaaaaagaaactcagagtgtctatcgtgttcccaaagctacttatagagtgggtaaggatggataa

SEQ ID NO: 43587 - DNA, 564 bp, Leptospira noguchii str. Cascata; identical to SEQ ID NO: 42586

SEQ ID NO: 43588 - DNA, 3357 bp, Leptospira noguchii str. Cascata
atgacggatttattttcttccggcgagattactgcaaatacaggatatagattaaagtctcttgaaattctaaattgggggaccttcaacggtaaaatctggaaattgaattcgcaaggagaaacttttcttttaacgggagcaaacggatccggaaaatcgactttggtggatgcaatccttaccttactggttccctctactaaaagaaattataatttagcctcgggcttggagagtaaaaaacgggatagatcagaaaaatcctatgtggaaggacactatggccgagcttcctcaggcagcgagggaatccttaaaatccgaggaaaacaggaagaatgttattccgttctttcagccgttttcaacgctaaaggaaaatttcctattatcagaattgctcaaattttttggtttgaatccagcgacttaaaaagaatttatctcatttccgacgatagcttggatttcgaaaaagatttggttttaagaaatagaaccatcaaagaactccgatctgatctaaaaaattcgggcgccaggctttatgataatttcaaggcttacggggttgactttagaaagatggtcggcctgggatctgagaaggcgattgatctctttaatcaaattgtagctataaaatcattaggtgttttgaatgaatttgttcgagaacatatgctcgaagcgaaagacaaaagatttagaatcgaagaattggacaggaattttttcgatttgaatgaaacatatgaaacgattctaagtgccagagaacaattacgactcctggagcctatagaaaaaaaagcattcgaatacagagattggaactctaaagtagaaggggttcaggaacttattttgtttgcacccgaatactttacgcaaaaaaaatacgaactttgtaaaaagaaagaacaggattatactctcgatttgttccgagttcaggaccacttaaaagaattaaattcgttaactgaatccttaaaaaaagaagaacgagaattgtattattcattagaaaataatgatactcgaaagcgaatttccgatttgaaaagaaaatttgaggaaattcagacaaatctaaataaacgtcgctccgaaaggaaaaaatattccgagtatcttcttaaacttgatttagagaacgttttaatagaggattctttttattcgaattttcgtaaagccggcgaaaaacttcaaaaatccgattcgacccgtgattcaattagagatcgtcttacggatttaacagttaaacggaaggaatctaaagttgaatttgattcggtttattccgaattggaacatctcaaaaaaagcagggataatcttcctagaatcgtgtcctccatgagggaaaaaatctctcaaggcctgggagtttccgaaaaaaaatttccatttgtctgtgaacttatccgtgtaaaggattccgagaaagaatggaccggcgcgttggaaagattattacataatttcggcttacgtatgttagttgacgaagaggattacaaagcgctttcctcttatgtgaattcttctcatctaggtggaaagatcgttttttccagaatgttgactcagggaggtcctattttacagccaaaggataaggatgaagttttttacaaactcgaaattaaaccttccttatctaaatttcaaaaagaatggctggaaacacagattctgaaagaatttggacatatctgcggggatctacagcgtttgcaaaaagaagaaaaagctcttactaaggaaggtctgatcaagtccggaaaaattcgtcacgaaaaggatgatcgtaaaaatataaacgacgcaagagattatattctaggctggaacaatcgggaaaaaatttctgcgcttgaatccgaatttatgagattgggcaaggtgatcgataagattgaatcggaaattaaaaaagttgaagaagaacaaaaacaaaacgacctatttagagacgacctcaaatcctttctacgcttcgaacagttctctcaaattgacgaccaaagtttggaagaacctcttgaacaaacacgaaaagaaatccaagatttggaagtcctttccgaggaatacggaaaattaaaagaacaatatgaatctgcaaaagttcgccttagcgaggcagagggcaaggaaaaagaaaccaccaaggaattgaccctcttagaagagcggttctcgaatttaaaaaaagaaatggaaaccttaaattccagaatcaaagagttcgaccctaacagacggactcgtttggaaccgatcttaaatgagcgtctcggacaagtaatctttaacttagattcgatcttagaaaaagagcgaaagtttttggaagttcttattaaagaacgagatgattttatagagaaaagagattctatcggtgaagaattaaacaagggtatggatcgttatgtaaaaaaatttagggaagaagcggatcgagaagaattatcggtttctattttaaatgcagaagcatttgcagaattgacggaacggattcgtaaagataggctgcctgagttccaagataaattccgaaatatgatgtcagataaggtagctaaacaaattctagagtttaaggcggaacttgaggatgatgtttcagaaatcaaggaccggatagatgaactaaatgaatctttacgttatcttgactattctaaaggtaaatcttatattcaaatcagatacttcgaaacaaaagatcgggaaattataggaagtacaggttttaaagaattattgcggaatagtattccggatatgggagatagttctaataacgaagaaaatttttcaaggattcgagaattactcgggaaattgaaaggagagaatggatccgatcgttggtccaggctcgtaacggattctagaaattggttggactttcaggcggcagaatttcaaagagacacagacacgatcattcaggtttatgattcttcggcaggtaagtcgggtggtcaaactgtaaaacttgcctatacaatccttgcctctgcgattgcttatcagtttaaaatccgcgagctaaattcgtttcgttttgtagtgatcgacgaaatgtttaataatttggataacgaaaattctagatacgctatggatcttttccgtcaattaggtttgcaattactcgttgtgaccccgatggataaaattacggtagtggaaccttacgtccagagtgttcattttgtaaaaaacaactcagatggtaatgattccagagtttatctaattacgaaggaaaaattagattcggagaaaatcgaaaatacagatcggaaagtgggaaatttatga

SEQ ID NO: 43589 - DNA, 1170 bp, Leptospira noguchii str. Cascata
atgatttctctggaagaaatccgtaagaaatgtttattatattatcataaagttttaaatcgagcagtcttaggtgagaagtcttttccttgggaaatttccacaggcaaaatagatcccgaagagataatacacaacccgtctttactagaaaaaataaaaaaggaatctaaggaaaaaaaaggatttgggtttctgctcgtttcttttcaaaaagaaacgagaaaatttggaacgcaaactctaccttcgaaaattcgattcgaagacgaagttgactttttacgttttttgcataaagaacaagaattttctttctacaaatcagattgtgatatgattttatttaaaattcccgcacttatggaatggatattaaaaaatccttttctagtcattcaagaatctgggaattgggaagacctactttcggtgtgttcctactttttaaaaaatccgagacctggattatacatccgtgaattgccgatctctgttcctacaaaatttatcgaagaaaataaaaaagtactcaggaatcttttagattttttggttccggaaaatattgattacgaaggaaaagatttcgaatctcgattcggattgaaaaaaccggaagccttggttcgtttccgtatattggatccgatcattgccgagaaatctagcggcggtttattcgatataagtgttcccgttgatgaattccgtaatttacatctatttggttgtaaacgaatttttattttggagaataaaaccaatttttctaatatcgatcattttctaacttttccgaaactttcgggatcaatcgccattttcggacagggatacggtttaggtattttgaaagattgcgtttggctgaataaaatggaaatcttatattggggggatatagatgtccaggggtttgagattctttctttattaagggagcaatactcccaaaccaaatcctttttgatggataaagaaacttttttaaagtttcagaattttgccgtcgacggtaaatattcaaaattttctaaattagattatttgacagaatctgaaaaggagacttgggaatatctacggtctctgggttcgaaaaatcgtttggaacaagagcgtattcctcaagaatatattgaaaaaactttacattcgcaattttga

SEQ ID NO: 43590 - DNA, 1443 bp, Leptospira noguchii str. Hook
ttgcaaagattatttcgttcctcttcaattcgtcttttaaaaaaagacaatgctccttttattatctattttttagaaaaatattttagaggttctgcgagaatttttgttccgtttgaggaactgaaaatactactccatcatgaattggaaaactttcgagaactcgaggaaacttttctctcaagaacagcggaagtttatataggagagtgggtcagcgaaaattttctatctcgtcggattcgttctttggaaggttccgaagaaataattttggaaccgagtagcgagttagaaaaagtattttcttggatggatgatttacgttctttagaaaataaagaatcaatcggaacagaaactcgatttttttctgtgttaaataaactgaaggaaattgttgaagaaagtgtttccgatccaaaagaaaaaattagacaacttgaatctaaaagagacgaattagacgatcaaattaaaaagctaaccgaagggaaagagataatcacttttgcgagtgagagaattcgaggccaatacttatatgcaagaaaggaagcaataggtcttctctccgacttccgtcaggtggaaggtaattttacggaaataacaaaattcattcacaaaaagtatttagaagtcgttcaaaaaggggaaatattacaatttgctctcgacggtgacgaggaattgctccaatcagaacaaggtaaaagttttcaagctttctgggactttctcaggtccgaacaaagccaagaaaattttgaaagtatattagattctctttattcattaaaagacatccttgtcttggacgacagaaagttttttcgaaatttcaaacggaatctaagagaagccggatccaggataaacactgttgtttccagaatgtcggaacaactcaagaaaagtcttgtagagcgtacacttcgcgacaatcgaaggtctaaagcaattatttcggaaatcaaacatcttgttttggaaagaaagttcgatctttcggaagaaaacttttattcaatggaagaaatattcgttcatcttccgatggacaggcccctttggaaaggggattctgcggatactccaagatccattcaaatatccgggcctgacgacgaaatgatttctctagattttttagactcgattcgaggaatcaattttgaaatatacgaacaacgaattcaaacattgcttcgtagttttccagaagtttctctagaaaaagttttggaggagtttccagagaataacgggtttgaaagtatcgtagcatatgtttttatagctagcaagggggaatatcattctttggacgattcagaatcttttcttttttatcccgcgttcaatttcacacaaaaagaaactcagagtgtctatcgtgttcccaaagctacttatagagtgggtaaggatggataa

SEQ ID NO: 43591 - DNA, 564 bp, Leptospira noguchii str. Hook
atggataaacttctttcttattctatttccatattaaggcttttgaaaggttcaatcgggatcgattcggaccctaaggtttgggaaaatctagttacctacgaaaaacaagttcgggaatactttgaaaaaatcggaatatttttacatttagatcgagaagacggttatgcttttttgcgtcaaacttcggacgaagatgatgttgagttcgatataaaacttccggttttgacgaggaagttacctttgacaaaggaggaaaccttgtttcttattttactcagagaatttattatcgagatggaagaaaaagatttatccggatcgattattctgagaaaagaagaattattcgaccgtattcatccattttttcctgactctttcgacgaagtcgatactcaaaaaaagtttgaaagactacttcgtaaatccgaggacctgggttttataaaatacatcgattctgaaaccttacgaatagaaaaaattttaaaagcgaagatcacagtatccgatttggaacgactacgaattaagtttaaaccggagaatgtatga

SEQ ID NO: 43592 - DNA, 3357 bp, Leptospira noguchii str. Hook
atgacggatttattttcttccggcgagattactgcaaatacaggatatagattaaagtctcttgaaattctaaattgggggaccttcaacggtaaaatctggaaattgaattcgcaaggagaaacttttcttttaacgggagcaaacggatccggaaaatcgactttggtggatgcaatccttaccttactggttccctctactaaaagaaattataatttagcctcgggcttggagagtaaaaaacgggatagatcagaaaaatcctatgtggaaggacactatggccgagcttcctcaggcagcgagggaatccttaaaatccgaggaaaacaggaagaatgttattccgttctttcagccgttttcaacgctaaaggaaaatttcctattatcagaattgctcaaattttttggtttgaatccagcgacttaaaaagaatttatctcatttccgacgatagcttggatttcgaaaaagatttggttttaagaaatagaaccatcaaggaactccgatctgatctaaaaaattcgggcgccaggctttatgataatttcaaggcttacggggttgactttagaaagatggtcggtctgggatctgagaaggcgattgatctctttaatcaaattgtagctataaaatcattaggtgttttgaatgaatttgttcgagaacatatgctcgaagcgaaagacaaaagatttagaatcgaagaattggacaggaattttttcgatttgaatgaaacatatgaaacgattctaagtgccagagaacaattacgactcctggagcctatagaaaaaaaagcattcgaatacagggattggaactctaaagtagaaggggttcaggaacttattttgtttgcacccgaatactttacgcaaaaaaaatacgaactttgtaaaaagaaagaacaggattatactctcgatttgttccgagttcaggaccacttaaaagaattaaattcgttaactgaatccttaaaaaaagaagaacgagaattgtattattcattagaaaataatgatactcgaaagcgaatttccgatttgaaaagaaaatttgaggaaattcagacaaatctaaataaacgtcgctccgaaaggaaaaaatattctgagtatcttcttaaacttgatttagagaacgttttaatagaggattctttttattcgaattttcgtaaagccggcgaaaaacttcaaaaatccgattcgacccgtgattcaattagagatcgtcttacggatttaacagttaaacggaaggaatctaaagttgaatttgattcggtttattccgaattggaacatctcaaaaaaagcagggataatcttcctagaatcgtgtcctccatgagggaaaaaatctctcaaggcctgggagtttccgaaaaaaaatttccatttgtctgtgaacttatccgtgtaaaggattccgaaaaagaatggaccggcgcgttggaaagattattacataatttcggcttacgtatgttagttgacgaagaggattacaaagcgctttcctcttatgtgaattcttctcatctaggtggaaagatcgttttttccagaatgttgactcagggaggtcctattttacagccaaaggataaggacgaagttttttacaaactcgaaattaaaccttccttatctaaatttcaaaaagaatggctggaaacacagattctgaaggaatttggacatatctgcggggatctacaacgtttgcaaaaagaagaaaaagctcttactaaggaaggtctgatcaagtccggaaaaattcgtcacgaaaaggatgatcgtaaaaatataaacgacgcaagagattatattctaggctggaacaatcgggaaaaaatttctgcgcttgaatccgaatttatgagattgggcaaggtgatcgataagattgaatcggaaattaaaaaagttgaagaagaacaaaaacaaaacgacctatttagagacgacctcaaatcctttctacgcttcgaacagttctctcaaattgacgaccaaagtttggaagaacctcttgaacaaacacgaaaagaaatccaagatttggaagtcctttccgaggaatacggaaaattaaaagaacaatatgaatctgcaaaagttcgccttagcgaggcagagggcaaggaaaaagaaaccaccaaggaattgaccctcttagaagagcggttctcgaatttaaaaaaagaaatggaaaccttaaattccagaatcaaagagttcgaccctaacagacggactcgtttggaaccgatcttaaatgagcgtctcggacaagtaatctttaacttagattcgatcttagaaaaagagcgaaagtttttggaagttcttattaaagaacgggatgattttatagagaaaagagattctatcggtgaagaattaaacaagggtatggatcgttatgtaaaaaaatttagggaagaagcggatcgagaagaattatcggtttctattttaaatgcagaagcatttgcagaattgacggaacggattcgtaaagataggctgcctgagttccaagataaattccgaaatatgatgtcagataaggtagctaaacaaattctagagtttaaggcggaacttgaggatgatgtttcagaaatcaaggaccggatagatgaactaaatgaatctttacgttatcttgactattctaaaggtaaatcttatattcaaatcagatacttcgaaacaaaagatcgggaaattataggaagtacaggttttaaagaattattgcggaatagtattccggatatgggagatagttctaataacgaagaaaatttttcaaggattcgagaattactcgggaaattgaaaggagagaatggatccgatcgttggtccaggctcgtaacggattctagaaattggttggactttcaggcggcagaatttcaaagagacacagacacgatcattcaggtttatgattcttcggcaggtaagtcgggtggtcaaactgtaaaacttgcctatacaatccttgcctctgcgattgcttatcagtttaaaatccgcgaactaaattcgtttcgttttgtagtgatcgacgaaatgtttaataatttggataacgaaaattctagatacgcgatggatcttttccgtcaattaggtttgcaattactcgttgtgaccccaatggataaaattacggtagtggaaccttacgtccagagtgttcattttgtaaaaaacaactcagatggtaatgattccagagtttatctaattacaaaggaaaaattaaattcggagaaaatcgaaaatacagatcggaaagtgggaaatttatga

SEQ ID NO: 43593 - DNA, 1170 bp, Leptospira noguchii str. Hook
atgatttctctggaagaaatccgtaagaaatgtttattatattatcataaagttttaaatcgagcagtcttaggtgagaagtcttttccttgggaaatttccacaggcaaaatagatcccgaagagataatacacaacccgtctttactagaaaaaataaaaaaggaatctaaggaaaaaaaaggatttgggtttctactcgtttcttttcaaaaagaaacgagaaaatttggaacgcaaactctaccttcgaaaattcgattcgaagacgaaattgactttttacgttttttgcataaagaacaagaattttctttctacaaatcagattgtgatatgattttatttaaaattcccgcacttatggaatggatattaaaaaatccttttctagtcattcaagaatctgggaattgggaagacctactttcggtgtgttcctactttttaaaaaatccgagacctggattatacatccgtgaattgccgatctctgttcctacaaaatttatcgaagaaaataaaaaagtactcaggaatcttttagattttttggttccggaaaatattgattacgaaggaaaagatttcgaatctcgattcggattgaaaaaaccggaagccttggttcgtttccgtatattggatccgatcattgccgagaaatctagcggcggtttattcgatataagtgttcccgttgatgaattccgtaatttacatctatttggttgtaaacgaatttttattctggagaataaaatcaatttttctaatatcgatcattttctaacttttccgaaactttcgggatcaatcgccattttcggacagggatacggtttaggtattttgaaagattgcgtttggctgaataaaatggaaatcttatattggggggatatagatgtccaggggtttgagattctttctttattaagggagcaataccccaaaaccaaatcctttttgatggataaagaaacttttttaaagtttcagaattttgccgtcgacggtaaatattcaaaattttctaaattagattatttgacagaatctgaaaaggagacttgggaatatctacggtctctgggttcgaaaaatcgtttggaacaagagcgtattcctcaagaatatattgaaaaaactttacattcgcagttttga

SEQ ID NO: 43594 - DNA, 1461 bp, Thalassolituus oleivorans MIL-1
atgttttttgaacaggaacgagggcagtttttccgccccatgaccggcaagtaccgggcacagattatggagtgcttacgcgagctgtatcagcgactgtatagctccagcagtgcggattatggccaagcaattcaacgtgatacggtggttgaggtatttcaagaggcgcttgtacgtgcccctgtattggcggatggcagcgaagaagctgacgatacgccagacggtcgctttcgtaacagccgcgagcaagccggttgggtactcaatcaacttttagaacatggttggttagaaaagcaggtggatgaagccacgttgcaaagtacctttgcgtttactcgctacgggcgcttattcacagagccattcatcaccgaaagtcgttcaatggcgcgcactcgccatcgtaatacgcgcaacacacgtaactcgctagaatctttcttagagcgcggcgatatctatgacctgttggacgcctatgaatactctgagcgtattattagtgatttcaccgatgtgattgccgagctggaagaacgtaagcgtgatcttgtgcgtgagatggaagatcagcttcttattcagcgtgccagtgaagccttcttcgattttatggagaatcgcttccagcccgatctatctgtgcgtttgtcggcggacaacgttgagaagcatcgcgatactattcaaaagatcatcaatgctatccgtaaaaaagacgtcgctttcaaagcgaagaccgagcgtcgcttacgtgaactcctgccggaactagggcaagaagggcagtcggtattttggactttgcttgatggcatcgaaatgcgtttgcgtaatgccagtgacatcatgctgccagcactgcgtcgcgcactgcaaagctttaccaaacgtgcagacatcattattcgtcaaatgagttatctcgcgtcgcagtctaaaaatgacgtactgaccgtgtgtaagcacttggccagtaagaccgagaaagaacaaaacagcattttagagcgggccggtgagttaatggccgtgccacaagtgcgattagtggatcctggccaagtgcgtatggctgcgccgcgtcatcgtcgtcatatcgaagcgcatttagacgatggccaaggcgatttcgatatcgaagcgcgtcgcgacatctatgtgcagcaagtgttggatcaagccttccttgttaatcagcaggctttgaaaaactacatgcaacgccaattgtcgacgggtaagccggtatcaacccgagatatgccgattgaatcggcgcaagatttcctcgccgtagcgcatgctattggcctaggtgcagccgacggcttgtcgtccgaattcaccttccgtattgattatgatgaaagcccagcccgagaacagggcgatgtgtatttcaccaaaaaagatcattttacctttgaactggttcagaaagagtcttga

SEQ ID NO: 43595 - DNA, 939 bp, Thalassolituus oleivorans MIL-1
atgttgcagtcgattgaaaaagaattagaaaaagaaggactgagccagcgcgattattccgagttattaattcgtttgctggattacggcgttatttgtcgtgatgaatctcagatcgaacaaacactttatgatcgctatgtgcgtttagaagaattagtgggtgaatatttatcgctgattggcgtgcgtattcaacacgaccgccgttttcaattcgtgcggttatttccaccaggttcacaagttccgggcatggatgaagaccaagaatttggtggtcagcaatccttccgtacgcgcctaaaccaagcggaagtcgcattaaccttggtattgcgtgctcagtacgacaaggcgctgcgtgaaggagcggttgacgatcaaggttgcgtgatgacctcgctagaagcgttaagtatcgccatgaaaaaccttttgaagcgcaatttgcccgataacctaacggatcgtaaacagctatttcgtcgcttaaaacaattacgtttagtgcaaattgctaacgaagagactttaggtgatggcgacatgtggttgcgcattcgccctatgattatgagttacgtcagtgatcaagtcttaaccgaactgatggatggtgaggatgactctgatgatgttgaaatcgcggcactagacactacacctgtgccagaaaaagaagctgaagtcgctgctgaattgactgactccgaagatggggacgcagtcgaaactgtcgaagaaacaacggaagacgttgttgtcgccgacgcagagtctgaagcagaaattacggcagaagctgccgattcagatcctgctgaagaagctgatttagctgaaaacacagaacaagcagcagccgtaaaagctgacgaagacacaaataacgagccgcagcgttcacatcaacctgccagcttgtttggggaataa

SEQ ID NO: 43596 - DNA, 3663 bp, Thalassolituus oleivorans MIL-1
atgtttttaaagaaatttatatacgttaactggggcaatattccggccactgaatttgaatttggccccattaatttgctctctggtggtaacggttcaggtaaaacgaccgcagctgatgccattcaaaccatcatgacggcagcgcacgataccttgttccattacaaccccggtcaggacgaagctacccaacgtggtcgcggtaaaaacgtgcgtaccttggcctcttatgttttaggttgtgacgatggcagttatgcgcgccccggcggtgctgttggctatttagccgcggtatttcatccaacggcgaacagtgcggatggcacaggtggcgaaagtggtgagccgtttaccgcgattatcggcgtgagtgcgtcgattgatcgcgccggtagccagcctgttgcacgtcaaaatgatttgcagttttttattattgccggcgagcagttaacgctaaacgacttcttgttagatcaagccgatggtcagcgtaatgtcgtcgagttgaataaactcggtaaaaatctagcgcgtcgtatcgaaccgcacaatattgaaaaatacgatacgaaaaaacagtatttacgtcgtttatatggagctttacgtggtcgcaatgatgcggtgccagaacgtgaagccatgaacgcagcgcgtactttctcacgctttatggcctataagccggttaaaagtattaacggctttgtggctaacgaaattctcgaagccaaagatatgggcgatgctattcgcagcgtatcggacttaatgaaaaccatctatgcgatggaatccgatgctaataccttggctgaaaccatcgcaatattgaacagcaccaaaggcgcgacgggccggtatattgatcaatggattgattacaacgtactggaatataccgctgcgcgcagccgttttttacatgaccaacgcagttatttaagcgcaaaagaacagcaacaaaactttcgcgagcaattaaataaaacgcaaaaagagcgtgatgttgcccaagatcgccgcaagcaattacgcgaacagctgatcaccatggaagcgcgtcgtcgtggtatcgatgcgctgcaagataaagatgcggctgaaagcgctttagctgatggcaaaaagaaattgcaacagcaagccattcctttattggaacaagagcagctattgcaggccagtttacgcgcgaccgagttagtacacggtgctttgcaaaagacgtcagttgccgcagaaattccgtcgttaggttccaagcgaattcttgatcaagcgaaacaagtattagccattaaagatcaagatgcggtcgatttccgtaaactactgggtaaagactgggtcgatttgtcgccgctagaagcgcacttagacgaagcgcgtgagcagcaatcattggtgaatcaatggcgtgaccgcttccataatgtggatttagaaagcagcggcatttcattgcgcgatcaaattgcgcgtaacgtcgaccgtcgcgaacaaaaattccaacaagtacaagcgcgcatgaatcaaaaacaaggcgacattgatagccttgaagcgcgtcagctaaattaccccggtttcgtgcgccaagcacttgaagccattctgcgcgagtgcccacaagctgatccgcgcgtacttgccgactacgttgaagtgaccgatcctgcatggcagagcgccattgaaggttatattggtggtgcgcgtttcagtattatcgttgaagcagcatttgaagccgaagcggcgcatattttgcgttcgattcctggtggtagccgtgctcgcgttattcaagggcaaaaagcgaagaaagactgcgagcgtttaaagctgccgtcgaattcgattttaaatgtgatgtcgttcgaacacgcgaccgcacgttattaccttgaagccagctacggcacggtagaacaagtcgaagacctacacactctgcgtttaactcgtcgtggtgttactaaggaaggcttgggttcgggtgcgtattcaatttatcgttgcgacttagatgataccgaactggtatttggtttgggcgcgcgcgaacgtgcgctatcggccaagcgtggtgaattagaaaccttggctgaacaagctaacgaagctaatcatcagttccgccaagcacagcaattattggatgccgttaatttactgcgtcacgtaacattcgccgaccaaatgcagggcatgttagatactcagtatcaaatggatcaagctgaaaaagccttgaaccaagtcgacgtatccgactttagcaatatggaagacgaatttactggcttaaaagaaaaagccgatgaactcgatgccgtgattaaagagctggatggtgagctaggtcgtttacagcaaatgttaaacgacagcgaaaaattctgtaaaaaccttagcgatatgcaggaaaaaacttctgaaatcgccgataaaaaagaagaaaacctacgcgctatcgtgagtgtgtggccagactttgattcagaagcacgtctcgccgccgccgatgcggaagccaatgacagcccagccgaagccatcgaaaatatgcgtaagagcgtatcccaagagcttaatgccacggcttacgaaattgagcgtaatattaacgagcacaatctgcgttgccaaaccgccgatgcgattgtttatgcaccggattatcgcgaagagcacagcgcccatttctttaaaggcgtgtgtggtttgcagcgtgaaatcgaacgcgttcataaccgtttgaaaaacaatattttggttgagaaacaagacaagctggcgcaactgcgcgaaagcttcaataacgtctttatcaccaacctatgtcactccatttatcaagccattaatgatggcaaacgtattctggaagacctaaacaaagaattggctcatcaccagttcggtgccgaccgagaaacctattggtttgattgggaatgggtgcctgaatataaggaatattggcagttctttgatgaggtaattaaaaacccatcgttaggtgatggcgctaccttatttactgcggatatttctgcagcatcgaagaaagttcgcgatcatctgatggcaatgctgttggatgacgatgagcaaaaagcgatgcgcgaattagagcgtatctctgattatcgaaattaccgcgcttacgaaatttataagcagcctgcgaacaaagagccgattgcgcttagccaatacggcacagggtcgggtggtcagttagagactccggcttatattattcgttctgctgcgattacctctgccttccgctttaacgaaggtgatacccacttgcgtgtggtattggtcgatgaagccttctctaaaatggatgaaacccgttcgaaagaagtgattaactatttaactgaaagcttaggtttgcagttattgtttattatgccgaccagtaaatcagggccatttatggacttggtgtctaaccaatttgtgttcagcaaagtgccgttagtgggtggccaatgcaagggtgaattgcaaacccgcgttctggttgatcgccaagagtgcaaccaagacaaagtaaaagaattgtgggcgaatcatcgccgcacgattcgccaccaagcggcgctcgattttatggaagagtttgcttaa

SEQ ID NO: 43597 - DNA, 1545 bp, Clostridium sp. ASF502
atgaatttgataagcaagattccaaaagaattttacaagctttttgcaagcaaatatacggaatactaccagcgtttcctgattgcgatctatgaagaatccggccgttccagttccctgctcggactgacggagcgggagtgccggtttgtcatgaatgagcagatcgccgcggagacgctggactggagcgaggagcagtttgacgaggagggggagcttctgaccagaagcaacatggcctccatctgcttaaagcatctggaagactggggatggctgagacgggattacgatgaagtgctggacagctacgtggtgtcttttccggaatacagccagatattcgtggagctgttcggacgcctgtacagcgaggacagcacccgggagcgggagagcgtgctggcggtctacagctatctctacacctacggttcagaccgggaaaaaaacaatgaaatactcaaaagcgcgctgcagacctcacgctctctgctgcagatgctttccaacatgcaggaaggcatgagagggtactttgacgagctttcccggcagaggtcctttctcggcatccaggaagtgctggtaaaggaaatgaacaacaacgaaagccggaaatatgccatcctcaccacaaccgacagcttttaccgatacaaggaagcagtcaaagagctgatcgaccggaacctgagtgaaaatgaagtgcgcaagcaggagctgctctccaggcagcgcgaattgaagctgcgggccgagctggaaggcggggagcatatcgggacagccggaaaaacccaaatcgaaatcacggatcatggaaaccaggcaacaccggacagccggacacacccggcaataagccgctccccggaggagaaaaacgctgcccgcgattacggaatcgaataccgccgtctggaacatgccgtccatctcgcggacgaggcaatgaacatcatctgccggatcgaacgggaatttgacgccattgagcgcagatacaataagctgatcgagcagaagaccctgtttgccagccgggcggcggcccggatacgctatatccttatggaaggcgcgctggaggaggatcctgcggctgcgctggccaatctcctcagcaaaagcaaaaacagcgccgagatactggaaaaactctcggagcggatgcatttgacagagcccttccgcgcggtgaccgggcagagcatgttccggcgcaggaatacggagaaaaccgcgtttacccctcaggctgtggttcagcatacagatcagcaggaggaattggaggaatttgtattaaagcccctttacagcaggcaggagattgccgaatttcggagaaaaaatgagcggaacgggacgtttacagtcaccagggacacggtgcgttccgcggaagacctggaaaaattattttttgtttggcaggacgcggtggagattgcggacgacgccagaaggatcgagatcgggcaggagctggagaaccgggatggctgccgcttttccgagctgacgatccatgaatga

SEQ ID NO: 43598 - DNA, 636 bp, Clostridium sp. ASF502
atgattacatacatggaagaattatccgcggccgaagcggaaaatctgaaaaaaacaatttccagattgttccgtcagacctgcatcctccagcttcggtatgacccggttaccctgacgccccgggacaacccggactatgaaacctgcatccgtcacaggcattttattgaaaattatcttgccgtgctgggctgcgagatggagcacgatccccaggagcacattttccggctaaaaggggaagggacggagacggagcggttcagtctgaccacaaccaggatcatcctcctcgtccggatgatctaccgggacaagatcctgggggaagggctgggcgcgacggtcacgaacctgggggagatccgggaatacggggcaaataccggtctgctggaccggaagctgacggccgcggagtggcgggatgcgctgtatatgatgagcaggcaccagatgatcgagctgcctggggcggtccgggatatgaaggatgagacgcccatttatctgtacagcacgctccttctctacgtgagcgcggcggatatgaacgaactgattgaagagtacagggaggaggcagacgatgaagcagtccaagaaaatcttccggcggatgctgatcaataa

SEQ ID NO: 43599 - DNA, 3387 bp, Clostridium sp. ASF502
atgaagcagtccaagaaaatcttccggcggatgctgatcaataactggggaggcatcagccataaaatcatggaatttcacgagtatgtgaacctgttcagcggcaaaagcggttccggaaaatccaccgtcatggatgccattcaggtgattctctacggcagtgtatctgctgcctttttaaataaagcggcggacgacgcgaaaaataagagaagcgtcctcagctatctgcggggcgcccagaaggacggaacctcaaaccgggaaaatgtagatttctgttcccagatcgtgctggaactggaggatacaggaagccgcgtctgtacctgcatcggcgcggtatttgaggtgggaagccaggacacggaactgaggaaataccattttttcagccattctggacatctgccgaaagacggatatctgacggagcagggggtgccctacacctccgctcagatgaaaaaactgatcgaagcgaggagccgttcggaggaaaaccgggggcgggtggatgtgaaccggatgtacccttcacgggaagcttatctggggactttgtatgattccattttcggatatctggatccgggacggttgatgaccatggaaaaaagcgccatcgcccttcggatggcggacggcaccggacagtttatcaaggattatatgtttcccaaaagcaaggaggacacggtgtccgcgatcagccggcagttaggcgcataccgggagatcaaggaaaaggtggacgacctggaacggcgcatcgaaatcctggatgaggtacaccatgccaatcaggagttggttcggattcgcgcggacaggctgcgtgcggagtcggtgcttcggatcgtggatctggaaagctgcaaaacccgtctggaagcaaagcaggaagacctggaaggaatttctgcaaaaatttccgaactggaggaacggtacaaaatcctggatgcggataaaaaagaaaaaacggaagcactgattgaggtcaaggcagagcttcattccagcgattacggcgtgaagcagaaggaaatggaagaactgaaaaataccatcagccttttgaagggaaacgccaggcagtggcaggagatcttacagggactcagggaatgggagacggatgaggagatcagcggctatatcagcaaccctaccctgcagtgtctggaggaggttttagaaggtggagtatcggagcatgtcctggacaagctgcgcagcggcattcaaaacggattggaaatgatcagggaggagatggcggaccttagcgacagtatccgaagcacggccagggagctgagtgagaaaaaggaaatggcggaggatctaaagcatgaccgcaagccatacaggaaggcgctcaaaagcgccagggcgcagcttcagagtgaattgagcagccagtacggccggaccattcatgtggaaatctttgccgatctgtttgacattgtggatgaaaaatggaaagaggccattgagggaaggctgggccgcatcaagcacagccttgtgaccgaaccccagtacgccctggatgccgcaaggatttttcgcagaatgaaacggaaggaatatgaggagattgacctgatcaatacggcagccgtaaaacgggatgagccgggagcggaggaaggcacgctttacgaggcggttcaggcaggcgagccctatgcggatctgtgcctgaaacggtatctgggaaggatctgcaaatgcgagaccgtggaagatcttcatcaggttcgggacggagtgacgccggatggctattcttacagcaattacgtgttccgccatctcagggaggacgactgcagacgctacgcctgcatcggaacccgggtttccaaggcaaagctaaaggagctggaggaggagatctatgagctggagcagcggcagatcgcatacatccagatgcgggaaatactgggcagggcgcagaagctggagcagttgaaccagaagaccgagcagttgctgcggctgtcaaaagctgcggaggagctggagcattatctggataaacaagagcagcttgcgcgggaactgaaaaatctggaagacggtactctgaccgcagaattaaaaggccagaaggaaattttggagcaggggatcgcagagcttgcccgcatccaggagcaggtcaacaaggaacggatcagccgggagggggatctccgggcagcccagaaggaatacagagattttcaggacaggctgtccgggctgcaggaaggcttccgggcagacgagcaattgcttgcggaggttcgggaaaatctgggagtccagacagaggccgcttaccgcagaaagcaatataacctgtgccagcggcttgcggggcaggaggaacagtcggcggaagagcggatactggcccggaaccgttttaacagggaatatccggcctatggatttaccggggtggaacacgaaaacgacgtgtacgataagctgcgtgaagacctgaagcgggactatgagccacagtatcaggaggaatttgagaaccaataccgtctggtctaccactgcctccgggaaaatgtgatcgccaccatccacggggagattaaggcggcataccggcacaggcgggagatcaaccggatgctgtccagaatccggttttccgacagcacctaccagatcgacatccttccggccgagaatgagaacgggcagttttatgaaatgctgatggcaccggaattggacagcaaggtgctggacaacgatggatttgagggacagctcagcatcggggaggacgcattttttcaaaaatacgagcagcagatctggcggctgacggaaaaattcatgccgccgagagacggggaagccgaaaaccgctcccgccaccatcaggaaatggagcgttttgcagattaccgcaactatctgacattcagtatgtatgagcgggtggaggacgaacagggcaatgtgaagaaaaacgcggtggacgaaatggccgggcgggattccggcggggaaggccagaaccccaagtatgtcgccctgctggccggcttcgccatgctctacatgcagcagagcagccgggattccaagatccggctggtacttctggacgaggcgttttccaagatggacaaggagcgcagcgaggtatgcctgcgctatgcaagggagctggagctgcagctaatcgtctgcgtgccggatgaacgcctccagtcactgatccgcaatgtggacagtgtgtatgggttccggcggtatcagaatcagattacgatgatgcatattgataagggaaattatctggagatgatggaaatgggcggaagaaatgcaggggagagtgtcacatcatga

SEQ ID NO: 43600 - DNA, 1371 bp, Methylobacterium mesophilicum SR1.6/6
atgctgttcgcgcagctgcccgacgagctgttcaagccgctggcttcggcgagccgcggcttcaacgccgccctgctcctccatctgcaccggcgcgtcctgggggcggagccggtgcgcaaggccgagctgctcgccgagatcggcgactttgcggcgggctggagcgacccggaagtcggcggcgacgagccgatctcagccgacccggccgagcggcgggcgacgctctaccgccgccttctcgaaaccggctggctgatcgagcgccgcgagcgctacgtgccggtggtcgagttcgaccccgaggcacgcctcctcctggaggaattgtcccgcctcgaacggggcgagacgcgatcctacggcggcgctgttctggaggtgcttggcggcctcgagagcgccctgtcggatccgggcagccgttcggaggcgctcgcgaacgcggcccgggcggcggcggccttcctgtcgcacgtgcgcgggctcgcggccggcatgcgcaaggtcgaggagcggatcctgcgcgagccggaccgcgccaagaccttccggctgttcttcgaggagttcgtcgagcgtcacctgatcagcgattaccggacgctgcacacccgcttcaacccgttccgcttccgggccagcgtcgtgcgcgaggccggccgggcgctgcgcgacgccctcacggtccgggcgctggccgagggcctgatccgggagggccgcagccccgatctcgacgccgcgcagcgggccgtgcgggcggatctcgcgcagatcctctccgtcttcgaggggctcgacaaccatctcgacgcggtcgacgccgtcgtcgcgcgcctggagcgccggatcggcgccgccctccacgtgatggaccggccggacccgagcggcgtcgagcgcgccgccgcgatgctgcgcgccatcggcggatcggacatcgccccggacgtgccggcggatgtctcgcagctgcggccgccgatcggtcacgcgcacctgcaggcgccgcgcgcccgcaaggccgcgatcgacgtcgagccgctgccggatctcgaggacgatcccgtggtggacgccttcgcggccgccaaggcggcgttccgccgccgtaccaccgtgacgccagagagcatgaccgccttcgtggaggcccggctcggcaacgccctcaccctgcgcggctcgcaggtcgtgatcgcgggcgtcgacgacttcatcgtgttccagcgcctgcgcgagatcgacgtgctgttcgacgcgcggctcggcgcgcgctacgccgtgacccggctacccgagcgggtcgccaacggctggctcgactgcccggatttcgtggtggagcggcgacgcggtgcttga

SEQ ID NO: 43601 - DNA, 627 bp, Methylobacterium mesophilicum SR1.6/6
gtgcttgagggattccgggctatcatcgacggcgacgagccgccgcccccgggcgcccgcgcgcccgaggccgaggaactcagccgcgcgctccaggtgctgttgaaggggcaggtgatctacgcggacacgcagggcatcggccggtcctacgaactggcgcggcactacgcgccgttcttcaccgactacttcgcctgcctcggctacgccttcacggtctcgcaccgcgaccagatggtctcgctcagcccggccgcggacgcgccgcgccacgacatcgtctcggagcgcctgcgcaaggatgagaccctggtgctgctaacgctgcggctcctgtacgaggagggcctgcgcgaccaccgcgccggcacggacggcatcgtcgagtgcaccaccgacgagatcgtcgagaagatccggaccgtggcgcgcaacgagccgcccgaggagggccggctcgccgatatcctgcgcctttacgccaagcgcggcgggctgcggctgggcgagcgcgaccgggtcgaacgggtcacgccgctctcgctcctgccgggcctggccgtgctcgcttccgacgcgtggctggagcgcctgcggacctggtcggaggccgccgagacctga

SEQ ID NO: 43602 - DNA, 3438 bp, Methylobacterium mesophilicum SR1.6/6
gtgtacgtcctcaccgacatcgccatctcgaactggtacctgatccgccgcgagcagatccgcctgcgcggcgccgccgcgctcgtcgggcctaccggcgctggcaagtccacgatcttcgacgcggtcggcacggtgctggccggcaacaacgccagccgcctcgcgcttaacgcctcggcgtccgggcgcagcgcccgcaccgtgcgcgactactgcctcggctggatcagcgacccggcggagggcggccgcccgacccgggaatcctgcgagaccgttctggccctcgtcttcgagaatcccgcctcgggccgcgtgatcacggtcggcctcgccctggcagcccgcgcggtggagccgaaggagacggtgctgtcgcggttcatcgcggtcgggcaccggttcgagatcgccgactatgcccgcacagcgccggggggcagcttcaccgcgccgtggaccgagatcgccgcggacctgcgcgcccgggcggcgagcttcaccgagtaccggacctccggcgagcgcttcacgtccgatgtcctggccaccctgcgcgagggagcccccgcaccggatccgcgccacttcctgcgcagcttcgccaacgcggtggcgttcaagccgatcttcgacaccagcgccttcgtgcgggccttcgtcctcgacccggagccgctcgatgtcgagcgcgtgcggctctccatcgccaactggcgccgcctcctggagacgatcgccgagctggagagccgcctcgcccgcctgcgccgcctgcgcgaccgctacgacgcctggagcgaggcggtgctcgccacggcgacgcacgagttgcgcgcggcctgcgcggagcttcgccgccgcagcctcgacctcgtcgccgtccggacgcgcctgcgcgagggcgccgacaccctgcgcatcgcccgggagcgcgtcgccgcgagccgcggccacgtgcgggagatcgacggcgagatcgccgagaagaaggcccttgccgcttccagcgcagccgagggccggctcgccgcctcgacgctcggcctctcgatgctcgaccgcgaccggaaggagctggtcgcccggaccgcggatctcgtcggcctcgtgggccagatgggcaagctccagccggtggcgccgatcctgcgccaggccagcccgcaggcggcccgtctcgccgaggcctgcgcccgcgccggcctgcggcgggaggcgccgccggaggagaacctgcgcgccgacggcccgctggccgagctggtcgacgggctcgcgcggctgcccgaattcgacgaggcgctggagcgcgccgccgaggacgcggcgctgaaggcgcgcgcccaggagagcgaggccgagcgcaccgcaccccgcaccggcgcgggcccggcggcgcgcctgtcctccgacacggtggcgttccgcggcgagctggcacgcaagggcatcgaggcggtgccgatctgcgagctggccgagatcgtcgatccggcctggggcccggccctcgaaggactgctcgggcgcgcccgcgaggccctggtcgtggcgccggaccggctgaacgaggcgctcggcgtccttcaatccggccgcgaccggttccaccgctgcatcctggtcaagaccaccgacaccgccaagcagcgggcacgccgctacgatgacgggccgctcaccgtgatcgagaccagcgatccgcacgcggaggcgttcctcggcgtgcggctcgggggctacgatctcgcccgcgacgatgcggagctggcgcgcctcgcccgggcggtcgcgccgagcgggcggaccacggccggcatggcctactcggtcacgcgcagcgtcgacttgctcatgacccgcggccatcgcggcccgaccgccgacgggcgcaaggcccacgaggccgcggtggccgaggcgcggcggctgcgcggcgaggccgcggtgctgcgggaagcggcccgcaccgccgccgcgattcgcgcccgcatcgcccggggcctcgacgatgtcgaggcgctgcgggccgaactcgacggactcgacgggcggcgccgcacgctgcagaccgagcgtgccgacatcgaaaagcgcgacacggccgggatcgccgccgagatcgccgcgctgactgcggagcgcgcgggctacctgcgcgagctgtcggaggaactggagccgaagctcgaccgcctgctcgccgacgaggcggccctgcgcgcccggctggtcaccatgcgcgaggcggcccgcgcggcgctgtcgggccggcgcgcggccctgcgccagctcatgggcggcgatgccgcccgggtgcgcctcgcgcgcgccgagcccttcgacccgacggtgatcgtcgaggcgcggcgggccctggcgggcctcgacgccaaggccgccgggtcacgggcgaccgccgaacgcggccttgcccgggaatccgccgaggcggcccgctcgcacgggcgcatcgccgagcgcgagctggcggaggcctgcgcggcctggcgggtggagaacccgctgaacgcgggcgacgcgccggcgatcgacggcttcgcctgggtccggcgggaatacgaggccgtcgaggggcacgaactgcggcgctaccgggcgcaggccgagcgggccgaggtcgagatgcgccgcctcatgaccgaggatctgctgacgcgcctcgccgaccggttcgagcgggtccatgcccggttggaggcgctcaacgagcgcctctcggcccgcagcttcaccggccagatctacgcgttcgaggccgcggtggaccgccgctacgccgccgtccacgcgctggccaccgagaccgcgcgttctccggaggccgcccaggcgctgctggccggcgaggcggagggtccgatggcggcggcgctggaggagatcaccgccctgatcgccggagacgaggatgcgggccgcctcgcggattaccgcaactacttcgtctacgagatcggcatgcgcgaccgtgcgggcaaccgcaccaccatgtcggcgcgggcgctccgcggctcgggcggcgaggcgcaggcgccgttctacgtggcgatcgccgcctcattggcgagcgcctactatccgggcgatcggccgggtgacgagaaccccggcctgggcctgtgcctcctcgacgaggcgttctcgaagctcgacgtgcgcaacagccaggcgctggtcgatctctaccgggcctgggggctgcagctgctgatcgccgcccccgaggacaagcgcacgacgctgaccgaggtgatggacaccatcgtgacggtctacaagagcccggatctaacctccgtccggatcgaggccgagcatccgctggaagcggcgcggcgcgcgctgcacgcgatcaatcccgatcaggtcgggatcgagggattccggcaatcggatgcggcggagtga

SEQ ID NO: 43603 - DNA, 1419 bp, Pseudomonas putida TRO1
atggaacctaatataccgccgctgttcgagcatttgcccaaggagctttttcgccctttggccgccgccaacaacctgcgctattgggatgtgctctgtcggcttatggcggccatgtggggagagggtggccgctcacccggggaagaagcgcccaagtcactggtccttcgaacgatcgaatcgtttctagtagccgatgacccttgggaggatatggacagctcccttacggtgaccggaagggctcatctgatcttcacctcgctccatgccagcgggtggctaagtcaacggcgcaaaggcgtagtagaacaggtcacggtcaggcctgttgtggcacggttttttggtcacctggtggagtttgccaatcagacccctgagttcctcgggattaggttccactcgatctacgtctccctgcgtgaagtgcgcgatgcaaacgcgcacggtctttatcatgaggcggcacgtcaggccaaacagtgcatggcacacatcaccaatacgagttgccgcattcaggatctgatggggaaactctcggcgaaggaaaccatgggcgagttcgttcgtggctttttcgaagagtacatcgagaacgttttcattgccgactatagcgacctgcgtactcacaaccatccgttgcagtttcgctcacagattatcgctctggttcgccaactccagtgtgacgatcagcagcgccagggattgatcggttggtatgcccagatgaagaccgacgacgacttcctacgcgctgagttgctctacgaacgggatacccatcagttgctgcgccttcgcgaagtcgaagagcacttgcagagattggatgaagaggtgcgtgacgccaatcagatggccattgcgctctttgagtacaagctgcgctcgcctggcaatttcgacaaactgatcgcgagggccctcaatgccgtggagatcctgggggaggggcatgcctcgcttccgggtaggtcaggcttctatcacgcttccgaggtcggcctgtccaaacctcgtgtaactccgcgggttcacgagccaacactggtcgaaacctacagtccgacaactgaggagcttgcaatggaagcccttcgacaacggatgaatgccaatcggcacgttacgccgctgaagctggcggagtacgtcacgcgacacgtcggctctgatctgcgcgtgacctcgagccaactgtcaatcgaatcggtcatagatctgtgctgctaccaaaggctgttattgatcgcctcgcgcgaggcatgccctccaggaaaacgcagagatgatgtccacctgcagttggtccctgggatacgtgtcgaatttgtccccgaagccatgactcgcaacgcgtacatggaacaccaagagttcatgattcatgtgaggatgccgtga

SEQ ID NO: 43604 - DNA, 603 bp, Pseudomonas putida TRO1
atggtcaactgggagcgattggcagaacagtcagaggtaagttatgtcagtgccgacttcgagagagcggcttaccggctaatggttgagcagatcctttatgccaatgacaagttcagccgggtggcctatcacttgatcgtcaagcatctcgcggcgtttcgggaggtgatgtccttgctaggggttcacctgattcacaatgcccatcacgcttatgtcgcggccatccctagccacccagtggccgagaaaatgcgccttagtgagacacgtttggcgcttgttctacgccgcatctatgacgaccgtatgcagtcggcagagatcgctgacggagaagcgttcgtgtcacttgaagagttggagcgtgcctacaaggaatggctcaaacgtgagctccccgagcggggcgaactgcgcgagttggctcaggccatgaagcgctacgggttggtgcgggtttcagaggccgacgacgggcaaccctacaagattgtcatccgtcctgggatcgtcgatgtgctgagcgagggggcgttgcaccaattggcagcgcacgcgccaatgaaggatgaggaggccggcgatggtcttgcttga

SEQ ID NO: 43605 - DNA, 3426 bp, Pseudomonas putida TRO1
atggtcttgcttgaacgggttaacctgattcagtttttcctttacgaggcccgggatgtcgatatcgggagaaatacggccttcctagggcctaatggaaccggaaaaacggcgcttctggatgcaattcaggtagtcatgttagcggccgatggcaaccgcataaacttcaacgcagcgagtgacagcaagaaaaagcgttctcgcagcatgcgtgattactgcctcggctcgattgtacctggtggcagttcctaccagcggacctccgcgaacacatacgtgggattggttttccgcaataccattacaggcgttccgttcactgccggcgtttcactacaagctcatatcgaggacgccaaagcggaggtgaatggatacttcatattgcccggtgtcgaactgtcggctaagcaatatttgcagaccgacggcgcacgcgaaaccgtgatgccctggcgagcctttcagcatgtagtcgctgatttgtgtcgcttggaggcaaacagtaccccttatataacgcctcacaatcgcgacgactttattcgacgcctcttgatcgatcatctggccggtccaggcgacaaaccgaactcacaggcatttcgggctgcgttttctcgttctctgaagctcaatgaagacatcgttgatcttaatgagacgttacgacagcatctcatcgagccgatgccaatccggattaccgagttccgcgagcgcctaaacgaggttcgtgacatgcgtgaccttattaggcgactgagagggcgcattacccaagcctcagaagtggctgacacctatgcccaagtgctgcaggctcgaacctccgaggcgaacctgacggccttgaagcatgtctacgcaaccgaacgcagcgcagaagcagtggatgctattcagatcaagcaagaagcgctagaggaggcgcttaccagagcgcagcgagaactcggaagggcatgtgcccaagcgcagttggccaatgccgcccgagatctggccctgactgcgctgacttccagccctgactttcaacagcaagcaggtcatgccggcgagctcttgctgttggagaagcaatttgatgagaaacaagcgcaactccgcacgcaattgcacgcgatgcagcgtgctctttccgacgccagcggcctagctgaaatcgcatccagtagagacctctttgacagcgggctcgagcaattgcaaagcttggagaaacggctggaatcagatgacatgccatcatctgaatcactccagcgtacgcttcaagcggtaagccaagccttcgaagtgctgcgtcgggcaatggcggagacagaaggcaaagcggaaaaggcagccaaccatctgcgtgacgctgagatggcaagtgcccgggctggccaaggccttgcgaaactgagcgataacaccaccgcattgttgcgtatcctcgcgaatgcgggtatcgacgcgactcccatctgcgacctggtaagtgtcgcagatgtagcatggcaagcagcgatcgagtcatggctggggcgccatgtagaggctttacttattccagaagatcgggagttggaggccattaaggtctatcgcagcgcagcggcagacggcgtttatcgcgtgaagttagctcttccttcacgtatccgggactggcacggatacgatactgagccttacgcagctcagttggtccaagggcagaacctacttgccgtgcgctacctacagggcgcgcttgggcgaacgatactagccgaatccaacgagcaactgcgcgttggtgtcaaagcgctatccaaggacggcatggtcagttcaggtgcggccgtggagcgacaatccttacctaaaccctcagagcttaggttgggccgtaaagacgtcgatgccatgcgccaacaggcagaacaggcgttgcagattgcgcaggcacaatccaggcaacacgaggaggcggtcattcggcttcgcaacggcttgcagaatctcaccccgtttgccaacaccgagacgctgcagaccagccttgaaagcatctttatggcgaaggtgcaggcaaacgcccatgccgcgcatttgcgcgagcggttggcgcgtacacaaactgctggtttggttgaactggaggcaaggaaacagcttgccgacgaggcggcccacaccgccaatgagttggttcttcgatggactaaggatgaggccagcttcgtcgagcaacttaagctattgggcgaacagctcggcgtgctgaccaagcagttggaagtagaaagcgcccgggaaagagagagtcggcagcacccgctttacaatgcgaatgaagtcgatcggcatcgcaaacgatcggatgagcgccatggcgacgatgcgagcgcgaaggttattgctttggagcaggcgatcgtaacggttaacggagtggctggcagcaaagaccgcgaagcctggaacctgttcgcgaattacctgaaggactataacctgcagaacacggatatctgcagcaatgattggaagggcgcttacggcttcatactggaggaccagcagcgactagtgaatcttgaactggtcgagcaagaagagaaagctgaagaagcctaccaggctgccgtgaaggtttttcgctccgatgtcgctcaggcactgcttgcaggttttgatcgcatcgaggagcagatcgcgggcctcacctcaattctcgaaaacgcaccgatgttctccaacaacgaacgctatgagtttaagttcaaggtggtcgaagagcatcgaagcctgtatgagttcttgctacgcgtgcgtacccatgggacagaggacgacctttttggcggaccaggtgaggtgccggaggagtttcgcgcgcttgtcgaaggcgacagcaactcaccgctgctgaacgaggccagccccctgaatgaccaccgccgcttcttcagctacgacgtagaggtctatcaaatgtcggagagtctgggcttgctgagcaggcgcttcgagcaggcctctggaggagagcatagaacaccggtctacctcatattcggtgccgctttggcggcctgttacgggaagtcgaaggacagtctcagtggcggcggtatcatgctgttggatgaggcgttcgaaaagatggatcctcagaatatccgagccaccgtgcaattcttgaatgcccttggcctgcaattgatcctggcggggccggaatctgaccaagccaaactcagttctttcctgaatatctactatgacatgtcccgcttcggaacccgaaatgtgcagatgaagaagaatgtcgtccacgatgctgctcgtgaattgctgcaaagtgacaactacttgctcaatccagtgttgttgcagcaggaaatcaaccgtttgaaggaagaacagaatgagcctggatga

SEQ ID NO: 43606 - DNA, 1167 bp, Pseudomonas putida TRO1
atgagcctggatgacgcaacccttgatcgactgctggttcgtgccgagcgcgctcgtctaagcggcagtacccgaactatccgtgagtccttcaagtcgctaacctcgccatactggcagctcagtctggacgagcgtgaccgcatgcacgaacgaatgcgggcagcggcgtcagctggcgcgattaagctggagtgggccaggcaaggagggggggatcgtccattggatgcggtagttcttcaggatctcgatcgactcgccgaccatctgcagcgtcccacctccagtgcaatccttggccaggcggctgcactactggcgccttggcacggacagggacaggtggacgagttgcttgcatgctgggcccagctcaagcaggtgaggctcctgggacctggttcggctgctgatttcgctgatgcgttgcgggcgctcgatgcgatggccggaaccaaggaggatcgcatcgtccgccaactcagtactcagcttttcggcgactccaagcgtctggaagccctgagcaagcatttggatctgctcaccgcggaaaccctgaatgcgccggcccgacattggagtgaagttttcggagcgatcggactcatcaaagagcctcaaccttttctcgtggcgggtatgggcaagctccggctgaccgaccaggatgactgcacagtcattcggccgtatttgggtgtcgccaataccgtgatccaaggttacatgggtgcgcctgcttggttattgacgatagagaatctcacaaccttccaccaggcagcgcgggaactaagcaagaatccgtcgggagtgattatctacacggcaggtatgccatcgccaagttgggggcaagcttacgttcgaatcttatcctcgcttgagcacaagcctccaatttaccactggggcgatcatgatgaagggggctttcgtatcgccgctcgaatcgcccagttcgccacccagtcagggtttcgattgcagccatggtctatgcaggcttcacgctggcctgatcgcggtcaagaggccaaagctgagcagcatcgtgcgatgaagagaaatgctgcccgcgcaggctgggcggaattggccgatcaacttgcccctgtactgttcgagcaggaaggacaacctttgaatcttcctacctag

SEQ ID NO: 43607 - DNA, 1467 bp, Acinetobacter parvus NIPH 1103
atgaatattcaggggatacaggcaacttaccgccgtttatatcatgaaagtccagtctggaaattattaagagcagaaaatgcgccacacattttagcatttattgccgatttatttgtcgaagaaaccgaagttccctatggtcgtgcccgaagcttactggatgaatttattaaatatagtcgcgaacagggattgtggcaaaccgaaaataatgcagcctattatttaaatagctggattaaggcaggctggttgcgtgaaatggatgacatgctcagcaagactgatgccagtgaaacagtattgcgtttttgtcgcaatctggacgagcgtcatagcagtactactgcctcacatttgagaattgtacaggatgcagtacgggatttcgtggttgccattagcgacagtattgatgatcgtgtcaacttattagaacaaaagaaagcccagattcaacaagaaattgatgacttgcatgcaggggtggttacgcagctcaatgaaacggagcaacgagaacggattcgggaaatttatcaactggcttctattttaacaggtgattttaggcgagtcgaagatgaaattcgtcagttagataaagagttaagaattgatatgattgagggcaatgcttcacgaggtgaagtgttactggcattgatgcaaaaagagcaattacttgccaagagcgatgctggcagtgcttttgatggtttttgtcaattattacaggatcaggatcgttccactgagtttcgggaacaactacgcagtattctcaatcaccctgtagcacagcaacttagtgaagcacaaaagaaatatctaggacagctcatgcgtgaactggcgcgggaaagtggtcgggtatttcaggtgcgtcgccgtactgaagagggattgcgggcatatattgaaagtggagctgcactggaaaatcgtatgatcgagcgtttgctatcgcaactggaaaaacaggcagtgaatttaacactggaacagcagtgcgatttaaaaaccgaaatgcaggtggatttggcagtcggttcggttcagatcagctcacctgaaaattttgctttgaaaagtccgaatgaacacatggatacacgtggcgtacagcaacaacaaaatcgtaaagaaccgagtaatcaaatgctgcactatctggacagtgtacaggtacgagaggttgctgagaaagcacgccatacattgctgaaaaaaggggttatgagtattgcacatttaacccaagaacatccattacaggcaggtctggaggaattggtggcatacttacgaattgccaaagccattaaagcgccgcaattaacagaacaaaatgagcagattcaatttcaggatcaacatggcgtgaatctacaagcccgtatcccgacctattatttaagtgcagaattattccctgaaaatttagatgaattggcattataa

SEQ ID NO: 43608 - DNA, 786 bp, Acinetobacter parvus NIPH 1103
atgcaaccacaagagagcagtttttttgatagggtgcgtcgcccaacatcagacgaaaatcatgatattcaaccgcagcgcatcgccgaagtcgaagatgaactgatagaagttgaagcagatcaagaggtggagagcgatttacagctaagtgatgaactatctagtatgccgcatgaagccagacgggttttggtctatttgatgcgacagggaacgattctggcagctgaaaatctaaaactgtttgatgtgttatgtcgttatgaaacagtgattcgccagcatcttgccgaagtatatattcaactggttttagatgccaaacagggcgtggcgtatattattaatactgaaaacatcaatgatgaaaatgacgatacagcattatcagatgatttccctacgctgattcgaaagcgtaccttaaccttatatgacactttggtattactcattttacggaaatattatcaggagcgggaaaccgcaggtgagcaaaaaattattattgatctggaacgaattcaggcaagtttgatcccttttattccgattaccaatcatgacagtaaagaccgtaaaaaactaagtggcacactagataaattcagtgaaaagaaaattctcagtgtaatacgaggtgaggatgggcgttatgaaattacaccgattatccgttatgtggtcaatgctgaatttctacaaagtttattgaccgaatatgagcaactggcagataaggcagctatgcatcaatgcgagcagaataaaggaaaggtataa

SEQ ID NO: 43609 - DNA, 3378 bp, Acinetobacter parvus NIPH 1103
atgcaagaaatgactttggatactttatttgctcagggacaaattcgtctggctgagatttccgtgtttaactggggctcattccataatttacatacagcccgaattgatcctgaagggacgttgattacaggcgacaatggtgctggtaaatctacctttattgatggactgatggcattgttacaacctgccagcaaagccagttttaacgtagcagccgcacagggtgaccgttcagatcgttctttagtgacctatatgcgcggcagttacggctctgaacatgatggttccactaccaaagtcaaaagtaaacgagaaaaagctgtaaccacggcactacgagccttgtatattgcagaggatggttctcagattaccctgattggcttgttttggcttggacaaggcaaaaattcacttagtgatgtcaatcgtttatatatgatagccagtcgcaatgtgttactgactgaagtattagagatttttgccgatggtaatacacgccaactgaaacagcattttaatcccaaaacagatcagcgtattcattattttgaaagtgattttaaaagctatcaggatatgtaccgtaaatatttatttatggacaatcagaatgcacctgcattactttcccgagcattgggtttaaagaaaattgatgatttaaccaagctgattcgggagttggtgttagagccgagtaatttacgagaaactgcacaaacggcggtgaatgaatttgctgatttagaagccaattataagcatctggtggatacgcgtgaacaggtggagcatttagagcgtttgccacaatgtgctgaacaaattgccgaattgacgcagcgtttagcgcagcttcatttggaaaaacaatcgattgctgcttattttggtgaattatttgccgcattatggactgaaaagttacagcagcttgaacaggaattgctacaactcaaacaacaatttcagcagattgaacaactggaacaggatgcagagacacggcaggaacgtcgtcatgaggaatatttacagttgggtggtcatcagattgaaaatctgcacaaagaactgggttttattacagataaactcaaaagtctggttatagaagcatctcgttatcaggacgatgcccgacagttacaacttgcggatgatttaaccgagcatgctttgctggaaaatcagggcattgcgactgaaaaattggtcaatactgaacaggataccaagcaacgtcaggatgaatttgctgaaatcagtggaaaatacgcacaaacccaacaacagctcaaagatattcaggaagatattcaggaaattgaagccagacccgatagtaatattcatgatgtgcatttattgcgtttacgtgatgaattaaaacagcatttatcttttgatgaacatgaactgatgtttattggggaattgattgatgttaaagagcacgaaaaagcatggcaaggcgcgattgagcgagcattaggtggactcaaaaccacattacttgtgccacagcatcgttattcgatggtgaccaaatgggtcaatgcgcgtaataataaaacccatgtgcgtttacaggtggttaatctagaacaagtggagcatgtccattttaaggacaatggttttcttgggaagttgctttggcgagaacacgcctatcgtgactggttaaaacagcatttacagcgttttgatttaaattgcgtgagtaatacccaaatactggatcatatgccattttccatgactcaacagggcttaattcatttagaacgaggacgctttgagaaaaaagaccaacaacgtgttgatgatcgtaaagcatggtgtctgggcttttccaatacctctcgtctgagcttgcttaaacatgaatatagtcagttagaacaacagcttaaacagctataccaacagattgaacaggctcggcagttacttaataatgtgaatcagcaaaaaggcttgtgggaaagattgcagcgttatcaatgggataatattaatttaccgtattggcaacaacgtcagcagcaaacccaacaggacttgcagcgtttacagcaggcagattctgatgctgaacaggctcgccagcgttgggaagatgcaaaaaatgagctcaaacagattcgcttacaaaaaggtgagtcacaaaaaatccgaggtcagttagaacagcaacatcatgatacccagttaaaacagcaaaaagcacaacaagcagccgagcacggaatcagtgatgatgctcgacagttattgaaacaacggataggcgaagtcaaacaactagatgatgcgttgcaggcagaagccgaacgaaaacttgagcgtttaattgggcaggcaaatgaccaaaaaactacggtcagtaataccgccaatggcattatggtgtcattccgcagtaaagataaatgggcacatattcctttacaacgagaatgggcgacagggctggctgctttagaggattatgttgcctatttgcaggaattacagcaggagggtttgccgaatctggttgagcaattccagcaacgtttgcataaacacaccgctcagtctttaagtgtgattcaggataaattgaatgccaatcgggaagaaattattgaccgaattgacatgattaatcaggtattacaacgcacggaatttaagctcggcagctatttaagactgggctataagaaagaaaaatatccacatgtacacgatttcgaacagcgtttaaaacaggttttatctggcgtgaatagtgaagaatatgaacgtcgttttaaacacttggcggagttaatggcgattttggacagagccagtagctcggcaactgccaataatcaggaaagtttacgtttgcttgatcctcgttatcaaatgtcattccatgccgaagaagtggatgcgcaaacaagtgaaataagggatgtgttggaatcctctagtggaatatcaggcggtgaaaaagaatcctttgcaggtacgattgtcgcagcaagtttagcttatgtattgacacctgatggttatgattacccgatttatagcactgtatttttagatgaagctttttccaataccgctgaagcagtcagtcgccgtgtgctaaaagtatttaaggcactcaaaatacatgtcaatctgattacaccctataaaaacctgaatctggcacgtgaatctgcccgatcattactgattgctgaacgtgatattgaccaacatgaaagccatttatgtgaagtcacatggcaagagattgatgaacggatgcagcaacgcaaacagaccatagccaccgaggcgcagaaacttggaattgagcttcatggctaa

SEQ ID NO: 43610 - DNA, 1215 bp, Acinetobacter parvus NIPH 1103
atggctaaaacagtagcatggggaattttgcctgatgatgccatcgctcagttacgcaagaaagaatgggatcatccacggcatttaaaacaacgtttgcgccatcaacgtccattcccgattgtactttcactcaaagccccgacaggtcagcaggcatttgcagatatagatcatttccatacattttttaagacatggaaaaattttgcctatcctgatctagtggaatggcaaaaacgtcaatttaaacagttggcaacacagcatgtccctgtcaaactggtcattcctacattggatgtcatggtggagttgttaggacagcaacagagacttaaaaaaatttcagacaaaatttcctttctgttgcaacagctatttgtagagccacatatagaatatgcactattttctacattaattgaatatttagaacagattgaacaataccctgaacatgattggcaattactgatccacttgattgcccagcttaaagcaaatatgggcgcagggcattatttaagagcattgcctttacagcatgtcgataccaaatttttagaaaaaaatctgatttttgtggaagctatttgtgatgtcttgcatcaaggcgaaatacaagcaacaggtggattactcagttggcttaattgtctggatcatcctaaaggctggctaatgatcaaacccttatgtgccaaagtgcaacaatcattgggtggatttccagtctttcagctttcgactgatgtattgacagaatttgaattgcctgcccaacatattatggtggttgaaaatattcagtcaggtttagccttacctatgttggaaaacagtatcgtggtctgtggcggcggtaaaaatatcaaatggctggatgcggcttggctacaacataaaaaagtttattactggggtgatctggattcagagggtttaaatatcctgagcatggtacgccaaaaaattccggatgttattcctttaatgatggatgaagccacagtactgcaatttcaggataaaatggtcgatgaacctgattctgtctttagcgaaccgcaatatttaacagcagaagagttgagtttgtttcatgctttaagaaagaattgctataaaaataagcgactggaacaggaacgaatcagcaatgactggataaatttatatttgacagtagagtcgaagttattaaaaaaatga

SEQ ID NO: 43611 - DNA, 1467 bp, Acinetobacter parvus DSM 16617 = CIP 108168
atgaatattcaggggatacaggcaacttaccgccgtttatatcatgaaagtccagtctggaaattattaagagcagaaaatgcgccacacattttagcatttattgccgatttatttgtcgaagaaaccgaagttccctatggtcgtgcccgaagcttactggatgaatttattaaatatagtcgcgaacagggattgtggcaaaccgaaaataatgcagcctattatttaaatagctggattaaggcaggctggttgcgtgaaatggatgacatgctcagcaagactgatgccagtgaaacagtattgcgtttttgtcgcaatctagacgagcgtcatagcagtactactgcctcacatttgagaattgtacaggatgcagtacgggatttcgtggttgccattagcgacagtattgatgatcgtgtcaacttattagaacaaaagaaagcccagattcaacaagaaattgatgacttgcatgcaggggtggtgacgcagctcaatgaagcggaacaacgggaacggattcgggaaatttatcaactggcttctattttaacaggtgattttaggcgagttgaagatgaaattcgtcagttagataaagagttaagaattgatatgattgagggcaacgcttcacgaggtgaagtgttactggcattgatgcaaaaagagcaattacttgccaaaagcgatgctggcagtgcttttgatggtttctgtcaattattacaggatcaggatcgttccactgagtttcgggaacaactacgcagtattctcaatcaccctgtagcacagcaacttagtgaagcacaaaagaaatatctaggacagctcatgcgtgaactggcgcgggaaagtggtcgggtatttcaggtgcgtcgccgtactgaagagggattgcgggcatatattgaaagtggagctgcactggaaaatcgtatgatcgagcgtttgctatcgcaactggaaaaacaggcagtgaatttaacactggaacagcagtgtgatttaaaaaccgaaatgcaggtgtatttggcagtcggttcggttcagatcagctcacctgaaaattttgctttgaaaagtccgaatgaacacatggatacacgtggcgtacagcaacaacaaaatcgtaaagaaccgagtaatcaaatgctgcactatctggacagtgtacaggtacgagaggttgctgagaaagcacgccatacattgctgaaaaaaggggttatgagtattgcacatttaacccaagaacatccattacaggcaggtctggaggaattggtggcatacttacgaattgccaaagccattaaagcgccgcaattaacagaacaaaatgagcagattcaatttcaggatcaacatggcgtgaatctacaagcccgtatcccgacctattatttaagtgcagaattattccctgaaaatttagatgaattggcattataa

SEQ ID NO: 43612 - DNA, 657 bp, Acinetobacter parvus DSM 16617 = CIP 108168
atgcaaccacaagagagcagtttttttgatagggtgcgtcgcccaacatcagacgaaaatcatgatattcaaccgcagcgcatcgccgaagtcgaagtcgaagatgaactgatagaagttgaagcagatcaagaggtggagaacgatttacagctaagtgatgaactatctagtatgccgcatgaagccagacgggttttggtctatttgatgcgacagggaacgattctggcagctgaaaatctaaaactgtttgatgtgttatgtcgttatgaaacagtgattcgccagcatcttgccgaagtatatattcaactggttttagatgccaaacagggcgtggcgtatattattaatactgaaaacatcaatgatgaaaatgacgatacagcattatcggatgatttccctacgctgattcgaaagcgtaccttaaccttatatgacactttggtattactcattttacggaaatattatcaggagcgggaaaccgcaggtgagcaaaaaattattattgatctggaacgaattcaggcaagtttgaccccttttattccgattaccaatcatgacagtaaagaccgtaaaaaactaagtggcacactagggtctgttgagaattaccgagagttaattacactcgcacacaattga

SEQ ID NO: 43613 - DNA, 3378 bp, Acinetobacter parvus DSM 16617 = CIP 108168
atgcaagaaatgactttggatactttatttgctcagggacaaattcgtctggctgagatttccgtgtttaactggggctcattccataatttacatacagcccgaattgatcctgaagggacgttgattacaggtgacaatggtgctggtaaatctacctttattgatggactgatggcattgttacaacctgccagcaaagccagttttaacgtagcagccgcacagggtgaccgttcagatcgttctttagtgacctatatgcgtggcagttacggctctgaacatgatggttccactaccaaagtcaaaagtaaacgagaaaaagctgtaaccacggcactacgagccttgtatattgcagaggatggttctcagattaccctgattggcttgttttggcttggacaaggcaaaaattcactcagtgatgtcaatcgtttatatatgatagccagtcgcaatgtgttactgactgaagtattagagatttttgccgatggtaatacacgccaactgaaacagcattttaatcccaagacagatcagcgtattcattattttgaaagtgattttaaaagctatcaggatatgtaccgtaaatatttatttatggacaatcagaatgcacctgcattactttcccgagcattgggtttaaagaaaattgatgatttaaccaagctgattcgggaattggtgttagagccgagtaatttacgagaaactgcacaaacggcggtgaatgaatttgctgatttagaagccaattataagcatctggtggatacgcgtgaacaggtggagcatttagagcgtttgccacaatgtgctgaacaaattgccgaattgacgcagcgtttagcgcagcttcatttggaaaaacaatcgattgctgcttattttggtgaattatttgccgcattatggactgaaaagttacagcagcttgaacaggaattgctacaactcaaacaacaatttcagcagattgaacaactggaacaggatgcagagacacggcaggaacgtcgtcatgaggaatatttacagttgggtggtcatcagattgaaaatctgcacaaagaactgggttttattacagataaactcaaaagtctggttatagaagcatctcgttatcaggacgatgcccgacagttacaacttgcggatgatttaaccgagcatgctttgctggaaaatcagggtattgcgactgaaaaattggtcaatactgaacaggataccaagcaacgtcaggatgaatttgctgaaatcagtggaaaatacgcacaaacccaacaacagctcaaagatattcaggaagatattcaggaaattgaagccagacccgatagtaatattcatgatgtgcatttattgcgtttacgtgatgaattaaaacagcatttatcttttgatgaacatgaactgatgtttattggggaattaattgatgttaaagagcacgaaaaagcatggcaaggcgcgattgagcgagcattaggtggactcaaaaccacattacttgtgccacagcatcgttattcgatggtgaccaaatgggtcaatgcgcgtaataataaaacccatgtgcgtttacaggtggttaatctagaacaagtggagcatgtccattttaaggacaatggttttcttgggaagttgctttggcgagaacacgcctatcgtgactggttaaaacagcatttacagcgttttgatttaaattgcgtgagtaatacccaaatactggatcatatgccattttccatgactcaacagggcttaattcatttagaacgaggacgctttgagaaaaaagaccaacaacgtgttgatgatcgtaaagcatggtgtctgggcttttccaatacctctcgtctgagcttgcttaaacatgaatatagtcagttagaacaacagcttaaacagctataccaacagattgaacaggctcggcagttacttaataatgtgaatcagcaaaaaggcatgtgggaaagattgcagcgttatcaatgggatactattaatttaccgtattggcaacaacgtcagcaacaaacccaacaggacttgcagcgtttacagcaggcagattctgatgctgaacaggctcgccagcgttgggaagatgcaaaaaatgagctcaaacagattcgcttacaaaaaggtgagtcacaaaaaatccgaggtcagttagaacagcaacatcgtgatacccagttaaaacagcaaaaagcacaacaagcagctgagcagggaatcagtgatgatgcccgacaattattgaaacaacggataggcgaagtcaaacaactagatgatgcgttgcaaggcaaattcgaaaaagagctagatgaactggttggacaagcgaatgatcagaaagcaaaggcaagtaatacggcaataggaattattggagcatttcgtggtaaagataaatgggcacatattcccttacaacgagaatgggcgacagggctggctgctttagaggattatgttgcctatttgcaggaattacagcaggagggtttgccgaatctggttgagcaattccagcaacgtttgcataaacacaccgctcagtctttaagtgtgattcaggataaattgaatgcaaatcgggaagaaatcattgaccgaattgacatgattaatcaggtattacaacgcacggaatttaagctcggcagctatttaagactgggctataagaaagaaaaatatccacatgtacacgatttcgaacaacgtttaaaacaggttttatctggcgtgaatagtgaagaatatgaacgtcgttttaaacacttggcggagttaatggcgattttggacagagccagtagctcggcaactgccaataatcaggaaagtttacgtttgcttgatcctcgttatcaaatgtcattccatgccgaagaagtggatgcgcaaacaagtgaaataagggatgtgttggaatcctctagtggaaaatcaggcggtgaaaaagaatcctttgcaggtacgattgtcgcagcaagtttagcttatgtattgacacctgatggttatgattacccgatttatagcactgtatttttagatgaagctttttccaataccgctgaagcagtcagtcgccgtgtgctaaaagtatttaaggcactcaaaatacatgtcaatctgattacaccctataaaaacctgaatctggcacgtgaatctgcccgatcattactgattgctgaacgtgatattgaccaacatgaaagccatttatgtgaagtcacatggcaagagattgatgaacggatgcagcaacgcaaacagaccatagccatcgaggcgcagcaacttggaattgagcttcatggctaa

SEQ ID NO: 43614 - DNA, 1215 bp, Acinetobacter parvus DSM 16617 = CIP 108168
atggctaaaacagtagcatggggaattttgcctgatgatgccatcgctcagttacgcaagaaagaatgggatcatccacggcatttaaaacaacgtttgcgccatcaacgtccattcccgattgtactttcactcaaagccccgacaggtcagcaggcatttgcagatatggatcatttccatacattttttaagacatggaaaaattttggctatcctgatctggtggaatggcaacaacgtcaatttaaacagttggcaacacagcatgtccctgtcaaactggtcattcctacattggatgtcatggtggagttgttaggacagcaacagcgatttaaaaaaatttcagacaaaatttcctttctgttgcaacagctatttgtagagccacatatagaatatgcactattttctacattaattgaatatttagaacagattgaacaataccctgaacatgattggcaattactgatccacttgattgcccagcttaaagcaaatatgggcgcagggcattatttaagagcattgcctttacagcatgtcgataccaaatttttagaaaaaaatctgatttttgtggaagctatttgtgatgtcttgcatcaaggcgaaatacaagcaacagggggattactcagttggcttaattgtctggatcatcctaaaggctggctaatgatcaaacccttatgtgccaaagtgcaacaatcattgggtggatttccagtctttcagctttcgactgatgtattgacagaatttgaattgcctgcccaacatattattgtggttgaaaatattcagtcaggtttagccttacctatgttggaaaacagtatcgtggtctgtggcggcggtaaaaatatcaaatggctggatgcggcttggctacaacataaaaaagtttattactggggtgatctggattcagagggtttaaatatcctgagcatggtacgccaaaaaattccggatgttattcctttaatgatggatgaagccacagtactgcaatttcaggataaaatggtcgatgaacctgattctgtctttagcgaaccgcaatatttaacagcagaagagttgagtttgtttcatgctttaagaaagaattgctataaaaataagcgactggaacaggaacgaatcagcaatgactggataaatttatatttgacagtagaatcgaagttattaaaaaaatga

SEQ ID NO: 43615 - DNA, 786 bp, Acinetobacter seifertii
atgcaaccacaaaaaagcagtttttttgacagagtacgtcgcccatcatctgatgaaaaccatgatattcaatcgcagtgcatcgcggaagtcaaagatgagtttacagggggtgaagtggatcaagagctagaaaatgatcctcaggcaagcgatgaactgtctagtatgtcgcatgaggccagacgggttttggtctatttgatgcggcagggaacaattttagcagccgaaaacctgaaactttttgatgtgttatgtcgttatgaaacagcgattcgtcaacatcttgcagaagtgtatattcaactgattttagatgccagacagggcgttgcctatattattaatgtggaaggcattggtaatgaaaatgataatagtccattatcagatgattttcccacactgattcgtaaacgtactttgactttgtatgataccttggttctgctaattttacgtaaatattatcaggaacgagaaaccgcaggtgagcaaaaaattattattgatctggagcggattcagggaagtttaattccttttattccgattaccaatcatgaaagtaaagatattaaaaaattaagcggtactttggataaatttagtgaaaagaaaatacttagtgtgatacgtggtgaagaggggcgttatgaaattacaccgattatccgttatgtggtcaatgccgaatttctacaaagtttattaagcgaatataagcaattggcggataaaacagctctgcatcaatctgaacaaaataaaggaaaagtataa

SEQ ID NO: 43616 - DNA, 3087 bp, Acinetobacter seifertii
atgcaagagatgactttggataccttatttgctcagggacaaattcgtttggcagaaatttcagtgtttaactgggggtcatttcacaatttgcacacggctcgtattgatcctgagggaacattaattacaggggataatggagcaggaaaatccacttttattgatgggttgatggcgttattacaacctgccaacaaagccagttttaacgtggcagcagcacagggcgacagttctgatcgttcacttgtgacttatatgcgaggcagttacggctctgagcatgatggttcaagtactaaagtcaaaagcaagcgggaaaaagccgtgactacggcacttcgagccttgtataccgcagaggatggttcgcagattaccctgattggactcttctggattggacagggcaaaaattcgctcagtgatgtcaatcgtttatatatgattgccagtcgcaatgtgttgcttactgaagtattggatatttttgccgatggtaatactcgccaactgaaacagcattttaatccgaaaactgatcaacgcattcattattttgataatgattttaaaagctatcaggacatgtatcgtaaatatttatttatggataatcagaatgcacctgcattgcttgctcgggcattagggttaaagaaaattgatgatttgaccaagctgattcgggaactggtgttggaacccagcaatttaagggaaactgctcagacggctgtcaatgaatttgctgatttagaggcaaattataagcatctggtagatactcgggaacaagtcgaacatctacaacgtttgccacaatgtgctgaacagattgccgaattgacacagcatttggcgcagcttcatctggaaaaacaatctattaatgcttatttgggtgaattgtttgctgcattatggacagagaaattacagcaacttgagcaggaattgctacagctcaatcaacagtttcagcagattgaacagcaggaacaggatgcagaaacacggcaagaacgttgtcatgaagaatatttgcaactcgggggaaaccagattgaaaacttgcgtaaagagctaggctttatcgccgataagctcaaaagtttggtcttggaggcatctcggtatcaggatgatgcccgacaattacagctttctgatgatttaactgaacatcgtttgctggaaaaccatgagatagcgactgaaaaactggtcaatattgaacagaataccaagcaacgccaagatgaatttgccgaagtcagtggtaaatacgcacaaactcagcaacaactcaaggatattcaggaagatattcaggaaatagaagccagacctgacagtaatatccatgatgtgcatttactgcgtttacgtgatgaattaaaacagcatctatcttttgatgaacatgaactgatgtttattggagagttgattgatgttaaagattgcgaaaaagcatggcagggagccattgaacgagcactaggcggactcaaaaccactttacttgtgccacaggaccgctattccatggtgactaaatgggtcaatgctcgtaataataaaacccatgtgcgtttacaagtggtcaatacagagcaattagggcatgtcccttttaaggacaatggttttctgggtaaattactttggcgagaacacgcctatcgtgactggttaaaacagcatttacagcgtttcgatttaaattgtgtgagtgatacccaaacactggatcatacaccattttccatgacccaacagggcttgattcatttggaaagagggcgcttcgagaaaaaagatcaacaacgtattgatgagcgtaaagcatggtgtctgggtttttctaatacttctcgtctaaacttactcaaacatgaatatagtcagttagaacaacagcttaaacagcaataccaacagattgaacaggctcggcagttactcaataatattaatcagcaaaaaggcttatgggaaaggttgcagcgttatcaatgggatgccattaatttaccatattggcaacagcgccagcagcagacgcaccaggatttgcagcgtttacaacagacagattccgatgctgaacaggctcaccagcgttgggaagcggcaaaaaatgaattaaaacagattcgcttacaaaaaggtgagttgcaaaaaatccgaggtcaattagaacagcaacatggtgatatccagttaaaacagcaaaaagctcaacaagcagccgagcaggtaatgaatgatgatgcgcgacagttattgaaacaacggatcggtgaagtcaaacaactggatgatgcgttgcaggcagaaatcgaacgaaaacttgagcgtttaattgggcagacaaatgaccaaaaaacgacgatcagcaataccgccaatggtattatggtgtcattccgcagtaaagataaatggacacatatcccattacaacgagaatgggcaacaggtttggtagcgctggatgactatgtcgcttatttacaggagttacagcaggagggtttgccgaatttggttgaacaatttcaacaacgtctacataaacatactacccaatctttaagtgtgattcaggataaattgaatgtcaatcgggaagaaattattgaccgaattgacatgattaatcaggtattacaacgcacggagtttaagctcggtagctatttaagacttggctataagaaagaaaaatatccacatgtacaggatttcgaacaacgtttaaaacaggttctgtctggtgtaaatagtgaagaatatgaacgtcgttttaaacagttggcggagttgatggcgattttggacaaggccagcagctcggcaaccgccaataatcaggaaagtctacgtttgcttgatcctcgttatcaaatgtcatttcatgcagaagaagtggatgcacaaacaggggtaatacgagatgtgcttgagtcttccagcggtaaatcgggaggtgaaaaagaatcctttgcaggcacgattgtcgcagcaagtctagcttatgtactgacacctgatggctatgattatccaatttag

SEQ ID NO: 43617 - DNA, 1203 bp, Acinetobacter seifertii
atggctagaacagcagcatggggacttttgcctgatgatgccattgcccaattacgcaagaaagaatgggatcatcaaaggcatttaaaacaacgcttgcgtcatcaacgtccattcccgattgtactttcactcaaagccccgacaggccagcaggcaatgagcaatctggatcatttccatacattttttaaggcatggaaaaattttgtctatcctgatctggtggaatggcaacaacgtcaattcaaacagttggcaacacaacaagtccctgttaagttgataattcctacattggaggtcatggtggatgtgctaggacagcaacagcgatttaaaaaaatttcagataaaatttcctatttgttactgcagccatttgtacagccacaagtggaatatgctttgttctgtacattaattgaatatttggaactgcttgaacaatatcgtgaggcagactggcaattgctgatccagttgatctctcagcttaaagcaaatatgggggcaggaaattatttaagagcattacctttgcagcatgttgataccaagtttttagaaagaaatgtgctgttggtcgaagccatttgtgatgtcttataccatggagaagtacaggcagcaggtggattactaaattggctcaattgcctggatcatccgaaaggctggctgatgatcaaacctttatgtaccctggtgcaacagtcattgggaggactgccagtttttcagctttctaccgatgtattgatacaatttgaattgcctgctcaacatattattgtgattgaaaatgttcagtcaggtttagctttacctgtgatcgaaaatacgattgttgtctgtggcggtggtaaaaatattaaatggctagatgcactttggctacaaaataaacaagtatattactggggtgatattgattccgaaggattaaatatcctgagcatggtacgacacaaagttccggatgttattcctttgatgatgaatgaagccactctattacaatttcaggataaaatggtggatgagcctgattcagtttttcttgaacctaaatatttaacagacgaagaattaatattatttcatcaattaagaagtaaggcttatatccataaacgtctagaacaagaaagaatcactaatgattggatcagagaaaatttaaaaagacaaattaaataa

SEQ ID NO: 43618 - DNA, 1467 bp, Acinetobacter sp. CIP 102159
atgaatattcaggggatacaggcaacttaccgccgtttatatcatgaaagtccagtctggaaattattaagagcagaaaatgcgccacacattttagcatttattgccgatttatttgtcgaagaaaccgaagttccctatggtcgtgcccgaagcttactggatgaatttattaaatatagtcgcgaacagggattgtggcaaaccgaaaataatgcagcctattatttaaatagctggattaaggcaggctggttgcgtgaaatggatgacatgctcagcaagactgatgccagtgaaacagtattgcgtttttgtcgcaatctagacgagcgtcatagcagtactactgcctcacatttgagaattgtacaggatgcagtacgggatttcgtggttgccattagcgacagtattgatgatcgtgtcaacttattagaacaaaagaaagcccagattcaacaagaaattgatgacttgcatgcaggggtggtgacgcagctcaatgaagcggaacaacgggaacggattcgggaaatttatcaactggcttctattttaacaggtgattttaggcgagttgaagatgaaattcgtcagttagataaagagttaagaattgatatgattgagggcaacgcttcacgaggtgaagtgttactggcattgatgcaaaaagagcaattacttgccaagagcgatgctggcagtgcttttgatggtttctgtcaattattacaggatcaggatcgttccactgagtttcgggaacaactacgcagtattctcaatcaccctgtagcacagcaacttagtgaagcacaaaagaaatatctaggacagctcatgcgtgaactggcgcgggaaagtggtcgggtatttcaggtgcgtcgccgtactgaagagggattgcgtgcatatattgaaagtggagctgcactggaaaatcgtatgatcgagcgtttgctatcgcaactggaaaaacaggcagtgaatttaacactggaacagcagtgtgatttaaaaaccgaaatgcaggtgtatttggcagtcggttcggttcagatcagctcacctgaaaattttgctttgaaaagtccgaatgaacacatggatacacgtggcgtacagcaacaacaaaatcgtaaagaaccgagtaatcaaatgctgcactatctggacagtgtacaggtacgagaggttgctgagaaagcacgccatacattgctgaaaaaaggggttatgagtattgcacatttaacccaagaacatccattacaggcaggtctggaggaattggtggcatacttacgaattgccaaagccattaaagcgccgcaattaacagaacaaaatgagcagattcaatttcaggatcaacatggcgtgaatctacaagcccgtatcccgacttattatttaagtgcagaattattccctgaaaatttagatgaattggcattataa

SEQ ID NO: 43619 - DNA, 798 bp, Acinetobacter sp. CIP 102159
atgcaaccacaagagagcagtttttttgatagggtgcgtcgcccaacatcaaacgaaaatcatgatattcaaccgcagcgcatcgccgaagtcgaagtcgaagtcgaagatgaactgatagaagttgaagcagatcaagaggtggagaacgatttacagctaagtgatgaactatctggtatgccgcatgaagccagacgggttttggtctatttgatgcgacagggaacgattctggcagctgaaaatctaaaactgtttgatgtgttatgtcgttatgaaacagtgattcgccagcatcttgccgaagtatatattcaactggttttagatgccaaacagggcgtggcgtatattattaatactgaaaacatcaatgatgaaaatgacgatacagcattatcagatgatttccctacgctgattcgaaagcgtaccttaaccttatatgacactttggtattactcattttacggaaatattatcaggagcgggaaaccgcaggtgagcaaaaaattattattgatctggaacgaattcaggcaagtttgatcccttttattccgattaccaatcatgacagtaaagaccgtaaaaaactaagtggcacactagataaattcagtgaaaagaaaattctcagtgtaatacgaggtgaggatgggcgttatgaaattacaccgattatccgttatgtggtcaatgctgaatttctacaaagtttattgaccgaatatgagcaactggcagataaggcagctatgcatcaatgcgagcagaataaaggaaaggtataa

SEQ ID NO: 43620 - DNA, 3378 bp, Acinetobacter sp. CIP 102159
atgcaagaaatgactttggatactttatttgctcagggacaaattcgtctggctgagatttccgtgtttaactggggctcattccataatttacatacagcccgaattgatcctgaagggacgttgattacaggcgacaatggtgctggtaaatctacctttattgatggactgatggcattgttacaacctgccagcaaagccagttttaacgtagcagccgcacagggtgaccgttcagatcgttctttagtgacctatatgcgcggcagttacggctctgaacatgatggttccactaccaaagtcaaaagtaaacgagaaaaagctgtaaccacggcactgcgagccttgtatattgcagaggatggttctcagattaccctgattggcttgttttggcttggacaaggcaaaaattcactcagtgatgtcaatcgtttatatatgatagccagtcgcaatgtgttactgactgaagtattagagatttttgccgatggtaatacacgccagctcaaacagcattttaatcccaagacagatcagcgtattcattattttgaaagtgattttaaaagctatcaggatatgtaccgtaaatatttatttatggacaatcagaatgcacctgcattactttcccgagcattgggtttaaagaaaattgatgatttaaccaagctgattcgggagttggtgttagagccgagtaatttacgagaaactgcacaaacggcggtgaatgaatttgctgatttagaagccaattataagcatctggtggatacgcgtgaacaggtggagcatttagagcgtttgccacaatgtgctgaaaaaattgccgaattgacgcagcgtttagcgcagcttcatttggaaaaacaatcgattgctgcttattttggtgaattatttgccgcattatggactgaaaagttacagcagcttgaacaggaattgctacaactcaaacaacaatttcagcagattgaacaactggaacaggatgcagagacacggcaggaacgtcgtcatgaggaatatttacagttgggtggtcatcagattgaaaatctgcacaaagaactgggttttattacagataaactcaaaagtctggttatagaagcatctcgttatcaggacgatgcccgacagttacaacttgcggatgatttaaccgagcatgctttgctggaaaatcagggcattgcgactgaaaaattggtcaatactgaacaggataccaagcaacgtcaggatgaatttgctgaaatcagtggaaaatacgcacaaacccaacaacagctcaaagatattcaggaagatattcaggaaattgaagccagacccgatagtaatattcatgatgtgcatttattgcgtttacgtgatgaattaaaacagcatttatcttttgatgaacatgaactgatgtttattggggaattaattgatgttaaagagcacgaaaaagcatggcaaggcgcgattgagcgagcattaggtggactcaaaaccacattacttgtgccacagcatcgttattcgatggtgaccaaatgggtcaatgcgcgtaataataaaacccatgtgcgtttacaggtggttaatctagaacaagtggagcatgtccattttaaggacaatggttttcttgggaagttgctttggcgagaacacgcctatcgtgactggttaaaacagcatttacagcgttttgatttaaattgcgtgagtaatacccaaatactggatcatatgccattttccatgactcaacagggcttaattcatttagaacgaggacgctttgagaaaaaagaccaacaacgtgttgatgatcgtaaagcatggtgtctgggcttttccaatacctctcgtctgagcttgcttaaacatgaatatagtcagttagaacaacagcttaaacagctataccaacagattgaacaggctcggcagttacttaataatgtgaatcagcaaaaaggcatgtgggaaagattgcagcgttatcaatgggatactattaatttaccgtattggcaacaacgtcagcaacaaacccaacaggacttgcagcgtttacagcaggcagattctgatgctgaacaggctcgccagcgttgggaagatgcaaaaaatgagctcaaacagattcgcttacaaaaaggtgagtcacaaaaaatccgaggtcagttagaacagcaacatcgtgatacccagttaaaacagcaaaaagcacaacaagcagctgagcagggaatcagtgatgatgcccgacaattattgaaacaacggataggcgaagtcaaacaactagatgatgcgttgcaaggcaaattcgaaaaagagctagatgaactggttggacaagcgaatgatcagaaagcaaaggcaagtaatacggcaataggaattattggagcatttcgtggtaaagataaatgggcacatattcccttacaacgagaatgggcgacagggctggctgctttagaggattatgttgcctatttgcaggaattacagcaggagggtttgccgaatctggttgagcaattccagcaacgtttgcataaacacaccgctcagtctttaagtgtgattcaggataaattgaatgcaaatcgggaagaaatcattgaccgaattgacatgattaatcaggtattacaacgcacggaatttaagctcggcagctatttaagactgggctataagaaagaaaaatatccacatgtacacgatttcgaacaacgtttaaaacaggttttatctggcgtgaatagtgaagaatatgaacgtcgttttaaacacttggcggagttaatggcgattttggacagagccagtagctcggcaactgccaataatcaggaaagtttacgtttgcttgatcctcgttatcaaatgtcattccatgccgaagaagtggatgcgcaaacaagtgaaataagggatgtgttggaatcctctagtggaaaatcaggcggtgaaaaagaatcctttgcaggtaccattgtcgcagcaagtttagcttatgtattgacacctgatggttatgattacccgatttatagcactgtatttttagatgaagctttttccaataccgctgaagcagtcagtcgccgtgtgctaaaagtatttaaggcactcaaaatacatgtcaatctgattacaccctataaaaacctgaatctggcacgtgaatctgcccgatcattactgattgctgaacgtgatattgaccaacatgaaagtcatttatgtgaagtcacatggcaagagattgatgaacggatgcagcaacgcaaacagaccatagccaccgaggcgcagcaacttggaattgagcttcatggctaa

SEQ ID NO: 43621 - DNA, 1215 bp, Acinetobacter sp. CIP 102159
atggctaaaacagtagcatggggaattttgcctgatgatgccatcgctcagttacgcaagaaagaatgggatcatccacggcatttaaaacaacgtttgcgccatcaacgtccattcccgattgtactttcactcaaagccccgacaggtcagcaggcatttgcagatatggatcatttccatacattttttaagacatggaaaaattttgcctatcctgatctggtggaatggcaacaacgtcaatttaaacagttggcaacacagcatgtccctgtcaaactggtcattcctacattggatgtcatggtggagttgttaggacagcaacagcgatttaaaaaaatttcagacaaaatttcctttctgttgcaacagctatttgtagagccacatatagaatatgcactattttctacattaattgaatatttagaacagattgaacaataccctgaacatgattggcaattactgatccacttgattgcccagcttaaagcaaatatgggcgcagggcattatttaagagcattgcctttacagcatgtcgataccaaatttttagaaaaaaatctgatttttgtggaagctatttgtgatgtcttgcatcaaggcgaaatacaagcaacagggggattactcagttggcttaattgtctggatcatcctaaaggctggctaatgatcaaacccttatgtgccaaagtgcaacaatcattgggtggatttccagtctttcagctttcgactgatgtattgacagaatttgaattgcctgcccaacatattattgtggttgaaaatattcagtcaggtttagccttacctatgttggaaaacagtatcgtggtctgtggcggcggtaaaaatatcaaatggctggatgcggcttggctacaacataaaaaagtttattactggggtgatctggattcagagggtttaaatatcctgagcatggtacgccaaaaaattccggatgttattcctttaatgatggatgaagccacagtactgcaatttcaggataaaatggtcgatgaacctgattctgtctttagcgaaccgcaatatttaacagcagaagagttgagtttgtttcatgctttaagaaagaattgctataaaaataagcgactggaacaggaacgaatcagcaatgactggataaatttatatttgacagtagaatcgaagttattaaaaaaatga

SEQ ID NO: 43622 - DNA, 1467 bp, Acinetobacter sp. CIP 102129
atgaatattcaggggatacaggcaacttaccgccgtttatatcatgaaagtccagtctggaaattattaagagcagaaaatgcgccacacattttagcatttattgccgatttatttgtcgaagaaaccgaagttccctatggtcgtgcccgaagcttactggatgaatttattaaatatagtcgcgaacagggattgtggcaaaccgaaaataatgcagcctattatttaaatagctggattaaggcaggctggttgcgtgaaatggacgacatgctcagcaagactgatgccagtgaaacagtattgcgtttttgtcgcaatctggacgagcgtcatagcagtactactgcctcacatttgagaattgtacaggatgcagtacgggatttcgtggttgccattagcgacagtattgatgatcgtgtcaacttattagaacaaaagaaagcccagattcaacaagaaattgatgacttgcatgcaggggtggttacgcagctcaatgaaacggagcaacgagaacggattcgggaaatttatcaactggcttctattttaacaggtgattttaggcgagtcgaagatgaaattcgtcagttagataaagagttaagaattgatatgattgagggcaatgcttcacgaggtgaagtgttactggcattgatgcaaaaagagcaattacttgccaagagcgatgctggcagtgcttttgatggtttctgtcaattattacaggatcaggatcgttccactgagtttcgggaacaactacgcagtattctcaatcaccctgtagcacagcaacttagtgaagcacaaaagaaatatctaggacagctcatacgtgaactggcgcgggaaagtggtcgggtatttcaggtgcgtcgccgtactgaagagggattgcgggcatatattgaaagtggagctgcactggaaaatcgtatgatcgagcgtttgctatcgcaactggaaaaacaggcagtgaatttaacactggaacagcagtgcgatttaaaaaccgaaatgcaggtgtatttggcagtcggttcggttcagatcagctcacctgaaaattttgctttgaaaagtccgaatgaacacatggatacacgtggcgtacagcaacaacaaaatcgtaaagaaccgagtaatcaaatgctgcactatctggacagtgtacaggtacgagaggttgctgaaaaagcacgccatacattgctgaaaaaaggggctatgagtattgcacatttaacccaagaacatccattacaggcaggtctggaggaattggtggcatacttacgaattgccaaagccattaaagcgccgcaattaacagaacaaaatgagcagattcaatttcaggatcaacatggcgtgaatctacaagcccgtatcccgacctattatttaagtgcagaattattccctgaaaatttagatgaattggcattataa

SEQ ID NO: 43623 - DNA, 792 bp, Acinetobacter sp. CIP 102129
atgcaaccacaagagagcagtttttttgatagggtgcgtcgcccaacatcagacgaaaatcatgatattcaaccgcagcgcatcgccgaagtcgaagtcgaagatgaactgatagaagttgaagcagatcaagaggtggagagcgatttacagctaagtgatgaactatctagtatgccgcatgaagccagacgggttttggtctatttgatgcgacagggaacgattctggcagctgaaaatctaaaactgtttgatgtgttatgtcgttatgaaacagtgattcgccagcatcttgccgaagtatatattcaactggttttagatgccaaacagggcgtggcgtatattattaatactgaaaacatcaatgatgaaaatgacgatacagcattatcagatgatttccctacgctgattcgaaagcgtaccttaaccttatatgacactttggtattactcattttacggaaatattatcaggagcgggaaaccgcaggtgagcaaaaaattattattgatctggaacgaattcaggcaagtttgattccttttattccgattaccaatcatgacagtaaagaccgtaaaaaactaagtggcacactagataaattcagtgaaaagaaaattctcagtgtaatacgaggtgaggatgggcgttatgaaattacaccgattatccgttatgtggtcaatgctgaatttctacaaagtttattgaccgaatatgagcaactggcagataaagcagctatgcatcaatgcgagcagaataaaggaaaggtataa

SEQ ID NO: 43624 - DNA, 3378 bp, Acinetobacter sp. CIP 102129
atgcaagaaatgactttggatactttatttgctcagggacaaattcgtctggctgagatttccgtgtttaactggggctcattccataatttacatacagcccgaattgatcctgaagggacgttgattacaggtgacaatggtgctggcaaatctacctttattgatggactgatggcattgttacaacctgccagcaaagccagttttaacgtagcagccgcacagggtgaccgttcagatcgttctttagttacctatatgcgcggcagttacggctctgaacatgatggttccactaccaaagtcaaaagtaaacgagaaaaagctgtaaccacggcactgcgagccttgtatattgcagaggatggttctcagattaccctgattggcttgttttggcttggacaaggcaaaaattcactcagtgatgtcaatcgtttatatatgatagccagtcgcaatgtgttactgactgaagtattagagatttttgccgatggtaatacacgccaactgaaacagcattttaatcccaagacagatcagcgtattcattattttgaaagtgattttaaaagctatcaggatatgtaccgtaaatatttatttatggacaatcagaatgcacctgcattactttcccgagcattgggtttaaagaaaattgatgatttaaccaagctgattcgggaattggtgttagagccgagtaatttacgagaaactgcacaaacggcggtgaatgaatttgctgatttagaagccaattataagcatctggtggatacgcgtgaacaggtggagcatatagagcgtttgccacaatgtgctgaacaaattgccgaattgacgcagcgtttagcgcagcttcatttggaaaaacaatcgattgctgcttattttggtgaattatttgccgcattatggactgaaaagttacagcagcttgaacaggaattgctacaactcaaacaacaatttcagcagattgaacaactggaacaggatgcagagacacggcaggaacgtcgtcatgaggaatatttacagttgggtggtcatcagattgaaaatctgcacaaagaactgggttttattacagataaactcaaaagtctggttatagaagcatctcgttatcaggacgatgcccgacagttacaacttgcggatgatttaaccgagcatgctttgctggaaaatcagggcattgcgactgaaaaattggtcaatactgaacaggataccaagcaacgtcaggatgaatttgctgaaatcagtggaaaatacgcacaaacccaacaacagctcaaagatattcaggaagatattcaggaaattgaagccagacccgatagtaatattcatgatgtgcatttattgcgtttacgtgatgaattaaaacagcatttatcttttgatgaacatgaactgatgtttattggggaattgattgatgttaaagagcacgaaaaagcatggcaaggcgcgattgagcgagcattaggtggactcaaaaccacattacttgtgccacaggatcgttattcgatggtgaccaaatgggtcaatgcgcgtaataataaaacccatgtgcgtttacaggtggttaatctagaacaagtggagcatgtccattttaaggacaatggttttcttgggaagttgctttggcgagaacacgcctatcgtgactggttaaaacagcatttacagcgttttgatttaaattgcgtgagtgatatccaaatactggatcatatgccattttccatgactcaacagggcttaattcatttagaacgaggacgctttgagaaaaaagaccaacaacgtgttgatgatcgtaaagcatggtgtctgggcttttccaatacctctcgtctgagcttgcttaaacatgaatatagtcagttagaacaacagcttaaacagctataccaacagattgaacaggctcggcagttacttaataatgtgaatcagcaaaaaggcttgtgggaaagattgcagcgttatcaatgggatactattaatttaccgtattggcaacaacgtcagcagcaaacccaacaggacttgcagcgtttacagcaggcagattctgatgctgaacaggctcgccagcgttgggaagatgcaaaaaatgagctcaaacagattcgcttacaaaaaggtgagtcacaaaaaatccgaggtcagttagaacagcaacatcgtgatacccagttaaaacagcaaaaagcacaacaagcagctgagcagggaatcagtgatgatgcccgacaattattgaaacaacggataggcgaagtcaaacaactagatgatgcgttgcaaggcaaattcgaaaaagagctagatgaactggttggacaagcgaatgatcagaaagcaaaggcaagtaatacggcaataggaattattggagcatttcgtggtaaagataaatgggcacatattcctttacaacgagaatgggcgacagggctggctgctttagaggattatgttgcctatttgcaggaattacagcaggagggtttgccgaatctggttgagcaattccagcaacgtttgcataaacacaccgctcagtctttaagtgtgattcaggataaattgaatgcaaatcgggaagaaatcattgaccgaattgacatgattaatcaggtattacaacgcacggaatttaagctcggcagctatttaagactgggctataagaaagaaaaatatccacatgtacacgatttcgaacaacgtttaaaacaggttttatctggcgtgaatagtgaagaatatgaacgtcgttttaaacacttggcggagttaatggcgattttggacagagccagtagctcggcaactgccaataatcaggaaagtttacgtttgcttgatcctcgttatcaaatgtcattccatgccgaagaagtggatgcgcaaacaagtgaaataagggatgtgttggaatcctctagtggaaaatcaggcggtgaaaaagaatcctttgcaggtaccattgtcgcagcaagtttagcttatgtattgacacctgatggttatgattacccgatttatagcactgtatttttagatgaagctttttccaataccgctgaagcagtcagtcgccgtgtgctaaaagtatttaaggcactcaaaatacatgtcaatctgattacaccctataaaaacctgaatctggcacgtgaatctgcccgatcattactgattgctgaacgtgatattgaccaacatgaaagtcatttatgtgaagtcacatggcaagagattgatgaacggatgcagcaacgcaaacagaccatagccaccgaggcgcagcaacttggaattgagcttcatggctaa

SEQ ID NO: 43625 - DNA, 1215 bp, Acinetobacter sp. CIP 102129
atggctaaaacagtagcatggggaattttgcctgatgatgccatcgctcagttacgcaagaaagaatgggataatccacggcatttaaaacaacgtttgcgccatcaacgtccattcccgattgtactttcactcaaagccccgacaggtcagcaggcatttgcagatatagatcatttccatacattttttaagacatggaaaaattttgcctatcctgatctggtggaatggcaacaacgtcaatttaaacagttggcaacacagcatgtccctgtcaaactggtcattcctacattggatgtcatggtggagttgttaggacagcaacagcgatttaaaaaaatttcagacaaaatttcctttctgttgcaacagctatttgtagagccacatatagaatatgcactattttctacattaattgaatatttagaacagattgaacaataccctgaacatgattggcaattactgatccacttgattgcccagcttaaagcaaatatgggcgcagggcattatttaagagcattgcctttacagcatgtcgataccaaatttttagaaaaaaatctgatttttgtggaagctatttgtgatgtcttgcatcaaggcgaaatacaagcaacaggtggattactcagttggcttaattgtctggatcatcctaaaggctggctaatgatcaaacccttatgtgccaaagtgcaacaatcattgggtggatttccagtctttcagctttcgactgatgtattgacagaatttgaattgcctgcccaacatattattgtggttgaaaatattcagtcaggtttagccttacctatgttggaaaacagtatcgtggtctgtggcggcggtaaaaatatcaaatggctggatgcggcttggctacaacataaaaaagtttattactggggtgatctggattcagagggtttaaatatcctgagcatggtacgccaaaaaattccggatgttattcctttaatgatggatgaagccacagtactgcaatttcaggataaaatggtcgatgaacctgattctgtctttagcgaaccgcaatatttaacagcagaagagttgagtttgtttcatgctttaagaaagaattgctataaaaataagcgactggaacaggaacgaatcagcaatgactggataaatttatatttgacagtagaatcgaagttattaaaaaaatga

SEQ ID NO: 43626 - DNA, 1467 bp, Acinetobacter sp. CIP 102529
atgaatattcaggggatacaggcaacttaccgccgtttatatcatgaaagtccagtctggaaattattaagagcagaaaatgcgccacacattttagcatttattgccgatttatttgtcgaagaaaccgaagttccctatggtcgtgcccgaagcttactggatgaatttattaaatatagtcgcgaacagggattgtggcaaaccgaaaataatgcagcctattatttaaatagctggattaaggcaggctggttgcgtgaaatggatgacatgctcagcaagactgatgccagtgaaacagtattgcgtttttgtcgcaatctagacgagcgtcatagcagtactactgcctcacatttgagaattgtacaggatgcagtacgggatttcgtggttgccattagcgacagtattgatgatcgtgtcaacttattagaacaaaagaaagcccagattcaacaagaaattgatgacttgcatgcaggggtggtgacgcagctcaatgaagcggaacaacgggaacggattcgggaaatttatcaactggcttctattttaacaggtgattttaggcgagttgaagatgaaattcgtcagttagataaagagttaagaattgatatgattgagcgcaacgcttcacgaggtgaagtgttactggcattgatgcaaaaagagcaattacttgccaagagcgatgctggcagtgcttttgatggtttctgtcaattattacaggatcaggatcgttccactgagtttcgggaacaactacgcagtattctcaatcaccctgtagcacagcaacttagtgaagcacaaaagaaatatctaggacagctcatgcgtgaactggcgcgggaaagtggtcgggtatttcaggtgcgtcgccgtactgaagagggattgcgggcatatattgaaagtggagctgcactggaaaatcgtatgatcgagcgtttgctatcgcaactggaaaaacaggcagtgaatttaacactggaacagcagtgcgatttaaaaaccgaaatgcaggtgtatttggcagtcggttcggttcagatcagctcacctgaaaattttgctttgaaaagtccgaatgaacacatggatacacgtggcgtacagcaacaacaaaatcgtaaagaaccgagtaatcaaatgctgcactatctggacagtgtacaggtacgagaggttgctgagaaagcacgccatacattgctgaaaaaaggggttatgagtattgcacatttaacccaagaacatccattacaggcaggtctggaggaattggtggcatacttacgaattgccaaagccattaaagcgccgcaattaacagaacaaaatgagcagattcaatttcaggatcaacatggcgtgaatctacaagcccgtatcccgacctattatttaagtgcagaattattccctgaaaatttagatgaattggcattataa

SEQ ID NO: 43627 - DNA, 792 bp, Acinetobacter sp. CIP 102529
atgcaaccacaagagagcagtttttttgatagggtgcgtcgcccaacatcagacgaaaatcatgatattcaaccgcagcgcatcgccgaagtcgaagtcgaagatgaactgatagaagttgaagcagatcaagagatggagaacgatttacagctaagtgatgaactatctagtatgccgcatgaagccagacgggttttggtctatttgatgcgacagggaacgattctggcagctgaaaatctaaaactgtttgatgtgttatgtcgttatgaaacagtgattcgccagcatcttgccgaagtatatattcaactggttttggatgccaaacagggcgtggcgtatattattaatactgaaaacatcaatgatgaaaatgacgatacagcattatcggatgatttccctacgctgattcgaaagcgtaccttaaccttatatgacactttggtattactcattttacggaaatattatcaggagcgggaaaccgcaggtgagcaaaaaattattattgatctggaacgaattcaggcaagtttgaccccttttattccgattaccaatcatgacagtaaagaccgtaaaaaactaagtggcacactagataaattcagtgaaaagaaaattctcagtgtaatacgaggtgaggatgggcgttatgaaattacaccgattatccgttatgtggtcaatgctgaatttctacaaagtttattgaccgaatatgagcaactggcagataaagcagctatgcatcaatgcgagcagaataaaggaaaggtataa

SEQ ID NO: 43628 - DNA, 3378 bp, Acinetobacter sp. CIP 102529
atgcaagaaatgactttggatactttatttgctcagggacaaattcgtctggctgagatttccgtgtttaactggggctcattccataatttacatacagcccgaattgatcctgaagggacgttgattacaggtgacaatggtgctggtaaatctacctttattgatggactgatggcattgttacaacctgccagcaaagccagttttaacgtagcagccgcacagggtgaccgttcagatcgttctttagtgacctatatgcgtggcagttacggctctgaacatgatggttccactaccaaagtcaaaagtaaacgagaaaaagctgtaaccacggcactacgagccttgtatattgcagaggatggttctcagattaccctgattggcttgttttggcttggacaaggcaaaaattcactcagtgatgtcaatcgtttatatatgatagccagtcgcaatgtgttactgactgaagtattagagatttttgccgatggtaatacacgccaactgaaacagcattttaatcccaagacagatcagcgtattcattattttgaaagtgattttaaaagctatcaggatatgtaccgtaaatatttatttatggacaatcagaatgcacctgcattactttcccgagcattgggtttaaagaaaattgatgatttaaccaagctgattcgggaattggtgttagagccgagtaatttacgagaaactgcacaaacggcggtgaatgaatttgctgatttagaagccaattataagcatctggtggatacgcgtgaacaggtggagcatttagagcgtttgccacaatgtgctgaacaaattgccgaattgacgcagcgtttagcgcagcttcatttggaaaaacaatcgattgctgcttattttggtgaattatttgccgcattatggactgaaaagttacagcagcttgaacaggaattgctacaactcaaacaacaatttcagcagattgaacaactggaacaggatgcagagacacggcaggaacgtcgtcatgaggaatatttacagttgggtggtcatcagattgaaaatctgcacaaagaactgggttttattacagataaactcaaaagtctggttatagaagcatctcgttatcaggacgatgcccgacagttacaacttgcggatgatttaaccgagcatgctttgctggaaaatcagggtattgcgactgaaaaattggtcaatactgaacaggataccaagcaacgtcaggatgaatttgctgaaatcagtggaaaatacgcacaaacccaacaacagctcaaagatattcaggaagatattcaggaaattgaagccagacccgatagtaatattcatgatgtgcatttattgcgtttacgtgatgaattaaaacagcatttatcttttgatgaacatgaactgatgtttattggggaattaattgatgttaaagagcacgaaaaagcatggcaaggcgcgattgagcgagcattaggtggactcaaaaccacattacttgtgccacaggatcgttattccatggtgaccaaatgggtcaatgcacgcaataataaaacccatgtgcgtttacaggtggtcaatctaaaacaggtggagcatgtccactttaaagacaatggttttctcggtaaattgctttggcgagaacacgcctatcgtgactggttaaaacagcatttacagcgttttgatttaaattgcgtgagtaatacccaaatactggatcatatgccattttccatgactcaacagggcttaattcatttagaacgaggacgctttgagaaaaaagaccaacaacgtgttgatgatcgtaaagcatggtgtctgggcttttccaatacctctcgtctgagcttgcttaaacatgaatatagtcagttagaacaacagcttaaacagctataccaacagattgaacaggctcggcagttacttaataatgtgaatcagcaaaaaggcatgtgggaaagattgcagcgttatcaatgggatactattaatttaccgtattggcaacaacgtcagcaacaaacccaacaggacttgcagcgtttacagcaggcagattctgatgctgaacaggctcgccagcgttgggaagatgcaaaaaatgaactcaaacagattggcctacaaaaaggcgaattacaaaaaatccgaggtcagttagaacagcaacatggtgatacccagttaaaacagcaaaaagcacaacaagcagccgagcagggaatcagtgatgatgcccgacagttattgaaacaacggattggtgaaattaaacaactagatgatgcgttgcaggcagaagtcgaacgaaaacttgagcgtttaattggtcaggcaaatgaccaaaaaactacagttagcaataccgccaatggcattatggtgtcattccgtagtaaagataaatgggcacatattcccttacaacgagaatgggcgacagggctggctgctttagaggattatgttgcctatttgcaggaattacagcaggagggtttgccgaatctggttgagcaattccagcaacgtttgcataaacacaccgctcagtctttaagtgtgattcaggataaattgaatgcaaatcgggaagaaatcattgaccgaattgacatgattaatcaggtattacaacgcacggaatttaagctcggcagctatttaagactgggctataagaaagaaaaatatccacatgtacacgatttcgaacaacgtttaaaacaggttttatctggcgtgaatagtgaagaatatgaacgtcgttttaaacacttggcggagttaatggcgattttggacagagccagtagctcggcaactgccaataatcaggaaagtttacgtttgcttgatcctcgttatcaaatgtcattccatgccgaagaagtggatgcgcaaacaagtgaaataagggatgtgttggaatcctctagtggaaaatcaggcggtgaaaaagaatcctttgcaggtacgattgtcgcagcaagtttagcttatgtattgacacctgatggttatgattacccgatttatagcactgtatttttagatgaagctttttccaataccgccgaagccgtcagtcgccgtgtgctaaaagtatttaaggcactcaaaatacatatcaatctgattacaccctataaaaacctgaatctggcacgtgaatctgcccgatcattactgattgctgaacgtgatattgaccaacatgaaagccatttatgtgaagtcacatggcaagagattgatgaacggatgcagcaacgcaaacagaccatagccatcgaggcgcagcaacttggaattgagcttcatggctaa

SEQ ID NO: 43629 - DNA, 1215 bp, Acinetobacter sp. CIP 102529; identical to SEQ ID NO: 43621

SEQ ID NO: 43630 - DNA, 1467 bp, Acinetobacter sp. CIP 102082
atgaatattcaggggatacaggcaacttaccgccgtttatatcatgaaagtccagtctggaaattattaagagcagaaaatgcgccacacattttagcatttattgccgatttatttgtcgaagaaaccgaagttccctatggtcgtgcccgaagcttactggatgaatttattaaatatagtcgcgaacagggattgtggcaaaccgaaaataatgcagcctattatttaaatagctggattaaggcaggctggttgcgtgaaatggacgacatgctcagcaagactgatgccagtgaaacagtattgcgtttttgtcgcaatctggacgagcgtcatagcagtactactgcctcacatttgagaattgtacaggatgcagtacgggatttcgtggttgccattagcgacagtattgatgatcgtgtcaacttattagaacaaaagaaagcccagattcaacaagaaattgatgacttgcatgcaggggtggttacgcagctcaatgaaacggagcaacgagaacggattcgggaaatttatcaactggcttctattttaacaggtgattttaggcgagtcgaagatgaaattcgtcagttagataaagagttaagaattgatatgattgagggcaatgcttcacgaggtgaagtgttactggcattgatgcaaaaagagcaattacttgccaagagcgatgctggcagtgcttttgatggtttctgtcaattattacaggatcaggatcgttccactgagtttcgggaacaactacgcagtattctcaatcaccctgtagcacagcaacttagtgaagcacaaaagaaatatctaggacagctcatgcgtgaactggcgcgggaaagtggtcgggtatttcaggtgcgtcgccgtactgaagagggattgcgggcatatattgaaagtggagctgcactggaaaatcgtatgatcgagcgtttgctatcgcaactggaaaaacaggcagtgaatttaacactggaacagcagtgtgatttaaaaaccgaaatgcaggtggatttggcagtcggttcggttcagatcagctcacctgaaaattttgctttgaaaagtccgaatgaacacatggatacacgtggcgtacagcaacaacaaaatcgtaaagaaccgagtaatcaaatgctgcactatctggacagtgtacaggtacgagaggttgctgagaaagcacgccatacattgctgaaaaaaggggttatgagtattgcacatttaacccaagaacatccattacaggcaggtctggaggaattggtggcatacttacgaattgccaaagccattaaagcgccgcaattaacagaacaaaatgagcagattcaatttcaggatcaacatggcgtgaatctacaagcccgtatcccgacttattatttaagtgcagaattattccctgaaaatttagatgaattggcattataa

SEQ ID NO: 43631 - DNA, 798 bp, Acinetobacter sp. CIP 102082
atgcaaccacaagagagcagtttttttgatagggtgcgtcgcccaacatcaaacgaaaatcatgatattcaaccgcagcgcatcgccgaagtcgaagtcgaagtcgaagatgaactgatagaagttgaagcagatcaagagatggagaacgatttacagctaagtgatgaactatctggtatgccgcatgaagccagacgtgttttggtctatttgatgcgacagggaacgattctggcagctgaaaatctaaaactgtttgatgtgttatgtcgttatgaaacagtgattcgccagcatcttgccgaagtatatattcaactggttttagatgccaaacagggcgtggcgtatattattaatactgaaaacatcaatgatgaaaatgacgatacagcattatcagatgatttccctacgctgattcgaaagcgtaccttaaccttatatgacactttggtattactcattttacggaaatattatcaggagcgggaaaccgcaggtgagcaaaaaattattattgatctggaacgaattcaggcaagtttgatcccttttattccgattaccaatcatgacagtaaagaccgtaaaaaactaagtggcacactagataaattcagtgaaaagaaaattctcagtgtaatacgaggtgaggatgggcgttatgaaattacaccgattatccgttatgtggtcaatgctgaatttctacaaagtttattgaccgaatatgagcaactggcagataaagcagctatgcatcaatgcgagcagaataaaggaaaggtataa

SEQ ID NO: 43632 - DNA, 3378 bp, Acinetobacter sp. CIP 102082
atgcaagaaatgactttggatactttatttgctcagggacaaattcgtctggctgagatttccgtgtttaactggggctcattccataatttacatacagcccgaattgatcctgaagggacgttgattacaggtgacaatggtgctggtaaatctacctttattgatggactgatggcattgttacaacctgccagcaaagccagttttaacgtagcagccgcacagggtgaccgttcagatcgttctttagtgacctatatgcgcggcagttacggctctgaacatgatggttccagtaccaaagtcaaaagtaaacgagaaaaagctgtaaccacggcactacgagccttgtatattgcagaggatggttctcagattaccctgattggcttgttttggcttggacaaggcaaaaattcactcagtgatgtcaatcgtttatatatgatagccagtcgcaatgtgttactgactgaagtattagagatttttgccgatggtaatacacgccaactgaaacagcattttaatcccaagacagatcagcgtattcattattttgaaagtgattttaaaagctatcaggatatgtaccgtaaatatttatttatggacaatcagaatgcacctgcattactttcccgagcattgggtttaaagaaaattgatgatttaaccaagctgattcgggaattggtgttagagccgagtaatttacgagaaactgcacaaacggcggtgaatgaatttgctgatttagaagccaattataagcatctggtggatacgcgtgaacaggtggagcatttagagcgtttgccacaatgtgctgaaaaaattgccgaattgacgcagcgtttagcgcagcttcatttggaaaaacaatcgattgctgcttattttggtgaattatttgccgcattatggactgaaaagttacagcagcttgaacaggaattgctacaactcaaacaacaatttcagcagattgaacaactggaacaggatgcagagacacggcaggaacgtcgtcatgaggaatatttacagttgggtggtcatcagattgaaaatctgcacaaagaactgggttttattacagataaactcaaaagtctggttatagaagcatctcgttatcaggacgatgcccgacagttacaacttgcggatgatttaaccgagcatgctttgctggaaaatcagggtattgcgactgaaaaattggtcaatactgaacaggataccaagcaacgtcaggatgaatttgctgaaatcagtggaaaatacgcacaaacccaacaacagctcaaagatattcaggaagatattcaggaaattgaagccagacccgatagtaatattcatgatgtgcatttattgcgtttacgtgatgaattaaaacagcatttatcttttgatgaacatgaactgatgtttattggggaattaattgatgttaaagagcacgaaaaagcatggcaaggcgcgattgagcgagcattaggtggactcaaaaccacattacttgtgccacagcatcgttattcgatggtgaccaaatgggtcaatgcgcgtaataataaaacccatgtgcgtttacaggtggttaatctagaacaagtggagcatgtccattttaaggacaatggttttcttgggaagttgctttggcgagaacacgcctatcgtgactggttaaaacagcatttacagcgttttgatttaaattgcgtgagtaatacccaaatactggatcatatgccattttccatgactcaacagggcttaattcatttagaacgaggacgctttgagaaaaaagaccaacaacgtgttgatgatcgtaaagcatggtgtctgggcttttccaatacctctcgtctgagcttgcttaaacatgaatatagtcagttagaacaacagcttaaacagctataccaacagattgaacaggctcggcagttacttaataatgtgaatcagcaaaaaggcatgtgggaaagattgcagcgttatcaatgggatactattaatttaccgtattggcaacaacgtcagcaacaaacccaacaggacttgcagcgtttacagcaggcagattctgatgctgaacaggctcgccagcgttgggaagatgcaaaaaatgagctcaaacagattcgcttacaaaaaggtgagtcacaaaaaatccgaggtcagttagaacagcaacatcgtgatacccagttaaaacagcaaaaagcacaacaagcagccgagcacggaatcagtgatgatgctcgacagttattaaaacaacggataggcgaagtcaaacaactagatgatgcgttgcaggcagaagccgaacgaaaacttgagcgtttaattgagcaggcaaatgaccaaaaaacgacgcttagcaatacagccaatggcattatggtgtcattccgcagtaaagataaatgggcacatattcctttacaaagagaatgggcgacagggctggctgctttagaagattatgttgcctatttgcaggaattacagcaggagggtttgccgaatctggttgagcaattccagcaacgtttgcataaacacaccgctcagtctttaagtgtgattcaggttaaattgaatgccaatcgggaagaaatcattgaccaaattgacatgattaatcaggtattacaacgcacggaatttaagctcggcagctatttacgactgggctataagaaagaaaaatatccacatgtacacgatttcgaacaacgtttaaaacaggttctatctggcgtgaatagtgaagaatatgaacgtcgttttaaacacttggcggagttaatggcgattttggacagagccagtagctcggcaactgccaataatcaggaaagtttacgtttgcttgatcctcgttatcaaatgtcattccatgccgaagaagtggatgcgcaaacaagtgaaataagggatgtgttggaatcctctagtggaaaatcaggcggtgaaaaagaatcctttgcaggtacgattgtcgcagcaagtttagcttatgtattgacacctgatggttatgattacccgatttatagcactgtatttttagatgaagctttttccaataccgctgaagcagtcagtcgccgtgtgctaaaagtatttaaggcactcaaaatacatgtcaatctgattacaccctataaaaacctgaatctggcacgtgaatctgcccgatcattactgattgctgaacgtgatattgaccaacatgaaagccatttatgtgaagtcacatggcaagagattgatgaacggatgcagcaacgcaaacagaccatagccatcgaggcgcagcaacttggaattgagcttcatggctaa

SEQ ID NO: 43633 - DNA, 1215 bp, Acinetobacter sp. CIP 102082
atggctaaaacagtagcatggggaattttgcctgatgatgccatcgctcagttacgcaagaaagaatgggatcatccacggcatttaaaacaacgtttgcgccatcaacgtccattcccgattgtactttcactcaaagccccgacaggtcagcaggcatttgcagatatggatcatttccatacattttttaagacatggaaaaattttgcctatcctgatctggtggaatggcaacaacgtcaatttaaacagttggcaacacagcatgtccctgtcaaactggtcattcctacattggatgtcatggtggagttgttaggacagcaacagcgatttaaaaaaatttcagacaaaatttcctgtctgttgcaacagccatttgtagagtcacatatagaatatgcactattttctacattaattgaatatttagaacagattgaacaataccctgaacatgattggcaattactgatccagttgattgcccagcttaaattaaatatgggcgcagggcattatttaagagcattgcctttacagcatgtcgataccaaatttttagaaaaaaatctgatttttgtggaagctatttgtgatgtcttgcatcaaggcgaaatacaagcaacagggggattactcagttggcttaattgtctggatcatcctaaaggctggctaatgatcaaacccttatgtgccaaagtgcaacaatcattgggtggatttccagtctttcagctttcgactgatgtattgacagaatttgaattgcctgcccaacatattattgtggttgaaaatattcagtcaggtttagccttacctatgttggaaaacagtatcgtggtctgtggcggcggtaaaaatatcaaatggctggatgcggcttggctacaacataaaaaagtttattactggggtgatctggattcagagggtttaaatatcctgagcatggtacgccaaaaaattccggatgttattcctttaatgatggatgaagccacagtactgcaatttcaggataaaatggtcgatgaacctgattctgtctttagcgaaccgcaatatttaacagcagaagagttgagtttgtttcatgctttaagaaagaattgctataaaaataagcgactggaacaggaacgaatcagcaatgactggataaatttatatttgacagtagaatcgaagttattaaaaaaatga

SEQ ID NO: 43634 - DNA, 1467 bp, Acinetobacter sp. CIP 102637
atgaatattcaggggatacaggcaacttaccgccgtttatatcatgaaagtccagtctggaaattattaagagcagaaaatgcgccacacattttagcatttattgccgatttatttgtcgaagaaaccgaagttccctatggtcgtgcccgaagcttactggatgaatttattaaatatagtcgcgaacagggattgtggcaaaccgaaaataatgcagcctattatttaaatagctggattaaggcaggctggttgcgtgaaatggatgacatgctcagcaagactgatgccagtgaaacagtattgcgtttttgtcgcaatctagacgagcgtcatagcagtactactgcctcacatttgagaattgtacaggatgcagtacgggatttcgtggttgccattagcgacagtattgatgatcgtgtcaacttattagaacaaaagaaagcccagattcaacaagaaattgatgacttgcatgcaggggtggtgacgcagctcaatgaaacggaacaacgggaacggattcgggaaatttatcaactggcttctattttaacaggtgattttaggcgagttgaagatgaaattcgtcagttagataaagagttaagaattgatatgattgagggcaatgcttcacgaggtgaagtgttactggcattgatgcaaaaagagcaattacttgccaaaagcgatgctggcagtgcttttgatggtttctgtcaattattacaggatcaggatcgttccactgagtttcgggaacaactacgcagtattctcaatcaccctgtagcacagcaacttagtgaagcacaaaagaaatatctaggacagctcatgcgtgaactggcgcgggaaagtggtcgggtatttcaggtgcgtcgccgtactgaagagggattgcgggcatatattgaaagtggagctgcactggaaaatcgtatgatcgagcgtttgctatcgcaactggaaaaacaggcagtgaatttaacactggaacagcagtgcgatttaaaaaccgaaatgcaggtggatttggcagtcggttcggttcagatcagctcacctgaaaattttgctttgaaaagtccgaatgaacacatggatacacgtggcgtacagcaacaacaaaatcgtaaagaaccgagtaatcaaatgctgcactatctggacagtgtacaggtacgagaggttgctgagaaagcacgccatacattgctgaaaaaaggggttatgagtattgcacatttaacccaagaacatccattacaggcaggtctggaggaattggtggcatacttacgaattgccaaagccattaaagcgccgcaattaacagaacaaaatgagcagattcaatttcaggatcaacatggcgtgaatctacaagcccgtatcccgacttattatttaagtgcagaattattccctgaaaatttagatgaattggcattataa

SEQ ID NO: 43635 - DNA, 786 bp, Acinetobacter sp. CIP 102637
atgcaaccacaagagagcagtttttttgatagggtgcgtcgcccaacatcaaacgaaaatcatgatattcaaccgcagcgcatcgccgaagtcgaagatgaactgatagaagttgaagcagatcaagagatggagaacgatttacagctaagtgatgaactatctagtatgccgcatgaagccagacgggttttggtctatttgatgcgacagggaacgattctggcagctgaaaatctaaaactgtttgatgtgttatgtcgttatgaaacagtgattcgccagcatcttgccgaagtatatattcaactggttttagatgccaaacagggcgtggcgtatattattaatactgaaaacatcaatgatgaaaatgacgatacagcattatcagatgatttccctacgctgattcgaaagcgtaccttaaccttatatgacactttggtattactcattttacggaaatattatcaggagcgggaaaccgcaggtgagcaaaaaattattattgatctggaacgaattcaggcaagtttgatcccttttattccgattaccaatcatgacagtaaagaccgtaaaaaactaagtggcacactagataaattcagtgaaaagaaaattctcagtgtaatacgaggtgaggatgggcgttatgaaattacaccgattatccgttatgtggtcaatgctgaatttctacaaagtttattgaccgaatatgagcaactggcagataaagcagctatgcatcaatgcgagcagaataaaggaaaggtataa

SEQ ID NO: 43636 - DNA, 3378 bp, Acinetobacter sp. CIP 102637
atgcaagaaatgactttggatactttatttgctcagggacaaattcgtctggctgagatttccgtgtttaactggggctcattccataatttacatacagcccgaattgatcctgaagggacgttgattacaggcgacaatggtgctggtaaatctacctttattgatggactgatggcattgttacaacctgccagcaaagccagttttaacgtagcagccgcacagggtgaccgttcagatcgttctttagtgacctatatgcgcggcagttacggctctgaacatgatggttccagtaccaaagtcaaaagtaaacgagaaaaagctgtaaccacggcactacgagccttgtatattgcagaggatggttctcagattaccctgattggcttgttttggcttggacaaggcaaaaattcactcagtgatgtcaatcgtttatatatgatagccagtcgcaatgtgttactgactgaagtattagagatttttgccgatggtaatacacgccaactgaaacagcattttaatcccaagacagatcagcgtattcattattttgaaagtgattttaaaagctatcaggatatgtaccgtaaatatttatttatggacaatcagaatgcacctgcattactttcccgagcattgggtttaaagaaaattgatgatttaaccaagctgattcgggaattggtgttagagccgagtaatttacgagaaactgcacaaacggcggtgaatgaatttgctgatttagaagccaattataagcatctggtggatacgcgtgaacaggtggagcatatagagcgtttgccacaatgtgctgaacaaattgccgaattgacgcagcgtttagcgcagcttcatttggaaaaacaatcgattgctgcttattttggtgaattatttgccgcattatggactgaaaagttacagcagcttgaacaggaattgctacaactcaaacaacaatttcagcagattgaacaactggaacaggatgcagagacacggcaggaacgtcgtcatgaggaatatttacagttgggtggtcatcagattgaaaatctgcacaaagaactgggttttattacagataaactcaaaagtctggttatagaagcatctcgttatcaggacgatgcccgacagttacaacttgcggatgatttaaccgagcatgctttgctggaaaatcagggcattgcgactgaaaaattggtcaatactgaacaggataccaagcaacgtcaggatgaatttgctgaaatcagtggaaaatacgcacaaacccaacaacagctcaaagatattcaggaagatattcaggaaattgaagccagacccgatagtaatattcatgatgtgcatttattgcgtttacgtgatgaattaaaacagcatttatcttttgatgaacatgaactgatgtttattggggaattgattgatgttaaagagcacgaaaaagcatggcaaggcgcgattgagcgagcattaggtggactcaaaaccacattacttgtgccacaggatcgttattcgatggtgaccaaatgggtcaatgcgcgtaataataaaactcatgtgcgtttacaggtggttaatctaaaacaagtggagcatgtccattttaaggacaatggttttcttgggaagttgctttggcgagaacacgcctatcgtgactggttaaaacagcatttacagcgttttgatttaaattgcgtgagtgatacccaaatactggatcatatgccattttccatgactcaacagggcttaattcatttagaacgaggacgctttgagaaaaaagaccaacaacgtgttgatgatcgtaaagcatggtgtctgggcttttccaatacctctcgtctgagcttgcttaaacatgaatatagtcagttagaacaacagcttaaacagctataccaacagattgaacaggctcggcagttacttaataatgtgaatcagcaaaaaggcttgtgggaaagattgcagcgttatcaatgggataatattaatttaccgtattggcaacaacgtcagcagcaaacccaacaggacttgcagcgtttacagcaggcagattctgatgctgaacaggctcgccagcgttgggaagatgcaaaaaatgagctcaaacagattcgcttacaaaaaggtgagtcacaaaaaatccgaggtcagttagaacagcaacatcatgatacccagttaaaacagcaaaaagcacaacaagcagccgagcacggaatcagtgatgatgctcgacagttattgaaacaacggataggcgaagtcaaacaactagatgatgcgttgcaggcagaagccgaacgaaaacttgagcgtttaattgggcaggcaaatgaccaaaaaactacggtcagtaataccgccaatggcattatggtgtcattccgcagtaaagataaatgggcacatattcctttacaaagagaatgggcgacagggctggctgctttagaagattatgttgcctatttgcaggaattacagcaggagggtttgccgaatctggttgagcaattccagcaacgtttgcataaacacaccgctcagtctttaagtgtgattcaggataaattgaatgcaaatcgggaagaaatcattgaccgaattgacatgattaatcaggtattacaacgcacggaatttaagctcggcagctatttaagactgggctataagaaagaaaaatatccacatgtacaggattttgagcagcgtttaaagcaagttttgtctggcgtgaatagtgaagaatatgaacgtcgttttaaacacttggcggagttaatggcgattttggacagagccagtagctcggcaactgccaataatcaggaaagtttacgtttgcttgatcctcgttatcaaatgtcattccatgccgaagaagtggatgcgcaaacaagtgaaataagggatgtgttggaatcctctagtggaaaatcaggcggtgaaaaagaatcctttgcaggtaccattgtcgcagcaagtttagcttatgtattgacacctgatggttatgattacccgatttatagcactgtatttttagatgaagctttttccaataccgctgaagcagttagtcgtcgtgtgctaaaagtatttaaggcactgaaaatacatgtcaatctgattacaccctataaaaacctgaatctggcacgtgaatctgcccgatcattactgattgctgaacgtgatattgaccaacatgaaagtcatttatgtgaagtcacatggcaagagattgatgaacggatgcagcaacgcaaacagaccataaccaccgaggcgcagcaacttggaattgagcttcatggctaa

SEQ ID NO: 43637 - DNA, 1215 bp, Acinetobacter sp. CIP 102637
atggctaaaacagtagcatggggaattttgcctgatgatgccatcgctcagttacgcaagaaagaatgggatcatccacggcatttaaaacaacgtttgcgccatcaacgtccattcccgattgtactttcactcaaagccccgacaggtcagcaggcatttgcagatatagatcatttccatacattttttaagacatggaaaaattttgcctatcctgatctggtggaatggcaacaacgtcaatttaaacagttggcaacacagcatgtccctgtcaaactggtcattcctacattagatgtcatggtggagttgttaggacagcaacagagacttaaaaaaatttcagacaaaatttcctttctgttgcaacagctatttgtagagccacatatagaatatgcactattttctacattaattgaatatttagaacagattgaacaataccctgaacatgattggcaattactgatccacttgattgcccagcttaaagcaaatatgggcgcagggcattatttaagagcattgcctttacagcatgtcgataccaaatttttagaaaaaaatctgatttttgtggaagctatttgtgatgtcttgcatcaaggcgaaatacaagcaacaggtggattactcagttggcttaattgtctggatcatcctaaaggctggctaatgatcaaacccttatgtgccaaagtgcaacaatcattgggtggatttccagtctttcagctttcgactgatgtattgacagaatttgaattgcctgcccaacatattattgtggttgaaaatattcagtcaggtttagccttacctatgttggaaaacagtatcgtggtctgtggcggcggtaaaaatatcaaatggctcaatgcggcttggctacaacataaaaaagtttattactggggtgatctggattcagagggtttaaatatcctgagcatggtacgccaaaaaattccggatgttattcctttaatgatggatgaagccacagtactgcaatttcaggataaaatggtcgatgaacctgattctgtctttagcgaaccgcaatatttaacagcagaagagttgagtttgtttcatgctttaagaaagaattgctataaaaataagcgactggaacaggaacgaatcagcaatgactggataaatttatatttgacagtagaatcgaagttattaaaaaaatga

SEQ ID NO: 43638 - DNA, 1467 bp, Acinetobacter junii CIP 107470
atgaatattcaggggatacaggcaacttaccgccgtttatatcatgaaagtccagtctggaaattatcaagagcagaaaatgcaccacacattttagcatttattgccgatttatttgtcgaagaaaccgaagttccctatggtcgtgcccgaagcttactggatgaatttattaaatatagtcgcgaacagggattgtggcaaaccgaaaataatgcagcctattatttaaatagctggattaaggcaggctggttgcgtgaaatggacgacatgctcagcaagactgatgccagtgaaacagtattgcgtttttgtcgcaatctggacgagcgtcatagcagtactactgcatcacatttgagaattgtacaggatgcagtacgggatttcgtggttgccattagcgacagtattgatgatcgtgtcaacttattagaacaaaagaaagcccagattcaacaagaaattgatgacttgcatgcaggggtggttacgcagctcaatgaaacggagcaacgagaacggattcgggaaatttatcaactggcttctattttaacaggtgattttaggcgagtcgaagatgaaattcgtcagttagataaagagttaagaattgatatgattgagggcaacgcttcacgaggtgaagtgttactggcattgatgcaaaaagagcaattacttgccaagagcgatgctggcagtgcttttgatggtttctgtcaattattacaggatcaggatcgttccactgagtttcgggaacaactacgcagtattctcaatcaccctgtagcacagcaacttagtgaagcacaaaagaaatatctaggacagctcatgcgtgaactggcgcgggaaagtggtcgggtatttcaggtgcgtcgccgtactgaagagggattgcgggcatatattgaaagtggagctgcactggaaaatcgtatgatcgagcgtttgctatcgcaactggaaaaacaggcagtgaatttaacactggaacagcagtgtgatttaaaaaccgaaatgcaggtggatttggcagtcggttcggttcagatcagctcacctgaaaattttgctttgaaaagtccgaatgaacacatggatacacgtggcgtacagcaacaacaaaatcgtaaagaaccgagtaatcaaatgctgcactatctggacagtgtgcaggtacgagaggttgctgagaaagcacgccatacattgctgaaaaaagggattatgagtattgcacatttaacccaagaacatccattacaggcaggtctggaggaattggtggcatacttacgaattgccaaagccattaaagcgccgcaattaacagaacaaaatgagcagattcaatttcaggatcaacatggcgtgaatctacaagcccgtatcccgacttattatttaagtgcagaattattccctgaaaatttagatgaattggcattataa

SEQ ID NO: 43639 - DNA, 786 bp, Acinetobacter junii CIP 107470
atgcaaccacaagagagcagtttttttgatagggtgcgtcgcccaacatcaaacgaaaatcatgatattcaaccgcagcgcatcgccgaagtcgaagatgaactgatagaagttgaagcagatcaagagatggagaacgatttacagctaagtgatgaactatctagtatgccgcatgaagccagacgggttttggtctatttgatgcgacagggaacgattctggcagctgaaaatctaaaactgtttgatgtgttatgtcgttatgaaacagtgattcgccagcatcttgccgaagtatatattcaactggttttagatgccaagcagggcgtggcgtatattattaatactgaaaacatcaatgatgaaaatgacgatacagcattatcagatgatttccctacgctgattcgaaagcgtaccttaaccttatatgacactttggtattactcattttacggaaatattatcaggagcgggaaaccgcaggtgagcaaaaaattattattgatctggaacgaattcaggcaagtttgattccttttattccgattaccaatcatgacagtaaagaccgtaaaaaactaagtggcacactagataaattcagtgaaaagaaaattctcagtgtaatacgaggtgaggatgggcgttatgaaattacaccgattatccgttatgtggtcaatgctgaatttctacaaagtttattgaccgaatatgagcaactggcagataaagcagctatgcatcaatgcgagcagaataaaggaaaggtataa

SEQ ID NO: 43640 - DNA, 3378 bp, Acinetobacter junii CIP 107470
atgcaagaaatgactttggatactttatttgctcagggacaaattcgtctggctgagatttccgtgtttaactggggctcattccataatttacatacagcccgaattgatcctgaagggacgttgattacaggtgacaatggcgctggtaaatctacctttattgatggactgatggcattgttacaacctgccagcaaagccagttttaacgtagcagccgcacagggtgaccgttcagatcgttctttagtgacctatatgcgcggcagttacggctctgaacatgatggttccagtaccaaagtcaaaagtaaacgagaaaaagctgtaaccacggcactacgagccttgtatattgcagaggatggttctcagattaccctgattggcttgttttggcttggacaaggcaaaaattcactcagtgatgtcaatcgtttatatatgatagccagtcgcaatgtgttactgactgaagtattagagatttttgccgatggtaatacacgccaactgaaacagcattttaatcccaagacagatcagcgtattcattattttgaaagtgattttaaaagctatcaggatatgtaccgtaaatatttatttatggacaatcagaatgcacctgcattactttcccgagcattgggtttaaagaaaattgatgatttaaccaagctgattcgggaattggtgttagagccgagtaatttacgagaaactgcacaaacggcggtgaatgaatttgctgatttagaagccaattataagcatctggtggatacgcgtgaacaggtggagcatttagcgcgtttgccacaatgtgctgaacaaattgccgaattgacgcagcgtttagcgcagcttcatttggaaaaacaatcgattgctgcttattttggtgaattatttgccgcattatggactgaaaagttacagcagcttgaacaggaattgctacaactcaaacaacaatttcagcagattgaacaactggagcaggatgcagagacacggcaggaacgttgtcatgaagaatatttgcagttgggtggcggtctaattgaaaagttacagagtgatttggttcatattcaggaaaatttgcaacgagtgactagagcatcttcaagttatcaaaaagatgcccaaaatttaaatttaaagattgaactacaagagattagtttaaaaaataaccagaaattggtgcttgaacagttgaaagatattgagcaagacagccaagcaagttttgaacaatactcaaatgtaaatcagcaggcgaaaatacttaaaaataaaattactgaattagaggatgaaatacaggaaatagaaaaatgcccagaaagtaatattagcgataccaacttgttattaatgcgtaaagagttaatacaggacttacaatttgaagaacatgagctaatgtttattggtgagttattggatgttaaagatagtgaaaaagcatggcaaggagcgattgaacgagctttaggcggactaaaaactactttacttgtaccacaagatcgctattcccttgttacaaaatgggtcaatgcacgcaataataaaactcatgtgcgtttgcaggtagtcaatctaaaacaggtagagcatgtccattttaagaataatggttttctcggtaaattaatttggcgagaacatgtctatcgtgactggttaaaacagtatttacaacgttttgatttacaatgcgttgcagatacacaaactttggataaaacccctttttcaataacacagcaagggttaattcataaagaatatggacgttttgaaaagaaagatcagcatcatattaatgcccgaaaagagtggtgtttaggattttctaataaatcaaggctagctttattacagcatgaaaaaatacaattagaacaagaaaagatacaggcagatcgtttggtgcaagcagcattattaaatgcgaaacaaattaatgatcggcaaaataaattaaataacttcttggaatataaatgggaggaaattaacttgccttattggcaacaacgtcagcaacagactcaacaggatttgcagcgtttacagcaggcagattctgatgctgaacaggctcgccagcgttgggaagatgcaaaaaatgagctcaaacagattcgcttacaaaaaggtgagtcacaaaaaatccgaggtcagttagaacagcaacatcgtgatacccagttaaaacagcaaaaagcacaacaagcagccgagcacggaatcagtgatgatgctcgacagttattgaaacaacggataggcgaagtcaaacaactagatgatgcgttgcaggcagaagccgaacgaaaactcgagcgtttaattgagcaggcaaatgaccaaaaaacgacgcttagcaatacagccaatggcattatggtgtcattccgcagtaaagataaatgggcacatattcccttacaacgagaatgggcgacagggctggctgctttagaggattatgttgcctatttgcaggaattacagcaggagggtttgccgaatctggttgagcaattccagcaacgtttgcataaacacaccgctcagtctttaagtgtgattcaggataaattgaatgcaaatcgggaagaaatcattgaccgaattgacatgattaatcaggtattacaacgcacggaatttaagctcggcagctatttaagactgggctataagaaagaaaaatatccacatgtacacgatttcgaacaacgtttaaaacaggttttatctggcgtgaatagtgaagaatatgaacgtcgttttaaacacttggcggagttaatggcgattttggacagagccagtagctcggcaactgccaataatcaggaaagtttacgtttgcttgatcctcgttatcaaatgtcattccatgccgaagaagtggatgcgcaaacaagtgaaataagggatgtgttggaatcctctagtggaaaatcaggcggtgaaaaagaatcctttgcaggtacgattgtcgcagcaagtttagcttatgtattgacacctgatggttatgattacccgatttatagcactgtatttttagatgaagctttttccaataccgctgaagcagtcagtcgccgtgtgctaaaagtatttaaggcactcaaaatacatgtcaatctgattacaccctataaaaacctgaatctggcacgtgaatctgcccgatcattactgattgctgaacgtgatattgaccaacatgaaagccatttatgtgaagtcacatggcaagagattgatgaacggatggagcaacgcaaacagaccatagccaccgaggcgcagcaacttggaattgagcttcatggctaa

SEQ ID NO: 43641 - DNA, 1215 bp, Acinetobacter junii CIP 107470
atggctaaaacagtagcatggggaattttgcctgatgatgccatcgctcagttacgcaagaaagaatgggatcatccacggcatttaaaacaacgtttgcgccatcaacgtccattcccgattgtactttcactcaaagccccgacaggtcagcaggcatttgcagatatggatcatttccatacattttttaagacatggaaaaattttgcctatcctgatctggtggaatggcaacaacgtcaattcaaacagttggcaacacagcatgtccctgtcaaactggtcattcctacattggatgtcatggtggagttgttaggacagcaacagagacttaaaaaaatttcagacaaaatttcctttctgttgcaacagccatttgtagagccacatatagaatatgcactattttctacattaattgaatatttagaacagattgaacaataccctgaacatgattggcaattactgatccacttgattgcccagcttaaagcaaatatgggcgcagggcattatttaagagcattgcctttacagcatgtcgataccaaatttttagaaaaaaatctgatttttgtggaagctatttgtgatgtcttgcatcaaggcgaaatacaagcaacaggtggattactcagttggcttaattgtctggatcatcctaaaggctggctaatgatcaaacccttatgtgccaaagtgcaacaatcattgggtggatttccagtctttcagctttcgactgatgtattgacagaatttgaattgcctgcccaacatattattgtggttgaaaatattcagtcaggtttagccttacctatgttggaaaacagtatcgtggtctgtggcggcggtaaaaatatcaaatggctggatgcggcttggctacaacataaaaaagtttattactggggtgatctggattcagagggtttaaatatcctgagcatggtacgccaaaaaattccggatgttattcctttaatgatggatgaagccacagtactgcaatttcaggataaaatggtcgatgaacctgattctgtctttagcgaaccgcaatatttaacagcagaagagttgagtttgtttcatgctttaagaaagaattgctataaaaataagcgactggaacaggaacgaatcagcaatgactggataaatttatatttgacagtagaatcgaagttattaaaaaaatga

SEQ ID NO: 43642 - DNA, 1467 bp, Acinetobacter junii CIP 64.5
atgaatattcaggggatacaggcaacttaccgccgtttatatcatgaaagtccagtctggaaattatcaagagcagaaaatgcaccacacattttagcatttattgccgatttatttgtcgaagaaaccgaagttccctatggtcgtgcccgaagcttactggatgaatttattaaatatagtcgcgaacagggattgtggcaaaccgaaaataatgcagcctattatttaaatagctggattaaggcaggctggttgcgtgaaatggacgacatgctcagcaagactgatgccagtgaaacagtattgcgtttttgtcgcaatctggacgagcgtcatagcagtactactgcatcacatttgagaattgtacaggatgcagtacgggatttcgtggttgccattagcgacagtattgatgatcgtgtcaacttattagaacaaaagaaagcccagattcaacaagaaattgatgacttgcatgcaggggtggttacgcagctcaatgaaacggagcaacgagaacggattcgggaaatttatcaactggcttctattttaacaggtgattttaggcgagtcgaagatgaaattcgtcagttagataaagagttaagaattgatatgattgagggcaacgcttcacgaggtgaagtgttactggcattgatgcaaaaagagcaattacttgccaagagcgatgctggcagtgcttttgatggtttctgtcaattattacaggatcaggatcgttccactgagtttcgggaacaactacgcagtattctcaatcaccctgtagcacagcaacttagtgaagcacaaaagaaatatctaggacagctcatgcgtgaactggcgcgggaaagtggtcgggtatttcaggtgcgtcgccgtactgaagagggattgcgggcatatattgaaagtggagctgcactggaaaatcgtatgatcgagcgtttgctatcgcaactggaaaaacaggcagtgaatttaacactggaacagcagtgtgatttaaaaaccgaaatgcaggtggatttggcagtcggttcggttcagatcagctcacctgaaaattttgctttgaaaagtccgaatgaacacatggatacacgtggcgtacagcaacaacaaaatcgtaaagaaccgagtaatcaaatgctgcactatctggacagtgtgcaggtacgagaggttgctgagaaagcacgccatacattgctgaaaaaagggattatgagtattgcacatttaacccaagaacatccattacaggcaggtctggaggaattggtggcatacttacgaattgccaaagccattaaagcgccgcaattaacagaacaaaatgagcagattcaatttcaggatcaacatggcgtgaatctacaagcccgtatcccgacctattatttaagtgcagaattattccctgaaaatttagatgaattggcattataa

SEQ ID NO: 43643 - DNA, 792 bp, Acinetobacter junii CIP 64.5
atgcaaccacaagagagcagtttttttgatagggtgcgtcgcccaacatcagacgaaaatcatgatattcaaccgcagcgcatcgtcgaagtcgaagtcgaagaagaactgatagaagttgaagcagatcaagaggtggagagcgatttacagttaagtgatgaactatctagtatgccgcatgaagccagacgggttttggtctatttgatgcgacagggaacgattctggcagctgaaaatctaaaactgtttgatgtgttatgtcgttatgaaacagtgattcgccagcatcttgccgaagtatatattcaactggttttagatgccaaacagggcgtggcgtatattattaatactgaaaacatcaatgatgaaaatgacgatacagcattatcagatgatttccctacgctgattcgaaagcgtaccttaaccttatatgacactttggtattactcattttacggaaatattatcaggagcgggaaaccgcaggtgagcaaaaaattattattgatctggaacgaattcaggcaagtttgattccttttattccgattaccaatcatgacagtaaagaccgtaaaaaactaagtggcacactagataaattcagtgaaaagaaaattctcagtgtaatacgaggtgaggatgggcgttatgaaattacaccgattatccgttatgtggtcaatgctgaatttctacaaagtttattgaccgaatatgagcaactggcagataaagcagctatgcatcaatgcgagcagaataaaggaaaggtataa

SEQ ID NO: 43644 - DNA, 3378 bp, Acinetobacter junii CIP 64.5
atgcaagaaatgactttggatactttatttgctcagggacaaattcgtctggctgagatttccgtgtttaactggggctcattccataatttacatacagcccgaattgatcctgaagggacgttgattacaggtgacaatggtgctggtaaatctacctttattgatggactgatggcattgttacaacctgccagcaaagccagttttaacgtagcagccgcacagggtgaccgttcagatcgttctttagtgacctatatgcgcggcagttacggctctgaacatgatggttccagtaccaaagtcaaaagtaaacgagaaaaagctgtaaccacggcactacgagccttgtatattgcagaggatggttctcagattacactgattggcttgttttggcttggacaaggcaaaaattcactcagtgatgtcaatcgtttatatatgatagccagtcgcaatgtcttactgactgaagtattagagatttttgccgatggtaatacacgccaactgaaacagcattttaatcccaagacagatcagcgtattcattattttgaaagtgattttaaaagctatcaggatatgtaccgtaaatatttatttatggacaatcagaatgcacctgcattactttcccgagcattgggtttaaagaaaattgatgatttaaccaagctgattcgggaattggtattagagccgagtaatttacgagaaactgcacaaacggcggtgaatgaatttgctgatttagaagccaattataagcatctggtggatacgcgtgaacaggtggagcatttagagcgtttgccacaatgtgctgaacaaattgccgaattgacgcagcgtttagcgcagcttcatttggaaaaacaatcgattgctgcttattttggtgaattatttgccgcattatggactgaaaagttacagcagcttgaacaggaattgctacaactcaaacaacaatttcagcagattgaacaactggaacaggatgcagagacacggcaggaacgtcgtcatgaggaatatttacagttgggtggtcatcagattgaaaatctgcacaaagaactgggttttattacagataaactcaaaagtctggttatagaagcatctcgttatcaggacgatgcccgacagttacaacttgcggatgatttaaccgagcatgctttgctggaaaatcagggcattgcgactgaaaaattggtcaatactgaacaggataccaagcaacgtcaggatgaatttgctgaaatcagtggaaaatacgcacaaacccaacaacagctcaaagatattcaggaagatattcaggaaattgaagccagacccgatagtaatattcatgatgtgcatttattgcgtttacgtgatgaattaaaacagcatttatcttttgatgaacatgaactgatgtttattggggaattgattgatgttaaagagcacgaaaaagcatggcaaggcgcgattgagcgagcattaggtggactcaaaactgcattacttgtgccacaggatcgttattcgatggtgaccaaatgggttaatgcgcgtaataataaaacccatgtgcgtttacaggtggttaatctagaacaagtggagcatgtccattttaaggacaatggttttcttgggaagttgctttggcgagaacacgcctatcgtgactggttaaaacagcatttacagcgttttgatttaaattgcgtgagtgatacccaaatactggatcatatgccattttccatgactcaacagggcttaattcatttagaacgaggacgctttgagaaaaaagaccaacaacgtgttgatgatcgtaaagcatggtgtctgggcttttccaatacctctcgtctgagcttgcttaagcatgaatatagtcagttagaacaacagcttaaacagctataccaacagattgaacaggctcggcagttacttaataatgtgaatcagcaaaaaggcttgtgggaaagattgcagcgttatcaatgggatactattaatttaccgtattggcaacaacgtcagcaacaaacccaacaggacttgcagcgtttacagcaggcagattctgatgctgaacaggctcgccagcgttgggaagatgcaaaaaatgagctcaaacagattcgcttacaaaaaggtgagtcacaaaaaatccgaggtcagttagaacagcaacatcgtgatacccagttaaaacagcaaaaagcacaacaagcagccgagcacggaatcagtgatgatgctcgacagttattgaaacaacggataggcgaagtcaaacaactagatgatgcgttgcaggcagaagccgaacgaaaacttgagcgtttaattgagcaggcaaatgaccaaaaaacgacgcttagcaatacagccaatggcattatggtgtcattccgcagtaaagataaatgggcacatattcctttacaaagagaatgggcgacagggctggctgctttagaagattatgttgcctatttgcaggaattacagcaggagggtttgccgaatctggttgagcaattccagcaacgtttgcataaacacaccgctcagtctttaagtgtgattcaggataaattgaatgcaaatcgggaagaaatcattgaccgaattgacatgattaatcaggtattacaacgcacggaatttaagctcggcagctatttaagactgggctataagaaagaaaaatatccacatgtacacgatttcgaacaacgtttaaaacaggttttatctggcgtgaatagtgaagaatatgaacgtcgttttaaacacttggcggagttaatggcgattttggacagagccagtagctcggcaactgccaataatcaggaaagtttacgtttgcttgatcctcgttatcaaatgtcattccatgccgaagaagtggatgcgcaaacaagtgaaataagggatgtgttggaatcctctagtggaaaatcaggcggtgaaaaagaatcctttgcaggtaccattgtcgcagcaagtttagcttatgtattgacacctgatggttatgattacccgatttatagcactgtatttttagatgaagctttttccaataccgctgaagcagttagtcgtcgtgtgctaaaagtatttaaggcactgaaaatacatgtcaatctgattacaccctataaaaacctgaatctggcacgtgaatctgcccgatcattactgattgctgaacgtgatattgaccaacatgaaagtcatttatgtgaagtcacatggcaagagattgatgaacggatgcagcaacgcaaacagaccatagccaccgaggcgcagcaacttggaattgagcttcatggctaa

SEQ ID NO: 43645 - DNA, 1215 bp, Acinetobacter junii CIP 64.5
atggctaaaacagtagcatggggaattttgcctgatgatgccatcgctcagttacgcaagaaagaatgggatcatccacggcatttaaaacaacgtttgcgccatcaacgtccattcccgattgtactttcactcaaagccccgacaggtcagcaggcatttgcagatatagatcatttccatacattttttaagacatggaaaaattttgcctatcctgatctggtggaatggcaacaacgtcaatttaaacagttggcaacacagcatgtccctgtcaaactggtcattcctacattagatgtcatggtggagttgttaggacagcaacagagacttaaaaaaatttcagacaaaatttcctttctgttgcaacagctatttgtagagccacatatagaatatgcactattttctacattaattgaatatttagaacagattgaacaataccctgaacatgattggcaattactgatccacttgattgcccagcttaaagcaaatatgggcgcagggcattatttaagagcattgcctttacagcatgtcgataccaaatttttagaaaaaaatctgatttttgtggaagctatttgtgatgtcttgcatcaaggcgaaatacaagcaacaggtggattactcagttggcttaattgtctggatcatcctaaaggctggctaatgatcaaacccttatgtgccaaagtgcaacaatcattgggtggatttccagtctttcagctttcgactgatgtattgacagaatttgaattgcctgcccaacatattattgtggttgaaaatattcagtcaggtttagccttacctatgttggaaaacagtatcgtggtctgtggcggcggtaaaaatatcaaatggctcaatgcggcttggctacaacataaaaaagtttattactggggtgatctggattcagagggtttaaatatcctgagcatggtacgccaaaaaattccggatgttattcctttaatgatggatgaagccacagtactgcaatttcaggataaaatggtcgatgaacctgattctgtctttagcgaaccgcaatatttaacagcagaagagttgagtttgtttcatgctttaagaaagaattgctataaaaataagcgactggaacaggaacgaatcagcaatgactggataaatttatatttgacagtagagtcgaagttattaaaaaaatga

SEQ ID NO: 43646 - DNA, 1461 bp, Acinetobacter towneri DSM 14962 = CIP 107472
atgaatattctagggttacaggccaagtatcggcgtttatatcatgaaaactcaatttggaaattattaagagcagataacgcaccacatattttagcgttcattgttgacttatttgcagaacaaaatgaagtcccttatggccgtgcaagaaatgtcttggatgagttgattaaatctagtcgtgagcagggtatttggcagacagaaaataatgcagcgcattatttaaatcattggattcattcaggctggctcagagaaatagatggcaagctgagtaaaacggatattagcgaaaccgtattacgtttttgtcagggcttggatgagcgagcaacccataccacagcatcacatttaagaattgtgcaggatgcggttcgtgattttgtggtcgcattgagtgaaaatattgaagaacgagtggagttgctcgaacaaaaaaaattagtgattcaaaatgaaatagatgctttgttggcgggtgttgttacacaattagaagaatcagaacaaaaagaaagaatacgagaaatttatcaacttgcttccattcttacaggcgattttagacgggtcgaagatgagattcgtctacgagataaagagttgcgtctagatatgattagtggtgcttattcacgtggagaagtattgctgagcttaatggaaaaagagcagttgcttgcccaaagtgatgcaggcagtgcttttgatgggttttgtcaattacttcaggatcaagatcgttctactgagtttagagagcagttacgcagtattttgaatcatcctattgcacaacaattaagcgaatctcaacgtaaatatttaggtcagttaatgcgtgagttaggacgcgaaagtagccgagttttccaagtccgacgtcgtacagaagaaggtttgagagcttatattgaaagtggtgcagcattggacaaccgtttgattgatcagttgttgtcggaattagaaaaaaatgcagtggcattgttggaatcggagtgtgatttaaaaacagaagtacaagtggatttagccgtgggttccatccagctgaattcgcctgaaagtcttgctttaaaaagtcccacagaacatatggatacacgtgaggtcgaagagcaacaaaacaagactgaacctagtgatcagatgctgaagtacttagacaatgtacgggttcgtgctgttgctgaaaaagtatatcaaacgctcgcacagaaaggggtgatgagtattgcccacttaacacatgaacatcctttacaagcggggcttgaagaacttgttgcttatttgcgtatagcaaaagccattaaagcaccacaaatgcagcataccgagcaagttgaacttaaggatcgttcaggtgtgcatttgcaggccagtattccagtgtattacttgagtgcagatttatttcccaaaaatatagatgagctggcactttaa

SEQ ID NO: 43647 - DNA, 834 bp, Acinetobacter towneri DSM 14962 = CIP 107472
atgcaatcagaaaataagatacaacagcatgacaacttctttgaaatggtacgcagaccatcttcaaattcagagaaaaatatagaaatccaagctaatcagcctgtagaagattcgtttgctacaactggggcagaggaacaacatgcagataatcaaacagagatggagcatgctcaggatcgtgatacagatgcgcttatgccacatgcagcccgacgcgtattggtctatctcatgcgtcaaggggttattcttgcagcagaaaacttaaaactttttgatttattgtgccgatatgaagcggaaattcgtagacatttggcagaggtttatatccagttggttttggatgccaagcaaggggtggcttatatcatcaatctcaaaagtattgaggatgaacaggaagatgagaaccagcctttggatgattttcctgtactgatacgaaaacgaactttgactgtatatgacaccttaattttacttattttgcggaagtattatcaggagcgggaaactgcgggtgagcaaaaaattattattgatgttgagcgaatccagagcagtttaattccatttattcctttaacgaatcatgacagcaaagatcgtaaaaagctaaatgcagcattagaaaaatttattgagaaaaaagtattaacgggactgcgtggtgaagaagggcgttatgaaattacgccaattatccgctatgtcgtgaatgccgagtttttacaaagtttattatctgaatatcaacaattagcagcaaaggccaagttgcagcaatccgaacaagaatatggagaatcatcatgcaagaaatga

SEQ ID NO: 43648 - DNA, 3378 bp, Acinetobacter towneri DSM 14962 = CIP 107472
atgcaagaaatgaccctctcaactttatttgcacaaggccaaattcgcttgtcagaaatttcagtatttaactggggctccttccataacttgcataccgcacgtattgatcctgaagggacacttattacgggagataatggtgcaggtaaatctacctttattgatggtttaatggcattgttacaacctgcaagtaaagctagttttaacgtagcagctgcgcagggcgatcgctcagaccgtacattactctcttatatgcgtggtagttttggttcagaacatgatggggctggaacgcgagtaaaaaataagcgtgaaaaagcagtgacaacagcattaagagcgctatataccgctgatgacggttcgatgattactttaattggattgttttgggttggacaaggtcaacattcgctgagtgaagtgaatcgtttatatatgattgcaagtcgtaatgtgcaactgactgaagtgttagaaaaatttgcagacggtaatactcgccagctaaaacaacattttaatcctaaaacagatgcacgcgtgcattattttgatagcaaatttgaagactatcaggagatgtatcgtaaatatttatttatggataataaaaatgcacctgcgttgttatcacgtgctttaggcttaaagaaaattgatgatttgactaaattaattcgcgagttggttttagaaccaagccaggttcgtgctttggcacagactgcagtaaatgagtttgctgacttagaggcaaactataagcatttggtagatgcgcgtgaacaagtcctacatttacagaaattacctgagttagctgttcaaataacagcgttaactctgcaactgaataatctacagctcgaaaaacaagcttttcctgcatatttaggtgaattgtatgttcagttttggactgaaaaaatacatcagctggagcaagagatacagcgattacatacgcagtttaagcaattagaacaacaagaacatgatgcggaaaaacgacaagagcgctgccatgaagactatttacaagtcggcggtaatcggattgaaaacttacaaaaagagctagaactgatacagcgtcagttaaagcaattaaccatagaggcatcgcgctatcaggaagatgctcagcaattacaattgcaagatgatttaaccgagcaaaatttaattgataaccaaaaaatagcccatgagcagcttctaaatattgggcaagagaaaacccaacgacaagatgagtttgctcaagtcagtagcaaatacgcacaaacgcaacagcaactgaaagaaactcaaagcgatattcaggaaatagaaaccagacctaatagtaatattcatgatgtacatttattgcgtttaagagatgagcttagacagcacttagattttgatgaacatgaattaatgtttattggtgagctcattgatgtaaaagaggctgaaaaaatctggcaaggcgcaattgaacgagcattaggtggtttaaaaacaacgttattggtgccgaaagatcgttattcgatggtcactcaatgggtgaatgcgcgtcataataaaacccatgtgcgtttacaggtgatccatcttgatgctacagaaagtgtgtattttaaagaaaatggttttctgcggaaattggtttggcgagagcatccatatcgtgattggttaaaacaacatctgcttcgctttgatctgcaatgtgtggcagatacaacaatcatgaatacaacgcctttttctatgacacaacagggcttaattcatcgtgagcaaggtcgttttgagaaaaaagatcaacagcggattgatgatcgaaaaatttggtgtttgggattttccaatacttcacgtttaaatttattaaagcatgaagcgaaacaacttgaggtacagttggaacagtatgccttgagtgttgcacaatcgcgtaaggtgttagatcaggtaacacagcataagagtttgtgggagcgaatgttacgttaccaatgggatatgataaatattccttattggacagagcgccagcaacagaccagcaatgacttgcaacatttacagcgggcagataccaatattgaacaagctcgacaacgttgggagcttgcaaaagaggaattaaaacaactacaggaacagaaaggacagttacaacacacttgggggaaactcaaacagaaattcagtgatgcagaaaaacaacaacaacaagcgcaaaaggcagcaaaccaaggtgttccagaacaagccagagaactgttgctacagcgtataggagaaacacctcggttggaggatgcttatcttactgctgtggaaaaagagctagagcgtttaattgaacataccagcaaccaaaatacctcagcaaaaaatagcgcaacgtacattattggtcagtttcgtggcaaggataaatggtcacatattgcattacaacgtgaatgggcagttggtttggccgcattggatgattgcgttgcctattttcatgaactagaaaaggaaggtttgcctgccttagttgaacagtttgaacagcgtctgcaaaaacataccatgcagtctttaagtgtgattcagaatcgccttgaggcagatagagaagaaattactgaccgtattgccataattaatcaggttttacggcgtacagaatttaagtctggcagctatctaagactaggatacaaaaaggaaaagtatccacacgtcatagattttgagcaaaaactaaaatgggtcatatctagtattaatagtattgaatatgaacaacgttttaaaaagttagctgaattaatttctattttagaaaaagcgagtaactcggttacagcgcatacttttgaaagccagcgtttacttgatcctcgtcatcaaatgtctttctatgcagaagaagtcgatttggccacagaagaaatacgagatgttttggagtcatcgagtggtaaatctggcggagaaaaagaatcttttgctggaaccattgtggcagcgagtttggcttatgtattaacaccagacggctatgattatccaatctacagtacagtgtttttagatgaagctttttcaaacacagctgaagcggttagtcgtcgagtactcaaagtatttaaggcgttgaaaattcatgttaatttaatcacaccttataaaaacttaaatttagcgcgtgagtcagcacgttctttattaattgccgagcgagatattgagaaacatgaaagtcatttatgtgaaattacttggcaggaaattgatgaaaaaatggcgcaaaaacaacagcaactgcatagagaggcacaacagtttggggtgcagttagatgcctaa

SEQ ID NO: 43649 - DNA, 1197 bp, Acinetobacter towneri DSM 14962 = CIP 107472
atgcctaaaattgagaagtggggattacttccaaataccgttttgggtattttgcataaaaaagaatgggaaaatcgtcgaaatttaaagcagcggttgttaaatcaacgtccttttccaatcgaaatttcactgaaagtgcccacagaccaacaagctagagataatttgggtcattttcatgctttttttaaagcgtggacagattttgcttatcctgaactggttgaatggcaagaacggcagtatcgacaactttcagaacaacgtgttccagtaaagttacgaattttttctttacagcagcttactgagcttttaggaacagagcaacaacttgaaaactggttggataaaatatccagctttttgaagcagtcttttgtgcatgatcgtcatcagcaccgtttatttcaaactttaattcatcatttagagcagatagaacgctatagccaacaagaatggcaatggttgattcagctgattgaacagctgaaaccgaatatgggggcagggctttatttaagggccttgccattaagcgctgtaaacacgaagtttcttgagcagaacttattgctgacggaggcaatttgcaatgtactttatgatgatgagatcgtactggctggagggttgttggcatggctagattgcttagatagccccaaaggttggttgacgatcaaacccgtctgcccaaatgtgcaggaaaaattgggaggactccccgtttttcaattgtctacagaggtgctagatcaatttgagttacctgcggaacgaataattgtagttgaaaatattcagtcaggtttagcgtgcccttacttggaaaatagtattgtggtttgtggtgggggtaaaaatattacatggatgaaggccaagtggttacagtataaacaggttttttattggggagatatcgactctgaaggtttaaatattttaagtatggttcggcaaaaaattccacacgtgattgctttaatgatggatgaagccacagtgttacagttccaaaatcatatggtggatgaaccagactctatttttagtgagccacaatatctcactgctgacgagttaaaattatttcatgatttgcgtgcacagacatttaaaaataggcgtttagagcaagagcgcatttcggttgattgggtgcatcgttatttagagttactttga

SEQ ID NO: 43650 - DNA, 1464 bp, Acinetobacter haemolyticus NIPH 261
atgaatattcaggggatacaggcaacttaccgccgtttatatcaagagagtgctgtctggaaattattaagagcagaaaatgcaccgcacattcttgcgtttattgcagatttatttgcagaagaaaatgaagttgcttatggtcgtgccagaagtttactggacgagtttattaaatttagtcgggaacaaggactgtggcaaactgaaaataatgcagcctattatttaaatagctggattaaggcaggttggttgcgtgaaatggacgatatgctcagcaagaccgatgttagtgaaacggtattacgtttctgtcgcaatctggacgagcgtcataccagcacaaccgcatcacatttaagaattgtacaggaggctgtacgggattttgtggttgctatcagtgataatattgatgatagggtgagcttattagaacaaaagaaagcacatattcagcaggaaattgatgatctgcatgcaggcgtggtcacacaactcaacgaagctgaacaacgtgaacggattcgggaaatttatcaacttgcctctattttgactggcgattttagacgggttgaagatgagattcgtcagttagataaagaattgaggattgatatgattgagggaagttcttctcgaggggatgtgctactttccttgatgagaaaagaacaattgctttccaaaagtgatgcaggcagtgcttttgatgggttctgtcaactattacaggatcaggatcgctcgactgaatttcgggaacaactgcgtagtattcttaatcatccgatagcacaacagttgagcgaacagcaaaagaaatatctagggcagttgatgcgtgaactggcacgagaaagtggtcgggtatttcaggtgcgccgcagaacggaagaaggacttcgagcatatattgaaagtggggcagcactggaaaatcgtatgattgatcgcttgctttcgcaacttgaaaagcaggcggtcggattactggaacagcaatgtgacttaaaaacagagatgcaggcagatttagctgtgggttcggttcaaatcagctctcctgaaaattttgccctgaaaagtccgaatgaacacatggatacacgaggcgtacagcaacaacaaaaccgtaaacaaccaagcagtcagatgctgcactatctggacagtgtacaggttcgggtggttgctgaaaaaacacgtaataccttgctgcaaaaaggggtgatgagtattgctcatttaactcaggaacatccattacaggcaggtttggaggaactggtggcttatttgcggattgccaaagccattaaagcccctcaattgacggaacaaaatgagcagattcaattttatgatcaacatggggtttgtctacaagccagtattccaacttattgtttaagtgcggaattattccctgaaaatttagatgaattggcattataa

SEQ ID NO: 43651 - DNA, 801 bp, Acinetobacter haemolyticus NIPH 261
atgcaggataaagagattagtcaattacaggatgccagtttttttgatcgggtacgccgtccctcaatagatgaaccacatcatgctgaacagaataaaatcatggcggtgcaagatgagttggcagaggttgaaacggagcaagaatcagaaaacgatagcgcacagctcaccgatgaattgtccagtatgccacatgaagcgagacgagttttggtctatttaatgcgacagggaacgattctggcagccgaaaacctaaaactatttgatgtattatgtcgttacgaagtcgctattcgtcagcatcttgccgaagtatatattcaactgattttagatgccagacagggtgtggcatatattataaatgtggaaagcatcagcgatgaaaatgctgacaatcaattctcggatgattttcccacactgattcgtaaacgtacactcactttgtatgatacgttggtattactgattttacgcaaatattatcaggaacgggaaaacgcaggtgagcaaaaaattattattgatttggagcggattcaaacgagtttgattccctttattccaatgaccaatcatgacagtaaagaccgtaaaaaattaacaggtacactggataaattcagtgaaaagaaaatcctcagtgtgatacgaggagaagaagggcgttatgaaattactccgattatccgctatgtggtcaatgctgaatttctacaaagtttattgactgaatatgagcaactcgccgataaagcggttcagtctgaacagaacaaaggaaaagcataa

SEQ ID NO: 43652 - DNA, 3378 bp, Acinetobacter haemolyticus NIPH 261
atgcaagagatgactttggatagcttatttgcacagggacaaattcgtctggcagaaatttcagtatttaactggggttcatttcacaacttgcataccgctcgtattgaccccgaaggcacgttgattacaggcgataatggtgcaggtaaatccacttttattgatggattgatggcattattacaacctgccagtaaagccagttttaatgtggcagcagcacagggtgaccgttccgatcgttcgcttgtcacgtatatgcgaggcagttatggttctgaacatgatggttcaagtactaaagtcaaaagcaaacgagaaaaagcagtcaccacagcacttcgagccttgtataccgcagaggatggttcgcagattaccctaatcggattattttggcttggacagggcaaaaattcactcagtgatgtcaatcgtttgtatatgattgccagtcgcaatgtgttactgaccgaagtgttagaaatttttgctgatggcaatactcgccagctcaaacagcattttaatccgaaaacagatcagcgcattcattattttgacagtgattttaaaagctatcaggacatgtaccgtgattatttatacatggagaataaaaatgcacctgcattgctggctcgggcattgggattaaagaaaattgatgatctcaccaaactgattcgggagctggtgttagaaccgagtcatttacgagaaactgcacaaacggcagtcaatgaatttgctgatctggaagccaattataagcatttggtggatacccgtgaacaggtcgagcatttacagcgtttgccacaatgtgccgaacacattgctgaattgacgcagcgtttagcacagcttcatttggaaaaacaatccattgctgcttattttggtgaattttttgcggcattatggacagaaaaattacaacagcttgaacaagaattggtacagcttaaccaacaatttcagcagattgaacagcaggaacaggatgcagaaatacgacaggaacgttgtcatgaagaatatttacagttgggcggtcatcagattgaaaatttgcacaaagaactgggatttattgccgataaactcaaaagtctagtcttggaagcatctcgttatcaggatgatgctcgacagttacaactttcggacgatttaatcgagcatcgtttgctggaaaatcagggcattgcgactgaaaagctggtcaatattgaacaggataccacacaacgtcaggatgaatttgccgaaatcagtggcaaatatgcccaaacgcaacaacagctcaaggatattcaggtagatattcaggaaattgaagccagacctgacagtaatatccatgatgtgcatttattgcgtttacgtgatgaattaaaacagcatctatcttttgatgaacatgaactgatgtttattggagagttgattgatgttaaagatcatgaaaaagcatggcaaggagcgattgaacgagcactaggtggatttaaaaccactttacttgtgccgcaggaacgttattccatggtgactaaatgggtcaatgcgcgtaataataaaacccatgtacgtttacaagtagtcaatacaaagcaagtagagcatgtccattttaaggacaatggttttctggggaaattactttggcgagaacacgcctatcgtgactggttaaaacagcatttacagcgtttcgatttaaattgtgtgagtgatacccaaacactggaccatacaccattttccatgacccaacagggcttgattcatttggagagaggacgctttgagaaaaaagatcaacaacgtattgatgaccgtaaagcatggtgtctgggcttttccaatacttctcgtttaaagttactaaaacatgaatataatcagttagaacaacaacttaagcaacaataccaacagattgaacaggctcgtcagttactcaataatgtaaatcagaaaaaaagcttatgggaaaggctgcagcgttatcaatgggatgccattaatttaccgtattggcaacaacgtaaaacagaaactgaacaagatttacaacgcttacagcaggcagattctgatgcagaacaagctcgccagtgttgggaagcggcgaagaatgcactcaaacagattggtttacagaaaggtgaattacaaaatatacgaggtcaattggaacagcaacatcgtgatactcaattaaaacggcaaaaagcacagcaggcagccgagcagggtattagtgatgatgcccgacagttattgaaacaacgtattggcgtgatcaaacatttagatgatgctttacaagtgaacaccgaacggaaacttgaatccttaattgagcaagcgaataatcaaaaaatcacggtcagtaatactgccaatggcattatggtgtcatttagtagtaaagataaatgggcgcatattccactacaacgagaatgggcaacaggcttagtggcattagatgactatgtcgcatatttacaggaattgcagcaggagggattgccgaatttggttgaacaatttcaacaacgtttacataaacataccactcaatctttaagtgtgattcaggacaaactcaatgccaatcgggaagaaatcattgatcgaattggcatgattaatcgggtattacagcggactgaatttaagctgggtagctatttaagactcggctataaaaaagaaaaatatcctcatgttcaagattttgaacaacgtttgaaacaggttttatcgagtatcaatagtgaagaatatgaacgacgttttaaacagttggctgagctgatggcaattctagataaagcaagtagctcagcaacagccaataatcaggaaagtctacgtttgcttgatcctcgttatcagatgtcattccatgctgaagaaatcgatgtacaaacaggagaaatacgggatgtactcgaatcatccagtggtaaatctggcggagaaaaagaatcctttgcaggcacgattgtcgcagcaagcctagcctacgtgctgacacctgatggatatgattatccgatttatagtaccgtgttcttagatgaagcattttccaatactgccgaagcggtaagtcgtcgtgtattaaaagtatttaaggcgctcaaaattcatgtcaatttaattacgccatataagaacttgaatctagcccgtgaatcagcacgatcattgttaattgctgagcgcgatattgaccagcatgaaagtcatttgtgtgaagtcacttggcaggaaattgatgagcgaatgcaacaacgtaagaagctcacaatcacacaggttgagcaacttggaattcagcttcatggctaa

SEQ ID NO: 43653 - DNA, 939 bp, Acinetobacter haemolyticus NIPH 261
atggctaaagctacgcagtggggtattttgcctgatgatgccatcgcacagttacgcaataaagaatgggatcatcaaaggcatttaaaacaacgtttgcgtcatcaacgtccattcccgattgtactctcactcaaagccccgactggccagcaggcattgacagatatggatcatttccatgcattttttaaggcatggaaaaattttccttatcctgatctagtggaatggcaacagcgtcaattcaaacagctttcatcgcaacatgttcctgtaaaactgattattccgacattggatgtcttggtggaagtattagagcagcaacagcgacttcaaaaattttcagacaaaatttcctgtttcttgcagcaaccatttgtacagccacaagcggaatatgcactattttccacattggttgaatatttagaacaagtcgaagcctatcgtgaatacgactggcaattattgatgcagttggttgcccaacttaaaccaaatatgggagcaggacattatttaagggcattgcctttacaacatgtcgataccaaatttttagagaagaatctggttttggttgaagccatttgtgatgtcttgcattatggagaagtacaggcaacaggtgggttactcacttggctcaattgtctggatcatccgaaaggttggttgatgatcaaacctttatgtgccaatgtgcaacaatcattgggaggactacctgtttttcaactctctaccgatgtgctggctcaatttgaattgcctgctcaacatattattgtggttgaaaatattcagtcaggtttagccttgcctgtattgcagaatagtatcgtggtctgtggaggtggtaaaaatattaaatggttggatgcagtctggttacaacataaaaaatcggtggtgtttcaaaaagtatgctga

SEQ ID NO: 43654 - DNA, 1467 bp, Acinetobacter sp. CIP 102143
atgaatattcaggggatacaggcaacttaccgccgtttatatcatgaaagtccagtctggaaattattaagagcagaaaatgcgccacacattttagcatttattgccgatttatttgtcgaagaaaccgaagttccctatggtcgtgcccgaagcttactggatgaatttattaaatatagtcgcgaacagggattgtggcaaaccgaaaataatgcagcctattatttaaatagctggattaaggcaggctggttgcgtgaaatggatgacatgctcagcaagactgatgccagtgaaacagtattgcgtttttgtcgcaatctagacgagcgtcatagcagtactactgcctcacatttgagaattgtacaggatgcagtacgggatttcgtggttgccattagcgacagtattgatgatcgtgtcaacttattagaacaaaagaaagcccagattcaacaagaaattgatgacttgcatgcaggggtggtgacgcagctcaatgaagcggaacaacgggaacggattcgggaaatttatcaactggcttctattttaacaggtgattttaggcgagttgaagatgaaattcgtcagttagataaagagttaagaattgatatgattgagggcaacgcttcacgaggtgaagtgttactggcattgatgcaaaaagagcaattacttgccaagagcgatgctggcagtgcttttgatggtttctgtcaattattacaggatcaggatcgttccactgagtttcgggaacaactacgcagtattctcaatcaccctgtagcacagcaacttagtgaagcacaaaagaaatatctaggacagctcatgcgtgaactggcgcgggaaagtggtcgggtatttcaggtgcgtcgccgtactgaagagggattgcgggcatatattgaaagtggagctgcactggaaaatcgtatgatcgagcgtttgctatcgcaactggaaaaacaggcagtgaatttaacactggaacagcagtgcgatttaaaaaccgaaatgcaggtgtatttggcagtcggttcggttcagatcagctcacctgaaaattttgctttgaaaagtccgaatgaacacatggatacacgtggcgtacagcaacaacaaaatcgtaaagaaccgagtaatcaaatgctgcactatctggacagtgtacaggtacgagaggttgctgagaaagcacgccatacattgctgaaaaaaggggttatgagtattgcacatttaacccaagaacatccattacaggcaggtctggaggaattggtggcatacttacgaattgccaaagccattaaagcgccgcaattaacagaacaaaatgagcagattcaatttcaggatcaacatggcgtgaatctacaagcccgtatcccgacctattatttaagtgcagaattattccctgaaaatttagatgaattggcattataa

SEQ ID NO: 43655 - DNA, 792 bp, Acinetobacter sp. CIP 102143; identical to SEQ ID NO: 43627

SEQ ID NO: 43656 - DNA, 3378 bp, Acinetobacter sp. CIP 102143
atgcaagaaatgactttggatactttatttgctcagggacaaattcgtctggctgagatttccgtgtttaactggggctcattccataatttacatacagcccgaattgatcctgaagggacgttgattacaggtgacaatggtgctggtaaatctacctttattgatggactgatggcattgttacaacctgccagcaaagccagttttaacgtagcagccgcacagggtgaccgttcagatcgttctttagtgacctatatgcgtggcagttacggctctgaacatgatggttccactaccaaagtcaaaagtaaacgagaaaaagctgtaaccacggcactacgagccttgtatattgcagaggatggttctcagattaccctgattggcttgttttggcttggacaaggcaaaaattcactcagtgatgtcaatcgtttatatatgatagccagtcgcaatgtgttactgactgaagtattagagatttttgccgatggtaatacacgccaactgaaacagcattttaatcccaagacagatcagcgtattcattattttgaaagtgattttaaaagctatcaggatatgtaccgtaaatatttatttatggacaatcagaatgcacctgcattactttcccgagcattgggtttaaagaaaattgatgatttaaccaagctgattcgggaattggtgttagagccgagtaatttacgagaaactgcacaaacggcggtgaatgaatttgctgatttagaagccaattataagcatctggtggatacgcgtgaacaggtggagcatttagagcgtttgccacaatgtgctgaacaaattgccgaattgacgcagcgtttagcgcagcttcatttggaaaaacaatcgattgctgcttattttggtgaattatttgccgcattatggactgaaaagttacagcagcttgaacaggaattgctacaactcaaacaacaatttcagcagattgaacaactggaacaggatgcagagacacggcaggaacgtcgtcatgaggaatatttacagttgggtggtcatcagattgaaaatctgcacaaagaactgggttttattacagataaactcaaaagtctggttatagaagcatctcgttatcaggacgatgcccgacagttacaacttgcggatgatttaaccgagcatgctttgctggaaaatcagggtattgcgactgaaaaattggtcaatactgaacaggataccaagcaacgtcaggatgaatttgctgaaatcagtggaaaatacgcacaaacccaacaacagctcaaagatattcaggaagatattcaggaaattgaagccagacccgatagtaatattcatgatgtgcatttattgcgtttacgtgatgaattaaaacagcatttatcttttgatgaacatgaactgatgtttattggggaattaattgatgttaaagagcacgaaaaagcatggcaaggcgcgattgagcgagcattaggtggactcaaaaccacattacttgtgccacagcatcgttattcgatggtgaccaaatgggtcaatgcgcgtaataataaaacccatgtgcgtttacaggtggttaatctagaacaagtggagcatgtccattttaaggacaatggttttcttgggaagttgctttggcgagaacacgcctatcgtgactggttaaaacagcatttacagcgttttgatttaaattgcgtgagtaatacccaaatactggatcatatgccattttccatgactcaacagggcttaattcatttagaacgaggacgctttgagaaaaaagaccaacaacgtgttgatgatcgtaaagcatggtgtctgggcttttccaatacctctcgtctgagcttgcttaaacatgaatatagtcagttagaacaacagcttaaacagctataccaacagattgaacaggctcggcagttacttaataatgtgaatcagcaaaaaggcatgtgggaaagattgcagcgttatcaatgggatactattaatttaccgtattggcaacaacgtcagcaacaaacccaacaggacttgcagcgtttacagcaggcagattctgatgctgaacaggctcgccagcgttgggaagatgcaaaaaatgagctcaaacagattcgcttacaaaaaggtgagtcacaaaaaatccgaggtcagttagaacagcaacatcgtgatacccagttaaaacagcaaaaagcacaacaagcagccgagcacggaatcagtgatgatgctcgacagttattaaaacaacggataggcgaagtcaaacaactagatgatgcgttgcaggcagaagccgaacgaaaacttgagcgtttaattgagcaggcaaatgaccaaaaaacgacgcttagcaatacagccaatggcattatggtgtcattccgcagtaaagataaatgggcacatattcctttacaaagagaatgggcgacagggctggctgctttagaagattatgttgcctatttgcaggaattacagcaggagggtttgccgaatctggttgagcaattccagcaacgtttgcataaacacaccgctcagtctttaagtgtgattcaggttaaattgaatgccaatcgggaagaaatcattgaccaaattgacatgattaatcaggtattacaacgcacggaatttaagctcggcagctatttacgactgggctataagaaagaaaaatatccacatgtacacgatttcgaacaacgtttaaaacaggttctatctggcgtgaatagtgaagaatatgaacgtcgttttaaacacttggcggagttaatggcgattttggacagagccagtagctcggcaactgccaataatcaggaaagtttacgtttgcttgatcctcgttatcaaatgtcattccatgccgaagaagtggatgcgcaaacaagtgaaataagggatgtgttggaatcctctagtggaaaatcaggcggtgaaaaagaatcctttgcaggtacgattgtcgcagcaagtttagcttatgtattgacacctgatggttatgattacccgatttatagcactgtatttttagatgaagctttttccaataccgctgaagcagtcagtcgccgtgtgctaaaagtatttaaggcactcaaaatacatgtcaatctgattacaccctataaaaacctgaatctggcacgtgaatctgcccgatcattactgattgctgaacgtgatattgaccaacatgaaagccatttatgtgaagtcacatggcaagagattgatgaacggatgcagcaacgcaaacagaccatagccatcgaggcgcagcaacttggaattgagcttcatggctaa

SEQ ID NO: 43657 - DNA, 1215 bp, Acinetobacter sp. CIP 102143; identical to SEQ ID NO: 43633

SEQ ID NO: 43658 - DNA, 1383 bp, Clostridium clostridioforme CM201; identical to SEQ ID NO: 42748

SEQ ID NO: 43659 - DNA, 750 bp, Clostridium clostridioforme CM201; identical to SEQ ID NO: 42749

SEQ ID NO: 43660 - DNA, 3390 bp, Clostridium clostridioforme CM201; identical to SEQ ID NO: 42750

SEQ ID NO: 43661 - DNA, 1179 bp, Clostridium clostridioforme CM201; identical to SEQ ID NO: 42751

SEQ ID NO: 43662 - DNA, 1425 bp, Clostridium innocuum 2959; identical to SEQ ID NO: 42690

SEQ ID NO: 43663 - DNA, 669 bp, Clostridium innocuum 2959; identical to SEQ ID NO: 42691

SEQ ID NO: 43664 - DNA, 3282 bp, Clostridium innocuum 2959; identical to SEQ ID NO: 42692

SEQ ID NO: 43665 - DNA, 1377 bp, Hungatella hathewayi 12489931
atgaaacagaataagaaactgatggaagaaataccggaccggttctgggggctgttccgctcggtgaaccggtccacctacatagaagcactattgagaattaatgaggaatatgaatacagcaactactttttgagccgtgaggtctgcatccaggtattgagcgagtattttgcaaagaagcggtacgtgatctggcaggatgagctggaggatgaactggatacgctggaaccgccggccacgagggtgctcaactggcttttaaagaccggatggctcagaaaagtggacgattatgcctctatgacggtgtacattgtgattccggactacgccgccgtcatgacagaggcttttttgcggctcgacagcgaggatgaggatgagacgcagatctatattcagaatgtttacgccatattgttttccttaaagaatgatccgagggccagcatcagcctgctgaatacggcatttgtcaatacgaaacggctgaacaagacgctgcaggatatgctgcataatatggacaaattctttgcaagcctgttggaacagaagtcgtatgaagacctgctccgggatcatttagaggggtatgtggaggagattgtgaagaagaaataccacattttaaagacctccgacaatttttacctctataagaccgatatcaaaagatggatcgcggccatgcgggaggacacggaatggatggagcagatgagcagacggagcggaggaaaggtatctgccgccgatatcgcagagaagctggaccagatcgagaggggcttcgacagcatcgaacaccggatatccaacatggaccgggagcattccagatatatccgcgccacggtgacaaggcttaactacttactcaaccaggatgataatatgaaagggctggtcatacagctgctgaaccatctatccgagggcgaggagcaggaggaacggatccgggaggtgggagagcacatgaacctgtcgcagatgaccatcttgtccgagaaatccttatacaagaggagacggccaaaggccgacttcaccgggaatctggaggcggaggaagaggcggaggagctttccagggaagagatcctgaacttaaataagctgaaaaaccgctacagcaaaaaagagatcgagagcttcatcgaggagaacatggaagaggggcgtatggaggtaacagatggttccgttcgctctggtgaagactttgagaaactgattctggcctacgactattccaccaggcgaaagagcctctaccgggtggaagaagcggatggagagccggagatgatagagagcggaggataccgttatccgaagctgacatttataaggaggaaatcttaa

SEQ ID NO: 43666 - DNA, 651 bp, Hungatella hathewayi 12489931
atggggtacgaggaagagacgacagtaaatttggggctcccctattatgacagccttttgccggaagagcagcaggaggtaacggaagccgttaagcttctgcttcgtcagacgtttgtgctggaacggaaatacgagaagcgttccggacgttttaccaataaccgggagtttcggatctgcaacaagcatctggaatttctgcggaagtattttgccgtcagcggcgtgtcggtggtggaaaacagccagatgggagtcatctacatccagggggagaccctggtgggcgacaagcttccgaagcttgccactctttatttactgatattaaagctgatttacgacgagcagatggccacggtctccaccagcgtcaatatctacacgtcgctgggagaaatgcatgagaagctgggaaattaccggctgttcaaaaagcagccgtcgcccaccgacatcagaagggcggtcaccctgctgaaaaaataccaggtggtggagccgctggacctgctggaagatttaaatggcgacagcagactgattatctatccgtgcatcaatgtggtgctgtttggcgacgatgtgcgggtgctgctggaatcatttggcgaaggagaagagaacgatgacgaatcagagatttga

SEQ ID NO: 43667 - DNA, 3372 bp, Hungatella hathewayi 12489931
atgacgaatcagagatttgaggccctgtcccggatctgtttaaataactggcattatatcaaccgcaaaacgctgtcctttaaccgggaaatcaatttttttaccgggcactcagggagcggaaagtccacggtgatcgacgccatgcagatcgtgctctatgccaacacggatggccgcggatttttcaataaggcggccgcggatgactccgaccggaacttgattgagtatctgcggggcatggtgaacattggagagaacaacgagttcgcttacctgcggaatcagaatttctccagcaccattgttctggagctgcagcgcacggatacagaagaatgccagtgcgtgggcattgtattcgatgtggatacatcgaccaatgagatatcgagacgtttcttctggcaccgcgggcctctgtgggacagcggttaccggacggccaaacggacgatgtccattgcggaggtggaaggctatttacagagccattacggcaaagaagagtacttcgccacttctcacaacgaacggttccgcaggcagctttacgatgtgtatttaggcggcctggactctgagaaatttccgctgctgtttaagcgggcgatcccgttccgcatgaacatccgcctggaagatttcgtgaaggaatacatctgcatggagcaggatatccatatcgatgacatgcaggagagcgtcatgcagtacgggcgcatgagaaagaagattgaggacacttacatagagatttcgatcctgaaggagatgcaggagaagtacggcctcgtcctggagaaggaagagaatatccggaaaaacggttactttacgggcagactcgagattctggaactgaaagaaagggccggagaactgacggataaggcggcgctttccagagacgatcttcagaagcaggagagcttaaaggacggcctcgacgaacagatcgcagaactgaccgcccagggagaggaactgctgaaacggatctcctccaccggatacgaggatttaaagacgcgtctggaatcgttaaacgagctgatggagcatttgaataagagtgaggtcaaatggcgccagactgcggaacgccttaacgcatggatcgaccaggagaccacgtcgaatcagacgatctgggacattgaggagtttgagaaaaacaccatagacggggagaagctggaacgtttaaaaaagtccattgcagagatgcggaaggaggcggaggatttaaagagtgaggccgccgccgtccttcgcgatttgaagcgccaggagcgccagctgaaagaggagctggctcagttaaaggccggaagcaaggcgtatcccaagtatctggagcatgcccgttcctatattcagcgaaggctgctggaggagacgggaaaggctgtggaggttcacgtcatggccgatctcttagatatccgcaacgaggaatggagaaatgcggtcgaaggatatttaggaggcaataagctttccctcgtggtgccgccggcatacgcggaggaggccttaagaatatacagtgagctggacaaaaatgaatacttccgcgtggccgttctcgatacggaaaaggccggaaaggatacgccgaccgttctggaagatgcgctttgcgaggaagttgaggtgcgggaggcgtatttaaagccgtatctggaacggcttctgggacaggtggtcaagtgcaggagtatcgatgagctgcgtgactgccgcatcggcgtgacgccggactgcatggtctaccatacgttccggctgcagcagatgaatccggagcagtacacgaaatctgcctatatcggtaaggacagtgtgagacagagaatccgccttctggagaaatccctgtcggaaatggagaaaaagcgtgctccggaagagacgacggtcagggaatgcgaggccgtattaagcctggagcagttaagcgaggagatctccgtctatctggagtggcagaaggatatggaagatttgaaggagcggcagaaggaaaagaagaggctggagcagaagcttttaatactgaaagaagaaaatgtggaccagtgggagaaagagcggagcgcggtttcagcccttgccgacggcaagaggagagaacgggacgcagtgagccgccggatctacgagatcaacacaaggatcacccagatggcccaggcagtcaccgcagtggagcaggagctgctggcaaaggaccgggaattcatgcaggacgatttgctggaggcggagtttgcagagtacatggctggaaaagaaaatccgcggtttgataaacttaaggattactttaccggaagactgaatgctgctgcggaggccagggatcaggcgtttcagacgctgatggacgccaggggagagtacgcgagaaagtatccgaaccggaatttctccatcacgtccagggacaaccgggaatatgagaagctgatggagattttggcgtgcgatcatctggaggagtaccgccagatcgcggccgagcaggcgcggtcggcagtggagcattttaaggacgactttatgtttaagatcaggagcgctatccgggaggcgcttcagcgaaaggacgagctgaaccgcatcatcagccgcctcgatttcggcaaggacaaataccagtttgttatcggcaaaaataaaggggcagacggccgcttttacgatatgtttatggacgattccctggaggtcaatcccaacgagctcagtgaagctgtggacaaccagatgaatttgttcacgatggagcatgagagtcagtacggggaactgattgaggaactgattaacgtctttatcccgccggataacgcgacaccggagcagatggaggaggccaaacgcaatatggacaagtatgccgattaccggacatacttatccttcgatatgcagcagctgatccagaatgaggatgaggtaatccggatccgcctgagcaagatgatcaagaaaaattccggcggcgaggggcagaacccgctctatgtggcacttctggccagctttgcgcaggcgtaccgcatcagcatgccggagagtgtccggagaaatccgacgatccggctggtggtgctggacgaggcgttttccaagatggatgcggagaaggtggccagctgtattgaactgatccgcggcctcggcttccaggcgatcataagcgctaccaatgataagattcagaattacgtggagaatgtggataagacattcgtattcgctaatccgaataagaagtcaatatcgattcaggaatttgagcgggaaagctttccgcagctgatgaaggaactggatgagggggaagaagatgattga

SEQ ID NO: 43668 - DNA, 1383 bp, Clostridium clostridioforme 90B1; identical to SEQ ID NO: 42748

SEQ ID NO: 43669 - DNA, 750 bp, Clostridium clostridioforme 90B1; identical to SEQ ID NO: 42749

SEQ ID NO: 43670 - DNA, 3390 bp, Clostridium clostridioforme 90B1; identical to SEQ ID NO: 42750

SEQ ID NO: 43671 - DNA, 1179 bp, Clostridium clostridioforme 90B1; identical to SEQ ID NO: 42751

SEQ ID NO: 43672 - DNA, 1383 bp, Clostridium clostridioforme 90A8
atgatactgatgaatgaaataccagaccggttctggagcctgttccgctctgctaaccggtctacttacatagaagcccttcttaaaatcaacgaggagtacgagtacagcaattacttcctcagcagggaagtctgcatccagcttttaagtgaatatttctcccggaaaaaatatgtcatatggcaggatgagaccgaggatgactgggatgaactggaaccgcctgccaccagggttcttaactggctgctgcggaccggctggctccgcaaggtggatgattacgccagtatgacagtcaacatcgtcctcccggattacgccgcggtgatgattgaggcattttcccgtttgtctaacgacgatgaggacgagacccaggtttatatccagaatgtctatgccattctattttctctgaaaaacgacccccgctccagcgtcagcctgttaaatacggctctggtaaacacgaaaaaactgaacaagtcccttcaggacatgcttcacaatatggataagttctttggcagcctgctggaacagaagaattacggtaccctgttaaaggagcacctggaaggatacgtgacggaaattgtcaataaaaaatatcatatattaaagacctcagacaatttttatctctacaagacagacattaaatcctggatagccgccatgcgggaggacagttcctggatcaataaaatgtgcgccaaaagcgcggcttcaaccagggggcagaagaagacgcccctgacagaatacgatattgtggagaagctggaccagctggagcgtgggtttgacgatatcgaacaccgcatctccaacatggacaaggagcacacccgttatgtcaaggcaacggtcacacgcctcaattacctgttaaaccaggaggacaacatgaaggggcttgtaatcaaacttctgaaccatatgtcggaatacggctgtccggaagatgaactgacagctgtaagcgccaggatgaatctgtcccagatgaccatactgtcagaaaaatccctgtacaaacgccgtaagaccaaggcggatttcacggaacagttaaaggatgaggaagaatccgaggaactgtccatggaggaagtcctgaacctgaacaaggtcaggaaccgttacagccagaaggagattgaagcatttatagaaggcagcatggcagacgggaaaatggtggtggacgaacaaaccatacattcagaccaggactttgaaaagctgatactggcctatgactattccaccaggagaaagagcccttataaggtggaagaggaagattcggaaatggtacacagcggcggctatatctatccgcggctggtatttgtcaggaggacaaaatag

SEQ ID NO: 43673 - DNA, 750 bp, Clostridium clostridioforme 90A8; identical to SEQ ID NO: 42749

SEQ ID NO: 43674 - DNA, 3390 bp, Clostridium clostridioforme 90A8; identical to SEQ ID NO: 42750

SEQ ID NO: 43675 - DNA, 1179 bp, Clostridium clostridioforme 90A8
atgaacgcaccgctggaatgtattatccgaaaatgcgagaacagcactgtggactggaaggagggcatgagcggaaaccgctccgtcatattcagggaacaggattttaaagaaacaggaaaacaggactttatgaaccagcttatgaagctggaaaaggaggggctgctgaaggtcaaatggtatcagtacggaaccgaggcagaaaaggtatggtaccgcctggaacagatggagactatataccaacgtctgggaaaaacaccgaagttcaagcgtgtcaatgcactgaaagaagaggtggaccgacagcttgctttgatacagagtcagtggatacgcagctattaccaatcctttctccagagtctggataaaggagatgttccaaaggcactggataccccgaagcgggaactgctgtttacctgtttcaaggccatagattgtctgcaggaaccagtctataaaaggattttcagcaaaaaatatctgggaaattccaaagcctttgaaaatcacctgcaatccaaaatcctatctgccgccagggtttatctggacacggtaaatgatgacatggatgactgtcaggtgctggaccagctcctgattaacggctatgcccaagagttagccgtgaaaggaaacctggtcattgaactggaaggaaacaagataaatctttccctgtttccctgcgggtttgtctttaacaaccagacactcaggaaagcatctatcccaccggaacagtccgttaccaaggtgattacagtggagaataaagcgaattatgaaagcatgccctatgaggaagggactctaatcatatattcacacggatacttttcaccggatgagcgtgcattcctgattcatctggaacgggttctgtccagcatccggacttcctgcgggacgacctatctccacaccggcgacttggattatggaggagtcaagatatttcaatatattaagaaacgcatcttcccaaatctgcagccgtatctcatggatacacaaacgcatgaacagtataaggcttacggtgaacccatagaaaccagtaaactggaaaaattgcagcggaccaccgaaccgctccttcagcccctcatagacaaaatctgtgctgaaaaacaggtgatagagcaggaatctttcctgttttga

SEQ ID NO: 43676 - DNA, 1383 bp, Clostridium clostridioforme 90A7
atgatactgatgaatgaaataccagaccggttctggagcctgttccgctctgtcaaccggtctacttacatagaggcacttcttaaaatcaacgaggagtatgagtacagcaattactttctcagcagggaagtctgcatccagcttttaagtgaatatttctcccggaaaaaatatgttatatggcaggacgagaccgaggatgactgggatgaactggaaccgcctgccaccagggttcttaactggctcctgaggaccggctggctccgcaaggtggatgattacgccagcatgacggtcaacatcgtcattccggattacgccgcggtgatgattgaggcattttcacgtttattaggcgatgatgaggatgagacccaggtttatatccagaatgtctatgccattctattttctctgaaaaacgacccccgctccagcgtcagcctgctaaatacggctctcgtaaacacgaaaaaactgaacaagtcccttcaggacatgctgcacaatatggataagttctttggcagcctgctggaacaaaaaaattacgggaccctgttaaaggagcacctggaaggatacgtgacggaaatcgtcaataaaaaatatcatatattaaagacctcggacaatttttatctctacaagacagatattaaatcctggatagccgccatgcgggaggacagttcctggataaataaaatgtgcgcaaaaagcgcggcttcaaccagaggccagaaaaaggcccccctgacagaatacgatattgtggagaagctggaccagctggagcgcgggttcgacgatatagaacaccgcatctccaacatggacaaggagcactcccgttacgtcaaggcaactgtcacacgcctcaactacctgttaaaccaggaggacaacatgaaggggcttgtaatcaggcttttaaaccatctgtcggaatacggctgcccggaagaggacctgacagctgtaagcgccaggatgaacctgtcccagatgaccatattgtcagaaaaatccctgtacaaacggcgtaagaccaaggcagactttacagaacagttaaaggatgaggaagaatccgaggaactgtccatggaggaagttctgaacctgaacaaggtcaggaaccgttacagccagaaggagattgaagcctttatagaaggcagcatgacagacggaaaaatggtggtggacgaacaaaccatacattcggaccaggactttgaaaaactgatactggcctatgactattccaccaggagaaagagtccttataaggtggaagaggaagattcggaaatggtgcactgcaaaggctatacctatccgcggctggtatttgtcaggagggcaagatag

SEQ ID NO: 43677 - DNA, 864 bp, Clostridium clostridioforme 90A7
gtggaaaacatggaattggaaaacagcatgacagacatcgcgccggcggccggatacaccggaaacggtgttccttactacgacaatctgatgcagtcggagcagatggaagtgacggaaatcatccgtctcctgtggcgccagacctttatactggaacacaaatatgacaagcgcaccggaagattccagtacaacagagactaccgggtatgcagcaaacacctggaatttatgaagaattattttgccatcagcggagtggagctgcgcgaaaacagccagatgggcgtcatgtacatccagggtgaaactgtggtgggagacaagctgccccgcctggccaccctgtatctgctggtgctgaagctgatatacgatgaacagatggaaagcgtttccaccagtgtcaatgtctatacatccctgcgggaaatccacgaaaagctgggcaattacaggctgttcaagaagcagcccgctcccacggatatccgccgggcagtgaccctcctgaaaaaataccaggtcatagaacctttggacctgctggaggacttaaaaagcgaaagccgcatgattatatatccctgcatcaacgtggtgctcatgggagacgatgtgcgctgccttctttcctcctttgaggatgattcggatgaaagcggagtccagttgaaagctgatttggaggaggaagaaccggatgccacggacgaaatgacggaggatgaaatggcggagggagaaatgtcacaggatgaaatggcggagaatgaaatgtcacaggatgagatgacgcaggatgaaatgacacagggtgaaatgacatctgaggaaggagaaccatggaacagaaaatag

SEQ ID NO: 43678 - DNA, 3393 bp, Clostridium clostridioforme 90A7
atggaacagaaaatagcaaacgatcgttttctcgccctttccaggatatgcttgaataactggcactatataaccaaaaggaccctgtcctttaatgatgaaattaatttttttaccggacattcgggcagcggcaaatccacagttatagacgccatgcagattgtgctctatgccaatacggacggcaggggtttcttcaacaaggcggctgccgatgactctgaccgcagcctgattgaatacttaagaggtatggtaaatatcggtgaaaacaacgagttttcctatctgcgcaaccagaatttttcctccaccattgtgttggagctgaaacgaagcgatacgggccagtgccagtgtgtgggaattgtctttgatgtggagacagccaccaatgagatatcccgccgtttcttctggcacaaaggacccatgtgggaaaatggctacaggggcgggaaacggaccatgtccatcgtggaaatagaagactatcttgaggcgaattacagccgggaggattatttcctgacctcccacaacgagcgattccgccgcatactctatgattcctacctggggggcctggactctgaaaaattcccccttctcttcaagcgggccatcccattcagaatgaatatcaaactggaggattttgtaaaagaatacatctgcatggagcaggatatccatatcgaggacatgcaggaaagtgttatgcagtacggccgcatgagaaagaaaatagaggacacatgtgcggaaatccaatccttaaaacagattgaggacagattcataaactatgctgacaaggaacagcagatcgaaaaatgttcctactttgtgcagaaattggagattctgcagcttcagtcagaggtccgtaccctggctgacagggcaaagctggcaggagaggacctgaaaaagcaggttcaggccagaagctcagtggacgaacagattggcgagctgacccggcagagcgacgagctgctgcgccgtattgcctccacaggatatgaggagctgaaaagccagcttaagagcctgaatgaactgttggaacagctgggaaaaagcgaagccaggtggcagcagaccgcaaccgccttaaagcgctgggaggaagaggacatcacctccaaccagaccctttgggatatggaggaatttgaaaaccgcaccattgacctggagacattggaacgactgaaaaaaaacatggtatccatgcgtacagatacggaaaaacagcatcaggaaactgccgccgctgtcagagagctcaaaaagcaggaaaagcagacaggagatgaactggaaaaacttcgttccggcagcaaagcctatcccaaatacctggaaaatgccaggagctacatccagcgccgccttctggagaaaactggtaagagcgtggatgtgcatgtgctggccgatctgctggatgtaaagagggatgagtggcgcaacgcggtggagggctatctgggaaacaataaattaaatctggtggtagctcctaaatacgccagagccgccctggaaatctacggggaactggataaaaaggaatacttcaatgtggctgtgctggatacggaaaaggcatcccagaaccagccccaggtacaaaaaggcgccctctcagaggaagtgactgtgagggagtcctacttaaaaccctatatagacctgctgcttggaaaggtcatcaagtgcaataccatagaagaattaagggaatgccgtatcggcatcaccagcggctgcatgctctaccacaccttccgcctgcagcatatcaacccggataactacactaaatttgcctatatcggcaaggacagcgtcaggaggcgtatccgtcttctggagcaggaactggcgagcctggaggaaaagaaaaagcctttggatgaaacggccagggagtccctaagaatcctggccctcccctggctctcagccgaacccgcggaatacatggactggctgaatgacataaacagctacaaagccaaggagcgtgaaaagaaaaaactgatacagaagctggagcttttaaaggagcaaaatgtagaccagttagaacgggaccgccaggcggttatcacgctctgcgacggtaaaaagagggagagggacagcctgaatgtgctgatccgtgacaaagagcgggagatagaagggtgccggaataagtccattgacagccagtcccttctcacgtcaaaggaacgggagttaaagcagaatcctgactatgacaacgaactgtcagcctatctgtcctccagggatacggtgcgctatgacagggaaaaggaaaccttcattgccaggtgcagcaaactgtctgaggccagggaagcagcttttcaggtgcttctggccgtcaggaccagctatatcaggacttaccccaaccgcaattttacggtaaacgccagagataatgctgcctatgaccgccttttaagcgacctgaaatgcgataatctggaagaatacaagcagaaagccacgcagcaggccaaatccgcggtagaacatttccgggatgactttatgtataaaatccgcagcgcaatccgggaggccctgatacgcaaggatgagctgaaccgcatcatcagccgcctggatttcggaaaggacaaataccagtttgttatcggccgcaacaaaggacctgacgggcgtttctatgatatgtttatggatgattcactggacatcaatccggccgacctcaattattcctatgaaaaccagatggacctgtttaccatagaacatgaaaaacagtatggggatttgatgaatgaactcatcagtattttcattcccccggaaaacgctaccccggagcagatggacgaggccaggcggaatatggataagtattcagattaccgcacctacctgtcctttgacatgcagcagcttatacagaatgaagacgaggtaatcaaaatacggctgagcaaaatgattaagaagaattcaggcggagaaggacagaacccgctgtatgtggctcttctggccagctttgcccaggcctaccgcatcaatctgccctccaaggtggagcgcaatccaaccatacgtctggtggtgctggacgaagcattttccaagatggacggggagaaggtggccagctgtattgaactcatccgcggccttgggttccaggccatcatcagcgccaccaatgacaaaatccagaattacgtggaaaacgtggacaagacctttgtctttgcaaatcccaacaaaaagtccatatccatccaggaatttgaacgggagcgctttgttgagctgatgcaggatatagaagatggggatgaattcgcggaaacgttataa

SEQ ID NO: 43679 - DNA, 1179 bp, Clostridium clostridioforme 90A7
atgaatgcaccgctggaatgtattatccaaaaatacgagaagagtactgtggactggaagaaaggtatgagcggaaaacgctctgtcatattcagggaacaggattttaaagagacaggaaaacgggactttatgaaccagcttatggaactggaaatggaagggctggtgaaggtcaaatggtatcagtacggtatcgaagcggagaaggcgtggtacagcctggaacagatggagactatataccaacgactgggaaaaataccgaagttcaagcgtatcgataaactgaaagaagaggtggaccaacagcttgctttgatacaaagccagtggatacgcagctattaccaatcctttctccaaagtctggataaaggagatgttcccaaagcactggataccccaaaacgggaactgctgtttacttgtttcaaggccatagattgtctacaggaaccagtctacaaaaggattttcagtaaaaaatatctgggtaaatccaaggcatttgaaaaacatctgcaatccaaagtcttatctgctgcgagggcttatctggacacggtaaatgatgacatggatgaccggcaggtactggatcagctgatgattaacggctatgcccaagagttagccgtgaaaggaaacctgattattgaactggcaggaaacaagataaatctttccctgtttcccagtggatttgtctttaataatcagacgctcagaagcgcatctatcccaccggagcagtccatttcaaaggtgattacagtggaaaataaagcgaattatgaaagcatgccctatgaggaagggactctaatcatatattcacacggatacttttctccggatgagcgtgcgtttctgattcagctggaacgggttttgtccggcattcatacttcctgtgggacggcctatctccacacaggcgacttggattatggaggagttaagatatttcaatatattaagaaacgcattttcccgaaactgtatccataccttatggatacacaaacgtatgatcagtatatggcctacagtgaacctatagaaaccagtaaactggaaaaactccagcggacagccgaacccctccttcagcccctcatagacaaaatctgcgccgaaaaacaggtgatagagcaggaatccttcctgttttga

SEQ ID NO: 43680 - DNA, 1383 bp, Clostridium clostridioforme 90A6; identical to SEQ ID NO: 42748

SEQ ID NO: 43681 - DNA, 750 bp, Clostridium clostridioforme 90A6; identical to SEQ ID NO: 42749

SEQ ID NO: 43682 - DNA, 3390 bp, Clostridium clostridioforme 90A6; identical to SEQ ID NO: 42750

SEQ ID NO: 43683 - DNA, 1179 bp, Clostridium clostridioforme 90A6; identical to SEQ ID NO: 42751

SEQ ID NO: 43684 - DNA, 1383 bp, Clostridium clostridioforme 90A4; identical to SEQ ID NO: 42748

SEQ ID NO: 43685 - DNA, 750 bp, Clostridium clostridioforme 90A4; identical to SEQ ID NO: 42749

SEQ ID NO: 43686 - DNA, 3390 bp, Clostridium clostridioforme 90A4; identical to SEQ ID NO: 42750

SEQ ID NO: 43687 - DNA, 1179 bp, Clostridium clostridioforme 90A4; identical to SEQ ID NO: 42751

SEQ ID NO: 43688 - DNA, 1383 bp, Clostridium clostridioforme 90A3; identical to SEQ ID NO: 42748

SEQ ID NO: 43689 - DNA, 750 bp, Clostridium clostridioforme 90A3; identical to SEQ ID NO: 42749

SEQ ID NO: 43690 - DNA, 3390 bp, Clostridium clostridioforme 90A3; identical to SEQ ID NO: 42750

SEQ ID NO: 43691 - DNA, 1179 bp, Clostridium clostridioforme 90A3; identical to SEQ ID NO: 42751

SEQ ID NO: 43692 - DNA, 1383 bp, Clostridium clostridioforme 90A1; identical to SEQ ID NO: 42748

SEQ ID NO: 43693 - DNA, 750 bp, Clostridium clostridioforme 90A1; identical to SEQ ID NO: 42749

SEQ ID NO: 43694 - DNA, 3390 bp, Clostridium clostridioforme 90A1; identical to SEQ ID NO: 42750

SEQ ID NO: 43695 - DNA, 1179 bp, Clostridium clostridioforme 90A1; identical to SEQ ID NO: 42751

SEQ ID NO: 43696 - DNA, 1383 bp, Clostridium bolteae 90B8
atgatactgatgaatgaaataccagaccggttctggagcctgttccgctctgtcaaccggtctacttacatagaggcacttcttaaaatcaacgaggagtatgagtacagcaattactttctcagcagggaagtctgcatccagcttttaagtgaatatttctcccagaaaaaatatgtcatatggcaggacgagaccgaggatgactgggatgaactggaaccgcctgccaccagggttcttaactggctcctgaggaccggctggctccgcaaggtggatgattacgccagcatgacggtcaacatcgtcattccggattacgccgcggtgatgattgaggcattttcacgtttattaggcgatgatgaggatgagacccaggtttatatccagaatgtctatgccattctattttctctgaaaaacgacccccgctccagcgtcagcctgctaaatacggctctcataaacacgaaaaaactgaacaagtcccttcaggacatgctgcacaatatggataagttctttggcagcctgctggaacaaaaaaattacgggaccctgttaaaggagcacctggaaggatacgtgacggaaatcgtcaataaaaaatatcatatattaaagacctcggacaatttttatctctacaagacagatattaaatcctggatagccgccatgcgggaggacagttcctggataaataaaatgtgcgcaaaaagcgcggcttcagccagaggccagaaaaagtcccccctgacagaatacgatattgtggagaagctggaccagctggagcgcgggttcgatgatatagaacaccgcatctccaacatggacaaggagcactcccgttatgtcaaggcaaccgtcacacgcctcaactacctgttaaaccaggaggacaacatgaaggggcttgtaatcaggcttttaaaccatctttcggaatacggctgcccggaagaggagctgacatctgtaagcgccaggatgaacctgtcccagatgaccatattgtcagaaaaatccctgtacaaacggcgtaagaccaaggcagactttacagaacagttaaaggatgaggaagaatccgaggaactgtccatggaggaagttctgaacctgaacaaggtcaggaaccgttacagccagaaggagattgaagcctttatagaaggcagcatgacagagggaaaaatggtggtggacgaacaaaccatacattcggaccaggactttgaaaaactgatactggcctatgactattccaccaggagaaagagtccttataaggtggaagaggaagattcggaaatggtgcactgcaaaggctatacctatccgcggctggtatttgtcaggagggcaagatag

SEQ ID NO: 43697 - DNA, 849 bp, Clostridium bolteae 90B8
gtggaaaacatggaattggaaaacagcatgacagacatcgcgccggcggccggatacaccggaaacggcgttccttactacgacaatctgatgcagtcggagcagatggaagtgacggaaatcatccgtctcctgtggcgccagacctttatactggaacacaaatatgacaagcgcaccggaagattccagtacaacagagactaccgggtatgcagcaaacacctggaatttatgaagaattattttgccatcagcggagtggagctgcgcgaaaacagccagatgggcgtcatgtacatccagggtgaaactgtggtgggagacaagctgccccgcctggccaccctgtatctgctggtgctgaagctgatatacgatgaacagatggaaagcgtttccaccagtgtcaatgtctatacatctctgcgggaaatccacgaaaagctgggcaattacaggctgttcaagaagcagcccgctctcacggaaatccgccgggcagtgaccctcctgaaaaaataccaggttatagaacctttggatctgctggaggacttaaaaagcgaaagccgcatgattatatatccctgcatcaacgtggtgctcatgggagacgatgtgcgctgccttctttcctcctttgaggatgattcggatgaaagcggagtccagttgaaagctgatttggaggaggaagaaccggacgccacggacggtatgacggaggacggaatggcggaggacgaaatggcggaggatgaaatgacagaggatgaaatgacagaggatgaaatgacagaggatgaaatggcatctgaggaaggagaaccatggaacagaaaatag

SEQ ID NO: 43698 - DNA, 3393 bp, Clostridium bolteae 90B8
atggaacagaaaatagcaaacgatcgttttctcgccctttccaggatatgtttgaataattggcactatataaccaaaaggaccctgtcctttaatgatgaaattaatttttttaccggacattcgggcagcggcaagtccacggttatagacgccatgcagattgtgctctatgccaatacggacggcaggggcttcttcaacaaggctgctgccgatgactctgaccgcagcctgattgaatacttaagaggtatggtaaatatcggtgaaaacaacgagttttcctatctgcgcaaccagaatttttcctctaccattgtgttggaactgaaacgaagcgatacgggccagtgccagtgcgtgggaattgtctttgatgtggagacaggcaccaatgagatatcccgccgtttcttctggcacaaaggacccatgtgggacaatggctacaggggcgggaaacggaccatgtccatcgtggaaatagaagactatcttcaggcgaattacagccgggaggattatttcctgacctcccacaacgagcgattccgccgcatactctacgattcctacctggggggcctggactctgaaaaattcccccttctcttcaagcgggccatcccattcagaatgaacatcaaactggaggattttgtaaaagaatacatctgcatggagcaggacatccatatcgaggacatgcaggaaagtgttatgcagtacggccgcatgagaaagaaaatagaggacacatgtgcggaaatccaatccttaaaacagattgaggacagattcctaacctatgctgacaaggaacagcagatcgaaaaatgttcctactttgtgcagaaactggagattctgcagcttcagtcagaggtccgtaccctggctgacagggcaaagctggcaggagaggacctgaaaaagcaggttcaggccagaagctcagtggacgaacagattggcgagctgacccggcagagcgacgagctgctgcgccgtattgcctccacagggtatgaggagctgaaaagccagcttaagagcctgaatgaactgttggaacagctgggaaaaagcgaagccaggtggcagcagaccgcaaccgccttaaagcgctgggaggaagaggacatcacctccaaccagaccctttgggatatggaggaatttgaaaaccgcaccattgacctggagacattggaacgactgaaaaaaaacatggtatccatgcgtacagatacggaaaaacagcatcaggaagctgctgccgctgtcagagagctcaaaaagcaggaaaagcagacaagagatgaactggaaaaacttcgttccggcagcaaagcctatcccaaatacctggaaaatgccaggagctacatccagcgccgccttctggagaaaactggtaagagcgtggatgtgcatgtgctggctgatctgctggacgtaaagagagatgagtggcgcaacgcggtggagggctatctgggaaacaataaattaaatctggtggtatctcctaaatacgccagagccgccctggaaatctacggggaactggataaaaaggaatacttcaatgtggctgtgctggatacggaaaaggcatcccagaaccagccccaggtacaaaaaggcgccctctcagaggaagtgactgtgagggactcctacttaaaaccttatatagacctgctgcttggaaaggtcatcaagtgcaataccatagatgaattaagggaatgccgtatcggcatcaccagcggctgcatgctctaccacaccttccgcctgcagcacatcaacccggataactacactaaatttgcctatatcggcaaggacagcgtcaggaggcgtatccgtcttctggagcaggaactggcgagcctggaggaaaagaaaaagcctttggaggaaacggccagggagtcccttagaatcctggccctcccctggctctcagccgaacccacggaatacatggactggctgaatgacataaacagctacaaagccaaggagcgtgaaaagaaaaaactgatacagaagctggagcttttaaaggagcaaaatgtagaccagttagaacgggaccgccaggcggttatcacgctctgcgacggcaaaaagagggagagggacagcctgaatgtgctgatccgtgacaaagagcgggagatagaagggtgccggaataagtccattgacagccagtcccttctcacgtcaaaggaacgggagttaaagcagaatcctgactatgacaacgaactgtcagcctatctgccctccagggatacggtgcgctatgacagggaaaaggaaaccttcattgccaggtgcagcaaactgtctgaggccagggaagcagcttttcaggagcttctgaccgtcaggaccagctatatcaggacttaccccaaccgcaattttacggtaaacgccagagataatgctgcctatgaccgccttttaagcgacctgaaatgcgataatctggaagaatacaagcagaaagccacgcagcaggccaaatccgcggtggaacatttccgggatgactttatgtataaaatccgcagcgcaatccgggaggccctgatacgcaaggatgagctgaaccgcatcatcagccgcctggatttcggaaaggacaaataccagtttgttatcggccgcaacaaaggacctgacgggcgtttctacgatatgtttatggatgattcactggacatcaatccggccgacctcaattattcctatgaaaaccagatggacctgtttaccatagagcatgaaaaacagtatggggatttgatgaatgaactcatcagtattttcattcccccggaaaacgccaccccggagcagatggacgaggccaggcggaacatggataagtattcagattaccgcacctacctgtcctttgacatgcagcagcttatacagaatgaagacgaggtaatcaaaatacggctgagcaaaatgattaagaagaattcaggcggagaaggacagaacccgctgtatgtggctcttctggccagctttgcccaggcctaccgcatcaatctgccctccaaggtggagcgcaatccaaccatacgtctggtggtgctggacgaagcattttccaagatggacggggagaaggtggccagctgtattgaactcatccgcggccttgggttccaggccatcatcagcgccaccaatgacaaaatccagaattacgtggaaaacgtggacaagacctttgtctttgcaaaccccaacaaaaagtccatatccatccaggaatttgaacgggagcgctttgttgagctgatgcaggatatagaagatggggatgaatttgcggaaacgttataa

SEQ ID NO: 43699 - DNA, 1179 bp, Clostridium bolteae 90B8
atgaatgcaccgctggaatgtattgtccaaaaatacgagaagagtactgtggactggaagaaaggtatgagcggaaaacgctctgtcatattcagggaacaggattttaaagagacaggaaaacgggactttatgaaccagcttatggaactggaaatggaagggctggtgaaggtcaaatggtatcagtacggtatcgaagcggagaaggcgtggtacagcctggaacagatggagactatataccaacgactgggaaaaataccgaagttcaagcgtatcaataaactgaaagaagaggtggaccaacagcttgctttgatacaaagccagtggatacgcagctattaccaatcctttctccaaagtctggataaaggagatgttcccaaagcactggataccccaaaacgggaactgctgtttacttgtttcaaggccatagattgtctacaggaaccagtctacaaaaggattttcagtaaaaaatatctgggtaaatccaaggcatttgaaaaacatctgcaatccaaagtcttatctgctgcgagggcttatctggacacggtaaatgatgacatggatgaccggcaggtactggatcagctgatgattaacggctatgcccaagagttagccgtgaaaggaaacctgattattgaactggcaggaaacaagataaatctttccctgtttcccagtggatttgtctttaataatcagacgctcagaagcgcatctatcccaccggagcagttcatttcaaaggtgattacagtggaaaataaagcgaattatgaaagcatgccctatgaggaagggactctaatcatatattcacacggatacttttctccggatgagcgtgcgtttctgattcagctggaacgggttttgtccggcattcatacttcctgtgggacggcctatctccacacaggcgacttggattatggtggagttaagatatttcaatatattaagaaacgcattttcccgaaactgtatccataccttatggatacacaaacgtatgatcagtatatggcctacggtgaacctatagaaaccagtaaactggaaaaactccagcggacagccgaaccgctccttcagcccctcatagacaaaatctgcgctgaaaaacaggtgatagagcaggaatccttcctgttttga

SEQ ID NO: 43700 - DNA, 1383 bp, Clostridium bolteae 90B7; identical to SEQ ID NO: 42131

SEQ ID NO: 43701 - DNA, 834 bp, Clostridium bolteae 90B7; identical to SEQ ID NO: 42132

SEQ ID NO: 43702 - DNA, 3393 bp, Clostridium bolteae 90B7
atggaacagaaaatagcaaacgatcgttttctcgccctttccaggatatgtttgaataactggcactatataaccaaaaggaccctgtcctttaatgatgaaattaatttttttaccggacattcgggcagcggcaagtccacggttatagacgccatgcagattgtgctctatgccaatacggacggcaggggcttcttcaacaaggcggctgccgatgactctgaccgcagcctgattgaatacttaagaggtatggtaaatatcggtgaaaacaacgagttttcctatctgcgcaaccagaatttttcctctaccattgtgttggaactgaaacgaagcgatacgggccagtgccagtgcgtgggaattgtctttgatgtggagacagccaccaatgagatatcccgccgtttcttctggcacaaaggacccatgtgggacaatggctacaggggcgggaaacggaccatgtccatcgtggaaatagaagactatcttcaggcgaattacagccgggaggattatttcctgacctcccacaacgagcgattccgccgcatactctacgattcctacctggggggcctggactctgaaaaattcccccttctcttcaagcgggccatcccattcagaatgaacatcaaactggaggattttgtaaaagaatatatctgcatggagcaggacatccatatcgaggacatgcaggaaagtgttatgcagtacggccgcatgagaaagaaaatagaggacacatgtgcggaaatccaatccttaaaacagattgaggacagattcctaacctatgctgacaaggaacagcagatcgaaaaatgttcctactttgtacagaaactggagattctgcagcttcagtcagaggtccgtaccctggctgacagggcaaagctggcaggagaggacctgaaaaagcaggttcaggccagaagttcagtggacgaacagattggcgagctgacccggcagagcgacgagctgctgcgccgtattgcctccacagggtatgaggagctgaaaagccagcttaagagcctgaatgaactgttggaacagctgggaaaaagcgaatccaggtggcagcagaccgcaaccgccttaaagcgctgggaggaagaggacatcacctccaaccagaccctttgggatatggaggaatttgaaaaccgcaccattgacctggagacattggaacgactgaaaaaaaacatggtatccatgcgtacagatacggaaaaacagcatcaggaagctgctgccgctgtcagagagctcaaaaagcaggaaaagcagacaagagatgaactggaaaaacttcgttccggcagcaaagcctatcccaaatacctggaaaatgccaggagctacatccagcgccgccttctggagaaaactggtaagagcgtggatgtgcatgtgctggctgatctgctggacgtaaagagagatgagtggcgcaacgcggtggagggctatctgggaaacaataaattaaatctggtggtatctcctaaatacgccagagccgccctggaaatctacggggaactggataaaaaggaatacttcaatgtggctgtgctggatacggaaaaggcatcccagaaccagccccaggtacaaaaaggcgccctctcagaggaagtgactgtgagggagtcctacttaaaaccttatatagacctgctgcttggaaaggtcatcaagtgcaataccatagatgaattaagggaatgccgtatcggcatcaccagcggctgcatgctctaccacaccttccgcctgcagcacatcaacccggataactacactaaatttgcctatatcggcaaggacagcgtcaggaggcgtatccgtcttctggagcaggaactggcgagcctggaggaaaagaaaaagcctttggaggaaacggccagggagtcccttagaatcctggccctcccctggctctcagccgaacccacggaatacatggactggctgaatgacataaacagctacaaagccaaggagcgtgaaaagaaaaaactgatacagaagctggagcttttaaaggagcaaaatgtagaccagttagaacgggaccgccaggcggttatcacgctctgcgacggcaaaaagagggagagggacagcctgaatgtgctgatccgtgacaaagagcgtgagatagaagggtgccggaataagtccattgacagccagtcccttctcacgtcaaaggaacgggagttaaagcagaatcctgactatgacaacgaactgtcagcctatctgccctccagggatacggtgcgctatgacagggaaaaagaaaccttcattgccaggtgcagcaaactgtctgaggccagggaagcagcttttcaggagcttctggccgtcaggaccagctatatcaggacttaccccaaccgcaatttcacggtaaacgccagagataacgctgcctatgaccgccttttaagcgacctgaaatgcgataatctggaagaatacaagcagaaagccacgcagcaggccaaatccgcggtagaacatttccgggatgactttatgtataaaatccgcagcgcaatccgggaggccctgatacgcaaggatgagctgaaccgcatcatcagccgcctggatttcggaaaggacaaataccagtttgttatcggccgcaacaaaggacctgacgggcgtttctacgatatgtttatggatgattcactggacatcaatccggccgacctcaattattcctatgaaaaccagatggacctgtttaccatagagcatgaaaaacagtatggggatttgatgaatgaactcatcagtattttcattcccccggaaaacgccaccccggagcagatggacgaggccaggcggaatatggataagtattcagattaccgcacctacctgtcctttgacatgcagcagcttatacagaatgaagacgaggtaatcaaaatacggctgagcaaaatgattaagaagaattcaggcggagaaggccagaacccgctgtatgtggctcttctggccagctttgcccaggcctaccgcatcaatctgccctccaaggtggagcgcaatccaaccatacgtctggtggtgctggacgaagcattttccaagatggatggggagaaggtggccagctgtattgaactcatccgcggccttgggttccaggccatcatcagcgccaccaatgacaaaatccagaactacgtggaaaacgtggacaagacctttgtctttgcaaaccccaacaaaaagtccatatccatccaggaatttgaacgggagcgctttgttgagctgatgcaggatatagaagatggggatgaatttgcggatacgttataa

SEQ ID NO: 43703 - DNA, 1179 bp, Clostridium bolteae 90B7; identical to SEQ ID NO: 42134

SEQ ID NO: 43704 - DNA, 1383 bp, Clostridium bolteae 90B3
atgatactgatgaatgaaataccagaccggttctggagcctgttccgctctgtcaaccggtctacttacatagaggcacttcttaaaatcaacgaggagtatgagtacagcaattactttctcagcagggaagtctgcatccagcttttaagtgaatatttctcccggaaaaaatatgttatatggcaggatgagaccgaggatgactgggatgaactggaaccgcctgccaccagggttcttaactggctcctgaggaccggctggctccgcaaggtggatgattacgccagcatgacggtcaacatcgtcattccggattacgccgcggtgatgattgaggcattttcacgtttattaggcgatgatgaggatgagacccaggtttatatccagaatgtctatgccattctattttctctgaaaaacgacccccgctccagcgtcagcctgctaaatacggctctcataaacacgaaaaaactgaacaagtcccttcaggacatgctgcacaatatggataagttttttggcagcctgctggaacaaaagaattacgggaccctgttaaaggagcacctggaaggatacgtgacggaaatcgtcaataaaaaatatcatatattaaagacctcggacaatttttatctctacaagacagatattaaatcctggatagccgccatgcgggaggacagttcctggataaataaaatgtgcgcaaaaagcgcggcttcaaccagaggccagaaaaaggcccccctgacagaatacgatattgtggagaagctggaccagctggagcgcgggttcgacgatatagaacaccgcatctccaacatggacaaggagcactcccgttacgtcaaggcaactgtcacacgcctcaactacctgttaaaccaggaggacaacatgaaggggcttgtaatcaggcttttaaaccatctgtcggaatacggctgcccggatgaggacctgacagctgtaagcgccaggatgaacctgtcccagatgaccatattgtcagaaaaatccctgtacaaacggcgtaagaccaaggcagactttacagaacagttaaaggatgaggaagaatccgaggagctgtccatggaggaagttctgaacctgaacaaggtcaggaaccgttacagccagaaggagattgaagcctttatagaaggcagcatgacagacggaaaaatggtggtgaacgaacaaaccatacattcggaccaggactttgaaaaactgatactggcctatgactattccaccaggagaaaaagtccttataaggtggaagaggaagattcggaaatggtgcactgcaaaggctatacctatccgcggctggtatttgtcaggaggacaagatag

SEQ ID NO: 43705 - DNA, 849 bp, Clostridium bolteae 90B3
gtggaaaacatggaattggaaaacagcatgacagacatcgcgccggcggccggatacaccggaaacggtgttccttactacgacaatctgatgcagtcggaacagatggaagtgacggaaatcatccgtctcctgtggcgccagacctttatactggaacacaaatatgacaagcgcaccggaagattccagtacaacagagactaccgggtatgcagcaaacacctggaatttatgaagaattattttgccatcagcggagtggagctgcgcgaaaacagccagatgggcgtcatgtacatccagggtgaaactgtggtgggagacaagctgccccgcctggccaccctgtatctgctggtgctgaagctgatatacgatgaacagatggaaagcgtttccaccagtgtcaatgtctatacatccctgcgggaaatccacgaaaagctgggcaattacaggctgttcaagaagcagcccgctcccacggatatccgccgggcagtgaccctcctgaaaaaataccaggtcatagaacctttggacctgctggaggacttaaaaagcgaaagccgcatgattatatatccctgcatcaacgtagtgctcatgggagacgatgtgcgctgccttctttcctcctttgaggatgattcggatgaaagcggagtccagttgaaagctgatttggaggaggaagaaccggatgccacggacgaaatgacggaggatgaaatggcggaggatgaaatgtcacaggatgaaatgtcacaggatgagatgacgcaggatgaaatgacacagggtgaaatgacatctgaggaaggagaaccatggaacagaaaatag

SEQ ID NO: 43706 - DNA, 3393 bp, Clostridium bolteae 90B3
atggaacagaaaatagcaaacgatcgttttctcgccctttccaggatatgcttgaataactggcactatataaccaaaaggaccctgtcctttaatgatgaaattaatttttttaccggacattcgggcagcggcaaatccacagttatagacgccatgcagattgtgctctatgccaatacggacggcaggggtttcttcaacaaggcggctgccgatgactctgaccgcagcctgattgaatacttaagaggtatggtaaatatcggtgaaaacaacgagttttcctatctgcgcaaccagaatttttcctccaccattgtgttggagctgaaacgaagcgatacgggccagtgccagtgtgtgggaattgtctttgatgtggagacagccaccaatgagatatcccgccgtttcttctggcacaaaggacccatgtgggaaaatggctacaggggcgggaaacggaccatgtccatcgtggaaatagaagactatcttcaggcgaattacagccgggaggattatttcctgacctcccacaacgagcgattccgccgcatactctatgattcctacctggggggcctggactctgaaaaattcccccttctcttcaagcgggccatcccattcagaatgaatatcaaactggaggattttgtaaaagaatacatctgcatggagcaggatatccatatcgaggacatgcaggaaagtgttatgcagtacggccgcatgagaaagaaaatagaggacacatgtgcggaaatccaatccttaaaacagattgaggacagattcataacctatgctgacaaggaacagcagatcgaaaaatgttcctactttgtgcagaaattggagattctgcagcttcagtcagaggtccgtaccctggctgacagggcaaagctggcaggagaggacctgaaaaagcaggttcaggccagaagctcagtggacgaacagattggcgagctgacccggcagagcgacgagctgctgcgccgtattgcctccacaggatatgaggagctgaaaagccagcttaagagcctgaatgaactgttggaacagctgggaaaaagcgaagccaggtggcagcagaccgcaaccgccttaaagcgctgggaggaagaggacatcacctccaaccagaccctttgggatatggaggaatttgaaaaccgcaccattgacctggagacattggaacgactgaaaaaaaacatggtatccatgcgtacagatacggaaaaacagcatcaggaaactgccgccgctgtcagagagctcaaaaagcaggaaaagcagacaggagatgaactggaaaaacttcgttccggcagcaaagcctatcccaaatacctggaaaatgccaggagctacatccagcgccgccttctggagaaaactggtaagagcgtggatgtgcatgtgctggccgatctgctggacgtaaagagggatgagtggcgcaacgcggtggagggctatctgggaaacaataaattaaatctggtggtagctcctaaatacgccagatccgccctggaaatctacggggaactggataaaaaggaatacttcaatgtggctgtgctggatacggaaaaggcatcccagaaccagccccaggtacaaaaaggcgccctctcagaggaagtgactgtgagggagtcctacttaaaaccctatatagacctgctgcttggaaaggttatcaagtgcaataccatagaagaattaagggaatgccgtatcggcatcaccagcggctgcatgctctaccacaccttccgcctgcagcatatcaacccggataactacactaaatttgcctatatcggcaaggacagcgtcaggaggcgtatccgtcttctggagcaggaactggcgagcctggaggaaaagaaaaagcctttggatgaaacggccagggagtcccttagaatcctggccctcccctggctctcagccgaacccgcggaatacatggactggctgaatgacataaacagctacaaagccaaggagcgtgaaaagaaaaaactgatacagaagctggagcttttaaaggagcaaaatgtagaccagttagaacgggaccgccaggcggttatcacgctctgcgacggtaaaaagagggagagggacagcctgaatgtgctgatccgtgacaaagagcgggagatagaagggtgccggaataagtccattgacagccagtcccttctcacgtcaaaggaacgggagttaaagcagaatcctgactatgacaacgaactgtcagcctatctgtcctccagggatacggtgcgctatgacagggaaaaggaaaccttcattgccaggtgcagcaaactgtctgaggccagggaagcagcttttcaggcgcttctggccgtcaggaccagctatatcaggacttaccccaaccgcaattttacggtaaacgccagagataatgctgcctatgaccgccttttaagcgacctgaaatgcgataatctggaagaatacaagcagaaagccacgcagcaggccaaatccgcggtagaacatttccgggatgactttatgtataaaatccgcagcgcaatccgggaggccctgatacgcaaggatgagctgaaccgcatcatcagccgcctggatttcggaaaggacaaataccagtttgttatcggccgcaacaaaggacctgacgggcgtttctacgatatgtttatggatgattcactggacatcaatccggccgacctcaattattcttatgaaaaccagatggacctgtttaccatagaacatgaaaaacagtatggggatttgatgaatgaactcatcagtattttcattcccccggaaaacgccaccccggagcagatggacgaggccaggcggaatatggataagtattcagattaccgcacctacctgtcctttgacatgcagcagcttatacagaatgaagacgaggtaatcaaaatacggctgagcaaaatgattaagaagaattccggcggagaaggccagaacccgctgtatgtggctcttctggccagctttgcccaggcctaccgcatcaatctgccctccaaggtggagcgcaatccaaccatacgtctggtggtgctggacgaagcattttccaagatggacggggagaaggtggccagctgtattgaactcatccgcggccttgggttccaggccatcatcagcgccaccaatgacaaaatccagaattacgtggaaaacgtggacaagacctttgtctttgcaaatcccaacaaaaagtccatatccatccaggaatttgaacgggagcgctttgttgagctgatgcaggatatagaagatggggatgaatttgcggaaacgttataa

SEQ ID NO: 43707 - DNA, 1383 bp, Clostridium bolteae 90A9; identical to SEQ ID NO: 43704

SEQ ID NO: 43708 - DNA, 849 bp, Clostridium bolteae 90A9; identical to SEQ ID NO: 43705

SEQ ID NO: 43709 - DNA, 3393 bp, Clostridium bolteae 90A9; identical to SEQ ID NO: 43706

SEQ ID NO: 43710 - DNA, 1383 bp, Clostridium bolteae 90A5; identical to SEQ ID NO: 42131

SEQ ID NO: 43711 - DNA, 834 bp, Clostridium bolteae 90A5; identical to SEQ ID NO: 42132

SEQ ID NO: 43712 - DNA, 3393 bp, Clostridium bolteae 90A5; identical to SEQ ID NO: 43702

SEQ ID NO: 43713 - DNA, 1179 bp, Clostridium bolteae 90A5; identical to SEQ ID NO: 42134

SEQ ID NO: 43714 - DNA, 1473 bp, Xanthomonas fragariae LMG 25863
atgaaacagcgtgcacgcatcgcccgctatcgcacgctgcgtgagcagccgctgtggaaactgctcgcggccgaccaggcgccggaagtgatcggtctgctgcagacgctgttgctcgacagcgagcgacgcttgccggcatcagtgctgcacgagcgcctgcaacgcatgctcaacgaactgaatgtcgatcagcttttgcgcgaactgccgcgtaccgcacaggtctatatcgcgcattggttgacccagggctggctggaacggcgtctgccagagggcgcacagcaagaagaatacgaactgtccacccaggccatacaggcgattcgctttgccgatggcctggagcacgcccgtggcgccgccaccgaaagccgcctggcgttggtgatgcaacagttgtcgcaactggccgcgctgaccgagaccaaccctgatgcccggttgtcggcgctgcgcgacgaacgcgatcgtatcgatgcggaaatcgcacgcgtgtcctccggcaaggccgattcgttggacggcaagcgggcactggagcgcgcgcgccaagtgattgcgctggccgacgagctgaccgaggacttccgccgcgtgcgcgatgatttcgagcagctcaatcggcaatttcgcgagcgcatcatcgacgacgagggcgaacgcggcgatgtgctgaccaagctgtttgagggtgtggacgtgatcggcgacagcgaggccgggcttagttttcaggccttctgggccttgctcaacgatgccgaacaaagtgcgcagctggatgcggcgctggagacggtgctggcgcgcgccttcgcgcgcaagctccatcgccgcgagcgcagcttcctgcgcgggcttaccggcaccatgctcgaacgcggcggccaggtgcacgatgtgctgcagcatttcgcgcgcagcctgcgcggcttcgtgcagagccgcggttatctggaacagcgccggctcaatcagttgctcaagcaggcccaggccgaagcgcttggcctgcgcgatcacttgcgcgcacagcacctgatcgggtgcgatctcagcctgaccaccagccggctgcgctcgttgtcgcaatggcgcatgcacgatccgcgtcaggtgcaggtcgatggcagcatccagcgcaacgatgcggccaccatttcgctggacagcgtgggcgatctggtcgcgcagtcggagatcgatttccgcagtttgcgccgcaacctgtacgcgctgttgggcgataacgcgcagctgtcgatcgcccaggtgctggcgcagcggcaggccgagcagggcctgggcagcgtgattggctatttgtcgctgggcacgcggcatggccaggtcgacgcacaccaaagcgagaccgcgcaatggtgcggcagcgacggccaatggcggcgcgcgcgtatcccgttagtgtggttcagccaggagaaacgcaatgaattggcaggctga

SEQ ID NO: 43715 - DNA, 702 bp, Xanthomonas fragariae LMG 25863
atgaattggcaggctgacaacgccgcagcagacgctcaggcacaggccgaccatgctgatgatcttgcaggcagcggtgcggacacgggcaccggtctgttccctggcgacagcggccggcttgcgcctgatgcccgacgcgtgttgtgccagctgctcagcgggcccagcgtggacgtgcagcgccacagcacgttgtggccggcgttgctgcggcatgaagcggccgtgcgcagcagcctggccgacctgttcctggagttggtgctggaccgcgaagccggcgtcgcgttcacccgtcaggccgagaccggcgagttggaagcgccggtgctgttgcgttcttcgccgctgaccttcatcgactcggtgctgttgctgcatctgcgccagcaactgaccgaagccgatgcgcgcggcgtgcgtgcggtagtcgaggacgcagcgctgagcgaagcactggcggtgtacgagaaaaacctgtccaccgaccgcgccgggttcatgcggcgggtcggcaacgccatccagaaaatgaaggacaaccacgtgcttacccgcctgcgcggcgacgacaaccgctatgagctctcgccgacgctcgagctgctgttctccgcagaggccgtatccgcgctggcgcaggtttatcgccagttgcgcgagcagcccggtagcctcgtcgaggtgggcgagtcctag

SEQ ID NO: 43716 - DNA, 1182 bp, Xanthomonas fragariae LMG 25863
atggctgcagcctcgcccatgctgctgcttgccgccgcgctgcaggtcttgcgcgggcaatggcagcgcgcacgcgggcagtggctgatcggcgagggcacgccgcaacccatctcgttgcgggtgccgacccagacccaagccatcgcaaggttcgatgcctttggccactggctgcagagctggaaccgcactgaactgccgggccgtgtggactatcgcgaggtggcttggccgcaactggggccgcaacgtctgccgcaagcctgggtgctagacgatgcggcccaggccgctgccgcgcttggcgaggccgagcgctggcagcgcgccagccaacgtggagcggcgctgcatgcgcgctggccgcaggcggccgccctggcggcacggctacgtcgtcaattcgatctgctggccgactggccggaggcggatttttcgcggttggtggcggtggtcgattggctgcaccggcatcgcgacagtgggttattcctgcgccaattgcccattgccggcatcgacagcaaatggatcgaatcccgccgcggggtggtcgccgattggttagccggcctgcgcggcatcgcggggccgcgcagcttcgctagcctttcggggctgcgcgccgcgccggatcgcgtgcgcttgcgattgctcgatccggcgctgcgtcaacacgtgggtgggttggaagacatcaccgcaccgatcgcgcaaatcgccgcgctgcacctgccggcgcggcgcgtactgatcgtggaaaaccacgagaccggtctggcctgcgaggcgctgccgggcacggtcgtgctgatggcgcgtggttacgccatcgagtacgtgcgcagcatcgactggctacgcgcgttgccgctgtattactggggcgacatcgacacccatggcttggcgatcctgcaccgcctgcgcacatatgcgccaccgaccgtcgcggtgttgatggaccaggccactctggaggcaaccccgcgttccctgtgggggcacgaatgcgaacagcatccggagcagcgcctggatgcgctcaacgacgaggagcagtgcctgtacgcggggctgcgcagcggccggttcggcccttctcctcgcctggagcaggagcgtatcgcttgggactacgcctggccgtgcatccaggccgccttggccgattga

SEQ ID NO: 43717 - DNA, 1353 bp, Azotobacter vinelandii CA; identical to SEQ ID NO: 41895

SEQ ID NO: 43718 - DNA, 663 bp, Azotobacter vinelandii CA; identical to SEQ ID NO: 41896

SEQ ID NO: 43719 - DNA, 2940 bp, Azotobacter vinelandii CA; identical to SEQ ID NO: 41897

SEQ ID NO: 43720 - DNA, 1353 bp, Azotobacter vinelandii CA6; identical to SEQ ID NO: 41895

SEQ ID NO: 43721 - DNA, 663 bp, Azotobacter vinelandii CA6; identical to SEQ ID NO: 41896

SEQ ID NO: 43722 - DNA, 2940 bp, Azotobacter vinelandii CA6; identical to SEQ ID NO: 41897

SEQ ID NO: 43723 - DNA, 1482 bp, Rhodococcus sp. EsD8
gtgtccaccgccgacctgcaccgcctggcgcgtctgcgtcaggagcacccggcgtgggcgctgctgcggtcggacaatgcggccgcggtgctggcgctgctgggccggcacttcgatcgcggcacgcgacggctgccggccccggagctgttcgcccgcctcgatgcggacctgcaggaactgcgcgacgagggcttcgagctgccgcgcaccggtcaggcctattgtgcggactgggtgcgcgcgggttacctgctgcgccgcgcgagcgccgacgcccgcgaggagaccctcgaaccgaccgaggcgacgttcgccgcgctcacgttcgccgcgggcctgacgaccgccacgagctcggtcaccgagtcgcggctgaccaccctgtcgagccagctccaggcgctggcgcgggactcggaccctcgcagtgagagccgcctggcggcgttgcgggccgagcgcgacgagctggaccggcagatcgccgccgtcgagtccggggattttcccgtgctggacgggaaccgcgcggtggaacggtccgcggagatcctggcgctggccggggagatcccgggtgacttcgcgcgggtgcgcgccgagttggaggcgctgaaccgggagctgcgggcccggatcctcgacgacaagggcgaccgcggcgacactctcggcgaggtgttccgcggggtcgatctgatcggcagctccgacgccggccgcagcttcgccggcttctacgacatgatcatcgatccggagcggtcgtcgcagctcgacgactggatcgaggcggtgctgcaacgcccgttcgcgcagcagctcaccaccgagcaacgcaaccggttccgcaccctgctcaccgagatggaggacgccggcggcgaggtccacgcgacgatgacgtcgctgtcgcgttcgctgcgccacttcgtgcagtcccgccactacgaggagcaccggcgtctgcagcggctgttgcgctcggcccagcagcaggccctgcaggtggcgcagcgccgcaaaccatacgacctgctggacctcgagctggtgcgggtcggcatgggcatcgactccgtggcggcgctgcggctgcacaacccggccgacgacctggtggccgagccggtggtgacgcagccggtcggcgaggtggatctggaggagctgcgccgcatcgtccgcgaatcggagatcgacatggacgagctggccggcaacgtcgccgccacgctacgttcccgcggcagcgccacgatcggcgacgtgctgcgcgatcatcccgccacgcagggtctggcaagcgcggtgggtctgctggtgctcgccgcggagcacggtcaccgcatcgacggcaccgaggagatcgcgtggacgtccccgtcgggcgcgacccgcgtcgcgacggtgcggcggcacctgttcgacccgaccgacaccgagttcaccacccgcatcaccgaggacgcgtcatga

SEQ ID NO: 43724 - DNA, 606 bp, Rhodococcus sp. EsD8
atgaccgaatcgaccacacgcaccgggctgtatgcgggcgacaccggcgaactcgacctcgacacccgccgcgcgctggtgcaactgctcaagggaccgctcgtcaccgccgacaagcacccggaggtgtggcggacggtgatccgcgacgagcgggtgctgcggtcccggctcgcggacgtgtttctcgatctcgtcgtcgacgaggacgatcagctcgcgttcacccgccccgccgacacgggcgaccacaaggccccgacggtgctgcgcaccgagcggctcacgttcatggacaccgtgatgctgctggcgttgcggcaccggctgctgcgcgcccagccgggcgagcgggtgatcgtcgacttcgacgaggtggccgggcagttggagatgtaccgcgctgcgacgagcaccgatccggccggcttccgcaaacgggtcaacgcgtcgtgggagaagttgaagaagtacacgctgctggcatcgacgtccacggagggccggatggaggtctctccggtgttgcggcagttgtgcgacgccgatcaggtcgccgccgtcgaggccgagttccggcgcatcgtcgaggaggacgcgccgtga

SEQ ID NO: 43725 - DNA, 3300 bp, Rhodococcus sp. EsD8
gtgagcgccgcccccatccaccccggccagttccggctcgcgcgggtgcaggtggtcaactggggcaccctgcacgggcatcacgacattcccgtggcccgcaagggttttctcatcaccggggcgtccggctcgggcaagtcgacgctcatcgatgcgatctcgacggtgctcatgccgggcggcagcgtgcggttcaacgcggccgcgcaggagtcggcggccggatcgggccgcaacttcgtcagctacatccgtggcgcgtggcggcgcgaggccgacgccgacaccgacgcgctcaccgcctcatatctgcgcaccggcgccacgtggagcgcggtcgcactgacgtacaacgccgccgacggcacggccccggtgaccctggtcaagctcatgcacctgcgccggggcgccaacgccaacaacgagatctcgcacctgcacctgatcctcgacaccgacgtggagctgaccgacctcgaaccgttcgtcacgcggggagtcgacacccggggcatccgcaagcgctggcctgatgcggtcgtgaaccccagctacgcgccgttcgcccgcgcgttccggtccaagctcggcatctcgtcggaggccgcgcagcggctgctgcaccgcacgctgtccgcgaagagcctgaacagcctcgaccaactgttgcgcgactacatgctcgacgagccgccaacgttcgcgatggccgagcgggccaccacgcagttccgcgagctgcgcgaggcgcatcgcgtcgtcgtcgacgcccgtcgtcaggtcgagacgctcgaaccgctcgtcgcgctggccgacgcccgtcgcaccggcctgcagtcccagcgcgacctgcaggacgagaccgatcacctcgacgcggtgcacgcccggatgacggtggacctgctcagcgacaggctcgacgagacgcgggcgcagacgggtctgctgcaggccgccgcggacaagaccgccgacgaggccgaccgcgccggcgaacgcaccctcgatctgcgggtgcgcgccgagagcgccggcgacggccggctcgcgaccctccgcgtgcacaaggagaccgccgagaccgcgctcgaacgaattacccagcaacgcaaacggttcgacgtcgccctcgcgcactgggaggcggagacaccggccaccgcggacgacttcgcgcatctgcaggcccagctcgagagggagctgcgcgagctcgacgcgaccgccgacatgcgcagggccgagctgtacgaggtggccggcgcgctcgccgagcgccggaagacgatccgcgaactgatcgccgaccgggaggtcctggcccggcgccggtcgaacctcgatcccgacctgctgcgcgctcgggaactggtgtgctcggcggccggactcggtgaggacgccctgcacttcgcgggcgagctgatcgcggtgcgcgccgagcacgccgagtggacgggtccgatcgagcgggtcctgggcggattcgggcgcaccctgctggtgcccgacgagctgtacccccgggtggccgccgccgtcgacgcacaccatctcggtgcccgcctcgtataccggcgagtccgcacgggcgtcggtgcgccggacgcacccaccaccgccgacggctcgctcgtccgcaagctcgaggtgcgccccggcccgctcgccgcgtggctgcagcaccacctggcggaccgcttcgactacgcgtgcgtcgacaccgccgacgacctgcgccgcgtcccgcggggcgtgacccgggccggtcaggtcaagcacggtggcgaccggcacgagaaggacgaccggcggcgcatcgacgaccgcagccgctgggtcctcggcttcgacaacgaggccaagctcgccgacctgcgccggcgcatcggcgacgccgagaccgacgtcgacgcgctgcaacggcggcaggaggctctcgagcgtgccgagtccgcgatccagctgcgccgggaggccgccgcggtgatccgcgagtccgcgtggtccgacgtcgacgtcgcggcggcggggaacgcggtggacgcgatcgaggaacggctgcgcgagtggatgcagggccacaccgaatacgccacgctcacagcggatctggatcgcgccgagagcgaggaacgcgccgcccggcaggcgcacaccgcggcgctggccaagctcgaacagcaccgggacgagctgacccgggtgcaggcgcggctcgacgaggcgcaggcccacgccggcacggcggtgcccgacccgatcttcgcgcgcatccggacccggttcgccgcggcggtgcgccgcgtcaccgtcgacaacatcgaccgggccctgagcacggtgggtcgcgcgatcaacgtggagatgcggtccgcgcagcacgacaccgcggacgccgagcgccgcatcaccgccatcctcaccggctaccttgccgagtgggaggcgcggcgcgccgagatgcgctccgaggccgagtacgtcgacgacgccctcgcggtgctcgcccggctgcgcagcgacggcctgcccgcctacgaggacgagttcttccggctgctgcgcgagcagtcgcaccgcaacatcggggagctggcgcgcgcgatccgtaaggctccgggtgagatccgctcacgtatcgagccggtgaacgaatcgctgcgccgctcgccgttcgacaccgaccggatcctgcgcatcgacgtcaaggaccggcgctcccccgccgcgtcggagttcctggcggagctgctgcagatcacgagcggcgcgtggaaggaggaggaccgggccgcggcggagcggcggttcgaacagatggcggcggtgctcgaacggctcgactccggcgagcccgccgacctgcggtggaagcgcctcgtgctcgacacccgcctgcacgtcggattcatcggggtggaggtcgacccggagggcaacgacgccaactatcacgactcgagctccggcctgtcgggtggacaggcgcagaagctggtgttcttctgcctcgcggcggcgctgcgctatcagctggccgccgccggcgaggagctgccgcgctacggcaccgtgatcctcgacgaggcgttcgaccgcgccgaccccgcgtacacgcgacgggcgctggacgtgttcacccagttcgggttccacatggtgctcgccaccccgctcaagctgctgcagaccctcgacgactacatcgacggcgtggccgcggtgagcatccgcgacaagcgctactcgcagatcgcactgttgccgatccgcggggacggcacgtga

SEQ ID NO: 43726 - DNA, 1137 bp, Rhodococcus sp. EsD8
gtgagcgcactgtgcgtgccgccgtccgcggtcgccggcaaggcccaggttgcctaccgcagccgccgcacccgatggatcaccgatcccactgcggccgaatcggattcgctgtcgatcgggctgcatccgccgtccgagcggcgggtcgcgcaggatcccgacgccgtcgtcgcgtgggtgcgtgcctggcaccgctacccgggtgccgggcgggtcgagtgggagacgcggcactggccgagcttcggcacgcaggaagtgccgatgcgcctgctgctttcgggcgcgaccgagatcgccgccgcggccgcacgagcacccgagtggcgcaccctcaccgaacggcaggcgcggctgctcgacggactcggccccggcaccgcgacgctcgcgacagcgatcgccgcgacgcatgcccgctggctggagctggacgagccggacttcgcgcggctcgtcgcagcggtgcgctggctggccgagcatccgtcgtcggggctgttcgtccgccagctgccggtgcccggcgtcgacaccaaatgggtgtcgcggcaccgcggcctggtcgagacgctgctcgacggcgtgcggggcgatcgtgacctgggggtgcggtcgctgccgcggatgtgcgaggtggccgtgtgcgaccgggcgcagctggcgggggcgccccggatcttcgcgacgtcgctcgacgagctggcggcactgccggtgacgccggcccgcaccctgatcctggagaacaaggagggcctgcacgcgctgccggacctgccggcgacggtggcggtgcacggcggcggctacgcggtgcacgagctggcggacgtgccgtggctcgccgcctccgacgtcgtgtactggggtgacctggacacgcacggtttcgcgatcctcgaccggctccgcggccgcctcccgcacgtgcgcagcctgctcatggaccgcggcaccgtcgagcggtggcgcgacctcgccgtgcccgaggcgtcacccgccccgcacacgcccgcacacctgaccggaccggaacgcgacgcgctcgcggtggtgcgcaccgagggtctgcggctcgaacaggagcggatcccgtggccgtacgtcgtcgcccatctcgaggcgctgtag

SEQ ID NO: 43727 - DNA, 1488 bp, Corynebacterium glutamicum K051
atgaccgttgtatcgcacgcgcttgggtttaagcgatttaggcaggaatccctggagctgtctttgttgcgcagtgacaactttccggtggtgctcgccgtggtagcgcagtattttccgcagggggctatcgctaagccggcctcagagctgtatcagctgctcagcgatgattttcgggtgttgcgtgaagaaggatttgagctgccgaaaagcccgtcggattatgtgagtgattgggtgaagtcccggtggtttgtgcgtcgtccgggtagttcgcagactggtgagaccgtggaaccgagtgaagagctgttggcggtgctggattcggtgcagcggtgggataacccgcatcgaagcatttcggcgtctcgaattgaatcgttgacgcaggcgttgcagactttggcgttggaatcggaccccagcacagcgaaacgtttagctgagttagagcgtgaacgcgacaggattgaacgccagattgaagcggtccacgctggtgaatttgaagtcctcaccaccgtgcagattggtgatcgggtagcagatattttggatctagcagcatctattcctgcagatttcgccagggtaaggcatgagctgagcgatctgaaccggaagctgcgcaggcagttgcttgatcctgaagattcccgtggtgatgttttggaagagatcttcaggggagttgatctgattggggattccgatgcggggcgcagcttcaatagtttctttgatgttttgctcgatcgggaacgctcaagtctgattgatcgatggatcagagaagttctgggacgcgatgaggctattgatctggattcaaaattaaggacagggctgtaccgaattttccgggatatggaggatgccagcttcgaggtcaacggggaaatgacagggctggctcgaagtttgcgtcactatgtcactaccgaggagttcgcagagagccgacgcatgattcagttgcttcgcgatacccgcagtgccgctgctaaggccgccgaggctggtgaagtgacctcactcaatcacatggacacaccactcgtgcgcattggtatggatgttcgctcgattgcggggttgaaactgaagaacccaggtgaagaacgcgtcgaagatttgcctgagccagttgaagaacaagaactagacactgaagtcttgatggaacaaattcgggcaagcgagattgattttgaggaattggaagaggctgtttctttagttcttgccgagcaatcgcacgccacgatcaccgaggtactagaacatttcccggcaacgcaaggtctcgccagcattgttggattgttatacctggcgatgcgtgatggtgttcccacaggtcgcgcgcaaatagtggagtgggaaagtgatgatgccacacaccgccggcggattacaggatggcagttcatcaggggtttaaacagtgaagatttggcagaaagcgagatggataaatga

SEQ ID NO: 43728 - DNA, 639 bp, Corynebacterium glutamicum K051; identical to SEQ ID NO: 41680

SEQ ID NO: 43729 - DNA, 3336 bp, Corynebacterium glutamicum K051; identical to SEQ ID NO: 41681

SEQ ID NO: 43730 - DNA, 1107 bp, Corynebacterium glutamicum K051; identical to SEQ ID NO: 42475

SEQ ID NO: 43731 - DNA, 1557 bp, Nocardioides sp. CF8
atgctgacgcccgatcagggcacgagctgcagcagcgacaccgggaggacggtcgagatgagcgagatcgccggcgagctggcgcgggtgcgctctgccttcgcgcagccgaccctcacgctgctccaccagcgccaggcgcccgtcgtcatcaccatcttccgcgccgcgttcggccgcaacaacaagccgatcgccacggcccggctgcacacccaggtcgaggagcacctcgcccagatccggctcgcgggggagaccgaggtccccaacggcaccgggcgcgagatctgccaccgctggatgcgcgggcagtggctggtccgctcgctcgacgagaccggccgcgaggtctactcgctcacctcccacgcgcagcaggcgctcgagctggtgaagaacctcgcccgcgaccgcgccaccctcagcgagcaccgcatcgccaccatcctcggcaccatccgccggttcaacgccgaggccaaccccgaccgcaccgcccgcgtgaccatcctcaacaccgagatcgcgcggctgcaggccgagcgcgaccggctggtcgagggtgccgagatcgtgagtgcgaccgaggacttcatgctcgaggggttcaccgagctgctctcgctgatctccgcgctgccgagcgacttcgcccgcgtggaggagcgcttcgccacgatccgggccgagatcctggccgcgttccgcgccgaggaccgcccggccggtgaggtgatcgacgactacctcgcccgggccgacgcactgatgacggcgacgcacgagggacgcgccttcgagggcgccttcgcgctgctgcgcgacgacgccctggtgacccagctgcgggaggacctcaccgcgctgctggagcacccgctctccgacgccatcctgggtgaggccgaccgcgcggagctccgcgggacggtgcggctggtgcgcgacggcctggaccgcgtcctcgcccagcgctcccgggtcaccgcgaccctgaaggaatacatcgtctcccacgacgacgcccgcgaccgggagctggagcagaccctgcgccaggtggagtccgagctgatgacgtggatggccacgaccgggccgcgcgcgacccacgacgtgccgttgctgcccccgcgcaccaccgtcgaccacctccgcgaaagattccacgacccggccgacgacgtgctgcccgaccggatcaccgtcgccgaccccgacgcggcgccggccgtctcgctcgcgtcgctgatggcccagggcgggccgcggctgacgtcgctgcgcgaacgcctcgagcaggtgctgggcgacctgctgcccgtggccaccctcggcgagctcttcgcaggcctcgagccgtcgatgcgccgcccggtcgagatcttcggcctgctgcacctcgcggccgaccgcggctgggaggccgaggaggccctcgagtcctactccgcggtccgtcacgacggctcacgccgcaccttcgcgctgccccgcatgcccctgcccgaccccgacctcgggcacgacaaccagcaggagaccccagcatga

SEQ ID NO: 43732 - DNA, 726 bp, Nocardioides sp. CF8
atgagcttggacatcgacatcgaggctcctgacggtgaggacttcgacctcgacctcgacgacgcgtccgtgtccctgtgggagggcgacgagggtggcctcgagcacgcccagcgactcgccctggtcacgctgctcaagcagcgcttcatcagcgcccgcacccacccgcgcgactggcgggtgctggtcgagcacgagcgggtcctgcgctcacggctcaacgacctcttcctcgacctccagatcgaccgcggccgcgaggtcgcctggaagcggcaggcgctctccgagaccggcagccgcttcccgaccttgttgtacgacgccgcgtggtcgcgcgaggagacgctcgtgctcgtccacctgcgcgaccggctgcgcgccggccaggccggcggtgacgcacgggtcttcatcgaccgggaggacatcgtcgagtacgtcgcgagcttccgcccgccccacgccaccgacgaggcgggcgacgagaagcgcgcccgcaacgccgtgctcagcgtggcgaaggccgggctgctgatcgcgaccgccagcgaggagcgcttcgagatctgcgaggccgtcgagccgctgctcccgctcgagctgctccaggagctgctcgaggccctccagcgcgccaacggggtcccgcccgagccggaggacgacagcctgttcgacgacgacgagcccgagctccacgaccacaccgagggggagtga

SEQ ID NO: 43733 - DNA, 3462 bp, Nocardioides sp. CF8
gtgacgatgtccatcgacgagatcgagcagatcgaggacgacgggaccgtcgagggtctcttcgaccgcggcgtggtcgcgacccccgccgacgacaccgtgcagtggcgcgcggcgctcctgcagcttgtcaactggggcggtttcggcggcctgaccacggtcccgctgcggggtgaggcgacgatgatctccggcggctccggcgtcggcaagagcacgatcctggacgcctacaccgcgctgatgatgccgtcggacacgaagttcaacggcgcctccaacgacgcggtcgccggtcgcgcccgtggtgtcggccagcgcaacctgctgtcctacctgcgcggtgcggtcgacgtcatcgacgacccccgcaccggtcggccggtcgagaagctgctgcgcggcaagggcaccgacacctggggcgcggtggcgatgaccttcgtcaacgaccagggcggccgcttcacggccctgcgcacctactacgtcccgcgccgtgcggtccggtccggcgacgtgcagatgcagctcgccacgcacgaggggtcgctcagcctcgagacgctcgaggtcgccgtacccgagcgcttccacgccagcaccctcaagaagctgttcccgggcgtccgggtgcaccgcacctacgctgaatattccgccgtcctgcacgcccgcctgggcatcggcgccaacggcgacggtgcgaaggcgctgcggctgctcgcgcgcatccaggccggcaaccaggtgcgcagcgtcgacgagctctacaaggagatggtgctcgagcggccctcgacctatgccgccgccgatcgcgccatcgagcacttcgacgacctcgacgccgcccactccgcgatgcgcaccgaggagcagaagctcgagctgctcgagccgatcaccgcgctgcacgagcgtcgcgacaccgcccgacgccgccaggccgagctcgactcctacggcgtcaccctgaccggcgacaccccgctgcggctgtggctgctgcgcacccacctgcgcctgctcgaggcggcggtggccgccaaccgcgatgcgcgtacggcgaccggcgacgagctcgccgcgaccacctccgcggaggtggcgcgccacaaggacctcgaggacgccaaggaggcacaccgcgccgccggcggctcgaccctccaggccctcgggctgtcgctggagcaggaacaggtcgtgcgcgaggaccggctcggccggcgatcggtcctgcaggagcgtctgctcccgctgatcgacgcgtcggacgcccaggctcccggcgtcgagggcgccctgtcgtcggcagcggcgttctcggcgctccaggagcacgcccgccagtggctgagcgggcgcgagtccgaccacgagcgcctcaagcgggagcgcgacgccgtgctgcgccgcggctatccgctgcagcagcggcagagcgagctgcgctccgagcgcgcttcgctggagggacgcgccagccgggtgcccgggcccctgcacgagatgcgcgccgaggtcgccgcggcgagcgggctgggcatcgacgagctgccgttcgtggccgagctgctcgacgtcgcacccgaggaggcgcgctggcgcaccgcgatcgagaccgtgctcggcggcacggcccgggtgctgctggtcccgctcgaccggctcgaggacttctccgccgccatcgacggcctccacctgcgcggccgcctgaccttcgagggcgtgcccctcgacctgcccgacctcggtcccgccgatcccgagtgcatcgccggcaagctcgtgttcaaggactcggccttcgccggctgggtccaggcccacgtgtcggagccgtcgcgcaacgccctgtgcgtcgagaccaccgccgggctgacgggcagcggcctgcgggtcacgctggccggccagacgcgcagcggacgacgtggtgcccacggccgcagcagcgcccgcagcatcatcggcttctccaacgaggacgccctcgccgagatcgaccaggagctggcctcgatcgtcgaccagctcggtgaggtcgacggacaggtcgccgagctggaccggcagctgcgggtctccgagcggcagcgcaccgcctacgacgcggtcgcggccgcacgcttcgacgacctcgacgtggagggcagcgaccagcgcatcgccgacctcgagcggcggcgggtcgagatcctcggctccgacgaccagctccaggtgctgcagggccagatcgagcagctcgggctcgagctggaggaggcgcgcaagaagcgcttcggcctggagcagcgccagcgtgagctcaacaacgcccacgctgagctggtcgactccgaggacctcgtcaaggaccgcctggacgccatggagcgcgccgggacggctgccccgtccgtggagcaggacacggcgctgatcgcggagttcgccgcggcggccgcaccggccgaccccgaggagctcgaccgcttcgccgagaactcccagcggctggaggagcgcctgcgcaccgcggtcgccgacgccgaggccgagatcaggcgggtcgaggaggagctcgccgggatcttccgcctctacaagctccagtgggactcacccaacctgggcgtcacagtcgactcgtacgccgactacgcccgcatcctcgacgagatccgcggcaaggggctggcgcaacggcgcgcggagtggcggcgtcgcctgaccgagtggagcggccaggacctcgtcccgctggtgggcgcgatggcggcctcgatcgaggacatcgaggaccggctcgagccgatcaacgcgatcctgcgccgcctcaccttcggcgcctcgggcgatcggctgcggatccggctgcgtcggctcgcgccggcgcacgtgcaggtgttcatgagggacctgcgcgccctgtcggccggcgcgaccagcgagctgggcgaggacgacctggacaagcggttcaccgagctgagccgtttcatgacgcagctccgcaagccgtcccacgtcggcgagggcacgaccgatcgcgaccggctcctcgacgtacgacgtcatgtggagatcagcgccgagcgctacgaccacctcacgggggagctgcgcgcgacctatcgcacgctcggcgagaagagcggtggcgagagccaggagctggtcgccttcatcgtcggctcggccctgcggttccggctcggtgacgagctgcgctcacggccgcggttcgcgccggtcttcctcgacgagggcttcgtcaaggccgactcggagttcgccgggcgcgcggtgcaggcctggcggggactgggcttccagctcatcatcggcgtcccgctcgacaaggtgaccgggctcgagccgcacatggacgagctgctcgcgatcaccaagaacagcgccacccaccagtcctggatcacgccgatcaccgacgtgggcgactga

SEQ ID NO: 43734 - DNA, 1515 bp, Gordonia terrae C-6
atggagttctcagccttcccggctccggtcgaggcccctggcacgtcgagcggccccgagtccgtgcagctcacgctggccgacgcgtgggaatcgaaccgctcgatccagaagtcggccgtgggtcggctcttcgcggccaccaactcggccctctacgtcaccttgatggaacgccacctcgactacggcaccaaactgtcggagaccgagctgtcggtgcgcctcgatcgcgacctcgccgacctcgacctcaccgatcaggccaccgggctcgagctggtcaaactctgggcccggcagggctggctgcaccgagtcaccgacaccacggacccgaacgcccccaacctgtgccatctgaccagcgaggcgcggtcggtcctggacttcatgcgccggcagcgtcgtgaggattcgatcgccaccggcggatccatcaccgggatcgccgccgagctccgacgcgtcgccggccaggtcagcaacgatcccgaccagatccgctcggagatcgaggcgcagatgtccgacctcgacgccgagctcgcggacctcgacgccggccgacgcccgcctgtcgacctgcgcatcgccgaggacgcggcgcgcaccatcggctaccagatggagcagatcatctccgacatcggccagtacggcacgatgctcgaccgcatcaccaccgcactgctcgacgacccgggcgactccgacctcgcctaccgcgaccgtcaacgccagctgttcgacgactacgaggcactcctcgactcaccgcagtccgcgtcgtaccaggcgttctcgcagatgatccaggatccggagcgtcgggcccgcctcaagcacgacatcgagacgatcgtcgacaacttcccggccatggacgcgggcctgcggtcggtgatggacaacttcttcggcctcgtcacccagcagatggccgaagtcggacgcaccaggcaacgctgcgcacgtcgtattcgacgcttcgtcgcgtcgggaaccctcgagcagagccgaggcctggcccgtcagctcaacgacgcgctcgccacggccaacgaactgctgaagacgtccctggccgaccgtcggatcggctacgagcttcctctcgccgcaccgacggtgaactccatcggccggctcgccttcgagatccgcgaacacgtaccgcccgcacccgcgctcccggccgccgtcgacgccgatctcacgtcgttcgcctcgctgtccggccaggtcgacacgaccgaactcaccgacaccgtgaacgcagcggtcgccgtcggcccggtcgccctcgccgacgtcatcgaaggactcgaggagccgtacctcgcgcacgtcatcgtcctgtggtcgtgggcctcgaaacagcaagcggcaggggagaaggtgccgatgaccaccgtccgcttccggtccctcatcggcgacgaccacgccatcgaagtgcccgacctgaccttcaccgaaccgattccgactgcggaggtcgacgccgaatga

SEQ ID NO: 43735 - DNA, 888 bp, Gordonia terrae C-6
atgaccaccaccgacgagaccaacgccggctccgaagacaagcaatcatcgccccctgaggtgcgagcgcagcgagcctcgaagggtctcgaaaccgacgcttcaaccgacgcccccaccacccccgacgaattcgccggcttcgacgacctgcccaccgtcgcgaaccgcgcggctacccacacgccggacgcaccccgcttcgacggcgacgtcagcgagctgcccgaccgcgcatgctgggcgctgcagaacctgttgacccgccgctacatcagcggtgaccggcagccgcagctgtggtcgtgggtggccgagtaccaggacgtgctgcgtggtcgcctctccgaactcgacctccggctgcgcatcgtcgacgagctgcaggtcgccttcgtcgagcaagccggttacgactcccgctggggccgaaagattctcaagcgcgagacgattcacacctacgacgccatcctggcgttacatctggccaaatacgtgcgcgccgctcgtgacgaaccggtgctgatcacccgcgaggagatccacgagctgttcgccggcgtcaccaacaccatcgaccgcgaccttgcgctcttcgacaagcgcatcgaacgcgcgctcgacaagatggaggagctcgagttcctccgcaagcagcgcgacgatgccgacaccttcatcgtcagcccggtgatctccgcggtgatgacggcgtcggtgatcaccgacctgcagcggcaattcgagcagttcatcggatccggtgacaccggggaagtgccgccggaagaccttgccgacgagccgacggagcgcgacgacgacgcagccgacctcgacggcgacaacgcgtacggcgagaacgacgaaggagacgactggtga

SEQ ID NO: 43736 - DNA, 3345 bp, Gordonia terrae C-6
gtgagcgggcaggtcgaccagtaccacctgtcccggttgcagctgatcaactggggcgtgttcgacgggtatcactcgatcccgttcagtcgcaacggctctctgatcaccgggtcgtcgggtagcggtaagtcgtcgttgctcgacgccatctcgctggcgttcctgccagatcatcgacgcaacttcaacgcctcgggcgatgcgacggcggccggttcctccagcggcaagcgcacggtcggcaagtacgtgcgcggcgcgtggggcgagcggcgcgacggcaccaacgcccaccgcgagatcatgtacctgcgtggcaccggcccggcgtgggcggccatctcggtcacctacacctccagctccggcgaggccatcaccggcctggtgttgaaatggcttgccgcgggcaagatgaccgacgcgcacagctcgtacttcatttacgacggcgacgccgacatcgtcgaggcctgcaacgagtgggccgccaacaattacaactcggccaagttccgcgaccgcggctggcgcggcggacccggtgagggcaagtacctctcgacgctgtactcgctcatcggcatccgcggctccgatgccgcgcagcagctcctcggaaaggccaagtcgctgaagagtgtcggcggtctcgcgcagttcgtgcgggagttcatgctcgacgccccgaccagcatcgtcgggatcgccgacgccctcgaccagatcgacccgctcgtcgaagcgcgcgagctgctcgacgtcgcgcgccgcaagcgcaccatcctcgggaatatcgaggaggtgcacgagcggtacgcgggggaggcggccaccttctccgtcctcgacaccatcgacaacaccaccatccgcggctacgtcaacaacctgcggatccgcaacgcgcagcccgaggtcgccgacctcgacgaccagatcacccgcctcgacggtgatcttgccgcgctgaccacccagcacaaccagctccgccaggaccacagtctgctgctgtcccggatcgccacctccaccggcgatctcgccccgctgcgcgaacagctcggtggcgcacagaaactcagcaccgaggtcaccgcccgacgaaacgcatacgaggacaaggtctccgcgctcggtttcaccccgcccacccgggccgagggattctggctgctccgcgaggaactcaccgaggaggccgccaagatcgacggccagctcgacgccggtcgcgcgcactacgccgaggcgctggccagcgaggtcgccgcgcgcacccgccgcgacgccgcgatggaggaactcggccgcgtcgagaacgccggctcggcgctgccgcgcaccgaacacgagatgcgccgcgcgatcgcccacggactccagatcgacgagtctgaactgaagtacgtcgccgaactcgtcgaactcgaccccgacgaagaacgctggcgtctggccgtcgagaaggtactgcgaaacgtcggcctgcgtctgttggtgcccgacaagcacttccgcgccgccctgcgcttcgtgaactcgcacgacatgcgcggccggatccagctgcaccaggccgactctcgcccgatgccggtcctcgagccggggaccctggcctcgaagctccgtcccgttgatgcctcgcacccgtgtgcggccgaggcgatgaccgtcctgtcgaagctgggcagccacatgtgtgtggacagtcctggcgagttctcccagtacgcgaaggccgtcacggaccagggtctgcgcaaggattcggcgaagctcgcggtgaaggatgaccggcagcagctgcgccggtcgcagtacatcttcgtcggggacgtcgcgtcgaagatcgccgccctccgtgacgaactcgactacgaggagcgggcgttcgaggatgcccgccaggattgcgccgagctcgaccgggagcgcagcgcgaaggagaagcgtcgcgacgcgtatcgccgtgtgtgcgagcagttcacgcagtggaacgagatcgacgtcgactccgtcgatgaccgggtcgaccagctcaccgatcagtacgacctgttgatcgaggagaaccccgacgtcgaggcgctgcagcgcaaggccgaggacctgtgggagcaggtacgcaacgcgatttcgcaggccgcgctggtcaaggacaagatcgcgcgccaggactcccgtcgcacacagctcctggacctcatcgaccggctcaagcccgaagacgttcccgcccaggcggagaagacgctcgacggtttccgcgaggacctttcggcgactctcgacgtgctcaaccccgagccgtaccgccaggagatcgtcaaggccgcgagccgggagcgcgaccgtttgcggtccgatgctcgacgctcccgcgacgagctggcccgcatcctcgacacgtacgatgaggaattcccggacgccatcccgaacgacagcgacgacttcgacgaacgcctgcacgactacgtcgccgtgtgccgccgcatcgacgagcgcgagttgcccgccgcctacgagcggatgcgccgactcatcaccgaacaggcgcctggcgcgatcctcggcctgcacatggcggccgacgccgaggaacgacgcatcgtcgagcagatcgagcgagtcaacaccggcctcggcgcggtggcgttcaaccgcggcacgcgcctacggctccgtcccggccgcaagaagctcgccgcggtcgaggagctgaccgagaaggcccgccagatctccaaccgcgcgaccgcagtcagcttcggcgacgagcaggccatcctcgagcagtactccgacatcttgctgctgcgcgaacgcctcgccggcaacaccccggaggaccgccagtggacgcgcgacgccctcgacgtgcgcaaccgcttcgacttctactgcgaggagcatgacgccgattcgggggagaccatccggacctactccaacgccggcgacaactccggcggcgagcaggagaagctgatggcgttctgtctcgcgggcgcgctgagcttcaacctggcgagtccgcacggcaacgacaaccggcccatcttcgcccagctgatgctcgacgaggcgttctccaagtccgacccgcagttcgcccagcaggcgctgagtgcgttccggaagttcgggtttcagctgatcatcgtcgccacggtccagaacaccagcacgatccagccgtacgtcgacaacgtcgtgatggtgtcgaagacggaggctgggccggagttgcggccggttgcgacggctacctcgacggggatcaaggcattctcggaattgaggcggtcggggagtcagctgccggtgtag

SEQ ID NO: 43737 - DNA, 1467 bp, Gordonia terrae C-6
gtgaaactgttccgcaaagactcaccggaagtgacaatcacggtcctgcgagcggcgttcagtgacgtcgaggacgtcgtcgaggttgaactgctccactcgcgcaccgacgcactgctctctgagcttgaggggctgggcgagagtgtcccacgtcgggaccgggcgcggatgtccggtcgcgagttctgccaacgcctcgtgtcggaccaattgctggggttgtccgccaactcgaacacgtacagtcttgcacccgccgcggttgaggcgctcgagattctggaacgcgtagggtcggatcgcgcgctggccaacagttcacggatcgaggcgatcctgcgggctgcccgcgaccttgccgcgttggctaccgtcgaccccttgcagcgcaccaagcagctcgaccgtgagatcgaacgactccaacgagaagtcgtgcgtgcggcggctgaacgtgaccgcatcgccgctggcgggcaggtcgagaccgcgcccgaacagcaactcatcgacgcatacgcgcaccttgatgacctgatcaaacgactgcccgccgatctcgcgcgtgttcgggactcggtggacggcgaacaccgaagactcacccgcgagctccgtgatggtgaccagtcgacggggcagtcgatcattgatcatctcgccaccgcggacctgctgctcgacactcctgagggtaaggcgttcagaggggttcgcgacctgctcggcgatcgtgacaccctacgagagttgcgcacgaacattcttgccgcggtcaatcatgaagtgctgcagatcggtttgcgcgaagatgaacgtcgagatctcacggcgacgcaccgccgcctgcgtgaaggtcttcgcactgtgcaggaacgccgggatcgcaccgcggaaactttgagcggatacgtcatcacccgcagccttatcgaagaacgtgaactcgggcgaatcctcgaccaactgcttggccatctgagcgcctggctgcagaccgcaaccaaccgcacggtgctgccgtgggaactcatcccggaagggattgagatcgaaagtataccagaacggttcgatctgacgttcactgaaacaccaccgccaccgctggaagacacgtcacagtttgcgccgccacctcccaccctcgaggacatccttgccctcggtggcccacgtcctgaaacgctggccgcggtggtcgacatgctgcgcaacaatcgcgacgaacaggcaacactgggctccttgttcaatcagcttcccccgcgattgcggcggccggtagagctgttcgggttgtggcaggcggcggctggtgctggagccgatatcaccgcagcgccgaccgaaccatttcacacggtccggccagatggtagcgagtgcaccatcctggcagccccgatcgtgctcaccgacgcgcagttcctcactctgctggagaaggccaatgaccgttga

SEQ ID NO: 43738 - DNA, 651 bp, Gordonia terrae C-6
atgaccgttgactccggtgaccatcaccgtcacgaggtgtttgacggtgatcgtggagaactcgactacgcggcccgcacggcgttggtggcgctgctcaagaaccgcttcatcaccgcggacaagcaacccgatcattggctgacactcatggaccaacgggcgctcatcgtcagtcgtatgcacgagcttctcctcgacgtgcacatcgacgagcgaaaccgtgttgcgtacaagactcgagtcactgtggccgaaccgtttgggcaggtcagtctgcttcgtgacgtgcggtggtcggcgtatgcgaccgcgcttctggtggtgctgcgtcaacggctgcgcgcggagcgcacgatagtcagcgacgacgtctacatcgggttcgaggacatggtcgctgagatgaccactctcatgcctcagctgagcgacgagtcgcgtcccaccaccgtcaccgtcacagcactcaaagcggttgcgacagcacgcctggtgcgtgaggtcagccctgggcgctacctcatcagccccgccctggagtcgctgctgccgttgccgaaactcgaccaactgctgagttggctgaccgacacgaccaccacgggcaccgccgaccgccgcgacgcagaggaggcggaagcgacttga

SEQ ID NO: 43739 - DNA, 3267 bp, Gordonia terrae C-6
atgccgttcgcagtcaacggcacgacgttgctgtccggtgcttccggcgccggcaagtcaagcctgctcgacgcctaccttgccgtcatgatgcccaccgccgcactacgtttcaacgaagcgtcgaacgacaccgcgggccgcgcccgcgatgcccgcacaggacagcgcaccatcctcgactacgtgcgcggcaaaacgggcgagcaccgtgaaggtggtgagatgcggcgcgacgtgctgcgcggccaggacagggcgacgtggagtgccgttgcggtcaaattcgtcaacgaccgtggggatctgttcaccgcggccagagtgtacttcgccggtcgtgccgcaacctccgacaccgaagtgaagtcgtggggcataacggcggagacgcacgtcgacatcgaccggctcgccggactcgccaccaacaccgggttcgacaaggatgctgttgtggcgcatctcggggtccaatggttgtcgcgcagggattttgaaagtgccgtgcaactgcacctagggatcggcggggcaactagcggtgcagaggcgctgcagctgctgtcacgaatccaggccggtaaggcgatggattcgtcggtcgaccaactcttcaaggagctcgttctcggcaggcccgccacattcgactacgccgacatcgcggtcaccgaattcactcgtaccgaggccgcgtttcgtgaggcacgcgaagcgggagacaaacgcgacaccctcgtgcccatcaccgaatggcatgaacagcaacgccagcacaacctgcgcgtgcatctactcgaatcgctcggcgccaaacacccagcatccgacaatccgccgatccgccgctgggcgcatggcgccgaattcgagatcgtctccgccgccatcgaggccaaccgcgcggaggcggacctcctcatcgaagatcagcgcgtcgtcggcatccgccgcgccaatgcccaaggcagggtggagagactgcagatctcgcgttccaacgtcgccgagggaatcttggtcctggaaggaactctgaaggcctacaagcagacccacgaacgtgcccgaaccgaccgcgcaacgtttgcccgccgcaccgccgtgctcgatgttaccgtcgacagcgaagagagattccgcgagctcaccgcggccgcaacagcattcctgcggaccgccgccgaccgcaaacaggcccttcatgcacggcagaagcccttttacacagcgtttggcaccgcaaacgccaccatcgaacagcttactcaagaacgagaactgcttgagcggtcgcgtgggcgcatgctgccagcgctcctgaaagcccgagaaacgatcgcccgagcgacaggcatgaccgaggatgagctcccattcgtcggcgagctgctcgacatcaacccatcactggcgcaatggcgcaccgcggcagaggtcacgctcagcgctgtcaccaaagtcatgctcgtcgacgccgaacgcctcgcagagttctcggcgacaatcgacgccctgcagataccgaacatcagttaccaaggtgtcgacctcaaccaggagccgaccggtagcccacgaactggtcgcatctccgaagtgctcgagttcgatcaccagtcgcccttcatcgggtgggtcatcgaccgggtctgccaaccgcacgcggacgcactgcgcgtgcagaacccacgagacctaggcggcgatcaactcaaagtcaccgcagccggacaaactcggtacgggcgtcgaggatcggcgggcaccgcgaacatcgcccgggtgatcggcttcaccaacgagtctcgactcgccgagatcgacgccgacctcgcaaccgcgaaccatcaacgcgaccaggccaacaccgccatcaacaagatcggcgcagagatcaaccatcacgatcaggtccacgccgcacaccaaatggtcatcgacacccgttgggaacacatcgacgaagccggcgccgccgacgccgtcaccgtcaccgtcaccgaacttgcgcggctacgtgacgacaacccccaactccaacagatcgatcacgcactgaagcaggcgaacgaggacctcgccacggcggtcgccgcacttacccgcctgtcggaccggctcaccgacctccagaatgactacgacaggttcgtcgtgcgagaggaaaccctgagctacgccgccgccgacgccaaaccagtcgctgaacaccaccgcgccgagttggaccgactctatgcgacccgagatccgagcgaaaccggctacagcattgaagggttccagcgaaccgtccgcgagatcgcccgcgagatcgaaggcgaaatccgctcggccgcaaccgcccgcgatctcgcgatcgccgagttgaccgggatcttcaaaggctacgacggacgatggcatgacgaccccaaccgtggtatcggcgtcgagtcctacccgcagtacctcaagatcctcgagcagatcagcgccgacgaggtgtaccgtcttgacgatcactggaaacaactgatggatgaccagaccggcacacacctggtcgaactcatcaaatcgtatgaagccgcccgcgacgacatcgacgatcgcctcgaccccatccgaactatcctgcaacgcctgcccttcggtgagcacggccaccggctggatctgatcctcgaggacatcccgtcccgcgaggtcgccgatttccactcccgaatttacgcgttgaccagggagctatccgcggtccgcaccgacgacgaatacgccgaaaggtacgccgaaatgaaagacatcatcgaacagatcagaaaaccggaatatggccgggccggcgctgctcgacgtaataggttgttaaatgtcaacgaccacatcagaatcaccgccgcagcttacgacgtaagccgcccgacaccggtcgaagtgaagcactacgacatgatcagcagcctgtccggcggcgaatggcaggagctcgtcgcgttcgttgcggccgcagcgctacgattccggctcggcgacagcggcaacgagagaccccggtacgccccggtgatcctcgacgaggcattcatcaaagccaacggcgagttcgcatcccgcgggatcaacgcgtggcgcaacctcggattccaactcatcatcgccgcaccacaggacaaggtcaccggcatcgaatcactgatggacgaactgcgctgcatcaccaaagagcacggctactcgcacatctcccggtacacgaagaatcagacacacccatga

SEQ ID NO: 43740 - DNA, 1203 bp, Gordonia terrae C-6
atgatgcgcgcccctgacgatatacgcgtcgcagtcggcaagtaccttcaaaacacttggccgacaaccatcgccgacatagccgacaagagctggccgaaaacctggaccctgctggcagagaagacccccggcaagagcatcctggacaatctgacccacaacgcagcgacgacccgagtctggtccgaactcgcgcagtcacaacccggcctggaactcgacaccaagacctggcgcgtcatgggcggacaaactctggcgcaacgtctcaccattgcgaatgcaacggccgcagcccaattcgtcagatccgacgcaccctacggcgagccacggcgatggagtctatggctaagcgtcgcccagcgccgcgccggcgtgctacgaaccaccaaccccgcactgtctgacaccgcggtcgcgcacctactggcgagcaccgcggcgtactccgatatcgacttcgacctactgaacgccaccgcaacctggttcacacacaaccccggcgcaacccaaggactaaccgcgcgacaggtcccggtgccgggcgtccatgcgaaatggctcaacacccaccatcgacaactcgaagcgctatctgggctcaccaaactcgatctggaacccaaccacccgccccgcatccagttcacctacctcgatcacagctacctcgccagcggtcgccgacgctacgacatgtacacgatgggcgacaccagcacacccgcataccaaccgcaagtggttctcatatccgaaaacaaagacaccgcagtgcgattcccacgtgtagagcgggggatcgccgtagaaggcaacggcaaggagggtccatcgcggctgaagaacgtcgactggatccgatcgtgctcagcgctgatctactggggagacatcgactccacaggattcacaattcttaataactaccgcgaacttggtatgagtattgtgtcaatcatgatggacttcaacaattttcgtgactacgccatgtacggcacgagtcaccaccccaatggtgagccgataaagacaacccaggtcgaactgcctcacctcaccgacgcggagcgcgctgcctatcgcgcgatcaactcggccgatgcgccgtgccgacgtgttgagcaagagcggataccgctgctcgccgctcggcagcgcctccagcacgtccgcgaccaactcggctaa

SEQ ID NO: 43741 - DNA, 1353 bp, Pseudomonas aeruginosa VRFPA02
atggaggatgcgctgcaagcgctgtccgaaatgctggctgcttatgccagccaggatctttacgagatcgacccggatgcaacgcacatccaggcaggtcgtgaactccgtgaatggatcaagcggcgccttgttgtagagcgagagggccgcatctatgcaaccgacgcgctggagtccgccatacagttcgtcgactcgttggatagtcgtatcatgacctccacggcctctcgcctttcggtggtccagcgcgagattgaaaacctggaaacgggtctgaaccccagcccaagtggccgtattgccagcctgcgccgccgaatccaggacttggagcacgagctagcgcaggtagaagctggccacgtcgtcgtgctggacgaagctcaggcgatagagggtatacgcgaggtatataacctggccaccagcctgcgcgcagactttcgacgagttgaagactcttggcgcgaagctgatcgcgccttgcggcaatccatcatcagcgagcagtctcaccgtggagaaatcgtcgatcggttgctggacggtcaagatgcgttactcaacacaccggaaggacgtgtcttcgaaagtttccagcagcaactgaggcagtccgccgagctggaagtcatgcgtgagcgcttgcgtaccatccttcgtcatccagcggttccgaaggcactgaatcgtccccagcaacgtgagctgcgttggctggcgttacgcttggttcgggagtcgcaggctgtgcttcaggcgcgtgcccgaagcgagcgcgatgtacgtggcttcatgaagacgggcctggccgccgagcatcatcgcgtcggacagttactcaacgatttcttcaatctagcgctcagcgtcgactggcaacgccaggccgtgcgtcgtagcactgtccgtttgccgccggttggcgtagccattaccggagtcccagcgattgagcgtctacgtttcaagaccctggatgacgatgacacgggcgagctggatctgagtctgaagccagcggggctggaacagattgacgatgacttctgggatgctttcgacgggttggatcgcgaagcgctgattcatgacaccctggcggtgctggtggagcaggggcgacctgtgagtctcggggagcttgcgtctttgcttccacctgctcacgacctggaaacctttgcgctctggttggctatggcgcgcgaggcaggtattgaggtgctgacagaggagcgtcagctcgtggagctagttgacgaggatgagcaacgctggcgcttcaatctgccttatgtcggactcgaccacgaggcactcaaggacatcgattgggagttgtga

SEQ ID NO: 43742 - DNA, 750 bp, Pseudomonas aeruginosa VRFPA02
atggcaggggtcttcgatcgaattgcaggcgcctctggtgccgacgaaacggagctgacggtggagcccatggcgttggatgacggcatggatgatgaacagcctctcatgagcgccgctgtacaggtcgatgagcgccggacgccgcaacgggtacgggaggccgtacaggaaatgctcaagtacggtctgctggaagagagtcacaagcccaacctgtatcgctcagcgctttccaatatcgaggcggtcgacagaatcctggagccgctcgaccttgccatgggggtcgacgaggttcgggggctgttgttcgttatcgttcgccagggcgaggtggccgagcaggatgactggtcgcaccccctagtgcgtcggcaaaggctgaatctggagcagtctctgctgatagccatcctgcgccagcagttcatcgcctacgaacaggaaagcggtacgggcgccagtcaggcatcggtagtggtcgatgagctgattccccaattgcaggtttacctgggcgagctgggcagtgaggcaaaggagcgcaatcgcatcatcacgctgctggatcagctcaaggggcatggcctggtgtcggctttggacgcccatgatcgcgtcatcatccgtcccatcattacccacttggctaacccggagaacctgcaggcactcgtggcatggctgcgagagcaggtggagggcgcggcgacgccggctgccgatggcgaggaggatatggcatga

SEQ ID NO: 43743 - DNA, 3306 bp, Pseudomonas aeruginosa VRFPA02
atgaagcaggcactcctttggcgtgacagcgagaccttcattctcaccagcatcgagctctataactggggcggctttcagggctatcaccgtgccgagatcgacccctccggtaccgccgtgatcggcccgacggggagcggtaaaacgacactggtggacgctctgatgaccttgctgtgcgccaatccgcgctacaacctggcatccacgggcgggcatgaaagcgaccgcgacctggtgtcctatgtccggggagttaccggccccggggacggaggtatagagcagtctcatatcgctcgccagggtaagacagtaaccgcaattgcggccacgctcgagcgtgatggtgcgcaggtacgactgggggccgtgctctggttcgaaggcacaagctcctcggcatcggatctgaaaaaactgtggctgttaagcgagtcccccgagcagactctggagcattggctcagccagcatcacgcaggcggtatgcgggctttgcgtcagatggagaaggatgggacgggtatctggccttatcccagcaagaaagctttcttggccaggctgagggattacttcgaggtcggtgaaaacgcattcaccttgctcaaccgcgctgccggcctgaagcagctcaatagcattgacgagatctttcgcgagttggtgctggatgaccgttccgccttcgagcgggccgccgaggtcgccggcagcttcgatgatctaaccgacattcaccgagaactggaaacggctagaaagcagcagcgctcattgcagccggtcgccgatggctgggagcgttaccaggtcttgcaagaacagctgcacgataagcaggctctcgaaggtatcctcccggtttggttcgccgagcaggggtatcgactgtggttggctgaaaccaacaggctcgagaaggagtacaaaaaggccgaactggatcaggagcaatgcaaaagtcagcttgaggcccagaaaggtgtggtcgatcaacatcgccagcgctacctgcgagtagggggcgcagggatagatcaattgcgcgagcgcatcgctgattgggtgagggagtgcgataagcgcagcctgaaagccgagcaataccaactcttggccaaaggccttggactagcggatgagttatcggccgctgctctcaaggagaatcagcagcatatcgcggcacgcctggaaatactggaccaacaaattactgacgcgcgccaaaaggcgttcgacgcaggcctcgtccagcaggaactcaatggtcgcctacagaccttacagcaggagggtgctgaggttgagaaacggccaggctcgaacctgcccgggcaatttcatgctttccgaagcgatctggcgcaggcgcttggtgtcaatgagtcggccctgcctttcgttgccgagctggtgcaggtcaagcccgaggagctggactggcgtggcgccatcgagcgggcaatcggtagccaccggctacgcatcctggtgccgcaggactcatcccaggccgcactgcgttgggtgaatcaacggcacaaccgcttgcatgtgcgcttgttggaggtacaggagccgacgtcgcgccccgtgttcttcgacgatggttttacccgcaagctgaccttcaaggagcatccgtaccgagaagccataaaggcactgctggcggacaatgaccgccactgcgtcgaaagcccggagcaattacgtcatacccctcatgccatgacggctcaggggctgatgtcgggcaaagaacgcttcttcgacaagcaggaccagaagcgtctggacgaagactggctgaccggcttcgataaccgtgaccgtctggccttcctggctgagcagattcgcgaggtcaatgagcggctcgagccagccaagctcgccttggatgctgcccagggcgacgttcgtcagttggagactcaagcttcgctgctgaatcgtgtcaaagaactgcagttcgaggatattgatctgccgggtgcccagagtcagctggagtcgctgcgtacgcaactggccaccctgacgcgccccgattctaaccttgccatgatcaaggtcgagctggatgcggccgaggccctgcaggagtctctggatcaacagctccgccaactgatcgaacagtacgttcagttaaaaactcagtttgaccaggccgcatccgctacccgtaaggcctataacagcgcggagaaagggctgaacgatacgcagcgtgaactggcgcaagcgcatttcccgactctgaccgcggatgacctcggcgatattgtcgagctggagcgcaagcatacgcgtgagcttcaagggcagctcaaagcgcttggcgagaaactgggcgatcagaaatcagagcttgccaaacgtatgtctgatgccctcaaggtagacaccggggcgcttgcagaggtcgggcgagagctggtggatgtccccaggtatctggagcgtctgcgtgtgctgaccgaggaagccttgccagagaaactcaagcgcttcctggaatacctcaatcgctcctcggatgacggcgtcacccaactgctcagctatatcgaccatgaagtctcgatgatcgaggaacgcctggatgacctgaatagtacgatgcagcgtgtcgactttcagcccggacgctatctgcgcctggttgcaggcaaggtcatccatgaaagcctgcgcaccctgcagcgcgcccagcgccaactgaactcggcgcgtttcatcgatgatgaaggcgagagccattacaaggcattgcaggatcttgtggggttgctcaaggacgcctgcgaacacagcaggaatcagggagccaaggcgcttctggatccgcgcttccgcctggagttcgcagtatcggtgatcgatcgagaaagcaggaatgtcatcgaaacccgaacaggttctcagggcggtagcggtggcgagaaggagatcattgcctcctacgtgctgaccgcttccctgagctatgcgctttgtcccgacggcagcagccggccgttgttcggcaccatcgttctcgacgaggcgttctcgcgcagctcccatgcggttgcaggtcggatcatcgctgcgttgagggaattcggcctgcacgctgtcttcatcacgcccaacaaggaaatgcgcctgttacgccaccacacgcgttcggcagtcgtcgttcatcggcgcggcctggagtccagtctggtttccctgagctgggaagctttggatgagcatcatcaacagcgcatcaaggccatgcatgaagtcgcccactga

SEQ ID NO: 43744 - DNA, 993 bp, Pseudomonas aeruginosa VRFPA02
gtgggtaaggtcgactgggaacccgtcagctaccgagcagggttggctccaatttccttgccaatgcgctggcacttgcgcagtccctccgaatggattgccgcaaccgacgatccttcggtcagccaggaatacgctcaactcgagtatctggtcgagcaggtagatagttcctttcatgctctgctggtggcgcaacggagcctgtggttgacgaagccctctgaagaagtcatcgctacagcgcagctcgccactcaactatctccgggctgcgctcaaggccgcccattgcgcctgcttgcagagcacggagtggacaccaagtttttcgagcgaaacgctatcttgctgacgaaactcctcgatgagcgcttcgaaggcgcggcgtccgagcaaggtctgacgacttttctggatgcctttgaagaaaccagtcagtgggttctagtcgttcctcttcagcctgagctgctgcccttcaagcggatcaggctcacgacttcggaactggccgaaacctcacttcccggttcgcgattgctcgtggtggaaaatgagcaatgtgttcacttgctacccgaaacgctgccggacaccctcgctgttctgggcgcagggctcgatttgcagtggttggcgtctgcgcatctggccgggaaacagatcgcttactggggcgacatggatacctggggcttactgatgctggcgcgagcgagacaccatcaacctgcagtcgaagcactgctaatggaccgggagctgtttgaccagcactccttgggaagcgcggtcgtcgagccagctaaagctcaggaattggctcccgaaggattgatgaccgacgaagctgatttctatcggtatctccttgcacaggagcgggggcgccttgagcaggagtatctgccacgcaggcaagtcgaacaggctattagtaaatggtttggagagtcggtagcgccggctcatcctgagcgaacggcttga

SEQ ID NO: 43745 - DNA, 1455 bp, Agrococcus pavilionensis RW1
atgaccacggtcagcgccgcgctgcgcctgcagcggctcgtcgccgacgaccccgcgctcgcgctgctgcgcgccgagcacgcgccgatcatcgtcgcgctcctctcgcggctgctcggcggcgaggtgcgccgccgcccggccgaggagttcgtcgacctcgtcgacgccgacctcgatgcgctgcgaccgcacttcgagctgccgcagaccggcaaggcctacgcggccgcgtggcgcgcggcgggctggctcgtgcggcggcccgcggccgaggcgcgcgccgagaccgtcgagctctcgccggcggcgctgcgggcgatccgcgtcttcgagcagctcgagcagccgcgggcgaccgccacggagtcgcggctcatgaccatccgcgaccaggtgcagcgcctcgcgatcgagaccgaccccgacggagcgcgccggcgcgaggcgctcgagcgcgagcgcgccgcgatcgacgcgcagatccgagcgatcggtgaggggcgcttcgagccgctcgatgcggcgcgcacgaaggagcgggtcgccgagatcttgcggctcgccgaggacgtgccctccgactttcagcgcgtgcgattccgcttcgacgagctgaaccacgagctcatggcgagcctcctcgacgccgacgagtcgcagcgcaccgtgctcgaggacatcttccgtggcgtcgacctcatcgagcagaccgacgaggggctcacgttcgccgcgttctcggtcctcgtgctcgatgccgagcgcagcgaggccttcgaggccgacatcgcgagcctgctcgagcgcgacctcggcgacgcgatgtcgatgtccgagcgccggttcctgcgcaccttcctccgcgagctcaagctccacagccacgagatccacggcgtgctcgccgagttcgcccgcggcttgcgccgctacgtgcagtcgcaggacttccagcgcgaccgcgcgctccagcgctccatccgcgccgcgctcgcgaccgcgctgcgagcggccgagcacgtcaagccgttccacgcgagcggcgtcgagctgccgctcacctccgtcgagctctcgagcatcggcgcgctcaccgcccacgacccatccgagttcgcgatcgacgagcacgtcgtcgcccacgagcccgggctcgcggactacgagcagctcaaggccctcgcgcgcgacaccgagatcgacttcgaggagctcaccggcgtcgtcaacgcgcggctgcggggcgccgaggcgctcacggtcgcgcagctgctcgccgactggcccgccacgcagggcgtcgcgagcgtcgtcggcctcatgacgctcgcgatgcagcacggcagcgtctcgggtgacgagaccgagacgctcgtctggcccggcgtcgacggcacgacccgcagcgccgtggtgcgcagccaccgcttcgtcgagaggatcccgacatga

SEQ ID NO: 43746 - DNA, 711 bp, Agrococcus pavilionensis RW1
atgaccgatccgcacgcggcagcgctcaagcacgccgctcccgacgaggagagggcggatgcgtcgaccggctcgagcgcgctctggccgggggattcgggccggctgcgcgaggactcgcggcgcgcgctgctcgagctcatccagggcccctacctctcatcctccaaccgcggccggctgtgggtcgcgctgctcgccgacgccgacgagatccgctcgcgcctgcacgagctcttcctcgagctcgtgatcgaccggaacgacgagatcgcgttcgtgcgcccggtcgacgcgggcgagcgcccggtgccgctcgcggtgcgctcgcgcgcgctgacgttcatggacacgctcatgctgctcgtgctgcgccagcgcctgctcgccgctcgcggcgagcggcgcgtgttcgtcgatcgcagcgacgtcttcgagcagctcgcgccctaccgggtcgcgcgcgacgaggccgacttcgagcgccgcatgaacgcatcctggaccaagctcatgaacaagctcggcctcatccaccgcgccggcggcgacgatcgagtcgagatctcgcccgcgctgcggctcatcttcgacgacgaccgcgtccagtcgctgcgccgcgagtacgagcgcgtgctcgagcgcggcggtgaggcggcgctcgacctcgacgccgccgccgacgccgacgaccgggagctgacgccgtga

SEQ ID NO: 43747 - DNA, 3330 bp, Agrococcus pavilionensis RW1
gtgacgatgctcgagatcgaggggctcgaggtgctcgagccgacggcgcagtggcgcctcgccgaggtgcagctgctcaactggggcaccttcgacggcctgcaccgagtgccgatcgcccgcaaggggcagctcatcaccggcagctccggctcgggcaagtcgtcgctgctcgacggcatcgccgctgtgctcacgcccgacggcctcctccagttcaacgccgccgcgcagggcgcgggcggcgggcgcggcgaccgcagcatcgtcagctacgtgcgcggcgcgtggtcgaagaccgccgacgaggagcaggatcgcgtcgtcagtcgcttcctgcgccccggcacggtcgtgagcggcgtgctgctgcgataccacgacggggcggatgcggtggtggcgctcgcgcggctcatgttcctcaagggcacgtcgaccgacaagggcgacctgcgcgacgcgtacctgctcgagcagggcgaactcgacctcgagcggctgcgcggcttcgtcacgagcggcgcgaacggcatcgacacccgcgcgctgcagcgcgcccatccgaaggcggtgctgacgacgagcggcaagcacgcgaagttctacgcgcggctgcagagcgtgctgggcatcggcggcgacaacgcgctgcagctgctgcaccgcacgcagtcggcgaagaacctcggcagcctcgaccatctcttccgcaccttcatgctcgaccggccggcgaccttcgcgatcgccgacaacgcggtgcagcagttcggcgagctggatgccgcccaccggcacgtcgtcgacctgcgccgccagcgcgacgcgctcatggtcatgcgcgagctcggcgaccgctacgacgacgcatccgcccgcgccaccgccgccggcgagctgcgcgacctcgtgcggcagttcgaggcgcgcgagcggctgcggctcgcgcggcaggagcgcgcggcggccgagatcgcggcgcagcaggcgagcgcggcgctcgcggtcgcgcgcgaggccgacgaggccgcggccgacgaccaccggctcacgcagcaggcgctcgatcgcgcgggcggcgccgatctcgtgcagctcgacgtccgcatccgcgacgtcgagcgcgaggccgggcagcgacgggcgcggctcgagcggctcgcgcgccagctcgccgacgtcggcatcgagcgggtgcccggcaccgaggagcagttcgccgggctgcgggcgctcgccgaggatgagctgcggcagccgccggcgaagctcgacatggagcaccccgcggtgcagcggctcgcccggtcgaccgagcgccgacgacgcatcgacgacgagctgcgagcgctccgcgattcgcgcagcaacgtcgacgcgcggcggctgggcgtgcgctcccggctcgccgagcacctcggcgtgcccgagcgggcggtgccgttcgccggcgagctgctcgaggtgctgccgggcgagcgccggtggacgggcgcgatcgagcgagtgctgcggccgctcgccacgacgctgctcgtgcgcgccgagcacctcgcggccgcgcggcgctggatcgacgcggagtcgcttggcactcggctcgtgttcgaggtcgtggaggcggacgtgccctcgccgcgctcgctcgcgagcgacgcgtcgctcgtgcggaaggtcgtcgtcgcgagcggcaacttccacgactggctcgcgcaccggctctcggagcagtacgacatcgcgtgcgtcgagaccgccgacgagctcgaccgcttcgcgcgcgccgtcacgatccgagggcaggtgaagcgctcggccacgcgctacgagaaggacgacacgcacgcggtcgacgacccgacacggtggctgctcggctcgagcgaagcccgcctcgaggcgctgctcgcgcagcgcgtcgatgcggacgccgaggcgaaggaggcgcatcgcgaggtcgagcagctgcaggccgacgtcgagctcagcactcgccggcggcagcagctcagtcagctcgtgaccgagtcgtgggagcagtacgacgcgagcagcgcggccgcccgcgtcgcgcagctcgagcggcagcggctcgtgctcacgagcgcgagcggtgacctcaagcgcgcggcggcggctgagcaggaggcgcgggtcgccgcgacggccgctcgcgccgccgccgacgaggcgctcgcggcagcccgcgccgccgtgcgcgagctcgagggcctcgccggcgcgatctccgaggcggagcgctccatcgccgctgacggccgcggcgagctcgcgcccgagcctgtcgagcagctcgaggcgcggttccgcgaggtgcggcggcgcatgacgctcgccgagctcccggctgccgcgcgcgaggtcgaggggcggctcggcagggagcgcgagcgcgcgatcggcgagcgcgacctcgccgcgcaggacttcgcggcggccgcgacgagcttcaaggagaagtggaccgtcgcatccgccgacctcgtcgcccgcgtcgacgatcgcgccggcttccgggcgctgctcgagacgatcgaggcgaacgacctgccctcgcaggagcagagcttccgccggctgctgcgggccaagtcgagcgacgtggtcggcttcctgcgcaaggagctgctcgacgcgccgaaggaggtgcgggagcgcatcgcgccggtgaacgagtcgctcgggcggtcgcagttcgaccgcgaccgcttcctgcgcatccgggtgaagctcacgcgcggcgacgtcgtgcagcgcttcatgcaggagctcgcgcggatcgccgagggcagttgggacgacgaggacgccgcgtcggccgagcgccggttcgaggtgctcgcgcagctgatggcgcgcttgggctcgagcgagccggccgaccgcaagtggcgcgagctgtgcctcgacacccggctgcacgtctcgttcctcgccgaggtcgtcgaccgcgccgggctcgtgctcgagacgtacgactccggcgcgtcgctctcgggcgggcagcagcagaagctcgtagtcttctgcctcgcggcggcgctgcgctaccagctcacgcaagagggctcggagcggcctcgctacggcacggtcatcctcgacgaggcgttcgacaaggccgacagcagctacacccgcatggcgatggacatcttcgtcgagttcggcttccacatggtgctcgccaccccgctcaagctgctgcagacgctcgagccctacatcggcggcgtcgcggtggtgcagaacccgacgcagcggcagtcgaccgtcgaccagctcggcttcgagcgatcgcggtga

SEQ ID NO: 43748 - DNA, 1149 bp, Agrococcus pavilionensis RW1
gtgatcccggtcgacgaggctcgcgctcgcgtggcagcgcgggttgccgcgctcgcccgggactgggccgccgatccggcggccgcggccggcgcggtcgtgcgcatcgccctgcacccgccgagcgagcgggacgcactcgcacagcagggggcggtgatcgcctggcgcgacgcctggacggcggccgcgaccgaacccggggtcgcgctcgagtgggcgacccgcagctggagccgtctcggcgcccagtcggtgccggcgcgcgtcgccatcgagggagcggatgcgctcgcccgcttcgccgggcgagagacggcggatgcgtgggcgcgcgtgcgcgaccgggtcgcggccgcgatcgagggactgggcggcggcgcggcggtcgcctcagccgcgcgctcgcacgccaccgcgctcgcagcctatggcgacgacgagttccagacggtgctcgacgtctcgcgctggctcgccgagcacccggtcgatggcatgcggccgcgtcagctgcccatccgcggcgtcgactcgaagtggttcggcgcgcaccgcgcggtggtgtcggcgctcgtgctcgcggcgagcggtcgggagtcgctcggcatcgtcggcgatgcgcagcagttccgggtgcggctgctcgacgagcgcgtgctcccgggcgctccgcgggccttcggcgcgtcggtggatgagctcgcggtgctccgcgtggaggccgacgcggtgctcgtgctcgagaacctcgagacgctgctcgcgctgccgccgatgcccggcgtcgtcgcggtgcacggggccggctacgccgccgccgagctcgcgcgcatcccgtggctcacgggtgcgcgagtgcgctactggggcgacctcgactcgaacggcttcgcgatcctccaccggctgcggtcggcgctgccgtcggtggtgagcgtcgtcatggacgaggaggcgctgctcgcgcatcgcgacctgtgggtgcgggagccgaagccggctcggggcgcctacccgacgctcgagccgttcgagcaagcggcgctcgaccgcgtgcgcgacgagggcgacgtgcgcctcgagcaggagcgcatcccgtgggcattcgcgcttgagcggctcgacgccgcactcgctcagcggtag

SEQ ID NO: 43749 - DNA, 1461 bp, Acidovorax sp. MR-S7
gtgaaagcagacaaagccatcgcgacctaccggcgcatgcgggcgcagccgctgtggcgtctgcttgcctcgactaccgggcctaccgtcattggcttgcttcaatctcatctgtatgagagcgagcgaagcctccctgcctccatttttcacgaacgcatcgcaagggatctggaagagctgcgcgcccaaggcgaagactttccccaaacggcacaggcgtatgtcgccagctggctcgccgatgggttcttggagcgacgcttcccggctggggcttcagaagaggaatatgaactctccacggcggccgtcgaagccattcggtttgtctctggcctggcacagccgcactccgccgcgaccgaaagccgcctgacgctcgtcatcgaggctttggcccgacttgccgaggacaccgacactgacaaattccgccgcatcgaccggctcatggccgagcaagcgcgcatcgacaaggagattgacgccatccagaaggggcagatgcgcgtgctgccccatacaacggcgctcgagcgcacgcgggagatcatcacgctggccgatgatctggcaggtgatttccgccgtgtccgcgatcagttcgaccagctcaatcgcgatctgcgtgaacgcatcatggacaacgatggcaatcgtggagatgtgctggattcgctgttcgccggaatcgacctgatttcagagagtgacgccggaaggactttctccgctttctggcgattgcttacggacccagaacaggccgcaacgcttgatcaagcgctggatagcgtgatgtcgcgggagttcgtggggcagctcgaagccaaggagcgacgattccttctgcggctgacgcgaactcttctcgagcagggtggcatggttcacgaggtgctccagaccttcgcgcgcagcctgaagcacttcgtccagagtcgtgagtacctcgagcaacgccgactcaatcacctgctgaaagacgcccagcgcgcagcactgtccctgaaggatgaagtcagggccactgaaaccctccagtacacgcttgagctcacgagcagtcggttgcgctccttgtctcaatgggttctgcacgacccatccctgcaagcattgcctgggcagatggctgaaggggatgcgccgcccatcgacctggagtctgtgagcgaattggtcgcacagtccgagatcgacttccgaacactgaaggccaacgtgctggcagttttggagcaacgctcccaggcatcgatttccgacgtgctggagcagttccccgctgcacaggggctgggcagcgtcgtcggcctgcttgcgttgggcagtcggcatgggttcaaagccgaccacagtgaaaccgtagggtgggttggaggcgacgacgagcgtcgtagcgcccgaattccaaagatcttctttttgagggagcgggccaatgaactggtctga

SEQ ID NO: 43750 - DNA, 708 bp, Acidovorax sp. MR-S7
atgaactggtctgagaacgacgaatcggcaatgccagccgaagcacaagcacccgatgctgttcagccgcctgccaacaccctgttcctgggcgacagcggcgagttggcattggatacccggcgcgccttggtgcaactgctggcagggccgtcgctcgatggacgtcggcatccaaaactctggccgatcttggtacgagacgaagcggtgatacgtcggcgccttgccgagctgtttctcgaactggttatcgaccgagatgtacaggtcgccttcacgcgccaggcagataccggcgacctcgaagtgcccctcctgctgcgtcgcgcccagctgacgttcattgactccattctgttgctccaccttcgccagcgattgacccaggcggactcgcaaggcgaccgtgcagtggtgtcgacagacgagatcacggagttcctctccctgtatgagcgcgccgccaacaccgaccgtgcggggttcgtgaaacgggtccacgcctccatcgagaagatcaagaagcacagcatcctgcagaaaattcgctcgagcgaggatcgcttcgagatttcgccgacgctgaagctcctcttctcggcagaggaaatacaagcgctgacgcacctgtatcagcgcatggcggccggagagacaccagcgcaactggttcagactgaagctgatgaggatgccgaccaatga

SEQ ID NO: 43751 - DNA, 3375 bp, Acidovorax sp. MR-S7
atgatcccggaaccccaaaccgcctccttgttcgcccgcgagcagtttaggatgacccgcctgcaggtttacaactggggcactttctccggcctgcacgacgtgccgatcagcgagcgaggttttctgtttgttggtcgatccggcgcagggaagtcgacgctgctcgatgcattttcggcgttgctgacaccacctcgatggatcgatttcaacgcggctgcgcgcgaggcggaccgcagtggccgtgaccgcaacctcgtcacctacatacgtggcgcgtgggctgaacagaaggatggggagtcgggagagatcgcgacacgctacctgcgcgcggggacgacctggtctgccttggcgctgacctaccaaaatgcgttgggtcagtctgtggtgctggttcaggtgttctggctgcggggcaatgcgaacggcagcgccgacgtcaaacgccactaccttgtcatggagcgggcctttgacctgcgcgaactggaggacttcggccaatccaacttcgacatacgaaagctcaaacagtctttccccgaggcgtttgcccgcgacgaatttcgtccctattgcgaacggttctgtcgtctgctcggcatcgagagcgaaatggcgctgcgtttgctgcacaaaacccagtcggccaagaacctcggcgacctaaataccttcctgcgcgacttcatgctcgacaagcccgagaccttcgaggtggcggatcgcttggtcagcgagtttggagagctcaatgcggcccatcaggcggtcgtcacggctcgcgagcaggttcaaacgctcgtgccagcgcgggagcagcatcagcgcagggactcattgatgctgcagcgcaatggactggatgagcttcggctgggggttgatggctaccgtgagactcgccgtattgagctcctcaaagagcacgtggcatccctggaggtgcaagccaacggttcagaaggtgaagtggggcgacgtcaaagcacgctggataaccacgccgcaatcttgcgcgatctggagcgacagcaccgtgaagcaggcggtgatcagatcgagcaatgggaagccgagaaatcggggctggagagccagcgcacggatcgcctgcgcaaacgcggtcaggccgaagatgcgtgcaagaagctgggctggagccttcctgatttgcctcaagccttcgctgagctgttgggcaacgcacggcaggaggttgaaaactgggagcagcgcagcaacgatagccgcgccgagcagttccgcctggcaggtgaaaaaagggacgctgaggcagcattttcgcaagcagtgaaagaggtgcaggcactccagcgccagccatcgaacattccggcggacatgctggaaatgcgtcgagacatcgctgccgccatcgggatctcggagtcggcacttccctttgttggtgaactcgtcgaggtaaagcctgacgaggccgaatggcagggggctattgagcgcgtactgcacgggtttgcactctcactcctggttgacgaacgccagtattcggcgctggcgaatcacatcaacagcacccatcttggacagcgcctggtgtattaccggactggccgtccagagacctggcaagccaagcccatcggggcaaattcgctcgtcctcaagctgaacgtcaaggaggggacgtatgccgattggctccaggccgagctgcgacaacgcttcgattacgcgtgcgtcgactctattcagtcgttcaggagtgctgatcgcgccattacccgtgagggtcaggtcaagcacagcaaaacccggcacgagaaagacgaccgtagaagtgtcggcgaccgacgaaactgggtgctcggattcgataaccgggagaagctcgggctctttcaagctcaggcacaggagctggctgacaccatttcgcgcctcggcggggagatcgaaaaactctccgaccaagacaagaatcgtgcgacccgagcgatgcagtgccaaaccctggtgaatctccagtggcaggaaatagatgtgctcccattgctggatcgcatctccaccattgaacggcagatccgcgaagcgcgcgaggggaacaccaccctgctgcaaatcagtgagcagatcgagaagcaaaagaaactcgtcgatgatgctgacaaggatcttcgccaggcaacgcgtgcgcacgactcgattgttgaccagatcaagaccagcacccagaaactggaatccctcttgcaggacgcgtctatcgttccattgacgccccatcaggtttcgggtctcgacgagcgcttcgccaagcagtcagatgcagtccggctcgacaacctcgacaaggtgacaacttctgtagaacgcgcactcaatgcggagatcgaagaggtcaaccgtgggattggtgcctgcgagaaggaaatagaagcacgctttgctgatttcaaacggcaatggccgatggacgcgggcgacatggacacgagccttgccagcgcgcctgacttcttcgccaaactggttcgactggaaacggatgggctacccgcctatgagcagcgattctttgaattgctgcagaaccaaagccaccaaaatctggcagcactctcaacctacctgaacgatgcgcgtaaggcgatcctggaacggatggatctggtcaacgacagtcttggtcaggtgcccttcaaccagagtgccaatcaacgcacctatctgcacatcgacgccagtgaccggcagcttgtcgacgtcaaggaattcaagcaggagatccagcaggcactgagccatgcatggacggaggatcgcgagtttgccgaggcgcggtttctagccttgcgacgacttgttgatcgactcgccagtcaggaccccgagcaaaagcgctggcgcgagactgtgctcgatgttcgacagcatgttgagttcatcgggcgggagatcgatgaaagcggcgtcgaggtcgagatctaccgcagcggagcaggcaagtccggcggccaacggcagaaactggccactacgtgcttggccgcagccctgcgatatcaactgggcgggaacgaccacggcgtgccgatgtatgcgcccgtcgtgctggatgaagccttcgacaaggcggataacgagttcaccgctttggcgatgaacatctttaccaatttcggattccagatggtggtcgctacaccgctgaagtccgtcatgacccttgagccattcatcggtggcgcctgcttcgtggatatcagcgatcggcgcgtgtcaggcgtcctgctgatcgagtacgacggtgatcgtcagcggttgaagctgccagagcacgctcgagaggaggctagcgttgaagcttcctga

SEQ ID NO: 43752 - DNA, 1188 bp, Acidovorax sp. MR-S7
ttgaagcttcctgaagatgttcggcagcttcttgcccgtcgctttcaaagcaagcaccgcgagtggttgattggtgatccgggcgagagccaatggccgcaggaggttccgctcggcataccgacggagcaggctgcactgaggcaggtcgacggcgttcgcgcttgggtgagcgcatggcaaaggtggcaggctaacaccgtacaaacatcgggcaccttgtcctggtgtgggcgccggtggaaagcccttggcgtccagcgactgccggagaagctggcgttgcgcggcccagaggatgttgccatgtggattggtgagtccgcacgatgggagtgtgctcaatctcgctaccagacgctcaccgctcgctggccggtactggcgcagcagttgccgaggtactttgatgtcctggcggactacggcgatgccgattttcgtcggcttgcagagatgctggattggatagcgaaccatccgcaatccgacctctatccccgccagctgccggtgtccgggctggacagcaaatggctcgatggacgcaaaggactgctgacggatctggtggccgcaatacaagaggactcttccagcgacctggatttctaccagcgctgcggactgaaagcacctccactccttgtgcgaatgcgggtgctggatcaggcattgcgagcgagggtcggtggcgtgggtgacatcactgcaccagtggaagacctggcgggactcaatttgcccgtctcacatgtgtttattgtcgagaaccttcaaacgggactggcaatgtccgacatgccgggcgctgtcgtgttcatgcgccttggctataacgtcgacgtgttggctcgtttcccttggcttgcccgcgcgaagtgcatctactggggtgatttggacacccatggatttgccatcctgcatcgagcccgttcatacattccagagttgcaatccgtgctcatggacgaagacaccttgcttcgacacaagccactgtgggtggatgagtcggcgcagcatccagcaacggaactgacgctcctgacagaacaagagcagcaactctatcgggatctcaagcagcaacgctggggccaaaacgttcgcttggaacaggagcggatcaattgggatgctgcatggagcactttgaagcgctcgattcttcaaaataactga

SEQ ID NO: 43753 - DNA, 1434 bp, Lachnospiraceae bacterium A4
atgatattaaaaaagacaattccgaaagatttttataaactattccggacgcggaacatggatgcctatatgatgtttttggtctccatctatgatgagaacaatgaggtctatacggcgcttggactcaccatagaggatgggcaggcaatcatcggcgaggtgtgcagcaaaatgcagattgagtggatggaggacagcgaggaggcgcccgattcggcgccgggcacgccctctgcgattctgaataccctgattcgctggggatggattaagagcgattacgacgaacagttaaatacatatattttatcctttccagagtacagccagctctatgtagaactgtttaagaagctgcaaagcgaggacgacagcagggagcgcgagagtattctttctatatatagtgcgctgtttacctatcaggcggagcatgaaaaaaataatggaatattaagaagtgcgctggcaacctcgaaaaatctcgagacgctgctctccaatatgcaaaatggaatgcgcacgtattttgacgtgctttctgccagcaggaatttcatacaaatccagcaggtgctggtggaggagattaacaacagcgacagccagagatatgcgattctcacgacgacggacagtttttaccgctataaggagtctgtaaaggagttgatcagtcagatcttgagccagcatgatcttatgaaaacagaactttcgcggacattgcgccagagtacagccaatacaccagaatacacccgcgcggagactgcgctgcactacagcgacgaggcggtcgggctgatttacaagattgaacgtcagtttgacttaattgagcgcaagtacaacaaacttgtcgagcagaaggcagtctttgccaagcgcgccctcgcaagaattcactatatttttcaggagggggcagcggaggaggacagcgtcattcggctgcttcatttgatagaaaagagtcccgagtcggaaaggatacttggggcgttgggcaccaagatttgcctgacagcgccgtttaagcgctttgacgacaacagtatctacaaacgccatgacagcagtgagacgccgtttcagcccttggcggtggagcgtgcacaggagaaagcggcacagatcacggactttgtgcccaagccgcgctacacgagaaaggagttaaaggcgttttgtgaccggaatataaaggacggcgtgtttcgcgcgacggcggagacagtccagtcagtagaggatttggaaaaactgctgttcttatggcaggaagtcacaggaaaacagacaaagcaggacctcgtacagcttggaggcgaaatccagaacgaggagggatttaccttttcagcgctatgcatgacgatggaggaggagttcggcgatgaagtacatagaggagttgtcgcagagtga

SEQ ID NO: 43754 - DNA, 612 bp, Lachnospiraceae bacterium A4
atgaagtacatagaggagttgtcgcagagtgaggcggcaggaatcaagaaaacgatacaggatttgtttcgccagacctgtattttgcaggtaaaatgtgaccctgtgacgctggtgcagcgggacaatcccagataccgcatctgtgcaaaccacagagaatttattgcggattatctgtcggtgcttgactgtgaactggtgcatgacccgcaggaacatatcttccgcattaagggagaaagtatgccagttgaccggctgacactcaccgggacacgccttctgctgattctaaaggtgatttaccgggacagaattatgggggagggactgaacgcgacggtgacatgccttagggaaatccgggagactggcagcaatacaaacctgctcacgcgcaagctcaccgcacaggaatggcaggacgcgctgtccgtgctcaaggtgcaccagatcatagagcttcccggcgcaattggaaatcttgaagatgacacaccgatttacatctacagtaccatcaatattttctgttcgtcggtggagatcaatgagctgataaaaatgtatgaggagtctacaggtgaagaacgcgaagaagatatttaa

SEQ ID NO: 43755 - DNA, 3354 bp, Lachnospiraceae bacterium A4
gtgaagaacgcgaagaagatatttaagagaatgtgcctcaataactggggcggaatcacgcaccaaatccttgagtttcacgagtatgtcaacctgttcagcggcatgagcggctcgggaaaatcgacagtgatggacgcgatacaggtcatactgtacggcagtgtctcgtcgagctttctcaacaaggcggcagacgatgccaagaataagcggagtgtgctaagttatctgagaggagagcagaaggatggaacggcaaaccgcgcagggagtgacttctgttcgacgattgtgctggagattgaggatacaggaagccatatctcaaactgtgtagggctggcgtttgaagtgcgcaggaatgacaccgaacttcggaaaatgatttatttcagccattctggcaaaatgcctgcgcagggttatctgaccagcgcgggctgtccttataccaatcaggagatacgcaggctggtggaggagcgcgctgtaaacagttcatacagggagcgcagtgacgtgaaccgcatctatccgtccaaggaggcgtacaccaatgcactctatgacagcctgcttggctacattgacggaaaacgctttcatgtgatggaaaagagcgcgattgcactcaagatgacagacgggacagggcagtttatcaaggactatatgtttcccaaaaatgacggggatatcatcagcaaaatcagcgagcagttaggctcttaccgcgatattcaggaaaagattcaggatatgcgccgccgcatcgagctgttgaatgaggtgcaggaagccggagggcgcaaggcgggagtcagcgcagaactttaccgcacaagggcaatggtgcggtgtgtggatatgatggagctgcaggagaagcttgcggcagatgaggagggaagccaaaaagcggcggacgagctgcttcgccttgaggagcgccaaaaaaagcttgatgccgaactagaagcgcttgatgcggcgctgatacaggtgtctgcggacttgaaggcaagtgatttgggcgcaaaggaaatacaactggaagagcttgtaaaattacaggaaatgtacgcggcggacagcgagcagtggcgcaaggtcacgacagggcttaggcgctgggaggaggatgagaccgtcacagattatgtgagcaatcccatgctcaacagaatctccgatttctgcaagggaaaaatagaccaggaactgtgcgaaggactgcggaaaaatataaaggctgccaaggctgccattgatgagctgctagaggagtacagcagccagcggcgcgagcttgagcgggagatgaaggagattgggcatctggtcgaggatatgcagaatgacagaaaaccataccccgcagtgctcaaggaagcgagggcggcactcgagcgcaagctgacagaccgttatgggcgcaccgttaaggtacaaattcttgccgatttgtttaatgtggaggacgccgtctggaaaaatgctgtcgagggcagaatgggcaggctcaagctctcgctggtgacagaacccaagtatgcgcgcgacgcggcagcgctgtttcgtgagatgaaaaagtatgaggaggtcgagctgctcgacacagacgccctcgtcaaagccaacgctgccgccgatggcaattcgctgtatgaggcagtctttaccgacacgccatatgttgatgcgtgtctgagacggtatctgggacacattcaaaagtgcggcaccatcgaggcgctagagcaggtacgcgacggtgtcacgcccgactgctattcctacagcaattacagcttccgccaccttcgcaggaatgactatgaaaagtatgcctgtatcggcacaagggtgtccaagacaaaacttgcatcgtatcaggagacgcttgcaaagcaggaggcggcgcacagggaattgaaacatacgattgagcggctaaaggcgtccgagggatttgagaagctggacaatgacatggaatactttgtgcgtctgtcaaaggctggaaaagagcttgggaaggtcacagggaatatcgcggcgctcaggcaggacatcacacggctcagagagggcgagtacagagcgcttcaggaggagaaggagagactcgaggcgcgcagggacgagaagcggattgagcagaagcaaaaccagcggctgaccaatgagtacactcggataaagagccagaaggagggagaggcgggcaggcttcgagccgagcttgacgagaagcgtgccggctatcatgcggacgcgcagatggaggaggaggcagcaaatcagctacagacacgctcggcacagacggtgcgaaaccgcctttttgcgcagatcagtacactggaagagaaagagcaggcggaggcagaagtccttcaaaatgcaagaaaccgctttaacagagagtatccttcggtcggttttaacggtatggagaaggacaatacttgttatgagcgcctattgcaggattatcagagcgattacgagccgaaatacgaacaagagtttgaaaaacagtgtaagcagatttacaaaagtctgcgtgagaatgtgattgcgacgctgcacggcgatatcaatgctgccaaacgccacacctgtgacattaacagacttctccgcaagacgaattttgcagacagcacctatcagattaaggttgagcctgccaaggacgagcggggacagttttatgagctcctgacagcgccggagcttgacagcaaaaatacaggctcacacatgacggaggggcagcttagtctcggggaggatgaattttaccggaaatacgaacagaagctccagcttctgacagataaattcatgccggtacgcgaggaggacggcagagtgcgcgaacagcgtctgcgggatatggaggcgtatgccgattacagaaattacctgtcttttagcatgtatgagcaggtgacagatgagaacgggactgtgatccgggagaattttgtggacgagatggcagggcgggactccggcggcgaggggcagaatccaaagtatgtggcgctgcttgcaggctttgccatgctctacaattcacagagcagccgcgactccaagattaagctggtgctgctcgacgaggcattttccaagatggaccaggagaggagcgccgtctgtctgaaatacgcgcgcaagatggacttacaactgattgtctgcgtcccggacgagcgccttcagtccctgattcagaatgtggattgtgtctatggcttcaggagacaccagaaccgcatctccatgatgcatatagacaaggggaattatcttgagctgcttgaaggagacttctga

SEQ ID NO: 43756 - DNA, 1419 bp, Lachnospiraceae bacterium M18-1
atgaatttgataagcaagatcccaaaagatttttacaagctttttgcaagcaaatatatgaactattaccagcgtttcctgactgcggtctatgaagaatccggccggtcatattctctgctcggcctgacggagcgggagtgccgcctgatcatgaatgaacagatcgccgcggagacgctggactggagcgaggagcagtttgacgaggagggcgaactgctgaccaggagcaacatggcctccatctgtctaaaacatctggaagactgggggtggctgagacgggattacgatgaagtcctggacagctatgtggtctcctttccagaatacagccagctgtttgtggaactgtttcagcgcctttacagcgaagaggacacccgggagcgggaaagcgtcctgtcagtctacagttatctgtacacctacagctccgacagtgaaaaaaataatgacatcctgaaaagcgccctgcaggcctcccgttcccttctgcagatgctttccaacatgcaggagggcatgagagggtattttgacgaactgtccaggcagaggagctttctcggcatccaggaagtgctggtaaaggaaatgaataacaatgagagcaggaaatatgcaatcctcaccacgacggacagcttttaccgatataaggaagcggtcaaggaactgatcgaccggaatctgagtgaaaatgaggtcaggaagcaggaactggcgggaagaaagcgtgagctggcggagccggacaaccttcctgcggaggaaaggatagagtcccgccgcctggaacacgccatccggcttgctgacgaggcaatgaacatcatctgcctgatcgaacgggaatttgacgccattgagcgcagatataataagctgatcgagcagaagaccctgtttgccagccgggcggcggcaaggatccgctacatcctcatggagggcgcgctggaagaagatccgacggcggtgctggtcaagctcctgaacgagagcggacacagtgcggaaattctggaaaagctttctgaccggatgcatctgacagaacccttccgcacagtgaccgggcagagccttgcccgccgcaggaatacggagaaagcagtatttactccacaggctgtggccagggatgcggaacagcaggaagatttggatgaatttgtgctgaagcccctctacaccagacaggagattgccgaatttcgaagtaaaaacgagcggaacgggacttttatggtcacggaggacacggtgcgttccgcggaagacctggaaaaactattttttgtttggcaggatgcggtggagatcgcggacgatgcaagaaagatcgagattggggaggatctgcagaatcgggatggatgccgtttttctgcgcttacgatccatgaataa

SEQ ID NO: 43757 - DNA, 636 bp, Lachnospiraceae bacterium M18-1
atgattacatatatggaagaattatctgcgtctgaagcggagaatctgaaaaagaccatttccagattattccgtcagacctgcatcctgcagctgcggtatgacccggtcacgctgacgccgagggataatccggactacgagatatgcgtccgtcacagacattttatcgaaaattatcttgccgtgcttgggtgcgagatggaacacgacccgcaggagcacattttccggctgaaaggggaaggggcggagacggaaaagttcagccagaccacgaccatgatcatcctgctcgtgcggatgatctaccgggacaagatcctgggggaggggctcggcgcaacggtcacgaacttaggagaaatccgggaatacggggccaacacagggcttttgtcccggaagctgacggctgcggagtggcgggaagcgctgtatctgatgggcaggcaccagatgatcgagcttccggcggcagtccgggatgtgaaggatgagacgccgatctatctgtacagtaccatcctgctctatgtgagcgcggcggatatgaacgaattgatcgaagaatacagagaggaggcagacgatgaagcagtccaagaaaatcttccggcggatgctgatcaataa

SEQ ID NO: 43758 - DNA, 3426 bp, Lachnospiraceae bacterium M18-1
atgaagcagtccaagaaaatcttccggcggatgctgatcaataactggggaggcatcagccataaggtcatggaatttcacgaatacgtgaacctgttcagcggaaagagcggttccggaaaatccacggtcatggacgccattcaggtgatcctttacggcagtgtgtcggcagcttttttgaataaagcggcggacgatgcgaaaaataagagaagtgtcctcagctacctgcggggcgcccagaaggacggaacttcgaaccgggaaaatgtagacttctgctcccagatcgtgctggaactggaagatacgggaagccggctgttcacctgtatcggcgcggtgttcgaggtggggagccaggatacggaactgagaaaatatcattttttcagtcattcgggacagttcccggaggacggctacttgacggagcagggagtcccctataccacctcccagatgaaaaagctgatcgaggcacggagccattccaaggataaccggggacgggtggaggtgaaccggacgtacccttcgcgggaagcttatctgggcaccctgtacgattccattttcggctacatagatccgggccggctgatgaccatggaaaaaagcgccatcgcgctgcggatggcagacggcaccgggcagtttatcaaagattacatgttccccaaaagcaaggaggacacggtatcggccatcagccggcagctgggcgcgtaccgggagattaaagaaaaggtggacgacctggagcaccgcattgagattctggatgaggtccacaatacaaaccaggagctggtccggatcagagcggacaggctgcgggcggagacggtccttcggatcgtggatatcgagagctgcaagacccggctggaagcaaagaaagaggatctggaagcaatttccgtaaaaatctccggactggaggagcggtatggaagcctggatgcggataagaaggaaaaaacggaagagctgatcgaggtcaaggcggaactgcattccagcgattacggcgtaaagcagaaggaaatggaagaattgaaaacgaccatcggccttttgaagggaaattccaggcagtggcaggagatcctgcagaatctgaaggaatgggagacaaatgaggagatcagcggctatatcagcaatcccgccctgcagtgcctggaggagatcctggacggtgagatatcggagtccgccctggacaagttgcgcgctggtatccagaatgcaatggaaatgatcggggaagagcttgcggagctcaatgacagcatccgcggcacggccagggaactgagtgaaaaaaaggagatggcggaagatctgaaaaatgaccgcaagccttaccggaaggaactgaaaagcgccagggcacagctccagagcgagctgagcagccagtacggcaggaccatacatgtggaaatatttgcggacctgtttgatattgtggatgaaaaatggaagaatgctgttgagggaaggctgggccgtatcaagcacagcctggtgaccgagcctcagtatgccctggatgctgccaggatcttccgcaggatgaagcggaaggaatacgaggaagtggacctgatcaatacggcggcaatcaaaagagatggacccgcagccgaagccggtacgctttatgaggcggtccgggccggtgaaccttatgcggatctgtgcctgagaagatatctgggaaggatcttcaaatgcgagagtgtggaagaactccatgcagtgcgggatggagtgacgccggactgctattcctacagcaattatattttccgtcatttgcgggaggatgattacagacggttttcctgtatcgggaccaaggtttccaaggcgaagctaaaggagctggaagaagagatctatcagctggaacagcggcagatcggggatatgcagatgcgtgaaacgctgaaccgggcacagagctttgaacgacttcatcagagtacggggcagctcctgcagctcgcacaggcttccagagagctggagaattatctggataagcaggaacagcttgcgaaagaattgaaagagctggaagacgggactatgaccgcacagctgaaaaagcaaaaagaaatcctggagcagggcattcaagaactgacccggatgctggagcaggtcaataaggaacggatcggccgggagggcgatctccgggcggcacagaaggaatacggagattttcaggatagactgtccgcgctgcaggagggctttcgggcggatgaccgtctgctggcggaggtccgggaaggtctggaaattcagagcgaagccgcataccgcagaaagcagcatgacctgtgccagcgtcttgccgggcgggaggaggagcaggaagaacagcggatcctggcccggaaccgtttcaacagggaatacccggcctatggattttccggggtagaacatgagaatgccgtgtacgataagctgtgggaagaattgaaacgggattatgtgccccagtacaaggcggactttgagaaccagtaccggcaggtctaccattccctccgggaaaatgtgatcgccaccatccacggcgagatcaaggcggcataccggcacaggcgggagatcaaccggatgctgtccaggatccggttttccgacagcacctaccagattgacatcctgccggccgaaaacgagaacggacagttttacgaaatgctgatggcgccggagctggacagcaaggtgctggacaatgacggcttcgaaggccagctcagcattggtgaggacgcatttttccagaaatacgagcagcagatccagaggctgacggaaaagttcatgccccccagggacggggagggtgacaatcgttcccgccataaccaggagatggaacgctatgcggattaccgcaattatctgaccttcagcatgtatgagcgggtggaggacgaccagggaaatgtgaagaaaaacgcggtggatgaaatggccgggcgggattccggcggggaagggcagaaccccaagtacgtcgcgctgctggccgggtttgccatgctctatatgcagcagagcaaccgggattccaagatccgcctggtgctattggatgaggcattttccaagatggataaggagcggagcgaggtctgcctgcgctacgcaagggaattggagctgcagctcatcgtctgtgtgccggacgaacgtctccagtcgctgatccgcaatgtggacagtgtgtatgggttccggcggtatcagaatcagatctccatgatgcatattgacagaggggagtatctggagttgatggacgggggcggaagaaatgccggggagtatggagaaaatagcgcggaaatggaaagaaatgaagccatacatccattatga

SEQ ID NO: 43759 - DNA, 1383 bp, Dorea sp. 5-2
gtgaatttttttgattatatacgaaatgattcttttttcaagcctttaaatctgaagtatcgcagggtatattatgattgtatccaaatattgatcgaaagagcgaaggaactgccggttttgtatgaatcagatgcaaaagacagtataaccatttatctgaggaatgaggagatttccgcgtcggaagacagtgacgctttgcttcaggcgggagagatcctttctctgttccgtgagtgcgggtggctgcttccgcgggagatcgggcgcaatggagagtatgttgtcgatatctccaccgactgcagacggctcatggattttctcagaagaatgacagagaagaccgatgagggtgagatgtcgaaccggatctttgccatgtatgatatcataagatctgcttttgacgaagattccgtgcgccgggaaagaccttatacgaatattctcctgccgctgcttaataatgagacggagttaaaaaacgaacttacagatctaaagaacagtattgcaggtattatgaaagctgtgatcgcgtttcaggatattaacagtttcggccaatttatcataagagacgagatgttagaccatttcttccgggaatatttctttatcaagaataatgggttgattcctgcgcagctctcctatattaagggaaagctgcgtgtactcaggcagggagagatgtgcgataagatgatccgggaatgttctgaaatgcgggagatgagttacgaagccgcacaagagcgcgtagagaagtattttgcagaactgcagcattttctgagcgtggaatatgaatcgaatatggaaatgatcgacagccggatcaatacttactataaccttgcgaatacaaggatcatgctgatggcaggcaacgggatccggctagaagccgtgctccatgattttctcaccgcagtatcgaagctgccggaagatgagcgggacacggcgatggaaaaggcggcggactgcgcgcgtgtcgtcaatcagaaatatatcggatataagtcatttgaaaagaatagaagagcgaagaacgaaggggagaatatcgggcttgccgccgaggaattgtcagaggaagagaaggcggcgcagacagagcatctctttcaaagcgctccgaacagattttccgtggaacgggtaagtaatttcctcgacgtgcagctgggaaatgagaagaaaataagcatcaaggaaaagaaggtccataggaaagaggagatcctgatgtacgcggcggcgatggtttatgcaaggaataaggaattcccctatgatgttcagttgtcggaggaaatggtggagacggaggctgcggatattacgaatgtgacggtaagcaggagataa

SEQ ID NO: 43760 - DNA, 597 bp, Dorea sp. 5-2
atgagtgattacagttttatggagaaaatgagcggggaagacgcatatttattcaagcgatgtatccggaagctgctagacgcaacatttatcgtagaagaccgggatgaaaagctatatgaattcatagcgtctgagtcgaatcaatacgatgtcaatacatatctggcggcgatcggatataaagttgtggtggaagagcggatgaaggtagcgatgctgcagcaggcagatgaagatgtagagaccgtaggtttaaaaaggcttaacctgtatcgctttgatacgaaacagatccagttattgatggtgctctggggcttattcctggaacgtatgggatattcagatgcggtgtatgtgacggtgggcgatatcgtggataaatgtaagatctatcaggttatgatgaagccgtcagatttcaaagacgcttaccgtatatttaagagattcaacctgatcgatcacagcgacgatgtaggtacggaggaaggaaaggtacgattgtatccgtcgctgcttttctgcatggacatcggacagcttaggcgggtcatggaagaatatttggaaagcgaggatgaggatgaataa

SEQ ID NO: 43761 - DNA, 3312 bp, Dorea sp. 5-2
atgaataagacgatcttacggaaggtacatctggtgaactggtatggattcggcaatacgacgattcctgtctcggaatgcctgacattgatctcgggcgagaatgaatgcgggaagtcgactatactggacgccgtcaaatatgcatatacaggggatacacagtttaataaggcgacgagcggctataataccggggtcgggaaacggaatctgctctcttatacccgctgcctggtggacgccagcgccgggatatatgccaggcctgcagaaaagataccggtggtgtatacacacatcgcgttggaatattttgaccagatcaatgagaatccctttgtcctgggcgtcgtgatagaaacggcggtcacagatatcagaggaacgcactggtatgtgtcggatggaaacacgcttaaggatattgcatttgtatacgaagaagacgcggtaaaaaaaccttatgacgcgtccggatttcagaaaagaaacggtgtacagatgaagaataagaaagaggggatcaccctgttcatgcagatgacagggcttaaactgccttatcaggaggtgccgaagtaccagaggaagctcagaaatatcatggcatataacccggctgcgaagatccaggaattcattaaggaatccgtgttggaagagcatgatgttaattttgataaattaaaagaagcgaagaagaatatcgagcagatcaacagcagcctggaacagatcgatcaggaactcaaggatctggagtctatcctggcagattatgacgagcatgataagaaatcatttcggcttaagattgatgatattaagataaaatataaaaaacagatgcagtgtcaaagggagatccgtgaagcggaggatatcgtaaaggaaggcaggatcacgtgtgagacactggagaaaaggatccgtgaacagtatcaggagattgacgagatcgatcggtactattctgagacaaagagggcgttacgcgatcttgatgtgtcgaaagccatcgacgcttcacagcagctgatccatacatatgaagaacagctggctgttctggatgtggaaaaggaaaggcttgagatattccagaagaggatgcaggaagctgcggcacgtctgagggagtcaggagcggggaaaatggatgccaatatggcagggcttctggtatcgaaagaaatagaagcggcagaaaagcaacgttttatcgacacaatgaaagaagagatccggaagcgccgggaccatctgatcgaagagaggatactgcttaagaaagagtcggaagatatccggaaagaatgtatagaacagacggaaattattgaaaactgtaataaaaacagaaccgatcattcacatgtacgggagcagttagagctgatcagagagataaatcttgagtttaagcggcaggggattcctgatgaagcacatatggcgtgtgaatatgtggttgaactgaaggatgagaactggagaaacgccatagagacattccttggaatacaccgttatgcgatcatcgtcgctccgtcttcattcgatgtggcaaatgccgtgctggatcgctccgggcaccattatgtggagctagtcaatacaaagcggctggttcaaaaggagacagagtgcaaagcagattccgtattccattatctatatattcagaacgaaacggcggctgaatattttaaatactggcttggcaggatccacgctgtggagcttgaagatgtgccgaaatatgataacgccatgtcaaaagaaggcaagcttagccgcagcatggcggtaacttacatgaacatgaagaagataaaaagctattgtctgggcaatcaggcaattgagttgaataagagagccgccgagaagaaattgaaggaactggaagccagggaaaatgagatcatggagaagcaggaaaatctgcaggaagacgccgaatatctgcggatcagcctggatcattttaaagagtatgatctgaacgcccataaggaggcggcgcaggtatctgccagcctgaaggaagagagagggcattatcaggaacttatagaggcgcaggaacagaatgaagagttcatggcgttgaatgagcgtgtgacggaattaggaagacagttggagcagaagaagaaggcacagaccgagaacctgcagaagaaaacgatactagagacgacgatttccgagaaagaacgccgcatcaaaaagcttaaggcagaagaagaggagaaaaggaaagagttagaagaagagcgcagcaggaatcattctgccgccaaaagagcggtcgaagaatacgacggatacctgtccggcgagaatccgggcggagggctgatgcagtatgagatgaaacaatcagaagaccgccgtgtcagagaattggaaggagatatcagagggaagcagcaaagttataataaccgcaagcaggaagaggacagactgccggtgggattggagtatgaagccgcttatcaaagaagaagagggaagatatggatcgaggacctgcagggaatacagaagaagatgaaggagcagaccattacctatgagaggatattcaaaagagagttcgtgctcaatatctatgaagcggcgaaagacgcaaggagcgatatcgcggatatcaataaagagctgcggaagcttcagttctctaccagatatcagttcgatgtaaagctgctgagcgatcactctgattatgcgaagattctgcgctatgcagaatatctgcaggaaaccaacaatatgctggacgggcagtttgcatttaccggccttatgggatatgaaaatgacgaggtcgagacaagagagaaagagatccgggacattatcaataagatcatcgaccagaatgatatgacacagatgaagagattcgcagattaccggaattatatgagttatgagatcatcatcaataatgacgaggtaaaggatgggaaactgtcgaaacaggtagggtataactcaggagcgggaacgcagattccttataccctgattctctcggcagcgctctccatgctttataatgtcagggtaaattctgtcaggctgatcttcatcgacgagccgttcgagaagatgagcgatcataatataaagctgatgttggatttcttcaagaatcagcattttcaggtgatattctgcgcgcctcccaataagttggaatccatcggcaatgaatgcggagtgatcatcccggttctgaaggttagtaatgacaatatgcagatcgggaaggtgaagttccatgcgtga

SEQ ID NO: 43762 - DNA, 1191 bp, Dorea sp. 5-2
atgagaaggaggatcattttaaagccgacagagatttataaagattataagaagaataacgcggatatattaaggaaacaacatttcggcgacgccgtatcagagttaaaaagtatgggggtcatcactgcagaatgtctgaaattcagtgaagacattgagaagatctatctctgtgaagaaaagatggatacgatatatgagtggctggaagaggtatatggtgtggttcctcaaagctctattgtaaaaaagattaaaaaaatcatggagacatatgtctgcgcgggagaggctgcacaaaaataccgtgacagcatacttgcacagaccgaggatccgaggaaaatattcgatccggaaagaatagacgcaaatatgaagatgctttgctttctggaaaacaatacggaagaactgtatttgcgtgaggcatctatactggtatatggtgattcgaaatggttcgagaatcataattgtgacgaggtgtgcgcatggttaaggaattttgccggcatgtccggggaagaatatgaaagaaatgatgcagtgttggcgcattatcacatcataccggcggaacaggagatcttcataaaaggagattggaagattgcgtgggaacaatatgtgttggagacagaccgatttccaggcggtattgccatagcgtcaaaggatgtccggagtatacggaggattacagtgaatgcctcaagtcttttgacagttgaaaataagacatcataccagaggcttaaaaatcacaatatggcgatgatgtatctgggaggattcgcgagccgtccgcagatagagtttttgaaaaaagtaatccgggataatccggacgttatgtatcagcattttggagatattgacatcggcgggttcctgatccacagacatctgtgtaaaaagacgtctgcggcgtttgggttatactgcatgggggtgcggcaattgagtgacgaacggtttcaaggctgcttgaaagcgctgacagagaatgatcttgcgaggcttaaaggattgaaagaggacgcggcgtatcgtgaagtgttggaatatatggaaaaatatggtgtaaaactggagcaggagattgtgagttattatataggaagagatgccgaaatagatccgtatgattgtcatatatacggcggatgtggagaaagctcctga

SEQ ID NO: 43763 - DNA, 1353 bp, Pseudomonas aeruginosa PA14
atggaggatgcgctgcaagcgctgtccgaaatgctggctgcttatgccagccaggagctctacgagatcgacccggatgcaacgcatctccaagcaggtcgtgaacttcgtgaatggatcaagcggcgcctcgtcgtagaacgagaggggcgtatctacgcaaccgacgcgctggagtccgccatccagttcgtcgactcgctggatagtcggatcatgacctccacggcatctcgcctttcggtggtccagcgcgagattgaaaacctggaaacgggtctgaaccccagcccaactggccgtattgccagcctgcgccgcagaatccaggatttggagcacgagctggcgcgggtagaggccggccatgtcgacgtgctggatgaagcgcaggcgatagagggcatgcgcgaggtatataacctggccaccagcctgcgcgcagactttcgacgagttgaagactcttggcgcgaggcggatcgcgcccttcgacactccatcatcagtgagcagtctcaccgtggagaaatcgtcgatcgattgctggatggtcaagatgctctactcaacacaccggaagggcgtgtgtttgaaagcttccagcagcaactgaggcagtccgctgagctggaggtcatgcgtgagcgcttgcgcaccatccttcgtcatcctgcggttccaaaggcgctgaatcgtccccagcaacgtgagctacgttggctggcgttacgcctagttcgtgagtcgcaggctgtgctccaggcgcgcgcccgaagcgagcgcgatgtccgcggcttcatgaaaacggggctggccgccgagcatcatcgcgtcggacagttactcaacgacttcttcaatctagcgctcagcgtcgactggcaacgtcagtcagagcgccgtaagcctgcctgtttaccaccggttggcgtagccattaccggtgtcccggcaatcgagcgtctccgcttcaagactctggatgacgatgatgcgggcgagctggatctgagtttgaagcctgcggggttggagcagattgatgatgacttctgggatgccttcgacgggctggatcgtgaagcgctgattcatgacaccctggctgtgctggtggagcaggggcgccctgtgagtctcggggagcttgcgtctttgcttccacctgctcacgacctggaaacctttgcgctctggttggcgatggcgcgtgaggcaggtatcgaggtgctgacagaggagcgtcagttcgtggagctagttgacgaggatgagcaacgctggggcttcaatctgccttatgtcggactcgaccacgaggcactcaaggacatcgattgggagttgtga

SEQ ID NO: 43764 - DNA, 750 bp, Pseudomonas aeruginosa PA14; identical to SEQ ID NO: 41752

SEQ ID NO: 43765 - DNA, 3306 bp, Pseudomonas aeruginosa PA14
gtgaagcaggcactactctggcgtgacagcgagaccttcattctcaccagcatcgagctctataactggggcggctttcagggctatcaccgtgccgagatcgatccttccggcaccgccgtgatcggcccgacggggagcggtaaaacgacgctggtggacgctctgatgaccttgctgtgcgccaatccgcgctacaacctggcatccacgggcgggcatgaaagcgaccgcgatctggtgtcctatgtgcgcggcgtcaccggccccggggacggaggtgtagagcaatctcatatcgcgcgccagggtaagactgtcaccgccattgccgccacgctcgagcgtgacggtgcgcaggttcgactgggcgctgtgctctggttcgagggcaccagctcctcggcgtccgatctgaaaaaactttggctgttaagcgagtcccccgagcagacgctggagcactggctcagccagcatcacgcaggcggcatgcgggctctgcgtcagatggagaaggatgggatggggatctggccgtatcccagcaagaaagccttcctggccaggctgagggattacttcgaggtcggtgaaaacgctttcaccttgctcaaccgcgctgccggcctgaagcagctcaacagtattgatgagatctttcgagagctggtactggatgaccgctccgccttcgagcgggctgccgaggtcgccagcagcttcgatgatctaactgacatccaccgagaactggaaaccgctagaaagcagcagcgctcgttgcaacctgtcgccgatggctgggaacgttatagggccttgcaagaacagttgcaggataaacaagcgctcgaaggcatcctcccggtctggttcgccgagcaggggtatcgtctgtggttggctgaaaccaacaggcttgagaaggagcacaaacaggccgaactggatcaggcgcaatgcaggagtcagcttgagatccagaagggcgtggtcgatcaacatcgtcagcgctacctgcgagtagggggcgcagggatagatcaattacgcgggcgcattgctgattgggtcagggagtgcgataagcggcgcctgaaagccgagcaataccaacgcttggccaaggggcttggactcgcggatgagttatcggccgctgcgctcgaagaaaatcagcagcagatcgcggcacgcctggaaatactggcccagcaaactacagacgcgcgccagaaggcgttcgatgcaggtctcgtccagcaggaactcaatggccgcctgcagagcttacagcaggagcgtgctgaggttgagagacggccaggctcgaacctgcccgggcattttcatgcttttcgaggtgatctggcgcaggagcttggcgtcgatgagtcggccctgcctttcgttgccgagctggtgcaggtcaagcccgaggagctggcctggcggggtgccatcgagcgggcaatcggtagccaccggctccggatcttggtgccgcagggctcatcccaggccgcactgcgttgggtgaaccaacggcacaaccgcttgcatgtgcgcttgttggaggtaaaagagccgtcgtcgcgccccgttttcttcgacgatggctttacccgcaagctgaccttcaaggagcatccgtaccgagaagccgtaaaggcactactggcggacaatgaccgccactgcgtcgaaagcacggagcaattgcgtcatacccctcacgccatgacggcccaagggctgatgtcgggtaaagaacgcttcttcgacaagcaggaccagaagcgcctggatgaagactggctgaccggcttcgataaccgcgaccgtctggccttcttggctgagcagattcgcgaggtcaatgaacagctcgtgcccgccaagctggccctggatgctgcccagggcgatgtcggtcaattggagagtcaagcttcgctgctgcaacgcatcgaagagctgcagttcgacgatattgatcggccgggcgccgagcgtcagctgcagtcgctgcgtactcagctggacaccctgacgcgtcccgattctaaccttgccgtgatcaaagccgagctggatcaagccgaggccctgcgggagtctctggaccaacagctgcaacgactgattgagcagtgtgtgcagttgaaaactcaatttgaccaagccgcatctgctacccgtaaggcctatcgcggcgccgaaaaggggctgagcgatacacagcgtgaactggcgcaagcgcatttcccgatcctgagcacggatgacctcggcgatattgacgagctggaacgcaagcatacgcgtgagcttcaagggcaactcaaaacgctcggcgagaaactgggcgaccagaaaacagagcttgccaaacgtatgtccgacgccctgaaagcagacaccggggcgcttgcagaggtcgggcgagaactggtggatgtacccaggtatctggagcgtctccgtgtgctgaccgaggaagccctgcccgagaaactcaagcgcttcctggaatacctcaatcgctcctcggatgacggtgtcacccagctgctcagctatatcgaccatgaggtctcgatgatcgaggagcgcctggatgacctgaacagtacgatgcagcgtgtcgactttcagcccggacgctatctgcgcctggtggcgaaaaaggtcattcatgaaagcctgcgcaccttgcaacacgctcagcgccaactgaactcggcgcgcttcatcgatgatgaaggcgagagccattacaaggcattgcaggcgctcgttggcctgctcaaggatgcctgcgaacacagcaggaatcagggggccaaggcactgctggatccgcgcttccgcctggagttcgcggtatcggtgatcgatcgggaaggcaataatctcatcgaaacccggacaggttctcagggcggtagcggtggcgagaaggagatcatcgcctcctatgtactgaccgcttccctgagctatgcgctctgtcccgatggcagcagccggccgttgttcggcaccatcgtgctcgacgaggcgttctcgcgcagctcccatgcggtggccggtcggatcatcgcagcgctgagggagttcggcctgcacgctgtcttcatcacccccaacaaggaaatgcgcctgttgcgccaccatacgcgttcggcagtcgtcgttcatcggcgcggcgtggaatccagtctggtttccctgagctgggaagcgttggatgagcatcatcaacagcgcatcagggccatgcatgaagtcgcccactga

SEQ ID NO: 43766 - DNA, 1146 bp, Pseudomonas aeruginosa PA14; identical to SEQ ID NO: 41754

SEQ ID NO: 43767 - DNA, 1353 bp, Pseudomonas aeruginosa PAK
atggaggatgcgctgcaagcgctgtccgaaatgctggctgcttatgccagtcaggagctctacgagatcgatccggatgcaacgcatctccaggcaggtcgtgaactccgtgaatggattaagcggcgccttgtcgtagagcgagagggtcgcatctatgcaaccgacgcgctggagtccgccatccagttcgtcgactcgttggatagtcggatcatgacctccactgcctctcgcctttcggtggtccagcgcgagattgaaaacctggaaacgggtctgaaccccagcccaactggccgtattgccagcctgcgccgccgaatccaggacttggagcatgagctagcgcaggtagaagctggccacgtcgtcgtgatggacgaagctcaggcgatagagggtatacgcgaggtatataacctggccaccagcctgcgcgcagactttcgacgagttgaagactcttggcgcgaagctgatcgcgccttgcggcaatccatcatcagcgagcagtctcaccgtggagaaatcgtcgatcggttgctggacggtcaggatgcgttactcaacacaccggaaggacgtgtcttcgaaagtttccagcagcaactgaggcagtccgccgagctggaagtcatgcgtgagcgcttgcgtaccatccttcgtcatccagcggttccgaaggcactgaatcgtccccagcaacgtgagctgcgttggctggcgttacgcttggttcgggagtcgcaggctgtgctccaggcgcgcgcccgaagcgagcgtgatgtccgtggcttcatgaagacggggctggccgccgagcatcatcgcgtcggacagttactcaacgacttcctcaatctagcgctcagcgtcgactggcaacgccagtcaggacgccgtagacctgtctgtttaccgccggttggagtggccattactggtgtcccggcaatcgagcgtctgcgtttcaaggccctggatgacgatgacacgggcgagctggatctgagtttgaagcccgcggggttggaacagattgatgacgacttctgggatgctttcgacgggctggatcgtgaagcactgattcatgacactctggcggtgctgctggagcaggggcgccctgtgagtctcggggagcttgcgtctttgcttccacctggccacgatctggaaacctttgcgctctggttggcgatggcgcgcgaggcaggtattgaggtgctgacagaggagcgtcagctcgtggatctggttgacgaggatgagcagcgctggcgcttcaacttgccttatgtcggacttgaccacgaagcactcaaggatatcgattgggagttgtga

SEQ ID NO: 43768 - DNA, 750 bp, Pseudomonas aeruginosa PAK
atggcggggatcttcgatcgcattgcaggcgcccctggcgccgacaaaacggagctgacagcagagcccatggcgttggatgacggcatggatgacgaacaacctgtcaggagcgccgctgtacaggtcgatgagcgccggacgccgcaacgagtacgggaggccgtacaggaaatgctcaagtacggtctgctggaagagagtcacaagcccaacctgtatcgctcagcgctttccaatatcgaggcagtcgacagaatcctggagccgctcgaccttgccatgggggtcgacgaggttcgggggctggtgtttgttaccgttcgccagggcgaggtggccgagcaggatgactggtcgcaccccctagtgcgtcggcaaaggctgaatctggagcagtctctgctgatagccatcctgcgccagcagttcatcgcctacgaacaggaaagcggtacgggcgccagtcaggcatcggtagtggtcgatgagctgattccccaattgcaggtttacctaggcgagctgggcagtgaggcaaaggagcgcaatcgcatcatcacgctgctggatcagctaaaggggcatggcctggtgtcggctttagacgcccatgatcgcgtcatcatccgtcccatcattacgcacttggctaacccggagaacctgcaggcactcgtggcatggctgcgagagcaggtggagggcgcggcgacgccggctgccgatggcgaggagggtatggcatga

SEQ ID NO: 43769 - DNA, 3306 bp, Pseudomonas aeruginosa PAK
atgaagcaggcactcctttggcgtgacagcgagaccttcattctcaccagcatcgagctctataactggggcggctttcagggctatcaccgtgccgagatcgacccctccggtaccgccgtgatcggcccgacggggagcggtaaaacgacgctggtggacgctctgatgaccttgctgtgcgccaatccgcgctacaacctggcatccacgggcgggcatgaaagcgaccgcgacctggtgtcctatgtccggggagttaccggccccggggacggaggtatagagcagtctcatatcgctcgccagggtaagacagtaaccgcaattgcggccacgctcgagcgtgatggtgcgcaggtacgactaggggccgtgctctggttcgaaggcacaagctcctcggcatcggatctgaaaaaactgtggctgttaagcgagtcccccgagcagactctggagcattggctcggccagcatcacgcaggcggtatgcgggctttgcgtcagatggagaaggatgggacgggtatctggccttatcccagcaagaaagccttcttggccaggctgagggattacttcgaggtcggtgaaaacgcattcaccttgctcaaccgcgctgccggcctgaagcagctcaatagcattgacgagatctttcgcgagttggtgctggatgaccgttccgccttcgagcgggccgccgaggtcgccggcagcttcgatgatctaaccgacattcaccgagaactggaaacggctaggaagcagcagcgctcattgcaaccggtcgccgatggctgggagcgttaccaggtcttgcaagaacagctgcacgataagcaggctctcgaaggtatcctcccggtttggttcgccgagcaggggtatcgactgtggttggctgaaaccaacaggctcgagaaggagtacaaaaaggccgaactggatcaggagcaatgcaaaagtcagcttgaggcccagaaaggtgtggtcgatcaacatcgccagcgctacctgcgagtagggggcgcagggatagatcaattgcgcgagcgcatcgctgattgggtgagggagtgcgataagcgcagcctgaaagccgagcaataccaacgtttggccaaaggccttggactagcggatgagttatcggccgctgctctcaaggagaatcagcagcagatcgcggcactcctggaaatactggaccagcaaattactgacgcgcgccaaaaggcgttcgacgcaggcctcgtccagcaggaactcaatggtcgcctacagactttacagcaggagggtgctgaggttgagaaacggccaggctcgaacctgcccgggcaatttcatgctttccgaagcgatctggcgcaggcgcttggtgtcaatgagtcggtcctgcctttcgttgccgagctggtgcaggtcaagcccgaggagctggactggcgtggcgccatcgagcgggcaattggtagccaccggctacgcatcctggtgccgcaggactcatcccaggccgcactgcgttgggtgaatcaacggcacaaccgcttgcatgtgcgcttgttggaggtacaggagccgacgttgcgccccgtgttcttcgacgatggttttacccgcaagctgaccttcaaggagcatccgtaccgagaagccataaaggcactgctggcggacaatgaccgccactgcgtcgaaagcccggagcaattacgtcatacccctcatgccatgacggcccaggggctgatgtcgggcaaagaacgcttcttcgacaagcaggaccagaagcgtctggacgaagactggctgaccggcttcgataaccgtgaccgtctggccttcctggctgagcagattcgcgaggtcaatgagcagctcgagccagccaagctcgccttggatgctgcccagggcgacgttcgtcagttggagactcaagcttcgctgctgaatcgtgtcaaagaactgcagttcgaggatattgatctgccgggtgcccagagtcagctcgagtcgctgcgtacgcaactggccaccctgacgcgcctcgattctgaccttgccatgatcaaggtcgagctggatgcggccgaggccctgcaggagtctctggatcaacagctccgccaactgatcgaacagtacgttcagttaaaaactcagtttgaccaggccgcatccgctacccgtaaggcctataacagcgcggagaaagggctgaacgatacgcagcgtgaactggcgcaagcgcatttcccgactctgaccgcggatgacctcggcgatattgtcgagctggagcgcaagcatacgcgtgagcttcaagggcagctcaaagcgcttggcgagaaactgggcgatcagaaatcagagcttgccaaacgtatgtctgatgccctcaaggtagacaccggggcgcttgcagaggtcgggcgagagctggtggatgtacccaggtatctggagcgtctgcgtgtgctgaccgaggaagccttgccagagaaactcaagcgcttcctggaatacctcaatcgctcctcggatgacggcgtcacccagctgctcagctatatcgaccatgaagtctcgatgatcgaggaacgcctggatgacctgaatagtacgatgcagcgtgtcgactttcagcccggacgctatctgcgcctggttgcaggcaaggtcatccatgaaagcctgcgcaccctgcagcgcgcccagcgccaactgaactcggcgcgtttcatcgatgatgaaggcgagagccattacaaggcattgcaggatctcgtggggttgctcaagaacgcctgcgaacacagcaggaatcagggagccaaggcgcttctggatccgcgcttccgcctggagttcgcagtatcggtgatcgatcgagaaagcaggaatgtcatcgagacccgaacaggttctcagggcggtagcggtggcgagaaggagatcatcgcctcctacgtgctgaccgcttccctgagctatgcgctctgtcccgacggcagcagccggccattgttcggcaccatcgttctcgacgaggcgttctcgcgcagctcccatgcggttgcaggtcggatcatcgcggcgttgagggaattcggcctgcacgctgtcttcatcacgcccaacaaggaaatgcgcctgttacgccaccacacgcgttcggcagtcgtcgttcatcggcgcggtctggagtccagtctggtttctctgagctgggaagctttggatgagcatcatcaacagcgcatcaaggccatgcatgaagtcacccactga

SEQ ID NO: 43770 - DNA, 1146 bp, Pseudomonas aeruginosa PAK
atgaagtcacccactgacatcggtcgcagcttggccaggcaatggcagcgttctagtgttcggttggaccgcttactcaattccgctagctggccgcaaagcctcaatattggtaagccttcggcgcgactattcactgacaacatccaggcggtgctccggcatgtggaaaactggcggagcgtgaaagtgggtaaggtcgactgggaacccgtcagctaccgagcagggttggctccaatttccttgccaatgcgctggcacttgcgcggtccctccgaatggattgccgcaaccgacgatcctgcggtcagccaggaatacgctcaactcgagtatctggtcgagcaggtagatagttcctttcatgctctgctggtggcgcaacggagcctgtggttgacgaagccctctgaagaagtcatcgctacagcgcaacttgcccttcaattatctcctggcagtgctcaaggccgcccactacgcctgcttgcagagcacggagtggataccaaatttttcgagcgaaacgctaccttgctgacgaagctcctcgatgagcgcttcgacggtgccgcgtccgagcaaggactgacgacttttctggatgcctttgaagaaagcagtcattgggttctggtcgttccgcttcagcctggactgctgcccttcaaacggctcaggctgacaacttcggaactggccgaaactccacttcccggttcgcgattgctcgtagtggaaaatgagcaatgtgttcacctgctacccgaaccgttgccggacaccttagctgtgctgggcgcaggtctcgatttgcagtggttggcgtctgcgcatctggtcgggaaacagatcggttactggggcgacatggatacctggggcttgctgatgctggcgcgagcgagactccatcaacctgcagtcgaagcactcctaatggagcaggaggtgtttgaacagcactcacaggggaacacagtcgtcgagccggctaaagctctggaatcggctccccctggtttgctggctgacgaggctgatttctatcggtatctgttggtgcaagcgcgggggcgtcttgagcaggagtatcttccgaaggctcaggtcgagttggccataagaaagtgggccagatga

SEQ ID NO: 43771 - DNA, 1494 bp, Corynebacterium pyruviciproducens ATCC BAA-1742
atggcggtggccgatgctttgacgctggggcgggtgcgggaagaatccccggcctggtcgctgctggcggcaaccaacgcgccggcgatacttgcggtgctcgaagaggcgttccatggcgataaccgcacgttggcgggaagtgagcttttgatgcaggtcgattccatgctggtggagatccgcgaacagacgaagatggaacttcccaaatcagccgcagcctatgtgggcgactgggtgaaggccggctacctcgtgcgacgcagcccgcagggcgagacggaagaattttacgagctctcctccgacgcgcacgtcgcccttgagtacgtggaggaacttgtcgagccacagcgggtggtcacgggctcacggctggggattgtgtactccagcctcaccgatctcgctgcggataccgaccccgacgagcaagctgcgatcgcccgcctggaggcgcaacgggaaagaatcgatgcccgcatcgccaccatcagggagcgcggcgtcaccgtcgcttctgagaacgaggcgctggaacgggcgcgggaagtcttgaccctggcacggggactgcccacggacttcgcgcgtatgcgcaccgacgtggagaaggtggatagcgagctgcgggaatccatcgtggaatctgaagtcaacgctggtgatgtgctgaacagtgtgttccgtggggtggacctcatcgaggattcggaagcaggtcgcgccttccgcgggttctacgaggtgttcctcaatagcgagcgttccgcgcagattgacgcggtcatcgatgccatcatgtcccgtgattttgcggccaggttgtctatggaagaacgtgaggagctgcgtgggctcatgcgcaccctcgatgaatcttccggccaggtacatgactcgatgactgggttgtcacgttccctgcgcaggttcgtgcagtcgcgggaggcagagtcacagcaggcgctcatcaccgccatcaacgaggcgcagacgctcgccatgaaagtgggtaaacagggcatcgccggcagcgcgagaatcggtgtggagctggagctcacggcccggcaaccgcagtcgatctcctcgtggcagctgtatgacccggcagattatcggatcgaggaggaccttgtcacggccgagtccgggtccatcgacgtggaggctctgctcgcgcgtatccgagagacggagattgattggcaggagctcaccgctaacgtcaacgccgtggtgggggagcgcggtgttgcgaccatcggggaggtgctcgaggctcgtcccgctacgcaaggcctcgccagcgtggtggggctcatcaagctgggcgcgcgccacggggagcgtgccaatggaaccgagcttgttcggtggaagtccggcaccggcaaagcgaggcaagcccgcctaaatcggtgcgttttcaccgatcagatttcagatacgtaccgttcccgcatttttggaggaagccatggctga

SEQ ID NO: 43772 - DNA, 603 bp, Corynebacterium pyruviciproducens ATCC BAA-1742
atggctgacgataccaagctcagcgattttgacacgggcactctcaccctggcgcagcgtcgggcgctggtgaagctcatcaaggggccgtttgtctccgcgtccaattccgcagacgcggaggattttcacgtaatcagcgagtcccgcaaagaaatagcctctcagctggacaacctgtttctcacgctcatcgtggatgacacggcgggcatcgcctacaccaaggtgtgggacacagatctggaaggaatgcgcaagctcctgcgcgcgaagccactcaactttgtggagaccatcacgattctccacctgcgcaggcagctagcaaaggcgaaccccaacgagcgaacgatcgtcgataagaccgaggtgttcgaggccaccgcgccctaccaaacagcgcagggcaccgaccacaccaaacaggcaaggaatttcgattctgcctggaataacctggtgaaatcaaaagtcgtggtgcccacacctacgcccaaccgcttcgaggtgtcgcaggtgttgcgcgtcgtgttctccagcgacgagatcaaggccgtcacgaggagcttcgaagaaatgctagaggataccgatgagtaa

SEQ ID NO: 43773 - DNA, 3354 bp, Corynebacterium pyruviciproducens ATCC BAA-1742
atgagtaaacagccgatcgtcccaggtcaattgcgcctcaccaccctccaggtgcacaattggggcaccttcagcggcctccacacggtccacgttgcccgcgaggggttcctcgtctttggtccctctggttccggcaagtccacgcttatcgacgcagtgagcaccatcctaggtccctccggacgtccccgtttcaacgccgcagcaaccgaatccgggaagaaatccggccgcgacctcgtcacctattgtcgtggcgcatggcaaaaggaacacgatgcagaactcgatgatgttacccgctcctacctgcgccccggtgccatctggagtggcgtgggtctgcacttcagcgacgctaacggcacggagttcacggcaatccgcatcatgtgcctgtctgccaaagtggccacgcccgcagacatcaagaaccgcttcctcctcctgcccgggtttgtggacctcaaggagtgcgaaccactgggccacgaccaggcacaggaggcgacagcgaagaaactgttccccgagtgcattgccatgaaccgcaaccacgctccgttcaccgcggcgctgcgaaggcagctgggaatcgccgacgataaggctctcgagctcctgcaccgcacccaatcggccaaaacgctaggggacctcaaccagctcatccgcgaattcatgctgccggagccacccaccttcggtatcgccgattcggcagccgagaacttcgtgcaactcaaaaccgcctacgccaccgtggtgaaggcccgcgagcagatcgaggccttgcgtccgctccgagcaaacgcggcaaagcgcgacgagcttctcgctaccatcgacgctctcaatctagagttcgctgccattcccacctacaccgccaagcgccggctgcaattcgagcagtctgctttgcaagaaagccaatccatcttcgatgaagccacctccacactcgcgcaggtgaagaaccgcatagaggaactaggtgcccgggaacagggactcaacttggctatcaacgggcagcagggtgcaggaatcgcgcaggcgaaactccgggtgaaggaactgaaggcagagctggggcgagtacaaaagaactcggcgcaattccacgccttcctctcggatctcaccacggtgcggcccgcgaataacgaggatttcatcaacctgcgtggccaattgcaagacgaaattgccgtcctaacagaccacaaagctaccaacgccaagcgctacgatgaaatactttcgcggctgctcgaacttagaaagacactcgagcagaccaagaaggagctagacaccgcgcaaaaatacgcctcatccatggatgcgcgtctcctcgcggcgcgcaggctgatctgtgacatcacggggatcgatgagaaagcgttgcccttcgtcgccgatctaatccacatcgatcccgccgaggtgaggtggcagcctgctgcagagcgtgtcatgggtggatttgctcgcacgttgcttgttcccgacgaatactacggtgaggtcgtccgcgcggtggatgccacgcacctgggaaccaagctcacctacattcatttcgacaccgtgctggaagggtactccccgtcgcgatttacagcacgaacattgggttccaagatcatcgtcgagcccggtcgttttgaggggtggatccagtatcgcctgtcctcggggttcgatcacctgtgtgcggagaacgcagaggaattccgtcgcgccgaccgtgcggtgacgatggctggccagatccatgataagcagcggcacgtcaaggacgatcgttcccgtatcgacgaccgctcccgctgggtgctgtacgagaataacgaggagcgcatcgagcttctcatcgagcgccaaaagcgcacccgcaccaagctggaggcggaggagagcgcgagaaatcagctgcaggaaaaggaagctcgcgaggccgagcagatggccagcgccaagcgtgtgctggaaaccgaaagcttcaccgagatcgatgaagccggcgcgcagaaaaaccttgacaccgcgcagggggacctcgatcgactcgtcgattccaacaaggagctcgcccgattggaaagtgagctgcggtcggttcacgcggagaagaagaaagcagaaaaggagaaggaggcacttaccgagaaaatcggcgtggcgcgcaaggacgtgaaggttgcctcagatcagataaagttgcttcgcatcgcactcgagggcttggaaccattaagtcctgaggtggaaagtcgcgtgaaggctagacttctaagtttctcccactccgttcgtcgcgacaacatcgaccagatcactcgcgatgccgagaatcagatcaacaaggagcgaaaacaggcagtagatcggtgcgcttccaccgaaacaaacattcgcgacgctatggaccgctacctggttcggtggccggagcgccagggtgacctcgtggcggaaatggttgcggtgggcgattttctcacggaactagaccgtttggaaagagatgatttgcctgcctttgaaagtaacttccgcaagaagctctttggggataccaaccaccatctgcagcggctccgcaaggagatcacctcagctgcgaaagccatccgcaccgagatagacaagctcaaccagtcgcttgccgtggtggatttctaccccgggcgcaccctcaggatcgaggtccgtgaatcaatgacggccttggcccgggacttttcggacaagctcgcccgcgcagttgatggcaccctggaaaacgatgagtcccgcgcgcaggaacgtttcgaggccctgtccgccgtcatcgatcacatcgtcgtgtccgaccgcaccaccgccaaccagcggaagatgcggctcgatacgcgtttccatgtggcgttttatggtgttgaggttgatgcgactggcaaccgtggcgcggtgtatgactccgccgaaggcctctccggcgggcaggcacaaaagctctccagcttctgcctcgcggcggccctccgcttccgtcttaccgggatgggggaatccgcaagcaaggcgcgcaagtcccgcgtcgaggtggatggcaaagtttatccacgttacggcacgatcatcctagatgaggcgttcgaccgtgccgacgcggacttcacccgcacgtcaatggaggtcttcgatcagtttggtttccacatgatcctcgctacgccggaaaagctactgcaaccggtggaggattacatcggcggtgtcctcatggtggagtgcaaggatcggcgcacatcaaccacatcgtccctcaccatcgaggaggctgagccccttgcgtga

SEQ ID NO: 43774 - DNA, 1122 bp, Corynebacterium pyruviciproducens ATCC BAA-1742
ttgcgtgatgttgcctgggcccgtaaacgcgcgctcacgttttataacaacaactttcaatcctggttggctggtgatttctcgccgctttcgcttaacctgcagccgccgacggtgaaggacgtcgaggcagacggtggcgcggctttccgcgagtggaaagccggttgggatgcgcattgggcggagccgacgtacgtggacaagcggctggggctctacggtacgtactcggttcccttccggttggatatcgccagcgctgacaaggcagcccgactggccgggaaaactgctcactggcggcacctgaacgagattgccagcgcgattgcctgtggcactggaatcccagatgccatccccattctcgcccgcaaggtgagttcctgggaagactgggccgatctcacagtcacccagttcaacggtgtggtgcggtggctgcaggtccatgatgcgtctgactactttcagcgtgagctgccgattccgggtgtagacaccaagtggttggagaaacacggcgggctagtatcagccattgttggaaagccaactttccgcccgcgcccaacgatggtggagctcaagagccttgacgaggctgtgcctgttctcggtggtgtccgtcacctctcggtggaaagcgatgatttagagcgcgtccccgcaggctttgagcttgtcatcgtggtggaaaactacaccacgttcattgccttgccctccctgccccgcacccttgccgtctacggtggtggattctccgtgacggacaaactcgacttcattggggcgaatacccctgtgttgtactggagcgacctcgatagcgccgggttcgccatgctcgcccgcgtgcgggcccacctcccccaggcgcgttccgtcctcatggacctggacacggcgcgtgaacacctgccctttgccgtggaggaaccccaacctaccactgcgccaagccagttgctcacctccgacgagctagcgacgtttgagttcctccgcgagcactccgccggtacgtgcgcccgcatcgagcaggagcggatcgggtacccgtgggtctgtgatcgcctgaaccttgcaatggaaggcttccgtgacctgcggtag

SEQ ID NO: 43775 - DNA, 1539 bp, Treponema medium ATCC 700293
atgcaaagctctgacagtgcatatatagcaaccttaattgcggaagattcgggattgcggcttttacgttcaaagaatcccgcaccggttatttcatttctttttaaaatattcagagagcggcatctgcaaaccgtcaatgcagatcggtttgaaacgctgctggcggattttttgcgatcacaggaattttccggttttgacaatagcagtatcgacgattggtatgattgggaaacggcagaaatacaaaacagcgaagagttcagacttgcaacgcaaagcatcgaggcgcgcgctcattttttagcaaataaatggtgttcggaaaaggtcggctatatcaaaaaatactataatgagcggcaggatgtgattatcgaactgagcgcgggagtggaacggctgtttacctggctggatacgatggattcaaaaatgtttatcggtacagaatcccgctttcaagatattctgcataaactcagagagctttcggaaaacactacgcacgatcctcaaacacaaattgcagaacttgaaaaacagaaagaagcattgcagcaacgtatagatgcaattaaaacaaccggagaggcggaagtgtatacgccggtgcaaatggttgaacggttacgtgaagtttcaaaagcggcacgcgaactcttatcggatttccggcaggtagaagaaaattttaaaaccattcttgctgatgtatacaaaaaacagtcggtgagcgaaacaaaaggcgcggtgcttggctacgcccttgatgccaatttggaaatgaaggaaactccgcaggggcaaaccttcgattctttttgggactttcttgcagccgatgccggtaaaaacgagatcaatcacttaacccggacgattatcgcacaggtaaccgagcatggcattgcatgggaggattccttcctgctgcacctcaagcaatatctgcatgaagcggggcggaagattatcgacaccaaccattcgctgacgcaccggctcaaccgtgtgctgctttcgcgtgactgcggtgatcacaaacagctgaccgaacttattgcttttatcaagacgaaagcctttgaattagccgagcgtgatattgtttttccgaaagagtttggtattcaaacaaaagcggtactgcatttcccgcaggcacggacgcttatccttccgccgcttaaccaaagctttgaaccgatcgtatcattcaccgagcaagagtcggcagcgctgctgcagcgaagcggtatttttaatcaattttatattgatgaagccttgctcaaaaaacatattgaacagtatcgcagtcaatttctccatagcgccgttcaattttcgctgcacgacttgagcgaaaaattcccgatagaaaaaggtctttccgaagtcgccgcctattttgcccttgcgccgaaactcaaacccgccgccgttatcctcgatgatgcaaccgagcggattacatacacatacaacggcaagtcagtggcgctgacagtgcctaagattctattcgggtaa

SEQ ID NO: 43776 - DNA, 585 bp, Treponema medium ATCC 700293
atgatgacagcacagtgggcgacagtctgcataaaattgttacaaggggctatttacgaaaatgaggaacctgaggcatggaagctcttgcagcaataccagcgtgagattgccgcatattttgaacaaatcggtatcagcctctttattgaaccggccgacggctacgcatttttagagcaaaaagagagcgaagaaggggattctaaatctgttaagcttatccggcattatccgctgtcatttgagttatcattgctgtgtgtactgctgagggaggccttggatcagttcgatgtttctcaaaatacatcttcaatcttagtactgaaagcaagtgaaatacgcgggatgctttctatttattttaaagaaaaaaccgatcaaacaaaactctataaagaattaaataggtatttaaatcaagctgtagatataggctttcttaaaaacttgagcgaaaaagacctcagcaaaaccggcgatgcagatattgaccctgcgtatgaagtccgcagaataatacgggcaaaagtcagtgtcgatttcttagccgaatttaaagagcggctgcaaaagctttag

SEQ ID NO: 43777 - DNA, 3396 bp, Treponema medium ATCC 700293
atgcaatttgatttattgaaaaccgaagatattgataaaaacggaatgtatcttgatttttttcaagtatacaactggggtgtttttgattcaaaagtgtatacgatgcggtgcggaaaaaaggcgacgctgttgactggtttaaacggttccgggaagacaacgctggtggatgcttttttgtcgcttatcgtgccgccgcggcagcgcttttataaccaatccgccggagcggagagtaagcgggaacgtgatgaaatcagctatgtgttggggacgtatgggaacaaacgtgaggaagaatttacctccggcactgcaaaaaatttacgcacaaaagaaaactgtatttctattttgctcggctgctttgtgttgggagatgatcaaagaccgataacgcttatgcaagtgcgttttttttccggcggcggagccttacaaaaaatctattcgataacacatacgcggctttcaattgaagagatacaaaaagcagggattgattttacaccgcagagcaattggaaaaaacgcatgaccgaagtattcggcaccaagttttacgccgataattttgccccgtatgcagaagcattctctcagcttgcaggcttgcgttcggatcgggcactctatctcttttcgcaaacggttggactgaaaggagtcggcaacttaaatgactttatcagaacctatatgtttgaaggccgcgataccgaacgcgattttgatgatttggtaaagcattacgaagagctttctcagatatacaacgagatagaaaaagcacaagaacagctcagactgctgcaggaaattttagatgccggaaaaatatttgaagactgcgagcaaaagaacagaacattaaaacagttcaaaatgattttacagctgtggtatatacaaacagtcctggatacgattacaaaacgaatagttgttttacaacaagaaaagttgctcgctgataataaaagaaatatacttgaagctgaaataaaacagcttgatgccgatatggattcgcttaaagcagttattcaaaaaaatagcacggcaattctgatcaaagaaattgagcataagattcaattcaatgaattacggttgcagacatgccggaataatgtgcgggattatgaacagtgcgcccgtgttttatctttggaaattccgcaaacggaaaagaaatttaatgcgaatgcagcattgctgccgaaattgagagaaaaactcagtaaagaaaaagatgatctttacgaatcaagccttgaacggaatgcgcaaaatcaggtaaataaaaaagaagaacaagcaattatcgaagaattggaatcgctgagtaaacggacaacgaatatccctgcgcataatatcgggatacgggatcaaatatgcgcacatatcggctgctcggaaaaagaactcgtatttgccggagagctattgcaggtcgcaaaagaagaaagccgatgggaagctgcgatagaaaaactgctgcataacttttcgctttgtttactggtgccgccgcatctttatacaaaggtaaataaatatgcggcaacgcataatttaagaggcaggctcgtctaccttaaaacagataccaaaccgcagctgaaaaagagtttccctgaaaaaaattcacttattgcgaaattagagatacaaaaaaagcatgaactttccgattggcttgaagcgtatctgtatgacacattcgattatatttgtactgatgatacggaagcatttagcagggcagccaaggcgcttacctcgacgggtttaattaagtcaaaaatacgccatgaaaaagacgaccgcccgcagcagccgggtcggcaagcatttgtgcttggctgggataatattcaaaagcggcaggaactttcgttcagcttgaaaaaactgcaaaacgaaattgagaaagacgataccgctctggaagacagcaagaaaaaacaggatgatataaccgatcagcttactatcttgagcagtttggaaaagatgcaattctgggatgatcttgatgtgcaaaaatattcggctgcattgaatgcgtctcttgaagaaaaggaagctattctccgcggagacaaagaattgcggcagcttgaaaataaattgcaaggtttgcaaattgaaaagcaaacaaaagaagaagcgcgtaccgcttatattgaaacatcgtcaaaagcggaacagcagttgacggatatccgcatcaaacaggaacgatttaccgctcagctgcatcagtatgccgatggagaaagtgaagaaacacaaagagcgctcgctatttttacagagcatttcagtgtacaaaaaacttttgaacagtctgaagccgttgataccgaacgggatcggattgaattggcattgaataaagagagcgaacaggcggaaacagctgtcagaaatgcggagcggaaagtccgcgaaaaaatgtccgcagtgaaaaaccctaagccggatataaagcggaagtttccgtcgtgggaggctgatgtacgggatttccaagtggaagtatcggggcttgcagactttcaagccttttatgatcgagtgaaccgcgatgatttaccttcgtgccggaaaaaatttaagcttatttttaatgagcacgtaaaaaacgatattaccaattttaagaccatacttgataccggacgtcagcagattattgtcggaatagaggaattgaataaaagcttaaaaacaattccctacagcaaaaatcctccgacgtatatcaagctggaaaatcgcaaaacaaccgatcagtccataaaagattttcaggctctgttgttagccgcattgcctgactccgcgtccatctttaaccgcacatccggttcggaatttgaagagtataaaaaaattgaaacgctgattgcctacttaaaagaaaatgatccgcgccgtaaaaaagtgctggacgtacgccagtggtttaattttgccgctattgaatattatctcaacgacaatacgcaaaaacaatattacgaagattctgcaagtttgtcgggcggagaaaaatcaaaattaacctatacgattttagcatcggcaattgcatttcaattcggcattaccggtggagagggatattcgttacggctggtgatcatcgatgaggtattcagtaaaatcgatatggacaattcgtgctatgcaatggagctgtttaaagagatcgggctccagatgattctcgtaacaccgatggataaaatcaacatcgtagaagattatatcgcatcggttcacattaccgaaaagcataacgataatacctcgcgcctactgaatatcacgattgaccgatatcgggaagagaaagaacagtatgataagtgttga

SEQ ID NO: 43778 - DNA, 1317 bp, Treponema medium ATCC 700293
atgataagtgttgaagcgatcagaaaaaaagccgagcataaattcgtaccgtatctgtattccgtacttaatggagatgacgcttttttcccgttgcatattccggcggcacgaggttccgcaacggatgattttgccatgcggaaaacggaagcggaaaaactgtaccggcattcaaagcaggcaaagggattcggctacacggtgatgagtgctgttgttaaaacccgcagtaagggagtgcagaccattattgaaaaaatcctatttgaaagcgaagctgattttttgcgatttattcaaaaagaaacggaagcctgcaatttcaaaacaaacctcgaacatattaaaatgcaatgtctcaaacttgatgctgcagatattatgcatgactggacggtcaagcatagttccgttttaaccgaggcgtttgacgcacagtattgggaacagctttttttatgcgcggattggtttatacatcatagcccgtgcggattatacctgcgcgaaattccgcttccagtacacacaaagtttatcgaacaaaaccgtgcactcattttctcgctgtattgcgcactcaaaagagattggcatcgagatgaaaccgctgggcagcgcagtgatagagcacaaccgctcgctgctgaatcctgcaatgggcgtagcgcgggagaaaaagcaacggaattacaaaacactgcggaagctatatatgccgaatggggagttcgcacggcatcgccatttgtccgtctccgtttattggatgaggcaatcagcgtaactattgcgggagaaacgcttaaaagcggtgaagtacaactaccgcttgaatcgtttgcaacactgcgctttaattccgtcgatactatttttattgttgaaaatctgctggtgtatttgacattccccactgttcctaaagggctctgcattttcggttcgggatttgccgccgtacaattacagcacaatatccatctacgtcaaaagaagctctattacttcggggatatagacgaacacggttttgaaatcctgtcggaatttcgtgcaatctttccggacgttacctcattttgtatggatagcacaacttaccaaacattcgcgcagtttgccgttcccggaaaatcctctaagcggaatagtgccgacctgtgtctcaccgccgaagagttagcgcttttccgttatttgcgggaacacaccgagtgcaacagacttgagcaggaacgtcttccgcaggattttatcaaggaaagactcgcatcacttataacgataaggaatagttatgcaaagctctga

SEQ ID NO: 43779 - DNA, 1494 bp, Dermabacter sp. HFH0086
gtgagcgatcttcaaaccttcggcgggcatagcgcgaacgagcgcgccgaggcttacgagcggcttcgccgcatgtccacgtggcggctcctatccgccacgaaagcgcccgcgaccctcgcgattttgcagacggttttccccgcgggcgaccgtcggctcgaccgctccgagctcgtggcccgcgtggcgagccacctcgacctcctgcgcggcgacgaggatcttcagcgcggcgcttcggagtacgtcgactcgtgggtgcgcgaaggctatctcacgcgacgcgacgaccccacgacggtcgaaacgaccttcgaattgtcggtgtccaccgtggaagcgatcagcttcatttcgagcctcgaggagcatcgacctacgacgacggaatcccgcctcacgctcgtcatgcagcagtttgagcggcttgccgaggacaccgagggcgatcgagatgtgcgccttcgcggcctgcagcttcgccgcgcgcagatcgaaagagagatccaggcgctgagcgaaggcgaactcatgctcccgccggccgagcattccgcggagcgccttcgcgatatcctccaggtcgccgacgaactgagcggagacttccttcagtaccgcgaggaccttcgcgccgttgacctgcatcttcgtgagcagatcctttcgcccgaaggctcgcgcggcgaaatcctcgagcagctcctcgcgggcgatgacctcctcggtcaatccaaggtgggcaagaccttcacggcgttcttcaggatgctcaacgaccccaaacaaaacgagcgagcccaggacctcgtggatcgcctcctttcgcgcgactttacgcgcactcttacgcgccgcgaacgcgaccgcctcgcgaacgtcttcagcgacctgtacgagcccgcgcaagaggtcctcgacgtcaagaccgagctgtatcgctcacttgcgcgttttgtgcgcagccaggacttccgccagcaccgcgtccttctcgaccttcttcaagaggcacagggcatcgcactcgcacaaaaagacagtgtgagccaccgcaagaccgaagaggtcgatctggggctttcgcgcgcgcagatgagctctgtcgctcagcaccttcttaaggatccgagcgatcccggcgtgccgccagaggccgaggtccacgatgcctcgcgtctcagcgtcgaggttctggatgagcttgtccgcacgaacgacattgacctcgtggggctcacatcgtccgtgaacgaggtcgttcacgcgaaaggtcaggcgagcatcgggcaggtcgttcgcgaacagggagcacctcaggggcttgcgagcgtcatcggcctcatgtttctcgcaacggcacacgcgaacgctcgcgagggggacacggagatcgtgcgctggcgcgaagattcccttgaggcaggtggcacggactacgcagcgcgcgtgcccgcgttcttcttcctcagcgaggtaccggagccatag

SEQ ID NO: 43780 - DNA, 795 bp, Dermabacter sp. HFH0086
gtggataactcttgtgcggccggtaggcttgagggcgtggaaaacgagaagggtccgcgcatgcgtgaacacgaggaaaccgccaccgacggtcgcactgctccggcggcaacgccgagcactgaccgcgacgaatgggcgctcgcaagcgacgacgaagacctcacctacgccggctccacagggggagcgctcgtcgaggactcccgccgcgttctcgttgccctgcttcaagggccctacctggacggtcgacgcgacccccagcgctacggccagctccttcgcgatcgcgcctacatcgagcagcgcctcgccgacatgttcctggaacttgttctcgacgacgacgcgcaggtcgcattcgtgcgccagagcgaggacgaccccgatgccccgaagcttctgcgtcgactcacgggcctcaaccgactcgactccgtcctcctcctcgtgctgcgtcagcacctccttacgcagtcctcgcgcggccagcgcgccgttgtgagcgaggcggaactcatcgccaacatcgccccgtatcggcgcacgacctcgaccgatgaagccggcttcacgaaggacatccgggcctcaatcgcaaaaattcagcgcgcgggcctcctcgaggaacagggtgactcgttcgaggtttcccccgttctcaaacttatgatcaaccccgatacggcgcgcacctttatcgacctctacgagcgcgcgggcgacgacatcacgggcgcagccaatgcgctcgacaaccccggagccacgaacgaagggcaggcgaagtga

SEQ ID NO: 43781 - DNA, 3420 bp, Dermabacter sp. HFH0086
gtgagcaacgcgaccggcgaagtgcccctcagcgacgtgcacaacaccctcgacggcttgggcgaagcaggcgtcggaaccgcccccgaaaacccccgccgcgagccgagcgaccccgagcacccgcacccgggccaatggcgcctcaaccacgtgcagctgagcaactggggaaccttccacggcacccacgacctcgagattagttcgaagggctacttcctcacgggtggtcccggcaccggcaagtccacgttgctcgacgcgatcagcgcgctcttgacaccacctcgtgcgctccacttcaacgccgcggcctccgacgccgggccgcgcagcacgaagtaccgccgcaccgtcgcgagctacgtacgcggtgcgtgggcgatgcactacgaccccgcaaccggtgaattcagccaggaagttctgcgggagaactcgacactcagcgtcgtgagccttcgcttcggcaatggactaggtgaaaccctccagctcacacgcatgttcttgcttcaatccgggcacagcgcggattcggacgtcaagagtctttacgtcatctcctcgaaaccctacgacgtgagcgaactgcgcccgttcgtgggcacgagcatcgaggggcgcgaactcgaaaaaaccctcgagggcaccgaaaccttccgtcagttccgcgagtaccgcgcgcgcttcagccagatccttgggatccccgacgaaaaagcgctcggcttgcttcacaaaatccaatccgcgaaggagctcggcgacgtcaacgcgctccttcgcgactacatgctcgacgaaccccgcacgttcgacctcgccgatcaggcactcgcaaacttccagaacctctccgaggtgtacgacgcgctcgtgaccgcgcgcgaacaacgcgacgttctcacgggcctcaaaaatgccgaccaggtatggcgggaggctcgctctcgcggaagtgaactcgtcgaccgccgaaacgacatcgatgtgttcgctgccagccaccttgtgcggctcctcgccgacgaaaaagaccggctgacgcgcgaccaggaccgcctccgtgcgcaccgcaaccgcctctcgcaggacatttccgacgcccgcggcgaccttgctcaactcaaagagcagcgcaagagtgccggtggcggtgagatcgatgactggaaaaagcagatcgcgggcctcgaggttgagcgcgaccgccgccgcgaacgcgcgaccgaattctcgggacagctcgcgctcgcgggcctgcacactccctcgaacgaagaaaccttcacgcaaacccagcgcgaggtggcgaagctgcgcgccgcactcgaggaggacgaaaagaacgaagcgcaaacccagtgggaagccgaggccaaggtccgcgagcacgcgcacgctctcgaaacgacccgccaggaactcgcctctctcacgacgcgcgcctcgaacctccactccgatgacgtcgcgcttcgcgatctcctcgctgagcgtacgggcgtcgcgccaaccgaccttccgttcgccgccgagctgctgcaagtgcgtgcgggagaggaagaatggacggccgccgccgagcaggcgctgcgcggcctcgcccgctcgatcctcgtgcccgaacgggcctaccgcgctttcgcgcgcgagatcgacggtatgaaactgcgccggcgcgtgtcctataaccgcatcaacacgaacgtcaaaaccgcccccaagaaactcgatgcgcgcgcgctcggggcgaagattgagatccgcgaaggcgagttccacgagtggctctcgaacgaagttgcctcgcgcatggactacctgtgtgccgaaaacctcgaggagttcaccaagcatcctcgagcggtattgcgctccggccagatcaagcactccgcgacacgtcacgagaagaacgccgagcggcagatcaacgaccgctccaactgggtgctcggcttcgataaccgcgcgaagcgcgccgtattcgaagcggagcgtacacgcgctgaacaggctctgttcgaggcgcaggcccggcgccgcgatctcgaaaaggaagcccagacccgccgcgaaaagctcttcgcgcttcaggcaatccaggccgtgacgtgggacgacgtggatgccgcgagtgtcgctcgccgcattgccaacctcgaggacatggtgcgtgcagccgaggacggctccagtgcccttacagaaattgcgcggcagatcgatcaggtcgaaatgtcgatcagcgaaggcgatgaggagcttctcgagatcgtgggccagcttggtcgcgtcaacgagcagctcgatcagatcagcgaacgccacctccaggccgaagcccagctcgaagagcgcacgctctcaccggaaacgacggccgacctcgaggagcgctttcgcgcaatcgcacccacactgctcatctccaacatcgaccaggtgacgcgcgatgcctccgcgacgctcgacgcggaactgatggcgctcacgaagaaaaccgcacgcgctgaagaagatatgcgcacggccatgcgcgaattcacgcggcgctggcccgcgggcggtgccgatgtcgacacctcgctcgaagccgcccccgagtacctcgcgatccttcgcgggatcgaagaggaaaagcttcccgaagtcgaggaccgcttcttcgaattcttcacctcgaacaccctcggtgacgtgcaggctctcgcgacagcgatcgcgcgcgagcccgcccaaatccgcaagcgcctcgcgaaaatcaacgagctgctcgcgcaggttgagttccatgaagggcgctatctccagctgtcgatgcgacccgtgcacctcgctgcgctcgacgagttcaagcgcgcgctcaacgaggcaacgagctcaagcctcgaaaacgacctcacgctcgaccgagacaaagcggaagaacgcttcctcgcgctccaaaacctcatggacatcatcacgaaggcccgcacgcgcgaagacctcgcctcccgtgcgatcctcgacgtccgccgccacgtccacttccacgccgaagaggtcaacgaggccggcgaagttgtgcacgcgcacgaatcgggcggccccctctcgggtggccagaacgagcgcctgacgacgttctgcctcgctgcggctttgcgctaccagctcgccgggaccggcgtggatgtgcccaggtatgcgcccatcattatcgacgaggcgttcagcaagggtgcgggcaagttcattaccgccgcgatggaatccttccgtcacttcggtttccaggtggtcctcgcgaatcctggaaagaatccgcaggcgctcgcgccgttcatcggtggcgtaggcgtcgtctcgatccgcgaggatcgctattcctccgtgagcccgatcgatttcattccggctgcgtag

SEQ ID NO: 43782 - DNA, 1449 bp, Bacteroides stercoris CC31F
atgcaagtagaagaaataacacaaatattacgagagtcaccaagcgtacgactcataaaatcaagaagtgtggatttcttcttgtcttttgtcattgaagcgtttgaaggacaggcggctataatgcaggaacgcttgcacatgctactggagaaccgactggatgagcaggaaaatacgttggtggaggatgattctgaaatgacgagactagtagagtctaacgaacagaaagcgaaacggctcatcaaagactggacagacaagggattcttgaccaattatcagaacgaagagggagaggtgatatacgagatttcgtcacacacaagcaaattgatagattgggtggtgagcttgaaaaaagaagattacatcggtactgaatcaaagttcaagacactgttttcccaactgaaggaattggtggaatactcgaacgaggaccgtgagaagcgactagaattgcttcgaaccaaaaaaatggagatagagcatcagattcagcggctggagatgggcgaagaggtcgaggtttacgaggactaccagatagaaccacgatacaacagtttgaacaaactggcgaaggaactgctgagcgatttcaaagaggtggatgacaactttaaggggattatcaaagagatatacgaacgtcagacagaaaatgcagagaagaaagctttgttgaactacatctttgatgcatatggcgaactaaaacaatcgcaacaaggcaaaagtttctatgcattttgggagtttctgctctcggccgatctgcagaaagaatgggacgagttggctggtgcactctacaaaacgctggaaaatagaggcattgatgcacatgacatgtttctcaaggaaatgaaaaagcatctgtttgacgctggtgagaaggttgcgaaaaccaacgaccgcatgagcgagaaactgagtcgaatcattcgccagaacggacatatgaatgctgaggcgacaaagcaagtaatcaacgatataaagaaactactcatcgaagccagcagacggaaagaaaagccagatgcttcgcttgaatacgaaaccattgacatcaatctgccgctggagcgccctcttaccctcacacctgtaaaagaaactgtgtataaggataagcctgacatagccggactgagtctggctgatttggagagtattggtaaactctacaatccgtatcacatcgaccgaaaggtgctgagagaccgcatcaacgaggtgttgaacgacagacagcagacgaccctggcagaggtgatagagcggaacgaaggcgtggagaaaggtctgtcggaagtgtttggatacattggcgtgctgaaggaatataagacggtggtaagcgaagaacgccagcaacatattatttttacagaaaataaaaccatatcaattcccgaaattataataacaagatga

SEQ ID NO: 43783 - DNA, 585 bp, Bacteroides stercoris CC31F; identical to SEQ ID NO: 41699

SEQ ID NO: 43784 - DNA, 1278 bp, Bacteroides stercoris CC31F
atgactataatgcagcagatgaacctatttaataccagttcggaagtggcaggctttaagcttgactatttggaagtgtggaattggggaacctttgacaaaaaagtgtaccatatgaatttgcatggtaacaactcgctattgaccggagcaaacgcctcgggcaagagtacgctgatagatgctctgctcacgctgatggtgccactgaagcgccaacgattttacaatcaatcatcgggtgtggagaagaagggcaaccgtacagaggaatcgtacttctttggcaactatggcaatcagcagcaggagggtgcagcgagcacaaccacgctgagattgcgcgacaaaggggctcgttcggtattgcttgcatcgttctgcaatgtggacaagcgcgtggtgacgctgtttcaggtgcgctactacactggcgaggaactaaaggtactgtttggtgtagcccgagagtcgttgactatagagcgtgacttttcagagtttgacttgcatggcgattggcgcaagcgactgacgaaaaaatacaatacgaatgaaacaaaacgcacgatagagttttttgatggtccggtggcatatggcgaaaagatgataaccctcttcggtatgcgttcggacaaggcgcttacactcttcaatcagatagtgggtgtgaaagtgttggacgatctggacagttttattcgtacgaatatgctcgaggaactgccggctgaggagaagtatcaggaactgaaggacaacttccaaaatctgatggaggctaagactaatatcgataaggtgaaggagcagattgcccaactggaacctatcaatgcattgacagaggaactgaaggagatagacatacgcatagttgaaatggagcaggagaagagtgtggcagcctattggtttgctgcgcgaacggtggatttgtgcgacaaggagttggtgtgctgcaagagcgacttgaggaaactggaagataggttgaaggagttgaaggtgcagaagggtgagctggaacaagagcaaatgcgcttgacggtggctattgagaaggacgaggtgggtcagcagatacatgaaattgaaaaggaaatcaatcagagagtgaggatacgtgataaccgcaaggccaaagccgaagaatacgataagttggcaaagctggtgaagatggaacaaagtcctgatgtagaggtattcgaaattaatcgtgcgaccgccaaacgcgagaaagatgctctgcaagtgacgattgacaggtaa

SEQ ID NO: 43785 - DNA, 1575 bp, Bifidobacterium animalis subsp. lactis Bl12; identical to SEQ ID NO: 41902

SEQ ID NO: 43786 - DNA, 810 bp, Bifidobacterium animalis subsp. lactis Bl12; identical to SEQ ID NO: 41925

SEQ ID NO: 43787 - DNA, 3498 bp, Bifidobacterium animalis subsp. lactis Bl12; identical to SEQ ID NO: 41904

SEQ ID NO: 43788 - DNA, 1221 bp, Bifidobacterium animalis subsp. lactis Bl12; identical to SEQ ID NO: 41905

SEQ ID NO: 43789 - DNA, 1458 bp, Pseudomonas sp. CFII68
atgaaagccagtacagccattgctacgtttcgtcggttgcggacccagccattgtggcggttgttggcctccgatcatgggccgctgaccctgggactgctccagacccatctgtacgaaagcgaacggggtctgcctgcatccatcttccatgaacgtatcgaacgggaactcgaagagcttcgcgtgcgaggcgagcatctgggaacagcgcaaagctatgtagcgggctggctgtcggaaggctatctcgaacggcgcttcccgccaggcgcgtcggaagaagaatatgagttgtccaccgcagccatcgaggcgatccggttcgtttcgggcatggagcaatctcattcggcggcgaccgaaagccgcctgactttggtcattcaggcactggtgcatctggcagagaacaccgatacggataagcaccggcgcattgagcgcctcttggccgagcaagcccgcatcggcaaggagatcgacgccattcaaggcggccagatgcgcgtgctctcagaagcctctgcccttgaaagtactcgcgagatcatcgcactggccgacgacttgacggctgactttcgtcgtgtgcgcgatcaattcgaccagctgaatcggggattgcgggaacgggtcatggacagcgaaggcaatcgaggcgaggtgcttgattctcttttcgcgggcatcgatctgattggcgagagcgaagcgggcaggacgttttctgcattctggcgattgctcactgatcccgaacaggcggctattctcgatcaggcgctggatagtgtcatgtcacgcgaattcatagcccgactggataccggggaccgacgtttccttcgacgtatgacgcgtacgttgctggagcagggcggagcggtccatgaggtattgcaaacctttgctcgaagtcttcgtcattttgtgcaaagccgtgagtacctggaacaacggcggctgaatcaagtgttaaaaggtgctcaacgagcggcgcttgggctgaaagatgagatcaaggcgacagagacgttgaattatcgtctcgacctgaccagtgccaaggtgcgctcatattcccagtggaaactccatgacccttctctccaggcgcttcctagtgaaatgcacgaaggtgatgccccgaccatagatctcgaatcggtcggcgaactggtggcccagtcggaaatcgatttccgaaccctaaaggctaacgttctggatgttctgagccaacgagcccaggccacgatcgccgatgtacttgaacattttccagctacccaaggactgggcagcataatcggtctgttggcgctgggtagccgtcacggctacaaggggcagtcccatgaagttgtaagctgggtaggtggagatgattgcccgcgtagcgcccgtatacccaccctctttttctcaagggagcgaatggatgaattggtctga

SEQ ID NO: 43790 - DNA, 702 bp, Pseudomonas sp. CFII68
atgaattggtctgaagagctgaataccgactcgcctggcgccgctacgaccattgatgaggctggtcccgatgcgttgttcatcaatgattgtggcgaactgccacttgatacacgtcgagccttggtccaactgctctccggcccctcgctggatggcaggcggcacccaaagttgtggccgatattgatacgagacgaagcggttattcgccgacgcttggcagatttattccttgatctggtgatcgatattgacctgcaagtggcattcattcgacaagtcgatactggcgatattgaagcccctagactgcttcggcgtgctcagctgactttcatcgactcgatactgctgcttcacttacgtcacctattaactcaggcggaatctcatggtgagcgggccgtggtctcgacagaggaaatcgtcgagtttcttcatatctacgaacgaatcggaagtaccgatcaggcaggttttaccaagcggatttacgcctcgatcgagaaaataaaaaaacacagcatcctgcaaaagattcgcgccagcgaaaatcgattcgaagtttcacctaccctgaagctgctcttttccgccgaggagatccaggcgctcactcgtctttatctggacatggcggctggtgatattcccatgggcgaagaaactgcagaaccgggagaggaaacagacgaatga

SEQ ID NO: 43791 - DNA, 3375 bp, Pseudomonas sp. CFII68
atgaatacactttcccgaaccggtctgttattggctcccgagcagtttcgtatgtcgcggttgcaagtttacaactggggcacgttctccggggtgcacgatatacctgtctcttcgcggggttttttattcgtcggtcgatccggagccggtaaatcgaccttgctggacgctttttcagcgttgttgataccccctcagtgggttgatttcaatgctgctgccagagaagcggaaaaaactgggcgtgatcgcaacctggtcagttatgtgcgcggagcctgggcggaacagaaggatggtgagtccggtgaaatcgccactcgttatttgcgcaccggtaccacatggtccgccttggcgttgagctactgtaacgatgccggacagagggtggttctcgttcgacttttatgggtccggggtaatgccaatggcacaggggacgtgaagccgcatttcctgatcttcgaaagggattttgatttgcgcgaactggaagagttttcgaaatggaatttcgatgtacgcaaactcaagcagacgttcccggaggccgtcagccatgacaagtttcgtccctattgcgagcgtttctgtcgaatgctgggcatcgagagtgaaatggcgcttcgtttgttgcacaaaacacagtcggcaaaaaacctgggggatctcaacatattcttgcgagatttcatgctcgacaaaccggaaaccttcgaggtcgctgaccggctggtaagcgaattcggtgagctcaacgccgcgcatcaagctgtcgtcattgcacgagagcaggttcagacgctggcgcctgcccgggatttgtatcagcagatgcagacgttgcaactcgaacactccagccttgaagagcttcggatagggctcaaccaatacgagcaaatgctacgcattaatcttctgggcaagcacattgccgacttgcgtatcgaggcgcaggggcatcaaggggagcatgacaaacttcaagctgtactgaagaaccataacgcaggactgcaagacttggagcgccgacatggcgagttggggggcgaccagatccagcaatggagaatggatcttggggctcaggagttgcagcgcgacgaacgcttgttcaagcgtcggcaagttgatgaagcctgccggaaactgggttggaccttgtgcaccactcctcagggttttgcagaacaggttggtgaggcgcgagaggaagcggagcgttgggaaagtggtaatgcagggagtcgagacctccacattcaattggacggaaagaagaaagagaccgagagcacttttgaacgagtgcgtagggaggttcatgcactcttgcgccaaccttccaacatccccgcggacatgcttgatctgcgtgagaaaatcgcttcggccattggtgttgccgtcgatgccttgccttttgtgggtgagttaattgaagtgaagccagaggaggccgcgtggcaaggcgccattgagcgagtgctacacggtttcgccctgtcgctactggtgggtgagcgccactacgcagcgctttcaaatcacctcaacaacacgcatttgggcaaacgcctggtttattaccggacgggtaaggtcgagtcctcgctgaccaggcccagcggcgtcgaatctctttttctcaaactgaacgtaaagaatggtactcaggccgactggctcagaacggagcttcaacaacgtttcaattatagctgcgtcgattccgtccaggcgtttcgaggcgcagagcgtgccttgacgcgagagggacagatcaagcacagcaagatccgccatgaaaaggatgaccgtcgtaatatcaacgaccgtcgacattgggttctgggttttgacaaccgtgacaagctggcgctgtatcaacaacaagcgcaggagctggccgacgagattgctggtcttgacgcaaaaatcagtgcgcttttggagcaggacaaaactcaaaggatgcgggccattgtctgtcagacgtttgtaaatgtgcgttggcaggaaatcgatgttgcaccgttgcttgagcggatttccatgattgaacggcagatcaaggaaaccttgtcaggtaatgtcgctttagagggggttgccgagcagatcgcgcaattaaaggataggatcaagcaaacctctgagacgctgctgaatgcacgagtagcgttagagactgcgcagaaacagatcaggatggacgaggagaggcttcaggcacttcaatgcgacatgccggccgtatccctcacacctgaccaacagcgaggattaaaggagctttacaacgctttatcggattttgtcaaccttgataatctcgaccgtgtgacaaggtccgtcgataaaaagttgggcgatgagcagtcaatcgtggcgcagagtattgctgaacgcaaaaacggcatcgaaagaagcttcgacgacttcaagcgacgctggccgatggacgccggggacctggataccagcctgctcagcgcccccgatttcttcgccaaactggcccggctcgaatccgacggcctgcctgcccatgaatatcgcttcttcgagctgttgcgaaatcagagtcatcagaatctggcggcactttccacttatatgaatgacgcccgcaaagccattctggagcggatggacttggtaaacgaaagcctcgaccaggtaccgttcaatcagagcacaagtcagaaaaccttccttcgcatcgaagccaatgatcgacaattgtccgatgttcgcgaatttaaacagcagatccaagaggtcctgctccatgcatggagtgatgaccgggagtttgcagaatcgcgctttatagagttgcgtaagcttgtcgagcggctttccagtcaggaccccgaacaaaagcgttggcgtgatgccgtgctggatgttcgtcaacatgtcgaattcattggccgggaaatcgacgaagaaggtattgaagtcgaaatttatcgaagcggcgcgggaaaatccggtgggcagcggcaaaaactggcgacgacttgcttggccgctgcgcttcggtatcagttaggcggcagtgaccatggtgttcctatgtatgctcctgtaattctcgatgaagcctttgacaaggctgacaatgagttcactgcgctggcgatgaatatatttaccaacttcggtttccagatgattgtggccacgcctcttaaatcggtgatgactctggagcctttcatcggaggcgcctgttttgtggatatcagtgatcgcaagacttcatctgtattgctaattgaatacgacgacggccaccagaaactgaaattaccagcacatgtgcgcgaggaggcggaggttgaaactccctga

SEQ ID NO: 43792 - DNA, 1179 bp, Pseudomonas sp. CFII68
ttgaaactccctgaggatgttcgtgcgctcctgattcgaaaatttcgcaccaaacaccgtgaatggatgcgagcaggtgttgtccctcaggaagcactgctcacctggcctctggaaatcaacctgggtattccgacggaacaggctgccttgcgccaatccgagggcgtgcgtacctgggtgtcttcctggcaagcctggcaggggcccggcactctggagtggagtgagcggcgctggcgttcgctgggcactcagcgcttgccccggagtctgatactggcaaatcccgctgagatagccctatggataggtgaaaccacacgctgggcaacagctcaggatcgccacacgacattgattgggcgatggcccatgcttagtgacgtccttacgcgacattttgatgtgctggctgactatagcgagactgactttactcaccttgttgaaatgctgaaatggattagcgatcaccccaattcaaacctcttccctcggcaacttccaatcgccggcctcgacagtaaatggttggaaagtcgtaaggggttgatctctgagttattagcttacattcagaacgatcctttaagcagtcgggactttttcctgagatgcgggctcaagccgcttcctttacttatgcggttgcgcattctggatcctacccttcggcgtcggttcggcgggctgtctgacatcactgctccttgggaagagattgcgggcatggacatgccattgagcagggtatttatcgtcgagaatctgcaaacaggtctcgcttttgaagacttgcccggaacggtgttgatcatgaggttgggctatgccgttgacatgttagggcgtttaccttggctcacccgcgtgccttgtttctattggggtgacctggacacacacggttttgccatcgtaagccgtgcgcgcagctatctgccaagcctgaggacgatactgatggatgagcgcacgttgttgtcgtacaaaacattgtggggggaggagaaagagccacacccctccatcatgctggccaatctcacagtaagggagcaggtcctctatgagaagctcaagcgcaacacgctagggcaaaacgtgcgtctggagcaggagcgaatatcgtgggatttcgcttggcgggagatacaggaggtggctagtgattga

SEQ ID NO: 43793 - DNA, 1419 bp, Osedax symbiont Rs1
atgctttttaataagcttccagaagacctatttgtcccattttccggacaaaataggcatatataccaaacggtgctcatcgaattggcagatctttttttcgatgaagatttaatagagccttttatcgccaaagatttggtgcgttccacgattgaaaatgcggtggtccgtatcggcctgcgaaaatggcaaagagaagcggaagacactgaagacgattatcaaccgccgcgttcaacggctgaatatgcaaatcgaatctaccgacgcttagtttcgacaggctggttggaagaagagcagcaaatatacaaaagttatgtattaatggcgccttccaatagctatttgctccgctcattagtggcgattgctaaaatggaaaagcgctcgtacggtggtgccgtgctcaatgtgctaagctctttagaagcggcgattaacgatcctgaagggcgtggtattacgctgcaggaagcggcccaatcttccgctgaattcagtgcgcatttaacggatatgttgctcggattgcgagagcttaaaataagtttagcgcaatcgactagcccgcaggaaatagttcgacagttttttgatacctttgtcgaacaaattttggtctctgattacaagacattaaaaaccaaaaacaacccctttcgatttcgtcgacaaatcatctcactgttgcgagatttacagtttgatccgattaagctggaaaagctaattaaccattatcagttacagtttgaaaatgattacctagacgctgaggcgatggtacacacccatatcaaccgtatcatccgtatttttgactcggtcgataaacgtttagacagtattgatgactttagatacaaattggaaaaacgggtagctgacactattcgctatatggataagacctcgccgggcatggcctccaggctatctcgtttaatcagtgccgtggctaaaaatccgcttttactcgatcaacagccgatcacccagctagaaaatagcggctttttatcaccgagtagtattagatcgccgatcagacgaaaaattcaggtggctccaagagttattcatcagcaaattattgaccctaaagtactcgaacttcgcgagttatttaaaagctataaagagcgacgagaagtgcgtgtcgatcgaatcgaaaattatttgcacaggcacttaagcccgggaaagagcttgtccgctgagcaattttcaatagagagtatcgaagattatatttgttttagttatattcgacacttggcttctctgggaaagagaggcaaggccacacacgagaaataccagattgaatttaaagacaattacactgaggtagacgacatggttgtatgtcgagattttaccatccactctaccaaacaaggatctaaataa

SEQ ID NO: 43794 - DNA, 744 bp, Osedax symbiont Rs1
atgctgagcgatcttcaaaaatatatcaatcgcagtgataagtatcaagagcaagactttattcgcgcagcaaacctattgatgaccaatcagtttattcacgctgatcgtagctcacatcgcgagagctattttttaatatcctcacatatagagtattttaaaaatttattttccgcccttggctggtcatttatttatcagcccgacgaagcgtacctaggaattttaccgcagggagatgagcgcaatttaaaattgaaattagatgagtcgttaatcttgttatgtctgcgtcaaatgtacgagcaaaagttagaaaattttgagatcgaaagtggaaaagcttttacgagctctgatgaaattttaagcttattcgagacattgaccggtaaagacctacccaatgaaacgcgcaccaaggagctgatctcactgtttgccaagcacggtttgatagagagggggaaaatggaagagggcaatgctaagaatatattattcagtattttgccgactattcgccaagtagtagtggaagaccatatcaagcaaattgaattgttgtgtgatcctgagcacagcagagatgcattaagtgcagaggaagaggcgctggaagaattagacgatactgagcaagagggtgctcaacacagtgcggcagccagtgaggatggccacttggctaatagcagtgtagatagcaatagtatggagagtaagaatgaaacagcttaa

SEQ ID NO: 43795 - DNA, 3444 bp, Osedax symbiont Rs1
atgaaacagcttaatcgtatagtcctcgttaactggtatgtattaggtgcggtggaaattccgattaaaggtaatgttgcgatcgtcggtcccaatggctccggaaaatcatcactgttagatgcgattcaaaccgtgctgctgggggggaataaacgccatttaagttttaacgcatccgcaggacaaaaaagtgagcgttcattgcgcacttattgtttaggctttatggatgatggcggcaagcaaggcagcgcgcgcgaagattccgtctcttatttggcgctgagtttttttgatacagaaaccgccactgaaacatgtgtgggcatagcgattaatgccaataccgcctctccagatgaggagatactaggccgtttcatcatcccaaatttctctgtgcagttagatgactttacattgaaggatggcgttgggcgcatcccaaaagactgggatcaagtgaagcaagagctgtttaaacaagctccagaaatgattttagaaaaaagagccagccgctttgttaaagaattaatgctgcatttatcggaagatagcgccaggccaaatgatgaagaaaaattcatcaagaactttaaaaatgcgctgcgttttgtgcctatcgatagtccgacccgttttatccgtgaatttgtactcgaagaaaaaattgtgcatgtcggagcgtttcgtaaatcgcttgaagaataccgggcgatggaggataaaacagcggaagtgtcgagtaggattgagcagctgacaaaagtccaagaacagtgttcagggattaagcgcaacgtaaaaaatgccgtcgagtatgagtgggtagtgcatgaaacgcgtttcgaaaatgccgatttgaaaaaagagggcgccgctgatcgtatcgagactaaccaggccaaagaagttgacttacaaagtgaattggaaaagcactctggtgatttaaatactttaatgcaagatctcgccaatgcgagggcgcaattgaataacaccaattccgcgcaccaaataaaggcattagaatcaaacatagcggcgcaacttcatgaagagggagtggtgaaagatcagatccaaaacagctataatttactgagaagcaccgttgtttttgccgatcatgctgaattactacctgaaaaatttgctcctttagtcaataaatgcgtcactctttggcgcagtggggaagatatgttggccagcagttggccagctgagccagtagaggttgatagcactttagctgagcttaaggggcaggtagatactatcagacgtgatattggtaggaaattcgaagaatcagtaattcgtatcaatgagttacgcagtaatattcagaatcaaaaaggtcaggtagagcaactcaaacaaggtaaagctccggttcgccataatactcgcgagttaatggcactgctggccgattatgggattgagtccaccccagtctgtgaaatggtcgatataaatgatgataaatggcgaattgcgattgagtcgtttttaggcgcgaggcgtgaagcgctgatcgttgatgccgaccatgtgaaggaggccataaccctctatcgtcgtaaaggacggcacttaaaaggctgtcgtatcattaacaccacccgctccagagattggctcaaccgtcataagcccaactccctcgtgcattttatcgataccgataacgagcatgcgcaagcttatatgaaccgcgcactgggcggggtgatcgctgttgaaactgaaacagagctactaaagcaagagcgtgcgttgacctatgactgcatgctgcaaaccgaaggatctaccacctcgattcatgagcagacaccgattatgggggttcgacgtcgcggagatcagctagcagtgcaaggcaagcaagtagacgctatggttgctgaattcaccagtttggggcagcgccatcaaacattagagaagctgcgcgataatttaattaacctgacgactagtctggtaggttcccatgaaagtacttttgaactggtcaatcagcgcacccagctggccaaggaaatagccggtcatcgtcaggcgatagaagatttgcggaatcatgacgacagcggtattcaagccaatatagtacgcttggctgatcagcaaaaagtcgccgagcaacagcatcaacagataatggatcacttgcaaaaagcacggaccgcaatgatcaaagataatgcggcgcttgaagtacttgatcaagaaattcaagagcacgtacaagcgcgagcggtgtgtgaagacaaagccatcttcgatccgcaggcggcgcaagaaaaacgcgattacctcgatgaaagttgcactggcgaattagcccgtattatttttgaagcggctaaaaaagcgcagtcagaattgcagttgcacgagaggaaaaagtacgcggtacgcgacgcagttgcagagtacaaggcacagtatcacggcggtggtttatctcatcaagggttagataaaatcagccctaactcctcacatcaagagttggaaagctacgttactgaaactctaactgccctggttgatactgagttagcccagtataaagaaagagctgaaagtgcgcgtaaagaagcggaagctgcttttagatcggactttgtcgcgcacttaaatgatcaaatcaatcagataaaagacttgattcgcgagttgaatcagcaccttaaaaatcgtccattccacaaagaaatgtacagttttgaaatgactcccaaccctgaattgaaagatattctggaattagtcgaagcctatacccgtattgatcaagccaatgtaggtactttatttgatattagttacgatccagacaagccttataagaacgctttagaaaaaattcacgaggtacttaaaagtgaaggtgagagtagtttgttacaagactaccgcaacttctataacttcgaactagtgattaaggatctaaaggggcgtcgtaaaactacgctatcacagcggattaaaaccggctccggcggcgagcatcaagtccctttctatgtggcaatggcggcggcgttagcggcatcctaccgtttaaaagaaggaccggaagggcgcgcagtcggcggtatgagtttgtcagtctttgatgaggcatttaacaagctcgactcagaaaacactatgacctcgctgggctttatgagcgatttaggactgcagattattattgccgcgcccgatgaaaaatactcgctgctctcatcgtgcatggacaccattatcaacgtctgtcgtgacgggcgtgtggtggatattgatgtggagtttcccactgaaaaagccaagaaaatgctaaatgcagataatccgaaaaaagtgcaggcggaacaggcagaggctgaagctgaagctgaagctgagttagaagctaaaagctag

SEQ ID NO: 43796 - DNA, 1476 bp, Osedax symbiont Rs1
gtgagcaatgatttaagttatgaatttttagagcagttcaaggagcaaagtattgcgctgcggctgctgcgcagtcaaaatttctcactgatcggcagctttttctaccgtgcgtttatcagtaaaaatcgcagagcgatgccctaccaagagctgatagggctgttggatcaccatctgtcggatatcgccgatacctacggagcggctaaataccctaagccagctcgcgcctatctggatgattggattaatagtaaaggtggttttttgcgaaaatatttaccccagcatgcagacgaacctgaatgtgatctcttgccagaggtagaaaaagctttgcgttggctagaggaaatgcaaggtaagcgattcgtcggcacggagtcacgcttaaaattattattggaaatgattaccaatctagtgcagggcactagtgttgacaagcccgctaaactcgctgcgttgcaggctaagaaagccgagttagagcaacagatcatcgcagttgagcaaggtatggacagcggtttatcacacacagaggtccgtgaacgcttatatctgctcagtgatatgtcccgtcagctactcggcgattttcgacaagtggaggcgaattttaggctgttggataaagacacccgtaaaaaaattactctagggggggcacacaaagggcaagtgcttgataaggtcttcggcgatcaagatctgattgatcaatcagatgaagggaagtcattcggcagtttctttgaattgttaatgaccccgaaaatgcgcgaaaatatgcgcggcgatttaaagcgcttgctagccaaccctcaaggtagagaatttgttaacagcgatcagttattgcaatatttgtatagctacttattagatgcgggaaccaaagttaatcagactaaacagcagataaacgatcagttgcgccgttatatacaagagcaatcccaagacaataaacgcatattggaactgattagagagtttgaagccagtgccttacaggtcaaagaacaacaacaagagataaccgctggggaatttagccaaatagacggggtacaggcagatatctgtacgcagtttagccgcagtttgtatcagcaaaaattggacgagcaatttaactccacagtggaaaatgccagtgccagtcccgaggtagatttgggcagtttatttgaggttagccacatcgatgaattccagttggcccgcaatattcaacagggattggcggctcatgatggccaggtaagcctcgcgcaagttatcgaaaaatgtccagtcgagtacggcttagatgaagtactcacctatattaaattagcttgtgaacaacagcaaaaagcaaccatagacactcaacaacagcaaaaaatcagctggcagacagcagaaggcattacccgtgtcttgaaaataccagcgattacttttgtcagggaacttacataa

SEQ ID NO: 43797 - DNA, 654 bp, Osedax symbiont Rs1
atgtcagcgaccaatgaaaacaatacccaaacggcgtctctagactctacccagagcgcaaaacttcagcagcagcaaaagtcagcgctgcagattaaattgttaaaaggggtgctatatcgaagtaaaaatcgcgatttatggcagtacttagagcgtgatcaataccaagttcgtgaatatttttcacagcttggtctgtcgttgaccctagatgatgcagagggctatgcctttttaaagcaagttgattttgatcgggaaaccgaagtgctggagctaccgcgattaatcactcgtcggcacttatcgtttaatcaaacgctactgctagtggcgctgcgcaaacgcttagcagagcatgatagcgaggagagctcaccgcgcttaattgtcactcgcgctgaaatgcaccagtggttatcaccttacttttcagaggtgagtaatcaaataaagcagcagcgtgaatttgatgcgctaattaaaaaaattagtgaaatgcagtttatcaagccactaattaatcacagtgatgattttgaagtgttgagaattattaaagcgtttattagtgccgagcaaataatagaatttaaccaacatttacaaactttagcgctcaaccacagtgagcaaggagaggcgagctaa

SEQ ID NO: 43798 - DNA, 3429 bp, Osedax symbiont Rs1
atgtcgctatttgataatccagatctcgccacaaaagatgctttgcccagtcaaagcttagacttgttcagtgaggatcaaagcatgctcggtggttttcggttgcactgttttgccgtgttaaattggggaacgttcgataataaaatatggaaaatgagccctaacagtgaaaatgcattattaaccggtaatatcggcagtggtaaatcgaccttagttgacggtttaacgacactgttagtgccgccgcgtaaagtgagttttaataaagcggcaggtgctgctgataaagagcgctcgattgaatcctattttcacggatactatacctctcatcaagatgaaaccggtaaggcacgtgcccaagggctgcgcaaagcggagcactacagtgtattactggcccagttttacagccaagcgctgcagcaaaaaattagcttagcacaagttttttggctaaaacctggcgagaacaaggtcaagaggctgtttgtggtcgccgagcagggattgcagatagaaacagattttagtggctttggcacgcagataactcagttaaaaaagcagttgcgcaaacatccaggattgcaaacctttgatagctttgccagttaccaacaagtgtttagcaggctgctggggttgggagcagatggcaaggcgctggaattatttaatcaaactatctccatgaaatcggtgggctcagtgactgattttgtccgccagaacatgttgcaaactcccgatgtagagctgcagttgcaagagctagagagcagctatgacgatttgaaaaggctacatgatgcggtggttgccgcgaggcagaaagtgcaactgttaacccctgtgagcgactatggagagcgtgctttaaccgcggagcgggaaaaagtgcagttaaatcacagtagagacctaagtgatggtttcgtggcaagcttggcggtcgatctctatcaaaaacgcatcgagcagcgccagttacaactagataaactagaaattgaacttggacaattagagcagcaaaaacaacagcatgaagaggctgtagcgcagctcaatgacgatattttaaacagcggtggcggccgaatacagctgctggaaacagccataggccgcgccagtcacgaccgagatgacagtcgtaaaatatacaataactatcaaactttaactcgggcactggcgttgtcagataccttagatgtcgatacttttgtcgccaacttaaatagcgctaaagaactggctgagcaattaaatgtcgacctagaagccctggagacagaacaagatgaactcaaacatcaattgcgcgcttccgataccgagcaaactggaattagtgaacagctctcggcactaaaacagcgtaaatccaacattcatgttagacagttgaatatccgggaacgtttatgccaagagttacaagtagatgaagagcgcttgccttttgtcggtgagctactgcaagtaaagcctgaccaagtgcgctggcaaggtgctattgaacgggtgctgcacaatttcgccttaagcttgattgtgccagatgacttgtatcagcgagtttgtgattttgttgagcaaacccatttaggtacacgtctggtctactaccgagtaaaagccgtcgataattatttccctggcaccgccgcggggcaatcgctgctgagcaaaatagaaataaaagctgagagcgagcactaccaatggttgcatagagagttgcagcaacgttttgactatcaatgctgtgctgaattaagtgattttagacgcagtgaaaaggcgatcagcctcaatgggcaaatcaagtcggggaagtttcgtcacgaaaaagacgatcgtcaccaattgcaagaccgcagccgctacgtacttggatggagcaataaggaaaaaattagcttactaaccgcggcactcactcagtgtcaagcgagcgcgaagcagttagtagggcggattaatctggccaaacagcagcgcgatcagctctccttacagcagcgcaacgcctttaatctagcggcttttgactttagttttgagaatctaaattggccgctacacgccgctaaagtaaagagcttagtggatgaaaaaaatcagctcgaactcgccagcgatatattaagagagctaagagagcgcttggccagcactaagcaggcactgacagtcgtcgataaagagcgagatagcagtttaactttgaaaggtaggacggagagtgagcttgaggctgattggcaaaccttagcgcaacagcaagaaattttagcgcaactcgatacaacgctgcgcgccgcctgctttcctattgtcgaacagtgttaccggcaacatgtgcaaaaaagtttactgcgcattgatatgttgagcggtatagcgactcaattaagatccaaattgaatgaacaaatacaaaatttagagtccaagaggcgacgtgccgagcaaaaaatgatcgtggcgatgagtgattttgcacacagttttgccaatgaggtgacagaacttgatcagagcctagcttctttgaaagaatatcaagcactgctaaagcgtctagagcaagaggacttaccgcgccatgaagaacgttttaagcaaatgctcaaccgcgatacgattcgcgccatggtgatctttcgcagccacttagataaacaagaggaggaaattgacgcacgcatccacctgatcaatcagtcattgcgagagttagattatcaagcgggaacttacatacaaatcgatgcaataacctcacctgatctcgaaattcgagaatttaaattgcgcctcaaaagctgtgctgagcaaaatagcgacgatgatttgtattcagagcaaaaatttgaacaggtaaaagagctaatcgagcaaatgcgcaatcaacctaagtggacccaaaaagtcgtcgatgtgcgctactggcacttatttaacgtgattgagcgctatagcgccgatgatagtgaaaaagaatgctattcggattctggcggtaagtcaggcgggcaaaaagaaaagctcgcctactctattttagccgctgccattatgttgcaatacggcttagtgcatcaagaatccggcaacagtggcaagcgaaaatttaatttagttgtcatagatgaagcgtttgcccgcggctcgaaagacagtacccgctttggtttagaactgttcaaaaaattaggattacaattactgttagtgactccgttgcaaaagttagatgtgattgagcactacgtgcaacacgtacatttcgtcgaccagcaaaacaaccgttcagtcttgttaaatatgagtattgaagaatatcgcgacaagttagctaagcataaatccctgcgtcactatcaacatttagttaaggaagcttaa

SEQ ID NO: 43799 - DNA, 1194 bp, Osedax symbiont Rs1
atgttaacggctaagcaactcaaggcaaaactggaaaagcagtggcagcaagctaaatttcaaaaagctcatttcaacaatctgccggtttttccttttcagataaaaatcgccaagcttagtgagcgcaccgtgatgcacaaatacgccgaatttcaggcgtggcagcaaagcttgagtgcagcctttagtgatatagagggggttgaattacaagagcaagaggtcagctataaaaaaattggccgacagctacacccggtggcgctgagttttgaaaatatccaagcagtggctagatacttggggaaatggcagcgctggcaagtgctagaacagcaagttaaaaagctgcaacagcaattgccggtgctgcgagagtggctgctagaaaaccctacagaagtagataactatttaccacactggcctaaacttgcagatatctgtcggtatatgcagcgtcaccctcagccaaaaatctatattcgacaactgtgtattgccggagtcgacagtaaatttattgagcggcatcagggcatactaaaaaccttattagatatttgtctaaccccgcaggacattaatcaagagtacactaagctcaaggaacatggctttgaaaaacgctttggttttctttacgatcaaccgctagtccgcctgcgaatattagacccagcacttagcgtagaattttcgggactcagtgacatcagtatgccgataaccgagtttactgagctcaatttgttattagatcgagtgtttatcactgagaacaaagtcaattttttagtctttccgccaatgaaaaattcactggtaatatttggtgtcggctatggcgtacagttgctccagcaaagccactggctggccgattgtcaaatccactactggggtgatatagacacccatggcttagcgatactttcacagtttaggggttactttccccatacgcgggcgatgttaatgaaccagcacaccttgctagcatgtcgttcagcttggggtgaggagcctgccagcaaagctcataaaagtgaaaaattagcctatttagcagacgccgaacaacagctatatcaggacttaaagagccataagtggcagaagaatttaagactagaacaagaatacatagactatcaactagtcatagactggttggggaaattgcattga

SEQ ID NO: 43800 - DNA, 1347 bp, Osedax symbiont Rs2
gtgttaatagaactggccgatcttttttttgatgaagatctgatcgagccttttattgccaaagatttagtgcgctcgactattgaagataccgtggtgcgcattggcctgaggatctgggagcgtgaagaggaagatactgaagaggattatcagccccctagatctaccgctgaatacgccagtagaatctatcgacgtttagtggctaccggctggttggaagaagagcagcagatctacaaaagctatgtattgatggctccctctaacagctatttgctgcgctctctggtctcaatcgcaaaaatggataaacgctcttatggcggggcgggactgaacgtgctgagctcactggaagcggcgattaacgatccggagggtcgcggtataacactgcaggaagcctctcaatcggccagcgagttcagcgcgcatctaaccgatatgctgttgggcctgcgcgagttaaaaattagtctgactcaatcgcaaagtccacaagatatagtgcgacagttttttgatacttttgtcgaacagattttggtatccgattacaaaaccttaaaaactaaaaacaatccatttcgctttcgccgccagatactgacgatgttacgtgatctgcagtttgattcgatcaaactggagaaactgatccaccactaccagctgcaatttgaaaatgaatatctagacgctgaagctatggtgcacggtcatattaaccgtatcatccgtatttttgagtcggttgataaacgtttggacagcattgacgatttcagatacaagctggaaaagcgggttgccgatactattcgctatatggataaaaccacgccgggtatggcctctcgattgtcacgtcttattactgcagtcgctaaggacagtagtttgttgcgtaaacatccaataagacatctggaaaacagcgggtttctctctcccagtagtatacgctcgcccatgcgtcgacgtattcaagtggcacctagggtcatacatcagcagattattgatcctaaggtgatagagctgcgggagttatttaaagcctacaaagcgcgccgcgaagtgcgtgtcgatcgtatcgaagattatttagcccgtcactttgccaacaacgatacgctgcaagctgatcaatttgaaattggcagtatcgaagattacatttgttttagttatattcgtcacttagcctccttaggcaaaaaaggtaaggccactaatgagcaatataacattgaatttaaagaaaattatattgaggtagacgacatggttacctgtcgagactttactatccactctaccaaacaaagggtcagctaa

SEQ ID NO: 43801 - DNA, 714 bp, Osedax symbiont Rs2
atgcttagcgatttacagaaaattatcagtcgcagtgacaaataccaggaagaagattttgtgcacgcggccaatttgctgatgaccaatcagttcattcacgctgatcgcagttcacaccgacacagttattttttgatctcttcgcacgttgaatacttcaaaaacatttttgcagctatcggctgggcttttgtacaccagcccgatgaagcgtacctgggcattttacctcagggacacgagcgcaatttaaaactaaaactggatgagtcgctcatcttgttgtgcatgcgccaaatgtacgagcaaaaactggagagctttgagatagaaagtggcagggcttttaccagctcagatgagttgttgagtttgtatctgacgctgaccggtaaagatatccccaatgagacccgctctaaagagctgctgtcgctgttttccaggcacggtctgatcgagcgtggaaaagctgatgaaagcaatccaaaaaacatattttttagtatcttgcctactatcaggcaagttgttgttgaagatcatattaaacagattgagttgctttgtgattcagaaaatggccgggatgcactcagcgatgaagaagaggcgctgttagagcaagaggaatctgaagtgtcagatagagaaccagtagcagccacacagccaaccactgagatggagagtaacgatgaaacagcttaa

SEQ ID NO: 43802 - DNA, 3420 bp, Osedax symbiont Rs2
atgaaacagcttaatcgaatcgtcttagttaactggtatgtattaggtgctgtagaaataccgatcaaaggtaatgtcgctatcgtcggccccaatggttccggtaaatcatcgttgttagatgctatccaaactgtgctgcttggtggtaataagcgtcacttgagttttaacgcctccgccgggcaaaaaagtgagagatcgctgcgtacttactgtcttggttttatggatgatggcggaaaaaaagccaccgcccgtgaagactctatttcctatattgccctgagcttttttgatacagaaaccgctaaagaaacttgtgtcggggtggctatcagcgctaacacggcctcgccggatgaggaagtattagggcgttttatcttgcctgatttctcagtgacgctagatgattttaccgacaaagatggtgctggccgactaccaaaagattgggatatagttaaaaactcactgcttaaacagtgtcccgaaatgactctggaaaagcgcgccagccgcttcatcaaagacttggtcgctcagctatcccaagatgcagccagacctaatgatgatgaaaagtttattaaaaatttcaaaaacgcactgcgcttcgtgccgattgatagcccgacccgctttgtgcgcgagtttgtcttagaagagaaagtggtacatgtaggggcctttcgaaagtccctggaagaataccgggcgatggagcagaagaccgcagaagtcgcaagccgagttactgagctggagaaagttcaggagttgtgctcggggataaagcgcaatgttaaaaacgctgtcgaatatgaatgggtagtacacgaaacccgctttgaaaatgccgacctgaaaaaagagggctctgcagagcgccttgaagacaatcaacagcaggaagtgcaattacagggacgattagaggcgcaatcagctgagctaaataccttaatgcaagacctggcgaatgccagagcacagttgaacaacagtaattcgtcgcatcagatcaaggcactggagaccactatcactgctcagctacatgaggaggggatagttaaagaccaaatccaaaacagttataacttgctcagaaccacagtggctttcgatgaacatgcagatttgttaccggaaaaatttgcaccattagtcaaaaaatgtgtcagtttgtggcgcagcggcgaggacatgttagccagtagctggccgcaagagccggttgaagtagacagcacactggctgcgttaaaaactcaggttgataccgtcagacgtgacataggccgaaaatttgaagagtcggttattcgcatcaatgagctgcgcagcaaaattcaaaaccaaaaaggtcaggtggaacagctaaagcaaggcaaggcaccggtacggcacaatacccgcgagctgatgtctctgctatccgactatggtattgactccactccggtctgtgaaatggtggatatcaacgatgataaatggcgtatcgcgattgaatcctttttaggtgccagacgcgaggcattgattgtcgacccggagcaggtgaaagaggccattacattgtatcggcgtaagggccgacatttaaaaggctgtcgcatcatcaataccactcgctcgcgggattggttaaaccggatcaaacccaattcactggctaactacattgatactgataacgaccacgctcaagcttatatgaacagagcgctcggtggtgtcatagcggtagaaactgaggcggaattactgcgccaggaacgcgctctgacttacgattgcatgttgcaaaccgaggggtcaaccacttcaatccacgagcagacgccaattatgggggtgcgtcgtcgcggcgatcagctggcggtacaaggcaaacaagtcgatgtgatggtggcagagttcaccactttagggcagcgccaccaaaccctggaaaagttacgtgacagtttgattaacctgaccactagtttagttggcagtaccgaaagtacatttgatctggtgaatcagcgcaaccaattggccgtggaaatcgccgggcatcgccaggcgattgaagatttacgcaaccacgatgactctgggattcagtccaatatagcgacactcgcggagcaacaaaaagcagccgaactcaagcataagcagctgatggatcaattgcagaaaacccgcaccgcaatgattaaagacagcgcggctctggaagtattagataaagaaatagaagagcatgtccaggcgcgcagtctctgtgaagaaaaaccacagtttgatgcgcaatcatcgcaagaaaagcgtgactacctggatgagagttgctctggagaactggaccgaattatttttgaagcggccaaaaaagcccagtcagagctggggttacacgagaagaaaaaatattcagttcgcgatgcagtagcagaatataaagccaaatatcacggcggcggtttgtcgcatcaaggtctggataaaattagtccgaactcttcccatgaagagctggagagctatgtcagcgagacgctgcaatctctggtagagacagagttagcgcagtacaaggaaagagccgaaaatgcccgcagagaagctgaatcagccttcaggtcggactttgttgcgcatttgaacgatcagatcaatcagattaaagacttaattcgcgagcttaaccagcaccttaaaaaccgtcctttccacaaggaaatgtacagttttgaaatgaccccaaatccagagctcaaagatattctcgaattggttgaggcttatactcgcatagatcaggccaatgtgggttcactgtttgatatcagctatgatgccgacaagccctaccagaatgcactggaaaaaattcacgaagtattgaagagcgaaggggagagcagtcttttgcaagactatcgaaacttctataactttgaattagtgatcaaagacctacagggcaaccgcaaaacaaccttgacccagcgtattaagaccggctccggtggtgaacaccaagtgcctttctatgtggcgatggctgctgcactcgccgcttcttaccgcctcaaagaggggccagagggaagagctatcggtggcatgagtttatctgtgtttgatgaggcgtttaataaactggactcagagaacactatgacctcgctcggctttatgaccgacttaggcctgcagacaatcattgccgccccggatgagaaatactcgctgttgtcctcttgcatggatactatcatcaacgtttgtcgtgacgggcgggtggttgatatcgatgtggagttccccaccgaaaaagctaagaagctgctcaactctgacaaccctaaaatgttgcaggcacaggccgagttagaacagcaaatcgcttaa

SEQ ID NO: 43803 - DNA, 1437 bp, Pseudomonas stutzeri B1SMN1; identical to SEQ ID NO: 41737

SEQ ID NO: 43804 - DNA, 591 bp, Pseudomonas stutzeri B1SMN1; identical to SEQ ID NO: 41738

SEQ ID NO: 43805 - DNA, 3384 bp, Pseudomonas stutzeri B1SMN1
atgaacgctcccgacacgctttccctgctcgatttcgccagcagtgacgagcgcgccggtttccgcctgcacgctatcgaggtgtacaactggggcaccttcgaccagcgggtctggcgctttcccacccgcggcgacaatgcgctgctgaccggcgacatcggctccggcaaatcgaccctggtggacgccatcaccaccctgctggtgcccgcgcagaagatcgcctacaacaaggccgccggcgccgaggccagggaacgcacgctgcgctcctacgtgctgggttactacaagtccgagcgcagcgaagccggcctcagcgccaagccggtggcgctgcgcgaccacaacagctattcggtgatcctcggccatttctacaacgagggcttcgaccagcacgtcaccctcgcccaggtgttctacatcagcgacaaccgcggccagccggaacgcttctatgtggtcgcggaccgtccgctgtcgatcaccgaacacttcgccagcttcggcagcgacctcaacgccctgcgcaaacgcctgcgcgagctgccccacgtcgagctcgaacccagcttcgccgcctacagcgccgccttccgccgccgcttcggcatcgccgacgaccaggcgctggagctgttcagccagaccgtatcgatgaaatcggtgggcaacctcaccgatttcgttcgcgaacacatgctcgaggagtttccgctggacgagcgcatccaggcgctgatccaccacttcgacgatctcaatcgcgcccacgaggcggtgctcaaggccaagcggcagatcggcctgctgcgaccgatggtggacaactgccagcgttacgccgaagcctcggagcaggcgcaagggctggtcgcctgccgcgaagcgctggcgccctggttcgccgggctcaaggccgagctgctggacaagcgcctggacaacctcgcccaggacatcgcccgccagcgcgagcagcgccgcgcgctgcaggagcaccagcggcagggccagtcgaaacgcgacgaactgacccgcgccatcgcccagaacggcggtgaccgcctggcgtcgatcaggcaggaaatcgcccggctggaagcggaccagcagcgccgccagcatgccgccgaacgctatgaccacctcgccggcgcgctgcagctgccgcaggcgaacgacgccgagccgttcctggccaaccgtcaggcgctgcccggcctggtcgagcagtgccaacaacagcgcgacagcgcgcagaacggccagaccgaagccgccgtcgaattgcgcgacctgcgccagcagcatcggcagctcgaaaccgagctggagtcgctgcgcagtcgccgctccaatctgccggcgcggattctcgacatccgttcgcgcctctgccaggcgctggagctggacgaggccgcgctgcccttcgtcggcgaactgctgcaggtgcgcgaagacgagcgcgactgggaaggcgtcgccgagcgcctgctgcacaacttcggcctgtcgctgctggtgcccgacgcgcgctacgcccaggtcgcgcaatgggtcgaacagacccacctgggcgagcggctggtctacttccgggtccgtgagcggcgcctgcagacgccggccgaaacgcaccccgagtcgctgctgcgcaagctgcagatcaagccggacacgcccttctacgactggctggagcaggagctggcgcgacgcttcgactatgcctgctgcgcctcgctggaacagttccgccgcgaggacaaggcggtcacccgcgccggccaggtgaagtccggccaggagcgccacgagaaggatgatcgccgccggctgggcgaccgcacccagtacatcctcggctggagtaacgagcagaagatcgccgccctggccgggcaggccgacgatctgcaaacgcgcatccagcgacaggccatgcaactggccgagctgcagcagcgccagcgcgacctcgatgaacgcctcggcctgctcaaccaactatcggtattcgacagcttcgaggcgctggactggcggcccctgctcacgcagatccatggcctggaacaggagcgccggcagctcgaagccgagtccgacaccctgcgcacgctgcaacggcagttgcaggcgctggaagacgaactgcgcgaaggtcgcgacgcgctcgacgagaagaaccgcgagctgagccgcagcgagcagaagcacgaagacgcccaggccctgaccgacgaggcgcgcgcgctgcacaccgccgcaagccccgagcagcaggcgcgcttcgtcgaactcgacagcttgcgcgccgaagccctgggtgaacacacgctgacggtggaatcctgcgccaatcgcgagcaggccatgcgcggctggctgcagggcaggatcgacagcgagaacaagcgcctggaccgcctgagccagaacatcatccaggccatgagcgagtaccgcatcgagttcccgctggaaacccgcgaggtggacgccagcctggcggccgccgaggattaccgcgccatgctcgacagcctcgagcaggatggcctgccgcaattcgagcagcgcttcaaggcgatgctcaacgaaaacatcatcaacgagatcgccaacttccagagccagctgcgccgcgaggagcacgacatccgcgagcgcatcgaggagatcaaccgctcgctgcgggaaatcgactacaaccccggtcgcctgatccagctggaagcgcagtccagcggcgacggcgagatcgccgagttccgcgccagcctgcgcgcctgcaccgaaggcagcctctccggcagcggcgacgagcaatacgccgagggcaagttcctcgaggtgcggcggatcatcgagcgcttccgcggccgcgaaggcctgagcgaccaggaccggcgctggacccgcaaggtctgcgacgtgcgcaactggttcggcttctccgcctccgaacgctggcgcgaggatggcagcgaacacgaacactacagcgattcgggcggcaagtccggcgggcagaaggagaagctggcctacaccgtgctggcggccagcctggcctaccgcttcggcctggaatggggcgtgacccgctcgcgttcgttccgcttcgtggtgatcgacgaagccttcggccgtggttccgacgaatcggcacgctacgggctcgaactgttcaagaagctcaacctgcagttgctaatcgtcaccccgctgcagaagatccacatcatcgagccctacgtcgccagcgtcggcttcgtgcacaacgagcagggccgcgaatcgaagctgcgctgcctgagcatcgaggaataccgcgagcgcaaggagcagttgggcgcaacgcagtga

SEQ ID NO: 43806 - DNA, 1185 bp, Pseudomonas stutzeri B1SMN1; identical to SEQ ID NO: 41740

SEQ ID NO: 43807 - DNA, 1476 bp, Mycobacterium sp. VKM Ac-1817D
atgcctgacgcaggcaccggtggcacgtcgctggaccagctctaccagctgcaccgcgaggtggccgattcacgttcgttgcggctgctggtgaccaacaatctggccacctatctgacgctgatggaacgtcacctggaccgcggcgccaagctgaccgagaccgacctggtggtgcggctggaacgcgacctcgccgacctcggctccgagaccgagcagtcgggcctgtcactcatcaaatactgggccagccagggctggctgcaccgggtcaccgagcagtccggcgacaccgaacgcaatgtctgttacctgacctacgaggcgcgggccgtgctggatttcgcccgccgcatgcgccgtgaggacaccatcgccaccggcgggtcgatctcggggatcgccgccgggctgcgccgggtggccggtcaggtcagcaacgatccggatcgcatccgtgcggacatcgaagccgagatggccaagctgcgggatgaattggaggcccttgaacaggggcagcggcccgaacctgatctggtcgacgccgaggacgaggcgcgggccatcgcgttgcagatggagcagatcatctccgacatcgggcagtacggcgccatgctgaaccgcatcaccacccggttgctggatgcttccgccgataccgatctcgggtaccgggagcgtcagcgccagctgttcgacgactacgagtcccttttcgcctcccgcgaaagcgcctcgtacacggcgttcacccggatgatccaagatcccgagcagcgggcggcgctggtggccgacatcgaggcggtgacccgggaattgccgcacctcgatcccgacctgcgtgaggtgatgacaggtttcttcagcctggtctctgcgcagaccgccgaggtgggccgcacccggcagcgctgcgcgcgacggatcaagcgattcgtcgcctccggaaccctggagcacagccgcggcgttacccgtcagctcaacgatgccctgaccagtgcccatgacttgctcagcatctcgttggccgacagtcgcatcggcatcgaggtgccgctggtccgtaccgacttcaattcgatcggcgccgtggccttcaagattcgtgacgcgatcccgccgtcacaggccgagacctctcacggcgaggtgaacctgtcggcgttctcggccttggcgtcccaggtggacgccgccgagctggccgatctggtcaacggtgcggtcgccgccggtccactggcactgtccgacgccatcggcatgctggactcggcctacctcggtcatgtgatcgtgttgtggtcctgggctctcaaacagccactgagtcaaccggaatccgatgccgaatccgttcgggtgcgtttccggtcgctggagggtgccgaccgcgaaatcgaaataccccgattggttttcaccgaaccgatccctactgccagtgagagcatgctatga

SEQ ID NO: 43808 - DNA, 765 bp, Mycobacterium sp. VKM Ac-1817D
atgaccgacaaccccgacacgtcgcccgtcaaagacgggtcgatcgacttcgatgccctaccgagcatcgacgccgtcgaacggtccaccgatcagcggcgtgctccgcgcttcgacggggacgtcagcgagctgcccgaccgcgcctgctgggcgctgcagcacctgctgtcgcgccggtacgtcagcaaggacaaccactccgagctgtggtcgtgggtcacccgctaccgcgccgaactcaccgtgcggctgtcggaactcgatatgcggctgtgcatctcggacgatcacgacatcgcctacgtcgagcaggcggattacgaatcgcagtggcggcgccggttgctgcggcgggagaccctcaacacctacgattcgatcctggccctgcacctggccaagctcatgcgcgcggcgtcccgtgacgagaacgtgctgatcagccgtgacgagatccatgagctgttcgccggggtgaacaacgacaccgatcgggataccgcctcgttcgacaagcggatcgacaacgcgatcgagcggctcaccgacatcgagatgctcacgcgcaaccgcgaggacgaggacagtttcacgatcagcccggtggtcaacgcgatcatgacggcctcgatgatcaccgagttgcagcagcagttcgagcagctcaagcgcgtcgcgaacggcacggcctacgatcccggtgcttccgacgatcccgatgtatccgaacggctcgaagacgaagtggacgcccatggctga

SEQ ID NO: 43809 - DNA, 3363 bp, Mycobacterium sp. VKM Ac-1817D; identical to SEQ ID NO: 43245

SEQ ID NO: 43810 - DNA, 1479 bp, Corynebacterium terpenotabidum Y-11
atgatgaacacccgtgcacactccgcctaccgtcaggcggtcggagccttccggaatccgacactcgagctgctgcacggcaggtacgccccgtttgtcgtggcgacgctctccctgctcttcaccgccgatcgcccgtcggtgcaggtcacggacgcgcatatcgaggttggcgatatcgtcgacgagttgcgggccgccggtgccgaggaggtcgaccgcggcctgccccacgggaccggccgggagatctgccgctactgggtccgcgtcggctggctcgtcccgcagatcgaggacgatgtggaggtctaccgcctctccgcccaggccgtgggagccctcgacaccgtgggccgggtcggcggcggtaccaaccgcgtctcccgctcccggatccgtaccctactcgacgccgtcgaccagctcagccatgacgccgagaccgaccccgccgaacgcctcgccgtcctgcgggccgagcgggaccggatcgaggaggagatgcggttgatcgccgccggggagatcgacccggtcgatgacgagcagctgctggaggaggcggagaacatcctccacctgtcccgggaactgcccgccgatttcgctcgcgtcgccgagtcgatcactgcgatgcagcgtgacgtggtcgctgagctgcgtcgggacgtccgtccggtgggcgaggtgctgcgcgagtacctgcatcgtggtcagcatgtgctggaggccaccgccgagggacgcgccttcgccggcgcattgagcctcatcggtgatccgggacgcatcgacgatctcaccgaccgggtggacgccctgctcgccctcccgttcgccgacaccctcctgccgccgcagcgtcgggaactggccgcgatcgcccgccgagtggagcagggggtggcggaggtgctcaccgcccagcgtcgggcgtcccatgtcatcaccgcccaggtccagacccatgatccggtgcgtgaccgggaggtcgatgacctgctccgcgaggcgatggcggggctgcagacctggatgggcgcctccggccccggcgatgccgtcgagccggtgcggaccttccccacggcgtccctggggcatctacggcagacgctcagcgatccgcgtccgcccggcgtgcccgccccactgcaccacgaggaggagccggacttcgctgaggaggacgcccgcgcgtggggcggtccgcactacgcggacctggaggatcacgtcgcccggctcgcggacgcgggcatcacggatgtcgatctcgccgccaccttcgcggacctggacacgaacctgcgccgtccggtggacctgctcggcctgctggagatcgcccaccgcaacggcatgaccgagaccgacgaggtgtcggtcgtggacgcggtacgtcccgacggcacgacccgacggttcgccttcggcgccgtcaccgcacgaacacatgaggaggacctgccgtga

SEQ ID NO: 43811 - DNA, 633 bp, Corynebacterium terpenotabidum Y-11
gtgagtgaaccattcatcgcaccggtggcgatggagaacgacccggcggagtgcttcgccggggaccggggcgtcctggatccggcagtccgtcgggtgctggtgcggctgctgcagcgccgcgtcctgctcgccgaccaggcggaggactggacggtactgctggacaaccagcagatcatcgagtcgcgtctccacgacctgttcatccggctcatcgtcgacaccgaccgtggcgtggcctacaagcagcaggtccggtccggggagaccgaggtgccgatcctgctcaccgaccgcgcctacagccgggtcgagaccctggtcctggtctacctgcgcaccgtctaccagcgggaagccaccgccggcgaccagcaggcccgggtcgaccgcgaggaggtggaggataccgtcctcacctacttcaccgaccccggcggcgatatcgcgggacgccaacgcgccgtcgccaaagccctggaccgattgcggcacgaaggcatcgtcgacgaggagtcggagggacgctaccgcatccgcccgatcatcgagatcgtgctcagcgcaccccggctgcgggaactgaacgactggctggcgcagagcacgacagaggagacggcacggtga

SEQ ID NO: 43812 - DNA, 3327 bp, Corynebacterium terpenotabidum Y-11
gtgaccatgctcgacacgctcttcggactgatcccggaggcctcccgcggggagcagtggctcgccggtgacctgcagctggtcaactggggcggctacgacggactccaccgcgtccgcttcgcccccacggcgacgctgctgtgcggcgggtccgggtccggaaaatccaccctcatggacgcctacatcgccctgatgatgccgcacaccaccccgttcaacggggcatccaacggtgcggtgaccgggcgtccccgtggcgaggaccagcgcaatatcctgtcctacggccgcggcaagaccgacgagacccgcagcggtgaccacacccgcgtgcgggtcctgcgtggcgacggggaggatacctggacggcggtcgcgatgacctggaccggccgcgacaatgcccggttcaccgcggtccgcgcctggtacatcccggcgaccgcccgggtgctcgatgacgcggtgaaggtccgtgccgtcaccggcggcgagttcgacctggccgacctggaaccggccgcggcgcaccgcctgtcggacgccacggtccgcgccgccgggctggagaccttcagcaccgaccgggagttcctcgcgcggatccacacggtgctgggcatcggggccgccggagccggttcgaaggcgatgaacctgctcgcccggatccaggccggccagcagatcaccaccgtcgacgagctgtacaaacggatggtgctggaggaaccggcgacgatggcgacggccgaggaggtcgtcgaccatttcgacgagctggagtccgcccgggtccggatggtgaccgcgcgcaagcaggtccgcgccctgcgtccgctgcgggagatccgcgcccggcaggacgccgcggcccggcgtctggatctcatcgacggcatcggccggttcgaggaggcggagtccgtggcgtcattgtggcgcgccgcgcgccgcctcgacctgctcaccgccgaggagacggtggtgcgcacccgcgcccgtgaggccaaggacgaggtccgcgcccagaccgcggcggtggacgcggcagtcgccgaacgggacgggctcatcgaggtgctgcgcaactccggcggcgaccgcctggagaccgcccaccgcgaactcgacgccgcagcccggcgcagcgccgaggtacgccgggcccgggagagcttcgacgaggcgaccgcctgcctcggcaccccggtgaccacccgcgccgagttcgacgccctgtccgcgaccgcccgcggcgtcctcgatgatccgacggcgacgggccgtgaccgcgacgcctacgccaccgcccgtgccgcgctgtcggccgcccgcgctgacctggcacagatcgaagaggaacgccggacggtcggcgagcggaccggcaacatccccgcccccctgcacgaggcccgtgcccagctcgccgaggccgccggtctgccggagacggacctgcccttcgtcggtgagctggtggaggtgcgcaccgagttcgaaccgtggcgtgaggccttcaacctcgccctcggcggtttcgcgacgacgatgctcatcgatgacgcgcagctgccggccttccgccgcgccgtggagacggtccgtacccgcacccggatccgctacgagggggtccgcacctcgaccccggcggtgaccccggacccggcccggctgcccggtcggctcgactaccgcgacagcccgttcaccgggtggctcaccacccgtctcgaccggcagttcggcttcgtctgcgtggactccgccgaccagctcggcgagcaccccagcgccctgacgctcaccggccagatgtcccaggggctccgcggtgcccacggtggccacggtcgacggaatgtcctgggagtgagcaaccggcgtctcctcgccgatctcgatgcccggatcgccgacgcccgacgccgggtggcggccgccgaggacgccgaacgcgccgcctccgccggcctcgacgccttggacgagaggctcgccgcctaccggcgcgtccgcgaaatcacctgggaccggatcgacgtcgccaccgtcaccgccggggaagaccgctggacacagctcattgagcaggtcggcgaggacgccccggaactcggtgacctgcaacggcggatcgacgggttggcgcgacgcatcgacagcctgcagaagtccctcggccgcgccgagggcacccaggaacgcctcgccgaacagtgggcggccatcgccgacgaggtggacgccgccaccgccctggtcgacgacgccaccgaggcgggccgcgaactgaccacggagcaggccgattacctcatggaacggtgtggggccccgggtgctgatctcgccgctttcgacgcggcgaccgccctggcgtcccgtcgactgcgcgaggaccgggacgccgcggaagacactgtcgccgagcagcgcgaccagctgcgccgcacgatggagagcttcctcgaccagtggcccaacccgaacctgcggaccgacccggacacctccctgcccgacttcgagcgcatcctcgccgacctggagaccagcggcctgcatgacctggaggcggagtggaaaggaagtctgctgcggttgtcgggcaatgacctgacgaacctggcgtccaccctgaaccgggcgcgccgggagatccaggaacggatcgccccgatcaaccggatcatggcggacctgccgttctacgatgacgaccaccgactgcagatcagcctgcgggacaatcggtccgaggcacggacccggttcctggccgagctgcgggaggtccgggggctcatcgacggtgcgtcctccgacgaggaccgcggccgggcctatgaccggatgtcgctgctgatcaaccggatccggcggaccgcgccggacgtcgacgggctgatcgacgtgcgcaaccatgtgcgggtcagtgcggagaagatccacgccgcctccggagcgcatgtcgccctctacgaccacatcggggagaagtccggtggcgagtcccaggagctcatcgccttcatcgtcggtgccgcgctgcgctaccagctcggggacgccgacgccccgcgtccccgctacgccccggtgttcctcgacgaggcgctcattaaggcggatgcccatttcaccgcccgggcgatcggtgcctggcgggggctggggttccagctcatcatcggcgcgccgaatgacaagtacagtgccatcgagccgcatgtcgacgccgaatatgacatcctcaaggacacctccggccgttcctgggcgaagccgaaggtgggggttccgcagggctga

SEQ ID NO: 43813 - DNA, 1461 bp, Mycobacterium abscessus subsp. bolletii CRM-0020; identical to SEQ ID NO: 42721

SEQ ID NO: 43814 - DNA, 750 bp, Mycobacterium abscessus subsp. bolletii CRM-0020; identical to SEQ ID NO: 42722

SEQ ID NO: 43815 - DNA, 3348 bp, Mycobacterium abscessus subsp. bolletii CRM-0020; identical to SEQ ID NO: 42723

SEQ ID NO: 43816 - DNA, 1446 bp, Mycobacterium sp. 012931
atgcacgacgacaacgcgggactgtcggcgaccgagctgctcgatctcaatcgcgacttgcagggctctcgcgccattcgcctgctcgccaccaccaacctcagcctttacgcgacgctcatggagcgccacctcagcgacggggcgctgcctgagaccgagctcgtcgtacagctcgagcgcgacctcgaagacgtcaacgatccgcagcccgggctcgccctgatcaagtcctgggccgcgcagggctggctgcaccgcatcgtcgacgagcgccacggccagaatgtctgctatctgacccaggacgctcgccgggcgctggactttctccgcggcttgcgtcgccaggacaccatcgccaccggcggctcgattacgggcatcgccgcgcgcctcaagcaagtggccgtcaaagtggataacgaccccgcccggatccgcaaacacatcgaagccgaaatcgccgcgctccacgaggagcttgaccagctcgatgctggccagcgtccccaaaccgatgtcaccgactgctacgacgaggcccgcgcgatcgccctgcagatggaacgcctgatcaccgatatcggccagtacggcacgatgatcgagcgggctacctccgccctcgatgaacccatcgattccaacgccgagtaccgcgaccgccaacgccagatgtacagcgactaccaggccgcatgggactcccagggccgcgactcccaccgcgccttcctgcgcatgatcaacgaccccgaccaacgcgccgagttcgaggccgacgtcgccgccgtcgccgaagccctgcccagcctcgacccggccctgcgcaaggtcatggccggcttcttcgagctcgtgggccatcagatcgacgaagtcgagcgcatccagcagcgctgcgcccagcgcgtcaaacgcttcaccgcgttcggcaccatggaacagagccgcggtgtcgcccgccaactcaacgaagccatcgccgcagcccgcgccctgctcaagtcgtcgttcaccgactcacgcctggacatcgaggtcccgctggcgcggcacgcgatcagttccgtcggtgccctcggcttccggatcggcgacctgtccaaccccaagcccgccaaacccggcgacaccgaggtcgacctcaccagcttcgccgccttcaccacccaggtcgacgcgcccgcgatgtccgacatgctcaaccacgcgatcaccgcggggcctgtcgcgctacccgacgccgtcgccatgctcgacaccgcctacctgggccacgtcatcgtgctgtggtcctgggccctcaaacagcccaaccccgacaccgccgagtcgaccgccgtccgcttccgctccctggacggccgtgacctcgaaatcgcggtacctcgtttgacatttaccgagcccatcaacaccatcgccggagccagcacgtga

SEQ ID NO: 43817 - DNA, 696 bp, Mycobacterium sp. 012931
gtgaccctccaagacgatgaagtcgacatcgacttctcctcactccctcaggtcgaccagaatgcccgcccaccggttcagcgccggccgcgcttcgacggcgatgtctccgaactgcccgaccgggcctgttgggccctgcagcacctgcttacccgccgctacatcagcgccgaagccgacgccgacgtctacagttgggtgctcgaataccgcaaggacctggccgtccggctctccgaactcgacttgctgctgcgcatcgtcgacgccgccgatgtcgcttttgtcgaacaggcccgctacgagtctgcgaggggaatcaagcttttacgccgcgagccgctcggcacctacgactcgatccttgccctgcacctggcccagatgatgcgtgcctccggtgggcagaccgtcctgatcagccgtgaggagatgcacggcctattctccggggtgctcaacgacaccgaccgcgacgcggtctcgttcgccggccgcatcgacggcgccatcgcccggctgaccggcctagagatcctgcgcaagacccgcgacgacgaggacagctacacgatcagccccgtcatcaccgccgtgatgactgcctcggtgatcaccgagctgcagcagcagttcgagcagctgctcaacggcggtgcgccagcagaggaagaagaacccgaaggtgactga

SEQ ID NO: 43818 - DNA, 3363 bp, Mycobacterium sp. 012931
gtgactgaacagttccacctgtctcggctgcaggtcatcaactggggcgtgttcgacggctaccactcgatcccgttcagcgtaggcggcgcactcatcgccggagcctccggcagcggcaaatcgtcactgctggatgcgatttcgctgggattcctgccgttcaaccgccgcaacttcaacgcgtccggagacaacaccgccgccgggtccagcgccgggcgccgcactgtcgacaagtacgtccgcggcgcctggggccagcgcagcgacggcggcaccagccgggtgatgtatctgcgcggcgacggcaccgcctggtcggccgtggccgtcacctacgccagtgactccggccgcaccgtcaccggcctggtgctcaaatggctgacaggcgagtcccgcaacgactcgtcgagccgcttcgtactcggtgacggtgacctcgacatcgaggaagtctgcaaccgctgggcctccggccgtttcgacgcaggagtcttcaaagaagactggcggttttccaccaaggtcgaatcgcagtacctcgcccagctctacgcggcgatcggcattcgcgcgtccgacgccgcccagcagctgctcggtaaggccaagtcgctgaaaagcgttggtgggctagagcaattcgtccgcgaattcatgctcgacgaacccgacagcctggcccggctgcccgaggcgctcaagcagatcgaccccctggtcgaggctcgcgaactgctggccgttgcgcagaagaaacgcaagatcctgggcgacatcgaacagatccagcagcgctacgcctcggagtcctccgacctcggcatcatcgacctcgtcgacgcgccgatggtgcgcgcctacaccgaccacgcccggcttgcgcaatgtcccgcccagatcgccacgctcgacggcaccgtcgaccagctcgaaaacgaatacgaggacgttacccgcagcctcaatctggccaaggccgaggcggattcgctcaacgcgcagatcagcggttccagcgcgaacatcgctccgctgcaatcgcaggtcaccgccgccgagacccaggccgagcaggtggagcgccgccgaacgacctacgaggacatgctggccgcccagggtatcgaaatacccgacaccgcagacgagttctggaaccttcgcgaggaactgctcgcgcaggccaccgaactgctcgccaaggtcgaacgaaaccgagaggcatccaccgacgccgagtacgcgcagaaggctgcccgcatcgcccgcgacgatgtcgccaaggagctcaagcgcgtcgaacacgtcggttcggcgctgccggagttcgcgctcgcgatgcgcgaccacatctgcgctgcaatcaaagtcgacgccgccgagctgccctacatcgccgaactgctggatctcaggcccggccagacccgctggcgcctcgctgtcgagaaggtgctgcgcggggtgggcttgcggctactggtgcccgaccagcattgggagaaggtgctgcggttcgtcaacgagaccgacatgcggggccgactgcagctgcaccacgtgcgggcgaagttcctcggcgccgaacctgctgagcccgagccgaacacgttggcgggcaagcttttccccgtcgatccgaagcatctttgtgccgccgaagctgtcgacgtcatcaccggagccggcgaccatgtgtgcgtcgatactcccgacgtattctcgcggttccgccgcgcggtcaccgacacggggctgtacaaggactccgaccggttggccgtcaaggatgaccggcgaccggtcaagctgtccgagtacctctaccagggcgacgtcaccgcgaagatcaacgcgctgaccgtcgagctggcggccgccgaggaggcctatcagaaggcccgccgcaccgccgacgacatcgccgcccagcgccagcagtggcgcgaccggacggcggcgtgcaaggcgatctgcgagcaatacccgcagtggagtcagatcgacaccgagaccgccgacgggcatgccgagcggctgcgcgagcagtacgaactgctgatggccgacaatcccgacatcgcggcgctcaacgcccgcgccgacgaatgctggtcgcagattcagaaactgatgacgcgccgcggcgcgatccagacgcgccgcgacagcctcgacgagcggcgcacccggctgctggagctccaggagcggctgtccccggcgttcgtgtccgagccgttgacagagctgctgcagcgctacgccgcgcagctgcccgtcgcgctagagctgcttgacccggaacctcaccgcgatgcgctgttcgccgcgatcaagaaggaacgtgaacaactgcgtgaaagccgccgtcgttcctatgacgaattggcccgcatcctgaacacgttcgacacgtcgtttcccgatgcgattccgaatgactccgacgattttgacgagcgtgtgcacgattacgtcgcgctgtgccgccacattgacgaacgcgaacttcccgaagcctacgagcggatgatgcggctggtcaccgagcaggcgcccgatgcgatcctcacgctgcaccgtgtcgccgagcaggaggcgcgacggatcagcggccagatcgaccgcgtcaacacgggtttggcggcggtggagttcaaccgtggcaccaggctgacgttgcgggcgaccccgcggcacctggtagcggtggatgagctgacccagatcgtgcggtccatctcgcggcgcatcgccgaggtcgggctgggcgacaagcaggcgatcctcgaccagtacgccgagatcctccgactacgcaaccggctggcctccacggcgccggaggacaaggcgtggacgcgcgacgcgctcgacgtgcgcaaccggttcacgttcgactgcgccgaatgggacgtcgacaccgaggaactgatccgcacgcacagcaacgccggcgacaactccggtggcgagcaggagaagttgatggcgttctgcctcgccggcgcgctgagattcaacctggccagccccgaaagtgacaacaacaagccggttttcgcgcagctgatgctcgacgaggcgttctcgaagtccgacccccaattcgcgcagcaggcgctgcacgcattccgcaagttcggcttccagctggtgatcgtcgcgacggtgcagaacgccaccaccatcgagccctacatcgacagcgtggtgatggtgtccaaaaccgaacccaccggcggcaacgcgcgaccggtggcgtcggtggcgaccaggacgatctcggagttcacgtcgctgcgacaagagatgcgcaagacggcggaacgagtaccagccggggtgtga

SEQ ID NO: 43819 - DNA, 1446 bp, Mycobacterium marinum str. Europe
atgcacgacgacaacgcgggactgtcggcgaccgagctgctcgatctcaatcgcgacttgcagggttctcgcgccattcgcctgctcgccaccaccaacctcagcctttacgcgatgctcatggagcgccacctcagcgacggggcgctgtctgagactgagctcgtcgtacagctcgagcgcgacctcgaagacgtcaacgatccgcagcccgggctcgccctgatcaagtcctgggccgcgcagggctggctgcaccgcatcgtcgacgagcgccacggccagaatgtctgctatctgacccaggacgctcgccgggcgctggactttctccgcggcttgcgccgccaggacaccatcgccaccggcggctcgattacgggcatcgccgcgcgcctcaagcaagtggccgtcaaagtggataacgatcccgcccgcatccgcaaacacatcgaagccgaaatcgccgcgctccacgaggagcttgaccagctcgatgccggccagcgtccccaaaccgatgtcaccgactgctacgacgaggcccgggcgatcgccctgcagatggaacgcctgatcaccgatatcggccagtacggcacgatgatcgagcgggccacttccgccctcgatgaacccatcgattccaacgccgagtaccgcgaccgccaacgccagatgtacagcgactaccaggccgcatgggactcccagggccgcgactcccaccgcgccttcctgcgcatgatcaacgaccccgaccaacgcgccgagttcgaggccgacgtcgccgccgtcgccgacgccctgcccaccctcgacccggccctgcgcaaggtcatggccggcttcttcgagctcgtcggccatcagatcgacgaagtcgagcgcatccagcagcgctgcgcccagcgcgtcaaacgcttcaccgcgttcggcaccatggaacagagccgcggtgtcgcccgccaactcaacgaagccatcgccgcagcccgcgccctgctcaagtcgtcgttcaccgactcccgcctggacatcgaggtcccgctggcgcggcacgccatcagttccgtcggtgccctcggcttccggatcggtgacctgtccaaccccaagcccgccaaacccggcgacaccgaggtcgacctcaccagcttcgccgccttcaccacccaggtcgacgcgcccgcgatgtccgacatgctcaaccacgcgatcaccgcggggcctgtcgcgctacccgacgccgtcgccatgctcgacaccgcctacctgggccacgtcatcgtgctgtggtcctgggccctcaaacagcccaaccccgacaccgccgagtcgaccgccgtccgcttccgctccctggacggccgtgacctcgaaatcgcggtacctcgtttgacattcaccgaacccatcaacaccatcgccggagccagcacgtga

SEQ ID NO: 43820 - DNA, 696 bp, Mycobacterium marinum str. Europe
gtgaccctccaagacgatgaagtcgacatcgacttctcctcactccctcaggtcgaccagaacgcccgcccacccgttcagcgccggccgcgcttcgacggcgacgtctccgaactgccggaccgggcctgctgggccctgcagcacctgcttacccgccgctacatcagcgccgaagccgacgccgacgtctacagttgggtgctcgaataccgcaaggacctggccgtccggctctccgaactcgacttgctgctgcgcatcgtcgacgccgccgatgtcgccttcgtcgaacaggcccgctacgagtctgcgaggggaatcaagcttttacgccgcgagccgctcggcacctacgactcgatccttgccctgcacctggcccagatgatgcgtgcctccggtgggcagaccgtcctgatcagccgtgaggagatgcacggcctattctccggggtgctcaacgacaccgaccgcgacgcggtctcgttcgccggccgcatcgacggcgccatcgcccggctgaccggcctagagatcctgcgcaagacccgcgacgacgaggacagctacacgatcagccccgtcatcaccgccgtgatgactgcctcggtgatcaccgagctgcagcagcagttcgagcagctgctcaacggcggtgcgccagcagaggaagaagaacccgaaggtgactga

SEQ ID NO: 43821 - DNA, 3363 bp, Mycobacterium marinum str. Europe
gtgactgaacagttccacctgtctcggctgcaggtcatcaactggggcgtgttcgacggctaccactcgatcccgttcagtgtaggcggcgcactcatcgccggagcctccggcagcggcaaatcgtcactgctggatgcgatttcgctgggattcctgccgttcaaccgccgcaacttcaacgcgtccggagacaacaccgccgcgggatccagcgccgggcgccggactgtcgacaagtacgtccgcggcgcctggggccagcgcagcgacggcggcaccagccgggtgatgtatctgcgcggcgacggcaccgcctggtcggccgtggccgtcacctacgccagtgactccggccgcaccgtcaccggcctggtgctcaaatggctgacgggcgagtcccgcaacgactcgtcgagccgcttcgtgctcggtgacggtgacctcgacatcgaggaagtctgcaaccgctgggcctccggccgtttcgacgcaggagtcttcaaagaagactggcggttttccaccaaggtcgaatcgcagtacctcgctcagctctacgcggcgatcggcattcgcgcgtccgacgccgcccagcagctgctcggtaaggccaagtcgctgaaaagcgttggtgggctggagcaattcgtccgcgaattcatgctcgacgaacccgacagcctggcccggctgcccgaggcgctcaagcagatcgaccccctggtcgaggctcgcgaactgctggccgttgcgcagaagaaacgcaagatcctgggcgatatcgaacagatccagcagcgctacgcctcggagtcctccgacctcggcatcatcgacctcgtcgacgcgccgatggtgcgcgcctacaccgaccacgcccggcttgcgcaatgtcccgcccagatcgccacgctcgacggcaccgtcgaccagctcgagaacgaatacgaggacgttacccgcagcctcaatctggccaaggccgaggcggattcgctcaacgcgcagatcagcggttccagcgcgaacatcgctccgctgcaatcgcaggtcaccgccgccgagaccgaggccgagcaggtggagcgccgccgaacgacctacgaggacatgctggccgcccagggtatcgaaatacccgacaccgcagacgagttctggaaccttcgcgaggaactgctcgcgcaggccaccgaactgcttgccaaggtcgaacgaaaccgagaggcatccaccgacgccgagtacgcgcagaaggctgcccgcatcgcccgcgacgatgtcgccaaggagctcaagcgcgtcgaacacgtcggttcggcgctgccggagttcgcgctcgcgatgcgcgaccacatctgcgctgcaatcaaagtcgacgccaccgagctgccctacatcgccgaactgctggatctcaggcccggccagacccgctggcgcctcgctgtcgagaaggtgctgcgcggggtgggcctgcggctactggtgcccgaccagcattgggagaaggtgctgcggttcgtcaacgagaccgacatgcggggccgactgcagctgcaccacgtgcgggcgaagttcctcggcgccgaacctgctgagcccgagccgaacacgttggcgggcaagcttttccccgtcgatccgaagcatctttgtgccgccgaagctgtcgatgtcatcaccggagccggcgaccacgtgtgcgtcgatacccccgacgtattctcgcggttccgccgcgcggtcaccgacacggggctgtacaaggactccgaccggctggccgtcaaggatgaccggcgaccggtcaagctgtccgagtacctctaccagggcgacgtcaccgcgaagatcaacgcgctgaccgttgagctggcggccgccgaggaggcctatcagaaggcccgccgcaccgccgacgacatcgccgcccagcgccagcagtggcgcgaccgggcggcggcgtgcaaggcgatctgcgagcaatacccgcaatggagtcagatcgacaccgagaccgccgacgggcatgccgagcggctgcgcgagcagtacgaactgctgatggccgacaatcccgacatcgaggcgctcaacgcccgcgccgacgaatgctggtcgcagattcagaaactgatgacgcgccgcggcgcgatccagacccgccgcgacagcctcgacgagcggcgcacccggctgctggagctacaggagcggctgtccccggcgttcgtgtccgagccgttgacagagctgctgcagcgctacgccgcacagctgcccgtcgcgctagagctgctcgacccggaacctcaccgcgatgcgctgttcgccgcgatcaagaaggaacgtgaacaactgcgtgaaagccgccgtcgctcctatgacgaattggcccgcatcctgaacacgttcgacacgtcgttccccgacgcgattccgaatgactccgacgattttgacgagcgcgtgcacgactacgtcgcgctgtgccgtcacattgacgaacgcgaacttcccgaagcctacgagcggatgatgcggctggtcaccgagcaggcgcccgatgcgatcctcacgctgcaccgcgtcgccgagcaggaggcgcgacggatcagcggccagatcgaccgcgtcaacacgggtttggcggcggtggagttcaaccgtggcaccaggctgacgctgcgggcgaccccgcggcacctggtagcggtggatgagctgacccagatcgtgcggtccatctcgcgacgcatcgccgaggtcgggctgggcgacaagcaggcgatcctcgaccagtacgccgacatcctccgactacgcaatcggctggcctccacggcgccggaggacaaggcgtggacgcgcgacgcgctcgacgtgcgcaaccggttcacgttcgactgcgccgaatgggacgtcgacaccgaggaactgatccgcacgcacagcaacgccggcgacaactccggtggcgagcaggagaagttgatggcgttctgcctcgccggcgcgctgagcttcaacctggccagccccgaaagtgacaacaacaaaccggttttcgcgcagctgatgctcgacgaggcgttctcgaagtccgacccccaattcgcgcagcaggcgctgcacgcattccgcaagttcggcttccagctggtgatcgtcgcgacggtgcagaacgccaccaccatcgagccctacatcgacagcgtggtgatggtgtccaaaaccgaacccaccggcggcaacgcgcgaccggtggcgtcggtggcgaccaggacgatctcggagttcacgtcgctgcgacaagagatgcgcaagacggcggaacgggtaccagccggggtgtga

SEQ ID NO: 43822 - DNA, 1446 bp, Mycobacterium marinum MB2; identical to SEQ ID NO: 41818

SEQ ID NO: 43823 - DNA, 696 bp, Mycobacterium marinum MB2
gtgaccctccaagatgatgaagtcgacatcgacttctcctcactccctcaggtcgaccagaatgcccgcccacccgttcagcgccggccgcgcttcgacggcgacgtctccgaactgcccgaccgggcctgttgggccctgcagcacctgcttacccgccgctacatcagcgccgaagccgacgccgacgtctacagttgggtgctcgaataccgcaaggacctggccgtccggctctccgaactcgacttgctgctgcgcatcgtcgacgccgccgatgtcgcttttgtcgaacaggcccgctacgagtctgcgaggggaatcaagcttttacgccgcgagccgctcggcacctacgactcgatccttgccctgcacctggcccagatgatgcgtgcctccggtgggcagaccgtcctgatcagccgtgaggagatgcacggcctattctccggggtgctcaacgacaccgaccgcgacgcggtctcgttcgccggccgcatcgacggcgccatcgcccggctgaccggcctagagatcctgcgcaagacccgcgacgacgaggacagctacacgatcagccccgtcatcaccgccgtgatgactgcctcggtgatcaccgagctgcagcagcagttcgagcagctgctcaacggcggtgcgccagcagaggaagaagaacccgaaggtgactga

SEQ ID NO: 43824 - DNA, 3363 bp, Mycobacterium marinum MB2
gtgactgaacagttccacctgtctcggctgcaggtcatcaactggggcgtgttcgacggctaccactcgatcccgttcagcgtaggcggcgcactcatcgccggagcctccggcagcggcaaatcgtcactgctggatgcgatttcgctgggattcctgccgttcaaccgccgcaacttcaacgcgtccggagacaacaccgccgccgggtccagcgccgggcgccgcactgtcgacaagtacgtccgcggcgcctggggccagcgcagcgacggcggcaccagccgggtgatgtatctgcgcggcgacggcaccgcctggtcggctgtggccgtcacctacgccagtgactccggccgcaccgtcaccggcctggtgctcaaatggctgacgggcgagtcgcgcaacgactcgtcgagccgcttcgtactcggtgacggtgacctcgacatcgaggaagtctgcaaccgctgggcctccggccgtttcgacgcaggagtcttcaaagaagactggcggttttccaccaaggtcgaatcgcagtacctcgcccagctctacgcggcgatcggcattcgcgcgtccgacgccgcccagcagctgctcggtaaggccaagtcgctgaaaagcgttggtgggctagagcaattcgtccgcgaattcatgctcgacgaacccgacagcctggcccggctgcccgaggcgctcaagcagatcgaccccctggtcgaggctcgcgaactgctggccgttgcgcagaagaaacgcaagatcctgggcgacatcgaacagatccagcagcgctacgcctcggagtcctccgacctcggcatcatcgacctcgtcgacgcgccgatggtgcgcgcctacaccgaccacgcccggcttgcgcaatgtcccgcccagatcgccacgctcgacggcaccgtcgaccagctcgaaaacgaatacgaggacgttacccgcagcctcaatctggccaaggccgaggcggattcgcttaacgcgcagatcagcggttccagcgcgaacatcgctccgctgcaatcgcaggtcaccgccgccgagaccgaggccgagcaggtggagcgccgccgaacgacctacgaggacatgctggccgcccagggtatcgaaatacccgacaccgcagacgagttctggaaccttcgcgaggaactgctcgcgcaggccaccgaactgctcgccaaggtcgaacgaaaccgagaggcatccaccgacgccgagtacgcgcagaaggctgcccgcatcgcccgcgacgatgtcgccaaggagctcaagcgcgtcgaacacgtcggttcggcgctgccggagttcgcgctcgcgatgcgcgaccacatctgcgctgcaatcaaagtcgacgccaccgagctgccctacatcgccgaactgctggatctcaggcccggccagacccgctggcgcctcgctgtcgagaaggtgctgcgcggggtgggcctgcggctactggtgcccgaccagcattgggagaaggtgctgcggttcgtcaacgagaccgacatgcggggccgactgcagctgcaccacgtgcgggcgaagttcctcggcgccgaacctgctgagcccgagccgaacacgttggcgggcaagcttttccccgtcgatccgaagcatctttgtgccgccgaagccgtcgacgtcatcaccggagccggcgaccacgtgtgcgtcgatactcccgacgtattctcgcggttccgccgcgcggtcaccgacacggggctgtacaaggactccgaccggctggccgtcaaggatgaccggcgaccggtcaagctgtccgagtacctctaccagggcgacgtcaccgcgaagatcaacgcgctgaccgtcgagctggcggccgccgaggaggcctatcagaaggcccgccgcagcgccgacgacatcgccgcccagcgacagcagtggcgcgaccgggcggcggcgtgcaaggcgatctgcgagcaatacccgcagtggagtcagatcgacaccgagaccgccgacgggcatgccgagcggctgcgcgagcagtacgaactgctgatggccgacaatcccgacatcgaggcgctcaacgcccgcgccgacgaatgctggtcgcagattcagaaactgatgacgcgccgcggcgcgatccagacccgccgcgacagcctcgacgagcggcgcacccggctgctggagctccaggagcggctgtccccggcgttcgtgtccgagccgttgacagagctgctgcagcgctacgccgcacagctgcccgtcgcgctagagctgctcgacccggaacctcaccgcgatgcgctgttcgccgcgatcaagaaggaacgtgaacaactgcgtgaaagccgccgtcgctcctatgacgaattggcccgcatcctgaacacgttcgacacgtcgttccccgacgcgattccgaatgactccgacgattttgacgagcgcgtgcacgactacgtcgcgctgtgccgccacattgacgaacgcgaacttcccgaagcctacgagcggatgatgcggctggtcaccgagcaggcgcccgatgcgatcctcacgctgcaccgtgtcgccgagcaggaggcgcgacggatcagcggccagatcgaccgcgtcaacacgggtttggcggcggtggagttcaaccgtggcaccaggctgacgctgcgggcgaccccgcggcacctggtagcggtggatgagctgacccagatcgtgcggtccatctcgcgacgcatcgccgaggtcgggctgggcgacaagcaggcgatcctcgaccagtacgccgacatcctccgactacgcaatcggctggcctccacggcgccggaggacaaggcgtggacgcgcgacgcgctcgacgtgcgcaaccggttcacgttcgactgcgccgaatgggacgtcgacaccgaggaactgatccgcacgcacagcaacgccggcgacaactccggtggcgagcaggagaagttgatggcgttctgcctcgccggcgcgctgagcttcaacctggccagccccgaaagtgacaacaacaagccggttttcgcgcagctgatgctcgacgaggcgttctcgaagtccgacccccaattcgcgcagcaggcgctgcacgcattccgcaagttcggcttccagctggtgatcgtcgcgacggtgcagaacgccaccaccatcgagccctacatcgacagcgtggtgatggtgtccaaaaccgaacccaccggcggcaacgcgcgaccggtggcgtcggtggcgaccaggacgatctcggagttcacgtcgctgcgacaagagatgcgcaagacggcggaacgggtaccagccggggtgtga

SEQ ID NO: 43825 - DNA, 1344 bp, Serratia liquefaciens ATCC 27592
atgcttgcgttattagtcgatctcgatactttcttggatccgacacaactggtagatgaacctacgccgcaacaggtacgggtctttctacgagactacatcgccaataagaatttgtgccttgagatagcgtcggttgaggcaacgataggaaaccccgctctggaacattatgtctataaccggctgcgtgatacggggtggattcgagaagagcaggagagcgggtatcgatacgttgtttggatggcgcaagatgcgcgcaggctgttgaacttccttggcaatatgagtgctgagcatccctcgttaggtgtggtgtgtctggcggtacgctcgaacctttctgaagtggttaaagacccaaccaacggatcgttagtgcgcaaagcggctgatgacatggaggatttcttaaatcgactcagagctctcgtgggcaatatccgcgaaatccaccatgcgattagcggtggttccgtccaaggtagtggccatttcactttttactttgaagaatacttggccgaactctttctacccaatattgagaaactctccctgaaaggaaaccccaaccttcatgccagtaaaattcgtaagctagttagcgatatccgtttcagctcagagcgcctagaagcatgcgctagagcctataagcgtgatgatatttctaatccttcggttcagcttgtggaagcagatctagatcgattgagcaaagcgtttgacggaattgctccactgttcaagaaaacgcaggactatgctcgtcgtataacccggcggatgtatgagaagatcaagtataccgtgcataccccaagtaatatggggcaacaggttcaggcgctgcttgagcgcatcgggagtgaagccttgttagtctcattacctagcccgttgatcggtgaagaactccttgctgattgccggttggccacacccaaggcaaagtcaatactgcctgttccgacggtgcgcagacagccaaaaccgttgtgggaaaaacgggcatacaaccagctcaaacaagaacatatcagtttccagaaatgcgaccctacacgtgttgccaacttcattgaatcgaatcttggagagcgagtacagatgaccacggatgatcttaggatcgataccgctgatgaaatgatggcagcgcttcatttgcgccttttggcacaaggtataccgaaaactcatccacttttttctctgcagtccatgtactgcgttgagtttgatgaaggggagtggacggaccttaaacagatggccggtcgtcgcctgagaatccgtcgaatcgtcgctatggagaaacgcacacatgacgagtga

SEQ ID NO: 43826 - DNA, 672 bp, Serratia liquefaciens ATCC 27592
atgacgagtgagattgcgctcagagaactgaaagatatcgaggcaaaaacatctgctgactacgccgatagcttacggaacacggcggcatacctactgcagaagcaatgggtatggaagggaaaacgcggccaaaaagagcacttcaagttgtgtgaggataatctggcttattttaacaagctttttgatgggttggatatggggtggtactacgatcgtaacttcggctatgcggggattttaccgcgtggttccggtaagcaactggatatcacctctacgctgttcctgctcattctacggaaaatgtatgacgctgaagcgtcgatgggacgtacggagcttgggtgtgtaacaccgccaacggtcgagcttcttaatcagtacgaacacgtcaggggggagatgccccccataacagaaaccaataatgccctggagaacctaaggaagaagggaattattgagctcggaattaaagaccccgataccaaactccacgagttgaccgttctccctaatattacccgtgtggtcgatcaaacctacgtgggcatgcttaaccgctttatggatagttacacacctgaatctgcgtctggcgaagcggtttacgaaggaactgatgatcttgagacactggaggtctacgatgacagtgcagaataa

SEQ ID NO: 43827 - DNA, 3513 bp, Serratia liquefaciens ATCC 27592
atgacagtgcagaataaccccatacaagcacatattcttcataatgtggtgttggcgcagtggtatctgtttgaactggagacgatccatctcaatgctccagccacgctagtatcaggcgaaaacggagcgggaaaaacaacgatttttgatgcgatccagtttgttctgatggggggggatcaacgtaaaacccgctacaactctgcctctgaaaccaaaacctctgggcgttctgcgcgtagttatgcgctgggcgagttcaaagaaaacgatgcaaagagttgccaacgtgagaatgccaatacttacattttcttaaactggtacgataatcatcaatgtccttacgcttttggactgtctgtttatgccaacagtcagtcaccaaacattgagacccgcgggcatatcattaaaggccgccacattactgaagctgatttactgtccggggatgacgcctttctaccatggcgtgactttgttgaccgcatgaaacaggatgccaaagagcgtcatggtgcgatgagctatgagttgcttgacagtgcgcggacgatacgtgaaaaaatggctgaggcgatgtcggttaatcagacgcgcagcgccaaaattgaacctgatttattggttaagacattatcaaatgcgttacaactgaaaatggacagcccgattgatccatttatcagggacttcattcttcctcccgacctcattgaaacctatcaattgcgcgaagatcttcttgagcaccagcgtattgaggcggaaatcgcacgtgccgagagccacaaaaatgcgcgcgagttactgattgccgaagcgaagaagcttacccggcattacgccaatgcccaccatgctctttgggtttcgcaagaggccgatactgttcggctcaatgaagaacttggccgcacagaagatgctcaaatagctgcgcaagagcgccagacagcagctaaacgcaccattgacagagaagagccacgactgccggagctgaaacaatgtcgtgatgatgccctgatcgcgtggcaaaattctgatgctgcaagtctgagtagagccgttgatgctgcaaaaagcgccgtttctaaatccacaaacagtcttaccaaccgaatattttcactgcaaaatgctgtgcgtgaagttatccgtcaacgatttcctgacacgctgggtatccagagtttcgagctattagcccggcactgggcgacatccgtggacattctcaatcgggcaggcattgagagcctctcagcatcggaacatgagaatacgcttaaggtaaccgataaacttaaaagcgcaaaaacattactggacgagatagctgaacgtatagaagtggctgataaaaatgtgagccacgacttaacacaaaccatgcatgaatgtaaggccttgcaggtgcgtattgaacggctgagaaagggactttcggacatcaatccggcgacggctaaggtcatcgaattactcaaacaagagagaatagaatccatgcccgtctgtgacctctgtgagatcgctgatagagactggcaagaagcagtggagtcgtacttgggtccgaatcgcgaagcactggtggtgagtgtacgtgattttgaccatgcattggaagtgtacgaagttgcacagaagcgagagccgcaactcaaacgagtacgcatgattaaccctgatcatgctttagccgccaacaaagcgcccactgaaagaatggtttcaaagctgatcgaaaccagcgatccgatcgctcgtggttttatgaacgtcattctggatagaactaagatggcggcaacgcgcgatgaactacgaagagagcgcaaagcgctaatggcatcaggccttgcgaccggtagtggaacggtgggcggtaccgctcatattcgcgggttattgatggggaaacaggctaaagctgagcagcttaagctcctggagcatgaacgggatgtgctcgcacaacggctctctggcgttgagagatcagcacaaacgctgagcaggcttaaccgcaactgggctgggctatctacatctattgtggagggctcatcgtccgtacgggaaaatagtatccgcctgatgcaagataaaaaagcattgtctgccgctcaggaacagttgaaaccgctgacatcgaaagatgaacagctcaaagccgcaaaggcgcaggctgacgacaattatgaagcatgtaatacggcgatcatcaatgccacggccgaacaaaagaacgctattgcaacgttaaatagcttgaacaccgagattgaaagcctctcaaaaaatagggacgaggcagaacgaatccgcagtgaaacagaaaaatctcctatacacaataccgccaaagcagatgaacgctggcaaacttatgagcagaagtttgggggcgaagaaggatgctattccctgattcgaaacaaagcccagaatgaggctcaggttgaacgggagaaggcgctcaatacacgtggagatctgtattacaaggtcgttagattcacgacagactttgcagaggatatagcgaatcgtcaggcgcttcttgaagccgcaaaaactgataacgtgaatacagaggcgtaccactttattgaggcagattgtacggaatgggttgagcgtatcctggcagcacagcttttagtgcatcgccaggcggcccgggaagctgctgaacagatggaaaaaaactttcgaggtatcatagtaggggagcttcaaagccgctttgagcagatgagatataccttcaatcaactcaataacttgctcaagaaagtcccatttcacgaccacatctacagcttccacttcaaggttcgcgagatagagagcttgcgcaccgtctacgaatacattacgactgcagatagagaagagaccgagttagttgggacaatgtttgaaacagcatcagaacatcctgctatagacctgttgaaagaggcattgctcagtggtgacgatctaattaatgagatcagtgattatcgcagtttcttcacctatgacatgaagatgcgtaaccctgacaccgggactgagcgcagcgtggcagatatgcaaagcacaggttcaggcggagagcaacaaacaccagcgtatattgcgctggctgcgagttttatgaacgtttacaagattagtggtcattcagatcgaggggcgtctttggtactccttgatgaagcgttcaataacatggatggtggcaatgcgagcgcagcagtggcctttctcaaagaaatcgggttgcaattactgattgctgccccgccagaagtgaccctgaaaattggtaaagagatggatcaaatttataccatttgccgtgaggacagagatgtggtgattgaccacacgcagattttcgaggcagggcaggagcttatagaccaacgtaatccagtttaccatccagagcttgtggctgaacgcgctgctgaattgaaagctaaagccgagatggttgaatga

SEQ ID NO: 43828 - DNA, 1239 bp, Serratia liquefaciens ATCC 27592
atgaactcttatgttgagaagttcatcaatcaattgatcaagaagatagataaaccagaaggtgtggaacttgagtgcaggatacgtatcacagatcacgcctatcgttggtacttcgccctcaataatagtaccaaaacggcgctgcataagacgttggaatccattgcatacttgaatatccactatcagcgtaaagtcgcgctgggagcgtttaaacatattgagtatatccagatcgttgatggctacagattaatggatagtcagggagttataccacaggctgatgaaatcaaagtttcatttcggcatttagagacaacggtgttcaatgtaccttggtgggataatacgaagctggagattgccaaggaatggtcgagcaacaagacgttttgtggtgtgaatcgcaaccaggcagaccgactttttgatgcaatgaaagttattgagtggatcgttcaactgcctgtctctgagaatgttcccgatattcggaccctcagtgccatgttgtatggcaactccaagaagttagaatgtaagagtttttccggtcttattcgaaagttgatgttgccgcatattgacgatgatgttgtggatttgcttgacgatggggttaagctgctggagtattttgggattagtaaatacccaataccaatgcgtttcaaagccaatgggttgttgcattgcagggggattatcgatttatctgcactccactacggaatcggtgtttccccggatgaagtcaaaggcattgtgtggggacaacggccaccctatgtgcttttcattgaaaatcgtgctagtttcgagcggtatgtgcgcgaaattgatgattttggtgtgattatttacaccgccggcttcccgccgcgctcttgggtacatgtaatagagatcattatcgctgaactgcgtatggagataccgatttaccattggggtgatcgagatgccggtggctatcgtattcttgcatttttggcgaagcgacttgatattgatattcagccatatctgatgggggtggaggctgaagcattgactcaggctgatgatgagctcgttgataaacctgtagtcgaattaatgcaggcgctggagtcagcaaagcactatccagctattttagcgctttatagagatctagcgaaactccaaattaagaatctaccttggatcgagcaggagcagatagcccctgttagccctcggaaatattga

SEQ ID NO: 43829 - DNA, 1449 bp, Desulfococcus multivorans DSM 2059
atgaatttcgactataacgcccttgatcacctccgtcagacccatccggcctggcgtctcctgtgcgccaagtatgcgcccctgacggcaagtttccttcaccgggtgttcatcgtccccaatgtgcgcatcctggcggaggccgatctggtcgaggcgctggaggacgagctcttcgttctgcgggaacagatggggaatgatgcttttcccggttcggcgcggagctatctcaccgattgggcggataacgacaaggggtggcttcgcaaattctatcctcccgggaccgacgagccgcactatgacctgacgccggcctccgaaaaggccctggcctggctggagggtttgaccgaccgggcctttgtgggcaccgagtcgcgccttcttaccctgttcgagctgctgcggcagatgagcgaggggacccagaccgatcccgaggcccggatcgccgagctcaagcggcgccgcgacgagatcgacggcgagatcgaccggatccttgccggagacatcccgctgctcgacgatacggcgctgaaggatcgattccagcagtttctgcaattggcccgggaactgttgaccgattttcgcgaggtagagcacaacttccgcgtcctcgaccgacgggtgcgggagcgcatcgctctctgggaggggggcaagggggcgctgctcgaggagatcatgagcgagcgcgacgccatcgccgattcggaccaggggagaagctttcgcgccttctgggattttctcatgtcccagtcccggcaggaggagctgagccgcctcctggaggaggttctggcccttccgccaatccaggccatgcaaccggagccgcgtctgtaccgggtgcattacgactggctggaggccggcgagcacacccagcgcaccgtggcccgcctgtcggagcagctgcggcggtttctcgacgatcaggcctggctggagaatcggcgtatcatggacatcctgcatcatattgaaacccgggccctggcgctccgggaaaccattccgcagggggatttcatgtccctggccgaaaccggcgccgacatcgatctgcccctggagcggcccctgttccgtccggcggttcagaatcgaattaccgagacggccgtcgacgaaggggacgccgaggtcgatacaggggtgcttttttcccaggtcgtcgtcgatcgggccgagctgtccgggtatatccggcgggagctccagatgcgggatcaggtcagcctcggtgaaatcgtcgcccggcatcccctgcgtcacggcctggccgaggtggtcgtctatctgcaactggcttcggaatggccctggaccaccgtggacgaagaacaccgggagcggctgcgttggcgcaccgaaacgggccgcgtccgggaggcgatcttgccgcgcgtcattttattgaggaacggatga

SEQ ID NO: 43830 - DNA, 630 bp, Desulfococcus multivorans DSM 2059
atgatggaaacgaatgctgtcggaacgaacctgtccgacgagtcgccatacgagctgtcggccgtcgtgattcccctgctcaaagggatcatctaccaggaagacagcccggcgctttggctcgccctcgtcaatctgcaggccggggtgcgggattatgtcgccgtgctcggactggagttgatgctcgacgaggccgagggatacgcgtttctgcgctcccgggaggaggaccccgacgtcgccggcacgccccgccttgtcgcgcggcgacagctttcctatccggtcagcctcctgctggcactgctgcgcaagaaactggcggagttcgacgccggcggcgccgatacccggttgattctttcccgggacgaggtggtggaactgatccgcatttttctccccgccggaagcaatgagacccggctgatcgatcagatcgacacccatctcaacaagatcgcccaactcggttttgtgcgacgcctgcgtggtcaaaaacagatgatcgaagtgcggcggattctcaaggccttcgtcgatgcccagtggctgtccgattttgaccggcgtctggctgaatatcgggaagagacggccggaacccgggagacgaccgatgattga

SEQ ID NO: 43831 - DNA, 3366 bp, Desulfococcus multivorans DSM 2059
atgattgaaacgcaggaactcgaattcatcaaagacgaccggctggcgggatttcgtctgcagcgcctcgaggtgttcaactggggaacctttgacagacgggtctggaccctgcggctggacggaaggaacgggctgctgacgggggatatcgggtccgggaaatcgacgatggtcgatgcggtgaccacgctgctggtgccgagccggcgtatcacctacaacaaggcggccggcgcggatgcccgggagcgctccctcagatcctacgtgctgggttattacaaatcggagcggcaggcaaccctcggcagcgccaaaccggtcgcccttcgcgacgccaatacctattcggtcattctgggggtttttcacaatgcgggttacggcaagacggtcaccctggcccaggttttctggatgaaggatagcgcgggccaacctgatcggctctatgccgcctgcgagggagatctttctattgcgaccgatttttcgaatttcggcgccgatatgaccgggcttcgaaagcgtctgcgcaaggccgatatcaagctgtttaacagtttccccccctatggggcctggtttcgacggcgcttcggcattgacaacgaacaggccctggacctgttcctccagaccgtatccctcaagtcggtgggaaacctcacggatttcgttcgcacccacatgctcgaaccctttgatgtggacgtgcgcatcactgccctcatacagcatttcgatgacctcaacagggcgcacgaggcggtcctcaaggccaaaagacaggtcgagatgctcacgcccttggtggctgactgcgaccgccacggagaactggtgcaggcggtcgacggcctgcgggcctgccgcgaagcgctctccccctggtttgccgggcaaaagctggggctgctggaaaagcgtctgacccttttgcaggaaaatctggcgcggcatacggtcgtaatcgagcgcctggaggagcagcgtcgggtataccaggggcgtgagcgtgaattgcgtcgcagcatagctgaaaacggcggcgatcgcatcgaccggatcggcgctgaaatatcgcaccagaaagcgtctcttgagcgccgaaaggccaaggcggaccgctatgcggagctggtgcgctccctggacagggttcctgcgacgaacccggaggacttccttgttcagcagcgggatttcgaggctctgcgggaagcggcggtgatcgcggaagatcgggtgctcaacgacctcaatgccctgggggtctccttcgcccaggagcgcagggaacatgaaaggcttcaagaggagatcaccggtttgaagtcgcgccgcaccaatatcgatgaaaaacagatcgccatgcgccggatgctgtgcggcgcggtgaacctggctgaagtcgatctcccctttgccggcgagctgttgcaggtgcgcgaagcggcacgggactgggagggggccatcgagcggctgctgcacaatttcgggctttccctgctggtgcccgaccggcattacgcaaaagtcgccgactgggtggaccggacgtacctgaagggtcggctggtctatttccgggtgcggaagccccgccgggggaatgccgtacccccgcaccccgatgcattgacggggaaactggcgatcaaaaccgattccccttattacgcctggttggaacaggagatcacccaccgtttcgacgtggtctgttgtgccgatcaggatgcctttcggcgtgagcgtaaagccgtgacgaaggcgggtcagatcaagatgccgggtgagcgccatgaaaaggacgaccgccaccgtctcgacgaccgccgccgctatgtgctgggttggagcaacgccgccaaaatcgccgctctggaggagagcgcccgccgcggcgaagaccggctgactgaactcggcagccggatcgccgacttgcagaaggaacagaagcagatccgggaacgcctggggaccttcttcaagatcaacgagcacaaggaatttcgcgatctcgactggcaaccggcggccgtggcgatcgcccggctcgaagcggagaaacgggagctggaggcggcttccgacctcctgcagaccctggccgcgcagctcgagaccctggagggggatctggcggccgtcgagcgccggctggaccagcgcaaggacaaccgttccgagacccgggaaaagatgcgggccgccgaggcacagcgggaacagaccgcccggcttctggaagggtccggcggcgaggcctcggcccggttcgggcagttggagaccctgtgcatggaagcactcggcgagcatcggctgaccgtcgagtcctgtgaccatcgcgaacgggagatgcgggactggcttcgagggaaaatcgatgccgaggagaagaaggtcgcgcgcctccgggaaaaaatcatcagggcgatgaccgaatacaaggaagcgtggaaactggaaacccgggacgtggatgtcagcgtcgcggccggcttcgaataccgggccatgctcgatcggctgcgcgccgacgatctgccgcgattcgaggcgcgcttcaaggaacttctcaacgagaacaccatccgcgaggtggccaacttccagtcccaactggcgcgggagcgggagaccatcaaggagcgcatcgcccgaatcaacgggtcgctattccaaatcgactacaatcccggccgctacatcaccctcgatgcccaggcgaccctcgatgccgacgtccgtgactttcagaccgaactgcgggcctgtaccgaaggggccctgaccggatcggaagacgcccagtactccgaggcgaaattcctgcaggtgcgacggatcatcgagcggtttcgggggcgcgaggagcataccgagctggaccggcgctggacggccaaggtcaccgacgtgcgcaactggtttgtctttgccgccagtgaacgccggcgtgaggacgacagtgaacatgaacattacgccgattccggcggcaagtcaggggggcagaaggagaaactcgcctatacggtcctcgccgccagcctggcctaccagttcggcctcgaatggggggcggtccgatcgcgctccttccgcttcgtggtgatcgacgaagccttcgggcgcggttcggatgaatcgacccattacggcctgcagttgttcgaccaactcaatctgcagttgctcatcgtcacgccgctccagaagattcacgtcatcgaaccctttgtcgccatggtcgggtttgtgcacaacggggacgggcgttgctcggtcttgcgcaacctcagcatcgaggactaccgcgccgaaaagcggcggcttcagacatga

SEQ ID NO: 43832 - DNA, 1188 bp, Desulfococcus multivorans DSM 2059
atgagctggacgaccccggaagatctgcgcggccaggtgcggcggctgtgggatcgcggcctgctgccggccgcccttgccggcggcgatacgatatttccccgccgtcttgtcctgaaggggccgtcttcgagagaactggcggaacgcttcgacgacgtgcgccgatggatcgcccgcctggagaaaggggctgaattctatcgcgtgggatggcgaaccgtcaaccatcgcatcctgggcgtcaacgcggtgccggatgaaatatggatcgattccctggatgacgccctcgggctgatcgacaaacggcgggacgccgagcggtttgcggcgctgatctccctgacccgggagcgccggccggaactctcggcctggctggccaaacggccgcttcgaggattggcgctggccgacgattgggcgcggctgctggacatcgtcgactggctgcgccgacatccccgccccgatatctacctgcgccaggtggacgtccccggcgtccacagcaaattcatcgaaaggcatcgggccgtgctgagcgagctcttcgatctggtgatgccgcttgccgcggtggatgcaagcgccggcggcatcggggggttctgccggcggtacggattccgcgacaagccgatgcgggtacgctttcgaactctggacccggacttgtcaccgttcaccacaacggccgatctcgacatgaccttgacccgcgatgtcttcgatcgcctggcgctgccggtcgcgagggtattcattacggaaaacgaggtcaatttcctggcgtttccaccggtttccggcacggtcgtgatcttcggcgcaggctatggtttcgataacctggccggtgccgaatggttgcgcgtcggagagattcactactggggcgatatcgacacccatggctttgcgattctcaatcaactgcggcggtatttccccgacgcggcctcttttctgatggatgagccgacactcctggcccatcgtgtgcattgggggaccgaaccgaacccggaaaccggagacctcgagcgcctgaccccggaggagagcgccctctacgatgcactgcgccggaaccgttggggaaatcgcatccgcctggaacaggaaaaaatcggtttcaattgcgtggcgtcggcgctggaaagactctcgagaccggattga

SEQ ID NO: 43833 - DNA, 1512 bp, Ralstonia solanacearum CMR15
gtgcatggaccaggcaaggtccagtgggagcaatcagccttgataccgtctgacctgttgccggaacccatgaccccaccagcgggtcatcctgtgttctttgagggtgagcgccagcggttcttccgtcccctgaacagctcccgccgggagcttgtggccgcttgcctgcgggcactctatgaccgactgcacggccccatggccgactatgctcacaacctcacgcgggatgcgctgcgcgagctcctgctgccggttgttcggcagtaccaaagcgtcaaggcgcaagagggtggcgacgatgagctgagcggtgcggaagccgatgacccgcaggcgctcgtcggcatggtcatccgggcactgctaaccgacgcttggcttgagcagttcgccgaccgcaccggcctcgtcactgccttccgattctctcgaccagggaagctgttcgcggaggccctctggtcgttggaccgcccgagccgcagccggcaacggaacatgcggggctgtcgcaatgcactggaagcggcactgtccgaccgcggtgacgcgcacgacctagtcgacgcttacgagtacgccgagaaagtcatcgaggacttgaccgacggcatcgactacttccaggagctggtccggcacctgatgcagaccgcctcggtgcaaacgcaatggagtgagttcgtcgagttcctggaccgcttccagcgtgactattccaagcagctcactgccgataacgcaacgcttaaccggcaggccatcgtgcagaagctggagcggcttcgcctcgtccccgaggccaagttcaatcggatggacgaacagctgcgagacgtcgcccattgggccgtgaaggaacacgtgggcacgtccgtctatgactggcttctgacccgcatcgaagacatcgttgatgctgcgtgccagtcgaagcagcctggcttcctgaaggccatggagacttacctcaagcgggtcaatggcttggcgctgcagtcgatgatgctgcgcgcaggccagacccggcatgcctacctcgctgcgattcagcaggtcgcagaggcccccaaggaacaacaggacctgctgctcgcgcacatcgggcagttcttggcgccggcagaggtgcggttgctggaccccgcaagcttcaagctccggacggccgcccagcgccgcaaggcggtcacgatttccgttcggccgcgaccccctcgcgaagagcgcctggccgcagccatggcccgcgccgaggcggaggccttctccatccccaacgaagaggttgcccagctactccggcgcgacctgcgcatctttcagcatcccattcgtgtttcagcgctcccaacggccaccgcccgcgacaccctgcgtgccatgcaggcagtggaggcggttcgaagcgaggtcggcgcagacctgtccatcaagaagctgcccacccgcttggagaacgagctctacagcggcaacgactacgagattgacctcaagaaatga

SEQ ID NO: 43834 - DNA, 672 bp, Ralstonia solanacearum CMR15
atgagcctcctgtcccacatcaacgaacaactcgcgcttgccaacatcaagccagaccggttccgggaaatcatcaaccgcctgatggcctacggtgccatcgtgcgcgaggaggaccgggttgagcatctgctgtatgacgacgcaaggcgcgtcgagggcctgctggaggactacttcgacatcgccggcttccgtttgcaccacgacagcaataaccagttctatcgcctctacgtggcgggcgccgtagtcgatgggctgccggaggacatcctggagccgacgccatcgctgcgggctcgggtatctcccgacttcattgcgatggcccttgctctgcgcttcctttaccagaacaagctcaacacgggcgacatccagccccagggtgaagcgctggtgagcttcgaggaaattgcggccaccatgcagacgcaattaaagcgtcctctgccgaacggcatgggcgacaagatggccttgctggccgagttgaagcggcatcgcctgctcagctacacggccgagttttcgatttcggatgaagacgcgctgctcgctatccggccaactatcctgggcatcgtgtccaacgacgcgctgagtgcagctctggaagcagaaggcgtggttgaccaagaaacgttcgtcgaggaggccgaccaatga

SEQ ID NO: 43835 - DNA, 3633 bp, Ralstonia solanacearum CMR15
atgaagctcgaccgcttggtgcttgtgaactggggacaactgcagcccggcaactacgagctgggaaacatgacgctgctcactggtccaacgggtgcaggcaaatcgacgatgctcgatggtcttcagaccatcatgacagcagcctaccaaggtatcgtggcctacaaccctggccaggaggaagtccagcaaaaccatcgccgtggaaaatccaaacgcacccttgaatccttcgtggttggcgccgagtacagccttttctctcggccggaaggtgcccagggctacctagcggcggtttttcgtccgggtcctgaggacggttcggccaagatgttcactgcgctcgtagcagcctcggcacgcgtggacggctccggagagagacgagacgcgaagctggaacgtcttgtcctggtcatcattgaggacgctgcactgtcggccgaacagttctttgaggacatggaccaaggtatctgtgtgccagtcgaagacatcgtcaagcgactgaaggccaagtacccaaaggtcgttacctacgacgaccacaagcgcgattacctcagcgggctttatggcaggttccgcgggcgcgtgtctattccctgggacgaggctcagaatgcggctcgggcatggtcgcagtcgattgcctacaagcccatcggctccgttcatgacctagttcgggacgacatcctcgagttcgatggaaagctactgcaggagagcatcacccgcatcagtgacttgatgcgccaagtgacaaacttgaaggttgaaggtaagcgcattgaagggaccgtcactcgacttcgtgagctgaaggaggccattggcaagacggccgccagcttcgaagggcaggttcaatatgacttgctcttggccaaattgcatctggctgccgacgacgagcgcatcgcttcggagcaggggaaaatcaagcacgacagagcgctggtcgaccagcacaagctcaaggctcaaaccgaagcacagctaaagcgcaacgttgataacggccgcattcatatcgcagcgaagttgagcggcattccggcccataccgagaagaagacgcttgacgagcacctcgtgcgggcggcgtcggctgcgcgcgccaagctcgctgagctgcatgcaggtctcttcgccgcggcgcacatcaagaacacaggcgacgctatggttggacggccggtaccggagcagttccggaggttacgcgcgtctgtcgatgtcgtggccgaggcccttgcgtctaccaatgtggacaggctagcagggctcctcaattccgtggacgatgcaaaccgtgatgacgtcctgtcaatagagaagctgcttcagttggcctctgcatttgacggcatcgacgccggcctgagccagttgcacaactcgttagttggtaccgagggtagtgtgctgatggctgttgctgccgaatcggcatcgctcggccagcgcatcgacgccgcgaagaaggagcgcgatgagctggctgaccgtaagcaacgacttgcggccggcgcggggaactacaaccgggacaccgttctcgcgttggagcgcattcgagagaagttccccgacgccagcgttcaggtgttatgcgacctcgttgagccggtgtccgaggactggcaaagcgccatcgagggctacatggacggcgcgcgcttcaacctcatcgtcaagccagactgggaagcccgcacgattgacttcctgaagtcctggggttcacgctcgaaggtcgtgcagggaaagcgatgcttggagcgtgctgacgagtctcgtgtgccgggcacttccatcattcacgagttgcgcaccgaccaccctattgcgcgggcctacctcatcgagcagttcgggcctgtcgtcaaagtgggagactccgaggagctgcggcggaccccgcgcggcctcaccaaggatggtaagggcagcagtgcgatgacgatgttcatctgcgagcgtcgggactttgtactcggtcgcaaggcgcgtgagcgggcgttgcagcgcaccactgaaatgctagaggccgccgacaaggacatctgtgaactggggagctcccaaggtgacctggagggtttccggaagctgctgacgactctgaaagcgcccacgttcgacgcgcagccgttggcccagcatgccgccgacctcgacgtcacacgtcggtctctgtcgcaacttaacttgaccgaggtcgaacaactacaggccgagctgacccggatggaagaactcatccaagcgcatgacttggcaattgatgcggccaaggagactgtcacgctggcagaacagcgcataacggctgcggagaatgtcatcaaacgcatcaacgagggccgggacgctcgtttccaagagcgcgaaaaccagattcgccgcctgaagcacctctgcgaagcgaactcggagaagacgtacacggtgatggcccaagaggtggacgacctcattgcgtctcacgcgtacgaaatccctgccgttcaggcacgggtttcccatctgcgtacacaacccgagaagctctttgccgacgtgcgcgagatgctggcggagtacaacgctgctgttcgtgccgacgaacgctttcagtctgcgctgccgcatctgacggatgcaccgtccttcgacccctgctatggccccttggtgctgctcgggcgctcggtcagcacgctccacaacgagctcgagagcatcggcctgtacaacaatcgtgccaaggtcgaggaggcagagcgctcctttcacgacgtcttcaccaagcagttctgcgttgaaatcaagagcaaggtcgacgaaggcgtgaggatgctgcgccagttgaatgtcgagcttgagaagctgaaattcggtaccgaccgcttcagcatcgactggtcgaagtgggagcctgaattccaggagtattacggcttcttctcagccgttgctgaactggccgattcgccggaagcggtggacctgttcggtgagacggagctgtcgcctaagcacatcgaggtccgtgaccgcctggtcaagctactcctggaccaagaccaggacagggcggggcgcgagttgctgcgcatcgcagactaccgcaactaccgacgctacgaaatttggaacgactcggacagcggtggccgcatcgccctgtcgacgtggggcacgggctccggtggtcagttggagacgccggcatacattgtgcgcgccgccgttgtgaccaaccgcctgcgcctgttcgataagggtgccagcttgaagttgcttgttagcgacgagtctttctctcgcatggacgagccgcgtgcacgtgccgtcctgcggtatctgcgagacagcatgggcctacagctggtcagcgccatgccgaccaagcacgccggcgcgctgcgcccagagttcgaccgcgagttcagcttcagtcggatgaacgtgtcaggcaacggcgaaatcgacttcgtctcggagtgcgatgaacgaatcttcaagaaggaccgcatgcgcgaggtctgggaagcgcagcgtcaagaggttcgcgaacaagccaagctgctctttgatgcggcagagcctgaagaggccacgggagcagcgaagtaa

SEQ ID NO: 43836 - DNA, 1143 bp, Ralstonia solanacearum CMR15
atggagcaaccgttttggcttcagtcttcgcctgttcagcagttgctgaacctgcttgtggaccgaatggattctgccgagcaaaggggaagcgctcgtacgcagtcggtcgctctcggagagcggacttggccggccctctataaagctcagcgggagtcggaaaaggaggagctttggggtcatgccgtcgagttggtgcgttgggggtggctcacggtcaagccagccggcgctatccgctcccgctctggctatgccgactcgccgcgtgtcacggttgccaatgaggtcgaggtgagaaggacggttggtcgcgcacagcgcgtcaagtccgcagctgagcgctggcgcgaggctgtccgcgacgggctccagggggccgccgaggtcaaggccgctgtctccgagttctgcatcgatatgccggaccgcactatgaccgaggttgtcgaacgtttgaacgagctccctgctcttgccggcaagcccatgctgctccgcgaagtctcctctcaactgttctggggcatgtcgaaggtcttggacaagcggcagagcctcgtcgccgcagtcttaggtgtcgatgaatgcccgtttccggagtctccgattcagctgcaagtgttcctaccgccggcgggctgccggggcgtgctgttcatcgagaacctcatgagcttcgagcgcgccattcgctcgacgagttcggcgttcgacgggctggcgctggtctacgcgtcaggcttcaagggaagtgctcagcggctgcgcacgccggatggctgctctctcttctacgcggcgcgtggcggcatcagtcaaaaccttcgagatggcttcgaagcctggctctttggcaaggatgtcattcccgccttcttctggggggacctggattggtccggcatgcgcatcctgtctgctatgcgcgcaagtttcctcggcctcacggcgtgggaaccaggctactcccagatgttggccgctctcatagaaggcaaggggcattcaccggaagccgccgacaagcaagggcagaaggcgctgggcacctccggttgtacctacgcggacgcccacctgatacccgcgctgcagtcctacggaaggtttgttgaccaggagcaaatcaacccgtag

SEQ ID NO: 43837 - DNA, 1500 bp, Ralstonia solanacearum CMR15
atggatcaggattggaaacagcgcacgtatcaatacgtccagtcgcgacgtcaacacccggcctggcaattgcttgccgcacgtagtgcaccgttggtgctgagctgtttgcagagcctgttcgagaagagccacgatggtattgaggtggaagcggccgagcaggggctgaccgcattactggagcaacacgccaattccgacgagtttggtgtcgaccctgacgccgattgcgcggcgctggcgcgcaaggaactgcgcggatggatccggcgtgcgctgttgattgagcgcgaaggccggctctacgccacggatgcgctggaggaggccttgcgctttgtggcggccttggacggccgactcatgacgtctacggcgtcgcggctatccatcgtgcaacgggaaatcgaaaatctcgaatccagtctgaatccggatcctcgcagccgctcgcggtatctggagcgcaagatccaggagctcgagcgagaactggacgacgttaaggccggcaaggttcacgtggtgaccgagtcggaggcggtcgagggcatccgcgagatttacagcttggccaccagtttgcgcgcggattttcgccgggtggaagattcctatcgggaggcagatcaggctctgcgacagtcgatcgtaagcgagcgcaatcaccgaggcgcgatcgtcgacaaattgttaaacagccatgacgagctcctagagacccccgagggtaaggtttttcgggggtttcagcagcaactcggccgctcggctgaactcgatgcgatgaagcatcgtttgcgcgagatccttcgccatcccgctgcacgctccgcactcaattccgctcagcagcatgaactgcgctggctcattattcgtctgatcgacgagtcggctgccgtcattcgtgcacgggccagaagcgagcgtgacgtcaagggattcctccggacgggcttggcggcagaacaccaccgggtcggtgagttgatcggagacatcctgcagcaggcgctggcgctcgattggcagagcgcctcggtgcgtggcatgggcagcagcttgccacctgtcgccatttccgtcgccggactgccgttggtcgaaaggattcgattcaaggtcatcgaggatgaggcgcaagagctgctggaactgcgggcgcaaagcatggatccgcagactatggacgatgagttctgggaagcattcgatggcctggatcggcaggcgttgtacgagcgaacattggcgttactcgagcaaagcggtgagtcgatgggcatcgccgaactggcgcggcagctgccgccgacgcacgaccttgagaccattgcactctggctgagcatggcacgcgaagctgaggcgccagtgagtgaccggcgagaaagcgtcgatgtggtcggccgggacggcgtgccgttacgatttagtgtccccgaggtggaactcagcttcgagcagatgcgcggattggatatggagctataa

SEQ ID NO: 43838 - DNA, 780 bp, Ralstonia solanacearum CMR15
gtggtgagcattttcgatacgctgacggctccaaaggaggatggccaggcggccaccgatgtcacgtctgatgtcgcgttgcagccggagctgactcacagggccgaagccgaatcaggcgtgggcgcggtgccggaggtacccgggacattcataccccgcgacgtaaaggatgcgttccaggaactgctcaaattcggttttctcgaggccgccagaaagcctaatctctaccacatcgccgccacgggtaccgcgcagatcaatgccattctggagcccctcgatttagcgctcaggattgacgacgtacggggcctagcttttctggtagttgccgccttgttcgttaccgatgcgcaggacgacgagtggtcccatccgctgattcgccgccagcgcctgacgctcgagcaatctttattggtggcgctgttgcggcagcactatctcgttcacgagcaggagcaggggattggtgcgcaggaggcgccggtgctggtcgaggaggtcgcgtcccaattgcaactgtatctggggaacctgggtagcgatactcgtgaactccagcgtgcgcgcaacttgcttgagaagctcaagccgcacggcctcgtctcggaggtcgatcaacacgaccagttcctgattcgcccgatcatcgtccatcttgccaatccggagaacctgcaggggttgctccaggcgctcaagcaggcatcggctgacgcgcgcagcgatggcgatgtcgggtcgacaccgggagaaggggcagccgcatga

SEQ ID NO: 43839 - DNA, 3327 bp, Ralstonia solanacearum CMR15
atgacgtctaccgaagccttccctgtcaccatcgaggaactaccgccaccagcgccgtacattctgaccgatctcgacgtcttcaactggggaccctttagcgggcgccatcacgcgcaaatcgatattgagggcacggcaatcattggccagacgggaagcggaaagaccacgctggtcgatgcgttgatgacgctgatcgccgcacagccccggtacaacctcgcctcgacgggcgggcacgaaagcgaccgtgacctcatctcctatgtgcgcggggtttccggagcggggcgcgagggcgactcggaccatatcgctcgaccgggaaagaccgtgtcagccattgcggcgacctttggcaatgatagtacgcgtgtgaccattgccggactattcgcgctggagggctcgggttcttcggccgccgagctcgaccggatctggatggtcttgcgtggtaacgaactcgacctcgacgacgtgctggagctgcaccacgctggcggcaagcgtgcactcaggcaacaggagcgagaggccggattcctgaaggttttcgatagtaagaaggcatatatcggcgagctgcgccgcctctttgaggtcggtgagaatgcctttacgttgcttaatcgcgctgctggcctgaagcagctcaatagcatcgatgacctgtttcgcgacttggtgctcgatgaccggtcggccttccaacgggctgtggaggtggcatccgagttcgatacactcgccgagattcgccaggaactggagattgcgcgcaagcaacgcgacacgttgttgccgatcgaaaagggctgggcgcaacggtccgcgaacatcgagcagcgtgatcttcatgttcatctcatctcgatcctgccgatcgcgggtgccctgcgagcacaccaactatgggcccagttggcaagcgacctaatgcgaaagctcgaactgtgtgaccaactggtcgagcagcgcacccagcgtcgggatgcgctggatgccgaagcgttgcgtctacgtgatctctatttccagtacggcggtagcagcattgaactgctggagtccaagctgacgaccgaacgtcagcgcctggcaacgattcagcggtatgccagtgagtaccggctagtggccaagcgacttcagtttgatgacacgttggccgagacagtgtttcaggcgaatcagacccaagcgcaggcgttgaaggatgcggttgatgcaacgatcgaggcgctggaggtagatgtctataccctaggctccgttcagtctacgactggacaaagccttcgcgagcagcagacggctttagccgacgccaaggtacgcccgggatcaaacatcccgtcgccgtatcaacagtttcgtcgggaactggccgacgaactgaaactcaacgaagatgcgctgccgtttgttgcggaattggtcgaggtgcagaaggcacagtcccaatggcgtggcgcgatcgagcgtgccatcggcgggaaccggttgcgcatcatggtcccgcccacgcagatgaagtctgcgctggcctgggtgaacgggcgcgacaatcacctgcacgttcgtctggtcgaagtgatggcaccggagcggccagccgaattcttgaccgatggcttcacccagaagctcaatcttaagaaccatccctatcgggacgcccttcgcggcttgctcgcgcaaatcgatcggcactgtgtggcctcccccgaggcgctgcgaaacacgccgcatggcatgaccgctcaggggctcatgtcgagcaagagcggcttcttcgagaagcaggaccagacccccttgaaccgagggtggctgacgggctttgacaaccgcgacatcctggaggcgcttgagcatcaggtgcgtgacacagagcgccagttgaaggaacaggtggcgcgttttgaagcggcaaaggcgcgtgtgagcgaggcacgatctcgcaacctcatgctcgagcgtgtgctggctatccagttcgtggacatcgatgagcccggggcgcagcgtgaggtggacgattccacaaagcacctttcagcgctgatggatccgcagtcggacacggcccgggcgaagcaagcttgggaaggcgtccgagcgcagctcaccaagatcaatgaagaccgtgagaagagcctcaagctacagcacacgctacaaaacgaggtgaccgcagcccagcgcgatcgtgagcgcgcctttgcattgactggagaggggctcgatgcagggcagatggcgctggtccaggtgcatttcgatttctcagacgtgcaaacggtggatgcgctgaatgcccgacagacgcagacccagcgtgagttgcgcgcgcatgttgacgagctggaaaagaaaatcgccgagtgcgaaaggcagcttgttcgcaacatggggacggcacatggcgttgacacgggcgccctggcggaagtggggtctgaggtagacgacgtgccgcactacttggaacgtctgcgagtactgagagaagaggcgcttccggagaagttggaccggttcctgagctacttgaatcagtcctcggacgagggggtgacgcagctgctgcgcagcatcgacaacgaggtcgagaccatcattgagcggatcgaggatctcaatgccacgatgcgtcaggttgacttccagccgctgcggtatctgcgccttgaaccacgcagggtggtgcatgaaagcctgcgaaccttagagcaagcgcaacgcggcctgcgtaccgcgatgcttcaggacgatcagggcgagagtcagttcaaggcgcttgccggagtcgttagattgcttcgggaagcgggcgagcggcgctcgaccgtaggcgcgaaggcgcttcttgatccgcgctatcggttgcagtttgcggtgtcggtgatcgaccgcgcttcagggaaggtcctggagacgcgtacaggatcccaagggggcagtggtggtgaaaaagaaatcattgcgagctacatcctgactgcatcgttgagctatgccttgtgtccggacggcaaggatcgccccctatttggcaccatcgtgctggacgaggccttctcgaagagctcgcaagctgtcgcagggcgcattatttctgccctgcgagagtttggtctccatccgctctttgtgacgccgaacaaggaaatgcgcctgctgcgatcccacacgcgctcagccattctgatccaccgcaagggcccgcacgccaccatgacctcactgagctgggaagagctcgatgccattgcccgttctcgacagatgagctcccgcgatgagatccccggatga

SEQ ID NO: 43840 - DNA, 1146 bp, Ralstonia solanacearum CMR15
atgagatccccggatgagatcgctgctcgccttgccaaggcgtggcagtcggccgatgtacgcgaagctagactgctggacccggagagttggccattgcagtacgcgatcggccggcccagccctaaagcgattgcagaacagaccgaacacgttaaggcgcatctggaccggtggcgagcggtcgagatcgggcgcgtgcactgggagactgtgatctatcgcgccggcgggggaccggttgaagttccgcatcgttgggagctcaagaatccctccgaatgggtgcgcgcgacccggagtgccacgattgctgcggagtatcgacggctcggagagctcgtccaacagatgagttcgcagtttcatgcgctggtggtgcgtcgccgtcaacttgtgatggagcgccccgtaccggaggtcatcaaagcggcggaagtcgccttggcgttatttcccggttgcgcacaaggccgtccactgcgggcgctgagcgtttgcaacatcgacaccaaattctttgaacgcaatcgggcgctgatctgccagatgctcgatgttcgatttgaggggcaggttggtgaactgggactcgagcattttctcggcgccgccgaagaggatgaacgctggttgctggtggcaccgcttgcctcgggaatgctgccatttcgccagcagcgcgtgagggcgagtgaactgtctcagcttgccgcggtggcgggtcatgttgtcattgtcgagaacgagcgatctcttcatcagctacccgagttgccctgtacggtggcgattctgggcgccggattgagcctgggttgggtgcgtgatgcgtggctgaccagtaagcgggtggcgtattggggtgatatggatacctggggcctgagcatgcttgcgagggtgcgcctggcgattccatccgtgaccgcattgctcatgaaccaggattgttttgatcaatacgcacaggaactggcggtgtgcgagcccgctccggtcgatggggggatacccgacgggctcactccggacgagggggccttctttgcgtatctcctgacgcaggagagggggcggctggaacaagagttcttgccgaaggaacttgtcagcaaagtcatgtgcgtgtggcagagagcgtga

SEQ ID NO: 43841 - DNA, 1467 bp, Acinetobacter junii MTCC 11364; identical to SEQ ID NO: 43638

SEQ ID NO: 43842 - DNA, 786 bp, Acinetobacter junii MTCC 11364; identical to SEQ ID NO: 43639

SEQ ID NO: 43843 - DNA, 3378 bp, Acinetobacter junii MTCC 11364; identical to SEQ ID NO: 43640

SEQ ID NO: 43844 - DNA, 1215 bp, Acinetobacter junii MTCC 11364; identical to SEQ ID NO: 43641

SEQ ID NO: 43845 - DNA, 1383 bp, Clostridium bolteae CAG:59
atgatactgatgaatgaaataccagaccggttctggagcctgttccgctctgtcaaccggtctacttacatagaggcacttcttaaaatcaacgaggagtatgagtacagcaattactttctcagcagggaagtctgcatccagcttttaagtgaatatttctcccggaaaaaatatgttatatggcaggatgagaccgaggatgactgggatgaactggaaccgcctgccaccagggttcttaactggctcctgaggaccggctggctccgcaaggtggatgattacgccagcatgacggtcaacatcgtcattccggattacgccgcggtgatgattgaggcattttcacgtttattaggcgatgatgaggatgagacccaggtttatatccagaatgtctatgccattctattttctctgaaaaacgacccccgctccagcgtcagcctgctaaatacggctctcataaacacgaaaaaactgaacaagtcccttcaggacatgctgcacaatatggataagttctttggcagcctgctggaacaaaaaaattacgggaccctgttaaaggagcacctggaaggatacgtgacggaaatcgtcaataaaaaatatcatatattaaagacctcggacaatttttatctctacaagacagatataaaatcctggatagccgccatgcgggaggacagttcctggataaataaaatgtgcgcaaaaagcgcggcttcaaccagaggccagaaaaaggcccccctgacagaatacgatattgtggagaagctggaccagctggaacgcgggttcgacgatatagaacaccgcatctccaacatggacaaggagcactcccgttacgtcaaggcaactgtcacacgcctcaactacctgttaaaccaggaggacaacatgaaggggcttgtaatcaggcttttaaaccatctgtcggaatacggctgtccggaagaggacctgacagctgtaagcgccaggatgaacctgtcccagatgaccatattgtcagaaaaatccctgtacaaacggcgtaagaccaaggcagactttacagaacagttaaaggatgaggaagaatccgaggagctgtccatggaggaggttctgaacctgaacaaggtcgggaaccgttacagccagaaggagattgaagcctttatagaaggcagcatgacagacggaaaaatggtggtggacgaacaaaccatacattcggaccaggactttgaaaaactgatactggcctatgactattccaccaggagaaagagtccttataaggtggaagaggaagattcggaaatggtgcactgcaaaggttatacctatccgcggctggtatttgtcaggaggacaagatag

SEQ ID NO: 43846 - DNA, 849 bp, Clostridium bolteae CAG:59; identical to SEQ ID NO: 43705

SEQ ID NO: 43847 - DNA, 3393 bp, Clostridium bolteae CAG:59
atggaacagaaaatagcaaacgatcgttttctcgccctttccaggatatgcttgaataactggcactatataaccaaaaggaccctgtcctttaatgatgaaattaatttttttaccggacattcgggcagcggcaaatccacagttatagacgccatgcagattgtgctctatgccaatacggacggcaggggtttcttcaacaaggcggctgccgatgactctgaccgcagcctgattgaatacttaagaggtatggtaaatatcggtgaaaacaacgagttttcctatctgcgcaaccagaatttttcctccaccattgtgttggagctgaaacgaagcgatacgggccagtgccagtgtgtgggaattgtctttgatgtggagacagccaccaatgagatatcccgccgtttcttctggcacaaaggacccatgtgggaaaatggctacaggggcgggaaacggaccatgtccatcgtggaaatagaagactatcttcaggcgaattacagccgggaggattatttcctgacctcccacaacgagcgattccgccgcatactctatgattcctacctggggggcctggactctgaaaaattcccccttctcttcaagcgggccatcccattcagaatgaatatcaaactggaggattttgtaaaagaatacatctgcatggagcaggatatccatatcgaggacatgcaggaaagtgttatgcagtacggccgcatgagaaagaaaatagaggacacatgtgcggaaatccaatccttaaaacagattgaggacagattcataacctatgctgacaaggaacagcagatcgaaaaatgttcctactttgtgcagaaattggagattctgcagcttcagtcagaggtccgtaccctggctgacagggcaaagctggcaggagaggacctgaaaaagcaggttcaggccagaagctcagtggacgaacagattggcgagctgacccggcagagcgacgagctgctgcgccgtattgcctccacaggatatgaggagctgaaaagccagcttaagagcctgaatgaactgttggaacagctgggaaaaagcgaagccaggtggcagcagaccgcaaccgccttaaagcgctgggaggaagaggacatcacctccaaccagaccctttgggatatggaggaatttgaaaaccgcaccattgacctggagacattggaacgactgaaaaaaaacatggtatccatgcgtacagatacggaaaaacagcatcaggaaactgccgccgctgtcagagagctcaaaaagcaggaaaagcagacaggagatgaactggaaaaacttcgttccggcagcaaagcctatcccaaatacctggaaaatgccaggagctacatccagcgccgccttctggagaaaactggtaagagcgtggatgtgcatgtgctggccgatctgctggacgtaaagagggatgagtggcgcaacgcggtggagggctatctgggaaacaataaattaaatctggtggtagctcctaaatacgccagatccgccctggaaatctacggggaactggataaaaaggaatacttcaatgtggctgtgctggatacggaaaaggcatcccagaaccagccccaggtacaaaaaggcgccctctcagaggaagtgactgtgagggagtcctacttaaaaccctatatagacctgctgcttggaaaggttatcaagtgcaataccatagaagaattaagggaatgccgtatcggcatcaccagcggctgcatgctctaccacaccttccgcctgcagcatatcaacccggataactacactaaatttgcctatatcggcaaggacagcgtcaggaggcgtatccgtcttctggagcaggaactggcgagcctggaggaaaagaaaaagcctttggatgaaacggccagggagtcccttagaatcctggccctcccctggctctcagccgaacccgcggaatacatggactggctgaatgacataaacagctacaaagccaaggagcgtgaaaagaaaaaactgatacagaagctggagcttttaaaggagcaaaatgtagaccagttagaacgggaccgccaggcggttatcacgctctgcgacggtaaaaagagggagagggacagcctgaatgtgctgatccgtgacaaagagcgggagatagaagggtgccggaataagtccattgacagccagtcccttctcacgtcaaaggaacgggagttaaagcagaatcctgactatgacaacgaactgtcagcctatctgtcctccagggatacggtgcgctatgacagggaaaaggaaaccttcattgccaggtgcagcaaactgtatgaggccagggaagcagcttttcaggcgcttctggccgtcaggaccagctatatcaggacttaccccaaccgcaattttacggtaaacgccagagataatgctgcctatgaccgccttttaagcgacctgaaatgcgataatctggaagaatacaagcagaaagccacgcagcaggccaaatccgcggtagaacatttccgggatgactttatgtataaaatccgcagcgcaatccgggaggccctgatacgcaaggatgagctgaaccgcatcatcagccgcctggatttcggaaaggacaaataccagtttgttatcggccgcaacaaaggacctgacgggcgtttctacgatatgtttatggatgattcactggacatcaatccggccgacctcaattattcctatgaaaaccagatggacctgtttaccatagaacatgaaaaacagtatggggatttgatgaatgaactcatcagtattttcattcccccggaaaacgccaccccggagcagatggacgaggccaggcggaatatggataagtattcagattaccgcacctacctgtcctttgacatgcagcagcttatacagaatgaagacgaggtaatcaaaatacggctgagcaaaatgattaagaagaattcaggcggagaaggacagaacccgctgtatgtggctcttctggccagctttgcccaggcctaccgcatcaatctgccctccaaggtggagcgcaatccaaccatacgtctggtggtgctggacgaagcattttccaagatggacggggagaaggtggccagctgtattgaactcatccgcggccttgggttccaggccatcatcagcgccaccaatgacaaaatccagaattacgtggaaaacgtggacaagacctttgtctttgcaaatcccaacaaaaagtccatatccatccaggaatttgaacgggagcgctttgttgagctgatgcaggatatagaagatggggatgaatttgcggaaacgttataa

SEQ ID NO: 43848 - DNA, 1419 bp, Ruminococcus sp. CAG:60
atgtttcatgtaattccgggaaattttttcgtcccattgtcctcacccaaccgaattgtatactgggaatgtatcagccggcttttttccatcatggaacatcagctttcctttggagtggaaagagaggtgctggcagatgaactggaattttattttaaccaggaaaacgcagcccagctggtggaagaggaattccaggcatatgacagccggagccgcgccaacggaatcctgcgccgtctggaatattacggctggatcgaagtggagacagacaaaagctatgtgcagagagtgaatttcaaagagtatgcagtgaaggtgattaagacgctgctggacattgcagacggcaaacagatcgagtaccagggctatatttataccatatacagccttgtgactggaaccatggacaagccgggaatcgtgctgatgcagatctgggaaaacacggatcttctgatcaccggcctgaagaatctgaattccaacatcaagcattacattgacgaactgaccaaacacagcacagtggcagagattatggatgccctgtttaatgattatattaccaacattgtagataaggcctaccaccgccttcttacttctgacaacgtgtccaaattccggccggagatcatctcccgactggaagagaaaagccatgaggaggcgtttctggaagaggcggcaagggaaatcgcatctattcgggaagtttctgtggaagagggaagggagctgatttaccgctatctacatgagattatagaagctttccgcggcatggacgatattctccaggagatcaatcagaaaaacacccagtaccagagagctgccatagggcgcgccaagtttcttcttgcaggaaacgaggatgtgcgaggtcagctaaaagagatccttatgggaatcaacgaagagatcaaccgggagaacatggacctaggcggcatctaccgcattgatttcctggatgacctggtgcagatctaccagtgctccatcctggaacaaagttccctgtatcttgcagtggaaggcaagcgggaatttactcctgcaagcctggatgagaaagagccggacgaagaactgcgccgggaaaaaatgcggaggatggctgagaagatccagaaggtggtcagcgtggaaaaaatccaggactatgtggatcagcagcttggaaatgtggatgagatgaacgccagccagctgccccttgccaatgaagatgattttattaagctgatctacaccaggctttacggacagcggaaaaatatgggatatacaattgagacaatggaagaacgggaagtgaacggctaccgtttcaaagattttcggatacggaggagagagaatggaatatctggagggaatgcttcaaaaagagaaggataa

SEQ ID NO: 43849 - DNA, 618 bp, Ruminococcus sp. CAG:60
atggaatatctggagggaatgcttcaaaaagagaaggataatttcggcagagtctgcaaccgtcttctgggaacctgctttttgtgcaaaggaaaccagaataccagaccggactattatttcgtgctgaaataccgcaaggaatttaaggaatacttaggggtactgggctaccgcctggagatcaacgaggaatatggcgtggttcagctgaccagcccccggggaatcaaccgcatgaatctgaagctttacgattccattgtgcttttgattcttcggatcctttacgatgaaaagaaacggcagctttcggcagtggaagaggtgatcgtcacccttggggacattcaggaccgcttcctcagcttaaatatccgtgacaaaataatcgacaaaacaaccatgcgaaatgcgttgagcctgttccgcagataccagatcgtagaacttctggaccgggacctgggggatgaggaatcaagggttctgatctatgattccatcctgatggctgtacgcgtggaagacattaaagctgcatttgagaagctggaaacatacagaaagggaaagaacataagcaatgaagaaactgacgaggatgaagctgattaa

SEQ ID NO: 43850 - DNA, 3243 bp, Ruminococcus sp. CAG:60
atgaagctgattaactggcacaggttcaacaactgtaccatagattttggagattccactcttttgtccggtgaaaacggcgctggaaaatccactcttctggatgcaatccagttcgtgatcatctgttccaccggatatttcaacaaggccgcccacgaaaacggcaagcgaaagctgaccggctatatccgctgcaaaaccggaaaagagaatcagccttatgagcgcaccggggagatcagtgcccatgttgcgctggaattttatgaggaaagcaaggataagtatttcattatcggcgcggtggtagactctgcttctgaggggcaggaaacgaccgtccgttatctgatggagaacaccagactttccgatgacctgtttctttacggaaatcaggtgaaatccattgcagaattccgaggctccaacattgacatccgccagtggtgcaagaccaatgtggaagcgcgaaaaatggtcacagcaaggcttggaagaatcgaagacaagttcttccgtctgattccgaaagctcttgcatttaagcctattgatgatatcaaggactttgtttactcctatgtgctggatgaaaaagaagtcaatattgaggttctccgggaaaatgtgcgcacttatcaggatatggaacgcaccctggataacgtgaaaaaacggatgaaaaagctggaaaagattcaggaactgaatcagcgcctgcaggagcggatggaacgggatcagatgtatgaatatttcctgaaacgcagtgacctggaccttgtggaaggcaaaataagaagcatagatgcagccaaaaagaacgaggaagtccgtctggaacaggccaaagtccagctggaaatgctgcagaaggaacgtgccgagaagcaggaaattgccaccaatctgcgggtagaactgcgtcataatcaggaatttgtagctcttgaggaagagaaaaaagagctggaaagacagctggaaaagcgtagaaatgcactgcaggatgaatcggaactgaagaaaagtgttgcaaaggcggcgaaagacagcgagcggcttctcatgggcgttaaggatgcaggcggtgattcccagaaactgatatcctgcgtccgggaatatcgcacacagctgcagaaactggattctgaggccaatgtagcagcactgaaaagcctgacagacgatgtgatccactgcaagcagaagtattttgcaggacttcagggagagcttgccaagctgcagatccagctgaaacagaatcacgcagaacgggaaaagctgaacaaaaagatcagcaaactgaagcgtaaaaagcttacctatccatcaggagtagaactccttacagaaactatacaggaggaatttgccagcctgggacgggaaatccagccgggagttctctgcgaaatgctggaaatccaggatgaagaatggcgaaatgcagtagaaggatatctgaatacacagcgtttttatgtgcttgtggagccggagaatttcgacattgcacttggaatctatgaccgccttcgcaaggagaaaaaggtctacggcgtgggtctgatcaataccagagatttggaaaattatgatactgctcctgcaggaactttggcttccgttgtaacttcccagaatcaatatgcccgccagtacagcaacatgatcctgggaaaagtgcagatgtgcgagcgttacgaggacctgaaaaaataccccatttccattacaaaaggctgtatgcgctaccagaaccgggtggcaagcgccatcaagccagaggtattccgggtgccgtttatcggcaaaaatgcctttaccgttcagctggttcaggcagaggaggagtaccagaagatgaatgagcttctggaaaatcaggagaagcaactggccgggatgaatgaaattctgggacttctttccacagacagtgatgtggatatcaagtaccgcctggatgtgcttcatactcttggaaccgtggacagggccattgccaaatgccaggaaaacatccagaagctgaagaaaaattctacattgattgagaagcagattcagctggaagaactggaaaaagtgctgcgtgggctggatgcttctgtgaattctgatacggagaaaatcggcggaatacgaactagaattcaggatctgattaccagaaaacaggcctttctggagaacgagatgacagagaaggggaaggtcctttccctgggagaggcagctggggatgtcttaaattcctggaatcaggagtacgaggaagcgcttggaaaacgtccggtggagcagttccagaatgagtatcttggcaaacgaagaaacaacagtgacaggtgggaaaaaatcaaagaccagatgataaatgccatggtggaatacaagacagagcatgatttcggtgcaactgccagcctggaaggtttttctgagtttcaagctgtatatgacagactgaaaaattccgagcttttggattatgaggagaaagtacagtctgcccgacatgctgcggaaacagagttccaggagcagtttcttgcaaagcttcaggagaatatgaagctggcgcaaggggaatttaaggagctgaacaaggctttaaaggggattgacttcagcagtgagcgctatgaattccagtttatgccaagcaagaaataccgcagctattatgaaatgatcatggacgatttcaatgtaattcaaggggaatccctgttttccggaatgttccatgaggctcataaggatgtgattgaggagctgtttgaacggctttctgtaggcggtgaaaacagcacgcagactctggaggagtttacggattaccgtacttatatggattatgatattaagatcatacatgatgacggcacctattcttactattccaaggtatgcgaggaaaagagcggcggtgagacacagaccccgttctatgtgaccgtggcagcttctttcgtacagctttacagcaacaatattggaggagaggcggctggactggtgctgtttgatgaggcgttcaacaacatggatgatgagagaattggcggcgtactggaattccttcgccgcctgccattgcagctgatcatcgcggctccgccggataagattcagtatatcggtccggctatggatgagatcatgctggttatgacagatcagaagcggagttatgtggaggaataccataacgcggtgtaa

SEQ ID NO: 43851 - DNA, 1344 bp, Clostridium sp. CAG:7
atgcatgagataccggaacgtttctggagcctgttccgttccgtcaaccgcgccacctacatagaagcacttttaaagatcaatgaggaatatgaatacagcaattactttctcagccgagaaatgtgcatccagcttttaagcagttactttgcccagaagcggtatgtgatctggcaggatgaactggaggaagaggaggaccagttagaacctccggcaacccgtgtgttaaactggctgttaaaaacagggtggctgcggaaagtagatgattattctactatgactgtgaacattgtcattccggactacgcggctgtgatgatcgaggcctttcaccgtctttccaatgaacaggaagatgagacccagatctatatccagaacgtatatgccatcctgttttccctgaaaaatgacagccgcgccgggatcggccttttggatacagcgatcatcaatacgcggaaattaaacaaatcccttcaggatctgctccacaatatggataccttttttggaagccttctggagcagaaggattattcccagcttttaaaagaccatttagagggatatgtacaggaagtagtgaataaaaagtaccacatcttaaagacttctgacaatttttatctttataagacggatattaagacctggatccgctccatgcgggaagatgaacagtggcagaaacgtatggcagagggaatggccccttctatgatccttcaaaaactggatcagttagaacggggctttgatgacattgagcacaggatcaccaacattgacagggaacattcccgttatgtaaaagctacggtaacaagactgggctatttattaaatcaggaagacgatatgaaagggctggtgatccagctcttaaaccgtctgtccgccaataacggagatgaggatatgatccaggcggtaggcagccgtatgaacctttcccagacaggcctgttgtcagaagaagctctttataagcagcgccgcccaagaacggactttgcaaaacagctgccggatgaaaaggaactgccggaactttcggaagaagagatcttaaattacaacaaagtaaagaaccgttacagcaggcgggagattgaagatttcatccaggatcatatggaaaatggcaccatgaaagtagatcagaataccgtatcttcggacgaagattttgaaaaactgatccttgcctatgactattccacacggaccaaaagccgttataaagcagtggaaagtgatgcaaagcccataaagaatggtccttatacttatcctgaattccaatttgtaaggaggaatacccgtgaatga

SEQ ID NO: 43852 - DNA, 711 bp, Clostridium sp. CAG:7
gtgaatgatacatctgatctgatcccggagaatgaaactaactggcagaatgactggcagatcccctattttgacaacctgacagaagaacagcaaaaggagatcaccgactccatccgtctgcttttgcgccagacttttgtattggagcgcaaatacgataaaaagacagagcggcttcagtatacggcagcttaccgcaccatcagtaaacattttccttttatccgccattatctggctgttgccgggatcgagctgacagaaaacagccatttagggattatttatgtacagggagaggatctgcttggagaaaaacttccaaaactggccactctttatcttctggcattaaagctgatctatgacgaacagatggaaaatgtttccaccagtgtaaatgtttatacgactctgggagaaatccaggagaagttaggaggttaccgtctgtttaaacgtcagcctgcacctacggatatccggcgcaccatagcattgttaagaaaatatcagatcatagagcctttggaactgttagatgatctgaacagctccagtccttttatgatttatccctgtattaatgtagtccttttaggggatgatgtacgggcccttttacaggattttgataatggggatacagagcgtatagagcctgatctggcagaggaaggaggaaacgaagatggaacagaagaataa

SEQ ID NO: 43853 - DNA, 3372 bp, Clostridium sp. CAG:7
atggaacagaagaataattctccttttctagcatttaccaggatctgtttaaacaactggcattatatttccagaaagatcctttccctgaataaggagatcaatttctttaccggtcactcaggaagcggaaagtctacggttattgacgcattgcagctggtcctttatgccaatacagacggccgcggcttctttaacaaggctgctgctgatgactcggaccgtagcctgatcgaatatctgcgcggtatggtaaatatcggggaaaataatgaattttcctatctgcgcaaccagaatttcagttctaccattgtactggaaatgcagcagacctgcacagaagaatatcagtgtatcggtgttgtctttgatgtaaacacagcttccaatgaagtttccagacgtttcttctggcacaaaggtcctttatgggaaaatgaatacaggacaccttcaaggcctatgtccatcagcgaagtagaacagtatttaagggaacattacagcaaggaagattatttttccacttcccataatgagagatttcgcaggatcctttatgacagctatttaggaggtcttgacagcgaaaagttcccattgctttttaagcgggccattcctttccgtatgaacatccgcctggaagattttgtaaaggaatatatctgtacggaacagaacatccatattgaggacatgcaggaaagtgttatgcagtatggacggatgcagcgaaagatcgatgatacctgccaggagatcgataagctgactgcgatccatgatgcatatggggaatatcgcctgatccatgacaagttagagaaatatcactggtttgtaaagaaactggatcttctggataccaggtccaagatccgtatgctccacgaaaagacagaacacggcaaagaagatctgctccagttagatgaggccaaaaagtcagtggaacagcagatcggggagctgactgcaaatagtgatgaacttcttaaaaggatcgcttctaccggatatgaggaattaaagcagcagcttacctctttaaatgccctttgcgagcagttaggccacagtgaagccaagtggcagaagacgctgctggctttaaagaagtgggaagaggaagagatcgtttctaatcagacattatgggatctggaagaatttgaaacacggacgattaccagaccggttttggaacgtttaaaagcttccctggcatccatggctgctgatacggaaaagctgcgtcaggagacagtaagccagatcaatgaattaaagaagtctgagaagctgaaaaaattggaactggaacagttaaaggcaggtaataaagcctatccttcttatctggaagaggcaaggtcttatctgcaaagacgtcttttagaggaaacaggcaaaggcgtagatgtgtatatcctggcagaccttctggaagtgaaaaacgaccagtggcgcaatgccattgaaggttatcttgggggaaataagttaaacctggtggttgctcccaaatacgcgaaaacagccctttctatttacagggaactggataagaagaaattctggaatattgctgtgctggatacggagaaagcagccgaatatgacaatgatgccttgaacggatccctggcagaggaagtaagtgtacgggaggcttatttaaagccttatatgaacctgcttcttggcaaggtgatcaaatgtaataccattgaggaattacaggccaatgccattggtattaccccggactgtcttttatatcatactttccgtctccagtatatcaatccggaaaattatacccgtcttgcctatattggaaaagacagtatgcgcaagagggtccgtcttcttgaaaaggaactggaggaggtttcagaaaagagaaatccgttagaggaaacgttaaaggactgcaagcggatccttgctttggaaaccttaaaagaggatacagaggagtatttccagtggttaaaggatatagacacccgcaaagaacagttaaaggaaaagcaaaaactgtctgaacggctggaaaagcttcgccagaaggatgtaaagcagttagaagccgaccgtcaggctgttttagaactgagtgacggaaagaaacgggagagagatctgttacaggagcagatcctaagcaagaaaaatgaactggaacgtttctcccagactatcttaaagctggaaacagaggctgcaggtcaggggaaggaagtacctgtaaacgaggaacatgaacgggaactgaatgcttatctggcagataaggatcatccacgctttgaccaggaaaaagaggcttatgcgtccaagtgccagatcttagagcagaaggcagttcaggcgaaggaacatgtaatgggccttagaagtgaatacatccgccggtatccgggaaggaatgttcctgtaagcagcaatgacaatgcagcgtatgacaagatcttaaaccgtctttcctgtgatgacctggaagtttacagggaacaggctggaaagcaggcaaaagcggctgtggagcattttaaggacgattttatgtacaagatccgcagtgctatcaaggacgctcttttgcgcaaggatgagttaaaccggatcatcagccgtctggactttggaaaagataaataccagtttgtgatcggccggtgcaaaggggctgacggacggttttatgatatgttcatggatgagtcattggagatcaatcccgccagtttaaagaccggggtggaaaaccagatggaccttttttccatggaacatgaaaaccggtatggggatctgatcaacgaactgatcagcattttcatcccgccggaaaatgctacagcagcccagttagaagaagcacggaaaaatatggaaaaatatgcagactaccgcacctatctttcttttgacatgcagcagctgatcaaaaatgaggatgaggtgatccggatcggcttaagccgtatgatccgcaaaaattccggcggtgagggacagaacccgttatatgtggcgctccttgcaagttttgcacaggcctatcatattaacctgtcatcagctgtaaggcagaggccgtccatccgcctggttattttagacgaggcattttccaagatggatgcggaaaaggttgcaagctgtattgagctgatccgtggactgggctttcaggccattatcagcgctaccaatgacaagattcagaattatgtggagaatgtagataaaacctttgtatttgcaaatccaagtaaaaaatctatttccatccaggcgtttgaaaaggaccgcatgaaagatctggcgtcagaaatggatgaagaggcataa

SEQ ID NO: 43854 - DNA, 1401 bp, Clostridium nexile CAG:348
atgagtataaaaaacagaattccaaaggagttttataagttatttaacagtaagtacgtcgagtattttcagcggattttgattgcactttatgagcagtcggcaagttcgtattcattgcttggacttacagaagaggaatgtcaggacacgatcgagatggagatttctacatttacgatggattttagtcaaagtgacctggaggaagagggagaacttctcacgcgggcgaatatggagtcagtgatgcttcgaaagctggaagagtggggatggctccgaaaggattatgacgaatctctgaactgctatgtcgtttcatttccggattacagccagatgttcacagagttatttggcaggctatataatgaagaaagcagtatggagcgtgagagtctgttgacgatatacagccatctgtttacataccactcttctaaggaaaaggacaatgagattttgaaaagtgcgctgcagtcttcgaaggcattgcttcagatgctctcgaatatgcaagaaggaattcgtggattttttgaggaaatgacgaagcagaagacatttcttggaattcaggaagtgcttgtgcaggaaatgaataatacagatagccagaagtatgcgattttgacgacaacggacagtttttaccggtataaagaagaggtgaaagagcttattgatcagaatctgatgggaaatgaggctagaaagcaggagttgcttcagaggagaaaagagctggaggcagattcttttgcgtggagaagaaatgaacgtggagtacagagctgcgatgaggcaatggagatcttgtttcagatcaatcgggagtttgacgggattgagcgcagatacaatcgtctcattgatcaaaagagagtatttgcaaaacgtgcggcggctcgtatccgatatattttggcggagggtgatgtggaggaagaccacacaaaagcgctgatcaggctattaaatatgagcgaccgaaaagatgagatattgaaaaaacttggtgaacgtatgggcatgacagagcgttttgcagtgctgaaagagaggagctttgcaaaaccgagagatgcgaaaaagaaagcgtttgaaccacaggaacttgtaaagacgggacaaagtgaggaacagttggatgagtttgttgtaaaaccattatatacaaaggcacagattcgggaatttcgcagacaaaatgaggtggatggagcatttcaggtgacaaaagataccgttcacacagtggaagatttagagaagcttttatttgtatggcaggaagccactgagattgcgcaagagacagaagagattgtgatcggagaggaatttacgacagaggaaggcttgcagtattcaggatttacaatcaggaggaagtaa

SEQ ID NO: 43855 - DNA, 639 bp, Clostridium nexile CAG:348
atggaacaatatttagaaagtttatctgtgacggaagcagaaaaattaaagaagactatcttgagtctgtttcgccagacgtgtattttgcaggaaaaatatgacccggttacactggtcccaagtgacaacgagcagtttgcaatatgcagaacacatcgcaactttattgaaaactatctttcggttctcggatgtgaattgctgtatgattcacaggagcgcattttcaggcttgtcggagaaggcgtggaggcggaggtcctgtcgaaggagacaacgattattgttctgctcataaagatgatctatcgagataagatcatgggaaagggacttgctgcgacggtgacaaatttagaagaaatcagagagtacgggaagaatacgaatcttttgaatcagaaacttccggacggtgaatggaagagcgctttggcgattatgaaaaaacatcagattgtggagtatccgggggcgcttcgtgatcttgaggacgatacaccgatttatatttacagcacgattaatttatattgcagttcggcgttgattaacgagctgattgaggcgtacagagaggagaatgcagaggatgaagcaggcaaagaagatatttacacgaattttgatgaataa

SEQ ID NO: 43856 - DNA, 3405 bp, Clostridium nexile CAG:348
atgaagcaggcaaagaagatatttacacgaattttgatgaataactggggcggaattgaccatcaggtactttgtctgaatgaatatgtgaatctgttcagcggaaaaagcggttccggaaaatcatccgtgatggatgccatgcaggtcgtgctatatggaagtgtcggaaatgatttcctcaacagagcggcagatgacagcgccaataaaagaagtgtgttaagctatttgcgcggagagcaaaaagatggtacggcgaaccgtgagaatcaggatttttatgcccatattgtcttggagatacaggatacagggcggaaaagttacacatgtatcggagcagttttcgaagtcggaaaaaatgatatggatctgaaacggttccgttttttcagccatgccggaaaatttccggaagatgagtatgtcactgtgtctggaattccatattcaattgcacagattcagaaactggtccatgaaagagaacagtcagaagatgcaaaaagcagaggaaatatcaaccggatctatccgtccagagaagcgtatctgaacatcgtaaatgatattattttcgggtacgtagatgcaggtcggtttaaaacaatgcaaaaaagtgcgatcgcgcttcgcatgacaaagggaacgagtcagtttatcaaagactatatgtttccgaagagcaaggaagatacgatcactgcaatcagtgaacagcttgcggcttaccgggagataaaagggcgggtcgaagatttggaaaaacagattacccttttagaggaggtgcaggcacatgacagaaagcttacgcttgcaaaggcagagcaggtaaagacagaaacgcttttacggattttggagattgaaaacaggcgggtacaacttttgtcaaagacggaggagttctcaaatacatgtgagaaaatcgcgcaattcgaagaacagataaaagatctcgagatgacattgaatggaaaacgagaagaactgattggggtgcgcacggaacttcgtgccagtgattttgagaaaaagaaagaagaccttacaaaattgcaggagacaatccgtctgtgcggaaatgaggcaagagagtggggagaattgctcaagcgactgaatcgttggaatgagacagacggagtctgcgagtatgtcagtaacccactttgcaatcttctggaagaaatcgaagagagaaatatcacagaagagaatgtgaacggactgaaaaagcgactgaaggaaacgtatgagagtatcaaatctgaggtggaagagctgaaggcagagcgacgacgtgtggaagcggactatcaggaacagaaagagatgcttgaggatttgcaaaatgacaaaaagcattattccaaagaagtgaaagtggtcaggagaaaactgcaggaagaattgtcagcaagatacggcagaaccatatcggttgaagtattcgcagatttgttcgacattacagacgaggcatggcgaaatgcaatcgagggaagacttggaagaatcaaatacggtcttattgtggagccaagatatgctttagatgcagcgaatattttccggggaatgaagaagcgagaatacgagacggtggatttgatcaacacggcagcaatacagcgggatgagccgcaggcgatggatgagacgctgtatgatgcagtaaagacggacattccatatgtagatttttgcctgaaacgttatcttggacatatcaaaaaatgtgagaccgtggaagaactgcacgaggtcaaagacggtgttactcaggattgctattcatacagcaattatatgttccgacatttgcgggagaaagattacagatatcagacaatcggcagaaaggtttccaaaaagcagatgcaggaactggaggaaggcgtatacaggctgaatgtggaactgattcgtcttggcggggaaatctcagagcttgagcaagcggaggattttgagcgtctgcagacatatgattacgagaccatgctgcagaaatctaatgcggcaagccggctgaaagagtactacgaagaagaggcgcgtctgtcggaagaaatccgagaacttcaggcaggtacaagagttgcagagcttcagaaacaggaacagagtctgaatgagtccattcgaaagctggaacaagaaaaaaatggggcacagaaagaggtgacaaattattcggcgacaaaaggaaagcaggaacaggatataagggaacgcacagaatacctggagaagctcgaggaaggatttgtcccgaatacagaactgaaagagaccgttcttgcggtcattgacaaaggaaatgaataccgttttgagagagagcagaaaaagacattcgaacagctgcgctcacaggaagaggaggaattcaagcaaagaggagatgcgagagagcaattcaataaagcatttccatcgtatgatttcagtccgttcgagaaagataataccgcctatgatgagttgttggaaaactgtaagcagaattttgagccgaagtataaggcggagtttgacaaacagtatcagcttatctatcagatgctgcgggaaaatgtgattgcgacaatcaacagtgagattaaagaagcgaaacgacaccgccgagagatcaatgcgatgctttctgaaatccgtttttccgacagtatttatcagattgacattttgccgactgacgatgaaaaccgacagttttatgagatgctgacggcggaggaactgaacatgaaagtgatcgaccgggacatggaaggacagttaagttttggtgaggatgccttttatcaaaaatacgaggcgcagattaagcgcctgactgacaaattcatgccgccgaaggaggacgagccttctgcgagagaaagacataaacgagatatggaaaaatatgcggattaccgcacgtatttgaaatttagcatgtatgagcagaccgaggatcaggacggaaatataaaaaagaattacgtggatgatatggcggggcgtgattccggaggagaaggacagaatccgaaatatgtggcgctgctggcgggatttgctatgctctatcatcaacagacaaaccgtgacaccaaaatacgtcttgtacttttggatgaagcattttccaagatggataaggagcgaagcgaagtatgccttgcatatgcgcgcaaactgggactccagcttgtcgtgtgtgtgccggatgagagactgcagtcacttgtacagaacgtggactgcgtgtacgcattccgaagagtcaacaatcggatttcgatgattcatattgacaaaggggcatatttgcggatgatagagggagaagcagatgaagaagaaaacagtgacgctgtcacagtggctcatcgaacagaatga

SEQ ID NO: 43857 - DNA, 1200 bp, Clostridium nexile CAG:348
atgaagaagaaaacagtgacgctgtcacagtggctcatcgaacagaatgataccgaagcatatcgtgcaggaaaacttgcagggaagaaacatccgaaagtagaccaaaaactgattgatgcggtcggtgggatgcaaaaccttatccgtcaggcaagagtgcttgaacaggatgaggcacttggcaaaagcgggatgattcaatttcggtggcgtaatttaggaagtgacatctcacagattgattatgaggttgccgcaattccatcgctttgcagaaagcttggtgtgaaagatgttcgggaacaccaagcggagttgataacacgggtacaaatgtggaaaaataaagtcagcgagtgcgagtgggtggaaaactattatgatacgcttttgagcaggcttacacttggcaaaaaagtctcagaagcagaagatgagaaattgtttttgtgtctgaacgcagtggcagcacaacaggaatttatttgggagcgtgtgttcagcgtcagagtgttccacaattcgaagacatttcagaacgaatataagaacagtattgttacgattttgaaaaattattctccgtactacgaggaggaaatagacgcagagatgcttctggcagcacataatatccactcctacgcgcagacactggagtggaaaggctgtcttgaatataggttggataatagtaatgttgtggatacagacgaaaacacctatggaacagtgattaattctcagacgatggaacacgccagcgtgacagacctttccggatgcaaacggattatgacaattgaaaataaggcaaattacgagagtatgattttctcagaagaaacgttgtacatttattgtcatgggtatttcacgccaaaagaagtgagatttttaaagaaaatcccggagcttgctgacgcagactgcgagtttttacactggggagatatggattacggcggaatcagtatttttcagttcatcaaaaagaatgtattcccagagttgaagccttataaaatggatcgaaccgcttttgagggagctttgaaagacggtgcaggcattgtgctggaacatgagacaaggaagaaactggaagcgaaagatgcgggtctgttggaagagttgaaacaggtgattttagagacaggaaagacgatagagcaggagctggtgagagggaaatag

SEQ ID NO: 43858 - DNA, 1632 bp, Bifidobacterium longum CAG:69
gtggccgatgtgatgcgggagctggaacggctgcgaccggtgtatgagacgggcgtcctgcggttgctgttgcgccagaacgcgatgctgtacgtgtcgctgctgcgttccacgttcgacccgctcaccggcgagctgccgcgcgagaccgtggaggagcggttcgcgcaaagtctgagcagtctggccgacgccggcgagtatgcgccgcgcgaggaccagaccttcgccgaggccgcccatcagatcctcgccgacctgacccgtgaaggcgaaggcgactacgcctggctcgccaactcgcatgatgcggcctcacaccgattcctctaccgtttgacggcccgcgcccaccgcgccatcgaggcgctgagcaggctcgaagacgaatcacgcgccctgtccggcgcgcaggccaacagcatcatcatggaaatcgagcacgcgcgcatgcagctgaccgccgaccccggcgagcgcatcaaactcctcaaccgtgaaatcaaggaacgcaagcacgagatcaaacgcatccaacagggcaagcagcatgccacgctgagcgaagcccaggtggaggacgtgatcgccgtgatccacaacacgctgcgcggcgtgcccatcgacctgcgcgaactcgtgctcgacgagcgggacaacggcgacgccttgcgtcggcgcatgcaggccggcgacatcagcgtggacgagaacctgacccgctaccacgatgaataccgccgctcgttccgcgaatcagacagcggccgccgcttcgaggacgccttccaggtgatcatcaccgacgagggccgccagcaaatcgacgaagccctgcgcgccatcgccaaaaccccgtatctggccggcgaatccggcgtgctgctcggccagatccgcgacgaactggcccgcatctacgacggcatcgaagccgtgcgccgccagatgcgcgtctccgacgaggcgatcagccggctcgtgcgccagcaaaccgacactcgctaccgcacgatgctcacccgcttgaaccgactgtacgcgcgcctcaacgcggatgcgaaaacccatatgggagacgcctcgcgcccgtacgacacggccacctcggacgcgctgttcgcgccattgccgatgcgcccggccaaatccatgacccgcgccaccgcacccggcctgagcgacctcgccgccgaagccccgcagtcgactccggtggccgatctgcgggacatggtcaacagcggcggcccccgactcctgcgcatggtcagcctcatccggcgcaacccggtgaccgttgacaggtccgatgacaggcccggcgcaaccctcgtggacatcgccgccagcttcaaccggctgcccgaaagcgaacgccgcgaaagcgagatcgtcggcttcctgggcgggctgggagccgtaagcggcaacgccatcgccgacgagccgtccactgacggcgtcggcgtcggggtcgacagcgacatcgccaccgagccggccccggcgcagcgcggcgataccgcgacctggcattgcgtatcgatcgacggcgagccccggaactggatcactagaccggtgctggccgacatggacgagctgagcatcattgtggaggaaggatga

SEQ ID NO: 43859 - DNA, 675 bp, Bifidobacterium longum CAG:69
atgaccgtggccgaggaacacgaggaacacgaggaggatatggacaacgccaacccgtacgccctgttcgaaggcgacaccggcgacatgccggccgaggcacgcatggccgccatcgccctcaaacgcgaccgctatatcagcgggcccacctacgacaccgtgctcgacaaccgcgacgccgtcgtacgctccctgaacaacgacctgctcgacttggtgatcaacgaacgctaccgcatcatgtacgccacgcccgtggccggcgacgacgtgaccctgcgctcgctcaaaacccgtgtcagcctcaaacgcgaggaggccgcgctgctcgccttcctgcgcatccgcgtcctcgaatacgagaacgtgcacgccgaccccgccgactggctcgtcagctttgaggagatccgcgccgcgctcgccaccggcgccggctatctggccgcccgcaacgacgaggaaggcgtggcaaagcagatcggcgccatcgtctccgcgatgatcacctacgggtatttggtgcgcctggacgacgaagccatgtaccagatcacgccgctcgtgcccgtggtgctcgaccgcgaactggccgacacctggctcgacgtcgcggaacacggcgacggcgacacggaagatgacgatgacgacgagaagggagccgaatga

SEQ ID NO: 43860 - DNA, 3546 bp, Bifidobacterium longum CAG:69
atgcaggcgacagacgtgcagatgatcgcggaccggtggatgctggaatcccgccgactcatcaactggggctcctatgagggctaccacgaattccgcccctccacggaccacaagctgccggtgaccctgctcgccggcgccagcgaatccggcaaatccacgctggtcgacgcgcagatctccctgctgtacccaaccggcacgccgttcaacaaggcctcgaactccggccgctccgaacgcagcgactacacctacctgcgcggcatggtcggcgtgggcagcaccgaaaccggcgacgagccgctctacctgcgcggccgcgacgagaacggcgcaccgcaacccgtgtggggcgccatcgtggacacctatcgcaaccagaccaccggccaggtgctctcctgcgccaaattcctctacctgatgcccggcgacggccgcggcgacgtgcgccgacagtacgtggtctggggcaagcccgtggaccccaggcgcatggaccaataccgtgacgccccgttcacgccggcccagctcaaagccacctaccccgactgcctcacattccccagcgccgaagcgttccacacacacatctggagcgcaatgggcctgagcgaggccgcctgccgactgctgcacaagatccagtccgccgacgcgccctcccggctcgacgacatcttcaaacaaggcgtgctcggcgtgcccgaagccctggacctggcccgcaccacggtcgaggactacgaacgttacgacgagaacttccacgccatggacgagaagacccgccgcatggacacgctgcgcggcatccaacaggcctacggcgaatacgccgccgcacgcggcaaggcccgcgccttcgaaccggtcaagccggccgtcgacggcacggtgccggccgtgctgcgcgactgggcattggcccgcatgcgcggcgaagtcgccgtccaactgcccgccgatcgcgccgaacaacagaacagcgaggcggaagccaagctgctgcgccgccgaaccgaagacctgcgcacccgtctcgacatgatccgaggccagatgcagggtctggacggcggcaacctgacccgactcgaactcgaactcgaccaggcccgccgcaccctcgaagacgtgcaagccaaccgaacacgaatcaaacaaacgttcgcatccatcggcgagacgctgcccggcgacgaacaagcctggaacgaacgccgcatcaacgccgtgaacttcaaacgcgaatacaacaaacgagacggcgaatgcgaggaagccctcaccgccgccatcaacgcgcgggccggcgcacgcggcgacctcgaacgactgcaacgcgacttcgaccggcaacgctcccagcgcacccgcatctcccagcagatggacgaaacccgcgccatgctctgccgcgccaccggactcacccccgccgaactgccgtacgtggccgaactcatggacgtgaacgaacacgaggaagactggcgtctcgccatgaacgtcgcctacgcgcccatcgcccagaccatcctcgtcgacaagcgccacgaacagggcttcgccgccaaagtcagcaccatcgacccgcgcaccatgtcccgacgcacctggcagttcgtggacaccgcacgccactacgacgacaccggcgcgcacgcgaacatactcaccggagaacaggacggcgactggctgtccggcaaactgcgctaccgcgacgactcgcccttcgccgactggctgcgctcgcagacccaggacgaacgattcgacgccctatgcgtcaccgccatcgacgacaccgaccgcaccaaccgtcaggtgcaggccgacggtcagatcaaatccggcgcacgcggccagcacggcaccaaagaccgcgcccaggtcatcggattcgtcaacgaaacctacctcaacgcgctcgcagcgcaggtcgacgccgcccgcaacgcgctcagccaagccgacaccgactacacggccgccaaaacacagtccgataacctccaccgcgaactcgaactggccaaccagctcgcctacacgtcctgggagcgcatcgacatcgccggcgcgcaacggaccatcacggacacgcaggacgccatcgcatccatcaaaaacgatcccaagctcgccgaactcgccaaacagcgcgacgaactgaacgccgaactcgaccgtgtggaacgccagcgcatcgaatccgaccaggccgcggcccgcgccggcagcgccgtcgaagcggcgctcatctggctgcgcgaccatgccgacaccggcacgacggacgccgccggtgccaccgccgacaatgacgatgacgccgcgtccggcccgctgccggacgaagtcacggcggcgctcgccgaatcctacgacaaccgattcgccggactggcggacgccgccatgcgcgcgcacatgatcatcggcgcgggcgcggcaggaacgcaggcaccgggggagagcttccccgaacgcaccatcgccggcatcggcaaggacatggcctcccgcatcaacctgctgaacggccaggccgatgccgcacgcaccggcgtcgaatcgaagatgagcacctacatcgcgctctacgcggccgacgatgattcgctgaccgccagcgtggaggactaccggtactatctcgacgaactcgccagcctcacccagctggccgcggttgccgccaccgacgccgaataccggcgctgcctcgaacagctgctcaggagcttcctgaccatcaaacgcgccatcgacacggatgccagcgacatccacgaccagcttgaccgcatcaacgccatgctcaaaggccagcagttcggtcccaagcacggcagcctgtccctgcacgcggacgtgcgccgtcccgagcgcaccttctgggcgcagctcatccgcgtcatcggcaccctgaacgattggaaatccgccgacgtcaacgattccgacgcctcgcgcaaggctttcgcggcctgcgcgccgatggtcgggctgctgcgcgccgaactcgcgcaggtcaaggacgcgaacggcgtgaaaagctacggcgcccgcaacctcgacccgcgctgccgctcgtccttctacgccatcgtgcatcatgccgacggcccggatgaacgcatcacctccaccggcggccgttcgggcggcgccttgcaggagctcacctcattcgtatacggcgcggcgctcatctacctgctcggcggcggcctgaccagcgagccctcgtacaccacgctgttcctcgacgaggcgctcatcaaggccgacggccgttacacgcagcgcgccctcacggtgctgccgcgcctcggattccaggtcatcgtctccgccccggaaagcaagaccggcgaaatcctcgaggtctccaccaaggcctacgtgacctacaaggaccccgacaccggcctcacctccctgcgcgaggccgtgctgtaccagaatgacatggacgatgaatcatcgtcggatatattgaaggatgacggggttgccgaatga

SEQ ID NO: 43861 - DNA, 1185 bp, Bifidobacterium longum CAG:69
atggccggcatgaaagacatcgctgcgatcaccacatgcgtgaagaaacatatgcgttcacatatgtacgacatcgaaccggcatggccatttcccgtgccggtgggattgccggaccaagcatttttggaaaccaatgcgattgcggtgcatgacaacaacaatgagatacggcaatgggcaagcaagaatggttgcgaaatcataaccaagcatcgcaccataggcacctctgtcgagctgatctccaaagtcgtcgttcctgacgaatcaatagccatgcgtgtggttggtcgtacgctggcggcggaatgtcgcgaagcgcgccgccgcatagcatgtctggttgctgcttgtgacgttgctccggaaacaatcgaatcggccgctcgcatgacaggccatgaacagcctgacgacttcgatctgcttgtcagcgcagttcgatatttcaggcatcatgacgtgaccggtatgacgccgcgacagattccactgacaggattcagcggcaaatggctgaatgagtcaaaaaccaatcgtcgtaaggccatttgccgactgctcggtgtcgaaacgttgggtctgtcaaaacggccgaccgaactgcggttccgttatctcgatccggtccgcgacgatgctgagctcgaacgcatcatatggtgtccgtgggaaggcgaagcgttatccggcattaaatatgctgtcatcgttgagaacaaagacacgtatcagactatgccgccgattgcgcagggcatctgcatatggggttctggtcgcgctgtaagcgatgctgtacctgcggttcctgcactgcgtgacatgcgtatcgtgtattggggtgatatggatgcggatggactggaaatactttcgacattacgtgaatcaggtatcgaatgcgactccatcctgatggattgcgatgcatacgatcggtaccacagatttggtaccgatcgtactgaacgcagcgcgaagattgctatgcgggagcctaagccgacgcccggccttcaatcggcggagcgacgtctttatgaacgactgtgtgctgacaaaacaatcgcttatcggcgtatcgaacaggaacgcattcccatgcgtgatgcagttgacgaattacgcaagcttggcatccccgtggagtccattgaaaatcaggatttgccgatttag

SEQ ID NO: 43862 - DNA, 1497 bp, Firmicutes bacterium CAG:24
atgattctgaaaaagaagataccgagagatttttataagctgttccgcacccagaacatggagtattacatgcagcttctgaccgctttgtacgaggcggatcaggaagcctatgccctgacgcagctgacggattcggaatgcaggagcattctggcggaaacgatcgccagggtcaacctggtctggtgggaggatgaaacagaaaaaacggaggacgaaggctttcccgggctttcgccctccgctgttttggacaggtttgtgaagtggggctggctttcgaaggattttgatgaaaaattaaactgctatatcattggctttccggagtacagcaggctgtatgtggagctgtttgaccgtcttgaaaaagaggatgacagcatggagcgggaaagtattctgtctgtatacagcgccctttacacctatgattcggatccggaaaaaaataacagcattttaaaaagtgccctgcgcacatccaaaagcctcggacagatgctgtccaatatgcaggacagcatgcggctgtggttcgatgaactttccaaacgaaaggactttatcggaattcaggaggttctggtcaacgagatcaacaatcgcgagagcgtaaaatatgcaattttaacaacgacagacagtttttaccgctataaggaggcggtcaaggagctgattgcgaagatcctggaggaaaatgaaaaccgccgcgaggggctgacggcgcagaagcggatgctaatggctgcacagggcagcgacagcaacgcacccgaaccgtcagaaagcgcaggaggcagctatgcagcgtccatgcaggcgaaagcactggcatccggcgcgtctgcgcccgcccttttaaggctggagcgcggcattcaattctgcgaagaggcggcgcagctggttcttttggtggagcgcgaatttgacttaatcgagaaaaagtacaaccgcctgatcgaattgaaaaccgtctttgcgcggcgggcgctggcgagaatccactaccttttgcaggagggtgcaggcgtagaggacagcacactggagctgatcggtctgctcaaccacggcgacaaaaaagaagcgcttttggaagagctgcgggacagcatgtatgtgacggcaccgttttccattgtcggggacgcgagcctttacaaccgtcggccaaggctggaaaatcagttcgtaccgctggctctgcaggaagaggcgtcctcggaaatcgcggatttcgtcccgaagccgctctataccggcagacagctggaggagttcagacggcggcatacgaagaacggagtttttcaggttttggaggatacggtgcagtcggcagaggatctggaaaagcttctgtttatctggcaggaggcgacccagagcagacaggaggaagaccggattttgctgcaggaggaaatccatcagaaggacggcttttcctacaccggttttagtatagacgaaacggagaattga

SEQ ID NO: 43863 - DNA, 663 bp, Firmicutes bacterium CAG:24
atgttttcatatctggaggaacgcacccccgccgaggtggaggcgattcgaagaaccatacaggagctgcttcgtcagacctgtattttacaggtaaaatacgatccggtgacgctgacggcccgggataatggtcgctatcaggtctgtttaaagcaccgggaatttattgcggactatctttctgtgatgggctgtgagctggtgcacgacccgcaggatcatctgttccggatcacaggcgacggtgcagcgatggaaaaaatgagcctgacgacgacaaagcttttgcttttgttaaaactgatttaccgggataaaatcatgggcgagggactgcatgcaacggtgacgaccctggcggaaatccgggaatacggcagaaataccggactgcttccgggaaaattgaacgcacaggactggcaggctgcgctaaatctgatgaaaacccaccagatgatcgagctgccgggggcgattttgaacgtggaggatcagacgccgatctatatttacggtacggtgaatattttctgctcgtccttggcgatcaacgagctggtacagcgttatcgggatgacgaagaagaaaaaacgacggaaggagaagaggaacgtgaaacaggcgaagaagatctttacccggatgtgtctgaataa

SEQ ID NO: 43864 - DNA, 3354 bp, Firmicutes bacterium CAG:24
gtgaaacaggcgaagaagatctttacccggatgtgtctgaataactggggcggaatcaaccataaaattctggaatttcacgaatatgtgaacctgttttccggcaagagcggctcgggaaaatccacggtcatggatgcgatccaggtgattttatacggcagcttttctccgagttttttaaataaagcggcggacgacgccaaaaacagacgaagcgtgttgagctatctgcgcggtgaacaaaaggacggcacggcaaaccgcgaaggacaggatttctgctcccagatcgtcctggagctgcaggataccgggacaaagcagtatgtctgcatgggaattgcttttgaagtacggaaaaacgattctgaaatacgaaagttcgtttatttcagccatctcggaaaaatgccggagggtgggtatctgacggcagagggctatccttattcgaaccaggagatccgggcactgacagagacgcggatgaaggagacggcaaagggcggcagggcagagttaaaccgcatttatccgtcccgggaggcgtatatcagcacgctgtatgaccagatcctcggctacattgacgggaatcgttttatgaccatggaaaaaagtgcgatcgcgctgaaaatgtccaacgggacgggacagtttatccgggattacatgttcccaaaaagcgagggagacaccattgaaacgatcagcgaacagctgggcgcttaccgggacatcaaagaaaagatcgacgtgctggaaaacaagatcggaatgcttaaaaaagtgcgggaagccggacaaaagttgacgatgacgcgtgcggatatcgtaaagcagcaggcggtgatccgctgcatcgacattgaggatttgaagaaccggatcgacgcccttttacaggatcaggatcggacacaggagcgtttgcgggagcttcggcagcaggaagaagagctggaagccctgtctgtccagctggaaaacgagctgatccttgtcagtgcggacttaaagagcagcgaccttggcaaccgccaggagcgtctggaagagctggaaaaaagaagccggatgctggcggataacgcggcacagtggcgcaaaatcctgcagggactgcggcgatgggagagcgacgagatcgttgcggactatatcagcaaccggctgctgaatttgattggcgcattttgcaccggaccggtgacacaggcgcagtgtctggagctgcgcagccgtctggaagaggaacgccagaatatcgaggaagagtacgaaacctatcacgagcaggagcggcagctgtccaaagacctgaaggaaaagcaaaagcttctggacgatatgaaaaacaaccgcaaatcctatccggaggtactgacaaaggcacgggctgccctggagcagaagctttctgcactgtatggaagaacaatcaaggtgtggatttttgcagacctgttcgatgttgaggatgaggaatggaaaaatgcggtagaaggacgtctgggacgtctgaagctgagcctgattacagagccgaaggttgcggcggatgcagcaaaagccttccgggagatggggcagtttgaggaaatcgatctgattcattctgaggcggtcacaaagagcaatccgagggcggaggagggttcgttatacgaggccgtgcgggcggtcgagccctttgcagacagctgcttaaaacgctatctgggacggattatgaaatgccgcacggtggaggagctgcgaagcgccaaagacggtgtgacgccggactgttattcctacagtaattttattttccggcatctgaaaaaacgggattataccgtcggtgcgtgcatcggaagcaaggtttcccgcgcacggcagcaggactatgaagtagatgcgcagcgtctgaaaaaagagctggaagaagcaaagcgcatggcggacggtctgaaggcggtccgggagatggagagcctgaaagaagagccggcgtatctggaaagcctttctcgggcagcgcaggagctggaagccgtgcttttggaaacacaggagacgaaagcaaccatcgaaggtctgcggatgggtgcatataaggagctggaagaaaaagaagcagagcttcgcaaaaaacgcagcgagctgaaaaagagaatatccggtatgcagaacgaaattgcacagcagaccggtaatcaggagcgcatccgaacggagctgcagtccaaaaacgcagcattaaaggaggcgtctgtcggttatacacagcagccggagatcaccgcaatggtgcaggaggcgctgtccaaacgatcctccggcgcggtcagggcccagaaaaatgcggagatagaagtactttgtgaaaaggagcaggagcagacagaagagctgtcccgggcaagaaacgcctatatcctgcagtatccctccagcggattttccggctcggagaaatccaatgagggttatgagcagctgctttcccagtatgagacagattttgagccccagtatcggacagagtttgaaaaacaatgcgatttcatttaccgcagcctgcgggagaatgtgatcgcaacgattcacggcgacattaaggcggcaaagcggcacgctgcggagatcaaccgcctgttgaaaaagacgaacttctctgatagtatttaccagattaaaatcgagcctgcctacaatgaaaacggtcagttttacgacatgctcatggcaccggagttagacagcaagaacctggacaatgacggcttcgaggggcagctgtcccttggagaggacagcttttatcagaaatacgaagcaaagatcaggctgctgacagacaagttcatgccggtaaaggacgacgatgagcgggtgctggagcagcaccgtcgggaaatggagcagtatgcggattaccgcaattatctgtccttttccatgtatgagcaggttacggatgcagacggaaacgtgatccgtgaaaatttcgtggacgacatggcaggccgtgattccggcggtgagggacagaatccgaaatacgttgcactgcttgccggttttgcgatgctttacatgcagcagaccaaccgcgacagtcgaattaagctggtgcttctggacgaggccttttccaaaatggaccaggagagaagtgcggtctgcttaaaatatgcccggcagatggatcttcagctgattgtctgcgtgcctgacgaacgcttacagtccctgatccgcaacgtggactgtgtgtatggcttccgccgccacaaaaaccagatctcaatgatgcatatcgataagggaaattatctggagctgttggaaggcgtagaatag

SEQ ID NO: 43865 - DNA, 1416 bp, Roseburia inulinivorans CAG:15
atgattttaaagaagaaaattccaaatgatttttataaattattccgcacaaaaaacagggaagcatatatgcagtttgtcacagccatttacgaggaaaacaatgaagtatatgcttctctcggtcttacgcaggaagagtgtgcgcttattattgagaatacgatcgagaaatcaaagatcgtgtggcaggaagaggacgatatggaggaaggagaaacgccggatgcattatttccaagcgattctccttccggcatgttaaaccacctgatccggtggggatggctgaaaagtgattttgatgagaaactgaatacctgtgtgatctctttcccggaatacagccagttgtatgtcgagttgtttaaaaagctgcagagtgatgatgacagccgggaaagagagagcatgctttccatttacagtgcgttgtttacttatcattctgacaatgaaaaaaacaatgatattttaaaaagcgcactgcgcacatccaaaagtctggggcagctgctgtccaacatgcaggatggaatgcgttcttattttgatgagctgtcctcccagaaacattttatcgggattcagcaggtgcttgtggaggagatcaacaacagtgacagcaaaaaatatgcaatcctcacgacgacggacagtttttaccggtacaaggaggcagtgaaagaacttatcagtgaaattttaaacgaaaatgatgagaaaaaagcggtgcttctgaaagaaaaaaattctctcgaaacaggcacactattacagaagagaaatgagtacagattgcagtattgtgaggatacgagcaggatcgtgatgcagttggagcgggaatttgacatgatcgagcgcaaatacaataaactcattgagcagaaaaccgtttttgcaaagcgtgcgctggcccgcatccattacattttgcaggagggcgtcagtgaggaagataacatcatcaaactgatcaatctgttagaccgcagtgagaaaaaagatgagattttggtggaaatgagagagcgtatccgtttttcttcgcagtttaaaaatattacagataacagttttgctggaagaagagaccgcggggacggagcgtttacaccggtgatgctggacgaagaaatagacgcaaaggaacagcacatgacggattttgtaccaaagccgttgtatacaagaaatgagttacagagtttccgaaggaaaaataccgtggatggaatctttgttgcaacagaagagaccgtaaaatctgtggaagatctggaaaaacttctttttctctggcaggaagagacggaggagcgtattgcggaagatacagtgtcggtggatggcgagatacggagtaaggacggactaacttattcgagacttgtgatcgggcagaatcaataa

SEQ ID NO: 43866 - DNA, 624 bp, Roseburia inulinivorans CAG:15
atgttacaatatatggaaactgtctcacagggcgaggcagagaatatcagaaaaatgatacaggatttattccggcagacctgcattttacaggtgaaatgtgatccggtcactctggtgcagcgcgacaatccgaggtatcaggtgtgtctgcgccacagagagtttatcgcggactatctgtctgtgttagactgcgagcttgtgcatgatccgcaggaacacattttccggatcacgggggatggcgttatgacagaacatatgagtcttatgacaacgaagctggtcattctgttaaaaatgatttaccgtgacaaaatcatgggggaaggtctgcatgcaaccaccacaaatctggcagagatccgtgagtatggaaaaaatacaaaccttatcacaagacgtctcacggggcaggagtggaacgatgcacttgttctgatgaaaacgcatcagatgatcgaactgccgggagccgttgccaatctggaagattttaccccgatttatatttacagtaccgtaaacgtgttctgctctgcgatggatatcaacgagctggtgcgcacctatcaggacgaggtggaagaacttctgacagaagaggaagaagagaattag

SEQ ID NO: 43867 - DNA, 2301 bp, Roseburia inulinivorans CAG:15
atgctgaccgataacagcagacagtggcgcaaaatcgttcagggattgaagcagtgggaagaggatgaggtcatcaccgattatatcagcaatccggttttaaatctcattgaagcgatcgagaacggaaatgtgacagaggaaaactgtcaggaactgcatttgaaaatagagtctgcaaagcaggatatcgaaaatgaatttgaagattacagtgagcagaagcgcgaggcaggaaaagaactgaaagaaaagcagaagcttgtggatgatatgaaaaacaaccggaaatcctacagtgagaatctccgttctgcgagaagttccctggagcggaaattaagcgaccgctacggaagaacgataaaagtccagattctggcggatctttttgatgtggcagacgaagagtggaaaaatgcaatcgagggtcgtatgggaagactgaagttttccatgatcacagagccaaagtttgcgcatgatgcggcggcggtctttcgtgagatgaaacagtttgaggaagtggatctcattaattccaaagcaatcgcagacagcgagccgcgtgccatggagaactctctttatgaggcggttgagacgaaggaagcctatgtggatgtgtgcctgaaacgttacctcggtcatattataaagtgtcattccgtggaagagctagagcaggtgaaagacggcgtgacgccggattgctattcgtacagtaattttattttccggcatctgcggaaaaaggattataccacaaatgcctgcatcggagagaaagtgtcaaaggcacgtctggcagagtacgaggctgacgtggagaggcttgagaaacagtatcaggaactgcattacatgaccgagcgcttaaaggcggcaagggattttgaaagtctgaaagaggaaaaagaatattatgtaaacctttccggcgcagaaaaagagcttggaaaggtcaataagaaaaaatccacacttgaggagacaatccgtactttgcaggaagggcagtataaggaattacagcagaaagagcagagcctaaaacagcagatgcgtgagcttcaggcttcaatcggcgaaaatcagggacagatgagtgagaaaatacgccgtcacgaaaatctttccggtgcaaatgaacaaagacgtctgcagttagaagagatgctgcagggatacatgccaaatgaggagatcggtcaggaggtacaggagcagttgaagaagcgctccggccagcccttaaagaaccagaaaaacgcagaacttgcggctctttcggcaggagagcaggagaaggcggagacactgcgcactgccagaaaccgttacatttttgcttatccgtccagccagtttaacggttcagaaaagtccaatgaagcctatgagaagcttctggaagaatatcagacagactacgagccggcatacgaagcagaatttgaaaaacagtgtgattttatctacaagagtctgcgtgagaatgtgatcgcaacgattcatggagatatcaaggcggcaaaacgccacgcttacgagatcaaccggttactgcgtgagacaaacttttccgacagcacctatcagatcaagatcgagccggcaaagaatgagaatggccagttctttgagatgttaatggcagaggaattagacagcaaaaatctggataatgccggttttgatggtcagttgagttttggggaggataccttttaccagaaatacgagcagaagatcaaactcctcaccgacaaattcatgccgccgagggacgaggatgagcaggtgcgtgcgaagaagcgtcaggagatggagcaatacgcagattaccgcaattatctctccttcagcatgtttgaacaggtgacagacgagcaggggaatgtcattcgtgaaaattttgtcgatgatatggcaggaagagattccggtggagaggggcagaacccgaaatatgtggcacttctggcaggttttgcaatgctgtacatgcagcagagcaaccgggattccaaaatcaagctggtacttttggacgaggcattttccaagatggatcaggagcggagtgccgtctgtctgaaatatgcaagaaaaatggatcttcagctcattgtctgcgtgccggatgaacgtctgcagtcgctgatccgcaatgtggactgcgtctacggattcaggcgtcatcagaaccagatctccatgatgcatattgataagggagattacttaaaactgatggaaggtgagcatggacagggagagccggaaactgtaaaatag

SEQ ID NO: 43868 - DNA, 1416 bp, Roseburia inulinivorans CAG:15
atggatgacgcacaggcacagcagaccaatccattatttggtattattccaaaagaatttttcacaccgctggcatcgccgaacagacttgtatattgggactgtctgtgccggttgtttcaggcaatgagtgcacagctttcctttgggatcgagagagaaatccttgtggatgaattacagttttattttgaacagaatcaggcagcggaatttgaggaagatgacataaatggcatggattccagaaaaaaggcaaatgagatgctgcgcttattggagaagtacggctggcttgaggttgagacggataagagttatgtgcagagagtcaatttttatgattatgccgtaaaagtcatgaaaacgcttcttgagatttcagacggacgaaaggtggaatatcagggctatatttataccatttacagtcttgtgcggaccaatacggatcatccggctgttgtgttacagcagatccgggataatacggatatgctgatcacaggactaaagaacctcaattcgaatatcaagcattacattgatgaactgacaaagcataagaccgtagcggagattatgaatgcgctgtttaatgattatattacgaatattgtagataaagcttaccacagattactgacttcagacaatgtgtcaaagttccggccggagatcatagagcggctggaagcaaatgggcatagctcacgttatatcgcaaagacgtcggaagagttggcagcgatccgggagataccggtcgggcaggcagaagaactggtatatcagacattgcatgagattgtggaagcgttccggaatatggatgatattctggcagagatcaaccggaaaaacacacaataccagagggcggcggtaaaccgtgcaaagtttctgctggcagggacggaagatgtcagaggacagatgaaagaaatccttttatacattggagagcagatggaacagagccagctggatctgaatgggatttatgagatcgagtatctggacaatctggtgaggctgtttggaagcagttttattgatgagaaatcgttttacagcccgatcgagggaaagaaagagtttcatccgcaggaactgacagaagtaatgccggatgtggaactccggcaggaaaagcttcggaagatgaccgaaaagatgcagcgcattttaagcccggaacggatagagcggtttgtagaagaacaattaggagacagggcaaaaatctatgcgtctgagcttccgatggaaacaatggatgattttatcaggctgatctatgtcagactgtatggctccagaaaaaagatgcgatatcgaattgaaaaggcagaaggtgcgaataaaatcagtggagagtttgatttcccggattttgcgatcataaaacgctga

SEQ ID NO: 43869 - DNA, 615 bp, Roseburia inulinivorans CAG:15
atggatttattaaatggcatgctgcagaaggatcaggatgaattccgcagaatatgtaataaactgattaatgtatgttttatatgcagacagaatcaggcaacaagaagtgacttctattttatacaaaagtacaaagaaaagtttgaagaattacttggagtactcggctacagattagaaataaacgaagaatatggcgttgtgcagcttaccaacgccctgaatacaaaccggcagaatttaaaattatatgagtccgttattttactcatattgcgtattctgtttgacgagaagaaaagagaattgtctgtgagcgatgaagtcatcgtgaatctgggcgatattcaggacaagtttttaagcctgaagatccgtgacaaaatgatcgataagacaacgatgggaaatgcgcttcgtcttttccggagatatcagctgatcgagctgctggaatcggatctgaaaaatgaggagtccagagttttgatctataattccatcctgatggcagtgcgggttgaggacatcaaaagtgtctatgaaaaagttgacagttataggaaaggaaaattaaaagatgaagaagctgaccagactgaaactgattaa

SEQ ID NO: 43870 - DNA, 3249 bp, Roseburia inulinivorans CAG:15
atgaagaagctgaccagactgaaactgattaattggcatcgtttctcggatgttacgatagattttggggactcaactctgatttccggcgaaaatggagctggaaaatccacacttttagatgcaatccaatttgttgtgacctgctccacaaatcattttaataaggctgcccatgagaacggcaagagaaagctgaccggttatatccggtgtaagaccggacgtgaaaatcatccttatgagagaaccggagaaatcagtgcgcatgtcgcattggaattttatgaggagagcaaggaaaagtattttgtcatcggggcagtgatcgattcggcaactgaagggcaggagacagtcgtgcgttatctcatggacaatgtgatgttagaggatgagatgtttaagatcggaaacagaccacggaccatcacagaattcaggtcgtttaacaataaaaacatcaaattatttgcaaagacgaatgcggaaggcaaaaagatgatgaaacagcgttttggaagaatcgaggataagttcttccagctgattccaaaggcactggcatttaaaccaattgatgatatcaaggattttgtctattcctatgtgctggatgaaaaagaagtcaatattgatcatctgcgcgaaaatgtaagaagctatcaggagctggaaaaaacgctggagggtgtgaaaaacaggattgaaaaactgtcagagatcgaatgccaccacaaagcagtggtggattgtatacaatctgaccggatgtatgaatattttatggcacagtcggatctggatctgaccaaagaacagatcggcgttctgcaggatgagatcaggcgcgaaagttaccgtctggaacagctgaatgcaaagtgcagcagcatgaaaaaggaactggagaataaggaggaagtccgcacactgcttttagcggaactgaacgccaactcagatttccagacgttggaaaagcagaaaaaatatctgaaagaattacaggaaaaagaagaaatacaatatcaggaaaagaaaagactgttagagagcggaaaaaaagcaggacagaaagtaaaaagactgcttgaaataccggatgtggatgaatgcatgaagcagtatgatgagctgctacaccggctgaaggatacggaggacgttgttagtgcacaggaactgattgaccgggcgatcgcttacaagaagcatatgagtacaaaactgcagaggaaaaatttagagatccaaagccggctgaatgagatcgcagcagacctgcaggagacagagcagcggatcagtaatctgaaacagcaccggttttcctatccctcggcagtccagcttctgatgtcgcgtgtggagcaggaattgctcaagatcggaaggacggcaaagccgaggattttgtgtgaaatgttagaaatcacggatgagacatggagaaatgcagtggagggctatctgaatacacagcgattttatgtgttggtagagccggaacattttgacattgcccttggtatttacgaaaaactgagaagagaaaagaaagcatacggtgtgggactgatcaattccggcaaactcgaggaatatgacattgcaccagcaggaagtctggcaacagttgtggagtcgaagagtatttatgcgaagcggtatgtgaatatggttcttggtaaggtacatatgtgtaagagagtggatgaattaaaacagtatccggtttctatcacaccaaattgcatgcgctatcagaatcatgtcgcatctgcgatcagaccggaaatctatacaactccatttatcggcaagaatgcattcaaagtccagtatgagcaggcactgcagaaaaaggaggatttaaaccggcagaaaatagaatgcaaagaccgtatgacacatatggaagtgacgctgcaatggctcgagtgggatgatgatacagatgtgaagtataggattacaattgtatcagaactgaaaaggacaggacttgagattgaaaaatgtgagacggagatccgtaatctgcagcagaatacgaccatgatcgaaaagcagatccgtgcggatgaaatgcggaaagagtgtgaggaactgaaaagccacatttccaaaagtgacagggaaagcggagcctgcgaactgaaaataagcaatgcaaaagacaggcttgtggagtgcgaggatgagtgcatacacaagaatgaactgatcacagacattgcccagaaagcagaaaacgagatcgtgctctggaagaaagaatacgaaaaacagaccggtgataagacattagagcagttccggcagaattttgaccggagacgtaaggcgaataatacaacaaaagagaatgcggataagaaaatgacaagtgcgatgtacgattacaaaacggcatttgattttggtgcagcagctacgttagaagcatatccggagtatgcggcagttcaggagagactggtgaactccgagcttctgaattatgaagaaaaagtaagaaaagcaaaattatcggcagaggaagaattccgggaacagtttttatccaagcttcaggaaaatatgaagcaggcacagggagagtttagagaactcaataaggcattgaaagatatcaccttcagcaatgaaagatatgaatttttatatttgccgagcaaaagctatggaaaatattacgatatgatcatggacgatttcaatgtagtgcagggagagtccattttcagcggtctgtttcatgagaatcataaggaagtcattgatgaactattttcaaagctcgcactggatcaggacaatgggatcaaggcattagatgaatttacggattaccgcacctatatggattatgatattaagatcacacatgaggatggcagctattctctttactctaaggtttgtgaggaaaagagcggaggcgagacacagaccccgttctatgtgacggtagccgcatcctttgtccagttgtacaataataatatcggcggagaggcaatcgggctggtgatgtttgatgaggcatttaacaatatggatgatgagaggatcggggcagttcttgagtttatgaacagactgccgcttcagatcgtgatcgcagcgccgccggataaaatccagtatatcggtccgaaaatgcaggagacattattagtactgacagacgataaagtaagcttcgtggaggagtatcgttatgcatccggtcgaaaataa

SEQ ID NO: 43871 - DNA, 1227 bp, Roseburia inulinivorans CAG:15
atgcatccggtcgaaaataagatattgaatgatctattggacaaatacgaaaacagtaagctctccagaggagaaaaccagagagcgatccatattgcatttccgttcaataagaagacgatgccaaagtatttcgatgagagctcgcttgagatagaaaccattcacgcagccgcagaacagatggagcgtgagggactggtcgcaatcgcatggaaaaaccagaagcccggatatattatcgagaagcttgtactctgtgaggatcatgtggaagaggcatatgagaggcttggcaggaagccgaagagggaagccgaggcacgtacaaaacagattttggagcagttttatcagaaaacgcagggtgagataacaagaagctttttgtcccgcatgataacgcggctggaaagcgaacagtcagtaaaagaatatctcgacattatggatcacaggaaaacagaacaactgattgacactttagataaagtagagcagaacaggaaagaatgttatatcagggaattttccatagaacattttcatgacagcaaagtattcgagacactgatcccaaaaatctgtaaaatattccgggaggaaaatgaagaactgacaggatttgaaaatgaagaaattcttgcggagtatcagatttataaaacaccgggctatgtgtatatgaagggaaacgtacagatttacagcgccggaaagcaggctgcagatatcagtgctttcccggaagggattgctgttgcggtggggagtgaggaggatgtaccggatatctgtccggatcagacgattgataaagtattcacaattgaaaatctgacttctttttaccgttttaaacaggaacacagtctggtgatctatcttggcggttatcataaccacagcagacgaaatctgttgatgcagatttatcagaaattgccggatgcacaatattatcattttggagatctggatgcaggcggattttatattttagaacacttgaaaagaaaaacagggatcccatttcaaatgtttcaaatggacattgaaacattgaaaaagtatgaggattatgcgaaaccattgacagagaatgacaaaaagcggttgatgcagttagaaaaaatggaactgccggacaaagagagaaaactcatcacttatatgttacaaaaaggaataaagctggaacaggaatgtatttccgaatcccagtaa

SEQ ID NO: 43872 - DNA, 1452 bp, Ruminococcus torques CAG:61; identical to SEQ ID NO: 42394

SEQ ID NO: 43873 - DNA, 639 bp, Ruminococcus torques CAG:61; identical to SEQ ID NO: 42117

SEQ ID NO: 43874 - DNA, 3366 bp, Ruminococcus torques CAG:61
atgaaacagccgaagaaaatttttacaagaatgctgatcaataactggggcggcatcagccataaaatgttggaattccacgagtatgtgaatcttttcagcggaaagagcggatcggggaaatcgacggttatggatgcgatacaggttgttctgtatgggagtgtgtctgctaattttctgaataaagcggcagatgattctaaaaacaagagaagcgttttaagctatcttagaggagcgcaaaaagacggaacggcaaacaggggagacgttgatttttgttcacagattgttcttgagattgaagataccgccactcatattgtgacttgtgtcggggcggcgttcgaggtggcaaaaggggatacggatctgaaaaaatatacttatttcagtcattcgggaagaattccaaaggatgaatatttggaaaataacgtaccttattcgatcgcacagattagaaaacttacggaagaaagaagcagaagcgccgataacagaggccggggtgaagtaaataaagtgtatccgtcgaaagaagcttatctttatacgctgtacggggaaatcttcggtcaggtagaacaaggtcgtatgatcacgatggaaaaaagcgccattgctctgaaaatgacgagtggaacaggtcagtttataagagattatatgtttccgaaaacgaaagaagatacggtggcgacgatcagtgaacagcttggcgcgtacagagagatcaaagaacgggtggaagatctggaaaaacggatcgaaatgctggataagatccaagtatatgacagagaactgacgaatgtgcgtgcggagaaagtacgaacggaaacagtgctcaaatgcattgatatcgaggaaaatataattcgactcaaaggacgggaaagtgagttggaatccgttgaaaaagaagcggacgaggcgaaaaaagaacagaagatacttcaggacgaactgcagacgatacgggatgaaagagcccgggtacaggcagaattaaataacagcgattatggaaagaaagaacaggaactaaaagatttagaatacagaattgctcttctggcggataattcggcacagtggcggcagatcgtgaaaggattgaaacgatgggaagaagaggatgttgtcactgattatgtgagcaacagagctcttcagcttattcaggaaatacgaggcggagcgcttacggaaaagttatgtaaagaactgaggacacatcttgacttggcccttgataatattacaaatgaattgtcggaacttcgtatttcgatccatgaaacggaaaaagacatcaaagaaaaacaagatgctgtcgaagatctccaaaacgacagaaaaccgtatccgttggaattgaaaaaggcgagacaggaactgcagcgtgcgttgagcgacaggtacggaaggaaaatcgaagttcatattttcgcggatttgtttgatattacggatgaaaaatggaaaaatgcgatcgaaggacggcttggcaggattaaaaaaagtatgattacagaaccggcatacgctcttgatgcagcgaaaatatttcgcaggatgcagcagtttgaagaagttgatctgatcaatagtgaggcggttcaaaaggattctccggaagcggacgaaaactcgctatatgaagcggtacacgcagaaagcggatatgttgaccggtgcttgaaacgttatcttggaagaatacaaaaatgtgagacggtggaagagttaagtacggtaaaagacggagtcacaccggattgttattcgtacagcggatatatgttccgccatctgcgcaggaaggattatacgaaaaatgcatgtatcggtacaaaagtatcgaaggcaaagctaagagagctgcaggaggaaattatagatcttcaaagttcgctgatcgcagatcgtcagacggaagagtcgttgaaagaagcccggcaatttgaacggttcggtcaggaaccggaacatttgatgcgtcttgcgggtgcggcagacgaactggccgatcattaccgccgccaagaccggctcaaagaagaaatcaaagaactgaaaaacggaactttggcagcagaactgcaggctaaaacgaaagaacttacaagccggattgaagaaaaagaacaggcggcaggaagattaagagaaaaagaaatcgaaacagggaagaaaaagggcaaactggaagagaaaattaaagcgctgaaagaaagactcgattttttgatgaagggatatgttccgaatgatgagatatttgccgaagtgaggtcggctttggaaacgaagagcgaagcggcttataaaaaagagatgacagtgatggcggagaggctttttgagaaagaaacaaaacttcaggatgagcggataaaatcaagaaatgcatttaacaatacatatcccgcatatggattttcaggtgtagaacatgacaatgaagtttacgacaaagttttggagcgatgcagaaaagattttgagccgaaatataaagaagaatttgaaaaacaatacgagctcgtgtaccattctctgcgcgataacgtgatcgcaacgatacacggggaaatcaagtcggcatacagacatcggcgtcagatcaataaaatgctgtcgcagatccgtttttcggacagcatttatcagattgatatctctccggcaaaaaatgaaaacggacagttttatgagatgcttatggcagaagaactggacagcaaagtaatagatcatagtgggtttgacggtcagatgagtttgatggaagatgaatttttcagaaaatatgaaaggaagatcggacttcttaccgagaaattcatgccgtccagagaggaagacggggcagggcgtgaaaagcacaaaaatgaaatggaacgctttgctgactacagaaactatttggactttaatatgtatgaacaatctatcgatgaaaacgggatcgagaagaaaaattatgtggacgacatggcgggcgtcgattccggaggagagggacagaacccgaaatatgtggcgcttcttgcaggattcgcaatgctctatatgcagcagagtaatcgggattcaaagattcgccttgttcttcttgatgaggcattttcaaaaatggataaggagcgaagcgaagtctgcttaaaatacgcaagagaattggaacttcagttgattgtctgcgtgccggatgaaagacttcagtctctgatccgaaatgtggacagcgtatacggcttccgcaggtttagaaatcaggttacgatgatgcatattgacaaaggaaattatctcgatatgatcgcaggggaaagcagatcggaagaggtgtag

SEQ ID NO: 43875 - DNA, 1233 bp, Ruminococcus torques CAG:61
atgagcggcaatttgttggcaaagtggattattgggaaagcggaaaaaagtgaagcttatcgggcgggaacgctgacaggcatgaaacatccgaaaccggacagagaaatgatcaaggcagcaggtggcttgcctgagctgatcagacaggctgatgagttggagaaaagcggatatatccggacagaaaaaagcaatctgggcgcggatatgaaaaaaatctattattccatagatgtcattccaaagctgtgcgaaaaagaaggaattgaagatccaagaaagcagcagcttcgttatataaaacaaatagaacaactgcgcgctgaggtacaaggcagttttttggaaggttattatgatgagatcataagacggttggaacttggggagatcgtaaaatcacccgatatggaggacgttgattttttccgatgcttgaatgcagttgtgaatttgaaaaaatctctgtggatgcgcgtattcagtgctgctgtgcttaatgactctaagcgttttaaaaaagattatgagaaaaaagtggtgaaagtactggtcagatcacctttgtatgaagaggggatgactgacgatgagatattaagcgttcatggaattctcagttatgcacaggtgatggaatggaaaggtccgcttctgtataaattaaagggcggacaggagtatatagaagataaggcgagggaaaaggaatatgaaatagatacatctcaaaatcaatacggaacagtgattaattcgcagacattggaacgtgcctttcccgtttctataaaaggagtccaaagaattgtaacgattgaaaataaggcaaattatgaagaaatgaaatacagagaggatacgctttatctgttctgtcatggattttattctccgaaagaacggatttttttgaaaagattaatggaagtggcggaaggagagatacagtattttcattggggagatatggatatgggaggcattcgtattttccggtttaataagaaaaatatttttccgaaattgaagccgtataaaatggatcgagaagcatttcaagaagcgcttgaaagaggagcgggcattcctctggaagagaaaaagaaagaaaaattggaaaagcttaatgcgggagaattagaagagcttaaaaagtgtattttggaaaaaggagtagaaatcgaacaggaaattttattggcggaaaatgcgatagcggaaaattga

SEQ ID NO: 43876 - DNA, 1374 bp, Eubacterium sp. CAG:274
atggagctatttaatataataccagaaaaatttttctctattttagcatcacctaataaggaactttatattgaggtgctttttataattgatgagttatttgatgatagattgaaaataaaaaagagtgaattagttagttgtttggagtataaattacaggatagaattagtcaatatattccaacagatgatgaagatatcgagcctgaagaatattatacattgggagcaaaggctagattacttgtaaatttaatagaaaaaagaggttggatagcttttgaatatgatacggtttatattgaggaatatgtaacattccctggatatagtcaaaaatttataaaactcttaaaagagttagaaaatagccaaaatacagaaagtgtaaattatgtttatgaaacatattctagtcttaaatcggctgataatgatgaagaaactggatttatgaagtttgtggcattaaatagtgcatataataagacaattgaattaaaggatagctttaaaagaatttatcatagtataaatagttattatcaaaaacaaatagatatggtaaatgttaatgaacttatttctgaccattataataattatcgtgaaagtatagtttcaaaatatatttatccaatgaaatgtagggactctgtaacaaggtataaaaggtctattttaaatattgtaaataaatggacaatagaaaatgaaataatggaagaactaactaagcaggaatttgaaaacggttcttataacagtatagaagatgcttctggagaaatacgaagaaaacttttctttatcagagatacatatgatggagcagaagaagatttcataaacgaaatagattataaagataaggaatatgttagagcaacaacagccaaaatagaatacttaactaatacagatagaagtattagaggtaaacttatagatataatcaacaatgtaaagcctgataaaattgccgagatttttaatcttaatattaatatatactctcaaaaatatctgggaaataccagcttatattctaagagaaagagagtagaaagacctgttggagcacaggaaaaaattgaggttcaaaaggatttatctgagaaaatattggaaagtatacgaacttcagattctcagaagtacaatcaatcagcaataaatagttacatagaaaatattattgataattacggtggtatattgacagaaattaataatgatgaagattatattaaggctatattatctgttgtgcactctaaagacaaaaaggcaaaatataaggttgaagttacagatgaaactgttaatagtgtggaatatagttttccaaaaataatatataggagataa

SEQ ID NO: 43877 - DNA, 627 bp, Eubacterium sp. CAG:274
atgcttgaaaagtatgaaagtttttctactagagaaaaagaagaatttagagatatatgtaatgaattatttgataaaacttttttaaacgaagaagttataagtaataatggtggatttgtaataaatgaaaagtttaattttgttagacgaaattttgaattatttgaagaatattttatgctttcaggttggattttagaaagaaaaaacaatgaaaccatatacataagaaatgaaactggtagcaatagggttatattaaaattacttactacaaaaatgcttatagctctaagagttatgtatgatgaaaaaagaaagacatctagtaacagtaatagagttcagtttaaattaagtgaactttataataagatgctacacgattttggattaatagacagtatgccttcaaagacggatagagatagtagcattaaaataatagaaaaatacaatattatagttaaggctgctgtagcagaagatgaaatggataatgtgtatgttattatgccgtcaattacagttgctgtttctgatgatagaattaatatgatatacaatcaattaaaagaggaggatttagcagatgaagaaattaacaaaaatgatgttgactaa

SEQ ID NO: 43878 - DNA, 3411 bp, Eubacterium sp. CAG:274
atgaagaaattaacaaaaatgatgttgactaaatggcattactttgaacataaaataattgattttgatgatataaattttttaacaggtaaaaactcttctggtaaatctacacttatagatgctatgcaagtagttttacttggcgaaacagatggtacttcttttaataaagccgctgatataaaggcaaacaggtcttttacaagttatataattggagaacttggagatgatataaatggtggagaaaaatctctaagaggtggcaaagaatttacaacccaattagtttgtgaatttaaagacacaatgaatgatgaatatttttgtatcggtatattagtagattcatattctgatatggcaaatgcaaaaagggtattttttagattaagagatagactggatgaaagtgattacatatataataatcagcctagaaatataaaccagtttaaaagctggtgtagagaaaaatatggcaaagatgataaaactataaaatttatggatacaaatactgaatataggcaaaatatacttagtatgtacaatgtccatgataggaaaatgtttacattactaaaaaaatcaataagttttaagagaatagacaatattgaaaactttattactgaaaatatttgtgatgttaaaaatgaaatagatattaggtctatgcagcttaatgtttatgaatatgagaaacagaaagaaaaggctgaccagttagaaaaacaagaaagagagttggctgaaatcaataacttgtatgaaaaatattctaataaaaagcgaaatattaaagtatataactatatttccaatagatgtgaagaaataagcaaaacttctgaaatagataacataaaaaaggaaatagaagcgaaaacgctggagttaaatactgccaaaacagaactagaaattgttcgaaagaatattgcccaatataataaagataatgaaaatgcaataaaagaattagaccaatgcgaacagaatagattatatgatgaacttactaaaaatattgatataagtagtcaaatcattgatagtaaaaataaaaatataaactttatcatcccagaattaaggggaaaatcagcaaaaataaacagtaaacttaatagccttaaagattctatagctaataaaattacttcttacgaaaatttagtagacgaaaaagcaaatagttttatatcagaaattaaaactgtaaatagtggatttaatagtttaataaatataaagagagagaatttcaatgcttatagcctttcctactttaaggatttaaaagataaatcgcaaaatttaatgaaaaaggtctatggatttaagacaaatactgaaaattgttataattctcttttaagtgaaaaagcagaaactgaagaagaattaaaaaagcttaaaaaaggtaaaaagcattatagtaaggatttattaaaattaagagataatatatgtaagcaattaaaggaaaagtataaaaaagatatagaagttaatattcttgctgaccttattgatattgatgaaaattcagaagtatggagaaatgcagttgagggatatttgggaaatcaaaaatttaatttaattattgagcctgaatattttatggatgcttattatatctataaaaatatgcgaaaagaaatttattcctttggtatagtagattgtgaaagaattttaaatacgaaaaagagcaatgctgataatagtttagctgatgtagttgttactgacaataaatatgctgatgcgtatataaaatatttattaggacgagtttctcgttgcaaagatgatgaagaaataagaaaatacaatataggtattacatcagaatgtatgttatatcaggggtttacagtaagagctataaatcccgaaaattataaaatacattatattggcaatagggctatagaacagcagataaaatatagagaacaacagttggttaatttaactgataatttaactgttattaaaaatatttttgatgcttacaatagtttaactgaaaatacattgtttatgaatgatgaatatattcaaggtcaactttcaagcttgtttgaagatttaaaaacagtaaacattgaagaagataaaagaagtaaattaatagaagaacgctctaacattgatatgacaactgccagaaaaattgagcagaaaataaagaagataaaagaaaatttaaaagaacttgacgaagaacaatctgtaataaataatacaataggtggttgtaataacgcaatagagtctaataaagatagacttaatgtagctgaaaatgaattaagaaatatagcttataatatttccagagaatatagtgattttacagaaaaagaaaaagctgaagaaagattagcaacagatattgaaacaaattctgatattttaaaacttaaaaatgactatagaaataaagtctttagaactaatagagatgtaaataatctaaacggagatattagggctaaaaaagaaaactataacagaaattataatatatctttggtaattaatgaaaatgataactttgaatttaatgatgaatgggaaagaataaaaaatatatctctaccacagtataaggataaaattgctgtagctaggaaagagtcaatggaacagttccaatctgatttcttagacaaaatgagagataacataatgacagctcagcaacaaattaaagagataaacgaggcgttaaaacttgccgaatttggtagtgataaatatagctttgaagttaaacctgaaaaagcctatatggaatattataatatgattatggcggatagaatgggtggcgattccatatttgatttgaattttcaacagcaatatggagatacttgtaataacctttttgataaaataacttctgtatcagaccaaatgacagaggaaagtagaaaagaattagataataatataagtctatttactgattatagaacatatttgaaatttgacttgtatgtaactaatgccacaggcagaaaagaaagtttagtaaatggaataaagagtaaatcaggtggtgaaagacaaactccattctatgtatcattccttgcaacatttgcacaattatataaagttaatgaatttaattataaaggtaatactgcaagattggttatttttgatgaggcatttaataatatggacaatggcagaatagatgaaagtattgaacttttaagaaaattaggcctacaggctattatatgtgctccagataataaaattgctaatatttctacaaaagctgataagacacttgtgttgtatagagaggggagagatattgatgtcttcgattttgataaggagatgaaaaaggttgaggctagcttatga

SEQ ID NO: 43879 - DNA, 1245 bp, Eubacterium sp. CAG:274
ttgaggctagcttatgaaatactcaatatattacttgataagtatgaaaggagtagtcaatctaaaggaaatacctgcaataggagaatacttttaaaattagataacgattttataaaatatagaaattcagactatgaagataaagaagaatgtaatcacacaattatccaatttaaagaacaacatataatagattttaaatgggaaaaacatagagtagatatgattatagaagaagtatggctcaacaaagaatatattcaaaaggcttatagtgttgcaaatagagaatatatcggtgatataattcaagaaagaataaatataattaaaaaatatatgtcatctataactacaccatggattttagactttttacattatcacttggattatatatcttccgaaaagaaactaaaaaagccttttaataaggatatgccatatatagaagatgttcttttggctttggataacatagataaaattaaagaacctattcctgtgagagtgtttagttcaaaatgttataaaaactctaaaacatttgaaaataaataccaaaattgtgttttaagcataattaaaaaatatgaatacacaattaaagatttattggataaagaccccgaattagaaatttcaaatagtgaaatactttcacagataggtattatatctaaaccagaaatatttgagttttctggaaattgtgatatttttacttcagaaggttcggttaatagttatatttttaaatcgggtatggttatgaataattattttgtaaatagtatagaaaatataaaatttaataatataaccgatgttatatttatagaaaatagaactaactattacgactatatacttaatcaaaaagaaaatgaatttgttattttccatgggggtttttatagccctcaaaaagctaaactttttagaaagcttataaaggctgttgacgataatataaaagtttatttttggggtgatattgatttaggtggatttaatatgtttgttagactgaaagaaaatatcattccaaatcttcaacctttaaatatgggattagaggaatataaaaaatatttatatagtgggttagagaaaaatgaagattatttaggtatattaaaaggattattgaacgatgaaaaatatggacctttttatgatgtgattgaaaatattatcttaaatagaaaaacaatagaacaagaaaacttcttaatttaa

SEQ ID NO: 43880 - DNA, 1362 bp, Anaerostipes sp. CAG:276
atgagatttggttacgatatcccggattctttttggagcctgttccgttctgtaaaccgggatcattacatagaagcgctgctgaaaatcagtgaagaatatgaatataacaactactttctgagccgggaggtctgtattcaggtcctgagcgactggaatgcggacaagcgcatctggctccagcgggaagagtttgaatcagaactggatgtactggagactcccccaaaccggatactaaactggctgattaagaccggctggctgaaaaaactggatgacttttctacgctgacatccaacattgtcattcccgattacgcggccgtttttctcgatgcttttgaacagctcgtgaatccgcagatggaagatacggagatttatatccaaaatgtctatgcgacactgttctcctttcaaaatgataaacggatcaaccttgggatgctgaaaacagccctgatcaatacgaagaaactgaacaaggcacttcaggatctgcttcacaacatggacaaatttttcggacgcctgctgaaacagcagtcttacggcgatgttctggcggaacatttagaaggatatgtggaagagatcgtcaagaaaaagtaccatatgttaaagaccaacgataatttctatctctacaaaatggatattaagaaatgtcttcaggaaatgcgggaagacgcggagtggatcgagagagtccgggccaaggcaaaagctgagggcagggatgaaaaggaagatgtgcttgacattctggatgccatcgagagaggttttgacgacattgagcaccggatcgccaacatggacaaagaacattccaaatatgtgcgcgccacagtcacaagactcaactacatgctcagcggcgaggcagatatgaaaggaatggtggtcagtcttttaaagcacttggaaatcgacgaaaagagggaagaacggctttctcaggtggcggaaaaaatgaacctgtcacgtctagaagtcctgtctgaaaaatctttttacagaagaaagaaaaggagagatttcatcagccggttagagccggatgaagatgtgcgggaacttaccagggaagaagtattgagactcaataagatccatacacgttacagtaaaaaagaaatcgaggagtttctggaaagccatatggaagacggatccatggaaatgagagatgtcaatatcggcgacgatgagtcgtttgaaaagctgatcctggcctatgactactgtaccaggaaaaacagccggtatcaggtgatcgagagggaaaataagatgctggaaaatggaaaataccgttatccggatctgttgtttgtgaggagaaagtcatga

SEQ ID NO: 43881 - DNA, 657 bp, Anaerostipes sp. CAG:276
atgattgaatactatgaacagctgagcgatgaggagaaggatgatgtaaagcgtgtcatccagattttgttccggcagacctttgtgctggaacggaaatacgaaaagaggaccggaagatttgctttccagaaggattacaggatcttaaatcagcacctggaatttttaagggagtatttttcgattgccgggctggaacttcgggataacagtcatatgggagttttttatatccagggggagaccgtcctgggagaaaagctgcccagactggctactatttatctgctgatcttaaagctgatctacgatgagcagatggaaacagcgtctgcaagcagctatgtgtatacgtcgctgggagaaatcaatgaaaagatcggagattttgccttgcttaagaacctgtcttctgcgacagagatgagaaagaccatttctctgctcaaaaaataccagatcatcgagccgatggacgtactcgaagaccttaatgaggagagccgcatggtggtgtatccgtgcatcaatgcggttcttctcggagcagatgtacagaaattgattgaaacatttacggaggaggacgaacgtggagaagaagacggagagcaaacaggcattcaaagcactatcgaagatctgtctgaataa

SEQ ID NO: 43882 - DNA, 3384 bp, Anaerostipes sp. CAG:276; identical to SEQ ID NO: 42403

SEQ ID NO: 43883 - DNA, 1212 bp, Anaerostipes sp. CAG:276; identical to SEQ ID NO: 42404

SEQ ID NO: 43884 - DNA, 1500 bp, Eubacterium rectale CAG:36
atgagtatgacattaaaagatagaataccaaaagaattttatagcttattccgcacgaaaaatatggatgcatacatgcagatagttgttgcgttatatgaggagaataacgaggtctatgcatcactgggactgacacgtgaggagtgtcagataatcatagcggataccatatcaaaaacaggcattgtatggcagactgattataatgaagatgagagtaataaagatagtggcagcatggataatcatgatgattataatcctgattccgaaattgatgttatatatgaccaggccagtttcgcatacaccctgacaccatcagctatattgggcaggcttataaactggggctggatcaggagtgattttgatgaaaagctcaacacatatgtgattgcatttcctcagtacagccaaatgtatgctgagctatttaaaaagctgcttgtggatgatgacagcagggagcgcgagagcattttggctgtttacagtgcgctttttacatatttttcagatccggaaaaaaataatgatattctgaaaaatgcgttgtatacgtcaaaaaatcttggtcagcttttatcaaatatgcaggatggtatgagggcatattttgatgagctgtcacgtatgaaggattttataggtatacagaaggtactgattaaggaaattaataacagtgatagcagacgttatgccatccttacaaccacggatagcttttatcgttacaaagaggcagtaaaggagcttataagtaaaatccttaatcagaacgatgacagaagggctgagcttgagggaattctttcgcagactacaccaggtacgtttgagagaaaacgctatgagtacagcgtggagtactgtgataaggcaagtgagcttgtttataaggtggagcatgagtttgacctgattgagagaaagtacaacaagcttattgagcagaagacgatttttgcaaagagggcgcttgcaaggatacactatatcctgcaggaaggcgcagatgacgaggataatatagtaaagctcattaacctgatagataagagtgataaaacagatgagatacttggggctcttcgaaacagaatgaagttcaccagacagttttacaatgtaacggacgacagttttccgggaagaagagagagaggaagaagtgagtttgttccgtttgttattgacgatgcttcggcaggcgaagatgatatggcagattttgtgccaaagccattgtataccaaaaaggagcttcaaagcttcagagataaaaatatgcgtgatggcatgtttgtgacagatgaacaaactgtagaatccatggaggatctggaaaaacttctgtttttatggcaggaggagaccaatgagcgcatgggtgaggatacggtgagtctggatggagagataacaaagagtgatggtgtaagctactcaaggcttgtaatatccaaatcggactctaaacgagaggcatag

SEQ ID NO: 43885 - DNA, 726 bp, Eubacterium rectale CAG:36
atgtttgaatatatggagaatgtttcgccaaatgaggcagaaaatattagaaaaactattcaggatctgttgaggcagacttgtattttgcaaatgaagtgtgaccccgttacattgattcaaagagacaatccaaggtatcaggtgtgtcttagaaacagggagtttatctctgattatctggctgtgcttgactgtgagctggttcatgaccagcaggagcatcttttcagaataacgggtgatggtgtcatgctcgagaagatgactcttcttactgcaaggattgtcattataatgaagatgatatacagggataaaatcatgggcgaggggcttaatgcgacaacaacgaatctggcagagattcgtgaatatggcagaaataccaatctgattaccagaaagctcaataatcaggaatggtcagacgctcttttgcttatgaaaacacaccagatgattgaactgccgcgggctattgcaaacctggaggacaacacaccaatctatatttatggcacagtaaatatattctgctcagccatggatataaatgagcttgtgcgcatgtacagtgatgaggtggagctgattaagtatgataacgagtcggctgcaacacttgaagctgccggattgaatacagaaggcagttctgtaaaccatacccatgaatttgccaagaacagtgaaatggaggagttaccaattgagtcagtctaa

SEQ ID NO: 43886 - DNA, 3366 bp, Eubacterium rectale CAG:36
ttgagtcagtctaagaagatatttaccagaatgtgtctaaacaactggggcggaataaatcacaaggttttgcaatttaatgagtatgtcaatttgttcagtggtaagagtggctcgggaaaatcaaccgtcatggatgcgattcaggtaatcctctacggcagcttcagccccacgtttttgaacaaggctgcagatgatgcaaaaaacaggagaagtgttctgagctatttgaggggtgagcagaaggatggctccgcaaatcgtggcgattgtgatttttgttcggtcatagcgcttgagatagaggatacaggcagtcatacgtttacatgtataggaatagcatttgaggtacgaaaaaacgattctgagattaagagatttgtgtacttcagtcattcgggcaggatgccggagccttcatatgtgacagcggacggcttttgctattcaaataatgatattaaaaagcttgtaaatactcgctcacagtcagctgacagacgcgccagaggggatgtaaaccgtatttacgcatcgaaggaggcataccttggcacattatatgatgtgattttaggatatattgaccccaatcgttttatcacaatggaaaaaagtgctattgcactcagaatgacaaatggaacaggccagtttatacgtgattatatgtttccaaagagtgactcgggcacgatagagactatcagtgagcagcttgatgcatacagacaaatcagggaaaaaatagaggatatgcgcaagcgtattgagcttcttaaggaaataaaggagtcgggacaggaactggtaaatatccaaagcgatattgtcatggcagagacaatgatcaggtgcatagatatcgaggatatgcgtgcaaagattcaggcagctgaggatgataaaaagcgtattgaagaagaacaggacaggctttcagaaaaggcagaggatatagccgggcagcaggcagatctgcagcaggagtatattcaggtatgtgcggatttgaaatcgagcgacttaggaagcaaaaaggatcagcttagggagcttgagaagagaagtctcatgcttaccgacaacagccgtcagtggattaaaatcacaaacggactaaaggcctgggatgaggatgaggtcatcacagattatgtgagcaatgcagttttaaacctcattgaagagattgtggatggcgatgtcacagaggcaaaatgtcaggagcttcatctaaagcttgagtctataaagaaggatatcgaggatgagctcgaggacaatacttcgcagaaaaatgagataacaaaagagcttaaagagaaaaaacgtctggtcgatgatatgaagaacaaccgcaagtcgtacagtgagagcctgcgttcggcaagagctgcgctgcagagagacttaagtgatagatttggcgagcctgtgaaggtacaggtatttgcggatatgtttgatgtacaggacgaggaatggaagaatgccatagaaggacgtatgggcaggctcaagttctcacttatcacagagccgcgttatgcgcatactgctgctgttattttcagagacatgaagcagtttgaggatgtcgacctcatcaattccaaggctatcatggacagtgaaccaaaggccatggatggttcgctctatgaggcggtggatacaaaggaaaagtatgtagatgtctgcctgaaaagatatctgggacatattataaagtgccggagtgttgacgagcttgagcaggtacgagatggagttacaccggactgctactcatacagcaactttattttcagacatctgaagaagcgcgattatactacaaatgcctgcatcggaggcagggtatccaaggcaagacttgctgagtatgagacagatgtggagaggcttgagaaggaccggatacagcttatgggtattatttcaagtctcaaggcacagagagattttgagtgcttaaagggggagccggagtattttgtgggcctttctgaggcgtcagatgagcttaaagcagttaattcgcagaaaaatgagctcgaagagattattaggacaatggagaatgggcagtacaaggagctaaaggagaaaaagaggcttcttgagaaaaacatcgatgcacttaagagtgctttttcactgaatcagcagcagataaatgaaaagataagccagcatgagaaaatcataggtgcaaacgaacagcgaagagcacagctggaagatatgttacagggctatgttgccagagaggagcttgagaagcaggtgcaggatatgctgcagcatagttcaggagcatcggtcaagagcaaacagcgtgagaagcttattgagctgcaaggcgcagacggaaatggtggcaggcagcagtcgtgtgtggagacgttgcagactgcccgctacaggtatataaaggagtttccgtcaggtcagttcagcggagccgagaagtcaaataaggcatatgaggagctgctggagaagtacgagaaggattatgagccggaatatgagagtgagtttgaggagcagtgcaaggtgatctacaaaagtctcagagagaatgtcatcggtacaatccacggtgatattaaggctgcaaagcgccatgcctatgagataaacaggcttcttagggagactaatttctcagacagtacctatcagattaagatagagccggcaaagaacgaaaacggtcagttctatgatatgcttatggcggaagaactggacagtaaaaatccggataatggcggaatagctggacagataagctttggtgaggatgatttttataagaaatatgagcagaaaattaaacttttgacagacaagttcatgcctccaagggatgaggatgagcatctgcgaatgcagaagcgcaaggaaatggagcagtatgcggattaccgcaattatctgtcattcagcatgtatgagcaggttacggacgaaaacggccgtgtcatcagggaaaactttgtagatgacatggcaggacgtgattcgggcggcgaaggacagaaccctaagtatgttgcgcttcttgcgggctttgcgatgctttatatgcagcagagcaatcgtgattcaaagattaagctggtgcttttggatgaggcattttccaagatggatcaggagcgaagtgcggtgtgtctcaagtatgcaaggaagatggacttgcagctgattgtctgtgtaccggatgaacgtctgcagtcgcttatccgaaatgtggactgtgtctatggcttcaggcggcataataatcagatttctatgatgcatatagacaagggcgattatctgaaattgatggagggatag

SEQ ID NO: 43887 - DNA, 1413 bp, Clostridium sp. CAG:149
atgtctttttttgaaacattgaacgagaaattttttaatcctttttgctgcaggaatcgggcgctctattttgaatgtatcagccagctgatcgaaaaatcaaaggaaatctctgttttgtacgaagcggacgccagaaacacactgattctgtatcttcaaaattgcacatactccatagaaacggaaaatattggagaagagattgctggcgggaaaactcctcaggagaacgcctccacaattctcaggtattttcgtgtatgcggatggattgctccgcaggaaatcggacgcagcggggacaatatcgcgtccgtatcggcatactgccgtaagctgattgacgcaatccataagatttttgatggggacgccaatggcgcgattacgaatcatattttttccatgtatgaaatcctgaaattttccttcagcaaagacaatgcccggtcgatacgtccgtatcagaacatcctgattccactggtagaaaatgaatgtgacttgaaaaatgagcttctgattctgaaagacagtatccgtgaaattatgcgtgcagttatgaagatggcagacgccaacagtttcggtcagtttttgatgaaggatgaactcctgaaccgttttttcaatgattattttttcattaagaaaagtggtctgattccttcttacatttcggacattgaccggatgctgagaaaactgcgccactcggagctttatgaccgaatgatccaggagtatagaaaaatagaaaacacagacgagattcaggcaaaggagaagattgaccggctgtttaacgagctggacagcttcattaacctggaatatgagcaggagatgtcttacattgaccggaaaatcaacaactactacaatctgtattctacccggatgatgatggtactgagtgaaaataccaatctggagcatgaactgaaccggatacttctgtttttgaaaaatctgaacgaagagaaccgggcggaagcactctcaaagctttcagaaacgcaccgtcttatgagcatgggatatatcggaagaaagtcttttgaacggcggaaaaagcgaaatcccaatcaaaaaaatgcgggcttagtctgtgaggaattgtcggaagaagagaaacagcggctgacggacgaacttctgacggagacgcccgatcggtacagtatggacaacgtggagaaacatttcgatgagatcatgagaggcagagatcagatttctgtggaagaatgcggagtacataccagggacgatgcgacgatgatcgcggcaagtatgatttattcggggacgtcagggtttccttatgaagtggaattcaggaagggcatggtggagaccgaggccgccagaatcagcaatatcagcataaagaggaagaaatcatga

SEQ ID NO: 43888 - DNA, 645 bp, Clostridium sp. CAG:149; identical to SEQ ID NO: 42522

SEQ ID NO: 43889 - DNA, 3318 bp, Clostridium sp. CAG:149
atgatcctgctaaaaaaagtgcggctgatcaactggtatggattttccaatgtgacggctcccatcggtttttttacgctgattgcagggaagaacggcaacggaaaatccgtcatgctggatgcaattaaatatgccgcttacggagatacggtatttaacaagtcgtcggagagtaaaggaagccgtacgctgtcctcctatacgagaggtcttctggatgccacagccgggacgtacatgcgcccggcggaccaggtgccaaacgtgtacagccacattgtgctggagtattttgacgatgtggaggataaatcttttttgctggggacggtaattgagaccagcgcgtccaataattgccagacgtatcgttacgtgatggaccggatggtcatggagcaggtggaacatacttatgaagagaacggcgtcacgatgccctgcagcgcgtcgttccttcaaaaaagatacagactgacgctgatgaaccgggagcagggattgccgaaatttttgcagatgacgggactgaagctgaatctgggacagcttcccgtctatctgcgcaagcttcggggaatcatgtcatacgatccgaacgccaggattgaccggtttatccgggagagcgtcctggaagaacggaacgtggatttcgggaaactgatccaggcgaaggagaacattgagcggctgaacgagaattttgagattatccagcaggagattaacgagctggatgggattcttggggagtacgatgcatgggagagcgagaaaaaccgtctgctggctgatgatatccgcatcatctataaaaagaggaaagatttgaaccgggagattgagcgccagacagctgagcaggaattggcacagagaagaaaggaagatctggagagggaactggagattctggatagaagaaaaaaagagattgacgctcagctggtgcaggccagagtcagtttggagcagctggacagtacccggatgatcgcagaagaaagacgaaaattagagggactggaggctgagaagaggacgctgatgactctgtgcagaaagctggagcattttcaggccgtggtcagcgaactgatgaatcagttttttgaaaaggaaaaacggatggaggatcagaacgtgctggcgtccctctgcgggcgcgggcacacggctgcggaaaaggcggcggcagtatccaggttcaaacagaaaataaacgagtgttacgacggactggtgatgagagcggcagataccgagagggagctggcagaactgaaccggagtctggacgtgcagcaccggatcatagaggattgtaaaaaacatcgcaatacgtttgctcagattccagagtatgtggggctgcgtgatgagatcaaccgtgaatttgaaaagagaaacatccggtcgaaagcgcagtttgcctgtgaatacgtgattggactcacagatgaaaaatggcgggacgccatcgaggcatttttgggaccgcgccggtatacgatcctggtggaccctcagtattatgatattgcagatgacgtgctgaaccgttcggaacatcgttatgcccatctgttcaacacaaagctgctgatgaagaaaaaagtacatgtggaagaagactcagcggtatttaaactggagatcaaaaacccggtggcaaaacagtattttgattatcagctgggaagaatgcatgcggtggagcgaaatgctgtgaaggaatatgaaaatgccatttccagggaaggccgcgtgtccgtagctatggacagctattttctgcgttttgacaggctccgttcctactatcttggacagaagacgtttgaactgaaccggatccgcgcggaaaaagagatttccaggctcaacgaggagaggaaagcaaaactggcagagaaaaaggagcttgaagatcagaagaaccgtatggcccagaatcgggagatgtttcaggagtatgactatgacgcccaccgaaaataccaggccgcgtcggaaaacgccagggcgtcggaggcgcagctggagcgcctgaaaaaagcgcaggagaataatcaggaatatctggagctgaacgagctggctggccggctttcagatgaacagaaaacggtgcagaacgaatataacgcaaaacttcaggagaaaagcggacaggacacgaccatatccagatgcggagagaagatagaggcaaaatcaggggaactggccgaacaggagaagcggtaccgggaatatcagaccgggtactataccatcgtgcagcggacggtagaggcctatgaaaaatacctgaaaaatggaaagaaaggtccgggcggcctgctggcggaagataccagacggcgtataggaaacagtatcacgcagcatgaaagagatctgacgcagaagcaggcggattataacgcaaaacatgccggacgcatgctgcccagaggaacggagggaagagaacggtatgcaggcagaagagagcgcatctggatggacaatcttcaggaaatccgtcagaaactggaagagcagacccgcagatatgaggacatatttaaaaatgaatttgtgctgacgattctgaaatcctgtgagcgtgccagagaagatttgaggcagatcaacggagaactggcaaagctgagctttgctgcaaaatatcagtttgatgtccactatgtaaaggacgggtcagaatacgcaaaggtgattgaatacgcccgatatctggacgagcgggagcagctgggaggcaatgcagacggacagatcgctttcgatatactgacctccgtgtccgatgaggaaggcgagcggttagaaacagagatgaagcagatcatcaaccggatcatcgaaaagaacagtgaagaaacgattgcccgttttgccgactaccgaaactatatgaattatgagattctgatcagcaaccagatcctggaccgggcaaaattatcccggcagactggtttcaactccggggcggaagtgcaaatcccgtatctgctgatcctgtcgtcggcccttttgctgatttacaaccagcgtatcaattccacacgtctcgtatttatcgatgagccgtttgccaagatggatcccggcaatgtgaaattgatgctgaaattcatgcgggagcagagactccaggtaatcttttgctctccggataagacggaatccatcgggaacgagtgcgaggtaatcctgcctgcgctgcgtgtgcgcgcggacagtatgcagctggggatcgtgcagttccatgaagaaaaggcgtacagcagccggtga

SEQ ID NO: 43890 - DNA, 1212 bp, Clostridium sp. CAG:149
atggtgaattacgaagaaaagctgctggctgccctggcggataaatacaggaagagcaaaaaagacagggggaccaatgtgattacgagacggacaaaactgaatccgtctcagctttataagaattacagccgaaacgacggcgatatgacacagattgaggcagtgaatcaggcggttttccggtgcagtcaagaaggatttgtgacctatgagacagagggattcagcagcgagatccagagcatttatctggtggatgaaaaaatcggcgagatcgaggactatctggaaacaaaatatggatatgagccaaaatctgcgaaacggaagtacgtggaagggctgattgtcgggtacagcggacgttcgcccgcagcggaacaggagtgtataaagctgcgtcaggctctggaaaagaacaggattccgccccgatatcatcagacggaagaccttctcaaagcacttgtctttattgagaataatgaaaaagacctgtatctgcgtgaagcttctctgctgatctacggggactccaaatatctggaggaaaatgtgctgggatccgtttgcagggcactccgggactgcctgggccgtccatgcggcccagcggagctggaagacgagatcctggaggaatatcatattacacgggaaaagcagaagctgtgcctgaagggtgatatgacggtatgcatccatggaaaagaactggaactgggggcgtttcccaacggtattgaattttttgctgatgaactgtataagattgagcagataacggtcaaaacggcggtttttactacggtggaaaactatacctcctggctgaggtgtgacagctcgaaaacagctctattttatctgggcggttatgccacccgttatcagagagacttcctgaaaaaaatattttccgataatccaacgcttgtctaccgccatttcggagatatcgacgctggagggctttatatccatgagcatttgtgccgtgtgaccggtatcccgtttcagatgtaccggatgtcgcgcgcggaattggaagacgtacgctttcagtcctgcctgcatccgctgacagagcaggatcgagtgcgcctgaagtctctggaaaaacaggagatgtaccgggaactggcagaatatatgctggagcggggtgtgaagctggagcaggagatagtcagctattatgagctgtga

SEQ ID NO: 43891 - DNA, 1446 bp, Clostridium sp. CAG:149
atgaaacttctgaacgaaatcccgtcctcattctggggacttttccgttccccaaacagggaaatatatatagaagccctcttaaaaatcaacgaagagtatcagtacagcaactatttcctgagcagggagatgtgcatccaggtgctgggcgattacttttccaggcgccaggtggagattgagagagaacaggaggaggctgaggcagataccctggagccgccggccacacgtattctcaactggctgatcagaaccaggtggctgcgccgccaggaggattttgtcaacctgtcggtcaatatcgtcattcccgactatgccgcagtctttatcggcgcattcgagcggctgatcggggaggagggagacgaggcggacatctatatccagaacatttatgccaacctcttctcctaccggaacgatccccgggcatccatcgccctgttaaacacagcccttgtaaataccagaaggcttaacaagacccttcaggacatgcttcacaacatggacaaattttttacaagcctgctggatcagaaattttacggggagctgctgcgggagcacctggacggatatgtggaagagattgtaaagaaaaaataccatattttaaagacatccgataatttctacctgtacaaggcagatatcaagcagtggctgaagctcctcagagaggagccggagtacctggagctcaccatccgccggggaggaaaaaagctggagctttcagaggcagtccgcctgctcgatgacattgagagaggatttgatgacatcgaacgccggattgccaacatggacagggagcacacccgctatgtgagagttacagtgagccgtctctactatctcttaaataaggaagaggacacgaaagggctgattttacagcttctgaaccgaatgtcccgggaggaggatccggagccccttatcagaaagacggcggccaggatgaacctttcaagaagagaactgctctctgacaaatccctctacaggaagcgaaagcccagggaagccttccgggagaagctgcagccggaggaggctcccaaggagctttccagggaagagcttctgagcctgaaccgggtttcggcaaaatacaccagagaagagattacagacttcatcagagagcggatggaggacaaggctgcggcgatcacaggagacagcgtccgaagcgaagaagattttgaaaagctgatcctggcctacgattactccttaaaaaaagaaagccccttcaggacagagggggagccggagtccatcgacaacggagcctatgtgtttccggctcttgtattcagagaaaagacaaaagcgggggagccagagaggcgcgccggggaggagacgaagggcagctaccatacaggaaagggacagataagagaagatgataccatattttaa

SEQ ID NO: 43892 - DNA, 696 bp, Clostridium sp. CAG:149
atgataccatattttaatgagctgcttcaggaggagcgggaggagcttacccaggctatccggcttctggagcggcagacctatgtgctggagagaaaatatgacaggaaaacggggcgctaccagtattccggtgtgtacagaaccctggaacgccacatggagtttctgcgggaatacctggaaatatccggtatttctatctatgaggatattcagctgggtgtgatttacataaaaggggaggcagtcctggcagaaaagctgccgaagctcgccaccctgtacctgctcatcttaaaggtgatctacgatgagcagatgacagaggcctccaacagccttgcagtccacacgaccctgggagagctcagcgagaggctcggcgtgtttggcctgaccgggaggacggctcccacagaaatccgacgggcgttaagccttctgaaaaagtatcagatcatcgagccgctggatctgatggacgatctggatggaaatatgcggctgatcctctatcccaccattaacctgatcctgaccggaaacgatgtgagagagcttctgtcagagcttggagaaggagaagggcaggacaggcagctgacacgagacacagaagaagcggcggatgaggaagaaaacgagacagacggggaagaaaatgagacggacggagaggaggattccagatga

SEQ ID NO: 43893 - DNA, 3426 bp, Clostridium sp. CAG:149
atgaatgacaagggattcaaggcgctgacgcggatctgcctgaacaactggcactatatcagccataaggtgctgtccttaaacagcgggatcaactttttcaccggacactcggggagcggaaagtccacgatcattgacgccatgcagatcgttctctatgcaaacacagacggccgcgggtttttcaataaggcggctgccgatgattcagacagaagcctgattgaatacctgaggggaatggtgaatatagaggaaaacaaccggtttgcctatctgaggaatcagaacttttccacgacaatcgccctggaatttacggagacggagggcggtgaggcccagtgtgtcggcgtggcctttgacgtggagacggcgtccaaccaggtgaaccgcctgttttactggcataaggggagactgccggagcatttctaccggactgccgatcgcaccatgaccatcagcgaggtgagagacttcctgaagaaaaatttcacaaaggaggacagcttctacggccctcacaacgagagattccgctctcagctctacagcacctatctgggaggcctcgacaaggagaagttcccccttctttttaagagggccattccctttaagatgaatatccgcctggaggattttgtgaaggagtacatctgtacggaggatgacattcacatcgaggatatgcaggaaagcgtcatgcagtatgggcgcatgaagaaaaaaatcgacgatacggtccgggagatggaggagctctcagaactgaatcaggcctttctgcaggtccgggaggccgagggggagatggaagggtatcatgcccttgcaaaggaaatggagattctggccctgaagggaagagtcaggcgccttggacgtgaggcagaggcggcaagggaggaggcaaaaagacagtctgagtcgaaagcgcagcttgaggagcggattcaggagaaggaagccgggagagaggaacttctgaaaaaaatcgcttccaccggctatgaggatctgaaggaaaagctgaaaaccctgaaggagctgattgagcagtacgaaaaaagtgaggcgaggtttcagaaaactgccgcaggcttaaagggctgggaggaggctgactgcactgcaaaccagaccctctgggacatcgaggcctttgagaaaagagagatctcagaggaggggcttcacagcctgaagcagagcatagaggccatgaggaaggaggccgatgaggagagaaaggaggcagagtcggagatacgccggctgaagcgggctcagacggaggcgagggagaacctgaaggagttaaaacaggggcgcaaggcctacccgaaagagctcctgaatgccagaacctacattcagaaacgcttcctggaggagttccagaagccggttcaggtggatattctggcggatcttctggacatcaggagcgagcggtggagaaatgcggtggagggctatctgggaggcaataagctgtccctggtggtagagccaagatacgtgcgttctgccatgcgcttttacaatgagctggacagaagggcctattaccgggtgtctgtggtggacacggagcaggcggtcagggacagtcacccggtgcttgaccatgccctgtcggaggaggtgtccgctcagacggagtacgtccggtcctatgtggattttatgctgggaaaggtgataaagtgtgaggggattgacgagcttcgccagtgccggatcggcatcaccgacgactgccttctctatcacagctgccgcctgcagtatataaacccggaaaattatacgaggggagcctatatcggcgccctgagcatgaaaaagagaattgaaaacctggaggaggagcttcgggagattggggaggaacttaagcctctggaggaaaccaggcagacctgcgatcaggttctgtccctggaacctctttctctgactgtgtctgagtatggggaaatgtttgaggacctgaagaacctgaaaaagaagagggctgagaaaaaacgccaggagcaggcccttctcgaactttctgagggacagataagcgcctgggagaaagagcgggaggagcttcagaaggagatagagaaggtccgcggggctttgaaggccctggaggagaacctctggaagctgaatcgtgatattcagggcagggaaaagcagaatatagagcttcagggagagctgtcacagagggagagagagctttccgaaatgaaaaaagagatggaggaaaagagcggaacccatgctctcgagcagtttgaagcgaagaaggaggaggccctgctgtcagcttttaaggcagttccggacggctattccacggcagaatacgccctggagcggccggctcagtgcgagaggctgagggagacctttgaaaacctggaaagagagtcaggagagcgcagagagagccgctttgagaggctggaaaagcagcggatcgagtacttaaggcgccatcctggccgccgcttctcgccctccgacagaggaaatgagaagtacgacaaacttttggcggagctttcctgtgaccgcctttcagagtacagggagaaggcggccgagcaggccagaacggcagtggagcactttaaggatgactttatctttaagataagaagcgccatcaaggaggcctaccaccggagagacgagctgaacgagattatcagctcgctggatttcggaaaggataagtaccgttttgtcatcgagaaaaacaggggggctgacggaaagtattacgacatgtttatggatgaggccctggagattaatccggccagtctgagccagaacatggacaaccagatgaatttcttcaccatggcccacgaggaccggtacggggcgatgatgaacgagctcatagacattttcattccgccggatcaggccgccgccagggagcaggaggaggccagaaggcagatggaaaagtatgcagattacagaacctatctttcctttgacatgcagcagattatcgagggggaggagaccatgtacattccattgagccggatgatcaagaaaaactccggcggagaggggcagaaccccttctatgtggcactcttagccagctttgcccaggcctaccgcatcaacctgccggcccggttcagaagaaacacaaccatccgcctggtggtgctggacgaggccttctccaagatggatgcggaaaaggtggcaagctgtatccgcctgatccgcggcctgggcttccaggcgatcatcagcgccaccaacgacaagatccagaactacctggaaaatgtagacaagaccttcgtgtttgcaaatccgggaaaaaagtttatctccattcaggagtttgagaggaaggagttcggggagctggagtaa

SEQ ID NO: 43894 - DNA, 1311 bp, Dorea formicigenerans CAG:28
atgaatgagcagcttgcccgtatgacgttagactggagtgaggagcgctttgatgaggaaggagagcttttgacgcggtcgaacatggcgatgataagtttacggcattttgaagactggggatggcttagacgtgactatgacgaaacactaaacagctatgtagtatctttcccggagtatagtcagttgtatgtggagttgttccgtaatctttatagtgatgaggacagcaaggagcgcgagagtgtgctggcagtgtacagtcacctttatacatatagttcggatcgggagaagaataatgatatcctgaaaagtgcactgcatacgtcaagatccctgcttcagatgttggcaaatatgcaggaagggatgcgcggatattttgatgaattatcgagccagcgaagttttttaggaatccaggaagttcttgtaaaggaaatcaacaatagtgacagccaaaaatatgcgattttgacgacaaccgacagcttttatcgttacaaggaagcggtcaaagagctgatagagaagaatcttggggaaaatgagacaaggcgcgaaggttttgtggaaaagctcatggatattcaagttcagctggcgcgagaggagcaggagaagtctgaagaacgaaatgtgcagaataagctgagcattcagcgttaccgtctggagcgggcagtgaagctctgtgacgaagcgaatgaaatgttgtaccgcatttccagagagtttgatgccattgagcgaagatacaatatgctgattgagcagaagactgtatttgcaagccgggctgctgcgagaatccggtatattttgatggaaggcgcggtcgaggaagatcagacaattgcctttgtaaatcttttgactcagagtgaaaaacgtgatgaaattttggacaagctgtcgcagaaaatgaagctgaccgaaccataccgtgtgatgaatgaaaagagtctgtatcagagacgggaccggaaaaaagaagcatttgtaccgcaggcggtgacagaggtaacagaacaggcagattcggaagaaatgaatgagtatgttctgaagccgctttacacgcagaaggaaatccgagagttccggaaacaaaacgagcaggatggaaactttattgtgacgaaagacacagtaaaatccatggaagatctggaaaagctgtttcttgtttggcaggatgctacggaagttgcggaaggaacggaagagattgaggtcggagaagagcttgagaacgagattggtctgagattctctaagcttgtgattaaaaaatctcagtaa

SEQ ID NO: 43895 - DNA, 645 bp, Dorea formicigenerans CAG:28
atggtaaattatatggaacaattgtctgtgacggagacggagaatctgaagaaaaccatttccgcgctgtttcggcagacatgcattttacaagtaaaatacgatccggtcacgctgacgccgagggataaccttcactatgaaatctgtgtgagacaccggaaatttatagaagactatctgtccgtacttgggtgcgaactggtatacgacccgcaggaacacattttcaggctgacaggggaaggcgtggctgtggaacgtttgaatgtgacggctacgaagatcattcttcttattaaaataatctatcgggataagattctcggggaaggtctgaatgcgactgtgacgaatctggcggagatccgtgagtatggaaagaacacgaatctgatccatgagaagctgactatggcagagtggaaagacgcgctgtatgttatgagcaagcatcagatcatcgaggtgccgggcgcgatccagaacgtagaagatcagacaaagatttacatttacagcacaattaatctgtattgcagtggtgtagatattcaggcattgataaaagaatacgttgatgaggaaggcggtgcagaagttgaagcaggcgaagaagatatttacaagaatgctgatgaataa

SEQ ID NO: 43896 - DNA, 3372 bp, Dorea formicigenerans CAG:28
gtgcagaagttgaagcaggcgaagaagatatttacaagaatgctgatgaataattggggcggtgtcagccacaaggtcatggagttccatgagtatgtgaatctgttcagtggtaagagtggctctggaaaatcaacagttatggatgccattcaagtcgttctgtacggaagtatttccgctacatttttaaataaggcggcggacgatgcgaagaaccgccgaagtgtgctcagttacctgcgaggtgcgcagaaagacggctcttacaatcgtgatggacaggacttctgctctcagatcgtactggagatatttgacaccggaacgaaggtgagcacttgtatcggtgttgcattcgaagttggaaaaaatgataccgatatccggaagtatacatttttcagccactccgggaaaattccggaggacgagtatctgacggagaaaggtgtgccatatacaattgcagcactcagaaagcttgtggaaaagcgggtggattcttcggacaatcgtggacgaggtgatgtgaatcgtctttatccgtcaaaagaggcatatctgaaaacggtttatgatgtgatctttggatatgtggagccggggcgcatgatgaccatggaaaagagtgcgattgcccttcgcatgacaaatggaacgggtcagtttatccgtgattatatgttcccgaagagtaaggaggacacggtttcgaccatcagtgaccagcttggtgcgtaccgtgagatcaaagagcgtgtggaagacctggagaatcggatccatcttctggatgagatcagccggcagaatctggcacttcagacgacgcgtgcggataagatccatgtggaacaggtgttaaaatatattgatattgaaagcttcaagacgaagattgaggcaagaagtcaggatcttatggatatcaatgagaagattcgtaccagagaaaaacagcagaatgagaataatgagaaaaagacacagcttacgaacgcacttgttgaggtagaagcggaactaaaatccagtgattatggtcagaaggagaaggagctgaagagtcttaaggaaaccatcaagcttctggcccgcaacagtgagcagtggcgagaggttgtaaaaggacttgtccgctgggaggaagatgaagagatcagtgcctatgtgagcaatccggcacttcagagaattgatgagatcaagtcgggaaatgtttcaaaggaagcaattgagaagctaaagaaacaactaagtgacgcgctggagagcattaatgaagaagttgatgaaatcggtacaagaatcagtcagaaccgcaaggatttgaaagagaaaaaggaaatggtggaggatctgaaaaacgaccgcaaaccgtaccgaaaagagttgaaacaggcaaggcaggagttacagaaccgtctgagcacacaatatggaagaaccattcacgtcaacattttcgcagacctttttgatattacagatgagaagtggaaaaatgcgattgaaggtcgtatggggcgtgtgaaacacagtcttgtgaccgcaccggagtacgcccttgatgcagcgaaagtatttcgtaagcttcaatatcttggtgggattgatgaagtagatctgttagatacggccgcaattgtgaagtccgagccaaaagttcatgacaattcaatctatgaggctgttcatgcagaagaaccatacgtggaccagtgcctgcgccgttatctcggaagaattgccaaatgcgagacagaggaagaactccgtgcctccggaaatggtgtgacagccgactgctattcctataataattacattttccgtcatctgaagaaaaatgattacgaaaaatatgcctgcattggaacgaaggtttctaaggcaaagcttcatgaaatggaagatgaggttctgaagctgagtgaagaagtattgcaagatcagcagatgcagcaaagcctgaaagcagcccagggatttgagcggctgaaccaaagcacagatcagattctgcatctggccggggcgggagaagaactgcaggcattttacgagaaacaggatcagttggagaaggaactgcgagagcttcgcgaaggaagcagaactgcggaactcaatcagcagaagacagaattagaagtaaaaatccaggaaattgagaagatatctgaacagcttcagaaagaaatactgggctatgccaagacacagggacaggcagagcaggatatcgtgaatttccagaatcgtatggatttcctgatgcagggatttgtactgaatgaagaactgcagactgaagtccaggaagcattaaagatacaatctgagcagacataccgacgtaagaaaagtaaagaatctgaagagctgatgaagcaggaagaggaagtacgtgatcttctgacccgtgcgagaaatcagttcaatcaggcatatccatcctatggcctgacaggtgtagaacacgaaaatgtttcttatgacaggattttgaatcaatgcagacaggactttgagccgaagtataaagatgaatttcagaaacagtatgatctgatctaccatacgcttcgtgaaaatgtaatcgcgacgatccacggtgaaatcaaagcggcataccgtcacaggaaagaaatcaatcgtatgctggcaaagattaaattttctgacagtatttaccagattgatattcttccggcagaaaatgaaaatggacagttctatgagatgctgatggcaccggaattggacagcaaagtgctggacgatgatggcttcgacggacagatcacgcttggcgaagacacattttatcagaagtacgagcaacagatcctgcgcctgacagagaaattcatgcctccgaaagacgaagatgccaagtccttaagccagcatcgtcagcagatggagcagtacgtggattaccggaattatctgaccttcagtatgtacgaacgagtggaagatgaagatggaaatgtgaaaaaaaatgcggtcgatgacatggcagggcgtgattccggaggagaaggacaaaatccgaaatatgtagcacttctggctggatttgcaatgctttatatgcagcagacaaaccgcgattccaagataagactggtacttttggatgaagcattttccaaaatggacaaagaacgaagcgaagtctgcctgcactacgcaagagaactggaattacagttgattgtgtgcgtaccggacgagcggctgcagtccttgatccgaaatgtggacagtgtgtacggatttagaagatatcagaatcaggtaagtatgatgcatatcgataaaggagaatatctggatatgattgaggggaagatttga

SEQ ID NO: 43897 - DNA, 1464 bp, Bacteroides sp. CAG:702
atggcgttacaaactgaagtgttatccgaaatcctgcgaacttcgccttgcgtggaactgctccgcttgcgcaaccggcaactgattatcctatttcttttcaaaatgttctatcataggcagaccgccgtgcctttcgaatccttacgcatgcaactggccgactacctgagcgctgtacgactagaacaggacgaagaaagcggcatcacagaattcgattcattcgaggaaaaggcaggcaaatacatccaacggtggaccgacaaaggattcttgcgcaactatcaggaagaaacaggtgaagtattttacgagctatcactctataccagcaaaaccatcgactggctgctgagcctgaaacgtgaggaattcgtgggcacggaatcgaaattcatgaatctcttcggacaactgaaggaactggtagagtttaccaacgaagacaaggaagagcgcatacggatgctggaagagaaaaagcgcgagatagaacaccaaattcagtccatccgtgcaggaggtgacgcacagatattcgaggaataccagatattgcctcgcttcaagcaaatcagccagtcggcaaaagaattgctttccgacttcaaagaggtagaagaaaactttaaaagcattaccaaggacatctaccgccgacatgccgatggagcatattcaaaaggtgacatcctgggctttaccttcgatgccttggcaaacctacaacagagtccgcaaggcaaaagcttttatgccttttgggatttcctgctgaccccttcattacaacacacatgggatgaactggtagaacacctctacgacacgctggacgacaagcggttggaggtgaacgacaccttcctgaaaaatatgaagcaatacctctattccgccgggaaaaaagtatatcaggcaaatgacaagatggcagagaaactaagccgcatcatctgcgaaaacggaacgatacctaccattgccacccaacgggtgataaccgacatccagtcgtccctgttagcattggcacaaaaaggcatcacgcccgatgtatcgctggaagtagaaacactacctgatatcaatatgcctctggaacggaaactcaccttggaacgaaacgtagaagtcatctatcgacaagcattggaaatggcaagttcggacatcagcgaagcccattcggcagagaacctgttcgtgcaaaaccgtatagaccgacgcacattgaaacaacacattcagcatgccttgcgacacaagcgtcagactacattaggcgatgtcatccaggaaaacggtggcttacagcagggtttgtcggaattattcggctacatcagtgtaatacgcgatttccggcatatcatccatgccgagcggacacagaccgtaacgttcgacgaaacacagcacaaagcaattgttattccagaaatcattgtcgtgcgatga

SEQ ID NO: 43898 - DNA, 576 bp, Bacteroides sp. CAG:702
atgaacttagaatcttacatctccccatacgcacgggcagtggtctgcctgttgaaaggtccggtaaataccaccgaccgatgctggaacgacctgttacattaccagacagaaatccagaaatatatttcacaaatcgggctggaactgattgtaaaacgcgacgaaggattcgcttacctgaaacagatgaccgacgagagtggcaataccctgggactggtgccccgcaagccgctggggttcgaatgttcagtgctcgccatcatcctccgcgaggtgctcgaagaattcgacagcaaccttgacgaactatataccaccgcatgctacatcaccggcaaggaactgaaagaacgcatcgaactgttcctccccgaacgcttcaaccgtgtcaagctcttaaacgaacttgactcgtacatcgcccgtatggtgcaactggggttcctgatagaaagagagcaagaagggcgtaccttttatcaaatccaccgcattatcaaagaaaaggtcacactcgaccaattggtagaatttaaaaagaaactcgaaagctatgttgaatctgtttag

SEQ ID NO: 43899 - DNA, 3405 bp, Bacteroides sp. CAG:702
atgttgaatctgtttagtacatcttcggatacggcggggttccgcctcgactatatggaaatctataactggggcacattccacgaacgcatcttccgacttgccccacaaggcaacaatgccttgcttaccggagccaatgcttcgggcaaaagcaccatcatcgatgcgttgctcactttactggtgccagctaagaaagaccgtttctataatcagtcttcgggcgtggaaaagaaagggaaccgtaccgaagaaacctatgtactgggacattacggtaatatacagaaggaaggcgaacggggagtcaccacgcaagccttgcgtgacaaaagcgcctactcggtgctgctcgcctcgttttcgaatacagaccagcgggtagttaccatcttccaggtgcgctggttctcgggtggagaactgagacgtagtttcgggcttgcccatgtccccctggaaatacaaaaagactttcagcccttcgatggcaaaggtgtatggcggcgcaggctggaggcatcctacaaaggagcacgcacgctggttgagttcttcgacggaccagtaggctatgccgagcgcatcacccaactgttcggtatgcgttcggtcaaggcactgagcctgttcaaccagattgtgggcgtgaaagtgcttgacgacctcgatgaatttatccgcatcaatatgctggaagaacacgatgccgaatcccagtacctacaactgaaagatagttttactaccctgatagacgccaaagtcaacattgagaaagcacgcacccaaatagagatgctccagccgatagccagcctggcatcccaaatagaaagtgccgacgaacggcttcaccagctgatgaccgacaaagacacagctgtctattggtttgccaaacaactgatagaccttgccaaggagaaactcgatgtggcaatgaaggaaaaagaaaaactggaaaccgaaatcgcacacctgcgccagcgtgaagaaaaactgaaacaggaagaacgcacactctcgcttgccatcgagaaagacgaagtcggacgtaaactgaaagaattggaaaccgacatcgaacgcctctcaaaagtgcgcaacgagcgaatggcatcaatggacacttacaacgaacttgccagcaaatccgggttctcacccaaccccgacgaaaagaccttcaatgcccagcgggcccaggctgcacaacagattgaagaatggacggaaaccaaggaaacatgtatccgaaaacaagtccagacagaaaatgaacaaaaaaaactggcacagcaggtagaagagctggtacacacagtagaaatgctccagaaaaacaagaacaacattcccttacgcgaaaccgaaatccgtgacgccattttagcgcatacaggagcttcgaaagaagaaattcctttcgttggcgaattatgccgggtggctgaagacgaaaaagaatgggaaatagcactggaaaaaatcctgcaccacttcgcactccaccttattgtgcccgacaaatattaccatcaggtcaacgaatacgtaaataccaccaacttgaaaggacgggtgatgttctaccgctatacgccctcaggttcgcttgccggtatgcagacgtaccagctttccgctggcgaagaaggacaagtcatcgacaaaattgaaatccgtcccgatagcgaatacgaagaatgggtgcgcgacatgattctggaaaaatacaactacacatgtgccgatacactgtccgcattcgagcgttaccgagaaaaagtggttacccgcgaaggactggtcaaatttgccggcgaacgccacgagaaagacgatcgtccacacatcttgcgccgtgagaattttgtcctgggctgggagaataaagaaaagatacgtctcttgcaacaagaattgctccaacttcaggaacaggacgccacgcttgcacgagagatagaccgcatccggcaagaagctgcagaaggagaagcccggtgtgccttgcaccgccgattggtagacttattccctgacttcaagaaaatagactggcaaagcttcgtaggcgaaatccaacgcaaacaggaagaaaaagaagccttggaaaaagggaatgaccatctgcacaccctccagacacaattggaaaatgtacacgaagaacagcaccgcctctcggtgactgacattccggaacacacccggaaaatgattcatgccgaataccgcatcgaacagttgcaacgggaaatagacgaaaaccaacgggtaatttcgtccatccggtcattactcttcactgatttcgaaaagaattatgcctacttgtgcgaactttcttacgaccaattgaaacaagagcgcggcaagttccaggcaaagaatgaacgtgagcgcaaaaaactggaaacggaaaaacgcggatacgaagacgaggcaaaagtgaaaattaccgccttcaagcatcccgatgaggatatcctcacccgtttcaaagactggcgtgccgatgtagacactttgcctgatgccactcatatcgaactgatagacgcctaccggcaaatgctggaaaggctggaaaaagaaaacctgcccaagtacgaaaagcaattcgacggctatctgcaaaagacactcaccgataaagtgggcgagttccggatgttcttcatcaactggatgcataccatcaagagcaacatcgatatgctcaatgactcgttgaaagccatcgattaccggatgcgtcccgttacctacatccagcttaccgcccttacacaaatcagtgaagaagccagcgagttcagacggcttatggacgaagcggttccgaatgtacagaaaatcaatgccacatccgacggcaggcgaatacacttctacgaacacgtagaaccgtttatgagccgtctggcagacgaggaatggcgagccaaagtaatggacgtacgcttctggttcacctacaaagcagaagaattcaaccgccagaacggacacaaggaaaccacctatgagaatatgggacacctttcgggaggagaaaaagcgcagctgacgtataccatcctcggttccgccattgcctaccagttcggacttaccaaaagtggattgcaaagtgattcgttccggttcgtggcaatcgacgaggcattcaaggcacaggacgaagacaaggcacgctacctcatcaccctgtgcaagcaactccatctccaactccttgtagtgacgcccaacgacaacatccatattgtggaaaacgatatctcgtacgtctatttcgtagaacgcaaagaggagaaaacctcctggctctatagcatgccgatagaacaatggaaacgcgagacccacgaacaaccaagtaggacctga

SEQ ID NO: 43900 - DNA, 1431 bp, Roseburia sp. CAG:380
atgttactatttgacaatccggggtatgaccgtttttttaatccgctttgctgtcaaaataaacgaatttattacgaatgtattttgcaactcattgaaaaatccaaacaggtctctcttctctatgaaaatgatgccagagatacgctgacactttattttcgcaatctgatgtatgcggttgaggatgaggacaacagcggttcagcagatgaaaatatcagcagtaagaaatcagaggtggaaaatgcaagtgcagttcttcgatattttcgacattgtggatggatttccgaacgggagcttggaagaaccggtgacaatattgcgacggtaatgccgtattgtcggaaaatgatcgatgcgatagaacgtatttttaaccgggacaacagtgcagctttgacaaatcagatttttgcgatatacgatgttttgcgctctgcatttacggaaggacatgggcgaaatgtacgaccatattcgaatattttaacaccggtttctgacagtgttgcggatctgaagaatgaactgttaatattaaaagatagtatccgatctattatgcggatagtgatcaagatgacggagacaaatgagctgggtcagtttttgatccgggatgaaatgatggagaaattcttcaatgattatttctttatcaaaaaggatggactgatcccgggatatattgatgagattgaaaaaatgctgcggtctgttgtgaagacagatgtatatgaaaatatgatacgggaatatcaggaactgcatgatgtaacgcagattcaggcacgtgaagccgtggagaatcaatttgatgagatcaagagctttatcagctatgattatgtgaaagaaatggattatatcgataagaagatcaataattattataatttgtattcgacaagaattttgatggttctcagtaataatgtgaatatgcagagttatctgaataatctgctcatgaccatgaaaaatatggatccggaggagaaaggagaagcattgcggcatatttcaaaatgttttatgctggaatcgcacaaatatgtcggacgcaggtctatcgaaagaagaaagaagagaaatccaaacacaaaaagcgcagcggtggtacaaagtaccatgacggatgaggaaagagcacgtctgacagaggaattgttacataaacaaccggagcgttatggtgctgaccgggcagcagaatattttgaccgtattctgggggctgaacaaagttttgttcctgacagtgaaacggtgaaaacaagagaggacgcaatgatggttgcggcaagcattatttattccggctcggcagagtttccgtatgaagtggaattccttggaggaactgtcgagacgtctgcagcaacgatcagcagcataagaataaagaggaaaaacaatgagtga

SEQ ID NO: 43901 - DNA, 624 bp, Roseburia sp. CAG:380
atgagtgatatcagattaaatctttccattaaagaagaaaacaatatacttttcaagcgatgcatacgaaaattactggattcaacatttattgtcggagataaagacgaaaaattatattcgtttatttccagagaatctaatcgacaggatatatccgattatcttcggatgatagggtttgacgtgcttgtggatacaaatgtgcgggtagcgatgttgaaacctcatgagtcggatgaggagacggttggcttgaagcgtgccaatgttgtaagctttacaacggagcagtatcatattttgcttgttctctgggaaatctacctggaaaatctcgggtatcaggatgaaaatgtagtgcttaagggtgacctggttgacaaattgaaagcatacgaggtggatgccgataagaaggatttgtcagtggctctgaagattttcaaaaagtataatttgattgattatgatccaaaggacaattcggaggatgccattattacactttatccttccctgcagtttggatggaatctggagcagtttaaaaccgtaaccgaagaatacatgaaaaataatgcggatgaaaatgacgatacggatggggaggaagaagaatga

SEQ ID NO: 43902 - DNA, 3300 bp, Roseburia sp. CAG:380
atgatcgagctttcaatggtaagactgattaactggtatgcgtttaataatataactgctccctttggtaaatttactctggttgcaggccggaacggaaacggaaaatctgtcctgttggatgcgatcaagtatgcgctttatggagatacggtttttaataaatctacagagaataaaggaagccgtaccgtcacatcatataccagaggattgttagacgcgacggcaggttcttatatgagaccggcagataaggttccgaatgtttacacacatattgttctggaaatgcatgaaaaggaacttgatcgatatttcattctcggaacggtgatcgagaccaattccgggaatggatttgtgacacagcgatatgtgatagaaggaaaacgtcttagcgaacttgagcacacttatgcggaaggatcatcactcctggtttacagtgcttcacagctccagaaaaaatatggatttaaactgatgtccgtaacagagggacttggaaagtttatgcagcgtacaggactgcggttaaatgaggggcagcttgcagcattccggcgcaaactgcgaagtgtgatgtcttatgatccggacgcgaagatagatcagtttatccgggaatgtgttctggaagaaaagaaagtggatttttcgaaattaatagaaacgaaaaacaacattgatacactgacagtaacatttgaggcgattgatggagaaatcaatgaactggaaaatattttgtcgttgtttgatgaatccaagcgcaaggataatattatttttgcagacgatgtcaagattgcttatcgaaaatttctgaaatatcaggaacaaatggaaacggcggagcgtgcaatggatatcgctggaaaacagattgaggaagacacgaaaagactgaaattcattgaggaaaaagaaggaaagacctcttttgcattacatgaggcagagtttaaccgggatcagatggactgttccaaggcaattcgtgatgcggaggatgcattaaaggaggcagataaaagaaaggagagtcttgctgctgaaaagaaaatgcttttagagcagcagaacaggatcagtgagttgatcaactggtgttatgaagaggaaaagaaaatcgaagataaagaaattctttcgtctttaacactggacacttataccggaccgcaaaaagaaaattcagtggagcattttgctgcatttttaagagaatacagagatacgatcttaggagagatgacaaggatccgggacattatccgggagaatgatgagaaacagagaaagtgccggcagataatagatgactgcaatgcgaaaaagacaacattttcggaaattccggactgggtttcgttaaaggaacagatcaacagagagtttcagaaaagaggaattgcatcagaagcacgcttcgcctgtgaatatgtaatcggtctttctgatgaggactggcgcgataccatagagggatatctgggacagcgcagatatacaattcttgtggaaccggaatattatgatctggcggatgatattttaaacgcatcccgaaatagatatgcacatttgtttaacacaaagctcctgatggaaaagaatattagtccggtggaagattctgttgcaaactttatcgaagtcagaaatccggttgccagacaatattttgattatcagctgggacgttttcatgcaacgacgatcgaacaggtacggaagtttgaaaatgcgatgtccaaagagggaagagtggctgttgccatggatggatattttattcggaaagatcgtattcgatattattatcttggtcaggagacaattgaattaaaccgccgcaaagcagaaaagaagttgagttcgttgaaggaagaacagcgggagcatcgggaagaacttgagggaaaaacagcgaaaaaatcttatctggatacacagctttccttgttgacgacatgtaattataatgcgtgtcaggaatatgaaacagcattggcagagtatggaaagaaagagtcggagcttcaggaactggtggatgcccagaagaataatatggagtatcttcgtctggcacagacagtgtctgatctggagcaggagcttgctgcaatccggaaggaaatcagcgatgtgagggctgacatgagccaccaggagacagaatacaacacgaatgagaaggattatcaaattgcagaagaaaatatcggacaggcacagacagccttacaggagtatcgactgcaaaatggtgtgatttgtgataaagccattcgggattatgaacaatatctggaaaatggatatagcgggcagggaggaacgttgaaggatcgtccaagagccgagcggctgcaaagagaagtacgagacaatctgaaagaggcacagtatagatataatgccgtgcggactgcagagaatcaattgccggtcactgaggattcgcaggcatcttatcagggcaggaaagataagatttggatggatgatcgacaggagatccaggaaaaattaaaggagcagaccggaagatatgaagcgatatttaagaatgaatttgtgttgactgtattgaaatcctgcgaagcggcgagatcggatctgaagctgatcaatgcggaactggcaagacttgattttaaatctgtttatgaatttgatgtccgctatattagggacggctcagattatgagaaaatccttgagtatgcaagatatctgaaggaacgggaagaacttgggacggcggatggtcagatgacgttcgatacgatgacatcctattcgaatgacagaggagacgaattggaaaatgaaatgaaaaaaatcattaatcggattgtttccagtgatgataaggagaaaatcgagcgttatgcagattatcgaaattatatgaattatgagattttggtatccaatgatgttttgaataaggcgaaattgtcaaagcagtccggctttaattcaggcgcagaggtacagataccatatattctgattctgttatccgcattgttgatgatatataatgacaaaaacaattcaaccaggctggttttcattgatgagccatttgcgaaaatggatccggtcaatgttaagatcatgctcggttttatgaaggagcagaagctgcagatggtgttctgtgctccggataagacagatgtcatcggagatgaatgtaatgtgatcctgcctgtgctgcgcaagcagcaggatctgatggaaattggaatcgtggaaatgcatgaaaacaaagcctga

SEQ ID NO: 43903 - DNA, 1254 bp, Roseburia sp. CAG:380
gtggattacggatatgagaagaagctgcttgtcgggctggtagaaggatatcgcaaaagtaagaaggacacgggagaaaaccggaccaaccggcgaacaaaactcaaaccggagaaattatataataaatatcattccaatgccggtgactatgagaaaatctcagcgatcaatgatacggttcaaaagctcaaggataagggatttgttacatcagaatacgaaagctttggaacagatctgaccggaatttatctggtggatgacaagattgatgaaattgaagaatatctggcagagcagtatggatatgtttcaaaagatacaaagctgcaaaagcttgaaacattgatcagggagtatgaggaccgctcgccgatctgtcatgaagaatgcggtaaattaaaaataatactggaaagcaggaagctccctaaaagtattgagaaaagtatagagatgctggatgatctgttccgggttcttagctttgtggaaaacaatcaaaagctaatgtatatccgtgaagtatccatgttagtgtacggtgactccaagtattttgaaaataacacactggagccgttgtgtactcttttgcagaaatataatactgtaccaattcccggacagacattatcagacggagaatatatattgtcagatgagattttgaaaaaatatcatgtatttaaagaaccacagaaaatatccattcgcggcaaggcgttgatacgaatgtgcgggaaagatattgacattagtgaatttgatgagggaatcgaatttacagtttctgaattatctaagatagaatgtgtgcagcttcttgccacgacatttatgacgattgagaacagaacatcgtatctcaggtataagaaagaaaatacagtgacattctatctgggaggctatgcgaatcgggatcaaagagatttcatcaggaagatatatgaaagtaatccgagtgttacatacctgcatttcggggatattgatgcaggagggttctggatacatcaccatctgtgtcaggtgaccggtgtgccgtttggaatgtttcatatgtcctttgaagagctgatggagccggattatcgtaaatgccagcatccgcttacagaaggagatattacacggatgcaggagctggcagtaatgccggaatacagggatgtaataaaatacatgctggaacacagagtgaagctggaacaggaaattatcagtttgaaattaatggaagtgtaa

SEQ ID NO: 43904 - DNA, 1353 bp, Coprobacillus sp. CAG:235
atggttaatatatttgatacattaccaagaaacttttttaatatatttaatacagctgatcgtgttgttatcagtgaatgtatttgtgttctttatgagtatattaaggatgatgcatcctttgcatctttaaaagaaaacttgatttatgagttaacaaaatattttagtagtcacttaattgaacttgaagaacttcaaagtcaatcgccaagagaacgtgctttttatgtttatcgaagattaaaagaatgtggttggttgagtgaagaagtaggggaaaactatcatgtgtatgctagttttgaagattatgctattagtatcattgaaacattaataaatttagaagaagatcgtgatattgagtattcaagtatggtttatagtatttattcgcagtttaaaaattttgatattgaaaatggacataagattcttgatgcacaatatagtatgacaaaaagcttaatgacaaaattaaaaaatttgaatacaaatattaagcgttatatcaaacgtcttgttcaagataatatgaaaaatgatttaaatcaaattttagattctttattaagtgattatcaattaaagatagtagatcgtgctttttataatctaacaactaaagatcatcctttaaaatatcgtaatagtatcatttctcaaattcaaaaaatccaagatgatcaagcaacatctgaaacgattataggaaatatcatgctttctaaagatttaacttatcaagaggcaatggatttgttttataaacaaacatcttatattattgatgcctttgaaagtattttagatttaattaatgaaatcaatcgtaaaaatgaaaagtttgttgcttcagcaacaaatcgtattatgtttttaatgaatgtaaaagaagatattggtggaaaaatcaatgacatcattaaagaagggcaagaatgtccagaagtgtttgatcaagtagcaacgatttcaattaataaatacttagatcaaaattctttatatttaccacgacaaataaaaaaagttaaaaatacggatttgattttagatacacaattagatgaacaaacacgtttaatggcgattgaaaaactaaaacaaaatgaaaaatatacaaaaacagccattgaaaaaaatgttttacaatgtttggatcaacaagaaacaatattgggttcaaattattatgatcaaaataaagatttatctttatttattttgacatggctttatggttatagtcaaaatgctcgatataaaatagaatcacaagaaaatattataaagaaagatcattatcaatttagagaatttataataaggagagttgaagatgaataa

SEQ ID NO: 43905 - DNA, 639 bp, Coprobacillus sp. CAG:235
atgaataaaaatgaactgatgaaaaatatgtcacaggcatatttgttattatctgaaaaaagaaaagaagaattttcacgtattttaaatcgattattagcggttaattttatttgtggtggaagaaaaagagatcgcgaagattattattttattagtgaaaatgaacaactatttaaagattttttaatgatgcttgattatgattttcatttatataaagcagaccgtgtaatctatatccataatttaaataattacaatcatttaaatcttaatcaaatgcaaacaattgttttattgttacttagaaaactttattttcaaaaatcacaagagttacaagatactgaatttattcatatttcccttggggaacttcatagtgaaatagaagcaactggtatttataacgaacgtctaaaaaagacagatttaaaaaatatctatcatttcttgtcaagatataatatatgtgaacgtattggtgatttaaacgaagatgatacacgtttaattatttatccaacaattaattatattttaccaattcaaaaaatagatgaaatcaatcaacgtattcaacaatataaaaaaggagatcacgatgaaaacattaacgaaagtgaaactgattaa

SEQ ID NO: 43906 - DNA, 3243 bp, Coprobacillus sp. CAG:235
atgaaaacattaacgaaagtgaaactgattaattggcatactttttctaatgaagaatttgaaatctataaaaatgccttaattactggagaaaatggaacagggaaatctacaattttagatgcgattcaatatgttttaactgctggtaaatgtaaatttaataaagcagcaagtgatattgggaatcgtacattagagtcctatattcgttgtaaaacagggattgaaggacatgaatttgctagaaatggtgatgtgacaacttatattgcattagagttttatgatgaaaaaacagaaaaatatcaaattattggaactgttattgatttaccagctggtggaagattaaatagagatttttttcaaattattgattgtaaaatcagcgatgtagcatttattgaagaaagaagagttttgacgagaaaagaatttaaaaaagctttaattgatcatcaacaaacaggtatttttaaagatacaattaaagaaggagaaagtttatttggaaatgctttaggtgttaaaagtaaatattttgatttagtaacgagagcacttgcttttaaagcgattgataatgtttatcaattcattgttgactttttattaaaagaagactttgttgatattcaaaatttaagagacagtatcaaacactataaagttcttgaagaaaaattaaaaatatctaaaaaagaatgtgaatcattagaaggtgttgtaagtcaatatgacacttatttagatacgcactttcaaatggatgttttagaatgtttaaaagaaaaattacaagaaaagcaattacaagctattattgataatagtcaaaagaaatatcaaaaaataaatgatcaactcaattttgtacaacaaaaacttacacaattaaatcaagatgaagaaacttatcaagaaagatatcatcgtttagatgaatcattaagagaaaacgaaacctataacttaaaaaatgaattacaaaaagaaagtgaacaactcaaaaaagaaaaagaaaaaaaagaaaacagttatcaaactcttataacagaaattaaacaagaaatacaattattaaagaaagtaaaaataccaaatagttatatccaaattcttcaaaatcaagattatcaaacagaaacattgacacatgcatttagaaatattgtagaagaagtttctaaaagaacaaaggatgttactgaaaaaatatcacatttaaaaattgaaatgacacaaacagttgatcgttttaatgaatattgtaaagaatatgattctcttaaagaaaatcaactttattatagaaaagaaattcaagaattaattcaattattaaatgaaaaacttacaagtcattatggaaaaacaattgaagttaaaccattatgtgaatatattgaagttaaagatgaaaaatggcgaaatgcattagaaggatatcttaatagtcaaagatttgatttaattattgaaccagaatattttgaatatgcattacttgtttatgaagaatataaaaataaaagaggtatatatggtgtaggaattgttgatgttgcgaaaatgtcaagatatgaagatgtggatgttaaagacacacttgcaagtcaattagattgtaaaaatacatatgctagatggtatgtcaacatgttgctttctaaagtacaatgtgtcgatgatgttacacaacttagaaattatgctacagcgattacgccaacatgtatgctttataaaaattatacagcacgtgcaatcaatccacgtatttacaataaaccatacattggattaggtgctattaaaattcaattagcgacaattgaacaagaattggaaaacctaaaacaagaaatcaaattacaaaaagcaaattatgaagatttaaaaaatggtcaagcattattaaatcaatccaaagcagatcatatcttctatcgcttagatttaattgatgaatatcataatttactaaaagaatatcaagaaattaatgatcgctatgaaaaattaattttagatgattcacttatttctttacaagaagaatgtgatgcagtaaaaaaacaacttgaaaaaacaaaaagagaaaaagaagactcacttatgaaaaaaggaagtcttgaaaataatctagaaacatttaaagaacaacttgaacaaactcaagaagaatatcaattattacatgaaaaaatagttcaatttgaaatggagcatgttgatgttactcaagtagctgatcaacaagtcgttatttatttaaaacgtttttctaaagattttaatggtatgaaaaatgatattgaacaacaaggaaatggttatcaacgaaaggcaaaccaaattgaaaatcaaatagtcatgaaaatgaaagattataatgatgattataatattggttttgaaaatgctttaacagatattgaaagttataaacaaagataccatcaattaaaggagatggatattgtttctaaagaagaaaaaacaagacaagcaaaacttaaatgcgaggaatcttttaaaacatcttttatttctggattaaatgaaaaaattgaaaatgcaaaaaaagatattgctgaattaaataaaggattagcacaaagagattttaatggtgaaacctatgaattctgtgtttcaccaacttcaagagatgattttaaagaatactataagatcatccaatcaggaaaagaatatatggtgaataatcttttatctgaaacattaagtgaaagtcaaagaagaattatggatgatttatttattaaattatcttctgtagaaaatgatcaagaaactgaacaaatgctcatggaatatacagattatcgaaattatttagattatgatataaaaattaaatatgcaagtggagattatgcatatttttctaaagtcaataaagaaaaatctggtggagaaacacaaacaccattctatgtcattatggcagcaagttttgaacaagttattcgtaatagaaatcaaaatgaggattttggttgtgttgttatttttgacgaagcatttaataatatggatgaacaaagaatacaagaaatgattaagttctataatgaacgtgaaatacaaacatttattgctgtaccaccatcaagagcaagtacaattattccttatgttaatacaagattgcttgtcattaaacagggacaacaatcttttgtagaaggttttaaagatgaacaattatag

SEQ ID NO: 43907 - DNA, 1218 bp, Coprobacillus sp. CAG:235
atgaacaattatagaaatgaaatcttaaatgagtttattgatcgttatgaaaaaagtagttattataaaggaaaaagtgaaaaaccaagaaagatttctattgttttgcataaaaagtttcctgaatatggacatagctttcattatgaagaaacaaatgaattagaaaatattgtttttcaattacaatctcaaggatttgttgaattttctaaaaagagcattttaggagatagagaactcattttaaatcaagaagaaaattgtcttgatcgaatttataaagaattaaaaagagtaccagttaaagagaaaataattcattatgtaaaattacttgatcaatattatgaagagacatttattaaagattttgttgatgaaatgaaaaaaagggcgattcatcaacaaagtcttttgccttatttaaaagtttatgatgaaaatgatttagaaaatgttatgaaaatattaaaaggaatgattgatcaaaaagatgaaatctcttttagaagattttctgaaaaagtattgggtgatacaaaaaagttagaaaagtataaaaataaaattgttcatattattaaagatttttatgatgatacattagataatgaaaatgatatttttgaagcgttttatatcagaaaaaatccagcgtatgtttatttaaaagggaatgctattttacaaatcaatggacaaatcattaatttgaatgaaatgcattattactttgtcttaccgagtatttgtatcaaagatttaaaaataaaaagaattgatgcaaaacaggtgatgactatcgaaaatttaacatcttttcacgatgtatctttaaatgacactttctatatttttacaaatggttttcataatcatgcaattgaagcatttttaaaatgtctttatgattttttaggagaaagcgttcattattttcattttggtgatattgatgcaggtggcttccatatctatgaatctttaataaaaaaaacgcaaattccttttcaaatgtataaaatgaatatagagatgttaaagaaatacaaggattatacaaagcctttaactcaaaatgatcgaaagagattgttatcgtttaaagaaaatcaaaatgaattgattgattatatgttaaaaaataatgtcaagttagaacaagaaataataggagaaaatgagaatgaaagaaaagacattaacacgtattag

SEQ ID NO: 43908 - DNA, 1395 bp, Firmicutes bacterium CAG:631
atgtttgagaccttacctccatctttttttaatttattagtatctaaaaatagagatttatatatatcggctctatttgttttgcgtcgggccattcgacaagatttatatttgacaagagacgatcttgttcgtagaattacaatctctttggaagaaaaaattaaagaggctcatttagatgaagaagatcaagtggatcaagaagatttagaaaatacaacaagtaaagcctattttattatccgaaaattacgtgactatggttggattaatattgatttcaatgctaaaaattcatttgaagaatatattgccgtacccgcttatgcaagtatgggaattaattttttgtatgctttatctgaaggtgcagaaacagaatataattcaatggtatatagtgtttatgctgctttaaaaatggccgatacagaaaataatgattattataatgcgttacaatcggcctataaaaatacagaacggttaaacgaatctttatctaatctttattatggtgttcgtagtattgaacaacgaattgctgaaaatattgatattaatgatgtcgttcgcattcactttactgaatatattgaaaaattacatgataaattttatcatccttataaaacatttgactccattcaacgttatcgtatgccgattataaaaatgctgaaaaactggcaaaatgattcttcgattcgtaaaaaaatgattgaacttggaaaaacaaaaaaaccagatatgaataatacggagttgtttgaatatattacaagtctttatcaatatatcctgcaaacttatgaaaatatcgaagaaaaaatggatattatagataaaaagatttttgattatacggcttcttctatcgataaaatgaagcatttaattagtattgatgaaagttataaaggaagaattacttatttaattaaagaattaaatgatcataaagaagatagcgaagaacttgttgatatcattcaagatttctttgatttatctactttagaatatgcgcatcaagaagggctttatacaaaacgtgaaataacaattaatcctgatattccagttattgaaatttttactgaagaaaaaactggagaggatgtcaatgaaatttttgataagatacggcaaggatataatttaagcaaaattaaggagtttattgtcagccatgctgaaaataaaaaaattgtaaccatggaagatttaaatatcaaagatgacgaagattttattttatctattcttgctatgttacgtggcgatgaaaaagaattgccatttaaagtagaatttgatgaagggtatttaaagattaggaattatctcgttccaaatatcaaatttattatgaaagaagggcaacgctaa

SEQ ID NO: 43909 - DNA, 660 bp, Firmicutes bacterium CAG:631
atgtttgaagaagaatttgaaaaactatatgaaagtgaaaaagaagaatttaaacgagtttgtaattatcttctttcaaaaacctttgtattaagagatgtatatgataaacaacaaaaaagaatgattacttctccagaatttttatttatggaaaaatattatgacatttttgaaaattacttaagttattctggatggaatttaaccaaagatcctatcaatggaatatataaagtggagaatatttatggctataataaagctaaatttgattcctttacaacttatattttattggctttgatgcttacctatgaagaacaagcacccattacaacaatgggcaatagtgtgattacaaccccttatgatattgctacaaaaatgcaaattttagggttgattcaaaaaagaccttcaaaagaatcctttagaatatctttccggagattggaacagtttaatttgattttacgtttgaatacttcccaagatttagatgcttggaaaattatgattatgccaacgattaatcatatcgttacatatgataaaatgaaagaactttgtgaatatattccaacgattttaaaagaaaaatatgaaaaaaaatctgaagatcaagaaatgttagaaatggagggtgcgctttcatga

SEQ ID NO: 43910 - DNA, 3381 bp, Firmicutes bacterium CAG:631
atgaaattactaaaaaaagttttactcattaactggcactcctttagcaaagaattaattgaagttgggaatatcaatttcttaacagggaaaaacgcggttgggaaatcaacgattgttgacgccattcaattagtcattttagctgatacgagaggaacatcctttaataaagcagcaagtgaaaaatctggacgtacggtcattagttatttaaaaggtgaaattggcggagatgagcaaggcaataagcgttatatgcgggatggggaattttcttcttatgttgctttggagttttatgatgatcaaaaagatgaaccttttgttatcggcttacaatttgatgttattggagataaattagtatcacatcaatttatatatgatggtgctattcctgaacaatgctttattttaaataatcgtgcaatgccgtttaagatttttaaagaatatgttacttctgaatttagaaatgtcattttaccagattctttatccacttataaagaagaaatgcgtaaaaaattgggacatttaagtcaacgcttttttgcattatttaaaaaagcggttccttttcaacctatttatgatattcgaaaatttattacagaattcgtttgtgatgtcaaatatgatatcaaaggcgatttagaaaagatgcaagaaaacattcgaaattatacttctttagaagttgaatcgaaattaattgaaaaaaagatctatcatttacaacgtattcatgaatattatgaaagttatgcagcagacaaaaataaatgtgaacaagcgaattatttagttgcaaaattagaaattgcaaagaagagaaaagatattgcgaatctcaatgaagaaattaaaaaacatcaacggcgatttgatgatttaggagttgaagaagtcgctttgactcaaaatgttgaaagctggagtaaagttcgtgaccaattaattgttgaaagagataatagtgattctaaaaataaacatgaaaaatatggtaaacaaaaagaagatatcaaaaaagaaattgatatgattacagatgtttttagtcgttctgcaactcgtttgattaatactttccaagaatttattcaaaaagcggaacaaattaaagaatacacatttgatccagaagtggctaatcttgctaaagttgatttggatttattttatgcaaaagcggatcaagttattgaaaaggcaagtgttttgaccaaactaaatgcggataacttaaataaatataatgaacatcaagttattgaattgacacaaaatgtagcttctttagaagatgatttcatgaaaatgcataatgtagtagaagcaacaaaacaaacttatatcgatcaaagagatcgttgcttgaatacaattgaaactttaagaaatgggaaaaagagttatccaactcatttgattgaatttaaagaatttattgaagaaaaactatatgagatgcatcatgaaaatatcgaattaaactttgttgcggaccttatggaaatcaaaaataaaaaatggcaacaagctttagaatgctatttaagtgcgcaaaagttttcttttgttgtcgatagtcgttattttaaagatgcaattacgatttataatcaaaaccgacatttattttccgatgtatcgattattgataccgaaaaaatttatcaaagagcaccttttaaagttttaaatcaatcattagctactgaaattgaaaccgataacaaatatgtacgtgcctatattgattatttaattggtactttaattaaagtagaaaatattgaagatttaaatcaatatgatcgagcaattactccatcatgcatgctttatcaacaattcagtgctagacaattaaatgtcaatcgttcacgcacaccttatattggtaaaaaagcaacgcaaactcaaattgaagcttatgcattagaggcagatgaattagtccaaaaaattgcaaaggaacaagaaaaagaacaaatctttttatctgttggtaaattgaataatttatcgattgtggatattaattaccattttggtaatttaaaacaaatctatcacattgatgcattacaatctgaaatcgaagaaattgatcataaaatggaaacgattgatatgagtgatgtttatgaaattgaagaaaaaatcaatgatgttgatagtgaattacgttatgcaaacaatgggcttcgtcaaaattctcaagaaaagggaagcattttggcaaaaattgaagaactaaaacaagtaaaattagcggatgcggaacggattttgcaacaaaaagaagaagatttggaaaagaaatatccagcagaatggattgaggccaatgtttcagaagaattacaagaaatgctaaattatattagcgaagatcaaattaataaaaaacttgttgaatcaaaacggattgctgaaactttacaaacgaaaaagcggatgcttgaccgcagtcgaacggattacatgcgaacctttaatgtatcgatggaaattgatgatgattccaataaggcgtttgatgatgatttagccaaatatcaagaaattgaattacctcattatcaacaaaagattgttgaggccaaagaaaaatcttatgatcaatttaaagaagatttattagcaaaactaaaatcttctattgaatcggtaacagaacaaattgagcaattaaatcaatcattgaaaaatttccaatttggtcgagatcgttatgaattcaccgttaagccgaatttaacgtatattaaaatatatgatatgattatggatgatttgctcatgcaagattcgcgaattaatgcggcagcattttatgaaaagcataaagataccattgatgaattttttgcagccattacggaagctcctggagcaaatgatgaagaaagaagagaaattatcaataaaaatattgcacgttatactgattatcggacatatcttgattttgacttactcgtacataatattgaaactaaggctgttcaaagtttggctaatagtatgaatacgaaatctgggggagaaacgcaaacacctttctatatttccattttggcatctattgccagtgaatatcgcattgatttagatgatacaggtaataatactccgcgtttaatcttatttgatgaagcatttaacaaaatggattcagaaagaattaaggaaagtattgaattattaaagaaattccaattacaagccattttagttgctccacctgaaaaagtaagcgatattgctccattggttgatcgtaatttatgtgttattcgacgtaaaaattctgcttttgtcaaatggtttgataaaagtgaaattagttctattgctagttaa

SEQ ID NO: 43911 - DNA, 1371 bp, Dorea sp. CAG:105
atgcaattaagaaatgaaatcccggacacgttctggagtttattccgttcggtgaaccgggacatttatattgaagcactgttgtgcatcaatgaagaatatcaatataataattatttcctgacgagggaagtgtgtatccaagtgctgggggacatgaatgcgagaaagcggttcaagctccagtgggaggaaaatgagacagagtttgacatgctggagacgccatcgtcgaggattctgaactggcttttgaagaccggatggctgaagcggattgaagattatcaaacgctggttacgaatattgtcattccggattattcggctgtttttattgaggcgtttgagcggctgtcttcagaagatatgcaggacacggaaatctatatccagaatgtgtatgcgacattattttcttttaagaacgacagcagggcgaacctcggaatgctgcggacggcgcttgtcaatacgaagcggctgaataaagctttgcaggatatgcttcataatatggataaattttttgcaagacttctggagcagaataattatgaagatctgctgcgggaacatctggatggatatgtggaagaaatcgtacagaagaaataccacattttgaaaacatcggataacttctatatttataagatggatattaaaaaatgtctgcgcgacatgcgggaagatgaagaatggatagaagagattcgtacccgggcggcgcagatgggtgatacgaaagatgatgtgttggatcttctggatcagatcgagcgtggatttgatgacattgagcaccggatcgccaatatggataaagagcatgcgaaatatgtgcgtgcgacagtgacgagacttaactatctgttaagtggtgagacggatacgaaaggtctggtcgtgcagctcttgaaccgcatgtcccaaacggaggatgcgcaggaacaggatgcgatgatccgtgaaaccggggagcggatgaatctctcgcttttggaaattctttcggagaaatcgctgtataagagacgaagaccaagaacggattttatcagtaaaatggcgccggatcaggcattgccggatcttgataaagatgatgtactcaagctaaaccggattcagatgcgctacagcagaagccagattgaggaatttattgagtcttatatggacggagaagtaatggacgcttccaagatttcgctgatggatgaagaggcgtttgagaaattgattcttgcttacgattacagtacaagaaagaacagtaaatatatggtgctggaggaagaaccggatcagattgaaaatggttcttataaatatccggcactcaaatttgtaaggagacgcttatga

SEQ ID NO: 43912 - DNA, 645 bp, Dorea sp. CAG:105
atgatcgaatattttgaacagctttcgcaggaagagcaggaagaaataacagaagttatccagatcctgtaccgacagaccttcgttctggagcggaagtttgataaaagacagggacgcatggttccggtgagagaatatcgtgtgttgagcaaacatctggaatttatccgtgcctacttcaaagtggcaggaattactttgcgggaaaatgcgcatatgggtgtgatttacattcagggcgaacagctctggggtgaaaaattatcgcggcttgcgacgatttatctgcttgttctgaaactgatttacgatgagcagatggagacggtttcttcgagcagccacattgtgacaaccgttggcgcattaaacggtaaagccggcgagttccgcgtgctacgcggtctgccgtcaccgaccgaaatgcgcagaacgattgcacttttaaaaaaataccagatcatagaaccgcttgatgttctggaagaattaaacgaagagacgagactggtcatttacccatgcattcatacggtacttctgggcgatgacctgcgggcattattagagacattcagtgaggaggatactattggagacgaaacaaccattcaaaatactgtcgaagatctgtctgaataa

SEQ ID NO: 43913 - DNA, 3369 bp, Dorea sp. CAG:105
ttggagacgaaacaaccattcaaaatactgtcgaagatctgtctgaataactggcattacattgatcagaaaatactgacattcagtgaaggaatcaatttcttcaccggacattcgggaagtggaaaatcaaccgtgattgacgcgatgcagattgtattatatgcaaatacagacggacgtggattttttaataaagcggcagcagatgattccgaccgttccctcattgaatatttgcgtggaatggtcaacattaacgaacacaatgaatttcagtatctgagaaatcagaatttttccagcacgatcgtactggaattagagcagagtgatacaaaagaaaagcagtgtatcggcgttgtgtttgacgtagatacggcgacaaatgatatcagcagactgtttttctggcacatgggaggtcttctggaaaataattaccgtaccacatccagatgcctgacgacgatggaaatgcgtgaatatttacagcgttctttctcggcggagcagttttactgtggaccgagcaatgagagattccgccgccagatgtacgatatttatcttggcggactggatgcggagaaattcccacgacttttcaaacgtgcgattccatttaaaatgaatattaaactggaagattttgtgaaagaatatatttgcatggagcaggatattcatatagaagacttgcaggaaagcgttatgcagtatgcgagaatgcgaagcaagattgaggagacattgaacgaaattcaaaagttgcaggatatccatggcagatatgaagcatttcaggagaaagaaaaagaagttcttttatgtacttatcagatcgaccgcctggaaatgctgaagctggaaggacagatccaggcctgcatggataaggaaaaagtgcgcaaagaaggcaccggtgagcaggaagcaattttatcgttgattaagaaagaagaagttgaactgcagaaacagtatgaagagattattttaagaattgcgaacagcggatatgcaaatctggaagctgaacttgcggcggtaaatgagacactggaacatttacagacaagccagggaaaatggcagcagatcagtgaacggctggaagcatggaaagagcaggatgtggtttccaaccagatgctctgggacatggaaaagtttacaaaaggaacgattatggcagaagagctggagcgtctgcaggagagctttggcgaagtccgcgaggaactggaagagcagagacaggaagcacagatgtcgctccgcaaagtgaagaaagaagagaaagaggcaagagaagagttaaaagagctgaaacagggaaagaaagcttatccgaaagagctggaggaagcaagatatgagttgcgtaaccgcctacatgagaagtgcggaaagtttgtaaatgtgcagatccttgccgaccttctcgatgtgaaagacgagacatggcacaacgctgtcgaaggttatcttggcaacaacaagatgcttctgatcgtggaaccgaagtatgcaaaagaagcgatggaactgtatgaacagatggatcggaagaaataccaccgcgtgtccattctcgatacagaaaaagtggtggcaggcgcaggcaaggatggctatgcggtcaaagataacggacttgcaaaagaagtgaaagcgaaagaagcatatgtgcaggattatattgatttcttccttggaaatgtagaaaaatgtgattccgtagaacagctccgtaactgcaagatcggtgtgacaccggactgtgtattgtatcatagtttccgtttgcagcatatgaatccggatcagtacacaagaagagcgtacatcggtgagacgagtatgcgtcagcgtgtccgccagctggaagagcgctgtgagaaactggtagaagaacgcatgccgctgcaggaattattagaagagatcaagaaaacattgcagcttgaaatgctgtcccagccggcagaagaatatcttactttgcaggcagatgcagagaagattacagagcgtgagaaacggaaaagtcagcttgtaaaacagatgcagcaaatgaaagaagcgtctgtggatgcttgggagcaggaaaaagaagacatccgtaagaaacaggatgcaaagaaggcacagatcacggaagtgcaggaagcaatctggaagcagacgcaggaaatgcagcaattgcaggaagaacgtcttcatgcggaagaagcgctgcttgtgcagaaacagaaaatggaacagagcaaatgggatgacgcttacgaacgggaatttcaggaatatcttgcaggcagacgctcggaaaattatgaatatttacagaaacagaagattgcttcacggtatccgaagatggatgagcgggaagaggcttatcagaagctggtagaagaaagaagtacttatctcagaagttatgcgaatcggacattttctgcgacaaacagagacaatgaagcatatgacagactgctggatgagctgcagtgtgaagaattagagacatttaaggacgcagcaaaagatcaggcaagggcagcagtagagcatttcaaagacgattttattttcaaaatccgcagtgccataagagaagcttatcaaagacaggatgagctgaaccgcattatcagtaagcttgatttcggtaaagataaataccagtttgtcattacgaagaacaaaggaccggacggaaaatattataaaatgttcatggatgattcgctccagatccatccggcgtcactggatgacggtatggaaaatcagatgaatcttttcacgatggagcatgaggagcagtacgcggatctgatggatgagttgatcagtattttcctgccaccggagaatgcaacaccggaagagctggaagaagcgaagaaaaatatggacaaatatgcagattacagaacgtatttatccttcgatatgcagcagatcgtgcatggtgaaaaagacatgaaaatcggcttgagcaaaatgatcaagaaaaattccggcggagaagggcagaacccgctgtatgtggcacttcttgccagctttgcacagatttaccggattaacctgtctccgaaaatgcaccgcaacccgacaatccgtctcgttgtgctggacgaagcgttttccaagatggacgctgagaaagtggcaagctgtatttcgctgatccgcggacttggatttcaggcgatcatcagtgctacaaacgacaagatccagaattatctggagaatgtcgataagacatttgtctatgccaatccgaataaacggcacatttccatccaggagtttgagaagtgcgatttcgatgagttggttgaggagtaa

SEQ ID NO: 43914 - DNA, 1473 bp, Firmicutes bacterium CAG:345
atgaataacaatttatttgataaaatacccgagaacttcttctcagttctctcaagaaagtataaatcggtttatgccttagcccttttaacactttatgaaacattaaaaacttataaggtttctattaaaaaaactgactatttaaatatgctgacttcgcgaatcagtgacagcatgtcactattttctgttgccttagatcgtcttgatgataaagatgatgaaaaaatagaaagcgctgcagacgtcaatgaagaattaactccttcaaagatttcttatattgttaaaaagcttgaaaaaactggatggattgaattagaaaaagatgtaaaaaccaatactgaatatatctttttgccaagttactccatcaagatgattgagcttttgaattcgttatcatctgatgttagcttttatcttcctttggttcaccagacatatagtgaattgaaacttgaagatgagaaagaagatgagtttatgtttagggcagttttaaatgctcgtaagaatgcggatgaattggaattaaatgttactttgctccatcattcaatctgcgttttcggacataaattaaccactattttttcacctaatgaagctttgcatcagcattttgataatttccaaactgagattaccgataagatatatcatccgatgaagacatttgattcattgaatttatatgctttaccaactattaaaattttgacaaggtggatggatgatgatcgacttataaataaaatggttatgcaagcgagagccgatagtcaattcgctggaaaatctcatagtgaaatagttggatttattattacaaatattcgcgatacgatagatgtttatcgaagactacaaaagtcttttgatgaaatagataaaaccaatgctgaatatacggctgctgttcaaaagaaagtcaattatttatcgagtagcgataaaactatcattggcaagattaaatctattttggtcagagcagcgaaagaaattaaaaataatcctgataaagactatgatgaaatggaatttctccagcaaatgggggatactatttccatttatcagcaaggttatatcgatcaagattctttaactcctccttttaaaagatcggttaaagaagaatttgaacctgagagtttgcctgatccatttagtggagatatggactttgatgatttaggattagaagagcttaataaatatggtcctgaaagtgttgataatttcatgtcaaaagcttttggaaagaaaaatgagataactacaggagatattgattttcaagattttgatgatttcatcttgtttattcttgctgaagtccgcgctgaacttcagatatctttctataagatggaaagagtaaaagaacaggaagaaataattaagcaaggtttccgtcttccaaattttgtatttacacgaaaggagttactccatgtttga

SEQ ID NO: 43915 - DNA, 636 bp, Firmicutes bacterium CAG:345
atgtttgaggaaagatataaagcactttctagtgcagaaaaaaaactatttacttcatatgttgatgagttattgttcgattcttttattgtaagaaaaaaatatgatcgcgtaactggcgtaagcaagattagtcctacttatttgtttattgaaaaatattttgatatttttgaggaatatgtgaagtatgctggttatgatttagcaaaagatgaagatagtggagttatatttttatttaatcctgaaggaacaaatagattgagattagattctgtcactactttgttggtctatgctcttcgctatcattatgaagaaactttaaaaagcaatagttcaagaactgaaattcttgttgattctgtagctttaaaattgttgattaaagatttgagcttaaataaggttagcaaaagaatttctgctgtcagtatcgctagctctttacgctttttagctcagcataatgttgttgctcgttgccaacataatttcaatgatccttcttattctttttatatactgccatctattcgctatgttatcgattctttacatatgaataatttagccaattctattcgtgaaagcgaatatgaaaatggtggaagtgaggaaagtgacttatga

SEQ ID NO: 43916 - DNA, 3420 bp, Firmicutes bacterium CAG:345
atgatattattagataaattacgtctcatcaattggcattattttttaaatgttactgctgatataaagaaaattacttttttaactggtgcaaatggtacaggtaaaagtacaattatcgatgctatgcaacttcttcttactggtgatacagctggtagaaacttcaacaaagcagcttcagaaaaaactggacgaactttaaagggttacttaagaggagatacaggagaaacagatagcggtgatatcatttgtttaagacatggtaagttttcatcttatgttgccatggaatttacggaaaatgaaaatgaatattttactttaggaatagttttcgattgtatcgatgattcttattctcatcaatttttctatattaaagataaattccctgaaaataattttacaaatgtagatattatcgataatgctaagttgcgtccattatctggtaaagaattggttcaattttgcaaacaacattatcgtgaaagtgaatatactttcttcgaaagtaatttagcttatcaaaaatttattaaagatagatttggtggtttgccagacaagtattttactttatttaaaaaagctgttggctttactcctatttctaatatcgcccaattcattacagaattcgtctgtgatcttgattatcatgtagatatcactccaatgcaaagcaacatagaacaatataagcttttggaagttcaagccaaggccatgcaagaaagaattgataaattgactggaattcaacaggcttttaccgatttccgtggaattaaaaatgatatggtattatctagctatattgttgatcgcgcaaattatgaagttgcaaaaaagacatatgaagcaagtaaataccgtttggaacaagctaaattagaaattgaaagcttgagacaacaaattgaagaaaccaatatcaatattaaagatttgagcgatgatcaagaaagatataccgcttcaaaattaggtcttcaaggatatagtgttgcaagtggtattaattctaagaaaaatgaacttttaaatagaataaccgctttaactatttcttacgaaaatgctattacacagattaaagaatatgttaagagttatgatgatatcgcatctaaattagttaataaatttaatgaaaattataatttggatttcttatcttctaatcaagaaaaagcattgctacatcttttagaagttgctgatgaagtcagagatactgcttttgatattcgcgacaaaatagatcataagaatttgactgataatgatttaacaaatttccaatctttgatgagctctttcaacaaagaaggaaatactttatatcatcagattgaaaatgaattatattctaaaagtgaagagttggatatgatttcttcagatttagataatatgtccaaaggacaaaaaccattctctcctacatacttagaacttagatcatctttttataattctttaaaagctcgtcattctgatgcttttgtcgatactttctgtgatttaatcgatattaaagataaaacatggactcgggcaattgaggcggttttgtataacacgaaatttaatttctttgtcaatgatgaatattatgaagaagccaatgaaatattagtaggaattactagaagaatgaatatttattcagtttcattagttgatgcttctagattgatagatcgcaattttgaagctaaaaagggttcccttgctgaagttatttataccgaagatgatggggctagagcttatgtaaattatcttttaggaaatataaaacgttgtcgcacttttgaagaagctagaaatagtggaaatggtttattgcctgattgtacaggatatcataatttttcaacttggtatttaaatagagaaaaatctaaagttaattatattggtactgctttaagtgatgatgaaatcttcgaaagaaaagaagaatttaataaacttaacagagaatattctaaattcaccgaagtatttaattatctatcagaattaaataatcttgatgttatgtctttaaatgaatgcaatggttataaagaagttttagcttctcaaaaagaaattaaagccctcgaaaataatattgaaaaatatgatgaagaacttcaagaaggtgatcttgatgaagtcaatagcatcgatgctaaaattcaagcgatttcccaagatatctctgctttgcaacaagaaaaagaagaatatcttacaagaattggtgaaaagaaaaatgaagttaagcaaatcgatgaaatattgcttccaaatcaacttcatgttatggaacaagcttctgaaaagcttactgcttattcagcagaatttgttgaaaatgtcggtattccattcttcgataatgctttagcaaatctttctatcgatagaattaaagaagatgctaatagaaattatattcaaaaatcttctaaacttcgttcagccagagaaaatttaataaatcttcgtgcaagatatgttaatgagagacatttgaattacgatactacaaatgaagaatcaaatgaagaatttgataaagaattagaatctttatcacaggtagaacttccagcatataaagagaagattgttgcggctcatgataaggctgtcaaagaatttaaagatgatttcatctataaacttagaacttcaattatgactgtttcaagtcaaattgatgaactcaatcaagcattaaaagatgttaaatttggtcgagattcttatcgtttctctgtagcaccaaatcgtgattatcaagaatattatgatatgataactgatgatttattgcttagcattggagatactgaagatcaatttttgcaaaaatattctactttgatcgaaaatttgatcgatttgattacttcagcaaatacagaaggcagttctgctgaacaaaaagctcaagtcttacaaaacatcgacaaatttactgattatcgtacatacttgacatttgaccttaaggttaaaaccggtgattctgaagttgaaaactctttggcaagaacatttaagaaaaaatccggtggtgaaacgcaaacacctttctatatttcaattttagcttcctttgctcaactttatcgtacaaacaaaaaagaaaacaataatactatacgtcttgttatctttgatgaagctttctcaaagatggatgctgcccgtatcattgaatctgtcagtttattgagatatttcaatttgcaagttatcctttcaactccgacggaaaaagtcccaaatctttctacagaagttgatgttactttgacagttcaccatgatgataaatcaaaatcttcatatatttctgcacatgaagatttgatgaaaaatcgtgttagaccaagaaatatataa

SEQ ID NO: 43917 - DNA, 1377 bp, Clostridium hathewayi CAG:224
atgaaacagaataagaaactgatggaagaaataccggaccggttctgggggctgttccgctcggtgaaccggtctatctacatagaagcactattgagaatcaacgaggaatatgaatacagcaactactttttgagccgtgaggtctgtatccagatattaagcgagtattttgcaaagaaacggtacgtgatctggcaggacgagctggaggatgaactggatacgctggaaccgccggccacgagggtgttaagctggcttttgaagaccggctggctcagaaaagtggatgattatgcctctatgacggtgtatattgtgattccggactacgccgccgtcatgacagaggcttttttgcggcttgacagcgaggatgaggacgagacgcagatctatattcaaaatgtctatgccatactgttctccttaaagaacgatccgagagccagcatcagccttttaaatacggcgcttgtcaacacgaagcgattgaataagacactgcaggacatgcttcacaatatggataaattttttgcaagcctgttggaacagaagacgtatgaagatcttctcaaggatcatttagagggatatgtggaggaaattgtgaagaagaaataccacattttaaagacctccgacaatttttacctttataaaaccgacattaagagatggatagcggccatgcgggatgatacggaatggatcgaacagatgagcaggcgaagcggaggaaaggtatcagccgccgatatcacggagaagctggaccagatcgagagaggcttcgacagcattgaacaccggattgccaacatggaccgggagcattccagatatatccgcgctacagtcacaaggcttaattacttactcaaccaggatgataacatgaaggggatggtcattcagctgctgaatcatttgtccgagggagataagcaggaggaacggatccggcaggtgggagagcgtatgaatctgtcccagatgactattttgtccgagaaatccctgtataagcggagaaggccaaaggcagacttcaccggtaatctggagccggaggaagaggcggaggaactttccagggaagaaatcctgaacttgaataagctgaaaaaccgctacagtaaaaaagaaattgagagcttcatcgaggagaatatggaggatggacggatggaggtcaccggcgatatgatccgctccggggaagacttcgagaagctgatactggcctacgactattccaccaggcgaaagagtctgtaccgggtggaagatgcggatggggaaccggaaatgatagagagcggaggataccgttatccgaagctgacatttacaaggaggaaatcataa

SEQ ID NO: 43918 - DNA, 651 bp, Clostridium hathewayi CAG:224
atggggtacgaggaacaggcgacaggaaccatggggatcccctattacgacagccttttgccggaagagcagcaggaagtaacagaagcggttaagcttcttctcaggcagacgtttgtgctggagcggaaatacgaaaagcgttccggtcgctttacgaataaccgggagttccggatctgcaacaagcatctggaatttctaagaaaatattttgccgtcagcggcgtctcggtggtggagaacagccagatgggagttatctacattcagggcgaaacgctggtgggtgacaagcttccgaagctggctaccctttatttactgatattaaagctgatctatgacgaacagatggccacggtatccaccagtgtcaatatctatacatcactgggagaaatacatgaaaagctgggaaattaccggctctttaaaaaacagccgtcgcccaccgatatcagaagagcggtcaccctgctgaaaaaatatcaggttgtggagcctttagatctgctggaagatttaaatggcgacagcaggctgattatctatccgtgcatcaatgtggtgctgttcggtgacgatgtgcgggtgctgctggaatcatttggcgaaggagaagataacgatgacgaatcagagatttga

SEQ ID NO: 43919 - DNA, 3372 bp, Clostridium hathewayi CAG:224
atgacgaatcagagatttgaggccctgtcccggatctgtttaaataactggcactatatcaaccgcaaaacgctgtcctttaaccgggagattaacttttttaccgggcattccggcagcggaaagtccacggtgattgacgccatgcagattgtgctctatgccaacaccgatggccgcggatttttcaataaggcggctgcggacgattctgaccgcaacttaatcgagtatctgcgcggaatggtgaacatcggggagaacaatgagttcgcctacctaaggaaccagaatttctccagtaccattgttctggagctgcagcgcacagatacagaggaataccagtgtgtgggaatcgtattcgatgtggacacatcgaccaacgagatatcgagacgcttcttctggcaccgcggaccgcttctggaaaacggttaccggacggccagacgcaccatgtctaccctggagttggaaggctggctgcagagccattacggcaaagaagagtacttcgccacctcccacaatgagcgtttccgcagacagctttacgatgtgtacttaggcggtctggattccgagaaatttccgctgctgtttaaacgggccattccgttccgtatgaacatccgtctggaagattttgtgaaggaatacatctgcatggagcaggatatccatattgacgacatgcaggagagcgtcatgcagtacggacgcatgagaaaaaagattgaagatacttacacagagatttctatcctgaaggaaatgcaggagaaatacggtctcgttctggaaaaggaagaaacgatccaaaagaacggttactttacgggaaaacttgagattctggagctgatggaacgggcaggagaactgacggataaggcggcgctttccagagatgatctgcagaatcaggaacgcttaaaggacggtctggatgagcagattgcggacctgaccactcagggagaggaactgctgaaacgaatctcttccaccggatacgaagatttaaagacgcgtttggaatccttaaatgagctgatggagcatttaaacaagagtgaggtgaaatggcatcagaccgcagagcggttaaacgcatggatcgaccaggagaccacatcgaatcagacgatctgggatatcgaggaatttgagaagaacaccatcgatggagagaagctggaacgtctgaaaaagtcgcttgcggagatgcggaaggaagcggaggacctaaagagcgaggcgtcagcggttcttcgtgatttaaaacgccaggagcgccagctgaaagaggaactggcccagttaaaggccggaagtaaggcatatcccaaggttctggagcacgcccgttcctatatccagagaaggctgctggaggagacgggaaaggctgtggaggttcacgtcatggccgatctgctggatatccgcaatgaggaatggcgaaacgcagtcgagggatatttaggaggcaacaagctggctctcgtggtgcccccggcgtatgcggaggatgcactgcggatatacagtgaactggacaaaaatgagtatttccgcgtggctgttctcgatacggaaaaggccggaaaagatacgccaaccgttctggaaggcgcgatctgtgaggaacttgacgtaagagaatcgtacttaaagccttatctggagcggcttctgggacaggtggtgaagtgcagaagtatcgacgagctgcgcggctgccgcatcggtgtgacgccggactgtatggtttatcatacgttccgtctgcagcagatgaatccggagcagtacaccaaatccgcctatatcgggaaggacagtgtgagacagaggatccgccttctggaaaaatctctggcggaaatggagaagaagcgggctccggaagaaaagacggtcagggaatgcgaggccgtgctaagtctggaaggactaaacgaggagaccggcctgtatctggaatggcagaaggatatgggggacttgaaggagcggcagaaggaaaagaaaaaactggaacagaagctgctaaagctgaaggaagagaacgtggaccagtgggagaaagagcggagcgctcttttagcccttgccgacggcaagagaagagaacgggacgcggtcagccgccggatctacgagcttcatacgagaatctcccagatgacccaggcagtcacagcggtggaacaggagctgctggcaaaagagcgggaatttaagctggacgatatcctggaggcagaatttacagagtatatggccgggaaggaacagccgaggtatgagaagcttagggactattttaccggaaggctgaacgcggcggcggaggccagggatcaggcgttccagacgctgatggacgccaggggagagtacgcgagaaagtatcccaaccggaatttttccatcacggcgaaggataaccgggaatatgagaagctgatggagatcctggagtgtgatcatctggaggaataccgtcagatcgcggcagaacaggcgcggtcggcggtggagcattttaaggacgatttcatgttcaagatcaggagcgccatccgggaggcgctgcagcgaaaggatgaactgaaccgcatcatcagccgcctcgatttcggcaaggataaataccagtttgtcatcggaaagaacaagggggcagacggccgtttttacgatatgttcatggatgattccctggaagtaaatcccaacgatttaaatgataccgtggacaaccagatgaatctgttcacaatggagcatgagagccagtatggagaactgatcgaggaattgattcacgtcttcatcccgccggataacgcatcgccggaacagatggaagaggcgaaacgcaatatggacaagtatgccgactaccggacctacttatcctttgatatgcagcagctgattcagaatgaggatgaagtgattaagatccgcttaagcaaaatgatcaagaaaaattccggaggcgagggacagaatccgctctatgtggcgcttctggccagctttgcccaggcgtaccgcatcagtatgccggagagcatccggaggaatccgacgatccgtctggtggtgttggatgaggcgttttccaagatggatgcggagaaggtagccagttgtattgagctgatccgcggccttggattccaggcgattatcagtgctaccaatgataagattcagaattacgtggagaatgtagataagacattcgtattcgccaatccgaataagaagtccatatcgattcaggaatttgagcgggaaagctttccgcagctgatgaaggaactggatgagggggaagatgatgattga

SEQ ID NO: 43920 - DNA, 1398 bp, Dorea sp. CAG:317
ttgagtttaatcgataaaattccaacagagttttacaaacttttcgcaagtaaatacagaacatactatcagaaatttttactggcaatctatgaagaaacgagcagatcttattctcttttaggactgacagaagaagagtgtaaggctgtgatgaatgaacatatagcggatcttacactggagtggagcgaggagcagtcagacgaagagggggagttccttacaagagccaatatggcatcgatttgtctgaaaaatctggaaagctggggatggcttaggcgagattatgatgagacattgaatcaatatgtcgtttcatttccggaatacagtcagatgtatgtagagctgtttcagaaattgttcagtgaagagggaagcaaagagcgagagagcgtgcttgcagtttacagccatctatatacatacagctcagatacggagaaaaataatgaaattctgaaaagcgcacttcatacttcccagtctcttgtgcaaatgcttgcaaatatgcaggaggggatgcgcgggtattttgatgaactgtccagacagaagagttttctcggtattcaggaagtgcttgtaaaagagatcaataacagtgacagcaagaagtatgccatacttacaacgacagatagcttttatcggtataaggaagcagttaaggagttgatcgataaaaatctgagtgagaatgagataaggcggcaggagtttgaagaaaaaagtgtggagcttgaaaaagatacgccggcttattatagaaatgagcgtgcgatcaagctctgtgaagaagcaatggatatcatttgccgcattgaacgggaatttgatgcgattgagcgcagatacaataaactgattgaacagaaaacggtatttgccagccgtgcagcagccagaatccgctatattctcatggaaggtgcggcagaacaagacagaacggttgaatttgttaatcttttaaatcaaagtagtcatcaagaggaaatcttgcagaaacttgcgtccggtatgcgtatgacagaacgatacaaagcggtgacagacaggagcctgtatcggcggaagaataccgagaaggaacgatttattccgcaggcggtaagtaccaaagaagaggcgcaggaaaatctggaaggattcgtgctaaaacctctgtacaccaaaaaagaaatcagggcattccgcagaaaaaatgagcatgatggagaatttcttgtgacaaaagataccgttcaaactatggaagatttggaaaagctgttttttgtctggcaggaagctacagaacttgcagagagtgatgcagttgtggaagtacaggaagaacttcagacgaagggcttccgctattcgggacttagaataaaggagaagtaa

SEQ ID NO: 43921 - DNA, 639 bp, Dorea sp. CAG:317
atgtttgaatatatggaagaattatcggtgacagaaacagagaatctgagaaagaccatttcgaatttatttcgtcagacctgtattttgcaggtaaaatacgatccggtcacgttgacaccgagggataatctatactatgaaatgtgcgtaagacataagaaatttatcgaggactatctggaggtacttggctgtgaacttcttcatgatccacaggaacatattttccggcttgcaggagacggggtggagattgagaaattcagcctgacgacaacaattattatcctgctgatcaaaatgatctaccgggataagattctgggagaagggctggaggctaccgtcactacactggaagaaatccgtgaatacgggaaaaatacaaatttactgaattggaaactgaaggtgacggagtggcaggaagcactttatctgttgagtaagcatcagatgattgaggtgccgggagcagttcgcgatgtagaggatcagacaccgatctatatttacagcactgtgaatctgtacttaagttcatccaatatcaatgaactgcttgaagaatatagagaggagatcgcagaagatgaagcaatcgaagaaaatctttacgaaaatgctgctgaataa

SEQ ID NO: 43922 - DNA, 3399 bp, Dorea sp. CAG:317
atgaagcaatcgaagaaaatctttacgaaaatgctgctgaataactggggtgggatcagtcataaagagctttcctttcatgagcatgtgaatctgttcagcgggaagagcggctccgggaaatcaacagtcatggatgcgatccaggtgattttatacggaagcgtggcatctacctttttgaataaggcagcagacgatgcgaaaaacagaagaagtgttcttagttatttaagaggggaacaaaaagacggaactgcaaaccgtgaggggacagatttttgttcgcagatcgtattggaagtggaagatacggcaacgaatattgttacctgtattggagcaatttttgaagttgggaaaaatgatttaaatctgaagcgttatttctttttcagccattcgggaagaatccctgaagatggatatatttcggaaaatggaagtccttatacgatttccagattgaagaagctggtagaacaaaggaaggtgtcggaagacaatcgggggagaggagaagtaaatcgtctgtatccttcgaaagaagcttatttaaacacactatatgatgtggtacttggctatattgaactgggacgatttatgacgatggaaaaaagtgcgattgcacttcgcatgaccaacggaaccggtcagtttatccgtgattatatgtttccgaagagtaaagaaggaacagtttcggttatcagcgagcaactgggtgcataccgcgagatcaaagagagggtcgaagatctggaaaagcggattgggatgctggaagaaataaatggtcacaatctgaagctggtacagctgaaaacagatgaagtccgtacacaatctattttgaaggtaattgccatagaaggattaaagattcagctggaatctaaaaagggagatttagagtccgccatagaggctgccaagcgttcagaagaaaagtaccggtccttagaaacacagaagaatcagtgtgcagctgataaattacaagtagaatcacagctgcttgcaagtgattacggacagaaggagaagcagttaaaagaactccgcaatacgattcggattttagcagaatattctaagcagtggagaagtgtgcttcatggattgaagaagtgggaagaaaatgaagaggtgaataattatttatcgaatccggcgcttcagacaatggaagagatggaaacaggagacttcaccgatgaccttctcggaagacttcgaaagtatttgaaagacacattggaaaatgtggaagaagaaatcagagacttagaagaaaacatccgcaaaacgagaaaagaactaaaagagaaaaaagaaattgtggatgatctgaaaaatgacaggaagccatatagcaaggaattgaaaaaagcaagggcaagactgcaaagcgagcttcgtgatcgatatggacatccggttccggtggcagtttttgcagatttattcgatattacggatgaaaaatggaaagatgccatagagggacgtctcgggaaaatcaaatatagccttgtgactccgccggaatacgcgttagaggcggctaagattttccggaaaatggcaggaaaagagttcgaagaatttaatctgatcaacaccgcggcaatcaagcgagatgaaccgaaggcgaaggaacataccttatatgaggcagtagaaacaaaagaaagttacgtcgatctctgcctgagacagtatcttggaagaattgtaaaatgtgagaccattgaagaacttcatgaggtaagagaaggggtgacaccggactgttattcttacagtaattatatgttccggcatctgcgagagaaagattacagactttatgcatgtatcggtacaaaagtatccaaagcgaaacttcaggaactggaggatgaagtctaccgactggaaaacagcctgcttgcagatgagcagatgcaaagcagtttagctgaagcaagaacttatgagcagttgcagaattacagtacagaacagcttgtacatatgtcaaatgcagcagaggaattagaggaatattatagaaaagaagatgctcttattcgggaaatgaaagagcttgatgaagggactctgattccgcagctaaaagaaaagaagaagcaattagaagagacaatgagtctgcttgaaaaagaagcaaaagagacggatgccgaacgtctggcgcggatcaaggtacaggcgaatgtggaaactgagttgaaaaatataagtgagaaactggaaacggaattagaaggttatgttccgaatgagagcatcgagcaggaagtgctccgggaattagagtccaatccagagcatacataccgcagacagaagctaaaagaattagaaaagctccgtcaggagattgaagcagaagcagatggacgagcagaggcaagaaatcatttcaataaagaatatccggcgtatggttttacaggtgtagaacatggaaatgaagtatacgataaggtgttggaacagtgcagaaaagattttgaaccgaagtataaggaagaatttgaacagcagtaccgattggtatatcatacccttcgcgaaaatgtaattgcaacgatccacggagagatcaaagcagcttttcgccataagagagaaatcaaccggatgctcgctaaaatccgcttctccgacagcatttaccagattgatattcttccggctgaaaatgaaaaccggcagttttatgaaatgctgatggcgccggaacttgacagcaaagtattggataatcacgggtttgaaggtcagttaagtctcggtgaagatgaattttatcaaaaatatgaagcgcagattttaagacttactgaaaagttcatgccgccaagagacgaagacggcgggaaacgggcgcttcacaaagaagagatggagcgatacgcagattaccggaactaccttactttcagtatgtatgagcaagtgaaggatgaagatggaaatatccgaaaaaatgcagtggatgaaatggcgggacgcgattccggaggagaaggacaaaacccgaagtatgtagcattgctcgcaggatttgccatgctgtatatgaatcagagtaatcgagactctaagatccgtcttgttcttctggatgaagctttttccaaaatggataaggaacgaagtgaggtatgtcttcattatgcaagggagctggaattacagcttattgtctgtgtgccggatgagcgtttgcagtcactgattcgaaatgtggacagtgtatatggattccgcagacatcagaaccagatttccatgatgcatattgataaaggcgactatttagctatgatcgaaggggaaaaagatgaagaagaatctgacactcagtcagtggctgattga

SEQ ID NO: 43923 - DNA, 1230 bp, Dorea sp. CAG:317
atgaagaagaatctgacactcagtcagtggctgattgagaaaacagacggagaagcataccgtgccgggaaattatctggggaatcatcggagaaatcatctgaaaaagcatatgtaacaaaacatccgaaagtagaccagcagataattaatcagatcggaagccttacaaaactgatcagtcaggcaagagagatggaaaaagatgcgcagcttagcggattcatacggtttgactggcgggacatgggaaatgatatccgtgcgatacattattctgtagaaatcataccgcttctctgcgatagagaaggaatcgaagatccgcggaagaggcagcagcgccatatcaaaacggtaggagaactgttgcaggaagcatcccagtcagaagcggattggctgaagtcctattatcgtttcctgttgacgcgtttggaacaggggaagcttgtcaaggaaatggatgacgaagcatggtttgcctgcctgaatgcaattggcaggctccattgcccgacttggaaacgggtattcagcgccagagtttttcgtgattccaaaaggtttcagacgtcatatgaggaccgagtagtgaaagtcttaagagagtattcggatatgcccgataaagatgttatgaccaatgagcagattttgaaggcatatggcattatttcttacacccagacattggagtgtaagggaacggtactttgcagaacagatacagggcagacatttgataccggtgattttccgtatggagcggttttgaattcgcagacaatggagcatgccaagccggtgaacattgcaaaaatccgccgaatcatgactatcgaaaataaagcaaattacgaaaatatgtcctacaaagaagatacgctttatatttattgtcacgggttcttctctcccaaagaggtagaattcttgcgggagctgacagtgttagctgcggagaacgtggagtttttgcactggggagatatggattatggcggaattcgaattttcttatttaacaaggataagatatttcccggactgaaaccttataaaatggattgcgaaagcttcgtggcagcggtgacattaaatgccggcagaacactggaggctgaaaaacgtaaaaagctagagcagatgaatgccggagaattggaagaactgcgcagcagtatattggagtatggcatggagattgaacaggaaatgttagtgtga

SEQ ID NO: 43924 - DNA, 1365 bp, Ruminococcus gnavus CAG:126
atgcagttacgatacgagatcctggacacattctggagtttgttccgttcggtaaaccgggagatttatatggagtcgctgctggtgatcaatgaggaatatcagtacagtaattattttctgacgaaagaaatctgtgtgcaggtattgagtgatatgaatgcacagaaacaggttttgcttcagcgggaggagaacgagacggattttgacatgctggagacgacagcatcccgcattttacggtggcttttaaagaccggatggctgaagaagatcgaagattacagtacgatgaccacaaatattgtgataccggattatgcggcggtttttattgaggcatttgagcgactcacgtccgaagagctggaagaaacagaattatatattcagaatgtatatgctacgctgttttcctttcagaataattccagagtaaatctgaatatgctcaggacggccctgatcaatacaagaaagctgaacaaagcgctgcaggatatgcttcataatatggacaagtttttcgagaggcttttggatcaggagtcttacggggaacttttgcgggagcatctggacgggtatgtggaagagattgtcaagaaaaagtatcatatcttaaagacctcagacaatttttatatctacaagatggacatcaaagaatgtctccgggatatgcgggaaaatgaagaatggattgaaagcatccggcagaaagcaaaagcagcaggagatacgaaagaggatgtgttagatctgctggatctgatcgaacggggatttgatgacattgaacacagaatctccaatatggacagagagcattcgaaatatgtgcgggcaactgtgagccggatgaattatctgttaagcggagagactgataccaaagggctggtggtgcagcttctgaataaaatatctgcgcaggaagaaccggagaagctgcttacagaagcgggaaaacggatgaacctgtctctgtttgagatgatttccgaaaaatcattgtataagagaagaaaacagaggacagactttatcagccagatgggacaggatgaagaatatgaagatctgaaccgggaggatgtgctgaagttaaaccggatccagatgcgctacagcagacaggagattgaggattttatcgaagagcatatggaaaacgaagtgatggacgccggaacacttcatattacagaagagacagcatttgaaaaactgatcctggcatatgactacagtaccagaaagaacagtaaatatcgggtattgaatgaggatgagacagtcatccaaagtggacagtatcaatatccggcattaaaatttgtgcgaaggagaccgcaatga

SEQ ID NO: 43925 - DNA, 645 bp, Ruminococcus gnavus CAG:126
atgatcgaatattacgagcagctttcggaagaagaacaggacgatatcaaacatgtgatccagacattatatcgccagacctttcttctggaacgaaaatttgaaaaacggaccgggcggatggttccggtcagggagtaccgtgtatgcagcagacacagagaatttctggaagcgtattttgcggttgccggaatcacactgcaggaaaatctgcatatgggcgtgatgtacatccagggagagacgctatggggagaaaagctctccagacttgtcacaatctatattctggtgttaaagctgatctatgatgagcagatggcagcagtgtcatccagcagccatatcgtgaccactcttggggcagtgaacggaaaagcgggagaattccatgtgttaagcggcctgccgtccccgacagagatgcggaggactgttgcatttttgaaaaaatatcagattgtggaacctgtggatgtgatggaggagctgaatgagaacagcagacttgtcatttatccgtgcatcaatacagtgctgcttggagatgatatcagagaactattagagacgttcagcgaggaggaagacagtggagacaaaacaggcgttcaaagcgctctcgaaaatctgcctgaataa

SEQ ID NO: 43926 - DNA, 3357 bp, Ruminococcus gnavus CAG:126
gtggagacaaaacaggcgttcaaagcgctctcgaaaatctgcctgaataactggcattacatagacagaaaagtacttactcttaatcagggaatcaatttctttaccggacactccggaagtggaaaatctacagtgatcgacgccatgcagatcgtactgtacgcgaacacagacggaagagggttttttaataaggcggcagcagacgactctgaccgttctctgatcgaatatttaaggggaatggtgaacatcggggaaaataacgaatcccagtatttgagaaaccagaatttctccagtacgatcgttctggagctggagcagacagatacgaaagaaaagcagtgtgtgggagtggtatttgatgttgagacagccacaaatgagatcaatcgcctgtttttctggcataaaagcgggcttctggaaaatcagtaccgggcggataagcgctgcctgacgacatttgaagtcaaagaatatctgcagcggacattttcaaaggaagagtattattgtggtccgagcaatgagagattccgcagacagatgtatgacatttatctgggtggtctggatatcgaaaaatttcctcgtttgttcaagcgagccattccgtttcgtatgaatatcaaactggaagatttcgtgaaagaatatatctgtatggagcaggatatgcacattgaagagctgcaggaaagtgtgatgcagtatggaagaatgcgcgggaaaatcgaagagaccatggaagaaatcgggtatcttcaggagatccggggttcctatcggcagtatgaagaaaaacaggaagagacggcgtcctgtacctatcagatttccaggctggaaatcctgcatctgcagagtaagatccaggaactgaatgaccggatgaaagagacacagacagagattgcgggacaggaagcgaaaaaagccaatctggagaaagagcaggcagaacttcagaaagaatacgaagcaataattttgaagattgcggacagtggttatgcagccatggaaaaagatctggagagtctgaacgaagccctggaacggctgcagaacagtaaggcaagatggaaaaagactgcagatggtctcaaagagtggaaagaaaaagatgtgacgccgaatcagaccttgtgggatattgaccggtttgtttctggaaagatcacggaaggtgagctggaacggctgcagacaagtctgacacagatccgggaagaactggaagaagagcgtcaggagacggatgccagacttcgcgcagtcaaaaaagaagaaaaagcggcacgggaagaattaaaagagctgaaacagggaagaaaagcctatccaaaagaactggaagaagcgagatatgagttgagaaaccggctgcatgagaagtgcggcaagtttgtcaatgtgcagattctggcggatcttctggatgtgcgggacgaacgctggcacaatgccatcgaaggatatctcggaaacaacaagctgcttctggtcgtggaaccaaagtacgcgaaaactgccatggaaatctatcaggacatggataagaagaaatttttccgggcagcagttctggatacagaaaaagtacaggagacagaatgggaagtaaaagaaggagccctggcacaggaactgatcgcaaaagagccgtatgtgcaggcatacatcaatttcttcctcggaaatgtcatcaaatgtgaaagtatcgaagagcttcgtcagaaccggatcggaatcactgcagactgtgtgctgtaccacagtttccgtctgcagcatatcaatccggaaaattatacgagaagggcatatatcggagagaccagtatgcgtcagagaatccgccgtctggaagaaaaatgtgagagtcttcaggaggaacggattccgctgcaggaaatgctggaagaaattcgcaggatctctcagctggaaggactgacacagcctctggaggattacagacaatggctgtctgatctgcagaaaattcctgcaaaggaggcagaaaaggccagacttctggatacaatgcagaagctgcgagaggaatccgttctggtgtgggagcagcagaaacaggaaatccagcagaagcaggaagcaaagaaagcagagattgaggcagttcagaaaaccatctggaatcatcaggaaaacggaaaacgattccagaacatgcaggtagattttaatgaacagttagtgcagaaagaaaatgaattccggcagcaggacagagaaaaatatgagccggaatttcaggagtatctggagggcagacagagccgcaattatgagtacctaatgcgggaacgtatcaagaaaaaacagcctttggaagatgcgcaggaaaaagcatatgaaaaactggtagaagcaaggagtgcatatcttcgaaaatatccgaacagaacctattctgcaacgatccgtgacaatgacgtgtacgaaaagcagctttcaaatcttgagtgcgataacctggaaaaatacagggaagaagcacaggaacaggcgagagcagcagtggaacactttaaagttgattttgtatccaagattcgttatgcaatcaaagaggcatatcagaaaaaagatgaattgaaccggatcatcagccgtctggatttcggaaaggacaagtatcagtttgtcattacgaaaaacaaaggtccggacggacgattctatcggatgtttatggatgacgcattggatatcaatccgtctcagttgagtgaccacatggaaaatcagatgaacctgtttaccatggagcatgaggaagaatacggagatctgatgaatgagctgatcgagattttcattccgccggagaatgccaccagggaagagctggaggaagccagaaaaaatatggataaatatgcagattatcgcacgtatctttcctttgatatgcagcagatcgtgcagggagaaaaggatatgcggatcggtctgagcaagatgatcaagaaaaattccggtggagaaggtcagaacccactttacatcgcgcttctggcaagctttgcacagatttacagaatcaatctgtctccgaagatcaagcgtccgccaaccctgcgtctggttgtcctggatgaggcattttccaaaatggatgcagagaaagtagcaagttgtatttctctgatccggggactgggatttcaggcgattatcagtgcaacaaatgataagattcagaactatctggaaaatgtagacaagacatttgtgtatgcaaatccgaataaaaagcatatttcaatacaggaatttgaacgaatggagtttgaacagctgcaaggggaagaatga

SEQ ID NO: 43927 - DNA, 891 bp, Ruminococcus gnavus CAG:126
ttgtggattcgtgcatattatcaggatttgctggaacgatcggaaaataaacgaaaaaaagatcttctggaattattagcggatgagaaaaaatatgccccgtgctttgaaggtctggatcagcttacagaatctgtttttaaaaggattttcagtaaaaaatatttgggaaatacaaaaacatttgaacaagagatgcaaagtcatgtcatcagtactgcaaaaaaattctgtccggatgtagaaaaagaaatggatgacacgacagtgcttcagcagctgtggatcgaagaatatgcacaagaactgtctttaaaagggaaactgcatttttgtctgaaagaagaaaatggaagcactcaggagattaatacagagtgttatcggttcggtactacattaaacagtcagacactggagcatgccgagataaaagaagtacagaatattcagaagatcgtgatatttgagaataaagccaattatatctctgcaccgtataaggatggtattctatacttatttagtcatggatatttttctccaaaagaatgtagatttttaaagcagctgcatcaagtgttaaaaaatcagacatcctgtgaagtgcaatattttcacagcggagatctggattacggtggaatcaaaatttttcagtatatacgcaaaacaatctttccggagttagagccgcttcagatggatgttgagacatatgaagcatatcaggaatttacagaagtgatagatccggaaacactggaaaaactaaagcgtgttcaggatgaaaatccaaagctgcaagagctgatcaaaaggctgatagaaacaggaaaaggaattgagcaagagtgttttttaatagagaaaagagggaatcacatatga

SEQ ID NO: 43928 - DNA, 1419 bp, Roseburia sp. CAG:18
atgattttaaaaaagaaaattccaaaggaattttataaactatttcgcacgaaaaaccgtgatgcatatatgcagtttcttgtggcaatttatgaggaaaataatgaagtgtatacagcacttggattgacgatagaggaatgccgtgtgattattgcagatacaattgcaaaggcaaggattatctgggaggatgaggaaatagaagaagaggacgagccggataccttatttccggaagattcgccgtctggcatattgaataccctgattcggtggggatggttaaaaagcgattttgatgaaaagttaaatacgtatattatttctttcccggaatacagccagctgtttacggaattgtttcagaagcttcagacagaagatgacagccgggagagggaaagtatcctttcgatttacagtgctttgtttacgtatcattcggatacagaaaaaaataatgatattttaaaaaacgcactccagacgtccagacggctggggcagcttctttccaatatgcaggatggaatgcgttcctattttgaggaattgtcgcagaaaaaaaattttattggaattcagaaagttctggtagaggaaattaacaacagtgacagtaaaaaatatgcaattcttacgacaacagacagcttttaccgttataaggaagcagttaaagaactggtcagccagattcttcgcgaaaatgaccaaaaaagggaacagcttgtaaaagagcgtaccggacttgtggagggaactgttaccagcaaaagaaaccagtatcgtctggaatattgtgaaagtgccagtcagcttgtgtatcaggtggagcgggaatttgatctgatcgaaaaaaaatataacaagctgatcgaacagaaaactgtctttgccaagcgtgcactggcacgaatccattatattctgcaggaaggctcttcggatgaagatcatattgtaaagttaattaatttgttggatcatcatgcaaacagcccacaggtgttagaacaaatgcgtgaccggatcagagtaggaacacagtttaagaatataaccgatagaagtttttacaaccggaaaaatgcggaggatgcaggatttcacccgattgcgatggaaaagcacgacgaggagactcagatgaccgattttgtaccaaagccgctttatacgaaaaaacagttgcaggaattcaggcagaaaaatatcgtggatggcagatttgtcacggatgaacagacgattcagtccgtagaagatctggaaaaactgctgtttttgtggcaggaggaaacggatgatacgaaacaggaggaaacggtgcatattgatggagaattaaaaggggaatatggatttgttttttcaaaactggtgattgacgcaaaaaaaggagagaaaaaataa

SEQ ID NO: 43929 - DNA, 675 bp, Roseburia sp. CAG:18
atgttagaatacatggaaaatatctcgcagagtgaggcggaaaatattagaaaaaccatacaggatctgtttcgccagacctgtattttgcagacaaagtgtgatccggttactctgatccagaaggataatcctcactatcaggtatgtgcgagaaatcgggaatttattgcagattatctgcaggtgcttgactgtgaactggttcatgatccgcaggaacatattttccggattacaggagatggcgtgctgacggagcgtatgacacttttaacaacgaaactggtgatccttatgaaattgatttatcgggataaaattatgggagaaggactacatgccacgacaaccagtcttgcggagatccgaagatatggaaaggaaacaaacctgattacgcgcagactgaccgctcaggagtggcaggaggcattgattctgatgaaaacacaccagatgatcgaactgccaagtgccattggaaatctcgaagacgattccccgatttatatttacagtaccattaatattttctgttcggcggcagatatcaatgagctggttgaaatgttcaaaggagaaaccggggaaacggaagaacaaaaggaagcagagtattcggaaaagacgcaggatcagtgggaaacacaagacgaaatgaggagtgaataa

SEQ ID NO: 43930 - DNA, 3348 bp, Roseburia sp. CAG:18
ttgagtcaggcaaaaaaagtttttacaaggatgtgccttaacaactggggaggcattgatcataaggtactggagtttcatgaatatgtgaatttgttcagtggaaaaagcggatctggaaaatcgacagtgatggatgccatccaggtcattttgtatggaagtttctcaccgagttttctgaataaagcagcggatgatgcaaaaaatcgcagaagtgtgttaagttatctgcgcggagaacaaaaagacggatctgccaatcgtaaagactgtgatttctgttccgtaattgctctggaaattgaagataccggaacccatattataacctgtattggaattgcgtttgaagtaagaaaatcagattctgagattaaaaaatttgtgtatttcagtcactccgggaaaatgccggagtctgaatatctgacggaacagggcgtctgctattccaatcaggagatcaaaaagctggtcagtgccagaacaaaatccgatgacaaccgcggaaagggagaagtcaaccgcatttatggttccaaagaggcatacctgggaactctgtatgatgtgattctcgggtatattgatcagaaccgttttatcacgatggaaaaaagtgcaattgccctgaaaatgaccaatggaacgggacagtttattcgtgattatatgtttccgaagaacacttccaataccattgccacgattagtgaacaattggattcttaccggcagatcaaagaaaaaatagaagatctgcggaagcggattgagctgttatctgaaattcaggcatcaggaaaggaactggtgcgtctgcagacggatatcgtccgggcagaagccatgatacgctgcatcggtattgaagatttgcgggcaaggattcaggcagcagaagacgacaaaaggaatcttgcagaaaaacaggaacaatgcaagaaaaaagtgcaggaactttctgcctcgcgggaggaagcacagcagaaattgatacaggtcagtgccgatttaaaagccagcgatttagggggaaaacagcagcagtacgaggaattagatgagcgcagcaggatgctggcagataataccagacagtggcaaaagatccttcagggaatgaaaaactgggaagaagacgatgtgatcacggattatatcagcaatccggtactcaacatgattgctgaattaaaccagggaagggtgacagaagaactgtgccagaatctgcatctgaaaattgaatcggccaagcaaaatatcgaggatgaagtggaggattacagagatcagagacgtgagattggaaaacagctaaaagaaaaaaagcggctggtagatgatatgaaacatgaccgcaaaccatatgatgagaatttgcggtcagcaagaagtgcactatcccagcaattaagtgaccgctatgggcagacggtgaaagtacagatttttgcagatcttttcgatgtgcaggaggaagaatggaagaatgcgattgaaggtcgcatgggaaggctgaaacattccctgattacagagccacagtatgcacatgaggcagcagtcctgtttcgcaatatgaagcaatatgaaaatgttgatttgattaattccaaagcgattgcagacagtaagcctgattgtatggaagggtcattgtatgaagcggtaaaaacgcaagaggcttatgtggatgtatgtctcaagcgatatctgggacatatcatcaagtgccggtcggtggaagaactggaacaggtaagagatggagtgacgccggactgttattcgtacagcaattttattttccggcatctgaagaaaaaagattatacgacgcgggcgtgtattgggcgacgggtttccaaagcgcgtcttgcagaatatgaaaaagatgttgaggagttaagccggcaggagatgcagctggatgatctattgcgcagactaaaagaggcaagagattttgaatgtctgaaagatgagccatctcattatgtaaagctgtcgcgggcaggggaggaacttgcaagagtaaacaaaaagaagatggaactggaagaaaccatccgttcgctgcgcgagggggcgtacaaagaactggaagaaaaggaacagtctttgcaaaagcaggtgaaaatggtccaggaggagcttgatcagacacagggagagcttgcacgcttaggcagccgcataggagaactttccggagagaacgaaagccgcaggcagcagcttgaagaaaaattacagggatacgtcccgaatgaagcgttagagcaggaagtctgggaactgttaaagaaacaatccggacaggcggttataaacaggaagaaagcgcaggtcgcagatttagaagaaaaagaacaggcacaggcagaaacgctgcgggcagcgcgaaatcgatatatttttgcgtatccggcaggtccttttaatggagcggaaacttccaacgaggcctacgaaaaactgcttgaaaaatatctgactgattttgaaccggcctacgaagaagaatttgagaagaagtgtgcctcaatctacaagagtctccgggaaaatgtcattgcaacgattcatggggatatcaaagcggcaaaacgtcacgcttacgagattaaccgtctgcttcgggaaaccaatttctccgacagtacgtatcagattaaaattgagcctgcgaagaatgaaaacggacaattttttgacatgcttatggcggaagaactggacagtaagaatctggataatgcagggtttgacggtcagatcagtttcggagaagatgcattttatcagaaatatgagcagaagatcaaacttctgaccgacaagtttatgccaccaaaagacgaggatgagcatttgcgggcacagaagcgcaaagaaatggaacagtacgcagactacagaaattatctgtcattcagcatgtttgaacaggtaaccgatgaacatggaaatgtgattcgggaaaactttgtcgatgatatggcgggcagggattccggtggtgagggacaaaatccaaagtatgtagcactgcttgctggatttgccatgctgtatatgcagcagagtaagcgggattccaaaattaagctggtactgctggatgaggcgttttccaaaatggatcaggagcggagcgcagtctgtctgaaatatgccagaaagatggatctgcagctgattgtctgtgtgccggatgagcgtttgcagtctctgatccggaatgtggactgtgtatatggattccgtcggtttaaaaaccggatttccatgatgcatattgataaggggcagtatctggaaatgatggaaggataa

SEQ ID NO: 43931 - DNA, 1206 bp, Roseburia sp. CAG:18
gtgggcagaaaaaaagagcaggaacataaaactttagcccgttggatcattgataaaaccaataccgatcattacagggcggggatgctcagtggatggaaacatccgtatattgatgcggatgttatggaaatagtgggtggaagaaaacagcttttggatcaggcaaatattcttgaaaatgagacaaatgcgggaaagatggggaagtttaagcccgattggaaagatgtaaaaacaagtattaagaaaattgattatgatgttgcgattattccggaattgtgtgaaagggaacaaatcgaagatccaagggaaaggcagcttcgtctcattgcccgtgtggaaaaatggcggagaaaaggacaggattgtgcatggttgtgctcctactatgatgatttattggatctgttgaacagaggcaaagagcagaaagaactggaagatgaaaccttttttgtatgtatagatgcagttgcacatcaaaaggaacacgtctggaaacgggtgttcagtgcgcgtgtccttcacaattccaaatgtttccaaaaaaattatgaggatagaatactgtctgttttaaaagaaaaatccccattttatatagaggaaatgagtgatgatgaactgctggatgcgcataatattcattcttatgcgcagacgcttgagtggaaaggcacactgcagtatattataaatgatgaaaaagtaattgattcttcatcacagatttatggaacgattataaatacacagacaatggaacatgcaagggcgtatgccctgtcaggttgcaaaagaatcatgacaattgaaaataaagcaaactatgaggacatgtcttatagaaaagatactctttatatattttgtcatggttttttctctccaaaggaagttcggtttttgaagacgatttgtgatctggtttctgaggaatgtgaattttatcattggggagatctggattatggaggaatctgtattttccagtttattaaggcgcaggtattcccaaaacttcttccatacaaaatgagtcaggaggattttgaattagcagtcagggaggatgcaggtattttattaaaggaagataccagaaataagctgataaggaaaaatgcaggactactggaaccattaaaggaagcaatacttaagtcaggtctgacgatagaacaggaacggctgttgtag

SEQ ID NO: 43932 - DNA, 1407 bp, Firmicutes bacterium CAG:212
atgcagttacgttttgaaattccagataaattctgggggctgttccggtcggttaaccgggaggcttatatggaggcgttattgaatatcaatgaagaatatcaatacagtaattatttcttaacacgggaagtttgtattcaagtgttaagtgatatgtatataaagaaacattttcagttaaaacaggaagaggatgaaacagagttcgatttattggagacaccggcgagcagaacattgaaatggctgcttcggacaggatggcttaaaaaactagaagactataatacgcttgcaaccaatattgtaattccggattatgcggcgatttttattgatgcatttgaacgtttgggctcagaagatatggaagagactgagatttatattcagaatgtatatgcgacactattttctttcaaaaatgattccagagtaaacttaagtatgctgcggactgcattggttaatacaagaagattgaataaagcactgcaggatatgcttcataatatggataaattttttggacgattattggatcagcaatcttaccatgatctgttaaaagaacatttggaaggttatgtagaagaaatcgttcgtaaaaaatatcatatattgaagacatctgataacttttatatttacaagacggatattaagaaatgtctgcgtgacatgagagaaaatgaagagtggatagggctggttagagagcgttctaaggcaatgggggatacgaaggatgacgtggtagacttgttggatatgattgagagaggatttgatgatattgaacatcggatttcaaacatggataaggaacataccaaatatgtaagagcgacggttacaagattgaattatctgctcagcggagaaacagatacgaaaggtttggttgttcaattgcttaatcagatgtcggcagctgtgacagaagaacagaatacacaggtggaaaatcgtggaaatggttattcttatgaggacatgctacagcttaccggggagcggatgaatatgtctctattggaaatgttgtcggagaaatctttgtataaacggagaaagccaagggaagatttcattagtcagatggcagaggatgagacgatagaggacttgaacagagaagatgtattgaaactgaacagaattttgcaaagatacagcaagcaggaaatcgaagcttttattgaggaacatatgaaggatgatgttatggatgtagagaaattgaaaatagcagatgaagagtccttcgagaaactgatattggcatatgactatagcacaagaagaaacagcaaatatattgtgcttgaagaggatacgccacagattgaaaatggatgttataagtatccggctttaaaatttgtgcgaagaggaatataa

SEQ ID NO: 43933 - DNA, 672 bp, Firmicutes bacterium CAG:212
atgatagaatactacgaacaattgctgcaggaagagcaggaagcgattaccgaaataatccagacgctttttcgtcagacatttatattagaacaaaaatttgaccgccgggcaggtcgactgcagtatgaaaaagattatcgcgtatgtacgcgacatttcgaatttctaaaagcatactttgcgatatcaggaattcagttatgtgaaaatgtgcacatgggaattatttatatccaaggcgaaacgctgtggggagagaaattaccgaagctggtaacaatttatttactattattgaaattaatctatgatgagcaaatggcaacggtttcatcaagcagccatattgttacgacacttggggcaattaatggaaaagcaggagagttccgggttttgaaaggactgccatctccgacggagatgaaacgtacaatagcaatgctgaaaaaatatcagattgttgaaccattggattcattggaagaattaaacgaagctaccagggtggtaatttatccaagtattcatgcggtattgctcggggatgatatccgggaactgctgacaacatttgaggaagcaaaggaactgaaatcccagcaaagcgtttttcataaagaggtagagagtgaggaggaacatcgtggagaaacaacagccatttga

SEQ ID NO: 43934 - DNA, 3378 bp, Firmicutes bacterium CAG:212
gtggagaaacaacagccatttgaggccctttcaaaaatatgcctgaataactggcattatatagatagaaaaatattgacacttagtgagggaatcaatttttttacaggacattccggaagtggaaaatcaacggtgttggatgcgatgcagatagtgctttatgcagatacggatggtcgtcggtttttcaataaagcagcggcggatgattccgaccgctcactcatcgaatatcttcgtggaatggtcaatatcagtgagaataatgaatcacagtatttgagaaataaaaatttttccagtactattgttttggagtttgaacgtacagatacaaaagacaaacaatgtgtcggagttgtatttgatgtagagacagcaacaaatgagattagccgtcagttcttctggcatacaggcggacttctggaaaatcaatatcgtgcggaaaaaaggtgtcttacaacggtagagatgaaagaatatttaagcagaacatttaccaaagagcagtattattgcggttcaagtaatgaacgattccgtcgacagctgtatgatgtatatcttggcgggttggatattgaaaaatttcctcgactgtttaaacgtgcaattccatttaaaatgaatatcaaattagaagattttgtgaaagaatacatttgtatggagcaggatattcatatagaagatcttcaggaaagcgttatgcaatatggacgtatgcaaagcaagattgcggagacaatgaaagaaatccgttatctgacggacattcgggaagcgtatcagtcttatgaagaaaaacagcaggcggccgagagttgtgattatcaggttgaacgtttggaattgctacagctgcaacggaaaagtaaagagttgcgggaacggattatagaccggacagagggaatcaaacagcaacagacacaacaggaaaaattgaataaggagctgaaagaacttcaaaaggattacgaggatattctatatcatattgcaaaaagcggatacgattcgttgcagatggagcttggcaatttaaatgaagtattggaacggctggaaaacagtaaggcaagaatacaaaagttgtctaagaaattgaatttgtggaaagataaagaggttactccaaatcagacaatctgggatattgagaagtttgaaaaaggaacaattacagagggggaactggaacgtctgcaaaaaagccttttggaaatccgggacagtctggaaacagagcgcactgatacggtgacaacattaaatcgtattaaaaaagaagaaaaagagataaaagaagaattaagagaattaaagcagggcaagaaagcatatccacgcgagctggaagaagcacgttttgaattgcgcaaacgtctgcatgagcgtgttggaaaactggtaaatgtacagattcttgcagaccttctggatgtgaaggatgagcgttggcacaatgcggtggaaggatatcttggaaataataagcttttattgatcgtggaaccgaagtatgcaaaagatgcaatggaaatttatcgggagatggataagagaaaattctttagagcagcagtgctggacacagagcgtgtcaatgcagaagaatttgcagtgcaaaaaggagccttggcggaggaagtagaggcaaaagaaagttatgtgcaggcttatatccgatttgtgttgggaaatgttaagaaatgcgaatcgattgaagaattacgtgactgtaaaatcggtattacatcggattgcgtgctttataaaggcttccgtatgcagcatatcaacccggataactatacaagacgagcttatatcggtgagacaagtatgcgtaaacgtattctgcagctggaaagaaaacagggtgagctgcagaacgaacgccttccgttacaagagatgctggaagaaatcaagcgcattttagaatttgaaatgttgttgcagcctacggcggattatatgcagtggcagaatgaagctggtcagatttcagaaaaagagaaacgaaaagcacatgtcattgagcagatgaaaaagctgcgtgaagagtctgtggatatgttggagaaacagaagttagatattgtgcgccgtcaggaagaaaaaaaggagtccatagattcggtgaaaaaagcaatctggcagaatgaacaggatatagaaaagtttaataatatgattattacaacagaaactgaatggttggaacgagaaaaaatgttggcagaagagaacaaacggcgttcagaagaacgaacacagatgttggaaagtcaattcaaacaatatcttgagaaaacaaagtcgcttaattatgattatatgaaacgacaaaaacagatggaacaagacccgttgaaagatcagatggatcgtttttatcagaagttggtcgatgttcgaagtgtgtataaccagcaatatccaaatcgttcattttcaacgagtgtgaaggataataagatgtacgataaactgttggatagtcttacttgtgaggacttggagcgatatcgggcatctgcacaggagcaggcaaaatcagcggtagaacatttcaaagatgattttattttcaaaatccgaagcgctatccgagaggcttatcagcgaagagatgagctcaatcgtatcattagccgtctggactttggtaaggataaataccagtttgtaatcacaaaaaacaaaggtgcggatggaaaatattacaagatgttcatggatgatgcgcttcagatcgatccgcatcagttaagcggttcaatggacaatcagatgaacatgtttacaatggaacatgaagaagaatacggagaaatgatgaatgagttgatccatatctttataccaccggagaatgcaacgaaagaagagcaggatgaagcgagaaagaacatggaaaaatatgcggattacagaacgtatctttctttcgatatgcagcagattgttcatggtgaaaaagatatgaagattgggctgagtaagatgatcaagaaaaattccggaggagaaggtcagaatccattgtatgtggcacttttggcaagttttgcgcaggtgtatcgagtgaatctgtcgcctaaattgcgtcgtaatccaacattgcgccttgtcgtgttggatgaggcattttctaaaatggatgcggaaaaagtagcaagctgtatctctttgatcagaggacttggattccaggcgattatcagtgcaacaaacgataagattcagaattatcttgaaaatgtagacaagacatttgtgtatgccaatccgaataagaaacatatttccattcaggagtttgagaaaacggagtttggacagttgacggaagaggcgtaa

SEQ ID NO: 43935 - DNA, 1359 bp, Lachnospiraceae bacterium CAG:25
atgaaatttgcctatgatatcccagattcattctggagtttatttcgttcgatgaacagagaactttatatggaagccttgctgaagatcaacgaagaatatgaatataacaattattatttaagtaaagaagtatgccttcaggtattagaagactggaacgaaagccagcggatctggttatctcctgaagaatttgaatcagaaactgatgcaagccagacaccaccaaacaggatcttaaactggctgatcaagacaggctggttaaagaggatcgaagatttctcaacattaactaccaatatcatcattcctgattacgcagccgtatttttaacagcatttgaagaattagtcaacccatcaacggatgacacagagatctatatccagaatgtatacgcaacactgttttcattctggcatgataagaagatgaacttagccatgttaaaaacagcgcttgttaatacaaagaaattaaataaagccttgcaggatatgttacacaacatggaccatttctttagccgactgctaaaacagaaatcatatgaagaagtgctggcagaacatttggaaggttacgtcgaggagatcgttgagaagaaatatcatatcttaaagacaaatgataatttctatttatataaaaatgatatcaaacgatgtttaagagaaatgcgagaagatattccatggatggaacaggtacagaagaaagcagataaagaaaaaggcgaagatgtgctaagcattatcaatgcgatcgaacgtggatttgatgatattgaacatcgaatttccaacatggataaagaacattctaaatatatcagggcaacagtaacgcgtatgaattacatgctgaatggagaatccgacacaagaggtctgatgatccagctgttaaagacgatcggggattctaaggacagcgaggaaaagatcaagaaggtcggacagagtatgaatctctctcattttgaagtgctttccgagaagtctttgtataagaagagaaaacgaagagattttgcaagtcaggtagaagaagaaaagcagcaggaagaattatcaagagaagatgtcttaagattaaataagattcatacaagataccagcaggctgagattgaagatttcattgaagcttacatgcatgatgaccatatggaagttaaggatattgatatcagggatgaagagtcctttgagaaattaatccttgcctacgattacagcacgagaagaaacagtaaatataaagtgatcgagagagacgataaattgatcgataatggaagttaccgctatccggcattaacttttgtaaggaggaaaccgaaatcatga

SEQ ID NO: 43936 - DNA, 657 bp, Lachnospiraceae bacterium CAG:25; identical to SEQ ID NO: 42392

SEQ ID NO: 43937 - DNA, 3360 bp, Lachnospiraceae bacterium CAG:25
gtgagtttgacgaagacgaagcagccatttctggcattatcgaagatatgcctgaataattggcattatatagatcagaaaatattaagtttcaacgatggaatcaatttttttaccggacattctggaagtggaaagtcaacagtgatcgatgcgatgcagatcgttttatatgcgaatacagatggtcgtggattctttaataaggcggcagcagacgattccgatcgaaatctgatcgaatacctgcgaggaatggttgcggtcggagagaaagatgaagttacttatttgagaaataaaaacttctccacaacgatcgttcttgaatttacacagacagaatctgacgaaaaagaatgtcttggagttgtatttgacgtagatacagcaagaaatgatacatccagattatttttctggcacaaaggcggcattttagagaatgcttaccgtacggaagaacatgcgatgacaatttcggaactccgcaaatatatgcagaaaaacttcaaaaaagaagatttctattttggaacaagcaacgagagatttagaaaacagatgtatgacatctatcttggcggtcttgatatggagaaattcccaagactgtttaaacgcgcgatcccatttaaaatgaatatcaagctcgaagattttgtgaaagaatacatctgtatggagcaggacattcatattgaagatatgcaggaaagcgtgatgcagtatggaagaatgcgtcagagaatcgaagatacattaaaggaagcaaagagcttagaagagatcaaagaaagtttcgttaaattcaagaccaaaaaagaggaacaggattattgtcagtaccgcatgaacaaactggatgtcctgaaattaaaaacagatattcatctattacagcaaaagattgaagatggagagaaagatctaaagacacaggaagagaatgaaacagttcttgagaagaaactagagaaactcgccaaagaatacgatgcattagtagcacagatcgcaggaagtggatacgatcagatcgcaacaaggaaaaaggatgttcaggagttgttaggacagttaaatcattccgtacagcgttgggaacagacatcaaaagacttaaaaaaatggtgtgatctcgatattacgccaaatcaggcaatctgggatatcgagaaatttgaacagggagatatcacagaagatgatctaaaccgattaaaacatacattggatatcttaagaaaagaaactgaggaagaacgacaagataatgcgtctgcactaagaaccttaaagaaacaggaaaaatccatttctgatgagttgaaagaactgaaaaagggtaacaaagcgtatccaaaagaagttctggatgcaagatatgaattacagatgaaattaagcgaaaaatgtggtgattttgtaaaggtaaatgtgcttgccgatctgttagatatgaaagatgagagatggcataaagcggtcgaaggatatttaggatcgaataaattaacactgatcgtggaaccaaaatacgtcaaggatgccatggaaatctatcgtgatatggatcagaagaaatactggagaatttcgattgcagacacacaaaagattgataagcaggacatgaaggttgaggaaaatgcattgtcagaagaagttcttgcagaacagtcttatgtgaaaaagctgatagaatccttgatcgggcgtgtgatcaaatgtgagacgatcgatgaattaagaaattgccgtactggtatcacaccagatggaatgctttataaaaatttccagttaaaacgattagatccaaaacagtacacaagaaattcctacattggagacaacagtttacgccacaggatcaaagaattagagaaagaaaaggataagatctttgataaaaaagatccattagaaaaagaagttttaagtgctgccgttattttggactatgaatatcttccacagtcagccgaagaatatttaaaacagcaggaaacactggaacgtgcgaaagaacgtcaggaagaatatgaagatttagaaaatcagctgacaaaattaagagaaggtgccttaaaaggtctggaagaggaaagagaccagaacaggttaaaacaggaagattgcaaacaagagatcaatgcaatgaaagaagcaatctgggcaacacagaatgcattaaaagaatgcagacagcagatcattgaccagaatgaagcattgatccgtgcacagaatgaattaccggcaaatggagagtacgagcagcagtttgcacaagagatcgagaagacagacaccgaagactatgaacgtctcaaaaaacgtgcagcaaggaaatactatgatgccggaacgaagaaggaagaagaatatagaaagcttgtggaagtcagaactgcatatttaagggaatatccgaaccgtacattctcagcagtagatgagaataatgatgtgtatgacaagctttataaggaattatcatctgatcacatggaaatgtatcgtgaaaaagctgcaaaacaggccaaaacagcaatggaacatttcaaagatgactttgtatacaagattcgaagcgcgatcagggaagcttatcagcgcagggatgaattaaaccgcatgattagtggactcgactttgggaaagacaaatatcaatttaagatcacaagaaatacaggagccgatggaaaatattatccaatgtttatggatgattctctgaatatcgatccatctgtcttaaatacaacgatggatgaccagatgaatctcttctctatggaacatgagaataaatacggggaactgatgaatgaattgatcgagatctttatcccgccagaaggtgcaaccggtgaagaacttgagaatgcgaaacgtgatatgcagaaatattctgattatcgtacgtatctgtcctttgatatggaacagattgtggatggtgatgaaaaactgacgattggattaagtaagatgatcaagaaaaactctggtggagaaggacagaacccattatatgttgcattactcgcaagttttgcacaggcctatggaattcatctttcaccaaaagtacgaagaaatccaagcatccgtctggttgtcttagatgaagcgttctctaagatggatgcagagaaagttgcaagttgtattgacctgatcaggaatctaggattccaggcaatcatcagtgcgacaaatgataagattcaaaattacctagaaaatgtagataagacttttgtatacgccaatccaaacaagaaaaatatttccattcaggaatttgaaaaatgtgaatttgataatttactcacagaagaatag

SEQ ID NO: 43938 - DNA, 1461 bp, Clostridium sp. CAG:568
atgaccgaaaataacaatgcacgtcttttcgaccgtcttccggatggattttttgcacctttatcccgaaagtataaagcagtttatgcttatgctttagtcaccttgtatcattgcttaaagatttatcgttcttccatcactcgtagttcttatatggatgcgttgagagaaaatggacaagatatcatgtctttgttttctatcgatactgataaggacgatgatagagaagtcgaagaagaagtcgatgttaaagacactttatctgccgataaattctcttacgtagttagaaaattatctcgttgtggttggtttcaaatagacaaggattataagactggtgtcgattatatctatcttccgtcctactctatcaagatgctcgaattgttggatgaattgactagcgatgtttcatcttatatgcctttggttcatcaaacgtattctgaattgaaacttgaagatgaaaaagaagatgactatatgtttagatccttggctaatgcagtaaagaatactgatgaattggaattatcagttacacttttgcatcactcgatcatcgtttttaatcataagttgactaatgtattcaatcctaacgaagtattgaaacagcattttgatgattataaatttgaagtaggagattctatttaccatcctatgaagacttatgattctttaggtctttattctagacctactgtcgaaatattgaataagtggcttagggatgggagaatcgttgcaaaactagcttctcaagctagaatggattctactttttcttctctttcagtttctaaagctacagatttagtcatttcttatttgaataaagtaatcgatgtattcaatagattgaataaatcttttgatgaaatcgacaaggccaatgccgattacactgaggctgttcaaaagaaggttaattacctatcgggtagcgataagtctatcaaaggaaagttagaaaagataatttcttctatggctagcgaattgcagaagaatcctaacatcaatgaggaaaattccccattgttatttaagatggtcgatactgtagattatcatagagcttccatatttgatgatagatctttgttcatgcctttcaagagaacacaaagagaagagccggatcccatggaactttctcctgatatttctgatgaaagcgacgatttgatgaatgatttcttgaacaatgaagtaagtcaattctctgaagcagctgtagagtcgtttatgagaagggcattcggttcgagaaaagaaataaaaactagtgagatttcattagttgaagataatgatttaattctattgattctcgctttggtaagagctgaattcaatacgacattcttcactatggagaaaatagatgataagacgatgaacggacattatcaaattccggaatatgtcttgaggataaaatag

SEQ ID NO: 43939 - DNA, 720 bp, Clostridium sp. CAG:568
atgtcatttcaagaggattacgataagctttcaactggtgaaaagagccaattttctgaaacgatgaacaatcttttatatcattgtttcatagttagaaaacgttatgatgtcactacaggtcttgaaaaaattcagtacgattacacttttatagaaaaacattattctttattcgaagaatatttggatttcatcgatatggtcatttcaaaagatgatgactgcggcgtcattttcttaagaaatgcattggataagaatagagaaagagttgatactgccactacatttgtcatatatactctaagagatttctatgaagattcattagaaaaacaaccaaatgtattgcaggtggctatggattccactcagctgagacaaaagctttctgacttgggattatctactgcctctaagcgtttgtctttacaaactatttccggagctatgaagactttggcttctttcaatattatcgctagaggaagaggatccttcaatgataacaattattcattcttcattcttccttccataaaatatattatttctacttccaagatgaacgcattgtataaattcttaaccggtagtgaagaacaaaatgaagatagttcttcttcaaatggcgagacatatgaaagcactcaagacaaagaagagtctaaagaaggtgtcgttactgcagacaaaaatgaacctgtcggtttctag

SEQ ID NO: 43940 - DNA, 3486 bp, Clostridium sp. CAG:568
atgataaagctcactaaacttagacttatcaattggcattattttacaaatactacagtcgatattgaaaatataactttcttgacaggagctaacggaactggaaaatcaactattattgatgctcttcaaactgttcttttaggtgatacgacaggaagaaacttcaataaagctgctaatgaaaaaactggaagaacattaaacggttatctccgtggagaaatcagtgaaactaaagatggtaatgtcgtttctcttcgtcctggtcgtttcactacttatatcgccttggagtttgcggatactaagaaaaagactcaattcactttaggaattgtcttcgactgtttttcagatggtcatgacgatagacatttcttctatttgaatacaggattcccgtcaaataatttcactaacaaagatttgttagatgctaagtcttcccctcgtcctttgacttataaggaattcagtagatttgtcagtgagaattacaaatctgatgaagccaggttctttgattctaatgagcagtatcgccaattcttaaagactattttcggcaatttgccagataagtatttctctttgtttaagaaatccgtttcttttgtacctatctctgatatttctaaatttattacagaatttgtctgcgatgttcagtataaagtcgatattgttcctatgcagaagaatatcgaacaatatagattattggaaactgagtcccttagaatccaagataaaatttctttgctgaaagatatccatgaagcttatgagaattatcacaatatctcaactgatatggctagtttcaactacattcatgctcgagctaacttggaatatgctaagagacagttgggagattatgaatccaaagttgaagagcatcgccagagattggattatctagctcgtcaagttgctttgatagatgatcaaatcagagaactgaatgctgaaaagcaagactattttgccaagaagacttcatcatcgggttttagtctttctaatgagttatctcaaaaaaaggctaactttgaacgtcaaatcgcagcattgaaagtctctcaacaaaatattttgagagagttgaaaaattatgccgattctctttctagacaggcagtcgattttttatcggcatttaagaacatcaacctcgatagacttggaattgatgatagagataaggatgaactgtcagaattcagtgaattttcaaatgaaatctatgatgaatttaattctttgagcaaagcttgcgatgaacaaagcgtcgatgtcttatctttggaacatcttcaacaagagatggattcatataaatcaaaaggttattctatttacacgaagctagaacagtatctctataatttttccaacaaaaaaactgaattggctgttcaattgaaatccgttcatagtggagctaagcctttcggacctagatataaacaagttgttgatgatttgcaaagcagattgtgtgctcgtcatcctgatgcctatgtaaagaagttctgtgatttggtcgatgtcaacgatcctaattgggctacagcaattgaatcatgtattggtggaaatagattctatgtttttgtaaatccttcctattacaatgaagctcaaagaatcttgaaagatttgatcaacgtttatgacttcaatggagttaacatcgtcgattctaccaaagttatcgaatttatgaatgaacatcctgctagagaagatagctgtgcattcttggtggattcgaaggatgaaggtgctcaagcttattcagattatttgttgggaaagacaaagaaatgtgcaaactttgaagaagccagagaaagtggaaatggtctttgtgccgattgtactggatatagaggctttgctacctggtatcctaaacgcgtcacttcattgttccttggaactagagtttcccaaggttcggtagaaggaatacacgatgagtatgtatctatcgatgaaaagatttctttgctcagttctttggtcgaaaagataacacctttgactatgatggcaatcatgtcttctaacgaagctagaacttaccgcgatgatttgaatgaagttgaaaacgttccagcattagaagagaatgttcgtcgtttgacagaacaaatgaaggaaggagcattatcttcagtcaaagaaatcgatgataagattcatgctatcgatgaggatatagctagtttgaatcaacaaaaagagcaattcactgctgaaaaaggagaacatacttctgagattcgtcgtattcaaaacgaggttattcctgaaaagcaaatggcagtcaaggctggagaacaaactatatctgcttttgatcctaaagctgttgaggaaacatacttgcccaggtatgataaattagcttccaccatggatgtttctcagattgcagaagaagcaaatagattatttgccagagctcaatcgaaacaaaagagtcttcgtgataatttgatgaagactagaagtgcttatgtcactaaatacaatctctcttatgatacaacagatgaatcctctaacgagacattcgataaagaattggatagtttgagcaatgtcttgttgcctcaatatactgagaagatagcgcaagctcacgcaaatgctattaaggaattcaaagatgacttcatttataagttgagaagtttaattactacagttcaatctcaaatcaaagaattgaacgatgccttgtctgatgtgagatttggacgtgatagatatcgtttcactgtcgaacccaacaaagactacatcgattattacaacatgatgatggatcctttgctcttatcagctggagatgctgaagatgtctttatggaaaagtacaaggatttgatgaatcaattgttctctttgatttcagacgctcaggattcaacttctaccaataaggaagcaatcttggccaacattgagaaattcacagattatcgtacatatttgaacttcgatcttttggtcaaacgtggaactgatgataatgctgtcgaatcttctttggctagaacatttaagagacaatctggaggtgaaactcaaacacctttctatatttcaatattagcttccttcgctcagctttatagagtaactcaagatagcgatactttgagattggttatattcgatgaagctttctcaaagatggatggtgttcgtatcaaagaagctgtatccttgctcagatcctttggacttcaaggacttatctccacacctgctgaaaagctcagagacttggctaaactagtcgatgaggctttggttgcaatccatgatgagaaacatcgtatgtcttatctcgatttatatgaagataaaagaaagaaaatcggtgaaatcaaagcagacatgactcaggaagaaactaaagtggtagcaactgacgataatacatctaattcaaattcttag

SEQ ID NO: 43941 - DNA, 558 bp, Firmicutes bacterium CAG:56
atggaactgattgatactcgcatcaacagttattataatctggcaaatacgaggatcatgcagatggcgagcagccgtgtcagactggagaatcttctcggcgatttcctggaccgtgtttccaggatttcaaaagaagagcaggatgcggcgatggaaaaagtggaaaaatgtactcgtgttatcaaccagaaatacgttggttacaaatcattcgagcagaatcggcgtatccgcaacgaaggtcagaatatcgcattaaacaccaatgcgatgtcggaagaagagatgcagaaacggacggagaatctgttccgcagtgcaccgaaccgatatgctccggtccgtgtcggagcatatctggatgaggcacttggattggatgagagcatggagctgaaagaaaagggggtgcagacaaaagaagaggcactgatgatcgcagcggcgatgctttatgcgaaaaatgcagaatttccatacaaagtccgtattaaggacgaaaaagtgagcacgaagattgccgatatcagcaatgtggtgatctcgagaaaataa

SEQ ID NO: 43942 - DNA, 645 bp, Firmicutes bacterium CAG:56
atgcaggatttaagttttataagcaatatgagcgacgaggatgcgtatctgttcaaacgctgtgtgcggcggcttctggatacgacatttcttgtaaaagacaaagaagaaaagctctatcagtttgtggcctccgaatccaaccgttacgacatgaaccagtatctggcagtgatcggctacaaagtggttgtggaagaacagatgggtgtggcgatgctgcagccaaatgatgatgataaagaaacggttgggctgaaacgattgaacctttatcattttgaccagaggcacatgaagctgctgctggtgctgtggcttttatttctggagcggatgggttatgaagaggcagtctatgtgacggtcggtgagattatcgacaaatgcaggctttatgatattgagctgacgccggtcgagtttaaaaaggcatatgcgaccttccgcaggttctgcctgatcgattacagtgacgatatcacaaaagaggacggggctgtgcgtctctatccttctttgcagttctgtctggatatcggacagttgaaacaggtgatggcagaatttgtggaacaggaagatttcgaggcagcggacatggcagacctggaagaggcagaaagtgaggagagcgatgagtaa

SEQ ID NO: 43943 - DNA, 2262 bp, Firmicutes bacterium CAG:56
  modified_base (2236)..(2236): a, c, t, g, unknown or other
atgagtaaaatagttttacgcaatgtacagctgatcaactggtatggatttaccaacacggtcgttccggttgcagaaaatctcaccctgatctccggagaaaatgagtgcggaaaatcgacgatcctcgatgccatcaaatatgcctacaccggtgatacgcagtttaataaggcgacaagcggatataatacaggcgtgggcaagcgaaatctgatctcgtatacacgctgtctggtcgatgcgagtgccggcgtgtatgcaagaccggcggagaagatcccagttgtgtatacccacatcgcactggaatattatgaccagatcaacgaaaaatcctttgtgctcggcgtgatcatcgagacagccgtgacggatatccgcggcacgtactggtatgcgatggaagacaaacatctgtcggatatttcctatgtctatgaagacggttctgccttaaagccgtacgatgcgtccggatttcagaaacgttacaatgtcaaactccgcaagaaacaggatggagtggcattgtttatgcagatggtcggactgaagcttccgtatcaggaagtgtttcgttatcagagaaaacttcgaaatatcatggcatacaatccggcggcaaagatccaggaatttatccgggaatcggttctggaagaacacgatgtcaattttgaaaaattaaaagatgccaagaaaaatattgagcagatcaacagccgtttggagctgatcgaagaagagatcggtgatctggatgcgatcctgaaggattatgcagaatacgatgagcgtgtcatgcagctgaaagtggatgatattaaattaaaatatcgaaatatgctttcctggaaagaaaaacgctgcatggcagaagaaatgatccgcaaaaacagcattgaagtagaagcacagatcaaaacaatcaaagaactgagcacggagatcgatgcacttgaccgttattatatggaagcaaaagccgcactgcgggaactgaatgtttccaaagcgatcgacaattccagacagcagatcactgctttcgagaaacagctggagaagcggaaaagtgaaagggaagagctggagcagttccggaaacgtttgctgcatgtggcagaagaactgaacaaaatggaatgcgaggtttctcattttgaaacgcttggcaaactgacggcagtcgatctttccaattcggagaaacaggaagccatcgatgcactgagagcggaaatccgtaaaaaacgtgacagcattgtgcgaaacagggcttatctggaccgtgagctcaaagaagtgcagctggaacgcagtgaacagagcaagatcgttgaaaactgtgaccgcaacaaagcggattattcgcatgtgcaggaacagacgcagctgatccgggagatcaacaaagaactgaaaaaacagggcatcgatgaagaagcccgcatggcgtgtgaatatgtatcggaactgaaagacgaagcatggcgtgatgcgatcgaagcttttcttggtgtgcaccgctatgcgatcctggtctcgccgcaggcctttgatgttgccaatcaggttatggaccgctccggacatcgttatgtggagctggtcaatacaaagcgtctggctgaacgcaagatcaaatgtgaggaagattcggtctatcattatcttcagattcagaatgagacagcagcaaagtatttccagttctggctgggtgcgatccatgcagttgagctggacgaggttacaaaatacgataatgccatgtcaaaagaaggaaaactcggcagaaatatggcagttacttacatcaacacgaaaaagatcaagagctactgccttggcggggcggcgatcgagctgaaccgcaaaagagccgcgaaaaaactggatcagctggaaaaacgggaaaaagagattttaagcagcagacatacgatgcagaatcaggatgtctttctgcagagcagtctggattatttcaaagattacaatctggaagccaacagagaatgtgagcatttaaatgcagagctggaagcagaaaaggtgcgttatcgtgaacttctggaagcccagaaaaacaatgcagaatttatggcactttcgcagcgtgtgactgatctggaaaaacagcttcgcaataaaacacgtgagaaagatgaagagagcaaaaagcgttaccgactggaagcggaaatcgaacagaaaaagaaagacagcncgaacagaaaaagaaagacagcgtga

SEQ ID NO: 43944 - DNA, 1434 bp, Faecalibacterium sp. CAG:82
atgcagctgtttgaactggtcagccccaagcttttccgcccgctggcggggcccaaccgggcttattatgcggagctgctgcttttgctgtgggaggagtgccgccacacggcggattacagcctctcccgggcggaagccgtctcccgggcggaggattactttgccgccgtggcaaagccgctggcgctggatgccgatggggcgggggatgaggacgagcagcccactagggacccgcatctgctggcgctgggctttctgctccgcctccgccgcaccggctggctggaagagcagcccggcagctatgaggaagagcccaccctcgcctttgtgcccgaggtgacgccgctgctggaggcgctggaggagatcctgaacccccgcgtcgtcacctacacgggcaagctttacaaagcctggcagctgctgcggggcatcggggaagaaaagagcccctacgagaatgtcctgcacgaggtggcgtccgacctggaagcgctgaacagatccctgcgggccctcaacgcgtccatcgggcattacatcgaccgtcttacccgcaaccgcaccccgcaggaagtgctggagctgtttgaccagtatgaggaaaaggtggtggcggcggcgtaccaccgcttcaagaccagtgataacctcttcaattaccgtgcctacctcgaagaagggctggacgagtgcgagaacaagtacctgccccagctggcgctggattatgcccgggtggagcgctgcgcccccggcgaggccgcgccccgggtgcgggccctcatccagaagcagcgggacgcgctggaagagatgagcggcctcatccgccagatcgacgacagccacatccgctaccgcaagcgggcggtgcagcgggcgcagttcctgctcctgagcgaccgctcggcccagggcagcgtcacggcgctgctccgccgctatgccgaggagatcaagacgccggatcagctctttgagcccgacgacggcccggtggcaaagcggctccacctctacccggtgcaggtgtttggcgcaaagcccctctacccgccggcggctccccgcggcgaagccccgctggccccggtgcggcaggccgcgctggacccggaacagctcaaaaaggagcagaagctcctgctggattacgctcggatggccgtgaccgaagaaaacgtggagctgctggcccggcaggcgctggccgcccggccgcgggtcacggcgtccacgctggccgccgagtacccggacgattttgcccgggtcatcggcctgcacacctattcccaatcgccccggcgggactatgacatcaccctcacgggcgagtgggtggagcggggcggcttccgctttgaagaatttgtattgacaccccgcagggaggacggaaacgatggccgaaccgaataa

SEQ ID NO: 43945 - DNA, 606 bp, Faecalibacterium sp. CAG:82
atggccgaaccgaataaaatgttggaagaaaccgcaaactatctcctcaaccactgctttttgctgggcggggtggaagaccagcgggcaaaatatctctatgtgcaggatcatctcccggaggtgcgggccgtgttcgcgccgctgggctatgcggtgctgctttacccggccccgctgcaggcggcggcccttgtcaacgagcatgagggcagccaggcccggctgctgaaatacgagagcatcctgctgctggtgctgcggctgctttatctgcaaaagcgggagagcctttccgccagtgccgatcaggtgctggtgacggtggaagaggtgcaggcggagctgcagaaaatgaatttgccccgccgcctcgaccagcccacgctggagcggctgctgcgtaccctgcgccgctacaatctggcccggccggtgggccgcctgagcgggctggacagccgtgttgaggtgttccccacggtattgctggccctgccggacgccgacctggccgatgccgccgccgagagcagccgcacccggagcgagctggctttgtacgaacgccctgacggggacggcgctgcggaggtggaagaatga

SEQ ID NO: 43946 - DNA, 3354 bp, Faecalibacterium sp. CAG:82
atgatcgaattaaaacgcctgagactcatcaactggcacaactttgaaaacgtcacctttgattgtgcccgcctgacctatatgatcggcgtcaacgccgtgggcaagaccacgattttggacgccatccgctactgcctgaccaccaaccgcaatttcaatgccctgggcaataaaaagagcggccgcaccctgcagggctccgtccacgccaagcagcgcggtgagaatgcttaccgccgcccgggccgcaccgtggcctacatcggcgcggaattctgggacaccgccaagcgggtgccctttgtcatcgccgtccgggtggagtcggagggccccatgcaggagctgcaccccggcgaccagacctggtacatctcggaagacggctgcacgctggagcagctgccgtttatcgacccgcgcaccggggctcccagcgccaaagaagacttcaagcccgccacggggcggctctcttatacccgcagccccagcgaggcccgggaccgcatctgccgggcgctgggcattggccgcgcgtccagcccgctgggcaaaaagttcaatgaagtgttccagatgggcaccagcatggacgagatccccaacttccgggaattcctgtatcagtacatcctgccccagccggaattagacctggatgccctgcagggcgaccgtgtggagctggaaaacctccacgcggtgctggccgaagcccagacccgtgccgccgcgctggagaccatcgtgaacgatggccgggaagccgccgaaaaagagaccgccgcccttgtgaaccggggcgcggccctgctggcccgtgccgctgccgatgccggggaagatgccacctggcagggccatctggaggccggaaaccgccagctggaaaccctgaacgcccagtatgaggcggccaagaacgccgaggccgaagcccgccgggcctatctggccgcccacagtgcggcctctgccagcggagagggtgccgccctcgacgtcatgaccgaggagctggcccggaaaaagagcgcgctggacgctgccgcccgccgtgctgccggggccgaagccgcggcaaacaaagtcacagccctgctgcagagccttggccgcagcgggtttgcgattggaaaagatctctggccggaagccctccgcgcggagacgctccccggcctgactgacgccctttccggcgtggaaaaaccgctggaagagcagtatttcgcggcccggcaggcggttgcagacctgctccgggagcagggcgccaaacgggcggaactggacgcggtctcgggcggcaagtgggtctacccccacggcgacgctgccacccgtgtgcgggacgccgtcaacgccgagctgcagagccggggcatgacgccggacgccaaaattttctgtgagctgctggccgtggaggacgagagctggcaggactgcgtggaggcctgcctcggcgaccgccgctttgatatcctggtgccgcctgcccactatgccgccgccaagagcgcctttgtggccctgaaagagaaggttgggcccatcagcctgctggataccccgggcatccgcaaggccaaccgccggacggacaagatcgctccggacagcctggccgcgcaggtcaccagtgaaaatccgctggccgcccagtacgcggagaccattctgggccgcatcgtctgctgtgacacaccggatacgctggaacagtacccggacagcgctacccgtgatctgctccgccaccatccgttccggctggaacgcctccgcgcgccccagcggtatattggtctggatgcccgccgcacccgcgccgaggccctgaccgccgagctggaagcgctggccgagcgccgccgcgccgccgagcagaccgaaaagaccctgaaagcggcctatgaccagtaccagaacgccctgcggggcaagacgctggaggagcttggcgctttgtgggacagccgcgcggccctgaccgctgcccggcaggcctacacggcgcaggagcagcagttggccgactgccgggagaaccccatgctccagcagctctacaaagaggaagaggcccgggagaaagcctgggacgctgcccgcgctgccgtggagcaggtgggcggggacatccgcgtctgccagaagcagctggcctcctgtgaggctgagcggaaaaaggcggtggagacagcgcagaccagcgccgatgccgccaatgcattctttgcaaagtatccgctgctggagccgctggcccgggagcgctgggcggccctctccggcccggacaaggcaaagcccgaccgtgccgtggcacaggccgccgaaaaggcccagaccaagctggacgaggcgttgcagctctacctgaccgggacgctggagcctgcccagaaagcctacaacgagcggtacgtctgcgattatccgctgggccttgcgggggcagagcagtaccgtgcccagtacgagagcttggtccgcattgacctggagcggtacgccgcccgcctcgagcaggcccagaaagactgcaaggaccgcttccgcaaggacatcctcttccggatgaaagacgatatcttcaacgcccggcggcagttccgggagctgaacaaggtgatggaacagctgacctacggcgaagaggtctaccgctttgagctggagcccagccgggatccccagctggcggcgttctatcaggtcattgtggacaaaggcaaccagcagatgaccgattccgattcgctggacaacatcgccgccaccgccgaccccgtttacgagcggcaggtggatgagctgatggaaaagatcatggccgatgtggacgagaacacccgcgcccggcaggagggccgccgccccgagggcgtcaccctctcggactatgtggattaccgcacctatctggattacgacatcaaagtgaccaacacggtgtccggccagcaggcctatctctcccgcgtcagccgggattcctccggcggcgagaatcaggccccgttctatgtggctatctgcgccagcctgctgcaaatttaccagaagagcgagaacagcatccggctggtgctgctggacgaggcgttcagcaagatgaccagcgaccgcatccgccccatgatggagctgttccgccgcctgcaattgcaggtgctgctcatctccacggtggagaagagcacggccatccagccttattgcgacattacctattccattgtgcgccatggcgacgccaacgccatcgcgccgttttaccggctgacgccgcccgcgccggagaccgaagagccccaaaaggagaacgaagatgaatga

SEQ ID NO: 43947 - DNA, 390 bp, Clostridium sp. CAG:43
ttgtttttgctggaaaataatgagtttatcgataccgactcgatccgctatccgcgacgggagcagatgatccgcgaggcaacctatgcggagctggaagaaatgacacaggaggacatcgatcgtgcgagggaggcacaggagagggaggcagagaacccgtattcgaaggataagatgaagaattatctggaggcgcttttaggagatcggacggagatatccagcgaggaggttccgatgaagagcaagcgggatcttttaagcgcgctctcggcggttgcatatggttcggaaaatgggtatgagatacaggcggaggatggttatctggaaacgcagcagatgcttctgcggcgctttaaaatcgaacgccggaaggagaaataa

SEQ ID NO: 43948 - DNA, 687 bp, Clostridium sp. CAG:43
atgggatttgaagaaatatggaatgaatatacatcctctgagaaggacatgttccagaaaagtgtcaggcgtcttctgaagcagacctttatcgtgcgcgaccgtgacgaggacagcaaaaaagcgtactattttgtctccaagcgttcggaaccattttcagcgtacctgggatatatcggatacgatattgtaattgaccgggaaaatggcgtgattatgctgcagaactgccgggatctcggcgagaatggaaaactgcagatcaaccatgtgacactcaaaaagatggagagtgtggttttatgctgcctctggactctctatgcggaccgggtgcgttctggaaatctttcgaaaaatattgagatttcggtgaccgatctgcgctacgagatggaaaaatacggcattcgggatcagattgacaagagcagttttgcatcgattctgacgctgtttaccaaatatcagcttctgcaggtgattggaaagctcggcgaggaggactgccggatctgtctttatccgtcgatgcagtttgtgctggaaccacaggagtttggcaaatttgtggaaaatgtcaaccggcggatgcaggaaaagtggagccgtgaggacgaatgggaaacggagctgacaaaagaggaggaagacggcgatgaagaatcagacgatcatgaatag

SEQ ID NO: 43949 - DNA, 3261 bp, Clostridium sp. CAG:43
atgaagaatcagacgatcatgaataggaaatcggcgaaaaaacttttgatggtccagtggtcgcgtttccagaatgtctgtatcgagctggaaggttcgaccctggtgaccggtgtcaacggaagcggaaaatcgacggtgcttgatgcgatgacctatctcctgacgggcaacacgcagtttaacaaggcggcgaaggaccgagaccggacggtgcttggctatgtgcgcggcgacacgcgcagtaatggcgaggcgcgttatttgagaaatggcagcgttgtcagctatattgcgatggaattttccgatccgacgctgggagtgccgctcacggtcggagtatgcattgagtctccaagtgagtctggcaagccggtcagcagctggtttatctgtccaggggcagcgattgacgatatcgattttacacggattgagggaaatgcactccgcatcacgccgaaaaatgagctgacagtgaatggcgaggcgatgaagctttcctcttttatgggacgggaccgcggcacggaggcggtactccgggcgctgggactccgcgtggacgcagccaaataccggacaaagcttctgaaaatgatggcatttaacccggaaaataatatcgaccagtttattcaggactgtgtcctggaaccgggaaaagtccagtcgctggaggaactgcgcgagcagaagcgccagtttgagcgcctgcgggaactctatgagagtctcagacagggcaaaatccagctcgaagaggtgcttcgccagagtgacgaatacgagaagaaaaagcggggactccgcatccgggagctgatgctttcgtaccaggcgctccgggagaaggaagaggaagaaaagcagacgaaaaaccgttatcaggctttaaaagaccagtacgggcgcctgaccgagcgggcgggagagctcatccggcagcaggaagccgcgcaggaacgcttgcgaattgcagaaaataacgatatggtcaagggaatgcaggaaagcctggattccctgaaacgccagatcgaggaagcggatcgtgagaaaaagaactgggaggacaagctggcgcagattttgaaattgaagaagaagataagcgcgcttatcaagcttctggaagcagatcttccgtccttatcctcggaaaacacctatctggagacactggaacaggcggatggggagacggcgaagaagcgggaggcgtttgacgcattccgcgagaaggtgcaccgtcaggacggcatctatgaggaaaataagatccacctgcaggatcagtgtaaagagcgcgaaaaagagataggggcgctgcaggagaagatccgccgtctggaatcgaatatccttgtgttcccggcggaggtggaaaatgcccggaataagattcagagagggttagaaaaacagggtatccagaccgaggtccacatttttgccgaattggtccaggaggtgaccgctccggagtggagaaaggcggttgagacatttctgggaagaaagcgtttctatatcatcgtggacggcgcgcactgccataaggcgatgcagattttacagaaagagcggatctatgatggaaatgtcgtgatcacggataagcttccggaaacagaggcggtggaaggttccgcggcggagattctgcggatcccgaacgtctatgcgagacgttacgcaaattatctgttaaacggcattcatctctgtgaaaatctggaagagctgcatgaatacccgaagggcggactcatgcgggatggcatgctggcgaagagctatgcggttgcgatgatggatatgagacggaccgagctgtgtctcggcgcagacgcgatccgctgccagctggaacagtccagaaaagaactggaagaattacaggtggttcagcgggccgataaagaggcacttttacaggttatcaaataccgtgatgcgatcaaggagatcgactgggacggcggacactacgatttcggcgcggcatatgggctgaaggactgcggaaagcgcagggacagcctggtaaaggaccgcgaggagatcgaggcaaatccggactttaccgcagtcctgaaagaactggagacggcgggacggctggcacgcgaggcaaatgagagtgtgaaccagaaccagagtgagctcggcggctgtaagaatgatttaaagggctgcgaaggaacactgggccgtatcagcacggagatctatttatgccagaaggcatatgaggaaaaatgccttgtcaacatggaactcaaagaggcgatgctggaggaatataaccgcgaaagcgagaagcgcggcacgatccgcgtgacgacacagctttccatcgacaagagcaaaaatatgctggcagagcgggagcgccagctggaggacgcacagctggcgtattgccgcctggcgggaattgacgtcggaaagcgcggcatcggttacatcccgtggtaccgggaagaataccggaacctggcgcatgtcaaggtggaggaagcccagcagaagctgcaggagcaggcaggacggctggagagcgcgtttatgaacgatttcgtggcggagattgacgagaatgtccgcgaggcaaaacgtgagatggacgcgatcaaccgcgaactgcgccatatgccgtttggcaacgatacctacaagtttgtgatgaaagaaaagccagaccgcgctctcttcttccgcatctgcaggcgtctggaaaaatatatgagttccccgcaggtctatatgaattcggcgcgcgacgacgaggagatggagaatgatattcaggagtttatgagtatcattctggcggaagaagatgagtgggaatacacggattacaggagatatttctcttacgatatggagatcagcagccgtcagggacagaccgagatcacggcagagttatcaaaaaaacagggttccgccagcaacggcgagaagcagaccccatatttcatcattctggcggcgagtcttttgcagtgctacccggcaaacacctgctgcgcccgtctggcattcatcgacgaggcattctcggcattgtcgagagagcggatcgagcagatggtccattatttcgaagaaaatcacttccaggtattctatgcagccccgccggagaagatcaacagtatcggtcagttcatcgattcaaccgtcagcctgatcgtgacaggacggtatacgaatgcggtagaaggattggtgaagcaggcatag

SEQ ID NO: 43950 - DNA, 1278 bp, Clostridium sp. CAG:43
atggcggatcggaaagagtggaaagaacagcttttaagtaaattgctggatcaatacgaaaaaagcgtcacctacgccggtgaaaacaaggtaaaacaagtgttttcggtcaaaccatccgatattttcaagggctacaacaaagattttctcccgccggaacagcttttccaggaaaaagaatttgaacgactgatccgtcagatggaatcggagggacttattcatgtagttcctccgaatacgggtattctccgtcagatctatgctgtcccggaacgctgggaagattactatgcctgcctgaaccggacagaaaagaatattctaaaaaaacggctggaagaggtttatcatcgcttctgccaatgcgatttattggagtcatatggaaaagaaaagcttcagacaatgaaaaacagccgtgcgagaaagctggatgaaaagaaggtagaaaaagagataaccgaggcagaagctatctggaatctggtgcaatttttaaaagaaaatcaggaaaagcagagaactacgctggagcgggaaatgtcagaggcagttctgcatgacagtaaacagtgggaaaagatataccggaaaaaggtgtgtggaattttggagcacacggggcggtatgatgaaccgcttgcggagctggaagaagaacgggagcggcagacggcgcttctggaggaattttacatttattccaatccggcgtatatctatctgaaaggggatgcgcggatctgccttgaagacggacgtgaacttcggatttatcacgatctgccgatgtcgatcccgtttgagacattccagaaggcaaaaagcatccagatccgggatgcggcgctgatgacggtggaaaatctgacctcgtttcaccggctggagcgggaacatatattttatctgtttctgagcggctaccatacccgcacgaaacaggcgctattgcagcggatcgccagagaaaatccgggactttcctggcatcattttggcgatctcgatccagacggtctggcgatcgcggggcatctgatccgaaagacgggactgccgtttcagctatgcgcgatgggtgtgcaggaattgcagcggtttcagacatatgcgaagccattggaagcacccgatcgggcgaaggcggaagcgatgataaaacagggcagcagctatgcgggaatattgcggtatatgttggagcacaactgtaaattggagcaggagattataagctggcaggagacgaggttggagagctttctgtaa

SEQ ID NO: 43951 - DNA, 1464 bp, Roseburia intestinalis CAG:13
gtgaaattgatatacgacatcccagcatctttctggggcctgttccggtccgtaaaccgggacatctatatagaagcacttctgaccatcaatgacgaataccagtacaacaattactttttaagcagagaagcatgtgtccagattttaagtgacatgtgctcctctcgtcgttatgcctttatgagagaggataatgagacagaggaagatgtagaaactgcattgccgggacgaatcctaaactggctggtacgcacaaaatggcttagaaaaattgaagattatgaggcaatgactaccaatatcgtcataccggattatgcggcagtgatgatcgaggcatttgaaaaattggcagaggagccgttagatgacacggatctttatatccagaatgtctatgcgacgctgttttcctttaaaaatgaccaccgcatgaatcttaccatgttaaaaacggcacttgtcaatacgaaaaagctgaataaggcattgcaggacatgctccacaacatggataaattttttgagcgtcttttgaataagcagtcctacgatgaacttttaaaagagcatttagagggttatgtggaggaagtggtcagacgcaaataccacattttaaagacaagtgacaatttttatatttataaaatggatatcaaacgctggttaaaagaaatgcgggaagatgatgcctgggtggagcgcatccggcagaaacagcagatggaacaaaagagtgcagaaaacagatcttccgtattagattccaggcggaccgaagaggaacttccatttttatatacgcgaagaaacaggcaggaagatgtgttggatctgatcgaccagatcgagcgtggatttgatgatattgaacaccggatctcaaatatggataaagaacacagtaagtatatccgtgcgaccgtgagccggttaaattatctgctcagcgatgagacagaacgccacggcatgctgatcctgcttttgaacaaacttggatcggctgaaacagaaagcgaacagagtgagatgttaaaagaggtggcggaacatatgaatctgtcatcttttgatgttttgagtgacaatcctctttacaagagaagacgccgcagaaaatttgaggatgatctgcaggaagaggaggagccggcagaactttcacgggaagatgtcctgcgcttaaataagattgagcaccgttatacggcaaaacagatcgaggaatttatcgacgaacagatgacagatggcattttagagacagaccggatggatatttcggatgacgaatcctttgaaaagctgatcctcgcctacgatatcagtatgcgcaaaaacagcagataccgggtgcaggtggaggaggaacaggttcagaatggaaactattgttatccaaagatgacttttagtgtaaaacaaaaatcaatagaaagtgaacggaattaa

SEQ ID NO: 43952 - DNA, 753 bp, Roseburia intestinalis CAG:13
atgtttgaaggttacgaagagttaaatacgcaggatgtggaacggatgcaggaagtgataagaaccttacttgcccagacatttctgccggaacgaaaatatgataaaaaatacggacgaatgatgccggaccgtatgtatgatttcagtgacaggcatttggaatttctgacggagtattttgcggttgcagggataaaacttcgtcaggatacggagcttggcatcatttatttagagggagcagacggaatcggtgaaaaactgccgaaacttgcgaccatttatctgctgctgttaaaactgatctatgatgaaaaaatggcggctgtttcttccagtgtcaatgtaataacgacatttggagaattaaatggaaaagcgggagaattccgtctcatcaagggaccgtcatcgatgacggagatcaaaagagcgtttgccattctgaaaaaatatcagatggtagagtttttggatgtgtttgacgaacagcttgaaaatacgaggatcatgatctatccgtgtatcaatttagtattgatgagagaagatgtgaacgggcttcttggcagtttttccgatgaggtaaaagataacgaggtagacgggcaggagaatctggagtggagcagtgaggaaacactttcagaaaatgatatgacggatgaagaaagtgatcttgaaccagaagaaatgaatgtggatgaggaaggagagacagaagatggaacagatgaatcaggcatataa

SEQ ID NO: 43953 - DNA, 3357 bp, Roseburia intestinalis CAG:13
atggaacagatgaatcaggcatataaagtttttaccagaatctgcctcaacaactggcattatattgaccgcaaggtgttaggcttaaatgagagcatcaacttttttaccggtcattccggaagtggaaaatcaacagtgatcgatgcaatgcagatcgtgctttatgcgaacacggacggacgtggatttttcaataaggcggcggcagatgactctgaccgaagcctgatcgagtacctgcgcggtatgatcaacattggcgagaataatcaggcggaatataagcggaacaaaaacttttccacgacgatcgttcttgagatggaacagacgatcacgaaggaaaaagaatgcatcggggttgtgtttgacgtggagacagcgaccaacgagatcaatcgtttatttttctggcacaagggagaactgatcccgggggattaccggaccaagagccgtgcaatgacgatcagtgaggtgcgcagctatttgcagcagaatttcccgaaagatgagatgttttacacctcaaataatgagagattccgcagaaacctgtatgacgtctacttaggcggattggatatggaaaaattcccgcgcctgtttaagcgtgcgatcccgtttaaaatgaatatccggttagaggattttgtaaaagaatatatctgcatggagcaggacatccatatcgaggacatgcaggagggcgcgatgctctatggcaggatgtgccgcaagatcgaagccacgatgcaggagatcgaagagttaaagcagataagtgcgcagtatcaggcgatggaggagaagaaaaaagaacttttaaactgccattaccggatggataaactgacgatcttacagttagagcagaccatagaggaaatgcagcaccgtgtggaaaactggaaaaaggatgttgtactgcagaacgaaagtctcgccgaactgcttgaaataaagggaaattatgaaaaagagtacagcgagatcaatgagcagatcgcaggaaccggttatgcaaggcttgaagagcagttaaagagtctggaagaaaacttaagccttttagagcgaagtaaaaacaagtgggatggtatctgtgcaaggttaaacggctgggaggatgtagatattgtttcgaaccagatcttatgggatatcgagaaattcaaagaaggcacgatcaccggcgaggagattgagcgtttaaaacgaagcctgatcgaagtgcagaaagaagcggaaaaagacagacaggaagcttccgcagaaatccgttccatgaataaagaggcggatgtcttagagaaagaactcgcagagttaaaacttggcaagaaggcgtatccgcgggaattagagcttgcgcggtctgaaattgcgagaaaactctccgaacagaccggaaaaaatattcaggtacgcatctttgctgatctcattgatattaaagatgagacatggcgcagtgcgatcgaggggtatctttcctggaataaacttgcactcatcgtggaacctgcctacgtcaaacaggcgatggaagtatacgagacactcgatgaaaaacggtttttccgtgtgtctttggtggatacggaaaaactgatgcaggaggagtggcgcataaaggataatgcgctcgcggaggaagtggaggcaaaagagccgtatgtgcgggcatttgtggatttcctgcttggaaatgtgatcaagtgtgcttctgtcgatgaactgcgccagtgcaagatcggtgtgacggcagactgcctgctgtaccagagttaccagctgcgccgcttaaatcctgacaattacaagaaacatgtctatatcggtgaaaagagtaaaaaacagcgtcagaaggaacttgccgccagccttgagaaattagagcaggacagagcggaatataaggagcgtgagacagaggcgagaaatatccttgcccaggaatttttaaatgatacggttgaggaataccagaacctgatcttagatctttcggagaagaaggaaaaagaaaaacagaaaatcaaaacagaaaagaagatggcagagatcggtgccggtactgtggaaaccttaaagaaacaggcggaggagatccacacaaaacagaaagagttagaagcaaaaattgatgatttaaaataccagatccggaaaaaagaagatgccattgaaaaggacggcaatgatttcatcacaagaaatgaagaacttcttgcgaaaaaacgggaactccgcggttccattgaagcggaggaggcatttgaagcctacattgccgggcagaaaaataagaagtatgacagcatgaaagcggcgacgcaggaggatatgaatcaggcggcggtgcagtgcacagagcagaaaaataagctggtcgatgtccgcatgaattatctgcagaatcacccgaagcgtgatttttcggcgagtgcggagaacaatgatgattatgataacctgctgtcggaactttcctgcaatgagttagaggaataccagaaaaaggcagccgagcaggcaaaggcagcggtagagcattttaaggaggattttgtatacaagatccgaagtgccataaaagaagcatatgtgcgcagggatgagttaaaccgcattatccgcaacctgaactttggtaaagaccgctatcagtttaaaataacaagaaataagggagcagacggtgcattttatgacatgttcatggatgaggatttagagatcgatccgtcctcacttgcgtcgccggtggaacatcagatgaacctgttttccatggaacacgagaacaaatatgggatgctcatgagcgagttgatccgcatctttatcccaccggaaaatgcatcccagcaggagcttgatgaagcaaaacagaacatggtgaaatatgcggattaccgtacctacctctcctttgagatggaacagatcgtggagggggacgaaaggcttgtcattggtcttagcaaaatgatcaagaaaaattccggtggagagggtcagaacccgctttacattgcactgcttgcaagttttgcacaggcgtaccacatcaatctgtctgcaagactgacaagacgcccgacgatccggcttgttgtgctggacgaggcgttttccaagatggatgccgagaaggtggcaagctgtatcgagctcatccgcggactcggtttccaggcgatcatcagtgcgacgaacgacaagattcagaactatattgaaaatgtagataagacatttgtttatgcgaatccgaataagaagagcatatcgatccaggagtttgagaaaaaggatttttcacagttggttgtggaggaggagtaa

SEQ ID NO: 43954 - DNA, 1251 bp, Roseburia intestinalis CAG:13
gtgatccttgatgattatgaacatggcgatactgattggagaaaatatcctaatcaggggcaaaatgatgggaaacgttctatcagaatcgttcaggcgctgtatgatgaaatcggaaaaacagagctgaacaggcaggttttagagttgcaggcacgtcatctgttacaggatggaaaagggcagaagataagtggatggtacacaaggggaagtgaactggagcagatcgtatattgtttgtctgatattccgagattttatgaaatggatgggcgggtgccaaaatatgagcgctattttgaaccatttttgaaacttcgtcaggagttacagaaattaagagggcgccagcagacctggaaaccatggatcgatcaatgtattggggagctggaaaatgacctggaacgtgaaaaaattccgaaaatatgcaaagatgaagaaacaaaggaaatttattttaacacgttagccggattaaatgagatagaggaaccggtttcaagacggatattcagtaaaaaatacctgaaaaattcaaaatcatttcagagagcagtccaggataaaattatttcggatgcgagaaaattttgcccggatgtggatgctgacgaagaagttatgggaaatgacgaagtattatcggaaattgggattgagacatatcatcaggaactttctgtcaaaggttcgctgcagtttgaacttgcaggaaacaaaattgataccgccctgtttgcctatggtacgatcttaaatgcagagacattaaaatatgcaaaactattgccggagcagacaattcgaaaaattgtaacggttgaaaataaagccaattttatggaaatgtcatatgaagagggaacgctgcttgtctattcgcacggttttttctcaccgaaagagaggcttttcctgaaaaatctcagggagtgtctgggagagcagggggcagagtattttcataccagtgacttagattatggcgggatacgtatatttatgaatataaaagagaaaatttttccagatgtgaaaccgcttgcaatggatgaggagacattttttaaatatcaggaatatggggaaaaacgggatgaaaaatatttgcaaaaagtaagggacacaaacgttccggcagaattaaaagaacttaaggagtgtattttaaaaaccggttgtacgatagaacaggaaagtatgctttttagcaggagggagttatgcagacatcagcagagttaa

SEQ ID NO: 43955 - DNA, 1374 bp, Clostridium sp. CAG:245
atgaatttattcgataaaataccgaaaaactttttttcaatactagtatcaaaaaataaaaatttatatatagatgctttatttgtattaagagatgcttttaagcaggaaatgagtatatcaaaagaaaatataatctcaaggctgataaatagtttagaagatgagattaatcaagaagatttttctgaagatgaaaatgtgagtgatttaaaagacaacaatattacaggtaaagcatattttttattgagaaaattagaatgggctggttggattgaaagagaaatgcagagagactcattcgaggaatttataattttaccagattattcaataaagtttattaatttattgtattcatttacagaagaaaagcaggtcgaatataactcatatgtatttgctacatacacggctttaaagtttgcaagtacagagaaaaatgaaacatataatgcggttataacagcttataataatacaattcaattaatagatgaactaaaatctgtatataacagtcttggaagatttcacagaaaaatgtgtaatcaagatgatgttaataatataataagccaacattttttcgagtataaagaatatagtgatgagatgatttttcctagatttactagagattctgttccgaggtataggcttccaattatagagttattaacggaaattttagcagatgaagaaagactacagaatgctataaatgtggcctacagtagtaagagatacaagactaaagaagatgctgaaaatgacatattaaataaaattagaataatttctgaaatatatgagaatattggaacaacgatgaatgagattgaaacaaaaaataatgactatgtaagagcatctgttaagagaatacaatatttactgactaatgataaagaattgaaaggtaagttagtaaatatattgaaaaattcaaaaaatgaacaagtaattgacaaaatgatagaccaattacagttatcaagacaagaatatttgtctaacgattctgtttatataagaacgaaaaatattaaaaaacaaggaaaatcgatgccagtaaaacaatctaaaccgatagattcaagagcactttatgattttgctaagagcttggaaaatatgtatagtaataaaacaataaatgagtttatggagaaaaactttaagaataaaccatttattagctcaagtgaaattgagttaaatacaacagaggacttaattttattaatactatcaacaataaaggcagataaatcaagcaagagtttttattacatagaagatagtgatgaaacaataaataataatggatacttaattccaaatattaagtttataaggagaagttaa

SEQ ID NO: 43956 - DNA, 645 bp, Clostridium sp. CAG:245
atgttcgaagaaaaatataataatttaactggagcagaaaaagaaaattttaaaagaattacgagtttattacttaatagaacttttatggtaaatagattttatgataaaaatcaaggcacttttaggtctaatagtgattacaggtttattgatagaaacatagatttatttagagaataccttgaaatagctggttataggctattgaaagacagcaattatgaagttatttatatagaaaacgagtatgaatataataaaaagagattagataaaaatacaacaatattcttatatggattaagactgaaatttgatgaggatagagaaagtgtaaagttaaatactgataccattgttagtgtatctgacattataaaaactttgatagacgttggtgcatttaataaaaagccttcggatatggatataaagacggcactatctaatctagcaaaatttaatattattcaaaaagttgatggaaaatttgaagatccagaaacaaaaataataatctttccatcaatattatttgctgtaacaaacgaaaaaattacagctttgagccaaacaatatcaattttagaagaaaatgtagaagatgacgaaaatgaagaagaggaggactctgaggaataa

SEQ ID NO: 43957 - DNA, 3339 bp, Clostridium sp. CAG:245
atgaagaaactagaaagaatgttattgataaattggcattatataagtaaggaaatgattgaattttcaaatattaatttcttgactggtaaaaacggctctggaaagtctacgattatagatgctttgcaacttttgctattgggagatactagaggaaatttctttaataaggctgcaaatgatagaaccgaaagaactcttgaaggctatttgagaggcgaaattggtgatgatggggatacgggttacaagtatttaagaagtggaaaattttctagttatattgtttgcgaattttatgatacggttacaagaaaaaatttctgcattggagtcgtatttgacgtttacaatgagagtggctttgaacataaattttttatgtttaatggaagtattccggaaaatgaatttataggagagaataatattccgttttcatttgcagaattgaagagcttcttgactagaaaatatggtaataaaaatttagaaatatgtacaagtaatactcaataccaagtggcagtaagaggaaagctcggaggattaaatcagaagttttttaatctgtttaagaaggctgtaacttttacaccaataaatgatattgaaaaatttatagtagaatatgtgtgtgatgtaaaaaatcaaattgatataacttctatgcaggaaaacataagacaatataatagtttattaaaacaagtagatgtaatgaatactcagaaaaatcaacttcaagaaattgaaaatacatataatggctatcttgacgaatgtatgaaacaaagagaagcacaatatttaatatggagagccgaaaaacagcaattaattgatgaatatgaaaatctacaaaagcaagtccaagatgataaagatggcaaagtaagcttagaggaaacaacgacacaacttgaaaaaacaaagggcgagattgaaaaagaaatatcagatttaacagtaacaagagcaaattctgatattaaaataaagagtgataagattactgccaaaatacaagaaatagatagtaagcttaataacattagtgaaaaggcaagcaaaaacattgcaactctaagaaattatacattaagatggaatgcaagcatttctaaactagaaagtgcaaaagacaaagtaaattatcaaaatataaataatactagagatttaataaagtacatagatagtataaatgaaaatatttttaatgaattagacataaatgcaataacagaaacgagaaacaatatatcagatttaataaattggggaacgagtacttattttgataaaaagtatgaaatagacaataagaaacagactagagaagttctaattcaagatatagaaaaattaaagaatggaattaatccatatgattcacaatttataaattttaaagctatgttggaggcaagactaaaagaaaagttttgtaaagacatagaggtatcaattttagcagatttattagaaataaaagatgcaagatggcagaatgcaatcgaaggttacttaaatacgcagaaaaaatatttaataatagacccacaatattttgaagaagcttcaaaaatatatagagaacttgcacgagaaaacgaaaaaatacattcatttggtatagttgatattgaaaaaattagaaaagacaatgcatcaaatgcacttgaaaatagtcttgcaacagaagtaattactgaaaatgaattggcaagaacatatgttgattacctattaggaagagtaattaaatgtgaaacaatagaagagttaagaagccataaacaagctataacatcagattgcatgttgtaccaaggatatgtgcttagaaaaatagatcctaaattctataaatatccggttataggtaagaaagcattagaacaacaaaaacaaataaaagaaaatgagcttgctaaattggaagatgatataaataattttgaaactgttataaatgcagtggatagtattagaaaaatggctaactttggagaagaatttttaccaggcttagaagaagacattatcgaagcaaagaaaaaatctgaatatgatgaagaaaaacagaaattacaacaagaattagacagtatggatttattctggttaaatacaatttctgaaaagataaaagaaaaagaagtagaaaaaacaaaaatagaacagcaaataaaggataatagtttaaaattaggaatactaagtgaagcaataaagaatatagaggaagaaaggcttcctagaataagcttatcaatagaagaaaagactaacaaaattaatgacttttatgatgttgaatggcaacaaaatgttggtgaacagaagtatgatatacaatcattaaagaaaactgcagagagaatagcagagtcatattctaatatcataaaaggaataataaaaagaaaagaccaattgcatgcagaacttatagacaagagaagtgattttaatacgaaataccaatatgcatataacattcaagatgcaagcaatgaggaattttctaaacacttgaaaaaattagaagaagtggtattaccagaatatacagaaaaaataaaagattcaagacagaaagcatatgagcaatttagaatagaatttttagacaagctaaaatctaacattgatgaggtaaagaaacaaataaaagaactaaacagtgcactgggagaacacagatttggaacagattcatacagcttcaaagtatctccaaagcaagagtataaaagattttatgatatgcttcaagacgacttattactaggagactgggctataggacaggaacagtttaaccagaaatattctcaagagataaaagaattatttgaaaaaataactacaacagatgtgaataataattcgatttcaagtgaggagtatgagaaaaacatcaaagaatataccgattatagaacatatttgaactttgatttaatagtaaaagataaacttggaaacgagcaacgtttatctaagacattattgaaaaagtctggtggagaaacgcagacaccattctatatatcaatattggcatcatttgcacaattatatagaactaagagtaatgataataccataagattaattgtatttgatgaggcgttcagcaaaatggatagcgagagaatagaagaaagtattaagctcttaaagaagatacaatttcaagcaatatttgctgcaccaccagaaaaattgcaagatattcaagcactagttgattcaacattactagtattaaatccggaagaacatgagattgttgtgaagaagtatactaataaggaagaataa

SEQ ID NO: 43958 - DNA, 249 bp, Clostridium sp. CAG:245
atggattttgagaagattattttaaatacattgttagataaatacgaggctagcaaggctttatatgaaacttctaatagaagaatcatattaaaaatgaagaatctaactggttataatattgaaaattatgatagaaaacagataattcatgatgtgatatttgagttaaaaaaagaaggcataatagatttttcttggcaaaaatacgagaagcggaaacataatagaagaaatttggttaaataa

SEQ ID NO: 43959 - DNA, 1518 bp, Bifidobacterium adolescentis CAG:119
ttggcggatgtaagacgggaaatggaacggctccggcccgtgtatgagaccggggtgctgcgattgctgctgcgcggcaattccatgctgtacgtcgcgctgctgcgctccacgttcgacccgctcaccggcgagctgccacgcgagatcgtcgaggaacggttctcccgcagtctgacccgacttgcggaaacgggcgattacacgcccaaggaagggcagacgtccgcggaagccgcgcacacgatcctgcagcagctgacgaaggaaggcgagggcgactacgcttggctcgccaattcgctcgacgtcgcatcgcaccgctacctgtaccgtctcacggcgcgcgcccaccgtgcgatcgaggcgctcgaccggctcgaggacaccacgaaagcgctgtccggcgcgcaggccaacagcatcatcatggagatcgagcatgcgcgcatgcagctgaccgccgacccccgcgaacgcatccgcctgctcgaacgcgacatcgaggagcggcaaaagcagatcgacgaattgaagcactgcgacacgttggacaagctcacctcgcagcaggtcggcgacatcatcggcgtcatccacaacacgctgcgcggcgtgccgatcgacctgcgcgaactggcgctcgaggaacgcgacaacggcgacaatctgcgccgaagcatgcagtcgggctccatcagcgtggagcaggcgctcggcacctaccatgacgaataccacaggtcgttccacgaatccgacagcggccggcgtttcgaggacgcgttccaggtgatcgtcaccgacgagggacgccgtgaaatcgacgaggcggtgcgagacatcgcccagaacccgtatctcgagggcgagcccggcatcctgctcgcccaggtacgcgccgaactcaaacgcatctacgagggcatcgaggacgtgcgccggcagatccgcatatccgacgaggcggtgagccgtctggtgcgccagcagaccgacacgcattaccgcaccatgctcgacaagctccatagactgttcgtgcgggccagcgacgacgcgaagacgcaccccggctcggacgaacgcccataccgtacggacaccggcacggcgcaattccaggcattgccgtccaggcccgcgaaatcgatggcgcgcgcggccacggccggattggacgacgcgccttcgacgaacgtcaacgcgccggacctgaaggccatggtcgagatgtgcggcccgcggctgacgcacatgatcggactcatcaggcgcgatccggtcaaaacggcggacggcaggttcgtggatttcgcggcgagcttcaaccggctgccccgggaggaacggcgcgaaagcgagctgatcggcttcctaagcgccctacgcacgcaggacggaccggcaaccgtggcatggcattgcgtatccatcgacggaggcgagcgcgtgtggcgcaccaggccgatcctcaccaccgaggcggcgcttgacgagatcatcgaggagggatga

SEQ ID NO: 43960 - DNA, 840 bp, Bifidobacterium adolescentis CAG:119
atgacggacaacaccgacggattcgacactggcatcggcatcgaagaggagacaggcccggaatccggcatgccgtccgaagggccggatatgacgagggacaggccgggattgttcgacggggatacgggagacatgcctcttgaggcgcgtatggccgcgatcgcgctgaaacgcgaacgctacatcgacggcagcctgtacgacagggcgtgccagtaccgtgaggccgtggaacggtcgttgaacaacgacatgctcagactggtcgacaacacgaaataccggatcatgtacgcgtcgccggtcacggacgcggagacgaacatccgctcgttgaagacgcgtgtgagcctcacccgcgaggaggccgccacgctcgcggccctgcgcatcaaggtgctggagtacgagaaccagaagacgaagccgggcgactggctcatcagcttcgacgacatccgcgcgctgctcgccacgggagcgggcttcctcacggccagcaacgacgaggagggcacggcgaagaagatcacgtccgtcatctcgcgcatgcgcacctacgggtatctcgcggaaacgagggacgagaacatgtacgtgctcacgccattggtgccgatggtgctcgaccagaagctcgccgaccggtggctcggctccgatgatacggacggcgatggtatgaaagacgcggatggcgatggttatgacgattcgtccatcggcgcggatggtggcgatacttccgattcgaccgggacggtttcgtccggcgtcgagcaggacgcgttcgatttcgattcggccgatgacgcttttgatggagggcaacactga

SEQ ID NO: 43961 - DNA, 3459 bp, Bifidobacterium adolescentis CAG:119
atggaagacggcatgaaaatcgtttccgaccgttggatgctgcaaagccggcagatcgtcaactggggctcctacggcggctaccacgtgttccgcccgtccatggacgatgcgatgccggtgaccctgctcgccggcgcgagcgaatcgggcaaatccacgctcgtcgacgcgcagatctcgctgctctacccgtccggcaccccctacaataaggcgtcgaattcgggacgttcggaacgcaacgactacacgtacctgcgcggcatgatcggcatcagcgacggcgaaaacggtgagaccccgatcttcctgcgcggcagggacgcggacggcaccccgcagaacatctggggcgcgctcgtcgacacatacgcgaaccgcagcgacggcggactgttgtcctgcgcaaaattcctctacctgaccgcaggcgacgggccggacggactgcgccgccaatacgtcacctggaaccagaccatcgacccgcgcctcatggaccggcaccgcgacacgtcattcacgcgaggactgatggaacagacctacccaggatgcacgacgcacgtcaacgcgcaggcgtttcacgcctccatctggcaggacatgggcctaagcgccgaagcatgcaggctcctgcacaagatccaatccgccgacgcgccctccaaactcgacgacatcttcaaacagggcgtgctcgacgtgcccgaatccatccggctcgcccgcgaaaccgtcgacgactacaaccggttcagcgagaacttccacagcatggaagacaaaatggaacgcgtcgccatcctgcaggacatacaagcccgctacggcgaatacgccaaacaagccagcgaacgccgcgaatacacgcccatcgaccccgaccgcgagcaaggcgagacgacgctcgccgcatggacatggtcgcgcatggccagcgaagtacgcgccggactgccatcggcgcaacgcaaagccaaggaatcccaggacgccatcgaccggtctcagcagcgcatcgacgaactcgacacgcaaatcgaagctgtcaaagaacgcatgaacggcatcgacggcggcagcctgcagcaactcggcaaggacttcgaacgcgcacgccaggacgccgacgaggcgcgcagacaacggcacgccatcgccgaacggttcgaacgcgtcgaaggcagactccccgccgacgagcagacatggaacgccaaacgcgccgcgctcgccttgtcgctcgatacgtacgacaagcgtttggaagacgcgcgatccgaataccagcggatggtggtggaacgtcacgcccggcagggcgaacgcgacctgttgaggcaggattaccggcgcaagatcgaacacaggacgcgcatcagcgacgacatggaccatgcgcgcacgctcatcgcacgggcgacgggcttggacgagacggaactgccgtacgtggccgaactgatggacgtggacgaggggaacgagcaatggcgtctggcgatggacgtcacgtacgcgcccatcgcgcagaccattctcgtggacaagcggcatgagcaggggttcgccgcgaaggtcagcgcgatcgatccgacgcgtatgacgcggcgtgcctggcgtttcgtcgataccgacgcgcaatacgattcggcctgcaacgaggggtggatgtcgtcgaagctgcggtacaaggaggattcgccgttcgtcggatggttgaaggagcagaccgcgtcgcaacggttcgacgcgcgttgcgtggaggcgatcgacgacatggaccgggccgaacggcaggtgcaggtcgacgggcagatcaaatccggcgaccgtggattccatggcgtcaaaggcctgcgtcaggtcatcggcttcgtgaacgaacggtatctggccgaattggaacgccagcttgacggggcggaacgggcgttggaggacgccgaccgccgcggcaggcagatggccaacgccatgactctgctgcaggacgagcatgagctcgcattgaccgtcgcggatctgccatggggcaagatcgacgtggacgggctcgagacgaaggcggaacggatccgtctgcagatcgaacggatcgaaagcgatccggaactggcacaattgcaggacgagttgaaacagctgctacggcagaaggacgacgagggcaagaacaggtaccgtgccgaagcggaattggaaaacgtgcagcatgccgtccaggccgaacaggcatggctcgacatgcatggcgactccgatttcgacgatgccgcattgtccgacatggtgtcgaatctgctggccgacacgtatgagacctgtttcgacacgtcgcgtccgcaggaacggccgcagcgcatcgccggcggtttcgaccgtgaggggacggcgccgttcgacgtgcgcgtgctgcgcagaatcggcaacaccgtgcgtgcgagactccagcagatcgacgagcgtgccgtccaattgcgcgccgacacggaacgcgccatgggcgactatctgaagcaccattccacggagggcgacaccgtcatggcgagcgtggaggactatccgtatttccttgacgagctcaagaacctcaacatgctcgtcacccgcgccgcgaccgacgaggagtatgcgaacagcgtcgaaaagctgtatatgagcttccaacagctcaaccgcgcgttcaacaccgacgaggagaacgtcagggagcagctcgaccgcatcaacggcatgctcaaaggccaacagttcggcccccgcggcggcaggctctcgctccacgtggacttccacccgatcgaccggcagttcaaatcctcgttgggccgcatcatgtcgaagctcgacgattggacacgcaacgcgcgcagcaatcccatggagacgcgcaaggcgttcgcaggctgcgaaacgttcatcggcaggctccaggcggaactcggccagatccgcgacacgaacggcatcaaggaatacggtgcgcgcaacctcgatccacgcgtgcgcagctcgttctacgcgatcgtgcaccataacgatctgcccgacgaacgcatcagctccaccggcggcaagtccggcggcgcgttgcaggaactcacctcgttcgtctacggcgcggccctgatctacctgctcggcggcgacctgaccggcaagcccacctacaccacgctgttcctggacgaagccctcatcaaagccgacggacgctacacgaaacgcgccctgaccgtgctgccgcgcctcggcttccagatcatcgtatccgcgccggaaagcaaaaccgccgagatcctcagcatcgcagacaaagcgtacgtggcatacaaggatcccgcaaccggcaactcgtacctgcaggagctcgaccgcgagccggcaacgcaagccgaaacacaagacgccaccgtcgagcagacgcaacccgcgacggaggcataa

SEQ ID NO: 43962 - DNA, 1233 bp, Bifidobacterium adolescentis CAG:119
atggcagcggccagagacaccacaggcgaaacggacatccgccggaaactcgacgaatacgtcgacgcccacctcaccaggcacatgtacgacaccgacgaatcctggccgctgcgcaaaaccatccgactgcccaaacaagccgaactggagcagcactacaaccaaatccgcgcccaaaacgaaaccatccgcgactgggcgcggcaacaccactgcgaaaccagcgagaaaaccaaaatcgtctccagcggactcatccaacaaaaaagcccgctcatcgactccgtgaccatacccgacctcgacaccgccctccgcatcgccaccaaacaaacccgcgaacgctacctacgcgaacacgaccgcatgagcgcgctcgccaaagaattcggcctcgaaccggcgaacgccatgaacgtcgccaaaaccctcaaagaccacgacgacaccgacttccacctcgtcatccaagccgcccactacttcgcaaaccacgactgccacaccatgaccccacgcatggcgcccatcccaggattcagcgccaaatggctcggcacacccaactcccaacgccgcaaagcgatatgccagctcaccggacaagacaacctcaccttccaggaacgcccgaacgaactccgactacgcctcatggacgccgaacaccacgaccaacccgacctcatcgtcacccaaccatgggtccgcaaccagccaaccgacatcgaacacgccatcatcatcgaaaacaaagacacctaccaggccatgcccaccgtcgaacacgccatctgcatcctcggcaacggatacgccgcaacatcacacatcacaacactcctgccatggctcaccaccatccccaacatcatctactggggcgacatggacgccaacggactcgacatcctctccaaactacgcgccaccggcatcccatgcacatccatactgatggacaccaccgcataccggacatacgaacaatacggcacccaactcgacgccaaaaacaaacccctcaccacacaaaccccacaacccacacccggactcaccaccgaagaacgcaaactctacgaaacactctgcacaggaacagacatccaatacctacgcatcgaacaggaacgcatccccatacgcgacgccacaaccatcctgcacgaccaacaccactggccaatcgacatacccggcaacgacataccaaacaacaccaaatag

SEQ ID NO: 43963 - DNA, 1419 bp, Firmicutes bacterium CAG:882
ttgtttagtgcatttgatgtgattccaaacaatttttttaatccgttgtcaagcagcagcaattacagaaccaatgccgccatgctcaagttcatatatgagcagtatgacaatgagatttcatatagaattaagagaaatgtgctcagagatgagctggcatattttatttctgatcattctgatgagctggcacttgatggggataatatgtcgaagagctatcaggacatggcgagcgactatctcagaaaatttgcgggcagggacgtgggctggctcgaggaggagtttgatgagactacatttgataaatatatcattatgaccgagcagggtgtgatgttagcagagctgctggttcgtttagagcacccggaacgtgaagagctttcaagttacatgtataatatctataatacactgttaaatcgtgaacagtggaacggggatccttatgtgggtgccctcaaaaatgcctacaaaaatgcaaaggcattgtcaaaatcactcaaaaaaatgtccacatatattcgcaaaactattgaaaaactgatgaaagagatttcgtatgagagcctcactgagaatattatcgcatactgtgatggagattttatcaaggaatattcaaggctcaccaagcctcagaacaacattcatatttatcgcggaaagataattacgatgcttgagcagatgcagaacgatggtgaaatgtatgagcttattacgattggctgcgtaaatgaggaggatatagaggagtgggaggccaatgagaagatagatttgatgtttgatacaatcaagaaatttttgaaggacgattatctcaaaattattgcagatattaaacataaattaaatctatatataaccatggctctcgggaggctgagatatctcaagaaccatgaagtcgatatgcgcggaaatgttgaaaaaactttaaaatatatgctggatatgatgaatgagaccggaatgaaagatgagcttccggacgaaatgggtgaacttattcgaataaaccagaacaaatacatagatttgcagtcaatcagaatgccgcagaacagaaagaaagtacggcaaaggtcggtaacgcagatagaacctctgacacaggaggatttggaaaatcagaggaaattacaggagcgcgaagcgagaaatccgtattcaaaggagataactaaaaagtatctggaaaccttgcttggaaaacggcatgagatttcaagcaacgaggttccgctggacaaaaaagaggatttattgatgattttgtctgcggctgcgtatgcacaggaaaatggatttaagatagaacctgaggatggatattttgaagccggaaatatgattttaaaatcatttaaaataacagatgacattaaaaaaacagagttttaa

SEQ ID NO: 43964 - DNA, 654 bp, Firmicutes bacterium CAG:882
atgaatttatttgaggcttgggatgattttatttcttcggataagataatgtttcagaattcgtgcagaaagctgctcaggaggacgtttcttgtaagggataagcaggacgacagaaagcattatttttttgtggcaaatcacatagatatttttctgaattatttttcctttatgggttttgagattaagtatgataaggataacggagttgtgatgcttgataactgtgccggagcgggtgacaaggataagcttcagtcgaacagataccgttttacaaaagaggagactatcgtgctgtgctgcctgtggctcatctatgtgtcaagaatgagggagggaagcctgagctctgttattgtgataggaatatcggatctcatttatgagctcgaaaagtacgatgcgagggataacgtgaataagacttctcttgatggaatttttaaatcattaaaaaattacagcttgatagaggttgacggaaatatcggagatgtggactgcaaattaattttatatccatcactgcagtttgcgcttgatactgatgagtttgagagattttcaaaggaagttgttgaggtcgtgctggcgggaaaggacaatatagaggaggtttctgatgagcaaagtgatgatgatgaatga

SEQ ID NO: 43965 - DNA, 3279 bp, Firmicutes bacterium CAG:882
atgagcaaagtgatgatgatgaatgagaacagcagaaaaagtgcaacgaagcttttgttagtaaactggtcaaggttttccaatgtgtccatcgctttagagggctcgacattgttcaccggtgtaaacgggagcggcaaatccactgttttagatgccatgacatatatgcttacgggcaatacacagtttaataaggcagcacaggacagggacagaaatgttgtatcctatgcgcgtggtgatacgaagagtgagggaaagagcagatttatccgcgagggagaggttacttcctatattgcgatggaattctgggcacctcttgaaaaacaatttcttgtggttggtgtatgcattgagtatgttaatgagacgaacaattcaaaaaaatggtttgtatttaaggacaccagacttgaggactgcagattttataccgtaagcggaaatctggtaacggtttatccaagacaggagcttattgtaaagggaaaaaaggtcatggcaggggagtttatgaaccgtgacaagggtacggaacaggtactcagggcacttggactgcgctgcggagttgaaaagtacaggtctaagctcgtaaagatgatggcgttcaatcctgagaataatatagataaatttattcaggaatgtgttctggacgagcaccctatacgctcaatggaggatatcagggaacatcgtcagcactataatgacgcgaaaagggtgtacgacgagctggctgacggaaagctgcagctcgaggttattcagggaaagacagcggaatatgagctgacggagcgaaagtacgagacaagacgtatcctgctgctttatcaggagatgaaatggaatcaggagcacagggcataccttgaggagaagatagccgttgataaggcaaggctgtcacagctaaatagcaggcttggggatttggcagataagagagagaaagccctgcaaagaaaagtgaacgctgagaaaaatgatattttgtgtgatgttgaagagataacaaagtcactcgagaacagcattgctaatattaaaaaagatatcgcaaagtatcagaacgaattaaaagagctttgttcactttcggagctgctacagaaggttatgctttgtccggagataaatcgtgagttaggcgacagagagacggcggttatagaaggaattgccgcaacagcttttagcgtcgatgagaagcttgcagctttcataaagctcaaaaatatagctgcggataaaaaaatatccttcaataaggataatgtccatattggcgacgatatccacagaataaaagatgaactggaggagctgcaggaaaaaatatcaagacttgaggcggataatcttccgtttgacagaaaatatgaagacgccaagaggttaataaagtcagagcttgagaaaaagaatatcaggacggatgtgaggctgtttgctgaacttgtgagcaatattgacaaggaatggcagcctgccatagagacatttcttgggaagaaacgatttgatattattgtggacggtaaatattgcacccaggtgatgaatattgttcatgatcatcaattaagagatataaaggttgtaattaccgataagctgccaaagacagagataactcctgaatcggctgctaagatgcttgatattccgaatgaatatggacgaagatatgccaactatcttctcaatggtattcatctgtgcaaggatattgatgaactgcatgagtaccctaaaggcggtcttatgattgacggaacacttgcaaaaagctttacaatgacatgtatggacattgctaaaacccagatatatatgggaaaagatgccataaaaaggcagcttgaaagggcaaaagccggtaaggatattttgctgcaggatgagaaaagggaaaaagaaagactggaaatcgtaagaaaatatatatcggatatcgaggcggtcaactgggatgagacaggatatatatttgatgcacagacgagaattgatgataacacggctgaacttagaaataagaattctgagttagaacatgtttcaagcactccgggatttgctgcggcattggaggagaagaacaaggcggaaaaggaatataaggaagcggacgacctgtatatcaggacgaatggagaaatagatgtatgcaataacaacattaaggacaacacggacaggtatggcgatagtgagcatcagattgaactgtcgaggaaggaatatgatgcggccattttgcagagactcgaactgagaaaagaagtcgttgaactctatgacaagcttcgggcaaagagcgataatgcgcgcgttatgaccactaaaaatgttgatagcttcagagtagataaggaaaaagcacaaaaggctcttgaggagcagcagcgaaaatactggcacattatgggacagagtgacgagaaatacggaattggatatatagcatttttccgtgagcagctaagggatattgccaatgtaaaaatagaggatgccaagcagaaattggaggaacagcagtacatgctggaaaatgcttttatggtggattttgttgccgaaattaatgaagccataagggaggcaagagacgaaatcgatgagataaataaggcactcaaggatattccgttcggaaaggatacataccagtttaagatgcttgagaagcctgagagaatggtgttctttaatctttgcaaaaagcttgaaagctatatgaattccatgaatgtataccgttccatgaaccggaatgacgaggagatggaatacaatataaggcagtttatggataccatacttgatgaggaaaatgaggaggaatatacggattaccgtaagtactttaagtatgacatgcgtattctgtcaagacaggacggggagaagacagcggcagatttatcaaagaaacaggggtcggcaagcaatggagagaagcagacaccgtattttattatccttgcagccagcctgcttcaatgctaccctaagaatgtttcatgtgccagacttgcatttattgatgaggcgttttcagcactctcgagggagagaatcgagcagatggtaaagttttttgaggataataaatttcaggtaatatacgcagcaccacctgagaaaattgacagcataggctcccacattaattccactatcagtctatgcatgaagggaaaatatacatgggctgtcgaaggactggtgaagcagaatgaatttaagactgagtaa

SEQ ID NO: 43966 - DNA, 1242 bp, Firmicutes bacterium CAG:882
atgaatttaagactgagtaaaatgcagaaagcggttctgaatatgctgctagatacatatgaaaacagtgcaacctataggggaacagccgcaaagaaccagagcttttcaataaaacctgaaaaggtatatcctgactataatggagattacacggatcacgatgaagtgaatcgcttcaaccaggatatgcagcagcttgccggcatggattacataattttggagtatgcaggaaagagcagtgtgatttgtaaaatcaaattaaagttggaagcattgactgatatctatttatcactgggcagggaagatataaccggaaagcgcagcagagagattgaattgtacctaaaatataagggtaagcactatattattgacgcattttgcgatgaacaagtggataggcttacgcatcacaaaaatgccaaatttacatctgatattgcagtgaatattctggaattactaaaatatattttaaacaatacacaggatattatggagcgtgaattatccatagctgtgctcggagacaccaagctttttgaaaacagttataaatcgcgtgtatgtaaaattatagaagaatatggaaatcaggagatggatttatctgttcctgatatgaatggcacatcggaaaaagagaaagcaatccttgaagaatatcgcattttttcaaatccttcctatgtgtttttcaagggaaatgttgagattttttatgatgatggaatctcaattaaagtgatgccggataaaccaatagcaattttgtcggagacgatagcagaaataaatacaataaaaatttattcagatcgaataataaccgttgaaaatttgactgcctacaacagaattaaagataatacttccgtattcatctacctcagcggttatcacaataccgcaaagcaaaagttcctaaagaaaatagcagagcacaatagtagtgttttatggtatcattttggtgacattgaccccgatggattttttattctgaaaaatcttattgagaaaaccgggataccatttaccccgttgcatatggatgcagggcagctaagaatatatcagaaatactgcaggcatctcgagaaaaatgacattgtaaaggcacggaccttgatagaactgggattttacaaagaggtaatggagttcatgctggagaatgactgtaagctggagcaggagattatttccctgtatgcaggacttgacgtgtaa

SEQ ID NO: 43967 - DNA, 990 bp, Firmicutes bacterium CAG:238
atggagcatccttacaacaacattcttgtaccgatgattgacaatgagagtgaatttaaaaatgaactgaccgatttaaaggacagcatttctgatattatgaaggcagtaatagcatttcaggatatgaactgtttcgggcaattcattatgaaggatcagatgctggatcggtttttcagcgagtatttcttcattaaaaataacggtctgataccgacgcagctttcctttattcgcggcagactgcgaaaactaaaagaacccgagatttatcagaagatgacaagggaatgcgcggaaagactgcagatggacatgcagtctgcggaagagagagtgaatcgatattttgcggagctgcagcattttttgagtatcgagtatgaagaaaatatggaattgattgatacaagaatcaataactattacaatttagcgaatacgcgtatcctgttgatgtcgagcagcggcgaaaaaatggaaagtgtgcttcatgattttttaagtactgtggaaaagctttcggaaaaagaacaggaaacagcaatcgaaaaggttgccgatacgcttaatactatgcagcaaagatatgtcggctataaatcctttgaaaagaaacgcaggatgaaaaattcgggtgaaaatattgcactttacaaggaagaacttacagaagaggaaaaagaagctaaaacggagcaaatgttcagccaggcgcagaatcgctattctgttgagagaaccggagactatcttgacgcacagcttggcatagcagagagcattgaaatcggagaaaaaccgattctgtcgaaggaagaagttttgatgtatgcggcagcgatggcatatgcaggcaatgaggaatttccgtttgaagtggagcttggagaaaaaacggtcgaaaccgaaaccgcggaaatcagcggagcacgcattatacgaaagaacggacagaaagacacaggtgaaaaaatatgggattag

SEQ ID NO: 43968 - DNA, 654 bp, Firmicutes bacterium CAG:238
atgggattagaaatcataaataaaatgaatgatgaagacgcatatctgtttaaacgcagtattcgaaaactactggatacaacttttattgttgcggataaagatgaaaaattatacgactttatcgctgcagagtcaaatcattatgatgtaaatacctacctttccctcatcggttatcaggtgatggtggatgacaggctgaaagttgccatgctgcagcagcatgacgaagatgtggaaacggtaggtttaaaaagggcaaatctgtatcgttttgattcgaaacagataagactgctcttggtgctgtggatgctctatttagaacgaatgggatacaaagagcctgttttcgttacggtaggagacattatcgataaatgcggaatttatcagattagcctgactccggctgattttaaaggcgcgtatctggttttcagaagatttaatttaattgacttcggtgacgacattggccgtgaggacggaattgtacggctgtatccatccctgcagttctgtatggatatcggacagctgaaacgcgtcatcgaggaatacacagggatgccggatatctctgctgaatccggtgcagaagacagcgcagatttattcatagaaagcgaggaagaagagtatgagtaa

SEQ ID NO: 43969 - DNA, 3324 bp, Firmicutes bacterium CAG:238
atgagtaaaattagtttgcgtgaggttaagctgataaactggtacggctttatcaatgaaaatattccgctgtcggaaaacatgaccttgattaccggtgagaatgaaagcggtaaatcgacgattttagatgcaattaaatatgcgtatacgggggattataaatttaatgaggctacgagaaaaaataatacgggaaccggcaagcgaaatctcgtttcctataccagatgcttattggatcccagcgcgggcatttacgcaagaccggcggacaaaatgccaagtgtcttcacacacattgctttggaatattatgacgagatcaatcagagcagctttgtgctcggcgttgttttggaaactgcggcagccgagattcgaacaaccggatggtatgctgctgagaaaaaaactttgaaggatcttgatttcacctatgaagaaaaggggcaggaaaagccttatgacgcatctgacttccaaaagaaaaacggattaaaactgaaaacgagaaaagaagggattactttgttcatgcagatgacggggctgaagctgccgtatcaagaggtcagtgcataccagagaaaacttcgcaatatcatggcatataaccccgcggctaaaattcaggagtttataaaagaatcggtacttgaggaacatccggttaagtttgaaaagcttaaggatgcaaaagagaacattgagcgaatcaacaacagtttggagctgattaatcaggaaattcaggatctggacgaaattctggaaaacttcggagaactggaaaaacaacaaaaccgtttgcttgtagatgatatcaaacggaaatatcaaaaagttctggaatggcaggaaaaattacagaatgcggaacagataatcgaaaagaatcgtctgcagtgtgaagaactggaaaagaaaatcgaagagcagcaggaagtaatacgaaatgctcaggagcagcatgagaaagtaaaagattcccttcaaaagatggatgcatcacaggcaatcgaggcatcccgaagggcaatcgaaggctatgaggagcggtttcagaaactgcgcagggaagccgcgatgctggaaaatttccaaagaatcatcagagaaacggtggaagccgccaaggtaagcgaagccgagcagctgctcgacagtgggatgcttgaaaaacttgtcgattcgaaaacagaagcggcggaaaaacagctttttcttgagaaactgagacgcgctttgcaggaagcgcgcgatgcggtaatgcagcagaaatattttattgaagatgaattggagaaaattcaaaaagaatgcgtcctgcaaaatgaaattttggaggcctgtaaaaagaaaaaagcggactttacttttgcaggagaacagcttgcattcataaaagagataaatcgtgaatttgaacggctgggcatcgacgaacaggcaaaaatggcttgtgaatatgtcatcggcatcaaggatgaagattggagaaatgcgatagaagctttccttgggattcaccgctatgctgtaattgtttctccctcggcttttgatactgccaaccgcatgcttgataagtcagggcacaggtacatcgaattggtcaacacgaaacggcttatgaaaaaggaacttacctgtgaagaagatgcggtatttcatcttttggatattcaaaattcctatgccgcggcatattttaaattctggctcgggagaattcacgctgtccctgtggaagaggtaccaagctatgataatgccatgtccaaagaaggaaagctaagccgaaatatggctgtgacctacattaattttaaaaaaatcaaaagctattgcctgggagaagaggccatcgagctgaacagaatagcggcgcagaagcgcttgaatcttctggaaaaagaagaaacagagcttttgaaaaaacaaaaaacgcagcagcaaaaaatggactcgcttcgcagtacaattgataatttcagggaatttaatcttgatgctcatcgtgaggccgcgcagacagaaacgaagctgcgtgaagaaagaaaacattacaatgaactcttggaagcccaaaggaacaacgcagagtttatggcactttccgagcagcttagccgtttaggcagagaactggacgaccggacaaaaaggcagaaggaaatgagccgaaagaaggacaggcttgaagtcgatacggaaagcaagcagaacgactcgatcgaatacagaagacatttgcaggaagctttagacatccttgatgaagagcgaataatgcatgcatctgttcatgaaaaggcaatcgaagaatatgaccgattccgaaaaggtgaggcaaaaatcggtggtctgatgaagcagaattccagggagagattgcagagcagcattgccaatctgcaatcaatgcttcagggaaggcagatgaactataacaaccgcaagccgccggaggaaaggcttccgctcggcacagatgcagagggtagctatcagaaacggaagacgaaaatctggattgatgatctgcagggaattcaggaaaaaatgcgggagcagaccagaaagtatgaagatattttcaaacatgaatttgttttgagtatctataaacatgcaaggacggctctcagcgatattcgggaaatcaataaagaactcagaaagctgaaattttccacgcaatatcagtttgatgtgaaaatgctcagggatcattccgattatgccaaggtactgaattatgcggaatatctccaaagcaccaatgatttattcgacgatcaaatttcatttaacagcagcggatacggaaagtatgaaaaagacgaaatcgaaaagcgcgaaaatgaaattaaaaatatcattaacaaaatgattgataaaaatgatttatcggaaattaaacgtttcgctgattatcgaaactacatgagttatgaaattttggtgaccgatgatacaatcaaagagggaaaattatccaaaaccgtgggctacaactcaggcgcgggaacgcagattccttatacgctgattctgtctgcggcactctcaatgctgtataacgccagagtcaattctgtgcgcttgattttcattgatgagcctttcgaaaaaatgagcgatcacaatattaaactgatgctggatttctttaaagcgcagaactttcaggttattttttgtgcaccgccgaaccgactggaatccatcggaagtgaatgcggcgtgatcattcctttgttgaagctgaaaaaagaagatatgcgaatcggaaaggtgaagttccatgaacagtga

SEQ ID NO: 43970 - DNA, 1245 bp, Firmicutes bacterium CAG:238
atgaacagtgagacgaaaaaactttgcggcgaaatccttcaaaaactgctgaaaaaatatgacaaacgcagtgcaaagcaggtagagaccaaccgtagaatcactctgagtccgtcggaaatatacaaagcttatcatgccaatgatgcggatatgaggcgaaaagaagccattaacgaagcaattcatgtcttggaatccgaatcgtttgtagcagttaaaagactgaaatacagcgatgaaattgaaaaaatatatatgcctgcggactctgcgagcagtgtgcgggattttctgcaaaatcaatgtggaattaccccacgaaaccgaattaaagaagaagtctttcagctttttactgcttataaacacggcggagcacttgtgcaggcttactgcgaatcactgaagcagcatctgaatgagacggcagaagaaattgaatttgcgaggatagatgcaaacctgaaaatgatagattttcttgagaaaaacagtaaatcgctctatgtcagggaggtatccgttttggtatacggtgattcaaagtggtttcaagagaataattatgaagaaatctgcagcttgctgagggctcttcttgacgtgccacagtcagattatgaacctgcagacgcgatactggaacgcttccatgtcattacaagcgagcaggagattctgctgaaaggacggtggaaacttcactggaagaatttcagcatggattcaagtcagcttcgcggcggcattgcgatttcctcagcggacattccttttatcgctcgtatagagatcggcaccgataaagttatgactgtcgaaaacaagacagcatttcaacgcatggacgaggcgaatttttcgtatctttatctcggaggttatgcaaacaggcatcagcttgctttcttgaagaaagtaatagaagataaccctgaattgaagtatgtacattttggtgacattgatgcaggcggctttctgattcatcaaaacctttgccaggcaaccggaaagcagtttgaattgcattgtatgggaattccggagctggaaaatgagaagttcgcgattgcgcgcaaaccacttacctcaaatgatgtcagaaggttacatacacttttagaaaaagaagaatatagacacacaattgaatacatgcttgctaataattgcaaaatggagcaggaaattgtgagtttgtttttttgccggaggtatcaatatgtatcaattatttga

SEQ ID NO: 43971 - DNA, 1416 bp, Clostridium sp. CAG:299
atgccgttttttgaagccatcaatgataaatttttcaatcccttttgctgccagaacagggagatttattttgagtgtatcagtctgctgattgaaaaatcgaaagaaattccggtattgtatgagacagatgccagaaactgtttgattctttatctgcaaaactgcatgtattctattgagacggagaatattggcgaggaggtcagcagcaggcggacacctcaggaaaacgcctcctccattctccgctattttcgtgtctgtgggtggataacgtcccaggaaatagggcgcagcggggataatattgcgtctgtttcggcttattgccggaaactggtggacgcgatacataaaatttttgacacgaattctaacagtgcgattacaaatcatattttttctatttatgaaatattaaaatcttcctttagaagagacagcgtccgtacaattcggccttattccaatattttacttcccctgattgaaaatgaatgtgatctgaaaaatgaactgctgattctgaaagacagcgttcaggaaattatgcgtgcagtgacaaagatgtcggatgccaatagcctgggacaatttttcctgaaagatgaactgttgaagcgctttttcaacgattacttctttataaaaaagagtggattgattccttcttatattgccagtattgagcgtatgcttcgaacattaagggattccgaattatacgagcagatgataaaggaatatagagatcttaaaaacgtggacgagcttcaggcgaaggagaaaattaaccaccaatttgcggagctggacagctttatcagtctggagtatgatcagaccatgggatatattgataagaaaattaacacttactataatctttattctgtccgcatgatgatggttttaaacagcggggccaatctggaaaatgtgctgaatcaactgctgctttttataaaggatctggataaagaagaacgggataccgtgatacagcagatttctcaaagctatcgtcaactgcaggttggctatataagccgaaagtcctttgaacggcggaaaaaggtaaatccgaatacaaaaaatgcagggattccatcggatgaactgtccatggaggagaaactgcgtctgacagatgaacttttgacagcgacaccggatcagtacagtatggaccgggtaaaggattatctggctgagaaaattccggataaggggcaggtatcggtggaggagtggggtgtccgtacaagagaggatgccatgatgattgcttccagcatcatttattccggttctgtgggatttccctatgatgtggtttttgaagaaggtacagtggaaacggaagttgcggcaatcagccggattaagataaagaggaagaaatatgagtga

SEQ ID NO: 43972 - DNA, 669 bp, Clostridium sp. CAG:299
atgagtgatatcagtctgcatataactgtgaaggaggaaaacggactcctgtttaagaaatgtatccgaaaactcctggagtctacctttattcttcaggagcgagatggaaaactgtatgattttgtttccagagaatcgaactggcaggatatgtcggaataccttcggataatcggatttgaccttctggtggatgataaggcgggtgtagcaatgctgattgccagcgaggcggatatggaaaccgttggccttaaacgagctaatgtagtgacatttaccaacttgcagtatcatctgcttctggtactctggaaagtatatctggaaaacctgggctgcaatgaggggaattttgttaccaagggagatttaattgataaaattcgcgattatggagtgcttgttgtccggacagaattaaatgctgcgttcaagctgtttaaaaagtatagtctgatcaattattctgaggaggaagaaggagaggacatgaagattcagctatatccttcccttcagtttggctgggatctccctcagtttaaaacggttgcaggagaatatctgaaagaggatggagagtccgaaaagacggcagaggacgaaaaaataaatgagcagcaggatatagaaccagaagattttgaggaggaagaagaatga

SEQ ID NO: 43973 - DNA, 3309 bp, Clostridium sp. CAG:299
atgatcttactgaaaaaagtccgcctgattaactggtacggttttgccaatgtaacagcgcctattggcttttttacgctgattgcaggaaaaaacggaaatggtaaatctgccatgttagatgctgtcaaatatgcagcttatggcgatacggtatttaataagtcttctgaaggaaagggcagccggaccgtttcctcttacaccagaggtcttttggacgctactgcaggaacctatatgcggccgccggagaaggtgcccaatgtatacagccatattgtgctggaattcttcgatcaggcagaggaaaaaaatttccttcttggcgtagtaattgaaacgaatgcttccaacaattatcaaacctatcgctatgtgattgacagaaaatcaatggaagagataaaccatacttatgacaaagaaggtattctcatgccatatagcgccacagagcttcagaaacaatacaaacttacgatgttaaaccgggaacagggactgccaaagtttatgcagatgacgggattgaaacttagcatcaatcagatgccagtctatcttaggaaactgcggggaatcatgtcttatgatccagaagctaagattgatcgttttatcagagaaagtgttctggaagaaaaaaacgtagatttcagtaagctgatcgaagctaaaaataacattgaacggctgaatcacacctttcatgcggtgcaggaagagattgaggaactggagcatattctgggagagtatgatacctttgagagcgagtccaacaggcttttatctgacgatattaaaattgtttacaagaagaaaaaggatttgaaaggcagtattgaggagctgacaaaaaaacaggaagaggcagagaaaaagcaaaaagaggtcaaccagaatcttcagattttagatgaacagttaaatgagctggataatcgcctggttcaggcaagagtcagtttgagacagatggacggcgccagaatagtggaggaagaacggagacggctggccttactaaaaaaagaaaagggagaatggctggcgaaatggcgggagctggaagattttcagacgaaagtcagcgaaattcttcacagttttatggaagaaggacaaaccgcagagaaaaaggagattttgtcatccctgtgcggaagcggctattcggtggcagagaaggaatctgcagcagatgggctgaagcggcttgtagaacaggcttatgatgagaaaattcgagaaatcgaccgtttgaatctggcagcagaagagctgaaccgaaagctgaatattcaggagaaaattctggaagactgcaagaagcacagaagcacctatgatcgaataccagattatgtggagctgcggaatgagatcaaccgggaatttgaacagagaaagattaaaagcagagctcagtttgcctgtgagtatgtaatcagcctgacagacgaaacctggcgggatgccatagaggcatttctcggaccacgccggtacagtattctggtagaaccccagtattatgacatagcagatgatgttttaaatcgctcatcccacaaatatgcccatttgtttaatacaaagctgctgatgcggaaagaactcaatccggaagcagattcagtggtacatatgctggaaattaaaaatgaggcagcgaagagatattttgagtttcagctgggaaggatgcatgctgtagaactacagcaggttcgtaatttcgagaatgctatttccaaagaaggaagagtatctgtagccatggacagttattttcttcgtctggatcgcatcggtgtctattatctgggacagaaaatttatgaattgaaccggattcgtgcagagaaggagattcggcgtattcgcgaggagaagcagtctgtgcttgaaaaacgcagggagctgcaaaacagaaagaaccgtctgaatggagacaaagcctttttccgttcatacgcctatgaggctccgtcaaagtaccaggaggtatcgaggctttgcagagattctgaggatcagctgaagcggctggaaaaagctcttaaaaataatcgggaatatctggaattgaatcagctgatagagcagatgcaaaacgaacaaagggggatgaagcaggccagagggaagctggatcaggaaaatagcagtctgggagcggaaatccagctgtgtggggcgagaagacagcagaagaaaatagaacttgaggcagaagaaggccgcttccggaaatatgaaataaacgcttacaccgtagtccagaaagcggtagaggcttacgaaaaattcctggcaggcggcactcagggcggtcttttagcacaggaaacaagagggcgtattgccagaagaattgaacagcacaaaaaggaactttttactctccaagctgcctataacactcattattcaggtggcgaattaactgtgggaacggaaggaagagaactttatgcagccagaaaagatcgaatctggatggataatcttcaggaaatccgccaggaactggatgctcagaccaaacgatacgaggacatctttaaaaatgaatttgtcttaaatatcaggaaatactgtgaaaaagcaagagatgacttaaaacagatcaatggagagctggtgaagctgaatttttccgccaagtatcagtttgatgtccattatgtgaaagatggcacagagtatgcaaaaatcattgagtacgccagatatctggaagagcgggagcagttaggaagctcagacggacagatgacatttgacatgtttacttctgtttctgatgaagagggagaacatctggaaaaagaacttcggaaaattattaaccggattatagagaaaaacagcgaggaaaccatcgcccgctttgcagattataggaattatatgacttatgaaattttagtaagcaatcagattctggatcgtgcaaagctgtcacgccagaccggctttaactcaggtgcggaggtacagattccgtatctgctgattttatcttcagcactgcttatgatttacaatcagcgggtaaattctaccagacttgtgtttatcgacgaaccatttgccaagatggatccgggaaatgtaaaattgatgctgaattttatgaggcagcagaagctgcaggtaattttctgttctccggataaaacagagaccattggaaatgaatgtgaggttctgcttccagtgctgcgggtgcgtcctgacagtatgcagcttggtattgtccagtttcatgaggaaaaggcttatgaaaacatataa

SEQ ID NO: 43974 - DNA, 1215 bp, Clostridium sp. CAG:299
atgaaaacatataaagaaaaaatgttgattttgctggtggagaaataccgaaaaagcaggaaggataatggaacaaatataatttaccgcagaaccagcatttcacctgtggagctgtataaaaagtataataaaaatgatggagatgtggaagagatagaggcagttaaccaggctgcagaagcctgcagcagggatggatttcttacatttgagaacaatggtttcagcagtgagattgcaaagatttacctgattgacgagaaggtagaggagattgaggcatatctggagtcggcctgcgggtatgaaccgaaatccagaaaacggcagtatgtagaacagatgattgcccgctacagcgggatctctccagctgcagacagggaatgtgagcggttaaaagagatccttgcgcaaaataggattccaaaccgttatcttcagacagaggaggtactgaaggctcttacatttattgaaaaaaatgaaaccccgctttatgtgagggaagcgtctatgctgatttacggctcttccaagtatttggaagaaaatacggtggaaagcgtatgcaatctgcttcgggcatatgaaaaaattccttgtgaagagggagaattacaggacgaaattttgcggaaatatcatattattccgaaaaaacaaaaaatatgtctaaagggagatattacactgaaaattgatggagaactgctggaactgggagctttgaaaaatggtattgaattttgtacagaggatcttgaagcgttggagcaggtgattgttcacacaccgaaatttatgacagtggaaaataaaacttctttttaccgttgtgggaatcaggatgtcagttttttctatctgggaggctatgcaactaggtttcagcgggattttttaaaattggtatatcagaataatccgagggtgaaatacctgcattttggagatttagatgcaggcggattttatatccatgaaaatttgtgccggataacagaaattccctttggactgtatcgtatgtcggcggcagaacttcaggatgaacgcttttgcagatgctgccagccgctgagtgagcgggatcggggcagactgaaatctttagtggaaaacgaactttactgtgatacagttgaatatatgttaaagcataatgtgaagctggaacaggagattatcagttattgtgaaaaaatgtaa

SEQ ID NO: 43975 - DNA, 1356 bp, Lachnospiraceae bacterium CAG:215
atgcagttacgttttgaaataccggattcgttctggagcctgttccgctcggtcaaccgggaagtctatatagaagcgctgctttgtatcaatgaagaatatcagtacagtaattattttctgacaagggaaatctgtatccaggcgcttagcgacttatatgtgaaacagcagatcgaacttcgcagagaagaagatgagaccgaaatcgatcttctggagacaccggcttcccgtattttgaactggctgttaaggacggggtggctgaaaaaggtcgaagattacaatacattggtgaccaatatcgtgatcccggactatgcggcggtgatgatcgacgcatttgaacgcctcacatcggaagatatggaagagacggaaatttatattcaaaatgtatatgcaacgttattttctttccggcatgatacaagagtcaatttgaatatgctacggacggctcttgtcaacacgcggcggctgaataaagcgcttcaggatatgcttcataatatggacaaatttttcgcacggctcttggagcagaaaacatacggggaacttttgcaggaacatctggaggggtatgtggaaacgatcgtgcggaagaaatatcatattttaaagacttccgataatttttatctttacaagaccgatataaagagggtgcttcaggaaatgcgggaagatgaggcatggatcgaaaatgtgcgggcgcagtccaaagcgatgggggatacgggagaggacgtattggaacttctggatctgatcgagaggggatttgatgatattgagcaccgtatttccaacatggacaaagaacatacgaaatacgtccgcgccacggtgagccgtctgaattatctgctcagcgccgagaccgatacaaagggactggttgtgcagcttttaaaccggatcgcggaggatctcgagacaaggataaggaaaaccggggaaaagatgaatctctcacagttggaaatattatcggagagatcactttacaaacggagaaaggcgagaaaagatttcatcagccggatggcagtggaagaagcggcggaagatctggatcgggaagacgtgcttcggctgaaccggatccaagtgcggtacagccgacagcagatcgaagaatttatccggtcgcatatggtggatgatgtgatggatgtcagcacactgccgttggaggatgatgagacatttgaaaagctgatactggcttatgattacagtacgcgccgcagcagtaaataccggatcgcagaggaagacgctttgatgatcgagaacggaagttatcgttatccggcattgaaattcgtccggcgcggcgtatag

SEQ ID NO: 43976 - DNA, 687 bp, Lachnospiraceae bacterium CAG:215
atgattgactattttgagcagttgataccggaagaacaggaggagatcaccgaggtgatccagacattatttcgtcagacctttcttttggaacggaaatttgaccgccgtctggggaggatgcagtatacgcatgaatatcgtgtatgcagtaaacattttgaatttttgaaattatattttgcggcggcggggattacattgaatgaaaatgtccaaatgggtctgatctatattcagggagaaacgctttggggagagaaactgccgcggcttgcgacgatttatctgctgatcctgaaactgatctatgatgagcagatggcttccgtttcttcgagcaaccatatcgtgacgacgctcggggcgatcaacggaagagccggggaattcggcgtgcttcggacattgccgtctccgacggagatccggcggacggtggcgcttttgaagcggtatcaggtgatcgagccgttggatgtgttggaggaattgaacgaatccacaagacttgtcatttatccgagtattcatgcggtgctgtcgggagacgatatccgggcgctgcttcagacattcggcgaggcagatgagagacaggaacgtctggaaacggaagacgatatgaaagaaataacgggaggaacgacgattggagaagacacaggcgtttcaggcgctctctaa

SEQ ID NO: 43977 - DNA, 3378 bp, Lachnospiraceae bacterium CAG:215
ttggagaagacacaggcgtttcaggcgctctctaagatctgcctgaacaactggcattatatagacaaaaaagtattgacgctgaatgaggggatcaatttctttaccggacattcgggaagcggaaaatcgacggtgctggacgcactgcagatcgtactttatgcggatacggacggacgacggtttttcaacaaagcggccgccgatgattccgaccgttcgctgatcgagtatctgcgcggtatggtcaatatcagcgaaaataatgaatcccagtatctgcggaatcagaacttttccagtacgatcgtgttggaactggaacggacggatacgcgggaaaaacagtgcgtcggcgttgtgttcgatgtggagactgcgacaaatgagatcagccgtctctttttctggcacacgggcggtctgcttgaaaaccagtatcgcgcggacaggcggtgcctgacgacggtggaagtgcgggaatatctgcagaggacgtttgcggcggatcaattttattacggaccgagcaatgaaagattcaggcggcagctttacgacatttatctggggggactggacggagagaaatttcctcgtctgttcaaacgtgcgatcccgtttaagatgaacatccggctggaagactttgtgaaagaatacatttgcatggagcaggatatccatatcgaagatctgcaggaaagtgtgatgcagtatgggcggatgcgcagcaagatcgaggatacgctggaagagatccagaagctgaccgagatcggggaagtctatcagacgtttgatgaaaaacagcagaaagcggtaagctgcgcgtatcagatcgcccgtcttgaaatgctgtatctggagcagaagatacaggaataccatgaccgcgtaaatgggcggaaagaggagatcgggcagcagaagatacggcaggcaaaactggaggaagagcaggggcatcttcagaaagattatgaagacgtgctcgtccggatcgcgaacagcgggtattccggtctggaaaaagaactggaaacgctgaacgagacattggagcgcctggcaggaagcaaggcacgctggcagcagacgtcggaacggctgaaagagtggaaagatcaggatgtgacgccgaaccagacgatctgggacattgaccgtttcctgaaagggacgatctcggagcaggagatggagcggcttcagaacagtctcaaagagatgcggcaggaattggaagaggaacggcaggaaaatgcgtccagactgaaagcggtcaagaaagaagaaaaagaggcgcgggaagagctgaaagaattgaagcaggggcggaaagcctatccgcgggagctggaagaagctcgttatgaactgcggaaccgtctgcaggagtattgtgggaaatttgtgaacgtgcagatccttgccgatcttctggatatcaaagacgaacggtggcacaatgcggtggagggatatcttggcaataacaagctgcttcttgttgtggagccgcggtatgcccgggaggcattggagatttacaaggagatggataagcggaaatattgccgtgccgcagtgctggacacagagcgggtcatggaaaacgagcatgcggtccgcccgggcgcgctggcggaggaagtgaccgcaaagaccgattatgcggcggcttatatccggtttttccttggaaatgtgatgaaatgcgaatccgtcgaggaactgcgggagtgccggatcggtatcacgccggactgcgtgctgtatcacagctaccgtttgcagcatatcaatccggatctgtatacaaagcgcgcatatatcggggagaccagtatgcgcaaacgtatccggcagttggaattgaaatgtgaggaactgcagaatgaacggcttccgcttcaggaggcggaggtgaagatccgcaggcttttggaactggaaatgcttccgcagccgacagacgattatatgcagtggatcaaagatgcagacatgatctcggataaggaaaagagaaagaaacatttgcaggagcagatggaacagctccgggaagagtcggtggcagtgctggacgcgcagaaaaacgagctgatggagcggatggaagaaaagaaagcttcggtagatctggtgaagcgggaaatctggaaaaatgaaaaagatatcgacggatatcagcgcgcgatcatcgatcaggaagaagcgttggcggtgaaaacaaaagaagtgcaggcgatgagtgggaaagaagtacatgatttggaaacggagtttcaggaatttctcgccgcgaagaaatccgtcaattatgattatctgaggcggcagaaagtatcggaacagcagccgcttctcgagcaggcggagcgggaatatcagaagctggtggacgtccgcagcgcgtatttgcggacatatccgaaccggacgttttccgcaagcgcgcgggataatacggcatatgagaaattgctggaagaattgcagtgcggcgatctggaacgatacagggaatcggcaaaggaacaggcgaaatctgcggtggagcattttaaggatgactttatctttaagatccgcgcggcgatccgggatgcctatcagcggaaagacgagctgaaccggatcatcagcaaactggatttcggaaaagacaaatatcagtttgtgatcacgaaaaataaaggcgcggacggcaaatactataagatgtttatggatgatgcgctgcagatcgatccgatgcagcttagtcatacgatggacaatcagctcaatatgttcacaatggagcatgaagaagagtacggtgaaatgatgaacgaactgatcaacattttcattccgccggaaaatgcgacccgggaagaactggatgaagccaagaaaaacatggaaaaatatgcggattaccggacgtatctttcttttgatatgcagcagatcgtgtcgggaaaaacttccggggaagagaccgatatgcatatcgggctgagcaggatgatccggaaaaattccggcggtgagggacagaaccctctgtatgtagcgcttctcgccagctttgcgcagatttaccggatcaaccagacttcgcggatccggagaaatccgacgcttcggcttgttgtgctggacgaggcattttccaagatggatgcggaaaaagtggcaagctgtatctcgttgatccgcggactcggctttcaggcgatcatcagcgcgaccaacgataagatccagaattatctggaaaatgtggacaagacctttgtgtatgccaatccgaataagaaacacatttccatacaggaatttgaacggacggaatttggggcgttagaagatgagtag

SEQ ID NO: 43978 - DNA, 1416 bp, Clostridium sp. CAG:58
atgaaaaagctgtttcagatgataccatctggatttttcaactgtctttccagcgggagcagcagcggggtatattcggactgcctccagattatttatgatcagtatgaccgggagatctcgtatcggatctcccgaagccatatccgggattcactggcggtctacctgctggaaaatcatgtggactttgtggaagaggatgaaaagggggcccggaaaaattataatgatctggcaaacgggatcatccggaaattctgttcaaaggaagtcggctggctggaggaagagcatgacgacgcgacttacgaaaagtatattatcatgacggagcaggggatcctgctggctgaatttttacagcagctgagggcgccggagagggaggagttttccagttacatttataacatttataatgttttaaaaaatgaggagcaatggtcaggggatccgtatgtggagggcttgagaaatgtttaccggaatgccaagatgctgtcgaaatctttgaagcgcctttcaacctttatcaagaagatcattgaacggatggtacaggaggagaccctggaaagcctgacggagaacatcctggagtactgcgagggaagcttcatccgggaatacgcccggctcacgaagcagcagaatatccacatctaccgttcgttcatccgtatgaagctggaacggatgcagaatgatcctgcgctttttgagcttctggtgatcggctgtgcggtggaggaggaactggaagaggcggaggccagggaatatgtgctggacatgatccagcggaccaagggcttcctggcagatgattatgaccgtatcatgaaagagatcaagcacaagatcaatgtatatctccagatcgctgttggccgggccagatttttgcggaaccgggaaatggatatccggggaaatgtggagcagaccttacgatatatcaccgaatccatgacggagaccggatggaagtcagagctgccagaagagatggcaggactttttttactggacagaaatgaatttattgatacgggctccatccgtttcccgcgaaaggcacagagcatccgggaaggaacctttgcagaggtggaggagctgtcgcaggaggatctgcggcgggccagagaagagcatgagagggcggcctataatccgtattcaaaagaaaaaatgaaggattatctggaacatgtcatgggcggtcagaagcagatacaaagtgacgaacttccgatggaaagcaaacgggacctgctctgcgcgctgtctgcggcggcgtacggggcggaaaatggttataccatccagctggaagaaggatacatggaaaccaatggaatgatactccgcagattccagatctcaaaagaggaagagtcatgcagatag

SEQ ID NO: 43979 - DNA, 651 bp, Clostridium sp. CAG:58
atgcagatagaggagttttgggaggcatatacctcatcagagaaggaattgtttcagcgctcctgcaggcggctgctgaaacatacatttattgtccgtgataaggatgaggagaataaaaaggcctattattttatctcgaaaagaccagagcctttttcggcctatttccgatatatcggctttgatatcgtggtggaccgggaaaatggggtcgtaatgctgaggaactgtgccgacgccggggaaagcgggaaggtccaggtgaaccgcctgcagttaaagaaggcggagagcgtggtattgtgctgtctctggaccttatacgcggaccggatccgttcgggaagcttatcccgggcgatcctggtatccattacggaaatacagtttgaactggagaaatatggcgttaaggaccagatcgataaaagtgccatgactggtatcctgactttattttccagatttaatttaattgaggtgaatggaaagatcggagaaaaggactgtctggtcagactatatccatcgctgcagtttgcgctggaatcggaggaatttggacgttttgcagaattgacgagaaagaggatgcttgagaaaacgggggaggttccgggcgaggaggatgcagatgagtatgaatag

SEQ ID NO: 43980 - DNA, 3258 bp, Clostridium sp. CAG:58
atgagtatgaatagaaaaacagccacaaaattgctgctggtccagtgggcgcggttccagaatgaatgtatccgtctggagggctccacactgcttacgggagtaaatggcagcggaaaatccacggtcctggacgcgatgacgtaccttcttactggaaatacgcagttcaacaaggcggcaaaggaccgggaccggacggtgatcggttatgtgcgcggagatacgaaaagcaatggcacagagcggtatttaaggaccggagaggtcatcagctatattgccatggaattctggtcgccgctggatcagtcgtttctggtggtgggggtctgtatggagtcagacaatgagatcgcatgcaggagcagctggttcgtctgccgtgacgcccggatcgatgagatcaattttacatcgacggaaggaaagaggatccggttcacgccgaaaaatgagctggcggtccgtggagaaaagctcaggtctgccgagttcctgggaaaggaacgaggggtggagcaggtgctccgggcgctggggctgcggtgcaatgcgtccaaataccgctccaggctgttgaaaatgatggcgtttaatccggagaacaatatcgaccagtttatccaggactgtgtgctggagcctggaagggtggattccttgaaggagctgcgggaacagcggcatcagtttgatcatataaaggaaatgtatgagaatttacgcagcagcaaggcccagctggagaccatagagcagcggaccggcgagtatgagagaaagctgcggagtctccgcatacgggaattgatgcttctttaccaggatctgagagaaaaggaagaggaaaagaagcaggaggagatccggctggaagctctgaagacgaaaaaggaacgcctggagatccggcagaaggagctggataaacggtataaggaggcgggagaacgctgccgcatcgcagaaaacaatgatattttccgtggagtcagggaaagcatccaggcattggagcggcagatcgaaaaactcaatgaagaaaaagaaaaacaggagaatgggctggctcttcttatgaagctgcaggcccagatatcagcgatactgaaatgggcagatccctttattgaagtagaagaggaagacagaaactgtctggcccatctgtcagaaggcgggcggcagatagaggaaaagctccgttcttatctgagatttaaagagcagatgcaggggcagaagcagatcttctgggaggaggagatccattgtggggacaggatccgggagctggaccaggagctggatgagctggagacggagatcaagcagctgaagtccaaccagatggtgttcccaaagaatgcagaggccgccaaacggatcatttatgaggaactgaagcagcaggggatccagaccgatgtgcggctatttgcagagctggtccaggaggtaaaggacgcggagtggagagcggccattgagacctttctgggacgaaaacgattttatatcattgtagacgggcaatactgccacaaagccatggaggtcctggaacgaaggaagctccatggcgttcatgtggtgatcacagacaagcttccagagacagatataagcgccgggtctgcggctgaaatgctggtgatccccaatgtgtacgccagaagatacgcaaattatctgctgaacgggatccatttatgcggctctctggaggaacttcatgagtatcccaggggaggcctgatgaaaaacggcatgctggcaaagagctatgcggtgtccaatatggacgtggacggaaccgagttctgtctgggcggggatgccataagactccagttaaacagaaaggaaggggcaaaaaagcagaaacaggaggagcgcagaagtaatcagaagcacagggaacagagccgcaggtataggagcgagatcgagggagtggactgggaggccggccattatgattttgatgcggcaaagtccctggaggcgaccctggggcggaaggagcggatccagcaggatattgataagatacagagcaatccggactttctggcagtgctgcaggagcagcaggatgcagaacgggagtatggagccctgggaggcgcgataaaggtgatcgccggggatattgggagctgtaaaaaggaactggaacaaagcgaagctgcacttaagaaggctgcaggcgagatctatcagctgaaccaggactatgaccgccagtgcatgcagcatctggaattaaagcgcccgatgctggaggagtatgaaaagcttttaaaaggaaagaccgggacctggagggcgatcacgaaaaagacggtcatgaacttaagcaccgaggtggacgcctgcgtcaaacagatggaaagcgcgcagatcgagtattgtaagctggcggagatcgatataaacaggcgggggaccggatatattccgttttaccgtgacgagtacagaaatattgccaacatcaagatcgaggaagcgcataataagttggaggagcaggggaaaaggctggaaagcgcctttatgaatgactttgtggcagagatcaatgagacgatccaggcagcaaaggatgaaatagaggggatcaaccgggaattaaagaaaatcccatttggaaacgatacgtaccggtttgtcatgacagaaaaggcagaccgcagcgtatttttcaggatctgtaaaaaactggagcagtatatgaattctccggaagtatatatgaattcagcacgggacgacgaggagatggagcatgatatccaggaattcatgagcgtgatcctggaagaggaggatgaaacggaatatacggattaccggaagtattttacatacgatatgaagatcctcagcaggcagggaagccaggagatcgaggcggatctgtcgaaaaagcagggctctgcaagcaatggagagaagcagacgccgtattttatcattctggcggcaagcctgctccagtattatccgaagcaggtctgctgcgcgagactggcctttattgacgaagcattttctgccttgtcacgggagcggatcgagcagatggtaaaatattttgaagaaaaccagttccaggtgttttatgctgcgccgccggagaagatcagcagtattggagcttttattgaatcaacggtgagcctggtgacatcgggacgttacacgcacgcggtggaaggtctggtgaaggaagtctatggggtataa

SEQ ID NO: 43981 - DNA, 1245 bp, Clostridium sp. CAG:58
atggggtataattcagttcagaagcaggtgctggaagcgctcctggatcagtatgaaagaagtaagacgtatcagggagagaataaggtgatccagagctttcagatcccgccggaaaaggtattcccggactatgcgtccgattatgccgatatggatcagatccgtgattttgaagcctggatgcgggaactggagcaggatggcctgatcaccataaagtacgggagtggagagatcagaaagctgacggcagatccggagagctgggatctgtattatgaggtcctgcagagaagggataagctttcattacagcaggaccagatcatgctgtatcagaggtatctggggatgagtccgctcctggaccggttctgccgggagcagatcggacgtttacagcaaaataaaaatccactctatggagggaaggaagcagaggccatattggagctctgcaaattcattttacagaaccagcaggacatcctggagagggagctgtcgatggcggttttgaaggacagtaagcgatgggagaaaaaataccgttcaaaggtctgtgggctgctgagaaaatacggggattatgagtctctgttcctgggactcacagatgaccgggataaggaggataagcgcgagacggaacggatcctcctggcagagcatcagatctaccccaatccgtcctatgtgtatttcaagggaaatgcggaattttacttttccaacggaccgtgcgtccggacagatccgtccatgcccatggccttttcttcggatgcactgaaaggcctgaaagcgctgtatatcggggatgaggcagtaattaccgtggaaaatctgacttcattcaaccggatgcagatggaacgggcgtttctgatcttcttaagcggataccataatttagcaaagcaggcgttcataaagcaggtcgccggggataacccggggaagcagtggcatcattttggggatatcgatccggacggcttctatatcgtggagaatctgatccggggaacagggatcgattttcatacggtctatatggatacggatactttgaaaaaatatgatgagtatacaaagccgctggaggagcgtgacaggagaaaggcagaaaatctgctggcggccgggcggtatacggatgttatgagctatatgctggaaaaggggaagaagctggagcaggagatcgtcagctggatggaatggaagggagcgttatga

SEQ ID NO: 43982 - DNA, 1425 bp, Erysipelotrichaceae bacterium CAG:64; identical to SEQ ID NO: 42690

SEQ ID NO: 43983 - DNA, 669 bp, Erysipelotrichaceae bacterium CAG:64; identical to SEQ ID NO: 42691

SEQ ID NO: 43984 - DNA, 3315 bp, Erysipelotrichaceae bacterium CAG:64
  modified_base (1051)..(1058): a, c, t, g, unknown or other
atgctgctggtcaactggctgtattacgagaagacgatcctgagctttgaggatatcgtctttctgagcggtaaaaccggtgaggggaagtcagcgctgattgatgccatgcagctggtcattctcggtcgaaccgacaattccattttcaataaatccgcaaatgataaaacaacccgtgatctgatgggatatctgaagggcaaatacaaggatggtacctttaagcgtgataaagggatgttcagctcacatctgtgtatggaatttgaggatgaacagcataggatttactgctttggtatcgtatttgacgtaaacgggcctacgcggggggacatggagcattgctactatatgatgaatcagccgattcccgagcattgctttacggatgagggaacggtattcaatatccgtcgtatgaagaagctgctggccagctttcaggatcgcagctgccgttcctttaccacacatatggattacaaaaactatttccgtcagcgcatgctgatcaaggaccagcggtttttcgatgtctttaaaatggcagttgcttacacaccgatgatgaatatttctgaattcatcgtaaaaaatatctgtcaggaggaagaagacctgaatctcgaagagatgcaggaggaaattcaggattaccggcagatgaaggaacagctggaaaccgtacagcagaaaaaggctcagctttccctgatccatgaacagtatacggatatctgcggggaacaggagcgtgttgcgaacttgcgtgtggagcaaaaggcagctgtatatcacggtatgctggtggaacatgatgaggcagccgcacaatatgaggtatatacaaggaactatcagaagctgacaaaggaatcaagggaaaccgaggagcagcgggcactgctggaacagaacatggaagccttacgggatgcacgcagggataatgcggcagatattctggaacgaaagatacaggcgcatctggagcagagaaacaccctgcaaagagatacgaccgccgttcagcagcagctggttnnnnnnnngcccgccgttcagcagcagctggttacgaagggagaatttctgaaggaacagatagagcagctggaggaaatcgaggattatgacggcttgcagctggaggacttcgatttgtccgcaatcaagctgtctatacaaaggtccgtgcatgcggcacagcggctggctgcgtttgatctggatgcctatatggatattcagcgacagatgagagacatcgagaataccctgtccactgtgcgccaaaccatgcaaaacagcctgcagacatgcagggaggaacaggaggtgcttgcggcaaatcgccgtgcgctggaagccgggaaaaagacatatccgaaaaagctgctcgttttaaagcaggagctggaggaacggctttatcagcaggtgggaaaaccggtagaggtatgcatactcgcagacctgttcagtattcaggaggaggcgtggacaaatgcgatcgaaggctacatccataaccagaagctgaatctggtggttgaggcagaatatttcatggatgcctatcgcatttaccgctccattaaggaagaaaaaaagattcatacctattccattgtggatatcgcaaaggcaaagccggggaaacgtcccgatgcaaaaacactgtatgactgcgtgcaggtggaacgcgaggatgtgcgcccctatgtggaatatctgctgggcagagtcgtgtgctgtgaagcggaggagacactgcgaagctatccggtaagcatcaccagcgactgtatgctgtacagcggctatgcagtgtcgcatatgaatccggaattgtataaggtaccctttatcggtgccgattccatagaaaagcagctgcaggagctgattatccgccagcaaaagctcacctccacctgccgcaagctggaaacagtcacaaggacattgcaggcggtacagctgcaaaccgttatcagtgatgactttatccgtcagctggaggatggactgtgcaaggccaaagaggtggagcagctggaacaaaagatcaaagagctgcgtgccgctcagacaccggaatccctgcaggaacttctgctgctggatcaaaaactggatgaggcaaagaaaaagaaaaacgaactgtatatgctgcaggtggaacaggaaagccggcgccgtcagctggaagaggatatgaagctttgcaatgcacgtatacaggagcttcagcagcaggttaaggaagcgaaaaagcccgagcaaggcataccggacacaatcggggcaatcaccacggcagacggtatccgcaggaaacagaaacagctggaggaagcactgcgggagctgaacagccgtgttgaaatttccaagcaggagctgataacgaaaaaaacacattacaatgataccttccgcattgccctcaacccgaattttttatgcgatgattatgagcgggaatatgaaaagcattcggataatattgttgaggactatatcgataaatgccgcctcgcacagcagaaggcatatgagtgcttccagaataatttctttagtgcgctcaatagtaaaatcgaaaatgtgcgaatgcagattgaccggttgaaccgctctatccgcaggcataaattcggccgctccagctatgaatttgtgtgtacctgcaatgaggattaccgtgagtattacaatctgatcaccaacaaggaattaaacgggcacaatctgttgaacacgaaggtgtatgaggaaaatgaggagctgattcatgagctgtttgataaaatttcttccttatcctccatgcaggaccccaaaaagtatcaggagctgcaaaaagaggttcagctgctttcccgcttcaccacctatctgaaatttgatattctggaaaacggaaactcgctgcgtgccacgatcggctccagctccggtggagaaacacagacaccgttttatgtcgctgtactggtatcgctgttcagcgtatatgatgcaggaaacgacggtctgcagctggcaatctttgatgaggccttcgataaaatggataatgagcgaatcgaggaatgcatttacctgttgaaatcactcggctttcaggcaattatcgtaacaccgacggataagatatccaatctgagcaaggttgcggatgcgacgctgattgcgacaacggatgagaaaaacggccagcgggtttccaccgttcagaaatggagtcagaaagaaaacatagccatccccgactcggaaatgagacaggaagaagtataa

SEQ ID NO: 43985 - DNA, 1383 bp, Clostridium clostridioforme CAG:132
atgatactgatgaatgaaataccagaccggttctggagcctgttccgctctgttaaccggtctacttacatagaagcccttcttaaaatcaacgaggagtacgagtacagcaattatttcctcagcagggaagtctgcatccagcttttaagtgaatatttctcccggaaaaaatatgtcatatggcaggatgagaccgaggatgactgggatgaactggaaccgcctgccaccagggttcttaactggctgctgcggaccggctggctccgcaaggtggatgattacgccagcatgacggtcaacatcgtcatcccggattacgccgcggtgatgattgaggcattttcccgtttgtctaacgacgatgaggacgagacccaggtttatatccagaatgtctatgccattctattttctctgaaaaacgacccccgctccagcgtcagcctgttaaatacggctctggtaaacacgaaaaaactgaacaagtcccttcaggacatgcttcacaatatggataagttttttagcagcctgctggaacagaagaattacggtaccctgttaaaggagcacctggaaggatacgtgacggaaattgtcaataaaaaatatcatatattaaagacctcagacaatttttatctctacaagacagacattaaatcctggatagccgccatgcgggaggacagttcctggatcaataaaatgtgcgccaaaagcgcggcttcaaccagggggcagaagaagacgcccctgacagaatacgatattgtagagaagctggaccacctggagcgtgggtttgacgatatcgaacaccgcatctccaacatggacaaggagcacacccgttatgtcaaggcaacggtcacacgcctcaattacctgttaaaccaggaggacaacatgaaggggcttgtaatcaaacttctgaaccatatgtcggaatacggctgtccggaagatgaactgacagctgtaagcgccgggatgaatctgtcccagatgaccatactgtcagaaaaatccctgtacaaacgccgtaagaccaaggcggatttcacggaacagttaaaggatgaggaagaatccgaggaactgtccatggaggaagtcctgaacctgaacaaggtcaggaaccgttacagccagaaggagattgaagcatttatagaaggcagcatggcagacgggaaaatggtggtggacgaacaaaccatacattcagaccaggactttgaaaaactgatactggcctatgactattccaccaggagaaagagcccttataaggtggaagaggaagattcggaaatggtacacagcggcggctatatctatccgcggctggtatttgtcaggaggacaaaatag

SEQ ID NO: 43986 - DNA, 750 bp, Clostridium clostridioforme CAG:132
gtggaaaacatggaattggaaaacagcgtggcagacatcgcgcccgcggccggatacaccggaaacagcatcccttactacgacaatctgatgcactcggagcagtcagaagtgacggaaatcatccgcctcctatggcgccagacgttcatactggaacataaatatgacaagcgtaccggaagattccagtacaacagagactaccgggtatgcagcaaacacctggaattcatcaagaattattttgccatcagcggagtggagctgcgtgaaaacagccagatgggcatcatgtacatccagggtgaaaatgtggtgggtgacaagctgccccgtctcgccaccctgtacctgctggtgctgaagctgatatacgatgaacagatggaaagcgtttccaccagtgtcaacgtctatacatccctgcgtgaaatccacgaaaagctgggaaattacaggctgtttaagaagcagcccgccctcacggatatacgccgggcagttacccttctgaaaaaataccaggtcattgaacctttggatctgttagaggacttaaaaagtgaaagccgcatgataatatatccctgcatcaacgtggtgctcatgggagacgatgtgcgccagcttctttcctcctttgatgaggatacggatgacagcggagtccagctgaaggccgaactggaggaagaagacgcggatgatatgacagcagaggaaggagaaccatggaacagaaaatag

SEQ ID NO: 43987 - DNA, 3390 bp, Clostridium clostridioforme CAG:132
atggaacagaaaatagcaaatgatcgttttctcgccctttccaggatatgtttgaataactggcactatataacgaaaaggactctgtcctttaatgatgaaatcaactttttcaccggacattccggcagcggcaagtccactgtcatagacgccatgcagattgtgctctacgccaatacggacggccggggcttcttcaacaaggctgctgccgatgactctgaccgcagcctgattgaatacctaagaggtatggtaaatatcggcgacaacaacgaattttcctatctgcgcaaccagaacttctcctccaccattgtgttggagctgaaacgaagcgatacgggccagtgccagtgcgtgggaattgtctttgatgtggagaccgccaccaatgagatatcccgccgcttcttctggcacaaaggccccatgtgggacaatggctacaggggcgggaagcggaccatgtccatcgtggaaatagaggactatcttcaggccaattacaacagggaggagtatttcctgacctcccacaacgagcgtttccgccggatactctatgattcctacctgggcggcctggactccgaaaaattcccccttcttttcaagcgggccatcccgttcagaatgaacatcaagctggaggattttgttaaggaatacatctgcatggaacaggacatccatatcgaggacatgcaggaaagcgtcatgcagtacggccgcatgagaaagaaaatcgaggatacatgtgcggaaatccaatccttaaaacagattgaggaccgattccaaagctatgctgacaaggaacagcagctcaaaaaatcttcctattttgtgcagaaactggagattctgcagcttcagtcagaggtccgcaccctggcccacaaggcaaagctggcgggagaggatctggaaaagcagatccaggccagaagctccgtggacgaacagattggagaactgacccggcagagcgacgagctgctgcgccgtattgcctccactgggtacgaggaacttaaaaaccagcttaagagcctgaatgaactgctggaacagctgggaaaaagcgaggccaggtggcagcaggccacagatgccttaaagcgctgggaagaagaggacatcacctccaaccagactctttgggatatagaggaatttgaaaaccgcaccattgatctggagacattggaacgcctgaaaaaatccatggcatccatgcgctcagacacggaaaagcagcatcaggaggcgtcttccgcactcagggagctcaaaaagcaggaaaagcagacaagggatgaactggaaaagcttcgttccggcagcaaagcctatcccaaatacctggagaatgcccggagctacatccagcgccgcctcctggaggaaacgggtaagagcgtggatgtgcatgtgctggccgatctgctggatgtaaagagagatgagtggcgcagcgcagtggagggctatctgggaaataacaaattaaatctggtggtagctccaaaatacgccaggaccgccctggaaatctacggggaactggataaaaaggaatacttcaacgtggctgtgctggacacggaaaaggcatcccagaaccagccccaggtacaaaaaggcgccctctcagaggaagtgactgtgagggaatcctacttaaggccctatatggacctgctccttggcagggtcatcaagtgcgataccatagatgaattaagggaatgccgtatcggcatcaccagcggctgcatgctctaccacaccttccgcctgcagcacatcaacccggataactatactaaattcgcctatatcggcaaggacagcgtccggagacgtatccgtcttttggagcaggagctggcggccctggatgaaaagaaaaagccattggaggagacggtcagggaagcccatagaatcctggcgcttccctggctcttagctgagcccccggaatacatggactggctgaaggacataaacagctataaggccaaggagcgtgaaaagaaaaagctgatacagaagctggagcttttaaaggagcaaaatgtagaccagttagaacgggaccgccaggcggtcatcacgctctgcgacggcaaaaagagggagagggacagcctgaatgtactcatccgcgataaagagcgggagatagaaggataccggaataagtccattgacagccagtccgttctcacgtcaaaggaacgggagttaacgcaaaatcctgactatgacaatgaactgacagcctatctgtcctccagggatacggtgcgctatgacagggaaaaggaaacctatactgtcaggtgcagcaagctgtctgaggccagggaagcagcctttcaggagcttctgacggtcaggaccagctatatccggacgtatcccaaccgcaatttcccggtaaacgccagagacaacgctgtctatgatcaccttttaagcgccctgaaatgcgacaatctggaagaatacaagcagaaagccacggaacaggccaaatccgcggtagagcatttccgggatgacttcatgtataaaatccgcagcgcaatccgggaggctctgatccgcaaggatgagctgaaccgcatcatcagccgcctggatttcggaaaggacaagtaccagtttattattggccgcaacaaaggacctgacggccgattctacgatatgtttatggatgattcactggatatcaatccggcggacctcaattattcctatgaaaaccagatggacctgtttaccattgagcatgaaaagcagtatggggatttgatgaatgaactcatcagcatttttatccccccggaaaacgccgccccggatcagatggacgaggccaggcggaacatggataagtattcagattaccgcacctacctgtcctttgacatgcagcagctcatacagaatcaggatgaggttatcaaaatccggctgagcaagatgattaagaagaattcaggcggagaaggccaaaacccgctgtatgtggcccttctggccagttttgcccaggcctaccgcatcaatcttccctctaaggtggagcgcaatccaaccatacggctggtagtactggacgaagcgttttccaagatggacggggagaaggtggccagctgtattgaattgatccgcggacttgggttccaggccatcatcagtgccaccaatgacaaaatccagaattacgtggaaaacgtggacaagacctttgtctttgcaaaccccaacaagaagtccatatccatccaggaatttgaacgggagcgctttgtggagctgatgcaggatgaagaagataggaatgagtttgcggatacataa

SEQ ID NO: 43988 - DNA, 342 bp, Clostridium clostridioforme CAG:132
atgaacgcaccgctggaatgtattatccgaaaatgcgagattcatctggaacgggttctgtccagcatccggacttcctgcgggacgacctatctccacaccggcgacttggattatggaggagtcaagatatttcaatatattaagaaacgcatcttcccaaatctgcagccgtatctcatggatacacaaacgcatgaacagtataaggcttacagtgaacccatagaaaccagtaaactggaaaaattgcagcggaccaccgaaccgctccttcagcccctcatagacaaaatctgtgctgaaaaacaggtgatagagcaggaatctttcctgttttga

SEQ ID NO: 43989 - DNA, 1473 bp, Prevotella sp. CAG:1185
atggacaaaatacaattaatagatatactggaaaattcgcccagcatcaaactgctgaaaatgaggactaagaacctgaagttcttcctcttgttcctgctcgacgtgttcgacgacaagactgccgtgtcgtgggagtatattcaccaaagacttgtaataaggttcgacgggatggacgacggcgacatcgaggaggaggacgacgacaaaatgcctaacaccattgaaactaacgaggagaaggctcgacgatggataaccaactggaccaacaacggatatctgaccaactatcagaacgaggtgggcgaggtgatgtatgagatttcggcatacacgagcaaggttatcgactggattgacaacagtctgagaaaggagaaatatgtgggcacggagtcgaagttcaactcgctcttcggacagctgaaggagcttgtagagtttaccaacgaagaccgcagcaagcgccttgaactgctgaaggagaagaaggccgagatagaaaggcagatagagcagctggaaaacggcgacgacgtgacggtgtttgaggactatcagattgtgccgcgctacaactcgctcaacaagctcgccaaggagctgctgtctgactttaaggaggtggacaacaactttaaggacatcatcaagcagatttatcagcagcagaccgagaactcgcagaagaaggagattcttaactacaccttcgatgcctacagcaagctgaagaactcgtcgcagggcaagagcttctatgctttctgggactttctgctgtcgtctaaccttcagaatgaatggaagaccatgacgcaggagctgtttgagtcgctcgacaacaggcacatcgacgtgcacgacttcttcttgaaggacataattctgtatctgttcaatgccggacagaacgtgtgccgcaccaacgacaggatggccgagaagctaagccgcataataagacagaacgagcagtcggactacagcgttacgaaacagaccataaacgacataaagaagatgcttataggcataagcaaaaggcgcgaaacgcccgacataggcttcgagattgaggagattaagataaggctgccgctggaaaggccgctcacgctggagcctgcgcaggaaattgaatataacgacaggcctgccaatgccgacctgagcattgacgaccttaaccgcatagggcagctgtataacgcctactttattgaccgcgagacgcttcgcaacaatatcgacgctgtgctgaaaaagaagaagcaggccacgctcggcgaggtgattgaggcatcaaagggcataaccaagggactgacagagattttcggatacatcaacgtgctgaaagggtacagcacgacggtgaatgccgacaggacgcaagacataatatttgacacggagaacaggagaaagattgtaatacccgaaataattatagtcagaaaatga

SEQ ID NO: 43990 - DNA, 588 bp, Prevotella sp. CAG:1185
atgagcacaacagacataaagccttactcgaaggccatagtaaagttactgaaaggaattgtagaatataacgacccggcctggaacgacatactgcaataccaggctgacatacaggcctacctcggcgtgattgggctcgaactcattgttaagaaggatgagggctttgcctttgtaaggcaggccatgctcgacgaaggcaagaccataaaccttgccacgcgaaggcaactcggatttgagatttcggtgatacttattgtgctgcgcaacatgctttacgaatttgagatgaatcctaccgactcgcaggccgacgagaaatatgtaaccacaacacagattaaggaagaggtggagatgtttctgcccgtgggattcaatcaggtgaagttcaagcaagacctcgactccaacatatcaaaagttatcgacatgggatttcttgccgaggtgaagaagctcgaaaccgacgagacgctgtacaggatacaccgcataataaaggaaaaagtcacactggatgaccttgccgaattcaaacaaaagctgaaagagtatgatacaacagatgaatctatttaa

SEQ ID NO: 43991 - DNA, 3399 bp, Prevotella sp. CAG:1185
atgatacaacagatgaatctatttaacacgactccagagaagtccggattccgactcgactatatggagatttacaactggggaacattcaacaacagggtttaccgcataagtccccagaggtgcaactcgctgctcacgggagccaacgcatcgggcaagagcaccctcgtagacgcgctgctcaccctgctcgtgccgctgaagcgacagcggttttacaaccagtcgtcgggcattgaaaagaaaggagcgcgcacggaggagtcgtatgtcctgggatgctacggaacgcagcagaaagagggcagcaccgaaaccataacgctgaagctacgcgaccgaaacgcacgctcggtgctgcttgcctcgtttaacaatgccgacggcaaggtggttacgctgtttcagatacgctacttcatcgggcaggaactaaagaccatatacggcatagccaaggcgccgctcgaaataggtaaggactttgcgcagtttgactcgcgcggcgactggcgcaagcagctcgaaaagcactacaacgccttctctgccaagaaggtgatcgacttctgcaacggtccttatgcctatgccgaaaagatgtgcctgatgttcaacatgcgctccaacaaggcccttacgctgtttaaccagattgtgggcgttaagattcttgacgacctcaacagctttatacgcaacaacatgctcgacgaggagcctgccgaagaacagtataccgagctgcacgacaacttccacaacctgatggaggcaaaaatcaacattgacaagacgagggaacagataaacatgctgaagcccatcaacgacaacgccgacaagctgcacgccattgatcaggacataaggcagcttgaacagaacaagagcattgccgcctactggtttgcgtcaaggattgtaacgctgtcggaaaagaaaatggccgagaacgagaaggaactgcagaagcagaacgacaagctgaaagaccttacggcgcagcttgaggagctgaacaggcagcgcagaaagattgaggccgacatagacaacgacgaagtgagccggcagatagcctcgctgacagaagaaataaagaggctgaccaaggagagagacaaaagaaccttaaaggctgaggagtataacaagattgcagccgcgcttgaactgcccccaaacccgctgaaagacgactttgagaagagccgcaagcgcgccggagaggagaaccttgacaggcagggcgagctggaggagctgtcggaaaagttgagacaggagaagaacaaagccgacgagataaagaataatctggaggaaaacgccaagataataaaagacctcgagaagaacaagaacaacatatcgggccgagtgtctgagataagggaagagatactgaggcacacgggtgccacgcccgacgacatcccgttcataggcgagcttataagggttaaagacagcgagcgtgagtgggagccgtcgatagagcgcatactccacaacttcgcgctgaggctcatcgttcccgagaaatattatcacacggtaaacgaatatgtaaacagccacaacctcaacggccgtattgtatatcaccgctatcagggctttacgccgctgaaggagatggagataaacgacgacgacgacaaccgcctgatacgcaagattgagtttaagcccgacaacaggtatgttgaatgggttgaggacgagatttcacagagatacaactacgcctgcgttgacagcctcgacgagtttgacgattacagcgagaaggccgtaaccaaggaaggactgattaagtcggttggcaacaagcacgaaaaggacgaccggcgggaaacccgcagcagggacaactatgtgctgggatgggaaaacaaggagaaaatagccttcctcaccaaggaaatatgcaggctgcaggacgaactgaaggacaacggcgcaaagattaagtccatagaggagcgacaggaaggatgccggcagcgcataagtctgctgaacaacctgctgataggcttcgacgaccatgaggctatagactggatgtcgtgcgcgcaggccattgaggagcttgaggagcagaagaagaaacttgaggctgccgacaacaaggggcaggctctgagagaagagctgaaggccgttgaggccaaggtgagggcgatggagaaagacaaggacatcaccaacataacgatatacaacattggcgaggagcagaaagacctatcgggcaaaagactgagctatcaggagtttgtcaacaagattggcgtaatagacatgctcgactttgagcagcagcaccccgagatgctcgaaattccgctctacagcctcgagaaccggcgcaacgcgttctacacatatctggagaacactcttaggagcaaaagcaacgagaagaacgacctggagaagaaggtgataaagcagataatgaagtttaagcgcccctcgaaggagcttgccgagaagtataaggactggaactctgacgtgagcagcctgcccgacgccgacaacaccgagtttatcgaagaatatcagaaactctacagcaagctgaaagaggaagacctgataagctatgagaatgacttcaaccagtatcttcaggacacgatgaacatcaaggtgaactcatacaaatgtttctttgagcattgggaggccgacatcgacaaggcgatagaccatctgaacaggtcgctccgcgagattgtgttcaacaaggatcagggcacctacatacagcttaccgccaccaagaagcagaacgccgagaccaaggaattttgcagtctgctgaggcaggccataccaaacgtacacgaggtaaactctacgacagacggccgccagcgccactttgaggagcacatagagccgttcatgaagaagcttgaggacggacagtggcgcagcaaggttaccgacgtgcgctcgtggttcacctacagggccgaagagttttatcaggctacgggcagcaaatacaagacctacgagagcatggggcagctgtcgggcggcgagaaggcgcagcttacctacaccatactcggctctgccatagcctatcagttcgggttcaccgagagcggcctcgagtcgtcgttcaggtttatagccatcgacgaggccttcaaggcgcaggacgaggacaaggcgcgctatctgctcgacctctgcaaccagctccatctgcagctgctcgttgtcacgccgagcgacaacatacacatagttgagaacaacatatcgtttgtgcattatgtagagcgcaaaggcgacgagtcggtgctctacaacatgcccatcgttgaatataaagaagaatataaacggagcaagacgtcatga

SEQ ID NO: 43992 - DNA, 1146 bp, Prevotella sp. CAG:1185
atgataaaggcagctgaaataaggagcaaggccgagaacagatacatacgctatctgcaggatgttgcctcgggggcagacttcgagaggatagttattccgtgcaacaagaagccgagcgacgattttgccgtgtatcaggctgagcttaacgacataaccgacaactccaaggagaggcgcggctacggatatacggtgatatggcagaccgtaaggcacaagaaattgggcgagcaagacctgcccaaggagatagccttcgacacagaggccgactttcttaagtttatccgaaaagaagccgaggcaaggcagttcaagcatgacgtaagctccattctgtctgccttccctgtacttgccggctgggttaaggctcatccgcttaaagtagtggccaactcggccgcatggcccggcctgcttaaggtattgcgctatttcagcctcaaccccaggccctgtatgtatatccgcgagctgccaatagaggttcacaccaagtttgttgagcagaacatgggaatactccgcgagctgctcgacatcgtaatagccggccatataaacactgacgagaaacgttttgagccgcgtttcagccttaaatatgacgaggaactgatacgtgtgcgctttctcgacgacagtcttgccctgtcatgcgcggcaggactgaaggacataagcctgcccgtgagccaattttgcgccgtcagctggaaggtgcagtcggtgtttatcgtagagaacaaggtcaactttctcacctttcctcccgtggccaatgcccttattatatggggacacggctatggcgtgtcaagtcttaaggctgcgtcattccttgccggcaccccactctactattggggcgacttagacgcccaaggtttcgagattctgtcgcagttccgcggctattttccgcaaaccagaagcatccttatggacagcgccatcttcacccgattttttgagaatgatgagggcaagcccagcaaggtgtcagcagacctgaaccttaccgacgaggagaacagcatctaccaaacaataaaggctaacaactggcgactggagcaggagaaaatcccgcagagctacgtcattgaatatataagagaattattcaatcagtag

SEQ ID NO: 43993 - DNA, 1359 bp, Coprococcus comes CAG:19
atgcagttacgttttgaaattccggagagtttctggagtctgtttcgttctgtgaacagagagacatacattgaggctttgatggcgatcaatgaagaataccagtacagcaattatttcctgaccagggaagtctgtattcaggtgcttcgggatctgtatatgaagaaacagatcgaacttaaacgagaagaagatgagactgagtttgatatgttggagactccgtcggcaaggattctgaactggctgatccgaaaaggatggctgaagaaaattgaagattataatacattggtgacgaatatcgtaattccggattatgcagcaatatttgtggatgcctttgagcggctttctacggaggacctggaggagacagagatctatatccagaatgtctatgcgacattgttctcgtttaaaaatgatccgagggtgaatctgaatatgctccggacagcacttatcaataccagacggctcaacaaagcactgcaggatatgctgcataacatggataaattttttgcaaggcttctggaacagcagttttacggggatcttctgaaagagcatctggacggatatgtggaagagattgtccggaaaaaataccatatcctgaagacttcggataatttttatatctataagacagatatcaaagaatgtctgcgtcagatgcgggatgatgaggaatggatcgagaagatccgtgagcgcgcccgtgcaaccggagatatgggagaagatgtgctggaacttctggatatgatcgagagaggctttgatgatatcgagcaccgcatttccaatatggataaggagcacagcaaatatgtgcgtgcgacggtgacaagactgaattatcttctgagcggagagagcgacacgaagggactggttattcagctcctgaaccggatggcagaggatgactatgaagaggtcattcaaaggacgggggagaagatgaatctgtctttggttgaaatcctgtcagaaaaatctctttataagcgacgaaaaacccggaaggattttgtaagtcagatggcaccggaagaagaagtggatgatctggacagagaagatgtgctcagattgaaccggatcaagcgcagattcagcaaaaagcagattgaagaatttatcgaagagcatatagagaaagatgtgctggatacagaaaaactttcccttacatcagaggaggattttgaaaagctgattctggcatatgacttaagtacccgtaagaacagcaaatataaaacgctggaagaggatgcggagacgattgaaaagaacggataccgttatcctgcactgaagtttgtaagaagacatttatag

SEQ ID NO: 43994 - DNA, 627 bp, Coprococcus comes CAG:19
atgatagaatattttgagcagcttacgcaggaagaacaggaagatctgacagatgtgatcaggcttctctatagacagacatttcttctggagaggaagttcgacaagcgtgcgggcagactccagtatcagagagagtaccgtatctgcgaaaagcacattgattttctgaaaatgtatttccagattaccggcattacattatgcgagaatgtacatctgggtctgatctatattcaggatgagatggtctggggagaaaagcttccgcgtcttgcgactatttacatattattgctgaagctgatctatgatgagcagatggcatcggtttcgtcgagcagccagattgtgacaaccttgggggcactcaacggaaaagcaggagattttcgcgtgcttcgcagtatcccgtcaccgaccgagatgaaaagaactattgccatgttgaaaaaataccagctgatcgagccattggatgtactggaagagttaaatgaaagtacaagacttctgatctatccgtgtatccatgcagtattgcagggagatgcggtgagagaagttctggaatcatttggaagcagccgggaagaagaggaggagactcttggagacattggataa

SEQ ID NO: 43995 - DNA, 3369 bp, Coprococcus comes CAG:19
ttggagacattggataacaggcagccgttctgggcgatttcaaaaatctgcctgaacaactggcattatatagacagaaaaatactgactttgagtgaaggaatcaattttttcaccgggcattccggaagtgggaaatcaacggttatcgatgcaattcagattgtgctctatgctaacacggacggacgtggattttttaataaagcggcagcagatgattccgaccgtaccttgatcgagtatttgcgcggaatggtaaacatcagtgaaaataatgagtcccagtatctgcgaaataagaatttttccagtacgatcgtgatcgagctggaacagacgagaacccatgagaaacagtgcgtgggcgttgtatttgacgtggagacagcaacaaatgagatcaaccgcctgtttttctggcacagaagcggtctgcttgcgaatgcttaccggggagaaaagagatgtctttctactgtggaaataagagaatatctgcagcgtacctttggtgaagaggcattctactgcggaccgagcaatgagcgtttccgccgtcagctttatgatgtgtatctgggcggattggataaagaaaagtttccacgtctttttaagcgggcaatcccgtttcggatgaatatcaagctggaagaatttgtaaaagaatatatctgtatggaacaggatatccagattgaggatctgaaagaaagtatcatgcagtatggcagaatgcgcagcaaaattgagtcaacgatggaagagattgaggaactgaagaagatcgatggaatctatcaggattttgatgataagcgagaaaaaagcagggaatgtgactaccgtcttacccgtctggaaatgctccggctgcaggcggacatccagggactccatgataagattaaaaccagagaagaaggtatcaaggtacaggagcatacgaaagccgagctgatgcgccagagtggagaactgcaaaaggagcatgaggagctgttacttcgtctgaataacagtggttataaagcactggaagcagaacttgcaggacttaacgagactctggaacatctgggaaaaagcagggcgagtctcacaaagacagcacagagacttgcagcatggaaagaacaggagattacgtccaaccagacaatctgggatattgataagtttgaagccggtacgatttcggagggcgaacttacaaggctgaaagaaaatatcgcacagatgcgtgcggagatcgaagaagaacgtcgggatacggacagtacacttcgtcagatcaagaaagaagaacgggaagccaaagaagagctaaaagagttgaaacagggaagaaaagcatatccaaaagagctggaagaagcaaggctggaactacagaaccggttgcaggagaattgtggaaaatttgtttccgtgcagatcctcgcagatcttctggaaatccgggatgaaagatggcacaatgcagtggaaggctatatgggaaataataaacttctgctgatcgtagagccgaaatacgcaaaagcggcaatggatatttatcaggagatggataagaagaaattcttccgtgctgcaattctggatacggaaaaggttatggaagaagagcacattgtccggcagggcgctcttgcagaagaagtaaaagcaaaagaaaaatacgtgcagtcttacatcaatttctttcttggtaatgtcatgaaatgtgagaacattgaggaactcagggagtgcaggattggtgtgacaccggactgtatgctgtatcacagctatcgtctgcagcatattaatccggaaaattatacgagacgtgcttatatcggagagattagtctctgtcagaggatccggcagcttcagaagcactgtgatgagcttcaggagaagaggcttccacttgcggcacttgtggaagaggcaaagaaacttctggaactggaagcaatgccacttccgacagaggattatatcagccagatcctggatgcaaaggcgataaagggaaaagaaacccgtaagaaagatttacttgaaaagctgcagaaactgcgtgtagaatcagtcgatactctggaagcacagatgaaagaagtgcaggaaagacgggatgcaaagcagaaagagatcacgaagacagagaaagaaatctggaaaaacggggaagaaatcgaaaaattcagaaacagtattacagagtcggaatttgcactttctggaatccagaaagaatttcaggaaaacgaaaggtttgagaagcagtttgaagagtatctggaagcacagaaaagcagaaactatatttatttaaaagaggcaagtgcaaggcagctgcagcagcttggaaagaaaaaagaagagatctatcaggagttggtggcagcccgcagtgcttataccaaaaaatatacgcagcgtaatttttcagtggtagaagaagataataaggtttatcaggagcttctggaaagcctgtcgtgtgataatctggaaacctaccggcaggcagcgaatgaacaggcaaaggcagcggtcgaacacttcaaggatgactttgttttcaagatccgcagtgcgatccgcgaggcctaccagagaagagatgagctgaaccggatcatcagccggctggatttcggaaaagataagtaccagtttgtgatcacgaagaataagggtgcagacggaaagtactataagatgtttatggatgataccctgcagatcaatccggcacagctttcaggttctattgagaaccagatgaatctgtttacgatggagcatgaagaaaactacggtgatatgatgaatgaactgatcggcatatttatcccaccggaaaatgctacccatgaggaactggaagaggcaaagaaaaatatggacaagtacgcggattaccgtacttatctttcgtttgatatgcagcagatcgtccagggtgaggaagatatgaaaatcggtcttggcaagatgatccgcaagaattccggaggagaaggacaaaatcctctttatgttgcacttcttgcaagctttgcacagatttacaggatcaatctttccccgaaaatccacaggaatccgacactcagactggtcgttctggatgaggcattttcaaaaatggatgccgagaaggtggcaagctgtattgcgctgatccgtggacttggtttccaggcgatcatcagtgccacaaatgataagatccagaattatctggaaaatgttgataaaacctttgtatatgccaacccgaataaacggcatatatcaattcaggaatttgaaaaaaccgagttcgcacagcttgcggatgaggaagaacaggggtga

SEQ ID NO: 43996 - DNA, 1203 bp, Coprococcus comes CAG:19
atgtatctggtagacaggattatagaaagatgtgagaacagcagccgagactggcgggaaggagcgactggagggaggactcttcggatcacacaggaggattatgatgcctgtgggaaagaagagctgatcgaagaggtgcagcgcctggaaagagcaggactcctgactgtgaaaaaatgggttgtcccagacagcgatgtagagcttgtggcatatcaggtagagcatcttccggatttttaccgtcttgcagacagcgaaagtggagaagaatactggccgaagcaggcgaaggtaaattattatatacgtatgattgaccaggagctttcggaaggctttcagaaagaatggatcgagaattatctggaaaagctgaaagagcggatcgcagaaggtgatctgccgaaaaatatagagaagctggaaaaatatctggactgttaccggggactggactctctggaagaaccgatgatgaagcggattttcagtaaacgctatctgaaggacagcaagatcttcgagcgggagatggaacgaaatgtggtgacggctgcaaggagatattgcccggagattacggcagatatggatatccagacggttctggagcagctgctgatcgaagaaaattcccaggaactggcagttaaaggaccgcttaaactgaagatctggaaaggatcagaagcaaaaagagtggatctttccgattttacatatggagttgtgctgaacagccagacagtcaagcatgcaatggttgaggtagagcagccggcactgaaaaaaatcgtgacgatcgagaataagacgaattaccttgcgatggaatatgatccggagatcctttatatctacagtcatggatatttttcaccacttgaaagagaatttctgaagaagctgcagagagtgattgaagggaaagacgtggaagtattccacagcggagatatggattacggtggaatccggatttttgaatatatccagaagcatattttcccgggaataaagccattgcagatggatgtggagacctacgagaaatacgaagaatatgcgaaaacaatctcgaaagagacgatggaaaagctggaaaaggtaaatgttccacttttggaggagttaaaagaaaagcttcttgaaaccggaaagggaatcgaacaggaaagcttcctgattgaagaatag

SEQ ID NO: 43997 - DNA, 1650 bp, Bifidobacterium pseudocatenulatum CAG:263
atggggccgggttccctcttccatgacaggaaaagacgtcgcattcgtactgtaactgcggcgtcttttccttattttcgtttagaatggagacttgccgccaaggcatcgaacacatggaaaggcgtattgttggctgagatcagacgggagatggaacggcttcgacccgtatacgaaaccggtgtcctacggttgctgctgcgtaacaattccatgctgtacgtcgcgttgttgcgttctacgttcgacccgctgacgggggagctgccgcgcgaaatcgtcgaagaacggttcgcacgcagtctcaaccggctcatcgaaaccggcgattacacgctgaaagacgggcagactgcgcgcgaggccgcgcattcggtcctgcttgacctcgcccgcgaaggggaaggcgactacgcctggctcgccaattccatggatgtggcctcgcaccgctacctgtaccgtctcacagcgcgagcgcaccgtgccatcgaagcgctcgaccggcttgaggacaccacgaaagcgctgtccggcgcgcaggccaacagcatcatcatggaaatcgagcatgctcgcatgcagttgaccgccgatccgcgcgaacgcatccgcctgctgaagagggacatcgaggaacggcagaaggaaatcgacgagctggaacatagcgaggccttggaaaagctcacgtccgaacaggtcggcgacatcatcggcgtgattcacaacactctgcgaggagtgcccatcgacctgcgcgagctcgccctttccgaacgggacaacggcgacgcgctccgacggcgcatgcaggccggcgccatgagcgtggaaagcatcctcaccgcataccatgacgaataccgacgcgcgttccgcgaatccgacagcggacgtcgtttcgaagacgcgttccaagtcatcgtcaccgacgaaggccggcgcgagatcgacgacgcggtgcgggacatcgccagaaacccctatttggatggcgagccgagcgtgctgctcaaccaggtgcgttccgaactcaaacgcatctatgaaggcatcgaggacgtgcgccggcagatccgcacgtccgacgaggcggtcagccgtctcgtacgccagcagaccgacacgagctaccggaccatgctcgccaaactcaaccagctgttcgcaaagaccagcgccgaagccaaagcccatcccaatgaccaaagccggccctaccatacggacgccgggcaggcgaaattcccgacattgccatctcgtccggccagatcaatggcgcgcgccgcatcatccagcctgaacgacgccccagcggcgaccatcgaagcgccggacctcaagaacatggtcgaaatatgcgggccacggctgacgcgcatgatcaggcttatccgcagcaatccggtgacgacatcggacggcatgttcgtggacctcgcggcaagcttcaaccagctgccgaaagccgaacggagggaaagcgaactggtcggcttcctcagcgccctgcgcacgcaggacgactcgtcatacgtgacatggcgctgcatatcgatcgacggcagcgaacgcgtatggcgcaccaaacccattctcaccaccgaaacgacgctcgacgacatcatcgaggagagataa

SEQ ID NO: 43998 - DNA, 783 bp, Bifidobacterium pseudocatenulatum CAG:263
atgacggactatatcgaagccaacatcgaggaaacgatcctgacagaaggggagccggtattagaagaggccggcagccagcaggcctcgaccgcgctgttcaacggcgacaccggcgacatgcccgtcgaagcgcgcatggccgcgatcgcgctcaaacgcgaacgctacatcgacggcagcctgtatgacctcgcctgcgagaaccgtgaggtcgtggaacgttcgctcaacaacgacatgctcagactggtcgacaacacgaaataccgcatcatgtacgcgtcgccggtcaccgactcggagacatgcatccgttcgttgaaaacacgtatgagcctcacccgcgaggagaccgccacgcttgccgcgctacgcatcaaagcgttggaatacgaaaaccagaacgccgaaccatgcgactggcttatcagcttcgacgacatccgcgcattgctcgccaccggcgcgggattcctcaccgccagcaacgacgaggaaggcactgcgaagaaaatcacgtccatcatctcacgcatgcgcacctacgggtatctcgcgccgatcgaagacgacgacatgtacgtcctcacgccactggtgcccatggtgctcgaccgcggcctcgccgaccagtggctcggatccgaaaccacggacgagaacgcatccgccgacggccgcaccgacgccggcccggacgacaggcccatggaagacatagaacaagacgcattcgatttcaacaccgacgacaaccgtttcgacgaggaggaacactga

SEQ ID NO: 43999 - DNA, 1203 bp, Bifidobacterium pseudocatenulatum CAG:263
atggcaacggtcagaagcaccaccaacagcgacatccacagccaactcaacggatacgtcaccgactatctcaccaagcacatgtatgacgccaacacctcctggccgttgcgcaaaaccatccgactacccaaacaaaccgaactcgaagcccattacacgcacatccgcgcccaagacgaagccatccgcaactgggcacaacaacaccactgcgaaaccagcgaaaaaaccaaaatcatctccaacggaatcgtccgacaaaccagccaactcatcgactcggtaaccatacccgacctcaacacggccctcaacatcaccacaccacaaacacgcaaactctaccaacgcgaacaccaacgcgcacacaccatcaccaaccaattcaacctcgactccaacacctccataaacatcgccaaaatcctcaaaaaccacgacgataccgacttcaacctcgtcatacaagccgcacactacttcgccaaccacaacaccgaaaacatgaccccacgcatggtccccatccccggattcagcgcaaaatggctaggcaaaacaacatcaaaccgctgcaaagcaatctgcaaactcctcaaacgagaacaactagccctcaacgaccgccacggagaaatccgactccgactcctcgacacacaacaccacaaccaaccagacctcatcgtgacacaaccatggacagacggcgcgccacacgacatcacccacatcatcatcgtggaaaacaaagacacctaccaagccatacccacaacagaacacgccatctgcatattcggcagcggacacgcggcaacccgaatcaaaacactactaccttggatcacaaccacaccccacatcatctactggggagacatagacgcagacggcctcgaaatactctccgaactacgacaaaccggcatcacctgcgactccatactcatggacagcacagcatacaaaacatacgaaccatacggcaccaaactcgacaccaaaaaacaacccctcaaaacacgcgaccccaaaccaacaccaggactcacgcaacacgaaagaaacttatacgaacaactctgcaccgggaaaaacacaacctacctacgaatcgaacaagaacgcatccccatcaacgacgcaatgacaatactccacaaccaacaccaatggaacacaacacaccacaaatag

SEQ ID NO: 44000 - DNA, 1446 bp, Roseburia sp. CAG:100
atgatattaaagaaacagatcccagaggacttctataagttgttccgcaccagaaatatggacgcttatatgatgtttctggcagcaatatatgaagaaaacagtgaattgtatacagcacttggactcacccttgaggaaggacaggctattatcgcggaaaccatgagtcgtggacagatagactggcaggaagatgaagaaagtcaggaagaagagacacaggatacagatatggagacagatgctgtgtaccccggaacaccttctgcaatactcaggcgcctcatccgctggggatggctgcgcagtgattatgatgagaaactcaatacctatatactttcttttccagagtatagtcagatgtatgtagaactcttcgagaaattgcagaaggaagatgagacaggagaaagagagagcatccttgccatttacagtgcattgttcacctatcattctgataaagagaaaaacagtgagattctaaagagcgccctgcggacatccaagaatctggaacagctgctttccaatatgcagaatggtatgaggacatattttgaagaattatcccagagtaagaatttcatggagattcagcaggtgctggtagatgagatcaataacaatgacagtaagagatatgcgattcttaccacaacagacagcttttaccgatataaagaggctgtaaaagagctcatcagccagattttaaatgataatgagaaacgtaagatacagatcatagaacagctgaatgaagcagcaccggattctatggcgaagttcagactggaacagtctcttaattactatgaagaagctacggtaatggtataccgcattgaacgtgaatttgacatgatcgagcgcaagtataacagattgattgagcaaaaggcagtatttgccagacgcgcacttgccagaatccgcttcattttccaggaaggagcccatgatgaagacaacatccccaagctgctgcgtattatggatgccagtgaggacaaggagcagatcctggatgagctgagcagccatatcaggctgtcagcaccgtataaagtatatgatgatgacagtatgtataccatcagagaagagagtgattcacagttcaatccattgacaacagcagagcaggagcagcacagagaagatgagattaccgattttgtgcccaaacctctttataccaagagacagcttcacgcatttcgtgatcagaatatgaaggatggcgcatttgtcacgacaaaggagacagtatcctctatagaagatctggagaaaatgatgtttttgtggcaggagattacagagaatcagagcgatgaggatgttgtaaacttaggcggagagttcaccagcccggatggatatactttttccgagcttatgatccgaaatatgcaccctgaaacagaagcatga

SEQ ID NO: 44001 - DNA, 618 bp, Roseburia sp. CAG:100
atgttaaaatatatggaagaattgtctcccggtgaggcatcaaatatcaaaaaaacaatacaggatctgtttaaacagacgtgtatattgcaggtaaaatgtgatcctgtaaccctggtacagagggataatcccagatatagaacctgtgccaatcacagagaatttatagcggcgtatctttccctgctggatctggagctgattcatgatccacaggaacagcttttcagaattcagggcgagggtctgccaacagagcgtatgaatctgatgacgacacgtattatgctgcttttaaagatcatatacagagacaggattatgggggatggtctgcgtgctacggtgacaagccttcgggagatcagagagtacggagccagtacgaagctgatcattcgtaagcttaccagtcaggagtggcaggatgcactgacgctgttaaaagtacatcagattatcgaattacccggtgcagtaggcaatgtagaagatgatacgccaatctatatatacagtacggtcaatatcttctgttcttcggttacgattgaagaacttgtgaagaagtatcgtgacaggacagaagcagcgatagacggcacgacagaatag

SEQ ID NO: 44002 - DNA, 3327 bp, Roseburia sp. CAG:100
atgtgcctgaataactggggcggcatttctcataagatactggaatttaatgaatatgtaaatctgttcagtggcaagagtggttcaggtaaatccacagtaatggatgccatacaggttcttttatatggaagcttctctccaagcttcctcaataaggcggcagatgatgccaagaacaggagaagcgtgctcagttacctgcgaggggagcagaaggatggtacagccaatcgtgagaatgctgacttttgttccaacattgtactggagatagaggatacaggtacgcataattacacctgtgtaggtgtggcttttgaagtaaaacacaatgacagtgagattaggaagtatgtctttttcagccattcagggcagataccggagtctgaatatatcaactccaaaggatatgtatacaccaatcaggagattaagaagctgctggaagtaagggcgcagtcagattctaacaagggcagggatgtaaaccgtacgtatacttccagagaggcatatatggctgcgctgtatgatgtgattcttggttatattgacggaacccgttttcagattatggagaaaagtgccattgcgttaaagatgactaatggtacaggtcagtttatcagagattacatgttccctaagagtgagagcaatgtcatagagaagatcagtgaccagctgggttcttatagagatattcaggataagatcaaggatatgcgccatagaatcgagcttctgcaggaggtgcgtgaagccggcagccgcatgcttgaagtcagtacagggattgccaaagccaatgcaatgatacgttgtattgatgtggtagaactacaggataagatcatgtcagaagaacaacagattgcacagcacaaggatgaactggacagacttgctctggaaatggagaaggacagagccattttaaaagacattgacgaagaactgattcaggtaaaagcggatcttcaggcgagcgatctgggcgcaaagaaaaaccagctggaagcacagaaccagttggctaaaatgctcacagagaagagtaagcagtggcgtaaaatgctggaaggactgcgaaagtgggaagaggatgaggcaattacagactatgtcagcaaccctatgctgcaacgtattcatgccttttgcagcggcagcatcacagaacagcagtgtaacgacttgagacgtaatatccagaataccttagtggatatcgaggaaacgctggaagaatacaaggagcagaaacgcgaatctgataaggaattgaaggaactgcgtactctggtagatgatatgaagaatgacaggaagccatattctgccgcattaaaggaagcaagaggtgcattggagcgtaggctcagtgacctctatggccgtaccattaaggtctatatctttgcagatatgttcgatgtcagggacaaggaatggaagaacgccattgagggaagaatgggcagactcaagctttctcttgtgacagaacccaggtatgcccatgatgcagcagttgcttttcgtgagatgaagaaatatgaagaggttgacctgattaatacggctgcaatcgaaaagagtcagccacaggcagaacaaggctccctctatgaagcagtggagacaggatatccgtatattgatgcatgcctcaagcgttatctgggcagaattatcaaatgtcatacgacggaggaactggaacaggtaaaagacggtgttacaccggattgctattcctacagtaattatatcttccgccatctgcgtaagcgtgattatgacaagtacgcatgtatcggaagtaaggtctccaaggcaagactggaggaatatcaggcagagctcatgcgtcttgaaagtgagaatgcacagcagatgcaggcaatcaacaggctggggcaggcttcagcttttgaaagactgacagaggaagattcctatattgtgtctctctccgcttccggtaaggagctggataaagtcatgggtaagatcaatgctctgaaaaaggatatagaagtattggagcagggaaaatataaggaattgcaggagcgcagcagcagactggaagagaagaaggaacagaaacagactgaaattgaccagaatcagggcgtaatcaacagtattgaacgcaggaaaggtcatttagagggcgaaatcgagaataataaaaaagcactggatgaaagtctgatgggctatattcctaatgcggaactggaagcagaagtggagaagcttttaaagacacgttcaggtcaggctatcaagagtcagaagaacagagaaatcacagagcttgaagagaaggagcagcaggagctggagaacagacaggctgcaagaaaccgctttaacagagaatatccttctgtaggcttcagtggcgcagagaagagcaatgatgcatatgtgaatctgttgaatgagtatgagacagattatgaaccgaagtatgaaagcgaatttgagaagcagtgcaatattatctataagagccttcgggaaaatgtcattgcgaccatacatggtgacatcaatgctgctaaacgccatacgcatgagatcaaccgtctgcttcgtaaaaccaattttgcagacagcacctatcagatcaaaatagaacctgcaaaaaatgagaatgggcagttctatgagatgctgacagcaccggagcttgacagcaagaatgtgggaagtggtgtcatagatggacagatcagtcttggtgaggatgaattttaccagaaatacgagaataagatcaagcttctgacagataaattcatgccaatcaaggatgaagatggctcccatagagagcagcgtctgaaagaaatggagcagtatgcagattatcgtaattatctgtcctttagtatgtatgagcaggtaacggatgcacagggcaacgtaattcgtgagaatttcgtagatgagatggcaggacgtgattctggtggtgaaggtcagaacccgaagtatgtagcactgctggctggttttgcaatgctttatatgcagcagagtaacagggattccaagattaaactggtgctgctggatgaagccttttccaagatggatcaggagagaagtgccgtctgcctgcaatatgcgcgcaagatggatttacagttgattgtctgtgtacccgatgagcgattgcagtcactgatccgcaatgtagactgcgtatatggctttagaagatatcataaccagatatccatgatgcatattgacaaaggagattacctcaaactgatggagggagaggaaaacgactaa

SEQ ID NO: 44003 - DNA, 1413 bp, Ruminococcus sp. CAG:55
atgaaactggtcgaaaaagttccaaaggatctatataaaatatttggaagtaaatatatggaattctatatgcagtttctggtagcgctttatgaggagagcagtcagtcttattctcttctcgggcttacggaacgagagtgtcagatgatcatgaatgaacgattggcgaagatggcactggactggagtgaggcaagagtcgatgaggaaggagaactgatcaccagagccaacatggcatcagtcagtctgaagcattttgaagactggggatggcttagaagggattatgatgaaacgttgaacagttatgtcgtttcatttccggaatacagtcagctgtttgtagaattatttcagaaattatacagtgaaaatgacggtaaggaacgagagagtgtgcttacggtatacagtcatctctatacctacagtttagataaagagaagaataatgagattttaaaaagtgcgcttcatacatcaagagcacttctgcagatgctcgcgaacatgcaggagggaatgcgaggttatttcgatgaactgtcaaagcagagaagtttccgaggaatccaggaagtacttgtgaaagagatcaataacagtgatagcaaaaaatatgcgatattgactacaacagacagtttttatcgatacaaagaagctgtaaaagagttgatcgaagaaaatctggaaaagacagaagcaagaaaatactcatttgaaacagaactcttaagtgaagaagaaaatacgagaaaatcttaccgtctgcgaagaatgatcgagatctgtgaagaggcaacagatatgctctataagatttcgagagagtttgatgcgattgagcgcagatataataagctgattgaacaaaagacagtatttgcaagccgtgccgcagcaagaatccggtacattatgatggaaggtgtaatggaagaagatcagacagtcgcactgattaatctgatcaatgaaagtggcaagtcggaagagattctggataagttgtcttcaaaacttaggttttcggagccatataagattatgacagagaagagtctgtatcaaagacgtgaaaatcagaaggaaaagttcagtccacaggcggtaacacctgagaaatcacaggaagagaatatgacagaatttgtcctggaaccactgtatacgcagaaagaaatcagagatttccgaaagaaaaatgaacagaatggaaaattcacagtgacaaaagatactgtaaaatcaatagaagatttggagaagttatttatggtatggcagcatgcaacagaatctgcggacagtaaggcaaagattgaagtggcgcaggagatggagaatgaggctggtttccgattttcaaaacttacgatagagggagtagaatcagatggttaa

SEQ ID NO: 44004 - DNA, 696 bp, Ruminococcus sp. CAG:55
atggttaattatatggaagaattgtcagtgacagaagctgataacctgaagaaaacaattgctgcattattcagacagacatgtattttacagatgaaatatgatcctgtaacacttgtcccaagagacaatctgcattatgagatctgtacaagacacagaaagtttattgaagactatctgtctgttttaagctgtgaattagtgcatgacccacaggaacacatttaccgtttacatggagatggaatcgcgatagaaaagataaatgccaccgttacaaaagtaatcttactggttaaattaatttacagagataagattttaggagaaggcttgaaagctacagtgacgaatctggcggagatccgtgaatatggaaagaatacgaatctgattaattataagcttacgatgggtgagtggaaagaagctttatatgtgatgagtaagcatcagatcattgaagtgccgggagcaatccagaatgttgaggatgagactccgatttatatctacagcacgatcaatctatattgtggaagtatggatattactgcgttgatcaaagaatatcaggaagatcagtacgcagaggaagagattacagaagaagtttctgaacaggaaatccaggaagaagcagagggaggtgtggaagatgaaagagaaacagtcgaagaaaatatttactag

SEQ ID NO: 44005 - DNA, 3369 bp, Ruminococcus sp. CAG:55
atgaaagagaaacagtcgaagaaaatatttactagaatgttaatgaataactggggcggtatcagtcacaaagtgatggagttccatgagtatgtgaatcttttcagtgggaaaagtggatctggtaagtctactgttatggatgcgatccaggttgttttatatggaagtatatcttccacattcttgaataaagcggcggatgatgcgaagaacaggcgtagtgttctaagttatcttagaggagcgcagaaagatggttcctttaaccgagaagaccaggacttctgttctcagatcgtcttggagattaaggatacaggaaagaatacacatacttgtattggtgtttcatttgaggttggaaaggcagatacagacatcaggaaatattgtttcttcagtcattccggaaagattccggaggatgaatatttgacagaagaaggtgtcccgtatacaatcgcgaaacttaaaaaattggtagaagcaaggatagaatcggctgacaacagaggtcgcggagatgtgaaccgtgtatatccatcgaaagaagcgtatttgaaaacggtttatgatgcaatctttggttatgtagagccgggccgtatgatgacaatggagaaaagcgcgattgcacttcgtatgacgaacggaacgggacagtttatcaaagattatatgttcccaaagagcaaggaagacacagttgcaacaatcagtgatcagcttggcgcttaccgtgagatcaaggaacgtgtagaagatctggagcagagaattaaaatgcttgacgagatcagtcagcataatctagctttgcagaaagcaggagctgataagatctatgtggaacagatcttaaaatatattgaaatagaaaattgtaaagcacatttgcaatcgaaagaggatgatttgcaggatattctcaagaagattgaggaaaaagaagaaaagagaaaatcttatttggcagagaaagatgcttatacgaaagaacaggtagaagtcgaggcagaactcaaagccagcgattatggacagaaagagaaggagctaaaggagattgaaaatacgatccagctcctggcaacgaattcagaacaatggagagatatcgtaaaaggtctttcagcctgggaggaagacgatgaagtcagtgcttatgtgagcaatcaggcgctgcatagaattgatgatatccgagatggtgttgtgagtgaagattcgattgaaaagctaaagcaatatttaagtgatgcactcgacaacatcaatacagaattaggcgatgtccgcgaaagaatccgtgagaatcagaaagaacttcaagagaagcgggagatggtagaagacctcaaaaatgacagaaaaccatatcgtgcggaattgaagcgtgcaagacaggaattgcagaatatacttagtactcagtatggaagaacgatccatgtaaatatctttgcggacttgtttgatattacggatgaagagtggaaaaatgcaatcgaaggacgtatgggacgtgtgaaacacagtctggtgacagcacctgaatatacgttagatgctgcgaaagcatttcgcaaaatgaagcagatgaaggggatcgaggatgtcgaactcatggatactgcggcaatcgtgagagacaagccgaaggcagatgagaatacactgtacgagtgtgtgcgcgcagaggaagcttatgtagatacttgtctgaagcgatacttaggccgcattaagaaatgtgagacggtggaagaacttcatgagacgagagatggtgtcacaaaggactgttattcctacagcaattacattttcagacatttaagaaagaatgattatgagaaatatgcctgcatcggaacgaaagtgtcaaaggcgaaacttcttgagttggaagaagaagcagcgaagctgaaacaggaagtggaagaggactgccgtgttgagatggcactgcgtgcagcacagaaattcgagtgtctgaaccagagcacagaacagatcttacatctttcaaaagcagcggaacagcttcaggattattacgagaagcaagaaaaattacgtctagaagtagaagaattgaaacgaggcgaccggacagtcgaactgaagaagaaaaagcaggaattactggagttgcttaagaaaaatgcagagattcttgatagcattcaaagtgaagtagtacagtatgcgaagacacagggacaaatcgagagtaatatcaaatcattttcagaaaagataaacttcctgacagagggatttgttgtcaacgaacagcttcagaatgaagtaacagatgcgttaaaagtacaaagtgaagcagcttataagagagacaagacaaaagaaaaggatgctttggaaacgttggaagagacggagagagaagaactgcaaagaagtagaaataagttcaataatgcttatccggcctatggttttacaggaatagaacatgaaaatgatgtgtatgacaaagtgctgaatcagtgcaggaaagattttgaaccgaagtacaaggaagaattcgataagcagtataatctggtttactatacattgcgtgaaaatgtgattgcttccattcatggtgaaatcaaggcagcttacagacataaaaaagagatcaaccgtctgcttgcgaagatcaagttctcagatagtatttaccagattgatatcataccggcgcagaatgaaaacggacagttctatgagatgcttacagcacctgaactagacagtaaagtgttcgatgactacggatttgaaggtcagttaagtcttggtgaggatgagttctatcagaagtatgaagaagatatcaagcgtctgactgagaagttcatgcctccgaaggaggaagatgcaagatccttaagccagtatcgtcagcagatggaacagtatgtggattaccgtaattatctgactttcagtatgtatgaaaaggtggaagatgagaatggaaatatccgcaaaaatgcagtcgatgatatggcaggccgtgactccggaggagagggacagaacccgaaatatgtcgcactgcttgcaggctttgcgatgctctatatgcagcagacaaaccgtgattctaagatccgtctggtgcttcttgatgaagcattttccaagatggataaggagcgaagcgaagtgtgtcttcattatgcgagagagctggagcttcagctgatcgtatgtgtaccggatgaacgtctacagtcgttgattcgaaatgtggactgcgtctacggattcagaagacaccagaatcaggtatccatgatgcatattgataaaggcgattacctcgatatggttgagggaaatgaataa

SEQ ID NO: 44006 - DNA, 1365 bp, Dorea longicatena CAG:42
atgcagttaatgaatgaaatcccggatacgttctggagtctgttccgttcggtcaaccgggatatttatattgaagcacttttatgtattaatgaagaatacgaatataataactatttcctgacgaaagaggtgtgtatccagatcttaagtgatatgaatgcgaagaaacggtttgagttacagcgggaggaaaatgatacggattttgatatgctggagacgccgtcatcaaggatattaaactggcttctgcgggcaggatggctgaagcgtatcgaggattataatacactggtgacgaatattgtcattccggattatgcggcggtgatgatcgatgcatttgaaaagctgaattcggaagatgcgtcggagacggatatttatatccagaatgtgtatgcgacgctgtatgcatttcgcaatgatccgagggcgagtatcgggcttttgaggacggcactggtgaatacgaggcggctgaataaggcactgcaggacatgcttcataacatgaacaagttttttgcaaaacttttacagcaggattcgtacagcgggattttaagagagcatctggacagctatgtagaagagatcgtgtggaagaagtatcatattctgaagacgtcggataacttttacatttataagatggatattaagaaatgtctgagagagatccgggatgatgaggcatttatcatgaaggtacaggcgcggtcgaagatgcttggagataatcaggatgatgtactggatctgctggatctgatcgagcggggatttgatgatattgagcacagaatcgctaatatggataaggaacatacgaagtacgtccgtgcgacggtaacgaggatgaattatctgttaagcggtgagacagatacgaaaggtctggtggtacagcttctgaataaaatgtcggaagatccggatcagatggaagagatcatcacagagaccggaaagcgcatgaatctgtcgctgctggaaattctgtcggagaagtctttatataagagaagaaaatccagaaaagacttcatcagccagctccttccggatgagacgacgggagatctggataaggatgatatcttaagactgaaccggatccagatgcggttcagcaagaagcagatcgaagaattcatcgagaataatatggaagatgaagtgatggatgcgtcgaagattaatattgcggatgaggaagaatttgaaaaattgattttggcttatgattacagtacacgtaagaacagcagatatatggtgctggaagaagaaccggagatggtggaaaaggacggataccggtatccggcattaagattcgtgaagagacgggcgtaa

SEQ ID NO: 44007 - DNA, 645 bp, Dorea longicatena CAG:42
atgatagattactacgaacagctaacccaggaagaaaaagaagaggtcacagaggtcatccagacactgtaccgtcagacatttctcctggaaagaaaatttgataaacgtgcgggaaggatgcagtatacaaaagaataccgtacctgtacgaagcatctggaattttttaaagcatattttgaggtggcggggatcatactgcgggaaaatgtacatatgggtgtgatctatatccagggagagcagttatggggtgagaagctgccgcgtctggcgacgatctatttactggtgctgaagcttatctatgacgagcagatgcagactgcatcgtcgagcagccatgtggtgacaacacttggtgcagtaaacggaaaagcgggagaatttcatgtattgaagagtcttccgtcaattacggaaatgagacggacgatcgcacttctgaagaagtatcagatcatcgagccgcttgatgttctggaagaattaaacgagtcgacccgcctggtcatctacccttgtatccatacggtacttttaggagacgacatcagggaattattagcgacattcagtgaggaggatcaaattggagacgaagcagccattcaaagcactctcgaagatatgcctgaataa

SEQ ID NO: 44008 - DNA, 3345 bp, Dorea longicatena CAG:42
ttggagacgaagcagccattcaaagcactctcgaagatatgcctgaataattggcattacatagataaaaagatactgacgcttaatgaaggaatcaacttcttcaccggacattccggaagcggtaaatcgacggttctggatgcgatccagatcgtgctgtatgctaatacggacggccgtggattcttcaacaaggcggcagcagatgattcggaccgtacactgatcgagtacttaagaggtatggtgaatatcagtgaaaataatgaatcacagtatttaagaaatcgtaatttttccagtacgatcgtgctggagctgacacagacgaataccagagataaacagtgtgtcggtgttgtgtttgacgtggatacgtcgaataatgatgtaagccgcctgttcttctggcatacgggagaattactttcgaatcattaccgttcggaaggccggtgccttaccactgcggaaatgcgtgagtacctgcagcgttcctttacgccggaacagttctactgcggtccgagcaatgaaagattccggagacagctatacgatatctatcttggcggtctggacatggaaaaatttccaaagctattcaaacgtgcgatctcgttccgtatgaatatcaaactggaagatttcgtaaaggaatatatctgtatggagcaggatatccatatcgaggatctgcaggaaagtgtcatgcagtatggacgcatgcgcagtaagatcgaggagacgatggaggagatcagaagactgaagctgatctgtgaaaagtatgagcagtatgcagaaaaatctgatgaggagaaggtgtgctcttatcagatcgaccgtctggagatcatgaaccatgaggtaaagagtcaggaagccagagaccggatcaaggtaagacaggaagccatcgaagatctgaagaagcagcaacaggtgctggagcaggaagaaaaggacttgcagaaagagtatgaagagatcattctgcggatcgcagacagtgggtatgcaagactggaatcagatctggatacattaaatgagacgctggagcgcctgaataacggaaaagtccgctgggagcagactgcagagcatctgaaggtatggacggagaaagacattacgccaaatcaggtgatctgggatatcgaaaaattcgcagacggaagcatttccgaagaagagcttgtgcgcctgcaggaaggcttaaaagatctgcaggaggagctggaagaccagagacaggaagcggatgcagaccttcgccggatcaagaaagaagagaaagaggcaagagcagaattaaaagaactgaagcagggaaagaaggcttatccgagagagctggaagaggcgagattcgaactgcgtaaccgtttgcatgagcgctgcggcaagttcgtgaatgtgcatattcttgcggatcttctggatgtgaaggacgagagatggcacaatgcagtggagggttatcttggaaataataaattgcagctgatcgtggaaccaaagtatgccagggctgcgatggacatttaccaggagatggatacgaaacgtttcttccgggcagcagtcctggatacggagaagcttacgaaggacaagcatcaggtacagccgggcgcgctggcagaagtagtaaaagcgaaagaagcgtatgtgcaggaatacattaatttcttccttggaaatgtaaagaaatgcgaatcactggatgaactgcgtgagtgcaggatcggtgtgacaccggattgtatgctgtaccagagctacaaactgcagcacatgaatccggagaattacaccagaagagcctacatcggtgagacgagtatgcgccagagaatccgcaagctggaagaaaaatgtgagaagttaaatggcgagagaatgccggtacaggagctgttagaagagatccgccaggcaatgcagatggagatgttgaagcagccggcagaggattatctcggatggctggctgacagcaaggcaatcatttccaaagaaaagaaaaaggctcagcttctggaacagatgcagaagttaaaggatgaatccgttgctgcatgggaaggcaagaagaaagaagtgcaggcggcacaggatgcgaagaaagaatccgtatccaaggtgcaggaagcaatctgggagaacaagaaagaaatcgaacgtctgaatgcagaagttctcgaatcggaagaacagatgaaggacgtgaagagaaaagtagcagataagcgttacgagaaggagttccaggaatatctgtcgggcagaaaatcagagaattatgagtatctgagacgtcagatggtttcgcgggtatatacgctcagggaagaagaggaagacgcttaccggaagctggtggaagagagaagcagttatatcagagaatatccgaaccgtacattctcaacttctatccgggacaacgcgccgtatgagaagcttttgaattcgctgtcctgcgatcatctggagacttacagggagtcggcgaagacacaggcgaaagcggctgtggagcatttcaaagatgacttcatcttcaagatccggagtgcgatcctggaggcttatcagagaagggatgagctgaaccggatcatcagcaaactggacttcggtaaggataagtatcagttcgtgatcacgaagaacaagggtgcagatggaaaatattataagatgttcatggatgattccctgcagatccgtccgtctgacttagatgatacgatggacaaccagcttgatatgttcacgatggagcatgagaaccagtatggggagatgatgaacgagctgatcaacatcttcatcccgccggagaatgcgacgaaggacgagatggatgaggcgaaacgcaacatggataagtatgcggattaccgaacctatctgtcattcgatatgcagcagatcgtacatggcgataaggagatgacgatcggactgagtaagatgatcaagaagaactccggcggagagggacagaacccgctgtacgtggcacttctggcaagctttgcgcagctttataagatcaatctgtcgccgaagatgcaccggtcaccgacactgcgtctggttgtgttggacgaggcgttctccaagatggatgccgagaaggtggcaagctgtatctcgctgatccgcggacttggcttccaggcgatcatcagtgcgacgaacgataagatccagaactatctggagaatgtagataagactttcgtgtatgcgaacccgaataagagacatatttccattcaggaatttgagaagacggagtttggggagttggcggaggaataa

SEQ ID NO: 44009 - DNA, 1419 bp, Coprobacillus sp. CAG:826
ttgaaattatttgacatgatcccggataatttcttttccgtcctttcgagcaaaaacaaggatatttatgcgatggcgttacttgcgctttatcgttctttacagaataatgagctttcgattaaaaaagatgactttattcgtactttgaaagataccgctagtgacttagtcatgaactttgatttttctgatgaagaagaaaacgatattggcgcagacagtactttaccaacaagagccgcttttatcgttcgtcgtttagaagaaacaggttggattgaagtacaaatggataccgaaacttttgatgagtatatcgctcttcctgagtattcgattaccatgttaacttctttaaatagcattgtgtcggatgctgaagtagcgtataactctttagttcactctacgtatagcgaattaaaactcgaagatgaagagcaagacgagtatatgtatgccactttagtaagagtgtttgagaataccaaacgtttacaaacggaattagttactttaggacactccattcgcattttccaaaatcgattaggacaattatttaccacgaatgaagttttacatgcccactttgatgattacaaagttcatgtaagtgataaatactatcaccctttaaaaacattcgattcaattaccaaatttaaacgtccgattttagcgattttacaaaaatggctaaaagatgaagacattcgtcataaactcaccatgcaagccatgatgtggggaaaggccaaagatattaaactttctgaagaagaaattatttctaaaattacgtatgttcaagatacttatgaaaagatgatgcttaccatcagtgaaattgatgaaagccatgcggaatataccaaatcttcggccactaagattatttatttaaataactctgataagaccatgaaaggtcatttggaaacgatatttaaggcctatgcgaaagccaatgtggaaggcgtaggattacgcggtattctttctagaatgcaagattccatttctttatatgaacaaggttatattaacccagattccattacgcttcctatcgtgagaaaatatcgtgaagaaggagaacctcttcctatcatttctaatagtgaagaagcgggcgattataccatgcaagaattcctcgatcaaacgagaaactccttcacggatgaaagaatttatgcctttatggaaaccgccttccaaggtcaagatgaaatctttattggcgatatcgctttacctgactttgatgcatttgtgcttctaattttagcgtcattaaagaaaaatgatgatgcgtgtttctatattgttgaacaagatgaaggccgtgtttattcacaaggctatgtcttaccgaattttacatttaagcgaaaggagtccactaaataa

SEQ ID NO: 44010 - DNA, 621 bp, Coprobacillus sp. CAG:826
atgtttgaagaagaatttgtgaaactttctagtcaagatcaaaatgagtttgctagaattgtcaatgctttaatgttaaagtcatttgtggttcgtgaatcttttgactcacgggaaaaaatgatgaaaattaatccggaatatcgttttattgaacgttattacgagatttttgaagaatatttaaaatattcaggttggcatttagaaaaagatgtcacgaatggtgtcattgctatttataatgaatatgaacaaaaccgcttaagaattgatcgagaaacctcattgattctctttacgcttcgtttgatttatgaaaccaaaaaagcggaatccaatgctcctggtgaaagtttatatatgacgacccctgaattattaaaaacgatgattgaatatggtattaccatgcaagggaaacgtttaacgggtcgtttattaggtcgttctttacgttttatggccgctcataacattatctgcaaagtgagtggctcctatgatgaaggtaacgtgactttctatattttaccttccattacctttgcggtagatagtcaaaaaattgccgctatgtccgatgccttagagcgcttgaaggagggcgaaaccttatga

SEQ ID NO: 44011 - DNA, 3384 bp, Coprobacillus sp. CAG:826
atgaaatccctcaaaaaaataaaaattattaactggcactacttctggaatgaaacgatttgtattgaacctatcgttttcttaaccggtttaaatgcttccggtaaatcgacgttaatcgatgccatgcaagtcttacttttaggcgataccagtggccgattctttaataaagccgccacggaaaagtcttcaagaactttaaaaggctatttacgcggtgaattaggcgatgccgaagaaggcggtttccgttatttaagaaacggaagatttacttcttatatcgctatggaattctatgatgatttacatgaatcctcctttacttttggtattgtttttgattcctttaatgatggtagtgaagaacatcgcttcttcttattagaagataaaattccggaaaatgaattcgttatgaataatattccaatggaatataaagctttaaatgaatattttagcaaaaattatccaggaaaattcaaattctttgattcgaaccgccactaccaagataacttaaaacgtaaatttggtggcttaaaagataagtacttctccttatttaaaaaggcggtttctttctccccaattaccgatattgaaacctttattaccgaatatgtttgcgatgcccaaaccaatattaatattgattccatgcaagcgaacattcttcaatataaaaagcttcaaaccgaagctatggtgatggcgggaagaattgaaagattaaccgaaattgaaaaagcgtataaagcctatgtagaacaaaaagattctttaactttatatagttacatcatcgaaagagcggaatatcaaaacgatttaaaccgtttagcttcttatcatgaacaaggtgaaaaagcccaaaaacgtcttttagaaatcgatgatgaaattcatgatattgaagaagaaattcaaaatttccaacgtaaaaaagaaaaattaacttccgataaattaacttccgatacttatcgtatgaccgatgaacttcgtgaagaaaaaagaaagaccgaagaacgtttggctgctttacaaagagaaaccaaagaagtggaaactaacttacttcgttatgcggaatcctttattaaaaaagccaatgatttagtggaaactttacacgcttttgatctttctttattagatgaagataagaaaaccgatttagaagacttagaaaataatgctttagatgtcattcgtttatcttcgcaaatgaaagatgaacatttagcgcatattgaaaccttaaccgtttccactttaaatgaatggcgtgacgctctaaacgcttttaaaaatcaagttagcgctttaaacgttactttaggtaaaaccattcatactttggatcaaaaagttgcattactccgtcaacaagaagtcgatatgatgaacggtggtaagtcttatgaaagaggacttagctatcttcgtcaagaattagcagcggaattacgccgccgccattctcgcgatattgaagtcgctatttttgcagacttaattgatattaaaaccccactatggacgaacgctattgaaggcttcttatctagccaaaaattcaacttatttgtggaaccccaatattatttagaagcccatgaaattcttcgtgaactttccaaaaaagtcggtttctatggtacgaatttagtagaccaagccaagattattgaacgccatttcacctgtgaaaaaggcgctttagcagaagaaattattaccgaccatgaaggagcaagaggctataccaacttcttaattggtcgtttaaagaaatgtaaaactgtgcaagaagctagagaaagcggaaatggtattaccgctcaatgcgatttataccgtaactttgctttatcttctttaaacccacgctcttataccccaagttatattggtcgtaaagttggcgcggaacaaattgaacaaaaacataaagaagttgctaaatatcgtgaactcgtagaactttatcgtaatttatatcgtatcgtcggtgaagcgaattcattagaaatgattaacgcctatgaaattcaagcttccttatccttaattgataagactggcgatattgaaggtttaaaagaaaacttagattacattgaaaaagaattagaaaaacatgacttatcacaaattaagacgattgatcaacgcattaaagatattgaagaagatattcgcggtttagaaagagatcgttcgagcttatttgaagaaaaaggtactttacaagcgcaaattcgctctttaaatgaagaaaaaattccagaagagatgaaaaaagccgaagaacgtaaagcccgcttagatgaaaactatgatggattcttcgttgatgaaaccgctcaacctgcttttgagcaactcttaaatgaaaagatgtccaccattgaaattgtttctacttataaagtgaaactcaccaaggcgcaatacttacaacaaaacttcttctccgaacttgttaagttacggaaagattatatccgcgattatcgtttaagctatgacgctgaaaccaaagataacacggtctatgatcaagaattaaccgatatgcgcgatgtcaaattaccacaatatcaagtggcaattaccgatgcttatgaaaaagcaaccaaacaatttaaagatgatttcattagtaaattaaagaccgctattgaaacagtggaagcacaaattgaagacttaaatgctgctttaagtgcttcgacctttggtaatgactcttatcgattcgtcgtccgtccatctcaagaatatcgtcgttattacgacatgattaaagatgaacttcttttagaagtgggcgaagatgattccgctttcgtcaccaaatatcaagatgtcatgaatgatttatttagacaaatcgtcgatgtcggtgaaaaaggcgaccgtcaaagtgccgttttagccaacgtcgaaaaatttaccgattatcgttcttacttagagtttgacttaatcgttcgtaaccgtgatggcgtcgaacaaagattatctaaaacccttcgtaagaaatccggtggtgaaacacaaacaccattctatattgccgttcttgcctcttttgcccaactttatcgtgtgaacgaaaagggtgaattaggtaattccttccgccttattatctttgatgaagctttctcaaagatggaccgcggacgtattaaagaatccattcgtttattacgtaaatttggcttacaagccattctctccgcaccttctgataaagtatcagatattagtgaactcgttgatgaaacgcttgtcgtcttacatgacaagaatacttctcgtgttcgtttatatgcggaagaagataaaatcacgagcaaataa

SEQ ID NO: 44012 - DNA, 1434 bp, Clostridium sp. CAG:411
atgagtttgatgaagcagattccgaaagatttttatcgggtgtttcggactaaaaatcgggaatattattttgctattcttgtggaattgtataaggcaaatatggaagaatattatacctttggaatgacaaaaaatgagtgtcgggatgtggtgaatgagacgatggcaagtcttaaaattgtctggcaggaagatgaggaagaacaagaggaaacagtgtcacaggggcagcaaatgcagatgcgtacacctgctgccagatgtctttctaatttgttgaaatggggatggcttcaggaagactatgatgatcagttggacgaggaaatctattcttttcctgaatatagtcagatgtttgtcgagttgctttggcagttagggctagatagtgatagtcaggaacgggagagtatattatctatttacagtttattatacacatattacatggataaggaccgcaataatgatattattaaaaatgcctggaaaacatctcgtagactgacacagcttcttacgaatatgcaggatggaatgcgaacgtattttgatcgattatccaaacaaagtaactttcttgggattcaggaagtattattacaggaaattagtaatagcgatagcaaaaaatatgccatgcttacaactacagatagtttttatcgttataaagagcaggtgaaagaactgattagccagattattcgtgagaatcaagaagaaagctttcaattacgccaacaatggatgcagtttacgccagaaacaaaagaggcacttcgcgtagaacgacagatgaaaagaaatgaagaaacgaacgagtatatgataagaattgagagagagtttgatcgaattgaggaaaaatataatggattgattgagaaaaagacggaatttgcaaaacgggctttggcaagagtacaattcctgttacaagagggaatggaacaaagcgagaatacagctacgttaattaaaatgataggggaaagaccagacggagaagagattttgaatacatttcagaaagcattacgtttttctaccccatttacattatttacggaaaaaggtctgtatcagaaacggggagcaacagaaaaacagtttacaccaaaagcggtagaaatgcagttagaggaaaaagaaaatcttacggaatttgtacctaagcctttgtattcagtaaaggaattgcaggaatttcgagaaaaaaatacaagtaatggcagatttgcggtggatgaaactacggttgaaaaaatagaagatttagaaaaattgatgttgttatggcagcagtttacagcggatacggaacaggatgcagaagaaaaagttacattgggaggcaacttgaaaaagacgatagagggagaaaacgaggttgcctttacacaattggtaattaaggaggattag

SEQ ID NO: 44013 - DNA, 651 bp, Clostridium sp. CAG:411
atgttcgcatatatgaatgaggtctctcaggcagaacaggataaaataaaaaaagtgattcaggaattgtttcgacagacttgcattttaaagataaaatataatccagaaacactgatagcaaaagataatgaaaagtattatatatgtaataagcacagggaatttatagcggattatctggaaattttagggtgtgagttacaacatgattcccaggagcatatttttcgtattgtaggagaaggtgttccagtcttgcgaatcagtttacatacaacaaagattttattgttgcttaaattgatttatcgggaaaaaatgcttggagaaggattacatgcaagtgtgacaaatttgaaagaaatccgaacgtatggagcaaatacaggtttattgacaggaaaattcacaaccagtgaatggagtgagaccctaaatttgatgaagcgacatcagatattggagattccaggatcggtggcaaatgtagaggatgatacgcctctttatatatacagtacgattaatatatattgtccatccagagaaattaatgatctgattgcacaatataaagaggaaacagaggaaggagagagactggagaatgaaggcgaagaaggtattcagacggttatgtttgactaa

SEQ ID NO: 44014 - DNA, 3378 bp, Clostridium sp. CAG:411
atgaaggcgaagaaggtattcagacggttatgtttgactaattggggaggcgtagatcatactatattggaatttaatgaatatgtaaacctctttagtggaaaaagcggttctggaaaatcaacggccatggatgcattgcaggttattctatatggaagtgtttcctcaaatttcttaaatcgtgcagcggatgacaagaaaaataaacgtagtgtattcggttacttgcgaggtgagcaaaaggatggaactgcgaatcgagagaaacaagacttttgttctgtaattgcattggaaattgaggatgtgaggacgcatacaaaaaattgtgttggctttaattttgaagtgcgaagtaaggatacagaattgaataaatttgtgtattttagtcatacgggagatatgccggaaggaggataccttacgaaagaggggataccttttaccaatgcacagatgcgggaattgattgaagagagagaacggtccataggaaaccgaggacgcgcagaaatcaatcgaatttataatacaaaagaggcatatttagccactttatatcaaaaaatactgggcggtatagatggcagacgttttgaaactatggaaaaaagtgcgatagccttgcaaatgtccaatggaacgggacaatttattaaggattatatgttcccacagggtacaggagaagctatcacacagcttagtgagcagttgggagcatatcgtgatatttgcgagcggattgaggatataaaaaaacgaatcggattactggaaaatgtgcaaaaagcaggaattaaactttctaccgcaaaagcagaacaggtgcattatagtagtttgataaaatgtctaaacattgtggatgcgaaggatcacattgctgcctggcaagcagaaaaagaaacggtagatggggaactgatacagttaaaacaagtacaagaaaagtttcaaaagcaggaagaaagtataaatgaacagtggacacaggcaaaggcagatttacagtccagtgaccttggacattataaggaacatttggaagaattgaacagacgaagtgaaatgcttgcggcaaataaccgaagatggagaacggttacggaagggttgaagcagtggggtgaagatgactatatcaatgattatttaagtggacaggtgcttaaaaaaattgacctttttcttaaagagcaggtaacaacagaaaaatgcgtcgaattgcgagaaaccttattggaagagaaaaagcaattggaaaaagaattgggaatgttgcaggaggattatcgggagataaagaaacaactagaagaaagacgcagcattgtaaatgacatgaagcaggacagaaaaccatatggggcaaaactgaaaaaagcccaagctgagttacaggagcatttgcaatatgcctgtggaaaagatgctaaagtttttgtgcttgcggatttatttgatattcaggatgcagaatggaagaatgcagtagaaggctgtatgggaaaacttcgttttgctcttatcacagagccaaaatatgcagaagaggcggcaagacagtttcgcaagctatcccgccatgaaaatattgatttgatcaatgcaaaagcattgcaggaatcgcaaccaaagagcagagagaattctctttatgaaacggtaatctgtgagaaggattatgtggatgattgtttaaaacggtttttaggtagcattatcaaatgtcagacagaagaagaaatgattgcggctggaaatgcgattacaaaagactgttattcctatcataattttatgttccgccatttacgaaaaaaggattatgaaatggcatttatcggaacaaaagtttcaaaagtcaaactaggggaatatgaacgagagctagaaaagatggaaaaacgatttgcagcattgggtgagcaaattagtcatatgaagttgatgtatgattatgaaatgttggcagagaacccttttgattatatggaattttcaaaagcaggaactgaattagaagagactatggcagagattgaaaaactgcatacggtcattgataatctggaaaagggagaatttcgcgaactacagcagagggaagaacagcttcataaagaatacaaaaatctgcggaaacagagcagagattgtaatataaggatacaggaaaaaacagcacgcgttgcaggattggcggcagacataaaaggaaaagaagaagaattaaaggaattagagatcggatatacggaaaatacaaaaataaaagaagaaatccgacaagaacgagaaaagggaattagtggcatcacactaaacaacagatggataagaaaaataaaagaagcaagggagacagaagaggaggcaaaacaagagagaacaatagccagagaagaatatattacaaattatccgaactcagaatttacaggatgggagccggataatgaaaagtatgatagaaaactggtagaatatcagaaaaactatgaaccacagtatcaggaagaatttgaaaaacaatgcagtctgatttataaaagtctacgggacaatgtgattgccaaaatacatggagacatcaaagctgcgcatagacataaagaggagattaatcgtttgctccgcgaaacaaactttgcagacagttgttatcaaattgatattgagcctgcggataatgcggatggacaattttacgatatgcttatggcagaggaattagataccaaaaatccagataatgatggatttgagggacaattaagtctaggggaaaatgcattttatcaaaaatatgagatgcagataaaggcattgatggaaaaatttatgcctgccaaaaacatagatgaagtgcagttgaaaaagtatcaggaggaaatgaacaaatatgcagactatcgcacgtatctggcattccgaatgaatgaaattgttacggattcggaaggaaaaactatacgcaaaaattatgtagatgaaatggcaggaagagattcgggcggggaaggacaaaatccaaaatatgtagccttgcttgcaggttttgccatgttatatatgtcacagacaaatcgagattcaaaaataaaactggtattgttagatgaagcattttctaagatggatcaggagcgaagtgcagtatgtttacaatatgctagaaagatggatcttcagcttatcgtttgcgttccagatgaacgcttacaatcgctgattcgaaatgtagacagtgtttatggatttcgaagaaaaaacaatcgaatatccatgatgcatattgataaaggttcttacttgaaaatgatggaaggggaagaagaacatgaaactattactggtagaggatga

SEQ ID NO: 44015 - DNA, 1461 bp, Clostridium sp. CAG:288
ttgaaactatttgataaaatccctgagaatttcttctctctcttatcacgcaaatataagtcagtgtacgctttttcactattgactttatacgatacattaaagctgtataagaccaaaataaaaaaatcagactatctaatgcttcttcgttcacgtggagcagatttgatgtctctttttgatatagctttggatagacaagatgataaagatgatgaagatgaagatcaaacaacaatagctacggattcttcagatgactcaacaattgccaagaaaacaaattacatttgcaataagcttgttaaaactggttggatggaaattgaaagagatccaaagacaaatatagattatatatttttaccaagttattctatacgctttttggaattgatttccgaacttacaagcgacgtttctatttacttgccattagttcaccaaacatatagcgaattaaaacttgaagatgaaaaagaagatgactttatgtatagatcattagctaacgctcgaaaaaatgctgatgagttagagttatctgtaactctacttcaccattcaatttgtgtatttggacataaactaacatcacttttgtctccaaatgatgttttacatcaacactttgataattatagaacagaaattagcgataagatttatcacccaatgaaaacatatgactctttgggtttatacgctatgcctacaataactattttgaagaagtggttgcacgatgaaagaatagtaggaaaaattgctaatcaagcccgttcagataccgataacgtttcgctttctaataacgaattaacaaatttagttattcagatgttacaagaaactatcgatatattttcaaagctcaacaaagcttttgatgaaatcgataaagcaaatgctgattatacagaagctgttcaaagaaaagttaactatttgtcaagttcagataagtctattaaaggtaaacttgatgcaatcattttagcaatagctaaagatttgacttcagtcgaagattacgatcaatcagagatgcttaataaggctagtgaaacaattaacttttatagacaaggtgttattgatggcgattcattaacaatgccatttaagagatctgaaaaagaagaaggcgaattattgccgattgaagatccacttatggatgacaacacattgctaaacgatttccttgatagtgaagttaatcaattcggcgttgaagctgtcgaagactttatgatcaaagcttttggtaaaaagaaagaaattgatatatctgaaatcgagttgaatgagatggatgatgtaattttgcttattttaggaattgttagagctgagtttggcgattcgttcttcagtatagataaatattctgatgagtctataagagtaggacgtttcttagttccaaagtatcgctttacaaagaaaggataa

SEQ ID NO: 44016 - DNA, 639 bp, Clostridium sp. CAG:288
atgttccaagaagattatgaaaaattaactagaggtgaacaaagacagtttgaagatgctgttaacgatttgctttatacttgcttcatagttagaaaaagctttgatagagcaactaacgtttcaaaaatttcaccgacatatttatttattgaaagacattacaatttgataaatgactttgttggatttatcggattagacttagttaaagatgatcaaaatggcgttatatatttaaatagtgaagaaggaagaaacagaataagaatagacagtgttactacacttctcgtatatgctctacgttcttattatgaagaaaaagttagcgataatccatcgcttactgaaacatatatggactctacaacattaaaaatgattttaagagataaaggcttaatgaaagttaacaaacgtttatcaactaacgcacttgcttcaggtttaaagactttagcaagttataacattattgctagagctcaacattctttctatgattcttcatatagtttttatattttaccatcgataagatatgttatttcaaatagtaagatgaacgctttatatgatgaggtaacaaaaattgctgaagataatgaaagcgttgcttctgaatttggtatttaa

SEQ ID NO: 44017 - DNA, 3393 bp, Clostridium sp. CAG:288
atgaaaaaacttacaaaattacgtttgattaactggcacttgtttgctaatgaaactacaaatattgatgatattacattcttaactggtgcaaatggtactggtaaatcgactatcatcgatgcaattcaaacagttttacttggcgatactagtggtagaaactttaacaaagcagctaacgatcgtaccggtcgtactttaagaggatatttaagaggtgaaacaggcgaaactgataagggcgaaattatgtgtttacgtccaggtcgttttacatcttatatagctttggaattttacgatgacttagaagaggcttattttactttaggtattgtctttgattcgtttgaagatgaaagcgaagaacatcacttcttctatttgaagcatggattcccagaaaataactttacaaattcaggtttgattgattcagttgtaagaccattaacatataaagaatttttaaactattgccgtcaatctttaaacgacaacgattatatgttctttgattctaatgtcgcttatcaacaattcttaaaagttaaattaggaaatttaccagataaatacttcacgcttttcaagaaagcagttggcttctcaccaatcacaaatatatccaactttattacagagttcgtatgtgatgttgactataaaattgatattgagccaatgaagaaaaacattgaacaatataagattttggaattagaagctaagaagttaaaagttaaacttgattctttacaggctattaaagatgcttacaacgcattccaaaaaggaaagagcgatttgaagcttagcgaatatctttctgatagagctgattatgaaactgttaagtatcaacttagtgaatacaataaaaaattaacatcttatcaaaatagattaagtgaaattgctgctaatttggatgattatcaacaaaatatagaagattttaaagcacaaaaagaatctttgttagctttaaaagttggttctgctggctatgcagctatgtcgacactatctaatcaaaaagagaaggttatgagccgtatttcagctattaacttaacatatggttctttagttacttctttaaaacaatattgtggaagctttggaaaaggtgctgaacaattctttaataaattcaaaaatttagatcttgaatttatggatgatgaaaatagaagagatctcgaagatttcttagaagattcagcagatttatttgcaagcagtagagaaattgaaaatgctattgcaattaataagcttgagccagaaatggttagaaatttccaagctgaaatgaatgaatacaagcaaaaagcattatcgttaaagagaacttttgattctgagttatatgatttacaaaatgaactagataatttgaatagacaaatttatgaaatgaaatctggtcgtaaaccatttaacacaacatatttagaagtaaagaattcattagaagcagctttgaaggaaagacatcctaacgctaaagttgatatttattgtgatttggtagatatcactgataaacgttggacaaaatctattgaagcagctatatttggtcaaaagtttaacttctttgtcgatgaattattctatgaagaagctagtaaactattaagtgaaattgcaagaaaatacaacttctataatgtttctgttatcgatagtgaaaagcttattgaaagaaattttgaaccaaaaccaggctcagttgctgaagttattaaaacttcacacgacggagcaagggcttatacaaactatttattaggtggtattaagcgttgtgaaacatttgctgaagctcgtgaaagtggttcaggtttactaccaaactgtacaggatatagaggctttggttcatggtatttaaaccaaaagaacgctcaagtatctttcattggtacaagagttgatgaaaacaccatgtttaataagcgtgaagagtataacgaaataaataaatattttgaaatttatgcttcacttattaattctttattagaattatcaagcttggatacaatgtctaataacgaatgtaatacatatgtcagtgatcttattgaaagaaatgagattgaagctttggaaaataacgcttcaagactcgatgaacaaatgaaagaaggctcacttggcgaagttaaagaaatcgatgataagatttctagactagacatggatattaaagatcttgaaaaagaaagagaagaaatgtttgttgaacgtggtagcatatcttctgagttagatagattgacaaagatcactattcctgcaactgaaaactctttgaaaattcttgcacaaaagttagcttcatacgatccgacatttgtcaatgaagtctgcgttcctttcttcgaaaacgcaatgaaaaagattccatctcttgataatatcaagcgtgaagctaatagtagctttattaaaatgcaatctcgtcttaaaaacttaaaagataagttgttcaatgttagaagcatttatacagctacatacaagttatcatatgatgtcacacaagaagacaacaatgcagaatttgatagagactatgattctttaagccaagttgaacttccaagttatgagcaaaaaattaacgaagcacaccaaaaagcaattaaagaatttaaagatgacttcatctataaacttagaacgtcaattgaaactgttaaaggtcaaatcgatgaacttaacgttgctttaaaggatgtgagattcggccgcgactcatatagattctcagttcaaccaaatagagattatatagaatattactatatgataactgatgacttgttattaaatgtcggtgatgctgaagatcaattcttagtcaaatacaaagatattatgaacaatctctttaatttgatttctgattctacaagcgataaaaacgctgatgaaagatctcaaattcttgaaaatgttgctaagtttacagactatagaacatatctcgtctttgacttattagttaaacgtggaaatgttgaaacagaatcttcacttgctagaacgttcaaaagacaatcaggtggtgaaacacaaacacctttctatatttcaattttagcttcttttgcacaactatatagagttacacaaaaagataacacttcaagattagttatctttgatgaagctttctctaaaatggatggtacaagaattaaagaagctgtcggtttgttaagatcgtttggacttcaagcaattctttcaactccatcagaaaagttaagagacttagcaaaagatgttgacttagtcttagttgctgtccacgacgttaaaaagaatagatcttatcttgataaatacaaagaaatagaaaaaagataa

SEQ ID NO: 44018 - DNA, 1434 bp, Clostridium sp. CAG:307
atggatatatttgatattatacctgaaaatttcttttcgatattatcatcaaagaataaaagattatatgcttcttgtttaattgaagcatttaaaatatatgaaacgggttcaattttaggaactgataaaaaacttcttgcagatgaattgactaattttttagaaaattccaatcttgcttttgataaggatgaagatttagatgatgaggatgctaatgaggcctcaaactctaaaaaaagtttggcctattatgcccttagaaaaatagaagaagctggttggatttacgtcgacgtaaatgctgattatgaagaaattgtcaattttacagatgctggtattacactatgtgaagctttacttaaagttgctccccaatatgtatataatgatagcgatgattatgttgatgatttaccatatttaaatccaaatgagtataatggttatatttatactatttattcattgttaactaatccgattaatcgtgattatcctttgattttagagcaggtttattcaaatacaagacagcttttaagagcgataagaagactagattcaagaatgaaggactatattcaaacggttgtagatacctctgaaattaaagatttaattggacgactaattgattataaaaatgagcttttagataatggctatgttaaattaaaaaccggagataatattaataaatatcgtcttccaattgtaacaaaacttgaagaatatgaacaaaatgaagctataatgtatacactaatagaggactataagcaaaaatatcgtactctcgacgatccaagccatagagtttatcatgatcttgatgatatgatagatgtatttaatagtcttgattcatttattagtgaaatcgattataaaaataagcgttatatcgattctacaattggaaaaattaagtttttattaacggaagatgataatatcacaggtaagcttaatacaattttaaagtatattaagcttgagggtaaagctaatcatatggacttggctattaatacggttcaacaaatgtttaccctaagacaaactaaaacctatgatcaggaatcgtctttatacgctcctcgtggtagatattcaagaattgataatcaaatgcttgatttatcaacattcgattttgatgaatcaacggaagaatatttaagagaatacggcttaccatatgaggaaaaagaaatacgtgctttctttaataaatatcaaattgatggtgaaatgttagcatctaatgtatgtcatcctaatacggatttagatacagtaatgatgttaatttatactttaatttatgcctgtgagcaatcatgggatgttactaagcttgatgatgaggttaagcattacaagtttacatttacaaattttattattaaggctggtgaataa

SEQ ID NO: 44019 - DNA, 588 bp, Clostridium sp. CAG:307
atgttggattcatatgaaagattaactaatgttcagaaggcaacattcaaagatatagcaaataagcttcttgcgagtactttccttgcaagagataagaaggataataaggacaattattattttgtcgtttcttataaagaagtatttgatgaattttttgcaattttaggttatgaggttaagcttgatcaaggtgttggctcaattatgcttaaaagtgatcaaaatacaggcttccttaaacttcgtcgtgatgaaactattatcttacttattttaagaattttatatcatgaacgtttaaaggaaacatcattaaacgaaaatgttgtaattacagttttagatattcatgaaaaatataatttccttgaaataaagaagagaatcaataaaacggatttagtttcagcgcttcgtttattccgtcgttttaatttaattgaaacaattggtgatattacaatgtcaaatacaaaggtagttataatgccaactattctatatgcaatcaatacagaagaaattacagaggtttataataccgtttcaagaattgttagtgaagcaggtgatgaggaatga

SEQ ID NO: 44020 - DNA, 3261 bp, Clostridium sp. CAG:307
atgaaaaagttaacaaaaattagattaattaattggcattaccttgcaaatgaaacaattaatgttaaaaataatgttttacttacaggacctaatgcctctggtaaatcaaccattttggatgctattacctatgtgataacagctggtgatacacaatttaaccttgcagctaatgaaaaaggtaaacgtgatttaagaggttatattaagtgtaagcttggtcttgaggataaggaatacttaagagatggtaatgttactggtgatatttgtcttgaattttatgatgaaaccgaagataaatatttccttgttggtgttgttatggatgcattcggtgatttaacacctgtaaagagtcttttctatcttgcaagtaacactagaatgaatgatcaatactttgtaagcgatgataatcatatttattcaactgttgaatttagaaagacaaatagctcatttgagtattttctatctaaacgtgatgcgaagcgtggctttagaactgcttttggttctattaatgaagatttctttagaatgattcctaaggctttagcttttaagcctatttctgatgtaaaggaatttatttatcaaaacattctcgaggaaaagcaaattgatatttcaccaattcaggattcaatcagatcatataaaaatcttgaggaaactcttaaggttattaaggccaaaattaatgatctacatgacatgcaagagctttataatcagcttttaagtgtaaatgaggataaaaaatatttaagctatcttttaaaattatttgagcttgaaaattatgattctaaaaagggtgatctagaaacacaaattgccatcatgaatgaaagaagagaatcaaaacttcaagaaataaaccgtcaagatacttatattgagtctcttaatgaaagaagtaaggaattatataaggtactttctaataatgatgattttaaagctgaagaatatgttgataagcagattaatcaggttaagaatgaacttcgtgaatatgatggtgttgaagaaaactatttaaagcgtgcatcagtaattaaggatacaattaatcgcattcgtcatgaaaatgattctccattatttaaagagtttgcaaacgttcctctttctaatattgaccctttaatgattcaaaacactaaacaggaattaattaaatatgataaagaattccaagatgttattaatgaaaatctgatatctactggtaagcttcaaagtgctaaggatgaaaaagttaaagagatgaatgaggtaagaaatgcaattgcatctcttggccaaaatcgtttaaattattcaccggatgttttaggtataagacaagatattgttgaaggcttaaagcgtaagtttaataaggatatatctgttcatatttttgctgagcttattgaaattaaggataaagaatgggcaagaacaattgaagcatatttaggtaatcgtcgttttgaccttattgttgagccaacgtattatgatgacgctcttgagatatttgctagaaacaaagggaagtatcgttcttatggactaggacttgtaaatacgcaggaaatgcaacgattcaaggattattctaaaaactctcttgctgaaattatggattcaattaatcaagacgcaagatattatattaattttacctgtggtaatgttataagatgtgatcacgaatatgatcttaagaaatatcaaacatctattactaatgatggtttaatttatcgtggcttcgttgtaagaaacatgaatttaaatgtggatcgttttattggtaagagtgctcttggtgaacaaacagagtattggaattcaaagggtaatgtcttaaagacggaatattatgaaataaataataaacttaatgttttacgtgaacaaaatgaagcattaagatcatttgatttgaaatctttaatctcatctcttgataaggttctaagatttaatgaattatcaagacagctttcagaattaaatgtgaaaaaggcctctattaaaaagctttctgtgtctgaaattgaagaagaatatcaaaagactaatcaattaatcaagcaatctgatgctaaaaagatgcttgctgtatcagaaattggttcaattaaatctacaattgaaacttttgaacgtcaaataaaggatttagatactaataaggttctaattcaaaaagaattaggtgagcttatggctgacaatcttgagcttgaggtaaaggccaaggatgaatataaggatcttgtagcgcaaatggctgttcctcgtgcaattgatgatgttaacagtcgtatgagtaaatgtgatcaaaattatgataatttagctgatggattaactaataagcaaatgaagtatattaatacatatgcatctaatttggctcttggtacatcagaaatgcctcactatctagatgaattaaataagcttgaaaaatctacattagtagagcaagaggagcaagttcgtaaagctcgtgagacagctgaaattatttttaaggaagactttatttctaagcttcgtaataatataatgacagctgaggcggaaatttctaagattaatgatactcttaagtcaattaagtttggtcgtgattcttatgaatttattttccctaaatcaagtcaatatgcagcgttctatgatatgtttaaggctgattctataagtgatggccgttcaatttttaactatgattttgaacagcagtataatgaacagcttgatatgttatttacatctcttgcaagtgacgaattaaactcaaatggtgcaattagtaaatttactgattatcgtacatatatggattatgatattaagattatcaatgaatttggtgaatcaatgctttactcaaaggtatttaaagaaaaatccggaggtgaaactcaggttccattctatgtagctatcattgcttcatttgtccgtatttattcgcaaaataaaaccgcaaatcgtgattcaattggtttggttatttttgatgaggtttttgataagatggatgctaatcgtatgaaatctatgatggactttatttcaacgatgccacttcaggttattattgcatgtccgcctcagcgtacggctattttacaaaattatgctgatacaactctagttatgatgagaaagaataatcatgcgtctgttattccttttgaaactaatgatggctatgatgtgggaagggaggctaattaa

SEQ ID NO: 44021 - DNA, 1509 bp, Alteromonas mediterranea MED64
gtggtggcaagaattcgatggcaaggaaaaagctatgaggaaggtgcattgaggttccatgggttgcaagcaaaatatcggcgcttatttgctgagcatgccgcatggaaactattaagagctgacaacgcgccttatatattggctttcattgctgatttattctctgaggagagtgaaattccctacggtcgcgcgagagtcatgctggatgctgagatagttcgcagccgtgagttgggtatttggtccacagaaacgtccgctgcgacttatcttaatcagtggattaaaaacggctggctacgagaaatggatgattctttaaccaagactgatgcaagtgagactgcgtttaggttctgtaagggtttggatgagagaaattctggcactacagcttcacatctgcgcattgtacaggaagcggttcgcgatttggctgttgctataagccctaatgtagatgaacgagtcgctttactggaaagcaagaaagctgagattcagaacgaaatagatgcactccaagccggagttgtgcctgagcttagcggggtagaacagaaagagcgtatccgagaaatttatcaacttgcttcagtattaacaggtgattttcgtcgagtagaggacgaaatcagggtgttagacaaagagctgagggtgaagataatcgagggagatgcttctcgaggcgatattcttttatccgttatggagaaagaagcattgctttctaccactgagtccggaagcgcatttgaggggttctttcaattgctctgcgaccaaaacagatcaatggagtttagagagcaacttcgcagcattttgaataggcctgttgcaaagcagctatctggtagtcagcaacaattcttgaatcaactgatgcgagagttaagccgcgaaagtgagcgagtgtttcgtatcaggagacgcacagaagaaggtcttcgttcttatatcgagagtggcgctgcggcagaaaaccaagctgtagatcgcttgttatcaaaactcgaaaggcaggccgttgttctgcgtgatgagggtgtggacttaaaaaccgaaaccggtcttagcttacctgtcggccccattgaaattaagtcacctgaatctatgcgcctaagaaaccctgacgataagttagatacatctggcgtggaagaaaaagcaaacagtcgtgaaccaagctctcatgttctcgattgcttggatgcagttcaggtcagggagattgcacataaaacattcgattcgctcaaagagcatggcccgatgtcgatagccgggctggctgctaagaatccattacagtctggtttggaagaactggtcgcctatctacgagtggccaaagcagtaggggcaacagccttggagcaaaaagaaactgtggaattgatggacaagcaaggggttatgttgaaagcatcaatacctacttacctgttgaccctcgatttattccccgaagatattgatgaactggcgttataa

SEQ ID NO: 44022 - DNA, 933 bp, Alteromonas mediterranea MED64
atgaccaataattcttctccgaacagcttcttctctcttgttatggataaagaggacgataatgagagcgaatctaaaccaggtgctaaagaagggattgccgataatatgttggtcaaagaggaggcccagaatagtcaggtttccacaaatgttgcggggctggttgaatctcagttatcggaaaatgaagcattggcgacttccgtaattcatagcgactctgctgttcaatctgaaacaatgcctcacgatgcaaggcgggtcctagtttacttaatgcgacaaggctcagtaatggcttcgcaaaagtccaaactctttgagttactttgtcgacatgaatctgcaatacgaaagcacttgtcggaagtttatttgcggttagttctcgatcaaaaaacgggggtagcgtttgtcgcaggtgccgattatcagaatgatgtcagtgacattaacgtcgagcccggttctgaaggaaatagtgagaatcaagatgatcctgaattagatgaatctacaacattaataccaaagagaacactatcgctttacgacactctgatattgctggttcttagaaaacattatcaagacagagagtcagccggagagcaaaagatcacgatagacattgaacgtcttgaatcctatctcacccctttcctccctattactgatcatgcatctaaagatcgcaaaaagctcttagctagagtgaaagagatggttaaaaggaaagtgttgtcaacgattcgcggtgtcgaagagcgatacgaaataactccgattattcgatatgtggtcagtgccagctttttagaatccatgttggctgagtacgcactattagctcagcaaatagaggatgctgcggttcaagaaagtcctcttaataacaatgggggagaggttggtgaaaacaatgaatga

SEQ ID NO: 44023 - DNA, 3384 bp, Alteromonas mediterranea MED64
atgaatgacgttgcaacaacaccagctgacttgtttgctcaaggtcaaataaggttagcagagctgtcggttttcaactggggctcttttcatggcttacatacagcttctatcgattccgatggtaccttggttacaggtgataacggtgctggaaagtcgacatttattgatgggctaatggctttgcttttaccagcaggaaaagcaacttttaacgttgctgcggcgcagggcgatcgctctgatagatcactcttatcctatatgcgcggcagctttgggtctgctcatgatggatcttctactcgagtcaaaagtaagcgtgagaaaggtgttgtgacgggactccgagcgctttaccaatgtgaagatggttcgagtattacactggcggcacttttttggacagcagcctcaactaatacacttagcgatgttaagagggtttatcttgttgcaaaaaggaacatgcaactaaaagagttgttagacgcttttggtgacggcaatactaagcagttgaagcagtggctgcgtgaagatcctgccattaccgactgtgatagcaactttactgattaccaggagctttatcgcaagcttctatatatggacaacaaaaatgcgcctgctttgttatcgcgagcgctgggcctcaagaagatagatgatcttacaaaacttattcgtgaattagtcttagaacccagtggtgtaaaagaggatgcaaaacaggttgtcgaagagttctctgatctcgttgccatccatgagcaactaattgatgctaaagaacaaaaaactcacttgagtaaattacctgaacttgcagaatccattgccgaatccaagcttgctctagaaaagcttcatctgcaaaaagaacatctgggcgtctattttggtgaggcactttcaatactttggactaacaagctgaatgatttaaacgaagaattggaatcccttagaagatctattgctcgcgccgaaacagaagagaatgatgcgcaggattcggtagagaaaaggcatgaggagtacctcaacctaggtggcgataagatcgaatcccttgagaaagacattgagcatgctaaagataagcttaattctgtcatacaagcatcttcaaattatcaaaatgactgtcgcagtttagagttggatgcagagctgaacgaagagatatttatctctaataagcgagaggcgacattaaagttagaaaaaatcgaagatgatacaaagcaaagccaagattattttggtgaaattgcagcacagttgagcgagcgacagaaaagcttaaacgaaattaaggacgagatacgggagatagaagctcgcccggactcaaacatcgatgtccgctatcagcagcttcgtgatgaactgatcgagtcgcttaatttatctggtgatgaactggtttttattggtgaattacttgatgttaaagacgatgagaaagcttggcagggagctgttgaacgtgcgctaggtggcctcagaacgactttgttagtacctcaaaaggattattcaatggtgactcgctggctaaatgtacggcataccggcttgcatgtgcgtgcacaggttgtagcgaacaggtcttcaaactttactgagtttaatgagcgtggctaccttcgcaaattggtatggaaagaacatccatatcgtgattggctcaaagctcacttgaataagtttgatttgcaatgcgtgtctggtaccgatgagcttgatgcgaccccattctcaatgacaaaggaaggtctcgtgcatctggatcgaggccgctttgaaaagaaagatcagcggaagatagatgatcgcagaagttggagtcttggcttttcgaataagtcgcgcctagtgcttttaaatagcgataagaaagaagcggaaattcgcttggcagagttggctgcaaccttatccgaggcacgagaagcgctcaacaacaatgctgagacagctaagctttgggaaagaattgatggctattcctgggagcaggtagacgcaccttattggcagaagcgcttagagacggtgaaagccgacttggaaagacttgaacaatcaggcggaaaccttgagttggctaaatctcgctgggatgcagctaagaaactgttgctagatattcagaaaaataaagagcaactcaaaaaagatgaaggtgcattagaaacgagaaaggatgatgcgcaacgtcaggctgagaaatatcgtttattggcgtccattggtatgagtgatgaagtaagaacactcctgtcggatcgaattggtgtcgtcactttggaaacagctgatcaacaatcggagtttgaaaaaacgctggatagcgaattggaaaaagttcgatcttctaaaaacactgctgaaaactctgcaaatggcattatgggctcctttagaggaaaagataaatggcagccccttacggctgattggcttactggcttagatggactaccagattatttagagcattactcctatattgaaaaagaggggttgcctgaattaatcgatcagttcaaagagcgcttaaataggcacgcaactcaatctttggctcgaattaagaccaagcttgaatctgagagggaagatatattagagcggatcgatacgatcaatcgcgtgttgaagcgtactgagtttaagcaaggcagtcacttaaagcttggctcaaaacgtgaaaagtatccgcatgtccaggagtttgagcgtaaaatccggagtgcgttaagtcaggcgacaagtgatgatcatgaagctcgatttaaccttttggccgaagttgtagaaattcttgagaaagcgagtgcgacggggacctcgagcaatatggagagtttgcggttgttagatccaaggtatcaaatgtctttctttgcggaagagattgattcgcagacgttcaatgtgcgtgatgtgcttgagtctagcagtggaaagtcaggcggtgaaaaagagtcgtttgctggtactatcgttgccgcgagtcttgcctatgtgctgactcctgatgggtatgataagcctatttattgcaccgtatttttggatgaggcattttcaaataccgctgaggcagttagcagaagagtgctacgtgtcttcaaggagcttcatatacatgtcaatttgattacgccttataaaaatctgaatttagcacgagagtcagcgagatcgctgctcattgctgagcgggatcctgagcttcatgaaagccacttatgtgaggttacatgggaggaaatagatcggcgcatggcagagaaaaaacgctctgcgataggagcgtcgctacatgatgaaatcaccgctgaaatcgatctggtcagaacttaa

SEQ ID NO: 44024 - DNA, 1305 bp, Alteromonas mediterranea MED64
atgagcacttcatcaaaagcgacttggggcttattaccagaagatatccttataatgttgaaaaataagcactggcagaactcaagaaatttgaaaagcttgcttagtggtggggattcatttcctttggtagttcctttgaagcctcccaggggaaatgcggcaatccagaatattggccattttcagaacttcatatcgtcttggaagagcttttcccaagattctattaatggggctgaccaagaaagaggcgacccgaaaagcaaagggtgtaaggtgatttgggaaaaacggaatttccgctcgctcgctgagcaagatgttcccacacacttaaatatctcagatatcggctcacttgcctgcatgcttggctcggatgaagagctccagttacaagactggcttacgaagattcgttacatttttgaatcccttccatcgcaattaaacagtcacaaagccagctctcaggaggggagctcttactatggaaatagcgaccagcaattattccaagtattaatcgatcatttggaaacgttgaacagtttcgagcaggacgatttggagctgttggtgaagttgttgccacagttacaaaaaggaatggggcaaggatgttatctcagggcgttacctgtcacttttgtggataccaaattcatcgaaaaaaatttacgaataattgagtctgtcgcgtgtgcgttgcttgatggtggtgttagaaataccggcttgatggcctggcttgattgtaaagaaaagcctaaggattggttattagttaagcctttgtgcgacgaaagcaggtcgaagcttggtggcctaccattgcttcgtctttcatcagacactctacaagattttgaactacctgctagaaatatcttagtaatcgagaacgagcagtgctgtcttgcactgagtaacattcccaacacaatagcggtctctgggggaggcaaaaatgtttcatggatgaaggcaggctggttggttgataagaatgttggttactggggagatattgattctgaaggcttggctattttaagtgatgtcagaagtaggcttagcactattactccattgatgatggatgaggtgacggtcaagacttttgcggagcgtatggtgcaagagtctgactcggtatctagggatccgatagctctaacagataacgagctcgctctttttaaaaggttacgttctgggtatttcgccaacaaaaggttggaacaggaacgcctaccattagaatatgtgactcaacatatccgtgattggattgagtag

SEQ ID NO: 44025 - DNA, 1008 bp, Burkholderia pseudomallei MSHR305
atgcgcgggtgccgcaatgcgctcgaggctgcgttgtccgaacgaggcgacgcacatgacttggtggatgcctacgaatacgccgagaaggttatcgaggacctcgcggacggcatcgattactttcaagaactggtccggcacttgatgcaagccgcgtctgctcatacgcaatggaacgaattcgttgactttctcgacagattccagcgggactactccaagcaacttacagcggataacgcgacgctgaaccgccaagccattcggcaaaagcttgagaaactccgggccgttccggaggcgaagttcaatcgaatggacgcgcagttgcgcgatatcgcgcactggatggcgaaggagtacaccggaagctcgctctatgattggctgctcggtcgtattgaagacatcgtagacgcggcgtgcgagtctaagcagccgggctttctcaaggccatggagacttatctgaagcgtgtgaacggcctcgctttgcagtcgatgatgctacgctcggggcagactcggcatgcctacttagcagccgttcagaaagtggccgagtctcccaagttggaacaggaccgcttgctgaagcttgttggccagttcctcgcaccagcggaggtgcgcgtcctagacccagctagcttcaagctgaagactgcaacgcagcgccgcagagcagtaaccgtgtctattcgaccgcgcccgacaagggaagagcggctcgctgcggcgatggcgcgagcagaggccgaagtgttctcaataccgaacgaggatgtcgcgcaggggctgcgtgcggacctgcgactcttccaacatccaatccgcgtttccgcaatgcctacggcaagtgcccgcgacgtcattcgcgcaatgcaagcggtggaagccgcgcgaagcgccatcggcggggacctcatcgtcaagaagctgccgacccgtttggagaatgagttctacggggccaacgactacgaaatcgacctgaaaaaatga

SEQ ID NO: 44026 - DNA, 672 bp, Burkholderia pseudomallei MSHR305; identical to SEQ ID NO: 42091

SEQ ID NO: 44027 - DNA, 3633 bp, Burkholderia pseudomallei MSHR305; identical to SEQ ID NO: 42299

SEQ ID NO: 44028 - DNA, 1134 bp, Burkholderia pseudomallei MSHR305
atgattggcgcgtctctttggctgaagtccatgccagtgcaagaattgctcaacatgcttgttgaccgattggacgcggccgagcagagaggaagcactaaagcgaaatcagtccagctcgacgagcgcacttggccagcgctctacatgtcgccagtggagtcgcagaaggaacacctttgggagcatgtcgtcgcgatggtgcgatgcggatggctagctgtgaagccagaaaccgcgctcaaaagtcggtccggttacgcatcatcgccgcgtgtgagtgtggtcgaccagcgagaactgcgtgcggcggtcggccggcaggaaagggtgaagtcgtccgctgagcgctggcgcgacgccgtgtcgtctggcttactagcaagcgatacggtaaagcgacttgtctcagagtattgcatcgatatccccggtcgcacgatgacggaggtcgtggagcagttgaaccggcttccggcgctggccgagaaatcgatgctgctgcgcgaggtgtcatcgcagttattctgggggatgtccaaggtcctcgacaagcgccaaggattggttgcggccattctaggtatggacgattgcccattcccagagtctcccatccaattgcacgtgttcttgcctgccggcggccatcgtggagtgctcttcattgagaattcggtgagcttcgaatgcgcaatgcgcgagccccgcggagtgttcggtgagttggctttggtctacgcgtccggctttaaagggagtgcgcagcggctgcgcaccacggaggggtgctcgctgttttacgcggcaggcggcggtctcgaacgggacttgcgtgcaacgtttgaaggttggttgttcggccggcaagagataccgtcgtacttctggggcgacctcgacttcgcgggaatgcgcatactcgcggctatgcgggcgaccttttcggggctgacagcctgggtgccgggttatgcgccgatgctaaccgtgctaaagggtggcggagggcacccccctgaggccgccgacaaacaagggcagaagccaatcgcatcgacagggtgcgagtacgccgatgagcaactagtgccagccctgcagaccttccggcgtttcgtagaccaggaatag

SEQ ID NO: 44029 - DNA, 1404 bp, Salipiger mucosus DSM 16094
atgacaaacacgacgagcagtggcatcgagcatatcttcggcgatctgcacccggacgcgttcaagctgttctcggggccgcagcggcatttctacgcgcgcctgctcgaacacctttccgaggagctcttcgaggacgccggtctctcgccacgcggagaggtgatcgccgccataaaggagttctgccgccagcatgcggacctcgacccggaggccaagacggatctcggggtgcgggcgaacgcgacctatgcccgcctgctggaaaccggatggctgctggaacagagaaccggcttccagcgcttcaccgatatcgatgccacggcccgcctgctgctggatttcctgctcgacgtgaagttcggccggctgcgctcctacggcggggaagtcatcaatgtcctggcgctcgtcgagagcgtcgagcgagatccccaggccaggtcggaagccctgcgcggagcggccaaggcatcgcgcggctttctcaaccacctgcgcgggctcagcgccagcatgcgcaaggccgaagagctgatcgccacccgggcctccttcgccgacctcttcgagagcttcttcaccgattacgtccagcgtcacctgatttcggactacaagctcctgcacacccgtgcgaaccccttccggttccgggtgcgcatcctcagtctgagccggcggatgctggaggacgatttcaggatccgcgagatcgcggaggcgtacgttcgagaagggaaggccgcggacgccgcagcgggacgcaaggccgtcatcgaggatctgcgcaccgtcatccgggtgttcagcggaatcgacgactacctggaggtcatcgaggagacgaaccggcgggtcgaaaccaagatccggaacaccatccggttcctggacacgatgaccgagacgaacaccgaggttctcgaagacgtgctccgcaaggtcggggccactgcggacgatgtcaccatgccctcggacgaggcgtccggcacccggctcccggaaggcagcgcgcatctcttcgcggcaagtgcgaagcggccggagatcaagccgaccccgatccaacggccccggaaatccgacgcccagcgcgcgcacgaggccgcgatcctcgcctaccaagagcgcagccgggtgcagcccgaccgcatcgatgcctacctgcgcgcccacgtcgaggggcagggcgccgttgaaggccgagagcttccgatctcctcgctcgatgacttctttgttttcgagcgcctgagatctctcgactacctcggagggcgtctgtccgacgactgggagatttccgattgtcccggcacggtcgagaacgactggatcgtctgccgcaatttcctcatccgcccgcgcggccagcagcaaaaggtgcactga

SEQ ID NO: 44030 - DNA, 648 bp, Salipiger mucosus DSM 16094
atggagcttcgagagttcgcgcaggtgctcgacaagtcggacgaccccgaggcgctgggcgaggcgatccgcattgcgatccaggcgctcttcttccaccaggtgatctacgatgacacccactcggtgccatcggccgccgtccaggccatcaaggagcaccgcggctttttcgagaagtacttcgccgtggccggctacgacctcgagatggacgcgcgaacccagatgatcgcgctcaaaccgcaggagcgggacaagccgccctacgcatggcgtctcatgcggctgaaaaaggacgagaccctgatccggatcgctcttcggtacctgttcgaacaaggcttcgtggacggcaagatggatggcaccgggcgggtggagaccgacacggtcgagatctcggagacctaccagcggatcgcgaagtcagcgccgccgggggaaaaccacctcgtcgacacgctgctgcgtgatctcacacgaaagggtgtcctgaggatcggcgacaaagaccgcgagacgcgcgtgacccgcatgacgatcctgccgggcatccgcgtgcttgtttccgacggctacatcgagcgcctgcgcgactggctcgagagtgagcaggccacgccgttcctggaaaaggcgagctga

SEQ ID NO: 44031 - DNA, 3420 bp, Salipiger mucosus DSM 16094
atgtacgagctgaaacggatttcgctgcacaactggtacctggtcgacgtgctcgacattccgatccgggatcatgccgccctgatcggtcagaccggcgccggcaagagctcggtgctcgatgccatccagaccgtcatctccggcaacaaccgaaacgtcctcgaactgaacgccgccgccggcgcccagcgcgggcgcagcgtccgggattacgcgctgggctgcgtgagtgatgtgaacgagggcaagcctcgccgcgaacgctgtgaaacaaccctggcgctgacgttccacgaccgcgatctcgaccggcacatggtcctcggcctcctcctgaaagcggaacaggacctgtccgagcagaccaagcgtttcatcatcgaggggtgcgatttcaggatcgaggacttcgtcgagggcggcgcggtggtctctcatgagaagatgctcgctcgcatccgggcagaacacggcgagaaggcgatctcgttccaccagaacagcacgcgcttcgtgaacgcctacctcgagaagatgcgcccctcggcaccgccggatgccaagcggtttctccgcagcttcgcgaacgcgctccaggcccgggagatgtcggacccgacggatttcgtgcgccgcttcgtactcgagccgctgccgctcgatgttgccggcgttcgctcatcgatctccatttggcgggaaatgtccgccgaggtcgagcggatcgagggcatggcatccgacctgaccacagtggtccggaaattcgaaaatggcttccagatcagtgcaatggaggctgaaattgatgtggcgtctcatgcggtcgaccaggccgaacaggagatcgaactgggccggatgcgagatgaggtgacccagctcaccgccgagctcgcgtcggtcaccgcccggcaatccgatctcgaaagcgaaaccggagacctccagggggaacgggatggcctccgtcagaaactctctgaaaatgatgcctcctcggaactcgcccacctggattcagagcgccggctcctggaggaacgcaaatccgtttttcggcagaaggtcgaacttggcctgcagcccttcgccgacctgcggcacctgaagtcggcggctggcatcgcccccgtcgcccagcgcgtggcggaagccggcgccgaggtgtcccggatcgtttccggaaaatccgccgaagagtgggtgtccgtcgccccggagatctcaggacatctgaacaaaatcaaggaatcgtccggctgccttgatgcgatacatgaagagttggaagacgcccgagagcgggtcatgcgactgcgtgcggacatccgcgagcatggcgacgacgggcgtgtcgagccgggcgccgttctcagccggcaggtccgggccttcctggccgatctgaaggacgccggcatcgaggcccggtgcctgccggatctcgtgaccgtgtccgatcagtcctgggccttcgcgctcgaggcaatcctgggccccaaccgcgaggccgtcatcgtcgacgaggcgcggctggatgccgccttcgatcttctctaccgcaatcggaacacctacgacggtgtgcgcctgatcgatcagcgccggctcacgcggatgcagccgcgggtgaccgaggggtccatcgtggagatcgtctcctccggcgatcccgtcattcagaacttcctggaattcaacgtgggccgctacgcgcgggcggaaaccgaagaagagctccggtcactttccagtggcatcatgcgcaacggcaagaccgggtcgggagctacgctgcgggtgttcagggaccgccggcctatcctgggaaagaccgcgcagaaagccacgcagggcgagcttgcgctcgaggtcgaagaaaaacgcgagcagctcgaggacacgcaggccaccgttcgggacctcgagggcgcccaacaacgcctgcgggcggtcctgatggtcgatccggaagagatcctgaattccatggacagcttgcggagcgtactcgtcgagctgaggtctctggcccagcgccgcagcgcaatatcggcaccggacacagcggatctcgacgagaggcttcgcaagatcgatgaccgcctgaatgtcctgaaatccgaaacccaggagctggagaagcggcgccgcaccctcgacgtgcagtgcgggatcctgaattcgaagatcgaggagagccaggacaggcttctcgagttcgggcgccggaaatccgaggtcgaggccgaagccgcttctcgtgtccctgaaaatgtctccgcgctgatcgagacatccgggtacgacgtgccggtcacgacagaggagctcgcggagatcctgaaaatgccggccgccgaggcttccgggaaagtcgccgtgttccgggagcgtatcgccgacctgcgcgcggaaatcacgagggacggctccgcgaacgctttcctggtgcgtggcaacaacggcctgatggcctacgcgcagaagtggatggtcgaggacgcgccgctcggggaagactctgaaaacgccgaccggtttgtctgggcgcatgcgcagctggaccggcttcagaaccacgagctgctgcagtaccgcgagcgcctggagcgagcccgcgccgagatggaaaccagcctcaccgagggcctgatcgggcgcatcggcgagcagttcgctctgatggaggagcagctcgacagcctgaaccgcaggctcgcaaagtatgccttcgtcggacagacctaccagttccgcagcgctgtctccgcgcagttcctgccgatctaccggttggtgaccgccgagataccggctgaccaatccgtgctcgacgtggctgacgacgagagcttgcaggccctagatgcgctcctcgaaggggagggcgacgacgtccgcaaatacgaggactaccggaactacttcaacttcgagctcttcatcgaacatcccgatcccgaggattcaacgaggatcgtcagcacgcccttctcgtcggtcatgggcaagctctccggcggccagcgccaggcgccgtactacgtggccatcgcggcctcgctggtcagcgcctactatcccaaggcaagcgccggcgacttcgagggcatgggactcatggtcttcgacgaggccttcaacaagctcgacatcccgaatacccagcgcctgatggatcttttccgttcactgggcctgcaggtgatcgtggccgcgccggaggagaagcgctcctcgctcatcgaatgcgtcgacagcgtgatttcggtgagccgcattcccggatcggcggacgtgttcatcgacagcgtggccatcggcgcccgggccaaggagcgcatgttcgcggaaaacccggtgcaccagccgacggaagcctacgaggggaccctgccggccggtgaatag

SEQ ID NO: 44032 - DNA, 1452 bp, Phaeospirillum fulvum MGU-K5
gtgtctctgttcggccatctcgacgatacggcctttttgattttcagtcgtggcaaccggcatctctatgccgaggcggtgctgatcgtctatcgccagtttttcagcggcacccggatcgtggtgccgctgcgcgacgatgtggttgaaacgctggcgcggctggtgcggcaacggcccgaactgtggcaggatgccgaggaaatcgaggagcttccaagcggacgcgggcgcaagccgctgccgcttcccgccgacgagatcggccgcaaggcccagcacgtctatggccgcctgctccgctgcggctggatcgaagaggaaccacacggcttcaacgcggtggtcgagatgccctcggcggcgatggcgctggccgaccagttcgacgcgatcgaacgcgggctgccccaattgtttggtggcgtcgtcgtcgatgtcaaatccagcatcgaggcgatcgcgctgaacccctcggccaacgcgctgggcctgcccgaagccgccgccaacgccgtccgcttcacccgccgtctgcgagcgatcctgtcctcgctgcgcgcggtgcagcggacgatcatggccagcccggacatcaagacccggctggacacctttttcgaggatttcatcggccggattctgatcgccgattacaaggcgaccttttcctatgcccaacacccgctgcgctttcgcgccgacgtggcgcggatggcccgcgcccatgctgccaattccgccctggtcgaggatatcgcccaggcctatgtcaagaacggggtcagccccgacgtggcgacggcgcggcgcgaggtgttcacccagctcgacaccatcgccgaaatcttcgaggggatgaccagcttcgtcagccggatcgaagaattccgcgtccggctggaacgacggctgcgcaacaccatccgctatatggaccgcagcgacgatagcatcaccgcccggctggcggggacgatgcgccgcctcgaccggctgcggacccgggccgaggggcacgacctggacctcgaggcaccgacgcttctgaccagccgcccccgcttgttctcgcccgacgggctggccgagccgcgcaccgccaaggccccgatcaagccccgcccggtccagcgcgccgaggccgatccggtcgaggatttccgcgatctgctggtcgaggcgttcgaaggaatgctggagccagacgaggcgaccctggccgccttcctcgaccgcaccgtcgctcccggccagccgaccgaggggcgttggctgacgccctccgatctggccgggttcgccgcgttcgacaccttggtcgagcggctggacgagccgggtgctggcgagatcgacggccgctaccgcctggaaccggccgaggggcggcatgtcagcgcctggaccgacgcccccaacttcaccatcactcctgccaaggaatcgtaa

SEQ ID NO: 44033 - DNA, 729 bp, Phaeospirillum fulvum MGU-K5
atgccggcaattctggcagaactggccgcgttcgaagaaaaggtcgccgccgccaagggccaagccgccgccgagcgcgcggtcgagaccctgcgccgggcgctgaacgtcctgctcgatcgccagttcatctataacggcgaccgcggcatggcgcctttgtacgaatcgctgctgcgggccgatgtccgccagatcgtcgaaggggtgctggacgcctttggctatgcgctggtggtcgagaccactgaccagtggatcggcgttgtccccaacgaaggcggcgagttacacggtgcccggctgcggatcgacgagacgatcatcttgttgctgctggggctgatctggcaggaagggatgaataccggcctgtccgaagaccgcgccaccgtgccgaccacctccgaggaattgttcgcccgccacgccgcgatcctgggccgcgagcggattccccgcgcccggttccaggatatcctgctcgatctgcgccgccgcgctttggtcgaaatcggcgaggaagaccccgaaacccgcgacgtgatcttgcggattcgctcgacgatccggctggtctcgggcgaggcccaggtgcagatgatcgaacgcttcgcccaggaaagcgaccgcaccttagacgggctggaccgcgcccaaagcgcccgcgaggccgggttggccgacgatgacagcaccgggaccgacgacgaagacggggaagcctga

SEQ ID NO: 44034 - DNA, 3459 bp, Phaeospirillum fulvum MGU-K5
atgtacgaattggtgaacgtcgccctgatcgactggttcctgctggggcgccaggacattccgatgcgcggcgcgatcggcgtctatggcgagaaccgttcgggcaaatcgaccctgctcgacgcgatccagactgcgatgctgtccaacgacaagaacgccctgcaactgaacgccgccgccaatcccgagaagaagcgcaagaaccggcgcagcgtccatggctattgcctgggccgggtcggcggcgcgggggaagcgccgttgcgcgagaccgcccgctcgcatatcgcgctggccttccgcgatccggtcgatggacgcgcggtttcgaccgggctgattttcgaggcgcgccagtcggaaacccgcgaggacaccaccgcccgctggctggtcaccggcctgacggtcgatagttccgatctggtcatctcgggcccggacggcgacgtcgcccgcacctggcccgaactggaagcccatctcgaagcgcgctgcacagccgaggggggcgcgttgcgggtctatatgagccccagcgagcatatcggcgacatgctgcatttctgctcgcagtccgggcagcatggcggcatcgaccagttccgccgcgcctttgccaacgccgtcagcttcgagacgatcgacgacgaaagccagttcgtccgcacctatgtgctggaccgcgatccgatctcgatccggggcttgcgcgaatcgatgcgcaattaccgcgaaatcgccgacacgatccgccgcctgctgcaacaggtcaaagatctcgacgccattctcgacgccgccagcacccacgccaccctggtcgaggagaagttcaaccgcgcctggatgctgcgccgcgcccgggttctgattgcgctgcgcgaggtccgtaagcaccgcaaggcgctgcgccgggcccagtccgacgtcgcccgcttaaagcggatcatcgaggatggcgagcgccagacccttgaattgcgcgaggagaagcaggggctggaacgctcggtgcggaccagcgaggtcgcgggcgaactggcccggatcgaactggccctggaacaggccaagcgcgaaatggccgaacgtctggttccggtccagcaatgggaattggcggtgacccgcgccgcgacgatccccgggcaaagcggagccgcgctcgacatgctgcgcgagcgctcgcccgccttgctgaccgcgctggcgacgctgcaacggctgaccggcgccgacaccgtgccggtctggcccgccgatcccaaggcgatggtccacgtcatcgatcaattgcccgatctcgattccttgtgccggatgctgcgcgatctcgccgacgaaagcctgcgcgggctgggcaaccaggaagtcgaggatttgcgtcgtcgcctcgaggcgatcgacaagaccggggcggcgatctcgctggagaccggggcgttcctgcttgatctcgaagccgagggcttcgcccccaagctggtctgctccgaaatcgaactgctcgatcccgactggcgcgacgccgccgaggcgatcctgggccgcgaccgcgaggcggtggtgctgccgcccgatcaggcccgccgcgccatcttgatgttgcggcagaaccgccacagcggacgctatcgcggctgccgcgtcgtcaacaccacccggctcgaaagcgggcgggcgcaaaagggcactctggccgcgatcctgcgggccaaagacccgctggtcggcgcctttatcctccaccgggtcggcaacgtccgtctggtcgagaccgaagccgagttgcaagagggcggccgcgccgtcaccaaggattgcgcctattgcgacggtctggtcaccgaaatccgccagccgggcgagcgcaagatcggggtcgatgccagcggggcgttgcggcgcgagctggaaagccgcctgcgtcaggcgcaggacgcccagaccgagacccggaccctggttcagggcttgcgcggactggccgagcgactgacgccgctggcggcggcgcgggcgcagccggtcgggctgatcgatgcggtgctcgattatcgcgacaagcagcgccagatcgacggattgcggggacaggtcacccggctgcgcgattacgtcaaccccgagatcagcagccggatcgaggcgatcgaccgtgaccttctgacgctggagttggagcggtcgggcgatcctgacggtcttgattccgactcgcgcaagggggcgaagcggctgctggaagaggcgttgcgggccgaaggaaccgcgatgaccggctgcaattctggtctgcccgaactggtcgtggcgctgaattcctatcgcgaggaacgcagccgggttctgttcgccccggcgatggaattgtggcgggcggaacgagcccggtcgcgcggtgcgctgcccccaatcgcccgggcctgcgacgaacgtctggccgtgctggccgaaaagattccaagcgccaacaaggcggtgttcggcctgatcttcgatttccgccgcaccagccagcgcgacctgggcttcacgatggagtcctcgatcagcgaggagatcgtgccgtgggcgacgcgactgcgcagcgacatcgccgacaaggatctggcccagcaccgccgccgcgccgacgaggcggtcgacgaggcgcaaaagctgttgaagggcaatttcgtcaacatgctgcgcgaccgcttcgagcgggtgaccaacgccatcgcgctgctgaacaacgtgctgcggcaacacgccttccataacgaacgctatcgcttcgatgtcgaaccggatgccgattttgccgggctgatcgaccttgtcgcggcggcgacccaggacgagatgattctgttgccgctgttcggcggggccgggatcgaggcttcgctccacgccgaaagcctgaagatgatcgaggcgatcctgatggaggacgatctcgactattcccgctatgaggattaccgcaactacttccgcttcaatctggtgatgaccgacatcgagaccggcaaggccaccacctttgcccaccggctgggcgtcggatcgggagccgagaagcaggtgccgttctatgtcgcgatcggggccgcgctggccagcgcctatcacaacggcatctatgccgcgtcaaagccgggcggactggggctggcgctgttcgacgaggctttcatgaagatggaccccaagaaccagcgcgaagtgctgcatttctatcgcgagatcgggcttcagccggtgctggccggaccaaagggcggcaagctgttcatgcagaaatacatggacaccctggtcaaggtcgcgcggcccagctatcggcggatgacgatcaccgtcacccatcccggcacggcgctgaaagaggcgttgatgagcgaagaccccagcgaatggtcacgcgagcggctggaacggctgtacgcatcgttacggccgtga

SEQ ID NO: 44035 - DNA, 1116 bp, Phaeospirillum fulvum MGU-K5
atggccaaggtcgaagtcaccagcgccgatcaggcgttcgaccacttcctgtccgcgcacgaacgtaagccggatcggatcaggaacctccacgtctatcccgattaccacgggatggggtcggaccttgcgtgccacaggttcaaccagcggatggaagaggccgagacggccaatgggggggtcgaactgacgtggaagccgatcccggcgaaacgctatatcgagcgggtgacgttgcggaatgcagacgccctctacgcccttttagggcgtcagcagccggacccgtcggcgctgtcgcctgcggttctgaccgtcctcgccgaggccgcgcccagcagcgacgaggaacgcgccgggtggatcgcgattgcgcgggcggtcgaggccgactggccgacagaggcgcttcccgccctggtcgccgaattgacccgaattcgcgccgaaccacccgaccggcccgcctttctcgtttccgccgccgggccgttggcgtcgtcgaagttgctggaccggctgccccaggccgccttgcgccggatcggtatccgtcctgaggcctaccccgccccgccggtggtgttgctgacggcgggcgcagcgcggcccgaggcggtgattctggtcgagaacccgcgcgcgttcgaacgcgccttttccatcacccgcgatctgccggttgcatggatttcgacgcacgggctggtcgccacctcggttgcccgtgctcttgacggggcgtggctgggagccccggtcgatggaacgcccccgccgctcgacgccctgctggcgacgccaaacctgttctattggggcgacctggatcaggccgggctgatgatctttgccacggcgcggcggcgtttgccccggatcgcgctgagcgccctctaccgcccgatggtggacctgctggcgaaaggtggaggccatccctataccgaggcaaccgacaaggctggtcagcgatcctggcactcggacgaccctctgcttcagtcgctgcttgaggcttgcgcgatttcctgcgttgatcaggaatgggtcgcgcccgcattgatccgcgatctctgcgccctgccctatcatccggccgggccggtctga

SEQ ID NO: 44036 - DNA, 1497 bp, Corynebacterium maris DSM 45190
gtgtccgaagtgcaagccctcgccgacgtccacgcgctgttgcggctgtcggaacagtcgccggcctgggcgattctgcgcgcgcagaacgcgccggtgattttgtcggtgctgggcaacgtgtttcctgtcggcaaccagcagctcgccggcaccgaggtgatgttggcggcggatccggtgctcgccgacattcgggagcagaccggtctggatctgccccgctcgacgcccgcgtacgtcaacgagtgggtcaaggcgggtttcctggtacgccgcagcccgcagggcacccgcgaggagttctacgaactgtcgccggacacgttgggtgcgctggagtacgtccggcagttggccagtccgcagcgttcggtgacccgctcccggctgtccacgctgaccggccgcttgagcaacctcgcggtggagaccgacccggacgaggccacggtgctgaaacggctggaggaggagaaggcccggctgcaggcccgcatcgaccgggtgcgcgagcagggcgcggaggcgatcaccgacgacgaggccgtcgaaaagacccgggaggtgctcgccctggtggcggacttgccgacggacttcgcccgggtgcgcgacgacgtggagcagctcgaccgcggcctgcgcgcctcgatcctggaggaacagatctcggcgggggaggtgctggacaacgtcttccgcggcgtggacttgatctccgattctgaggcgggcaaggcgttcaacggtttctacgagctgctcttcgaccgggagcagtccgcccagctggacgccacgctggcggcggtcctgtcccgggggttcattgaccggctcagcgccgacgagcgcacccagctgcgtgggctggtgcagacgctggagtcctcctccgacgacgtccacgattcgatgacggggctgtcgcgttccttgcatcgtttcgtgcagtcgcgggaggcggagtcgcagcaggcgctggcctcggcgatcaaccaggcgcagcagctcgccctgaaaaccggtcaggtcatgagcgatcccagccggtcgatcggggtggagctggagctgaccacccggcagccgcgctcgctgtcgacgtggcggttgcacgatccggcggactaccggatcaccgcagacatggacgtccacgaacccaccgagatcgacctggccgccatgcgggagcgcatccgagaatcggagatcgactgggcggagctgcacgaatccatcaactacgcactgacccggcaggcggaaccgtcgataagcgaggtgttgggccaccgccccgccacgcaggggctggcctcggtggtgggcctgatcacgctggcgcaccgtttcggcgagcgctccgagggcaccgagcacctgcactgggtcggcgccgacggccggcagctgcgcgcccgctacgcctgccaccgattccccgaccccgtttccaccccgcggagcatccatgagcgacaccactaa

SEQ ID NO: 44037 - DNA, 600 bp, Corynebacterium maris DSM 45190
atgagcgacaccactaaactttacgacggcgacaccggcaccctgaccggcccgcagcgccgcgcgctggcggaactgatcagaggcccgtacgtctccagcctgaccaaaccggagatctttcgcaccgtctccgactcgcgcgccgtactggcccagcagctggacaacctctttctcaccctcgtcgtggacgacgccgccggcgtggcgtacacgcgcatgtgggacgccgacgtggaggacaggcgggcgctgctgcggacgatgagcctgtcgttcatggacacggtggtgctgctgcatctgcgccgcgagctgatgaacaccagccccaacgaacgcgccgtcgtcgacgaagacgaggtcttcgaggccacccgcccgtaccagggcgccgcgggcaccgaccacaccgcgcagcagaagaaattcaccgccagttggaacaagttcaagaacaactcgatcgtggtgaagaccccgaccgagggccgcttcgagatctccccggtgctgcgcatcattttctcggcggaggagatcgccgccgtcaccgccagctacgacacgttgctggcagaagcggaggaacagtga

SEQ ID NO: 44038 - DNA, 3384 bp, Corynebacterium maris DSM 45190
gtgaacgaccacaccacgcacgactacgcgggacagttccggctggcggagatccaggtgcacaactggggcaccttcgacggcctgcaccgcgtgcccgtcgcccgcgacggcttcctcatcaccgggccctctggctccggcaagtcgacgctgatcgacgccgtctccacgatcctggtgccacccgcccaggtgcgcttcaacgccgccgccggcgcgagcggcggtcagcgctccgggcgcaacctggtgacctactgccgtggcgcctggcgacgcgaacacgcggccgaagtcgacgagctcacccagtccttcctacgcaccgggccggtgtggtccggcgtgctgctgcgttacgacgacggcgccggccagtccgtcaccgcgctccgcctgatgtacctctccgccgacgcccacagccccgccgacgtcaccaacctcttcgtgctgctgcccaggactgcggacctcaccgagttcgaggaactcgcccgcggcgggctcaacatcaccaccgccaaaaagcagcttcccgacgccttgtccgtgcagcgcacgcacccgccgttcgtcacgacgctgcgccgacacctcggcatcgtggaccccggcgccctgcagctgctgcaccgcacccagtcggcgaaaaccctcggcgacctgaactacctcatgcgtcacttcatgctgccggaacccgacaccttcaagatcgcggcgacggccgtcgaaaacttcacgcagctgcaatccgcccaccagtcggtcatcgccgcccgcgagcaggtcgagcagctgcggccggtgcgggacgcggaccgggaattgacggagatcacgcggcaacagacggagacggaggccgattccgccggggtcgaacagtatgtactcgacaaacgcgtcgccttcgccgaggccgagcgcgacgaggccgacggcgagatcacggcgctgaccgccgcccggcactccgcgcaggcttccctcgagtccgtggaagccgagctggagaccgtgcgcgcgcagatccacggagtggaaaacgccggggtcatccacgcccgcgccaaagtcgacgacgccgagcacaccgtccggcgcgtgaccgcacaagcccagcgcttcaccgacctctcccgcgagatcgacgccgaaccgccgcagaccgcggaagcgttcgccgacttccgcctccaggtcaccgaccactgtgcggatctcgcggagcagacgacgacgatcggcgaccgccgtcccgagatgtacggccggatggcggaagcgaaccagagactggagcaggaacgccaggaactccaggcgatccgcacctaccggtcgtcgatggaccgacgcctgctcaccgcccgcgaaaagcttgcggagctcacgaacctccgtcaggacgacctgccgttcgtcgccgacctcatccacatgcgcgacggcgaacacccctggcagcctgccgcggagcgcgtcctcggcggcttcgcccgcaccctgctcgtaccggaagagcactacgcgcaggtcgccgccgcgatcgacgccacccacctcggcgcgaaactgcagtacgtgcgcttcaccccggaactcgcgcaggcgcggcccggccgcatcaccgccgagacgttggcctcgaaaatcaccgtgcgcgccgggcgtttccacgactggctgcaaagcgaactctcgcgccgcttcgatcacctctgcgtcgacacgatggatcaatttcacgccgcgcagcgcgccgtgacccggcaaggtcaggtcaaacgcgaccggcaccgacacgaaaaggacgaccgctcattgatcgacgaccgccgccgctgggtgctctccggcgacgtggacgacaagatcgccgaactgcagcgcagcatccggggcctggaggagcagctgaccaggagcacgcaggcgaaagacgagctcgagagcgccgccctggctgtgagcgcgcagttgacggccgcgaagcgactgctggaaaccgaggaattcgcactcatcgacgtagcgtccgcacagcgctccctcgcggagctgcgccgcaccctcgacgaactcaccgatgagaacaccgagttggcggccctgaaagcggcggaacgccagctggtgcccgccgtgcgggcgcagcgggagaagctggatgagatcaatacggagttgggcgggcaccagcgtgggcgtcggcaagcagaagccctcctcgcggagttgggggagcggatggccgacgccgaacccttgtccgaggaggtgcgctccaggttggcggcgcggtttagacggcatacgcgcaagctcagggcggacaacatagacacgtggcagcacacggtcaccgacgagctgggcacggaacgcgcgcggttgacgcagcgcgccagcaagcaggaaaacatcgccctcaacgccatggccgcgttcctccggcggtgggaggagcgcaagggcgacctggtcgccgagcaggcgtggcggcccgacttcatccgcgaactcgagcggctggaagccgacgacctgccgcgtttcgaagaacgcttccgcgacctgttgcgcgagcagacccgcacgcacctcagcaggctgctgaagaacatccggcaggccgcgagcggagtccgctcctcgattgaggcggtcaaccagtcgttggccgacgtcgagttctacccgggcacgtacctgaaaattgaggtgcgcgacgcgcagcccgccgaaacccgccagttcgtggcgaaattgacggaggtggtcgacggcgtgctggcggaggagtcgctggccggcagcgagcaacgcttcctcacgctcaaggaggtcgtgggcatgctgagcgtctccgacgagacgagcgagcgcgtgcaccgcctgcggctggacacccgcgagcacgtgaaattcctcggcgtggagaccgccgccgacggcacccgcggcgccgtctacgactccgcggaaggtctttccggcgggcaggcgcagaaactctcgtcgttttgcctggccgcggcgctgcgctaccagctgaccggcgccggtttgcccgcggcccaggcgcgcgcctccaccgtggacgtcgacgagaaggtgtacccgaagttcagcaccatcatcctcgacgaggccttcgaccgcgccgactccgagttcacccgcgccgcgatggacgccttccgccagttcgggttccacatgatcttggcgacgcccgagaagctcctgcagacggtccaggactacatcggcggcctggtcatggtcgacagccctgaccggcgccattcagtgaccagccaactgaccatcgaggaggcgggcggggaaacggcggactgtggtcggtag

SEQ ID NO: 44039 - DNA, 1461 bp, Mycobacterium abscessus V06705; identical to SEQ ID NO: 41997

SEQ ID NO: 44040 - DNA, 750 bp, Mycobacterium abscessus V06705; identical to SEQ ID NO: 41998

SEQ ID NO: 44041 - DNA, 3348 bp, Mycobacterium abscessus V06705; identical to SEQ ID NO: 41999

SEQ ID NO: 44042 - DNA, 1488 bp, Corynebacterium glutamicum MB001; identical to SEQ ID NO: 41679

SEQ ID NO: 44043 - DNA, 639 bp, Corynebacterium glutamicum MB001; identical to SEQ ID NO: 41680

SEQ ID NO: 44044 - DNA, 3336 bp, Corynebacterium glutamicum MB001; identical to SEQ ID NO: 41681

SEQ ID NO: 44045 - DNA, 1107 bp, Corynebacterium glutamicum MB001; identical to SEQ ID NO: 42475

SEQ ID NO: 44046 - DNA, 1461 bp, Mycobacterium abscessus subsp. bolletii 50594
atgaatgatctgacagtcgaagagctgttcgcgcacaacgatgacgtgcagaaatcccgtgcggttcgcctgttggccgccaagaatctggcgccctacatcacgcttatggaacgccacctggaccgcagcgccaaagtctccgaacctcagctggtggccaagctggaccgggacctgagcgccgtcgggctgggagaacagtccgggctggccctcatcaagagctgggcgagcgacgggtggctgcaccgagcgtcggacggcaccggccccgatgccgagaacgtctgctcgctgaccgaggacgcgcgcagcgcgctggcctttgtgcgccgcctgcgccgtgctgacacggtggccacgggcgggtcgatcgccggtatcgcggcaggcctcaaacgggtggccacccagctggacggcgacccgtcacgcctgcgcgccgacatcgaggcccagatcgcagaactgcagacccagctgcacgccatcgacgacggataccgtccggaaccggatatcgtcgatcttgaggacgagacccgggccatcgcctatcagatggaacaggtgatcaccgacatcgtccgctacggcagcatgcagaacgagatcaccgccggactcatcgacgccgccgaggactccgactccggcttccgcgatcgcgcccgcagaatgttcgcggactatgacgccctcttcgattcccgcgaacgtgcctcttattcggccttcacgcggaccatccaagatccggatcagcgagccgcgctacggagcgatatcgcctgtgtcgcagagggtttgcccgatcttgaccccgggctgcgcgaggtcatgagaaacttcttcaagctcgtgtctcagcagatcgcggaggtctcccgcatcgaacagcgctgcgcacagcgcatccggcgattcttcgccgccggcaccacggagcaggctcgtggccgtgcgcgacagctcaatgacgcgctggcggccgggcacgctctactcaagatgtcgacggcggactctccgatcgacgccgagctaccgatcgggcgttccgccgcagcggcgatcggcgcgctgtctttcaccatcaaggacaccgcgccgccggtgctcgcacaggacgccccgtcggggccgctggatttgagcgggttctcggcgctggccacccaggtggatatggccgcattggccgatacggtcaacagtgctattgccggtggcccagtttccttgcccgacatgatctctcatgtcgaggccccctaccttggtgatgtgatcgtgttgtggtcactggccctcaagcaggacaacactgccgaccgtgaatcggtaaaggtgaagttccggtccctcgacggacaagaccgggtgatggaggtacctcagttgatgttccgtgaaccggtgctggccaccctcgaagaggagggatcgacactgtga

SEQ ID NO: 44047 - DNA, 747 bp, Mycobacterium abscessus subsp. bolletii 50594
gtgacgacacaggcttcaggaaccgccctggggaacatcaatttcgacgacctgccgggtgtcgaacccgatgcctcggcaccgcgaacggccaaggggccgcgattcgacggcgacaccagtgagcttccggacaaggcctgctgggcgctgcagaacctggtggcccggcgttacctgagtaaggacggtcagcccgaactgtgggcgtcgatgatcgagcatcgcaaggtgctggccgcgcgcctgtccgaattggacctgcggctgcgggtgttcgacgatctcgaggttgcctacgccgaaccagctccgttggagaaccccagcgtgtacggcgccagggtgttgcgccgggaaccgttgggcacctacgcgtcgattgtggcactgcatctggccaagatcgcgaggaccgcgcacgacgaacatgtattggtcagccgcgacgatattcacgaacttttcgccaacgtctcccacgacatcgaccgcgacgaggcgatgctgcgtgatcgcgttgacgaggcgatcaagcggctgtccaaggctgagattctgcagcgcacccgcgatgacgagcacagctacaccatcagcccagtcatcaacgcgctgatgtcggcgcagatgatcgaggcactgcagcgtcagtacgagcagttgcagcgcggcgccgcccccgaagacgccgacggcgcagaccccaccgacgaagaagatggcgagaccgatgatgacgagtga

SEQ ID NO: 44048 - DNA, 3348 bp, Mycobacterium abscessus subsp. bolletii 50594
atgatgacgagtgatgcagcgacacaacagttctggttgtcccggctgcaggtcatcaactggggcgtcttcgacggctatcacagcatcgagttcagccgtcgcggtacgctgatcaccggctcctccggtagcggtaaatcatctctgctggacgcgatctcgctggcattcttgtcttcgaaccgccgtaacttcaacgcctcgagcgacaccaccgccgcgggttccagcatgggcaagcgcaccgtcgacaagtacgtgcggggcctgtggggagagctgaagaacccgggggagcgccccaagcagatgttcctgcgcggcaagggcggtgcctggtcggctatcgccgtcacctactccggcaccgacggtcgggtgatcaccggcctggtactcaagtggcttgccccgggctcggattcggactcgtccagccgctactacctgatcgatgcggacgccgacatccgtgatctctgcaatgcgtgggccagcaagggatacgccggctcggtgttcgagggcgcgggttggcgcggccacaagagcgaacgctggtacctggaacagctatacgccgccgtcggtattcagggttcctctgccgcgcagcagctgctgggcaaggccaagtcgctcaagagtgtcggcggcctggagcagttcgtacgcgagtacatgctcgatgaaccggagtcgatggcagcgatatccgaagcgctagggcagatcacgccattggtcgacgcccgtgccgccttggcgatcgcgcagcgccagcggcagaccctgggcgatatcgaacagatccaacagacgtacgccagcgatgcggcgcagttggccaccgtggacgtcgtggaccatcacaccgtgcgcgactacgtggatcagcagcgcctggcgctggcgggcccggagatcgatctgctcgacaccgagatcacccggctgggtggtgagtgtgacgaaatccagtcgcgccaggacattctcacgggagagcgggacaaattgctcggccggatcgctgccgccgacagcaatctggcgccactcaaaagcgagctggctcatgctcgtgcccgcgcagaagaggtgtcgcgccggcgtacggcctacgacagtgcgttgtgggacctgggtcacgaagacgatatcgaatccgccgaggaattcgaggccatgcgggtggagagcctgcgggcagtcacccggatcaacgctgagctcgaagccggccacgatgcatatgtcatggccgcgggtgcgctctcgacggcacgtgatcagctgcgtgctgcatccgccgaattcaagcgggtcgagcacctgggtaccccggtgccgccggatgaggaccgcatgcgcggggagatcgccgcggcgcttgggcttaccgccaaggacctgccctacgtgtgcgagctgatggatctgcgcccagggcaggaacggtggcgcaaatctgtggagaaggtgttgcgctccaccgggctctgcctgctggtgcccgatcagcaccaccgccaggtgctgcgttatgtcaacgagaacccgatgcgcggctacctgcagatggagcgggtgattccctccggtaccccgcggcgcgccgagccgggcacgctcgccgactgtttgcgcctgaccaaccccaaccacgaatgcgccagtgccgccatgaatctggtggccggtgtcggcgactacgtgttggtcgacagccccgacgaattcagcaagcaccgccgggcggtcaccgatcagggactgcgcaaggacggtgaccggcgcgcggtcaaggacgatcggcgtgaattgcgggcttcccagtacatctatcagggcaacgctggcgacaagcgcgccgcgctttccgacgatgtggtcgaagcgcagcaggcggtcagtgatgccgaaaagttcatcggcgaaatggacaccaagcgcgaagagctgcgctcggaggtggtgcggtggtccaagctgcacagccaatacgagtattggagccagatcgataccgactcggccgaagctgccgtggcgcgtctacaggaccagtacgacgcgatgctggaagccaaccccgacctgaccggattgcagcagcaggccgactcctacctcgacgagatcaagaggctctccgaacgcatcggagcattgcgcaagcaagaatccgaacatgattcgcgccggacccggttgctggatctgctggacaacctgaacccgcgtgaggtgggcgggcacacccgatcgggaatcgaggcctatgtgccccaactctcgtccagcctggatgtgttggaacccgatgcctaccgactggagctgtggcggcagatcgagaaggatcagtcggtgctgcgtgagagcgtcacccgctcgcgcaacgagctgaaccggattctcaacgcgtacgaccgggacttccccgactctatccccaacgacagtgagaacttcgacgagaagatccacgactatgtcgcactctgccgcaggatcgatgaacgcgacctgcccgccgcctacgaacggatgctgcggctgatcaccgagcaggcgcccactgccgtgttgcggctgcaccagctcgccgaggaggaggcacaccgcatcaccgaccagatcgaccgtgtcaatagcggtttgggttcggtcgagttcaaccggggtacccggctgaccctgcgtgccgagccgaaggcgctcgaagcggtgggcgagctcaacgagcgtgcccggcggatatccgggcgtgccgtcgccgtttcgatgggggacgagaaggccatccacgaccagtaccaggacatcctgcaactgcgtaacctgttggccgctgagacacctgaggcgcgccagtggacgcgcgacgcgttggatgtgcgtaaccgcttcgtgttgtactgcgaggagcgcgatgccaggaccggcgaaccgatccgtacctacagcaacgcgggtgcgaattccggtggagaacaagagaagttgatggcgttctgcctcgccggcgcgctgagcttcaacctggccaacccggagacgggggacaaccggccggtcttcgcgcagcttatgctcgacgaggcgttctcgaaatcggatccgcagttcgcccagcaggcgctgtccgcgttccgtaaattcggattccagctggtgatcgtggccaccgtgcagaacaccaccaccatccagccctatatcgacagcgtggtgatggtgtccaagccggacggcccgggggtgcgtccggttgcttcgacgcgcacggtgccgatcggtgaactcggtgacgtacgcaaggccgtgagcgcccgctag

SEQ ID NO: 44049 - DNA, 891 bp, Photorhabdus temperata subsp. temperata M1021
ttgaataaagatcgtggtacccccgcaacccttgggaagtctgattcagatcctcagaaagagcagcaaacagggtttttcgatcagttgataaaacatcatactcaatcagagtacaacccgcttacagacacaaccggtgttgaatctgctgtcgctgccaataagagttcatccgttgaagttgatgatgtgttagtcagtgatcaccctgaaagctcaaacagtggtatgccacctgatgcgcgccgagtgctggttagcttgctgcgtcagggcgttatattgtcttcgcagaaagccaagttgtttgaatcactttgtcgataccaatgtgctgtacgcaaacatctgtcagaagtctatttgaagctggtcttagatgagaaagcgggtgtcgcctttatagccggttttcaaaatgaggaagataccgaatcattgggcatagatggtgaagaagttgtctctctgattagccgaaggacgctctctttatacgatacgttgttgctgttagtgctgcgcaaacactaccaggatcgggaaacatcgggcgagcaaaggattatcattgatatcgagcgtatagaatcccatctgacaccgtttttaccgctgacaaacagtactaaatctgaccggaggaaactcaagggtgctcttgagaaaatggtgacgaaaaaaatattgagttcggtgcggggaagtgaggatcgcttcgagattacaccggtgatccgctacgtagtcagtgctgaatttctcgaaagtatgttgaatgaatacctgaaaatggcggatgagaagggtattgagctaaataaaaacggcagcaacgctgttgattatcaagatggagaggaggaaacaggagatgaaaatgactga

SEQ ID NO: 44050 - DNA, 3405 bp, Photorhabdus temperata subsp. temperata M1021
atgaaaatgactgatcaaactctttcggctgattcattatttcatgttggtcaaatcagattagccgaactctcagtttataactgggggtcatttaacggcttgcataccgcgttgatcgatccgatgggaactttggtcactggggataacggcgcgggaaaatcgacgtttattgatggtcttatggctttactccttcctgccggaaaggcaacctttaatgtggctgcggcgcagggtgatcgttctgaccggactttactttcttatatgcggggaagttttggatctgcccatgatggagcgggtacgagagtcagaagtaagcgtgaatctggcgtggtgactgggctgagagcgttatatcagggggatgatggttcaaaaatcacacttgcggcacttttctggatcactaaatcgacgaatgtgcttgcggacgtgacacgagtttatgttgtcgctaaaagagacctgactcttaaggaaatgcttgatgcctttggggatggtaatgcccgatcattcaagcaatggcttcgtgatgacccggcactgacatgctgtgatgataatttttccgattatcaggagttgtaccgaaagcttctgtatatggacaataagaatgcgcctgcactgttgtcgcgggcgttgggcctgaaaaaaattgatgatttaaccgggttgattcgtgaattggtacttgaaccgagtacagtcaaagatgatgccaaaaaggtagtggaagagtttgctgatctggtggcgattcatagtcaattagtggatgcaagagcacaacaggtgcacttatccaggttacctgaactcagctcaattatcgaaaaagcgacgaaagaatttgagaagctgacggtcgaaagaaatagtcttccggtctactttggggaaatcttcgcacaattgtggagtgagaaaattgccgatattgaggctgaacttgaagcactatccctcaaaattaagcaagctgaagggcagaaagtcgatgcggataagctggttgaacgaaggcatgaggaatatcttcagtttggcggggataaaatagagtcgcttcgaaaagagatgggtcatacccaagatcaattgaatcgtgtggttcgaaattcatcgcaatatcaaactcatgccaacgagctagctcttccttctgtattagaagaggctgtatttctcaaaaatcaatccgaagtatcagccaggcttgccagtattcagcgagacgaagaagagtatcaggacaggtttgccaccatcagtgccaaattcagtgagttgcaagcaaatatccatgatatctctcaggaaattcgggaaatcgaggcaaggccggattctaatattgatgtgaaatatcagcaattgcgggatgagctggttaattccttagaattaagtaaagaccaatgtgtatttatcggtgagcttatcgacgtcgaagatcatgaaaagatatggcaaggcgcgatagagagggcgttgggcgggttacgaacaacactggctgtgccacatcattgttattcgatggtaactcgctggttaaatgcccggcatacgggtttacatgtacgtgttcaagttgtgaatgatgctgcgactaaccagggtcaatcggcggagtttaagcctgatggttatttaaggaagctagtatggcgcactcacccttatcgggagtggctcaagcgtcacttgcaaagatttgacctgcaatgtgtttcgaatacggaagaattggatcaaaccccgttttcgatgacacaacaggggttaatgcacatggataaggggcgctttgagaaaaaagatcagcaccggatagatgatagaagacgctggtgtctgggtttttcaaacaaatcacgtttagccattcttaataacgataaaaaagatttaggcttgaaactggaggaaaccggaaaaaaggtgagccaggcccgtcaggatttgaatgctgtttctgatcgtaaaatactttgggagaagctccaaagttaccgttgggatgatattaatgctccttactggcacgaaaagctttctgatttgcaggctgaccttaaggtgttagaacagtcaggcggtgatcttgataaggccagagaacgttgggaatcggctaaagagcaattggctcagattcaatcggcattaaatcaactcaactctgattctggtggcattaaaaatacgctgagaaatgcacaagaagagtggaacaaagcgcgggcaaaagcggagaagggattacctgatgcagccaggcagttacttgcgattcgggtaggcgtgcttaataccaacgatttaagccggatggctgaattggtgtcgaaagttgaagaaggtttggatcgtctattagattctagccggaacaataaagacagagcggaaagatcagccatcagcattatggtttcgttcaggtctaacgataaatggcaagtcttcacggttgactggcaaagtgatattggcagcttacctgattatcttaatcatttacgacaactggaagaggaagggcttcccaaccttgtggagcagtttattgaacgtttgaataagcatgcaacgcagtcgctggcgcggattaaaactaagcttgaatctgaacgggaagatatcctcgagcggattgacatcattaaccgggtcctcaagcgtacagagtttcgatcagagacacatttaaagctgggttcaaagagggagaaattcccgcatgttaatgaatttgaacagcatctgcgtaaggtacttagtcaggtaaccagtgatgaccatgaagcacggttccgtcagttggctaaggtagttgagatccttgggaaagccagtgcgccaggctcctcaaatacattggaaagtttgaggctgcttgatccccgttatcagatgtcattttatgccgaagaattggatattaatacgggtgagatccgtgatgtattggagtcatccagtggaaagtctggaggagaaaaggagtcattcgcagcgactattgttgcggcaagtttggcctacgttttgacgccggttggctatgatcggcctgtttactgtactgttttcctggacgaagcgttctcgaatacggccgaaacagtaagccggcgtgtgcttagggtgtttagggaactgcatattcacgttaatttgattacaccttataagaacctgaatttggcgagagaatcggcccgttcgttgctcattgcggaaagagaccaggaaaaccacgacagccatttatgtgaagtcacctgggaagaaattgaccggagaatgggagaagagaaggagaaaaagttagttgctgaggcttctggtttaggtatcgaacttgagaaactgatatga

SEQ ID NO: 44051 - DNA, 1197 bp, Photorhabdus temperata subsp. temperata M1021
atgaaaagagagctgaatggggtgcgctgggggttactaccggcgcaggttaagaagctcattaagcaacgtgagtgggataatctttcctcactaaaggctcgattactgggcagcaaagtattccctgtccgcgttggtttaaaaccccccagaggcagttctgccatatcagatatggttcattttcagcgatttgttgaagagtggaaatcatttccctatcaagaccatgtggagtggtcttccaaaaattttcgggagttgtctgagcaacgaatcccgacttttgttgtcattgaatcgatgcaacatttgattcaatttttggggaatgatgccctttcccgaagtaagttgtgggaaagaaatatgaagccattcttgcggattgataaagatctctatcctgcattggttaaatgtatagatattgtggaaaaactctctctgagagatgcggaattattggcaaagctgctcccacaattagagcaaggcttgggggaaggacaatatttaagagcattacccctcattggtattgatactaagtttcttgagaaccaccaaatcctgatcgaagagctgaccgatgtgattcacaaaggtgccgtttcagcatttggtggtcttactgcttggttgggttgtttaaccaatcccaagggctggttaaccatcagaccgctttgccatactgcgacggtcgcgtttggtggaattccgatacttcaaataccgggtgaattacttaaacagcacgaacttccggcatcgaatatattagtcgtcgaaaacttacagtctggtttggcgttacccgacatgcctgacacagtagcggtgataggaggagggaaaaacattgcctggatggatgcggcatggttgaaagacaagcgtgtagggtattggggagatattgatagctggggcttgtcgattctcagtgacgccagagacaagtttgtggatattaaatccctgatgatggatgttgaaaccgttaaagttcatgaagatagaatggttcctgaacccaatccagttgaatccaatccttcatcgctaaatgaagatgaagcaaagttgtttaatgatctcatctctggccggttccactcttcacgcttagaacaggagcgtctttcatctgattacattagaaacaaacttatagattggctgtcctaa

SEQ ID NO: 44052 - DNA, 1425 bp, Peptoclostridium difficile P28; identical to SEQ ID NO: 42381

SEQ ID NO: 44053 - DNA, 669 bp, Peptoclostridium difficile P28; identical to SEQ ID NO: 42382

SEQ ID NO: 44054 - DNA, 3282 bp, Peptoclostridium difficile P28
atgctgctggtcaactggctgtattacgagaagacgatcctgagctttgaggatatcgtctttctgagcggtaaaaccggagagggaaagtcagcgctgattgatgccatgcagctggttattcttggtcgaaccgacaattccattttcaataaatccgcaaatgataaaacaacccgtgatctgatgggatatctgaagggcaaatacaaggatggtacctttaagcgtgataaagggatgttcagctcacatctgtgtatggaatttgaggatgaacagcatagaatttactgctttggtatcgtatttgacgtaaacgggcctacgcggggggacatggagcattgctactatatgatgaatcagccgattcccgggcattgctttacggatgagggaacggtattcaatatccgtcgtatgaagaagctgctggccagctttcaggatcgcagctgccgttcctttaccacacatatggattacaaaaactatttccgtcagcgcatgctgatcaaggaccagcggtttttcgatgtctttaaaatggcagttgcatacacaccgatgatgaatatttccgaattcatcgtaaaaaatatctgtcaggaggaagaagacctgaatctcgaagagatgcaggaggaaattcaggattaccggcagatgaaggaacagctggaaacggtacagcagaaaaaggcccagctttccctgatccatgaacagtatacggatatatgcggggaacaggagcgtgttgcgaacttgcgtgtggagcaaaaggcagctgtatatcacggtatgctggtggaacatgatgaggcagccgcgcaatatgaggtatatacaaagagctatcagaagctgacaaaggaatcaagggaaaccgaggagcagcgggcactgctggaacagaacatggaagccttacgggatgcacgcagggataatgcggcagatattctggaacgaaagatacaggcgcatctggagcagcgaaacaccctgcaaagagatacgaccgccgttcagcagcagctggttacgaagggagaatttctgaaggaacagatagagcagctggaggaaatcgaggattatgacggcttgcagctggaggacttcgatctgtccggaatcaagctggctatacaaaggtccgtgcatgcggcacagcagctggctgcgtttaacatggaagcctatatggatattcagcgacagatgagagacatcgagaataccctgtccacggtgcgccaaaccatgcaaaacagcctgcagacatgcagggaggagcaggaggtgctagcggcaaatcgccgtgcgctggaagccgggaaaaagacatatccgaaaaagctgctcgttttaaagcaggagctggaggaacggctttatcagcaggtgggaaaaccggtagaggtatgcatactcgcagacctgttcagcattcaggaggaggcgtggacaaatgcgatcgaaggctacatccataaccagaagctgaatctggtggttgaggcagaatatttcatggatgcctatcgcatttaccgctccattaaggaagaaaaaaagattcatacctattccattgtggatatcgcaaaggcaaagccggggaaacgtcccgatgcaaaaacactgtatgactgcgtgcaggtggaacgcgaggatgtgcgcccctatgtggaatatctgctgggcagagtcgtatgctgtgaagcggaggagacactgcgaagctatccggtaagcatcaccagcgactgtatgctatacagcggctatgcagtgtcgcatatgaatccggaattgtataaggtaccctttatcggtgccgattccatagaaaagcagctgcaggagctgattatccgccagcaaaagctcacctccacctgccgcaagctggaaacagtcacaaggacattgcaggcggtacagctgcaaaccgttatcagtgatgactttatccgtcagctggaggatggactgtgcaaggccaaagaggtggagcagctggaacaaaagatcaaagagctgcgtgacgctcagacaccggaatccctgcaggagcttctgctgctggatcaaaaactggatgaggcaaagaaaaagaaaaacgaactgtatatgctgcaggtggaacaggaaagccggcgccgtcagctggaaggggatatgaagctttgcaatgcacgtatacaggagcttcagcagcaggttaaggaagcgaaaaagcccgagcaaggcataccggacacaatcggggcaatcaccacggcagacggtatccgcaggaaacagaaacagctggaggaagcactgcgggagctgaacagccgtgttgaaaattccaagctggagctgataacgaaaaaaacacattacaatgataccttccgcattgccttcaacccaaattttttatgcgatgattatgagcgggaatatgaaaagcattcggataatattgttgaggactatatcgataaatgccgcctcgcacagcagaaggcatatgagtgcttccagaataatttctttagtgcgctcaatagtaaaatcgaaaatgtgcgaatgcagattgaccggttgaaccgctctatccgcaggcataaattcggccgctccagctatgaatttgtgtgtacctgcaatgaggattaccgtgagtattacaatctgatcaccaacaaggaattaaacgggcacaatctgttgaacacgaaggtgtatgaggaaaatgaggagctgattcatgagctgtttgataaaatttcttccttatcctccatgcaggaccccaaaaagtatcaggagctgcaaaaagaggttcagctgctttcccgcttcaccacctatctgaaatttgatattctggaaaacggaaactcgctgcgtgccacgatcggctccagctccggtggagaaacacagacaccgttttatgtcgctgtactggtatcgctgttcagcgtatatgatgcaggaaacgacggtctgcagctggcaatctttgatgaggccttcgataaaatggataatgagcgaatcgaggaatgcatttacctgttgaaatcactcggctttcaggcaattatcgtaacaccgacggataagatatccaatctgagcaaggttgcggatgcgacgctgattgcgacaacggatgagaaaaacggccagcgggtttccaccgttcagaaatggagtcagaaagaaaacatagccatccccgactcggaaatgagacgggaagaagtataa

SEQ ID NO: 44055 - DNA, 1470 bp, Stenotrophomonas maltophilia MF89
atgaagcatcgcgaacgcattgcccgttaccgtcacctgcgcgaacagccccagtggaagctgcttgccgccgaccatgccccggaaatcatcggcctgttgcagggcctgctgatggacggcgagcgcacgttgccttcgtcggtgctcaacgagcgcctgcagcgcgcgctggaccagctggccggcgatgaactctcgcgcgagctgccgcggaccgcgcaggcctacatcgcgcactggctggcccaaggctggttggagcgccgcctgcccgaaggcgccgaccaggaacagtacgagctgtcgaccgcagcgctacaggcgatccgcttcgccgacggcctcgagcaggctcgcgtggccgccaccgagagccgcctggcactggtcatcgaacagctctcgcagctggccgcgcagaccgagtccgaccccgatgcccgcctctcggcgctgcgcgacgagcgcgaccgcatcgacgccgagatcgcccgcgtcggcgccggccgcgtcaccgcgctggatggcaagcgcgccctggaacgtgcgcgccagatcatcggcctggccgacgagctgaccgaggatttccggcgcgtgcgcgatgacttcgagcagctcaaccgcgagttccgcgaacgcatcatcgacgatgaaggcgagcgcggcgacgtgctgtcgcagctgttcgaaggcgtggacgtgatcggcgagagtgatgcagggcgcagcttccaggccttctggcgtctgctcaatgacgccgagcagagcgcccagctcgatgccgcgctggaagcggtgctggcgcgtggctttgcccggcgcctggaccgcaacgagcgcaacttcctgcgcggcttcaccagcaccatgctcgagcgcggtggccaggtgcacgacgtgctgcagcacttcgcgcgcagcctgcgcggcttcgtacagagccgtggctatctggagcagcgccgcctcaaccagctgctcaagcaggcgcagtccgaagcgctggcgctgcgtgacgagttccccgcacaacgcggcatcggccgcgacctgcagctgaccaccagccgcctgcgttcgtggtcgcaatggaagctgcacgatccgcgcagtgcccaggtcgatggcaacgtcgagtacaacgacgcggccgcgatcagtctggaaagcgtcggcgatctggtcgcttcgtccgaaatcgacttccgcaccctgcgccgcgacctgcacgacctgctcgatgcacagccgcggctcagcatcgcccaggccctgtcgcagcgcgaagcgccgcagggcctcggcagcgtcatcggctacctgtcgctgggcacgcgtttcggcaacgtggtcgccggcgagcaggagcttgcgcaatggcgcggtggcgacggccagatccgccgcgcccgcatcccgctggtttggttcacccaggagagacgccatgagctggcatga

SEQ ID NO: 44056 - DNA, 702 bp, Stenotrophomonas maltophilia MF89
atgagctggcatgaagatcccatcgaagcaccgcaggccgacgtggcggaagacgcctacgaggccgagccggcggcgaccatggcgcagccccgccgtggcaacgacgtgtactacctcggcgacaccgggcgcctgccgctggatgcgcgccgcgcgctgtgccagctgctgatcggccccagcatcgaccagctgcgccacgccaagctgtggcccgcgctgatccgcagcgaagcggccatccgctcatcgctggcggacctgttcctggaactggtgctcgaccgcgacagcggcgtggcgttcacccgccaggccgataccgaagacgttgatgcgccggtgctgctgcgcacctcgccgctgaccttcatcgactcggtgctgctgctgtacctgcgccagcagctggccgaggccgatgcacgcggcaaccgcgcggtggtcgccgacgccgagatggccgaagcgctggccatctatgaaaagaacctgtccaccgaccgcgccggcttcaaccgccgcgttgcctcggcggtgcagaagatgaaggacaaccacatcctgacccgcctcagcggccaggatgaccgccacgaagtctcgccggcgctgaagctgctgttctccgccgaagacgtgtcccagctttcggcggtgtaccgccagctgcgcgaaaccccggccgccgaggcctga

SEQ ID NO: 44057 - DNA, 3381 bp, Stenotrophomonas maltophilia MF89
atggctatctccaagcacactcccgcactgttcaacgaaggcctgccggacccgcgcctgcagcagttccgcatgcgccgcctgcaggtgcacaactggggcaccttcaacggcctgaccgaagtgccgatcgccgagcgcggcttcctgtttgtcggccgctccggctcgggcaagtcgaccctgctcgatgccatgtccgcgctgctgacgccgccggccatcgtcgacttcaacgccgctgcgcgtgaagccgagcgcagcggccgcgaccgcaacctggtgtcctacgtgcgtggcgcgtgggctgaccagcaggacagcggcaccggcgaaatcgccacccagtacctgcgcaaaggcgccacctggaccgcactggtgctggaataccgcgccggcgatggccgcgtggtcagcctggtgcgcctgctctggatctccggcaacggcacctcggccggcgatgtgcgcaagcactacatgatcgccgagcgcccgttcgacatcgccaaggatctcggcggcttcgacctggacctgcgcaagctcaagcagaagctgtccgacctgcaccacttcgacaccttctccggctacgccgagcgcttccgcgacctgctcggcatcgacaacgagatggcgctgcgcctgctgcacaagacgcagtcggcgaagaacctgggagacctcaacgtcttcctgcgcgacttcatgctcgacacgccgaagaccttcgacgccgccgagcgcctggtcagcgatttcgccgagcttgatggcgcacaccaggcggtggtcaccgcccgccgccaggtggaaaccctgctgccggcgcgcgcctactacaacgacctgaaggaaatgcaccgccggcgcggtgacgacgaagccttgaaacttggcgtcgacagcttccgcgagagccgccgccaggcgctgatcgaagcgcgcctgcgcgagatggacgtgcgtgaccgcggcctgcttggcgaagaagcccagcgccgtgctgcactggacaatcacaccgagcgcctggccgaactggagctgcagcgccgccagcagggcggtgagcgcatcgaggaactggaacgcgagcagggtcgtgccgaagctgagcgcgaccggcgccaggccaagcgcgagcaggcacgccaggcggcacagcagctgggggccgaactgccggacgacgcgcacggtttcgccgaactggtcgagcgcgcgcagaacgagctgcaggatcgccagcgtgcctcctcggcactggacgatgcgatcagtgatcgcctcggtggcaagcgcgatgacgagcgccgtttcggcgaagtccgtgccgaactcgaagcgatgcagcgcacaccgtccaacatcccggcgccgatgcagaagctgcgtgcgcgcctggccgaagagaccggcatcgccgaggcagcgttgccgttcgtaggtgaactgatccaggtccgcgcggaagagcagggctggcagggtgccatcgagcgcgtgctgggcggtttcgcgctgtcgctgctggtcgacgacaagcactacaacgatgttgccgagtgggtgaaccgcactcacctgggcatgcgcttcacctactaccgcgtgcgccgcaacgatgatgcgttcgcgcgcgaaccctcggcgaaatcgctgctgcacaagcttgaactgcgcgagcatgtgttcgaaagctggctgcgccgggagctgggcaagcgcttcgactacgaatgcgtggatgccaagcaactgcgcaacgtcgaccgcggcatcacccgcgaaggccaggtcaagcatccaggtgaccgtttcgagaaggacgaccgcagtgcagtgggcgaccgccgccgctggatcctcggcttcaacaaccacgacaaggtcggtgccttcgagcgcgaagcccaggaactggccaagcgcatcgccagctgcgagaccgacatcgcgcgcctgcgcgggcaacgtgaccgcgacaacgaacgccgcctggcctgccacgagctggtcagcatcagctggaacgagatcgacatcgccgctccgcagcagcgcctgagcgatatcgaagccaccctgcgcgacctgcgcgaaggcaacgccgatctcgccaggctggccaagcagatcgacgccgtgcgtgcggatatcgaacaggcacgccgcacctatgaggacgttcgcgtcgaacgcggccagctggtcaaggagcgcgaccgtctcgatcgcgcccgccagcagagccgtgcactggtgctgccgaccctggcccaggagcaggaggccgggcttgccgagcgcctgcaggagcagggtccgctcagcctggaaacgctcgaagcgcacatgcgccaggtcagcaacgcgctgaacgagcagctgtcgtcctcgcagcaggacctcaaccgcatcgagaaccagctgatcggctgcttccgccgcttcatccagcagtggccggaggagtcgggtgacttcaccgtctcggtggcctcggccgaggacttcctcgcccgcctcgaacgcctggaacgcgatggcctgccgcagcacgaagagcgcttcttcgatctgctgcagaaccagagcaagaacaacctgctggccctgcagcgccacagcgccgaggcccgcaagtcgatcggccagcgcctggatgaagtgaatgccagcctggagcaggtgccgttcaaccgtggcacgctgctgaccatcgaactgagcgaccgccgcctgccggaagtcgccgagttccacctgcagctgcgcgaggtgctgtcgcagcaacagaccgagcagcgtgaactggccgaatcgcagttcaccgtgctgcgccagctggtcaaccgactgggctcgcaggaaggcgaggacaagcgctggcgcgagctggtgctggacgtgcgcatgcacgtggagttcatcggcgtcgagctggatgcagaaacgcgccagcaggtggagatctaccgcagtggcgccggcaagtccggtggccagcgccagaaactggccaccacctgcctggcggcagcgctgcgctaccagctcggcggcgccgacagccagctgcccagctacgcggcggtcgtgctcgacgaggccttcgacaaggccgacaacgagttcaccgcgctggcgatgaacatcttcgacaacttcggcttccagatggtggtcgccaccccgctgaagtcggtgatgacgcttgaaccgttcatcggcggcgcctgcttcgtcgaaatcagcggccgacacgactccggggtgttgctgatcgagtacgacgaagaaggcaagcgcctgaagctgcccgagcgcagtcgccagcaggccaacgaaccggaagaagccgaggcctga

SEQ ID NO: 44058 - DNA, 1464 bp, Microbacterium maritypicum MF109
gtgacaggaacacgagcagaagcggcattctcgcgcgctgtcaccgcattcagcacgccgactctcgacctccttcacggacgtttcgcgcccttcgtcgtcgcgtccctctcgctgctgttcacggcagaccgggcgtccatcccgatcgccgacgcccaggccgagctcgccgagatcctcgatgagctgaggggagcgggcgacgacgatgacgaccgccgggttcccgcagggaccggccgcgacgtcgcgcggaactgggtgcgactgggctggctggtgcagcagatcgacgaggacatcgaggtgtaccgactctccgcgcacgccgtcgaggcgctggagatcgccggacgcacgggcggggggcgcacacgtgtatccaactcccgtgtgcgaacgctcctcgacgccgtggagcacctctccgacagcgccgaggccgatcccgagcgtcgcctggctcgtcttcggaaggagcgggcggcactcgacgccgagatcgatcggatcgaggaatcgggcagggcggatccgctcgacgatgaagagctgttcgaagaagcggagaacgtgctgcacctggcacgggagctccccgccgacttcacccgcgtcgccgagtcgctcaagctcatgcagcgcgacgtcgtcgcccatctgcggcgtgacgaacgcccgaccggcgaggtgctccgcgagtatctgcgacgcgcgcaggacgtgatgaactcgaccccggaggggcgcgcgttctccggcgccctgcggctgatcggcgatccggatcgcatcgacgcgctcaccgaacagctgcacggtctgctccggcagccgttcgcccgcatgctcgacagcacgcagcgtgccgaactcgacgccatcggacgtcgggtcgagctcggcgtcgaagaggtcctcgccgcacagcgtcgagcgtcgcacgtcatcaccggccaggtgaagacccacgatccgctgcgggaccgtcagatcgacgatctgctgcgcgacgtcatcgccgctctccacatctgggacggtgcgggggcgagcgactcgccggtgcgcagtctcccgctcgcagatctggggcacctcaggcagacggtgagcagcatccgcccgccggccgtccccgcacctctcgcggacgccgacgacgtcgagttcgccgacgtcgactcccgcgcgtggggtggtccgcggtatgcggagctcgaggagtacgtgtcgggtctcggccccgagttcgacctcgcggcggcgttcacccagggagccgacgatacccgtcgtcctgtcgacctcgtcggactgctcgagatcgcgcaccgcaacggcatgaccgagggcgaggaggtctcggtggtcgaagcgcggcgtccggacggatcgacgcgacgtttcgctttcggcgccgtcacggcgcgcaacccgaaggaagaatcacatgcctga

SEQ ID NO: 44059 - DNA, 663 bp, Microbacterium maritypicum MF109
atgcctgaagagagcctcgtgacggagacgccggtcgaggatccgttcatcgccccggtcccgatggaagacgacatcgaggagcacttcgcgggtgaccgcggcacgctggaccccgagatccggcgcctgctcgcgcacatcctccagcgccgtttcatcgccgcggagcgcaaccgccgggaatgggccctgctgctcgaccatcagcacgtgatcgagtcgcgcctgaacgacctctacctccgcctggtcgtcgaccacggccgcgggttcgcatacaagcagcagctgcgctccgacgagatcgacatgccggtgttgctgaaggacgcgccgtacacacgcgccgagaccctggttctcgtgcatctgcgcacggtctatcagcgcgagtccgccgcaggcgaggcatccgtgcgcatcgacatcgaggatctcgagcagaccgtgctgagctacttcagtgacgtcgacggcggcacagcccggcagcagaaggcgatccggaacgcgatggatcgcctggatcgagagggcatcgtgcaggaggagaccagcgggcgctatcgcatcagcgcgctcgtcgaggtcgtcctgagcgccgagaccctgaaagaactccgcgactggctgcggtcgcaggaagcggtggaacgatga

SEQ ID NO: 44060 - DNA, 3360 bp, Microbacterium maritypicum MF109
atgaccatggtcgacacgctcttcggcctcatcccggcgggttcgcgcgggcagcagtgggtggcggaggagctgcagctgatcaactggggcgggtacgacggcggaccccatcgggtgcgcttctcgccgcacgcgaccctgctctgcggaggctcgggctccggcaagtcgacgttgatggatgcgtacatcgccttgatgatgccgcacacgacgccgttcaacggagcgtcgaacggcggcgttacgggtcgcccgcgcggcgaggagcagcggaacatcctctcctacgggcgagggaagatcgacgaatcccgcaccgaggagggcacgaagctgcgtgtgctccgcggagacggggaggacacgtggagtgcgatcgcgacgacgtggatcgaccacgacgggtcgcggttcacagccgtgcgtgcgtggtacatccccgcggatgcacgcgtcctcgaggacacgacgcgggtcagggccaccgtgaacggggcgttcgatctgggactgctggagcgcgcggcgacgcagcggctctcggatgcgtcggtgcgggcgacggggctggagaccctcgcgacggaccgtgagttcgcggcgcgcctgcaggcggtgctcgggatcggtgcggccggctccggtgccaaggccatcagtcttctggcgaggatccaggccgggcagcagatcacgacggtcgacgatctgtacaagaagctcgtcctcgaagagcccgagaccatggccaccgcagatgccgtcgtggcgcatttcgacgagctcgagagcacgcgcatgaggatgctcacggcgaagcagcaggtgaacgcgctcgagccgatccggggcatcaaagaccgcatcgtctcggcgtccgagcgtgtgcgcgtgatcgacgaggtcggcgtgttcacggatccgacctctctggccgccctctggaacgcgcagcgacgcctcgatctcctgcgcgacgtggaggtcgagctgggggatcgttcccgcgcgctgagtcttgccgtgcgcgagaaacgtgctctcgtcgatgccgcggatgtcgagcgcgaagggcttctcgacgtgctgcgccagtccggcggcgaccgtctcgagacagctcagcgcgaactccgcgtcgccgagcgccgagtggacgacgtccggcgggagcgggcgaagttcgacatcatcgtccgggagctgggagcggaggtggagaccgccgcgcagttcgacgccttcgccgccgacgttcgggggtcggctccgaagtccgagatccgtgctgcccgtgccgctttcgccgatgccgagagcacacgccggacgacggaggccgagatccgccgcctgcgcgaggagcgtgagaagacgagtcgcgtacgcgggagcatccccgcgcatctcgacgagtcgcgcagcctgctcgcagaagcggtcgggctcgacccggccgatcttccgttcgtcggcgagctcatcgagctgcggaccgagttcgagccgtggcgggaggcattcaacctcgcgctcggaggcttcgccaggacgcttctgatcgacgtcgagcacctcgcttcgttccgcacggccatcaactccgtgcgcaccccggaacgtctgaactacgaaggcgtccataccggcatccccgaggtgcggaacgccgacccgaagacgcttcccgggcggctcgagtacctcccgacgcccttcaccggttggcttcagcagcgacttcaggatcgcttcggatacgtctgtgtcgactcgtcgtcgcagttgggcgcacaccagaagaccctcacgatcagcggccaggtgtcccaggggagtcgaggtgcccacggagggcaggggcgcagcaacgtcctgggcttcaccaacgaccgtcgcctgcgcgagatcgacgaacagctgcggcggctgacggcgcagcacgaggagtgcgcgtccgctgcgcacgaggccgaggccgccctcgaccgcatcgaggcgcggtcgacatccttcgcgaagatcgaggacctcacgtgggagcagatcgatgtggtcacggtggaggccgagcgggagcgctggctcgcggtcgaggcggaggtcaccacggccagccccgagatcgcgcaactcaagcgccaggccgaagaactgcgggcgcgggcggcgcggctccgcgatgaagaggcgcgtctcggcaacgagctcgctcagacccaggagcagtggggtcgggtcaccgacgacgtcgacagctgtcagtcggtcatcgactctgccgcggcatccggactcgtgctcgcggacgggcacgcctcgttcctcgacagccgattcctgcacgccgagaccggaggatccgcgacggcggcgcagcgcctgacccatttggacaccgccctcaggacggcagctcagcgccttctcgatgaccgccgcgaggcggccgaggcgcacgagcagcagcgcgagagcatgcgccgactcatgacggggttcctcgagcgctgggacaccctcacgatccttccggatcccgacgcttcggtcggggagttcgagagcatcctggaggctctccagaccaacgggctccacgagctggagaccgagtggcgcgacagcctgctcaaactgtcgggaaacgacctgacgagtctcgactcgacgctcagccggtcgctccgtgagatcaaggaccggatcgatccgatcaaccggatcatggaggagctgccgttcttcgacgacgatcatcgtctgcagatcaccccccgggagaaccagacggaggctcgcaagcgcttccgccgtgagctccgtgaggtgcggggactcatcgatgcggcggcgacggatgcggagcgggagaccgtgtaccgcaagatgagtcgcctcatcgcgcgcatgcgccgcaccgcccccgacttcgcggagctcatcgatgtgcgaaaccatgtgcgggtgagcgcggagcgcgtcacagccgccacgcgagagcacgtcgcgctctacgatcacatcggtgagaagtccggaggcgagtcgcaggaactcgtcgcgttcatcgtcggggccgccctccggtaccagctcggagacgcgggcgccgctcgacctcgctatgcgccggtgttcatggacgaggcgctgatcaaggccgacgcccacttcaccaagcgtgcgatcggtgcgtggcgcgggctcggcttccagctcgtcatcggtgcgccgaacgacaagtacagcgcgatcgagccgcatgtggacgtcgagtacgacatcctcaaggacacgcgcggtcggtcctgggccaaggcgaaggtgggtctgccggaagcgggggtctga

SEQ ID NO: 44061 - DNA, 1443 bp, Arthrobacter sp. AK-YN10
atggactactacgcgatcaacgcgctgcgcgaaaagcatgcaggctgggcattgcttcgagcacaaaacgcacccctggctctgcacttcttcatgtccgccttcacggaccccaatcagcggaacgtcgggcgccaacagctgatcgacgttctggacgacgtcttgttcggcgtacgggagacctatggggaagagaagtttccgcgcaacgcctcggagtacctggatgactgggccgcgtctgagcgcgcttggctgcgcaagtactacgtccaaggcgaagacgagccgcattacgacctcacaccggcggctgaagacgtggtgcgctgggttgagagcctcaaaggccgcgagttcgtggccacccaatcgaggctgacaagcatctttgccgtgttgaagaccctcgtgcagcagtcagagacagacccggacgtgcgattggcggaacttcaacagcaacgggaccagattgatgccgagatgcagcggattcgcgagggagacctcaaagtcatgactgcaccggaggccctggaccacttccaacagctcaccaccctggcgaaggacctgctctccgacttccgcgaagtcgagcagaacttccggaaactggacaggcaggtccgggagcagattgctacgtgggacggcagccagggagaacttctggactcgatcttcgccaaccagcaagacatcggaagctcgctccaaggccgcactttccagggtttctgggactacctgatgtccccgcagctgaggagggaactcaacgacctcctccaaagggccacccagatcgaggcgttggctcggatggataacctccacaccatcaccaacctccaccaggattggctacccgcagtggagcaaactcaggccacggttagacagctctcacaacagatgagacgcctcttggacgacaaggtcttcctcgagaacaaacgcatcatgcaacttatccgaagcatcgaggcgaacgcactggaccaacgggaccagccgccgtcgaactttgccatggagattgaagcgtcctccgtggacgtcgccttaccgttcgagcggcctctttacgagccgggcagccgcgagatggtgatggacgatgttgtcaccgcggatgatcaggacctggatgcgagcgcgctgttcagtcagtttcatgtggaccgtgagcgcctgaaattcaatatcgaaagtgtcctcgaggaggagaaccaggcgacgctggcggacatcacggcggcccatccgttgtcccaagggctcgcggagattgtggcgtactaccagctcgctgcggagtcggactgggccagcatcaaccccgaaactacgcagcgcctccactggactttggaggatggcagcgtccgggaagcagtcatcgatcagatcatttttgtgaggccggcatga

SEQ ID NO: 44062 - DNA, 591 bp, Arthrobacter sp. AK-YN10
atgaacactgcaagcgaaacgtccagcccggaagagttgccgggaatcgtgaccaagctgttcaagggtgtggtctacgcggagacggatgagaaggtctggcaatcgctgctcgccttgacgtcccaggtgcgcgattatgtggcagtgctggggctgaacctgattctggacgaatccgagggctacgcgttcctgagatcccgggaggatcccgaaggcacgcttccgcggctcattccgcgcaggcagcttactttcgatgtgagcttgctgcttgttttactcaggaaacggttgttggagttcgataccaacagcagtgaactccggttgatcatgacggaggaggagctaaaggacatggtcgcagtgttcctgccggagtccagcaacgaggccaggattctggaccggctaggcaccaacatcaagaaggtggtggagctcggcttcttgaggaagctccgcggcgaaacggggacttacgaggtagcgcgcatcttgaaggcatacgttgatgctcagtggctggaagagttcgacgcgcggctggccgactaccgtgaatcactcaccggaagcaaataa

SEQ ID NO: 44063 - DNA, 3426 bp, Arthrobacter sp. AK-YN10
atgagcactgacgttcaggacagcctcttctctctcgaggaaccctccgaggaaccctccgacgagcaagcgaacgacggcggccttccgcccgggttccgactccaccgtttggagctgctcaactggggcacgttccacggcggtgtgcgcacgttccgtttggacggggccaacagccttctgacgggcgacatcggctcgggaaagtcgaccgtagtggatgcaatcaccactctcctgcttcctgccaaccggatcgagtacaacaaggcggcaggggctcagaagcgtgaacggaccctgatgtcttatgtgaggggcttccataagagcacgcgcagtacgggcggcgagtactcgaagccggttgctttgcgagcgcccggcacgctcactgttgtccttggggtcttccataacgccgtcatggacaagaccatcacgctgggcatcaccctctggaccatgcaggaggccggccagcccacacgcttctattcccttgccgagggcgagcaatcgatcgcggatgacttctccaacttcgggcaggaccccgccaagttgaagaataagctccgcgccgcgggcgtcgctgtccacgacactttcgatccctatgctgcagctttcaagcgccactttggcatcagcggcaaccaggcgatggagctgttccaccgcactgtttccatgaagcaggtggagaacatcacccacttcgtgcgcaccaacatgctggaagacgatgacgtccagacacggatcaacaagctgatcagccattttgacgatctgaagaaagcgcacgaggctgtggtccgggcaaaagaccagatcgagcttttgaaaccgatccgcgatggcgccgccacccaccggaagctcagttccgaagaaaaccaggcccgcaggcaacgcgaccagctgcatccctggttcattgaccagcaacttacgttaagcctcgaacataaggaggagctggagcggactggtcagaagcttcgcgaagacagcgcccagctggcctcggacgtggccaggctccggcacgagctcgcgatcgtccaggaggacatccgtacaagcggcggtggcaggctcgccgcgattgacgcggaggtctcccgacttgaggagtcggcgaagaagcaacgcaaccgtttcgaggattacgcggctgccgccgtcgagcttggactgaatgcccccgaagaccgagtgctctttgacgcgaaccggtcccggctgggcgaggtggagggaaacctcgcgtccaaggcggcgaagctgcaggagcagcgcacggcgttgcattcagagctcaaggagctggccgcccgacgggacgatctggatgccgagcttgggagccttggctcccgccccaccttgctggaacgtccgcaacttgagctccggcgtcgtatctgtgagggcactggcattgccgagtccgcgcttccttacgcggcggagctgctgcgggttcgcgaaggcgaggctgagtgggagggtgctgccgagcgcacgctgcggagctttgcgctgtccctgttggtgtcatcggaacactacgcggctgttagctcgtgggtggatgccaatgatctcaaaggcaggctggtgtaccggaaggtgggtgactcctattcatcgcgtccacccgcacccgggactttgggggcgaagatcgcgatcaagcagggcacgccgttccgggagttcctgttggacgagctcagcgcgcggttcgactacatgtgctgcgacaccatggatgagttccgccggtatcccaaggctctgacgatcaacggtcagataaaaggcgcccggggacggcatgagaaggacgaccgcaagggcctcatggaccggcgcacgttcgttctcggctgggacaaccatgacaagatcgtccgcatcagggccgagcgtgaccacatcgatggaaagcaccgcagcgtcggcacccagttggcgaaggtggacgccgggctcggtgacatgggccggttgcggcaattgctgggcaacgtcggctccgtggctgagttttccgacatcgcctggcagctgacggcccgcagggttcaggagctcaaggatgaaaagctcgagcttcagtcggccagcagtgtgttgcagcagctgactgttaaggaattggaggtgtccggccgcatcgagcgattgcaggagcgctcggataaggttcagcagcggatcggtgagaatactaacgcggccaagagtatcgctgcggctatcgaggaatgccgcctgacgctcacggaacaaccactaacggacgacggcgatgtgctggccgccgtagcgcagctcaccgccgaggcgttgggtgataaagccctgacgtaccgcaacaccggcgccgccgagagctctgtccggtcgagcttgacggcaaggatcgatgctctgacgaaacgtatcgcgacggcgggtgccaccacgatccggcttatgtctgatttccgccataaataccccaacgagaccacggacatcgacgcgacgttggagtccgcggaggagttcaatcgtttgcttgagcagctggagcgtgatgatctgcccaggttcgaggcacggttcaaggactcgctgacgcagaacaccatccacgaggtggttgcgttcaatgcgttcctggacagccggcggcaggacattgtgaaccgcatcaacgagatcaaccagtcgctttcggagatccaatacaacccgggccgtcatatccaactggaacaccagagctcgtcagatcttgatgtgaggcagttcggcattgacttgcgtgcatgctccgagggcaccattggcgacgacgagcagtactcggagcagaagtatctgcaggttgaacgtctgatcgaacgctttcggggtcgcgaaggcttcaccagtcttgacgagcgctggacggccaaagtcactgacgtgcggaactggtttaccttttcagcttccgaaaggtggacggagaccggcgaggaattcgagcacttcacggattcgggcggcaagtccggtggacagaaggaaaagctcgcgtacaccatcctggcggcggcgttggcattccagtttgggctcgcggccgggaagggagctgcgcggggaggcggttccgggaagggccggagtttccggttcgtggtgatcgacgaggctttcggtcgaggctccgacgagtccgcacggtacggcatggagctgttccaacgcatgaagctccaactgctgatcgtcactccgttgcagaagatcaacgtcatcgagccgtttgtggcacacgtgggctttgttgcaaacaccaacggcaacgattcccaacttcggaacatgaccatcactgaataccgcgaggaacgggagcggcgtgccggctaa

SEQ ID NO: 44064 - DNA, 1257 bp, Arthrobacter sp. AK-YN10
gtgccggctaagtcaggtgcttcccggtggacctcgttggctgacttgcgggcgctgtcggctactgcgtgggatcgggggcagctgctgcgggaagctcttgatccaagcggagtttatccacgccgccgggtgttgaagcgcccatcggctaccgaactgcgcggtgactacgcggccgcccgcgaatgggcagccagactcttcgccgcagagggtccgttcagtttggagaccgtcgacgtcggacgcaccactatcggttcaaaccgccttcccgctgtggccgtgtttgcttctgtggaggacgagattgagttcgccggtaagcagcgggaaacgaagcagttcctgtccttggctgccgagctgggcggcttagacccggcgctccaggcttggaccgcgaaacgtccgaagcagttgctggttctaggtcaagacgctttactcgctgcccgggtggcactttggcttagggatcacccctcccccgccgtttatgtgaggcagttgcgcctgcccggcgtgcacaccaaattcatcgaggcgcaccgcaggactattgacgagatggtggagtcgctgaggccgggcctggcaggaaccttgccctcggacgacgattcaggtgctgcagacccggaccttgacgactctgtgcttggcacgccgatagcccgcactcccgcagctcgtttcgccgaacgccacggcttccttcatcaaccggagcaggttcgcttccggttattggacccgtccataccgctgctgggtgatgcgcgggacattacggtcacggcctcggcctttgaatcactccggctcccagtcacccatgtgatcattaccgagaacctcgtgaacttccttgccttgcaagaccggcccggaacactcgccattttcgggaagggctacggattctcatcattgagggacgctgcctggttgcagtcctgccaggttctctactggggtgacttggacactcacggcttccgcatcttggaccagctccgatccgtgcacccgcatgtgtccagcgtgctcatggacgaagcgactctcttggcgcaccgggacgcgtggagcgtggaggcgtcgccgtcgcgtgctgcgttgacacgcctgacgccaaacgaagccctcgtgtatgaggcactccaggccgggacctatggcgacaaggtccgcttggaacaggagctgattgcttgggagtgggcgctggagcggctggagtctgactga

SEQ ID NO: 44065 - DNA, 498 bp, Arthrobacter sp. AK-YN10
atccagagtgacgatgtccgccagtcggtcacgctccgcaaggtgctcgccgaggccgagcaggcaatccgttccatgccatacgagcgggaccgtccgggccttgtccccgggcccgtcctctacaacgcgggcttcgagtcgctggccatggtcaagctcttcgaccccgacgagttcgccacgccaccccgtctggcggaccccatcgctttcaccgactcggaccgcgtcaagtccgcccgcaccggaaaggcaaggcccgacgtcgtccgtgccgccatggcagggtccgcaaccctgggcgaggcgtgggaaaaccttcccgctgaggaacggcacatcaacaccgtccgttccctcctgtccatggccttgcagaccggcgccgcctttgaccgggccgcctgggagcacatcgacttcgaacaaatcgacggcagcatccgcacggcatatctgcccgtcgtcacgctgaatgaggattctgatgactga

SEQ ID NO: 44066 - DNA, 897 bp, Arthrobacter sp. AK-YN10
atgactgaggaaatcacgacgacggaactcgccgcgacggataaccccaccatggatggtggccgggaagatggtggccgggaagaggtggagacgcacaccgcggatccgttccgtgtgtccccgagggatacgttcgttgacggtgcagctctcttccccggggatacgggcgtcctgcccatgaaagtccgccacgccctggtcaaactgctgaaagggccgtacatcgacggcggccgcgacgagaagctctggaccacgctcctggataaccaactgatccttcggagccggttgtcggaactcttcctgacgctccagctggaccacgaccgcaagatcgcggtcctgcgcccggtggatccggagatcatcggggcaagctcccggtccagcatcctccgccaacagcgcgccctcagccgggtggaaaccatcgtcctgctgcggcttcgcctgctcctggaccgccatgtcacggcccagacggatccgaccgtaacgcgcgaggagatctccgacctggtagcgaactacaccccggccggccagcaggatgccttgcgggactccgacgtcgtgaaccgcaccatcaccaaactcctggcccgccaactgctcctggccacccccctggacgacacctacaccatcagcaacgcactcccgctggccctccccttcgaaaacatcggcgacattccggcccacatcgaagccctggtggcagtagcagccgacgaatccggcaccgaaccgctgcttgacttggaccccgattcacatcaaaccagcccctcagatgacgacatggacgacgacacggatgacgacggacccgctgcggtgagttccgccgcggactcaaccgacgccgaagggaccacgaagtga

SEQ ID NO: 44067 - DNA, 3444 bp, Arthrobacter sp. AK-YN10
gtgacgatcgcaagcatgctcccgttgggcgaacagacgaacccgggccagatgcgccttgccctcgtccaggtggtcaactggggcaccttccatggcgcccacaccatgcacgtggaccgcaacggcacgctcctcacgggtaattccggcgtaggcaaatcgacgctctttgacgcgatgctccgagtatttgatgcccgtccgcgttccaacgaggccgcggcccagcggtccggcggtgctgtggaggacaagaggaccaccttcacctacatgcgcggcaaggtcggtgataaggcggtcggcgacagctcggccagtgccttccagcggcctggtgccacctggtccgccgtcgcactcacgtttgataacgcagccggcaccaaggtgacgatttccgcactgttcgacctgcccaagaacggcaccgaatcgagcgtcggccggttctatgtgatcgacagcaagcctttggatcttgaagcgatcgaggggatcgcgcagaagcggttcaccaagggcgcgctggagtcgatcttccccgaggggcaggtcttcgacgtccataaggcttttgccgagcggttccgccggcttctgggcatcaattcggaccaggcgctgcccttgctccgcgtcatccaggcaggcaagggcctgggcggcagcgtcaacaccttcttccgcgaccaagtgctcgacgctcctgcgacgcttgccgccgcggacgatgtggttgaggaattcagcaacctgatgtccatccgccagcggttggaagacgtccggcagcagcgcgaccagttggcaccggttcccggcctcaacaaggaatacgcgcaggcgttgctggatgccaaccggctccgtgagctgacgggcgaggaatttgaggcgtacaaacagcagctcgcggtttccgtgcatgccaagaccttggccaggttcagggaattggcccagcagaaagcgcaggaactcgcggcggagcggaccatccgggacgcgctcgccaaggaactgcgggagctggagtccgactacaacaaccgcggcggcaacgcgatctctgccattgagcagtcgctggagaacgcccgcgtcggcctgaagctgcggcagcaggtggaggagtctgccaggaaggcgttgtccgatgccgggctgaacctggaatggtcagctgaaggttgggaccaggcccatgagcaggccgcagcgcggtcggcatccttgcaggacgactcggagtccctcaaggaactccgttttgaggcgttcgatgcccacgccaccaagaaacgcgagctggcagctgcccagcaggaattgttgtcgctgcgttcgcgcaagtccctcctgccgccgtcgagcattgaaaaccgggctgcgatagctgcggccactggcgtacccgaggaacggatgccgttcgcgggcgagctcatcgatctcgcggagggccaggagcagtggcgtccagccgccgaacgcgcgctccgcaacctcgcaaccactctgctggtcccgggtgagtacttcgcggccgtaacccgctacctgaatgacaacaccatccgcggagcccttcgcgccgtggatgtttccaagccgcttgcaggcggcgcacttgctgtggaggacgtgtccgacggcgatctcttgactaagttgagcatcctcacgtcgggggccaatgcagaggcgggggagtgggtccgtgaacggatcgccgtggacttcgcctacccgtgtgtcgaggacccggacgagctggcttcgctggacaagggactgagcctgggcggcgtggtcaagcgcaaccggcacaccgtggagaaggacgatcgcttcacgagccgccaggactacgttctcggtttcgacaacgcgtccaagttggagctggtggcggcccgcgtcggtgagctcgagaacgagttggccaaagctgcggaactggcacagagccgggaagattcgcatcagggaatggcccgtcagttggaagccctccgccgggttgccgaggatgagcgtccttgggagcaggtttcagcagcagttgccggggaggaattgacgcgaatcgaacagcgccttgccgacgccttggccgcgcaggccgatcttgagccgttgcgggcaaacattgaggcggtgcgtgagaagcaccaatcctccacaggtgccgcggccgtcctgcagagcgaatacaaggcgctcgaccatcagatgaccacggctgacgggctgttggacgcggcgaggctgaagcttgagcaagcaccgccgtcgagctccaccgtcacggcgcttgagccgtattttgccggcgctgccgacgtcacccagctgtacgagctggataacctggccaacagcgtccgcaacaagctgcttgatgaattgcacgtagccgagtcccgggggcaagcaacggcggagcggttgacccggattttcgaggcgttcgtgcgtgaatggggcagtgccatcagcgccgatcatggcacgtcgatcggcgccgccggtgatttcgaagcccggtaccatgcgatcgtgagcgacggcttgcccgcacaggaagcggaattccgtttgttctttaaccagcgcacgcatgaatcgttcagtacgctgctgcacctccttgatgaggaacgccgcagcatcaccagccgcatcctgccgctgaacgggatcctttcccaggtcaatttccacgaaggcagctacctggaactggacatcaagcagacacttcctgccactgccaagcagttcaaggacgcgatccagaacgcactcaaggccaagcacgcacgcccgtcccggggagccgcgccgtccgaggtggatgaggacgccgagctcactgcccgttacaagtcactggaaaccctggtgaagcggctcggctcgcagacccccgaggaccggcgctggcgttccgaggtcctcgatgttcgcgggcacctcttcatccagtgcaaggagcaccgcgaggtggccggagcgtcaggcaggaagaagacggaagtcttcatgcatgcggacaccggctccatgtccggcggcgagcgtcagcgattcaccgccttcatcatggcggctgccctgagttaccagctgggcatcgccgagcagggtttcacgacgtacggcaccgtgatgatggacgaggcgtttgtcctggcgtccgaggaattcgccggggcgggcatcaaggcgctccacgaatttgggttccagttgctgttggctgccccggagaacgtcatcgacctgtcacgccacctcggctccgtcacggaaatcctccgcgacaagcgcaccaaccgtagcggcgtgctgaccgcgcccgtcatttcgggacgtgacgagcctggagcgtggcgttcggaagccaaccctgtggacatcgtcctccgctga

SEQ ID NO: 44068 - DNA, 705 bp, Xylella fastidiosa subsp. multiplex Griffin-1; identical to SEQ ID NO: 41844

SEQ ID NO: 44069 - DNA, 3435 bp, Xylella fastidiosa subsp. multiplex Griffin-1; identical to SEQ ID NO: 41845

SEQ ID NO: 44070 - DNA, 1218 bp, Xylella fastidiosa subsp. multiplex Griffin-1; identical to SEQ ID NO: 41846

SEQ ID NO: 44071 - DNA, 1359 bp, Clostridium sp. KLE 1755
atggaagcgctccttaccatagatgatgaatatcagtacaacaacttctttttaagcagggaagcatgtgtgcagattctggcggatatgtgcgcccggcggaggttccagctggaaaaggaagaaacggaaacagaagaggaggcgctggaagcggttccaaagcgtatcctgaactggctgctgcgggcaaaatggctgcggaaaatagaagattataccacgatgaccaccaacatagtcattcccgactatgcggcggtttttatcgctgcctttgaacagctggtgaaccagccgatggaggatacggatatttatatccagaacgtatatgccactcttttttccttcaaaaatgactccaggatgaatattgccatgctaaagaccgccctggtcaataccaggaagctgaataaggcgcttcaggatatgctccataatatggataaattctttgaccgcctgctggcaaaacagtcctatggggagcttctggaggagcatctggagggctacgtggaagaggtggtaaagagaaaataccacatcctgaaaacaagcgataatttttacatctataaaatggatatcaaacgctgcctgaaggaaatgcgtgaggatgatgtatggatagagcggatcagggcaaagcagagcgcgtctcaggacaaaaaggaaaaggagccggaaggcttttttaagaagcggcaggatgacgatgtgctggatctgattgaccagatcgagaggggcttcgaatctattgaacacaggataaccaatatggatcgggagcacagcaagtacatccgcgctacggtaagccgcctgaattatcttttaagcgatgaaagcgaccgtcatggcctggtgatccagctgctgaacaagctgggagagcaggaggaggacggagcgcagcttgcgcggattaacagggtggcggagaagatgaatctttccgcctgggaggtactgaatgataatcccctgtacaggcggaggcgtcggaagaattttgccggagatctgctgccggaggaagaaaacagggagctttccaaagaagaggtactgcagctgaacaagatccatcaccggtttaccaaacagcagattgaaagctttattgaagagcatatgaaggacggcgtgatggagacagggacgatggcccttgagagtgaagaggattttgaaaagctgatccttgcctatgacatctgcatgcgtaaaaacagccgttttgaggtgctcacctcgggagaacaggtggaaggcgaacgctttgcctaccccgcaatgatattcgttaagagaaaaggggaaaaagaggatgctggaaatatatga

SEQ ID NO: 44072 - DNA, 777 bp, Clostridium sp. KLE 1755
atgctggaaatatatgaacagctgacgcaggaggaacaggaaaagctgcaggatgtcatcaggcagctgtaccgtcagaccttcctgctggaaagaaaatatgataaaaaagcaggccggctgattgccaataaggatttttatttctgcgacaagcatatggagtttttgacggcatattttgcggtggcgggcgtacggctgaaccagaatacggagctgggaactatctggctgcagggggaggctaccatgggcgaacggctgcccaagcttgcaaccatctatctgcttttgctgaagctgatttatgatgaacagatggcggcggtatcctccagcgtgaacattgtcaccacctttggggagctgaacgggaaagtgggagagttccggctggcaaaaagcctgtcctcccttacagagataaaaagggcgctggcgctgctgaaaaaataccagatgatagaactgattgacgtgctggaggagctgaacgaacacacccgcattattatctatccctgcatcaacctggtgctgatgcgggaggatattctgaagctgcttaatagcttcagtgaggaagaagccgtcccggatgcaaatgaggaagaagaaggagaaatgccagatggagatacagcagacacagacaatgctgccggagagttcacagatccggacgccggatacacagacagcggtgatgcagatgccggatacacagacgccggatacacagatgccgagtacacagacacagcagctgactga

SEQ ID NO: 44073 - DNA, 3381 bp, Clostridium sp. KLE 1755
atgccgagtacacagacacagcagctgactgaggccggccgccagtccttcaaggcgattaccagaatcgcgctgaacaactggcattacattgatcataaaatactgacgctgaacaaaagcatcaacttttttaccggccattccggaagcggcaaatccacggtcattgacgccatgcagatcgtcctgtatgcgaataccgacggccggggtttttttaacaaagcggcagcggacgattcggatcgaagcctgctggaatacctgcgcggcatgatcaatatcggggaaaacaaccaggctgaatacaaaagaaaccacaatttttccaccaccatcgtcctggagctggagcagaccgggagcggtgaaaaggaatgtgtgggcgttattttcgatgtggaaacggcaaccaatgaaatcggcaggctgtttttctggcatcggggaggcctgctggaaaacagctaccggacgcaggagcgggctatggccatcggggaactaaagagttacctgcagcacaattttgccagggacgactggttctatacctccaataatgaacggttccgcaggaatctgtacgatgtttacctgggcgggctggatatggagaaattcccccggctgttcaagcgcgccattcccttccgcatgaatatcaagctggaggatttcgtaaaagagtatatctgcatggagcaggacattcatatagaagatatgcaggagagcgtcgtcctttacggccgtatgcgccgaaaaattgaggacgccatgcaggaaatcaacgagctgacaggaatcaaaaatcagttcgaccgttttgtggagggaaaaagaaataccgaaagctgccgttatcgtctggataagctgacaattctccagctgacagagctgatcggggagcttgggctgcgggtggaggtagggaaaaaggatcttctggcccagaaggaagccctggacgcacagcttgcactgaaggaggaatatggggccgcctacgatgagatcaaccgccagatcataggcagcgggtatgccgagctggaagccaagcagaagagcctggaggagaaccttgctctgcttgagcgaagtgaacgcaggtgggccgcgctttctgaaaaaatcggcagctgggaggaggaagagaacatttccaaccagacaatctgggatattgataaattccggaaaggaaccatctccggcgaggagctgggccgtctgaaaaagagcctgcaggaggtgcggaccgacctggagaaacagcaccaggaggcggcagccgagtgtaagagcctgcagaaggaagcggatctgattcaaaaggacctcatggaaatcatgctgggacggaaaacctaccccaaggagctggaggaggccagaagagaaatccaaaagggcctttacgagcagtttggcaaaaacatacccgtccgtatcctggcagatcttctggatatccgggatgaaaaatggagaaacgccatcgaaggctatctggcctggaacaagcttgccctgattgtggagccgaaatatgtgaaggcggccatggagatttacgaacagctggatgccaaaaaattctggcgggtttcccttgtggatacggaaaagctcatcgcccaggaatatcctgtccgggaaaacgcgctggcagaggaaatcgaatgtaaagagccttatgtgaagtccttcattcaatttttactgggaaatgtaatcaaatgcgaggatgttgcaaaactgcgccagtgtaaaatcggcgtgaccgcagactgcctgctgtaccagaacttccagctgcgccgcctgaatccggagaactataccaggcgcgcctttatcggtgaaaaaagtatgcgtaagcgccagaaggagctgcaggagcgtctggaggagctgaaccgcagccgggaagaatatgaagccatggcagcggccgcaaagcgcctgctggattttgaatatctgcaggaaccttccgaaaactatctggagctgttccaggatatggaggagaaaaggaaaaaagaagcccagctgcgaaagctggaaaaaaggatggaagaactcggtgcgggaagcgtggatatcctccgtcagcagcgtaaggaaatcatggaaaagcaaaaggtcctggacggtcatatcgacagcctgaagctgcaaatccatgaccgggagaaaaaaatagaagcggacaacgccgcctacatcgagaaaaacgaggagcttcttgacagacagagacagctgattggcgcccctgcctgggaggaggattttgacgcctggttttcccaggtgaagaatcccagatacgatgcgctgatccgccagacactttccgcaatcaccgaatcggaggaacgcctggaggcggagaaaaaccgcctggttgacgtccgctccgagtacttaagacgccaccccaaccgggatttctccgccagcgcggaaaataacggggaatatcagcagctgctggatgagctggcctgcgaccggatccgggattacgaagaaaaggcgatggagcaggccagggtggccgtggagcattttaaggaagacttcatttacaaaatccgaagcgccatcaaggaagcctatatccgccgtgacgagctgaaccgcattatccgcaagctgaacttcgggaaggaccgctatcagttcaggataagcaaaaacaaggggctggatggggaatattacgatatgttcatggatgaatccctggaaatcgatccggccaccctgtcaggatccgtggagcatcagataaacatgttttccatggatcatgagagcaggtacggcacattgatgaacgacctgatccatattttcatccctccggaaaatgccagcgccagggagcaggaggaagccaaaaagaatatggaaaaatatgcggactaccgcacctatctttcctttgaaatggaacagattgtggaaggcgaggaacgtcttgtcataggcttaagcaaaatgatcaagaaaaactccggcggggaggggcagaacccgctgtatgtggcccttttagccagctttgcccaggcctaccacatcaatctgtcgcccaagctgtcccgccgtcccaccatccgcctggtggtgctggatgaggctttttccaaaatggacgccgagaaggtggccagctgtatcgaactgataagggggctgggcttccaggctattatcagcgccacaaatgacaagatccagaactatctggagaacgtggataagacctttgtttatgccaatcccaataaaagaagtatttccatacaggaatttgaaaagaaggacttttcccagcttataaaggaagaataa

SEQ ID NO: 44074 - DNA, 786 bp, Clostridium sp. KLE 1755
gtgtatgagaaaaaagagtattatttgaaggctcttgccgggctgaaccagttaaatgaaccgatttacaaaagggtgttcagtaagcatttcctgggaaaatcgaaggtatttgagaatgaaattcagggagttgtaatcagcgctgccaggaggttccatcctgatgtggattctgatccggaggtaatgagcgccgaagaggttctgagtcagatttttgtggaaacctatagtcaggaattgtggataaagggaccgctcaggcttcaggtatgtggaaaagtttccggtttttcggagtttccgtttggcgtcgggctgaatgcggatatgctgaaaaatgcggagatttgccaggaacaggatatatgtaaggtagttaccgtggagaataaggcaaattttatgaagatgccttatgaagaaggcgccctgttggtttatacccatggatttttttccccgaaggaacgattttttctaaagaagctggagacggttcttaaaaagaaacgtgtggaatattttcatacgggcgatcttgattatggaggaatccggattttccagcatattcagaaaaatatatttccaaagcttcagccgttgtggatggatgaagaaacttttttgaagtatgcggaggaagcagcggcggtagaggaagcttacctggataagcttcgtaaattgagtgtgccggaaactctggaaggactgaaaaaatgtattctggaaaccggtaaggtgattgaacaggaatgtatgctatggaaggagtaa

SEQ ID NO: 44075 - DNA, 1419 bp, Clostridium symbiosum ATCC 14940
atgagactgatgaatgaaataccggaccggttttggagcttattccgctccgttaaccggcccgtctatatagaagcattactaaaaatcaatgaagaatacgaatacagcaattattttttaagcagggaggcgtgcatccggattctgggagagcattttgcccggaaaaaatacgttatctggcaggatgaactggaggacgagctggatacgctggaacctccggcaaccagggtgctgggatggcttttgcgggccggatggctcaggaaagtcgatgattacgcatccatgacggccaatatagtcatacccgactatgcggctgtcatgctggaagcgtttcgcagactccacagcgatgaggaagacgaaacccagatctatattcagaatatctatgcaattctgttttccctgaaaaatgacagaagagccgggctgagccttctcggcacggcgctggtcaacacgaaaaagctgaataagacgcttcaggacatgctgcacaatatggataaattttttgccggcctgctgcagcagaaaaactatgcaaatcttctgaaagatcacctggaaggttatgtggaagaaattgtcaggaagaagtaccatattttgaagacatccgataatttctatctctataaaaccgatattaagcactggatcggggagatgagggatgatgagcagtggctggaggctcttgtcagaaagagcgccgcagattcatacggcctgttatccgccggcaggacggcagaggaagaacagaaggccgccgagacgcggatgatggaggatatccttgaaaagctaagccagattgaacgcggttttgatgatattgaacacaggatttccaatatggacaaagagcattccaggtatgtccgcgccacggtgacgcggttgaattaccttctgaaccaggaggacaatacaaaggggctgattatcagactgctgaaccgcctggcggatgacggggagcaggagaacatgctcacggagacaggaaaacggatgaatctgtcccagatgaatatcctgtcggaggcatccctatacaagcgcagaaaggtaaaggccgatttctcaaagaatctggagccggacgaggaggataaggagctgaccacagaggaaattctcaacttgaaccgggtgaagaaccgttacagccgcagcgagatagagaattttatcacgcagagagccgtatcggggaaaatggaggcagatgcggacaccgtatcctgtgatgaggaatttgagaaactgatccttgcctatgactattccacgagacagaaaagccggtaccttgtggaggaggaagaggcggaaatgatagataacggcagataccgctatccgaagctggtatttgtaaggaggaacgaatga

SEQ ID NO: 44076 - DNA, 690 bp, Clostridium symbiosum ATCC 14940; identical to SEQ ID NO: 42732

SEQ ID NO: 44077 - DNA, 3375 bp, Clostridium symbiosum ATCC 14940
atgatgatacaacagacgaagactgacagggagcgctttgtggcactttcccgcatctgcctgaataactggcattatatcagccggaagactctttccttcagcgaagaaatcaactttttcaccgggcactccggcagcggaaaatcgactgtgattgatgcgatgcagatagttctgtatgccaacacggacggaagaggctttttcaataaagcggccgcggatgattccgaccgcagcctgattgagtatctgagaggcatggtgaacataggggaaaataatgaatttgcctatctgagaaacagaaatttctctacgaccatcgttttggagctgaaacagacggacacggaggaatgccagtgtgtcggcattgtatttgacgtggagacggcttccaatgaaatctcgagaaagtttttctggcataaagggcctctgtgggagaacaactacaggacagaggggcgcgccatgaccatcgcggaggtggaggaggagctgctgcgttcctatggaaaagaagagtgtttttatacctcccataatgagcggttccgcaggcttctctacgatgtatatctgggcggccttgatcaggaaaaattccccctgctttttaagagggcgataccattcaggatgaatatcaaactggaggattttgtaaaagaatacatctgcatggagcaggatatccatattgaggatatgcaggaaagcgtgatgcagtacggcagaatgagacagaaaatagaagatacctgccgggaaatagaggaactcaaagagctggccgcacaataccgtgaggtacaggcccaggaggagcagattcgggcgaatacctatttcatgaataagatggaaataatgaatcttcgtcttcaggtgtccgagatatccgaccgtatcggacaggcggcctccgatctggataaacaggaagtattggaaaaacaggtggtgagtcaggctgcacagttgaaattaaggagcgacgagctgctccggcagattgcgtccaccggatacgatgagctgaaggataaactcctcaatctcaatgaactgctggaacatctttcaaaaagcgcggacaaatggcagaggacggcggaagggctgaaggcgtgggtcgatgaggatgtcacatccaaccagaccatctgggatatagaggaatttgaggcccgtaccatcggcagggaggcgcttatccggctgaaggcatccgtggaggagatgcgggaggatgtgggaagacagaaacaggaggccggttcaatcctccgtgagctgtcaaagcgggaaaaacaggcctgtgaggagcttagccagttaaaggccggaaacaaggcatatccgaaaaacctggagaatgcacgggcatatattaaacggcggcttctggaagagtgcagaagatcggtggaggtccatgtcctgtccgaccttcttgatatcaggaacgatgagtggagaaatgccgtagaaggctatctggcgggcagcaagctgtctctggtcgttgcaccggcttatgcaaagacggcaatggagatttacggggagctggaccgcagggagtattggaatgtagctgtcctggatacggaaaaagcgtcaaaagccgctccgcctatatttgaaaatgccttgtcaaaggaggtggaggtgcgggaggattaccttcggcccttcattgatatgctgctggggaaggtgatcaagtgccgcggcatagaggaacttcggaaaaacaggacgggaattacgccggactgcatgctttaccgcaattaccgcctgcagtatatcaatccggatcattatacgaaatgggcttatatcggaaaggcgagcgtgaagaaaagaatccgcctgctggaagaagagatagaacagtgccgtgcacagaaaaaaccgcaggaggagcttcaaaaggaatgcatccggctcctggggcttgagaagctggaaagcagtgcggacacttatcttgaatggctcctcgatatcaggcaggtaaaggagaagaccagggagaaaaagcggctggaagataagcttctcaaactcagggaacagaatatcgatgagtgggagaaagagcgggaggcggtcgaggccctgcgctttgccaaagaggaggggatccgcgagacaggcagacagatagaccgcagccgggatgaactcgagagatataaaaaagaggccgtatggcagcagggagagctttccgaccgggagcgcagcttcacaaaggtgcaggagctggaggaccggttagacgaatttctctccaaacgtgaaaatccgaggcttgacaaactgggggattatttcaaaggcagggcggcagcggcggcggaagcaagggaccgcgcgtttgaacagctgctcggccgccggcttgaatacctgaaacgttatccgaacaggagcttttcacccagcgcaaaggataatgcggcatacgacaagctgctcgatacgctgagctgcgataaccttgagcattacagggaagcggcggcagaacaggccaagacggcggtggagcattttaaagacgactttatgtataaaatccgcagcgccatccgcgaggcggttcagcgaaaggatgaactgaaccggattatcagcagcctgaatttcggaaaggacaaatatcagtttgtcatcggcagaaacaggggagccgacggccgtttttacgacatgtttatggatgaagcgctggaggtaaatccgtctaaactcagccagacctttgaaaaccagatgaatttctttacaatggagcatgagaaccagtatggtgagcagattaatgaactgattaatatcttcatcccgccggagaacgcttcggcggaggagatggaagaggcccgcaggaatatggataaatatgccgattaccgtacctatctctcctttgacatgcagcagattattaaaaatgacgatggaatcatgaagctgcagctgagcaaaatgataaaaaagaattcaggaggcgaggggcagaatcctctctatgtcgcgcttttagccagctttgcccaggcgtaccgggtcgggctgccgccaaaactgagacggagccctaccatccggcttgtggttttagacgaggccttctctaaaatggatgcggaaaaggtggcaagctgtatccagttgatccgggatctgggcttccaggccatcatcagcgctaccaatgataaaatccagaactacgtggagaatgtaaataaaacgtttgtctttgccaatccgaataaaaaggctatttccatccgtgagttcgagcgggaggagatgccgcagctgatgaaagggttggtttag

SEQ ID NO: 44078 - DNA, 1500 bp, Bifidobacterium bifidum ATCC 29521 = JCM 1255 = DSM 20456
atggaacggctgaggccggtctatgaaaccggcgtgctgagactgctgctccgtcagaattcgatgatgtacgtggcgctgctccgcgcggccttcgacccgttgaccggcgagctgccccgtgagaccctggaggaaagcttctcgcaaagcctgtcccggctcgtcgactccggcgaataccagctcagggaggatcagaccatcgcggacgcctcccggcgcatcctcgccgacctgacccgtgagggcgatgacgattacgcatggctcgccaactcgcatgacgccgcatcgcaccggttcctgtaccgtctcaccgcccgcgcccatcgtgcgatcgaggcgctgtcgcggcttgaggatgactcccgcacgctgtcgggcgcgcaggcgaactcgatcatcatggagatcgagcatgcgcgcatgcagcttaccgccgaccccggcgagcgcgtggcgttgctcaaccgggagatcaaggcgcgcaaacacgagatacgtcagatacgccacggtcagcggcaggcggcgctcaccgaatcgcaggtcgaggacgtgattgcagtgattcacaacacgctgcgcggcgtgcccatagacctgcgtgaactcgtgttgaccgaacgggacaacggtgacgcgctccgccgccgcatgcaggcgggcgacatgagcgtcgacgacatcctgacctcgtaccacgacgaataccgcaggtccttcagcgagtccgacagcggaagacgcttcgaggacgcgttccaggtgatcatcaccgacgagggacggcagcagatcgacgcggccctgcgcgacatcgcccacacgccgtatctggccggcgagtccggcgtcctgctcgatcaggtgcgtgccgagctttcgcgcatctatgacggcatcgaggcggtgcgtcgccagatgcgcgtatccgacgaggcgatcagccgtctggtgcgacagcagaccgatacccgataccgcacgatgctcggcaagctcaaccgtctgtatgcccatgtcaacgccgacgcgaaggcgcatcagggcgacgatgcgagaccgtaccggaccgataccgcggccggcaggttccctccgctgccgtcgcgccccgcgcgcccgatggtacgaacgaccaccccgggattgtccgtaccgcagacaccgggcgatgcgaccgcgcccgacctgcgttcgatgatcgacaacgggggaccgcggctgcggcgcatggccgcgctcatcctcgaatcgcccgtctacgcggacgacgggaacggcgccatcgacatcgtcgccagcttcaacgggctgccgaaagccgagcggaaggaaagcgagctcgtcggtttcctgggagagctcggctgcggggacggagccggtgtcgcatggcattgcatatcggcagacggaagcccgagggactggatcaccggtccagtgctcgcacaagaggatgaattgcacgacatcgtgaaggaggactga

SEQ ID NO: 44079 - DNA, 1038 bp, Bifidobacterium bifidum ATCC 29521 = JCM 1255 = DSM 20456
atgagcgacctgacgaacgacaccgcccagccggacgcggacatggacatgattgacgacgacatgaccggcaccgacagtgccgataccgacagtgccgataccgacagtgccagtaccggcgcggatgacatgggtgcggtggacgtcgaatacgatggcgcggacgcggaaggcgcggtcaacccatacgccctgttcgagggcgacacgggcgacatgaccgccgacgcgcgcatggtggcgatcatgctcaaacgcgagcgctacatcagcggacgtttctatgacctggcgctcgacaaccgcgcggcggtcatccgttcgctcaacaacgacctgctcgatctggtcgtcaacgagcactaccgcgtcatgtacgccaccgcggtgagcgggccggacatgacgctgcgcgcgctcaagacccgtgcgagcctcaaacgtgaggaggcggcgctgctggcgttcctgcgcatccgcgtgctcgaatacgagaacgcccacgtcgcgccggacgaatggctggtcagcttcgaggagatccgagcggcgctcgccaccggcgccgggtacctcgcctcgcgcaacgacgaggagggcgtgctcaggcaggtgggtgcgatcgtgtccgtcatgtgcacgtacggctatctcaggcagctcgacgatgacgagacgatgtaccgcatcacgccgctggtgccggtggtgctggaccgtcagctggcggacagctggctcgcagtcgcggaccgggacgacgatgacgagccggccggtgacatggccccggccggctcgcggtctgcagccggcgatacgtcgaacgccgatgcgagcggcgccgatgacgatggcgattcggacgatgcgggacccgacgccgaactgttcgaggctccgctgttcgatgatgacgccgatgcggacgccgccgaggacatcaagggcgccgatgatgccaatggcgcgaacgacagcgacattgacgacgagaccgcctcggacggcggcactgcacgggaaggggagtga

SEQ ID NO: 44080 - DNA, 3591 bp, Bifidobacterium bifidum ATCC 29521 = JCM 1255 = DSM 20456
atgagcggcaaggacatgcagatgatcgccgaccgatggatgatggaaagcaggaggctcgtcaactggggatcctatgagggctaccatgagttccgtccctccacggactcgcaactgccggtgacgttgctcgccggcgcgagcgaatccggcaagtcgacgctggtcgatgcgcagatatcgctgctctacccgaccggcacgcccttcaacaaggcgtcgaattcggggcgttcggaacgaagcgactacacctacctgcgcggcatgatcggcgtgggaggctccgacggcgtcgacgaaccgatgtacctgcgcggccgggacgagtccggcgcgccccggtccatatggggcgcgatcgtcgacacctaccgcaacttcaccaccggtcagatactgtcctgcggcaagttcctctatctgatgcccggcgacgggcgcggcgacgtccgacggctgtacctggcatgggacaagccgatcgacccgcgccgcatggacgtgttccgcgagtcgtcgttcacgcccacgcagctgaaatccacgtatccggggtgcgtcaccttcccgaacgccgaggcgttccacacccatatttgggatgtcatgggcctgagcgcggaggcatgccgtctgctggcccgcatccagtcggccgacgccccctcccgccttgacgacatcttcaaacagggcgtgctgggcgtgcccgaggcgctggacctggcccgtgcgaccgtggaggattacgagcgttacgacgcgaacttccgaagcatggaggaaaagaccagacgcatgggcaagttgcgtgccatcaccgccagctatgacgactacgagtcggcccgtgacgcggtccactcgttcgacgcggtgaacccggccacgaagtccggctcggcgacgatccgagcatgggcgatccgccgcatgatcggcgaggtcaacgaacggcagccgctcgacaggcgtctgcgtgacgagcgacgcagtgaggcgcgggctgccggcaagcgcatcgaaagcctgcgcacccgcatcgacgcggtgcgcgagcgcatgcgaggcctcgacggcggcgacctgacacggctcgacgcggaaatgcggcaggcggaacgcgcgctggcggacatcaccgccggcagacagcgcatcgggcgcatgttcgaggcggccggcgaggagttccccaaagacgagcacgcgtgggacgagcggcgcatcgaggccgtgacgttcatgcgctcatatgagcagcgcaagggactgctggacgacatgcgcaaccagacgtacgccgcgcacgcgtccgtcaagcagacgctgcagcggctgaacgacgattatgaacgccagaaatcgcagcgcacccgcatctcccgccagatggacgagacccgcgccatgctgtgccgggccaccgggctgggcccgagcgaactgccgtacgtcgcggagctcatggacgtgcgcgaggatcaggagcattggcgcctcgccatgaacgccgcatacggatccatggcccagaccatcctcgtcgacaagcgccatgagcgtggattcgcagccaaggtcagcgccatcgacccgcacgccatggcgcggcgcacctggcagttcgtcgacaccgaacgcgggggagccgggaacgggcccggcggcgcgaacacgggtgcgaccggcggaacggccggagaggtgtggctgtcctcgaagctacgctaccgcgaggattccccgttcgccggctggctgcgcgagcagaccagctccgagcgtctcgacgccctgtgcgtcgacggcatcgacgactccgaccatgccgtgcggcaggtgcaggccgacgggcagatcaaatccggcaaacgcggccagcatggcatcaaggaccgtcagcaggtcatcggattcgtcaacgaaagctatttggcgcaactgcgcacgcgcatccaggacgcgcaacgccaatgcgacgagaccgcgcaatcgtacgcgagcgcgaaggaacaggccgaccgcctgcagcgagagcgcgaactcgccgaccagctcgcatacaccgcatgggagaagatcgacgagaacagcgcgaaggcggcgatcgccgacatcgaacgcaccatcgcctcggtcaggaacaatcccaagctcgccgaactcgacacgttgcaggagtcgctgtccaaggagctcgaccgctcgcagcgccagcgcatcgacatcgaacggcaggccgagctcgccgatcaggcggtgaacgcagcgcaggcatggctcgacgagcatgccgcgcagccgcagccgcaaccgcagacgcggccgctcgatggggaagcggcggacgtttcgccaaaagccgtcacgaacggacggactctcctgacggacgaggtggaggaggcgctcgccgaatcatatgagcagcgtctctccggtctgggggatgcgacgacccgcgcccacatgatcatcggcgcgggggcgccgcagcgtatggctcagggggataccttcgccgaccgtatcatcgccggcatcggcaaggacctggaggcgcgcgtctccatgctcgaaggtcgtgcggcatcggcccgcaccgccgtcgaggcgcggatgggcgcctatatcgagatgtatgcgggcggtgacgatacgatcgccgccagcgtggacgactaccggtattaccaggacgagttggaaagcctttcgaagctcgccaccgtcgaagccaccgccgtcgaataccacaactgcctcgacaagctgctgatgagcttcctgaccatcaaacgcgcgatagacaccgacgccggagacatccacgaccagctggaacgcatcaacgcgatgctggacggccagcagttcggcccgcaccacggcagcctgtccctgcacgcggacgtacggcgccccgagcgcgcgttctggtcggccctgacccgcgtgatcggcaccctcaacgaccgcaaggcggcacagacggacgacgatcttgacggggcccggtgcgcgttcgcgtcctgcgccgcgatgatcgacatgctgcgccgcgagatcgggcagatcagggacgtcaacggcgtgaaaagctacggcgcccgcaacctcgacccgcggtgccgatcctcgttctacgcgctcgtgcgccactcggacgggcaggtcgaacgcatcacctcgaccggcggacggtccggcggcgccctgcaggagctgacctcgttcgtgtacggcgcggcgctgatctacctgctcggcggcggcatggacaacaagctcaagccttcctacacgacgctcttccttgacgaggcgctcatcaaggccgacggccggtatacgcggcgcgcgctgtccgtactgccgagactgggtttccaggtcatcgtctccgcccctgaaagcaagacgggcgagatactggaggtctccaccaaggcatacgtgacccgcaaggaccccgacaccggctacaccacgctgcacgaagccagactggacggcatcgatgagacggaaggcgcagatgagccggaaggtaccgtcgagtcggatgacgccgccgaatag

SEQ ID NO: 44081 - DNA, 1455 bp, Pseudomonas aeruginosa VRFPA03
atgagcttgcacgagcagcaggcgcgttttaggcgattgctctccgagcatgcagcttggcgtctgctacgcgctgagaatgcgtccatcgttcttgccttcatcaatgatctattcgctcaagacagcgaagtgccgtttgggaaagcacgtgtcgcgctggaggccgagctgctgatctggcaggaggtctatggcctgcacgataacgcgggcacctatctgcgccaatggatccaggcgggctggttgcgtgagcttgatgacaagctcacgcgaaccgatgccttcgagttagcactgcgctttgcccagagcctggatcagcgagacagtaacgccacggcctcgcacctgcgcattgtgcaagacgccgtacgagacttggctgtcgccctgagcccaaaccctgaagagcgaatcactctgctgactgcccgccggcaggaacttgatctggagattgagcgcttgcagatgggcgaggtgccagagctgagcgcgccggagcagcgagagcgcatccggggactgtatcagttgacgtcagtgctcacgggcgactttcgccggctggaggacgaaattcgccaactcgatcagcgcatgcggatccgcatgatcgagtcggagtctgggcgcggtgaagtggtgaaggcgctgatagagcatgaaggtgaactgctccagaccgatgccggacaggccttcgacggcttctatcagttgctctgtgatcagaatcgaatcactgagttccgtgagcaaatccggtcgatcttggcacgtccggcatcccagtatctgaagtcagacgaactgcgttacctatcccatctggtccgcgagttgggcaaggaaagtgagcgggtattccaggttcggcgccggaccgaggagagcctgcgggcttttgtagaaagcggcgttcagcaagagcgtcgtgcggtcgaacgactgcttcgccaactggagcggctggcggtgaatttcaaggaccaggagttgagcctgcgcgagccggtggttgtggacgtccccacgggcagtctgcgcgtgcgttctccgtccagtattcacctacgactacctgaagaacgcctggatacccggcaggtggccgcaaataccaatagtcacgtcgccagtctcggcatgctggatcacctcaacacggtcaaggtgctggaagtagcccaggatgtgaagcagttgctcactgagcacggcccgatgacggtggcgagcatcgttagtcaccgccccatcaccggaggattggaagaactggtggcgcacgtgcggatcgccaaagcagtcagcgctgtggtgttggaacacccagaaagtctggtggtagtggatcggaccggcaattggattcgggccaatattccctctttgctgatgtccgccgagcagtttccaacggatttggaggaactcgccttatga

SEQ ID NO: 44082 - DNA, 756 bp, Pseudomonas aeruginosa VRFPA03
atgaacgaagaagagcagcattcccaacaggcccctgccctgttcgaccagtatcgaacgaatcggcctgaaacgccgtcaatcagcggcgaggtggagacgtttgaggatgctcccgttgagcggcccgtcgttgggggggctgaagtcggcatgccactggaagcccggcgcgctctggtgctgttacttcgccaaggggtggtgatggccgaaagcaaacgtctggcgttcgaagcgctgtgccggcacgagggcctcatcgcagagcacttgggcaacatgttcatgcgcatgttgctggacatgaaggccggtatcgccatcctgctccagcaggaggtggcagagcaggacgaggagactgacgaagcgtcacgcttgatcaacaaacgcacgctcagcctctatgacacgctgctgttgctggtgctgcgtaagtactaccaggagcgagaaacagcgggcgaacagaagatcatcattgatatcgagcggatcgaggcattgatgacgccctttttgccgctgacctacagctcccgctccgagcggaggacgctcaacggatcgcttgccttgttgaaagataagcgtctcatcagtgcggttcgtggggatgacgagcggtttgagatcacctctgtgatccgctatgtcgtcaatgccgattttcttgaacgtctgttgaaagagtacgaacgcctagccggtaatgcgggcgtcaaaacgggcgacgaggtgcaggatgcttga

SEQ ID NO: 44083 - DNA, 2865 bp, Pseudomonas aeruginosa VRFPA03
atgcttgaggctagcgaggtaagtctgagtgagttgttcagcaccggtcagatccgtctagccgagctgtcggtatacaactggggctccttccatggcctgcactccgcgaagatagaccccgagggcaccctcattaccggtgacaacggtgccggtaagtcgacactcattgatgggttgatggcgctgttgctgccctccagcaaggcgtcgttcaacatcgcggctgctcaaggggaccgtacggatcgtaccttgatgtcctatgtgcgaggaaactatggcaaggcccatgatggcagcgagacggctacgctgctgaaacgctcaggggcgaccgcaacggggcttcgggcactgtaccaagcggacgatggttcgaagatcaccttggcggcccttttctggattacccaggccagcaactcgctcaacgacctcaaacgcctttttgtggtgggtaagcgcgatgtgggcttggatgagctgttgcatctcttcggtgagggcaatgcccgtgtgctgaaacagcacctcaaagaggacccgctggtcgaggcattcgattcgtttaccgagtatcaagagacctatgtgcgactcctgtgcatggagaaccgtaacgctccagccctgctctcccgggcgctgggtttgaagaagattgatgacctcaccagcttgattcgagatctggtcctggagcccagtcaggtcaaggagcatgcccggcttgcggtcagtgaattcgatgacttggtcagcgtccatagcgaactcgatgatgctcggcgacagcgggatgccctgattgagttgccagagaccagccaagcgctaaatcaggccagggaggagatgcggcggatctcagttgagctagccggcctgccggtctactttggcgaacagtgctctcgactgtggcaaatgcgcctgaagaaatatgaggcggaactgcttcagttggcagaggaaatgacccgccttggcgctttggaggagcaagcaacggaacgggtacaggcattgttccatgcctaccagtcgcaaggtggtgagcgactggaggggctgcggaaggacttgaaagcggcaacgcaggtgcatcacgacagcgtgcgcgatgcgcgcctgtatcagatggatgtacgagaccttagtctgcccgacacgctgtcgctcgacgtattcaagcaaaatcaggtgagagcgcaaacggaactggcggatatgccggcgttacgtcaagcgcgccaggatcagttcgcttcgtcggcagcgaacctctcccgtgagcaaacacagctcaaggagctggtaggtgaaatcgaagacatggagtcgcgaccggactccaacattgaaccttcctatcagaagctccgcgaccaactggtagagagcttgtcgctagatcctgcggaggttgttttcgttggcgagctgatcgatgtcctggaggcgcatcgaccttggcaaggcgccattgaacgggcgctgggagggcatcgcaccacactgctggtgcctgatgagcgatatcgcctggtgaccaagtggctgaacactcgccacacgggtctccatgtcagggtgcaggttgttcggctgaaccagcatccgcaggttgctgagttcctaccggatggctttctaaaaatgttggattggaagccgcacccctatcgtgattggctgaaaaagcacctctcacgcttcgacctgcactgtgtggaatcgactgaaatactggaccagaccgacttctcgatgaccatccagggcctggtgcacctggataaagggcgatttgagaagaaggaccagcagcgcattgataacccacgtttctggtgtttgggattcagtaacaaggggcgtctagcggcgttaaggaaggatcgtgtcgagttggaggcagaggtcaagaagttggcccagcttacagcagatgcgcgcatggccatggatgacctcgagaagcacactcgggtgtgggagcgcatcgcccagctcacctgggcggcaattgatgtccagtcagcgcaagatcggatgcagtcgctgagggcggatctagaggcgcttgaacggcctgatagtgaattgggagtggcgaaggctcggtgggagcaggcaggtgctgagctgaaggaagtacaaggcaagaaagaactggtcagcaaaaaagtcggggggctggagagcgacaagctcaaggcgaaccaacaactggagctggcgttagatgccgcccggaccggtttggtggatgaggtcagggagttgctttctaagcgtgtgggacagctagaccttgacgatttggagatggtttcagaactcgaaaatcgccatcgatcagcgctggaagaggcccgtaagggggcccacaaccgagagtttcgagcatcgaacaaggctagcgggattgtctccgagttcaaaacaaaatggccgctcatcgccaatgattggctcgccggcgtggatgccctagaagagtacgtcgatcacctggcccatttggagcaggaaggattgccagacctggtcgagcgtttccgagagcgcttgaaccgcaacgcaacacagtcgcttgctcgaatcagccaaaccatccaggccgaacgtgaggacatccaggaccgaatcgaaacgatcaacgatgttctggaacgcacggagtttcggcagggaacctaccttcgtctgggaagtcggccagaaatcttcgaacacgtgaaagcattcaatgcacagttgatgcgcgtgctggcgcgagctggaagtgacgatcccggcggggcggctgctgctcctcgaagtagatgtgaatcttcctgcaaaccatcctga

SEQ ID NO: 44084 - DNA, 994 bp, Leifsonia aquatica ATCC 14665
ggcgggcggcgtggagccggcccccggcgaggcggtgcgccgccagctccgcgaagtgctccggctcaccgcgtcgctcccggaggacttccgccggctcagtgcgatggtcgagcagcggcaccgtgaggtcgcccgacgcgcgaccgaggaccaggtgggcaagggagcgctggtggagcagtacctgcgcgacaacgacctcctcgagcagacgccggaggggcgcgcgtaccgcggtttcgcgtccatgctctcctcccacggtctcgacgggatgcgtgccgacctggagcgcgtgctggcgcagccgctcgcgatcgccgagatgaccgagcgtcagcgtctgcaactggagaccctgatcggctcgctcctcgccgaggagcagaccgtgcaggagacgtacgtgcgctggatgtcgtcgctgcgccggttcctcagccggtcgggcgccgagaagcaccagcgcctcctgtccctggccgaccaggccctcgcggccggcgcccactgggcccaggtgcgccccgggcccgtctcggtgcccgaggacgtgctgagactcggcccgtgggcgctcaccgacgtcacccagacgcaggtctggcgcggcggcgagcggcccgacatcgcggtggccgtcaccgagagccgggacgcgctgccggcatcggagcgcgccgccctgcgtctcgcggtcggcaccagtccggacgcggtgcaggagaccatcgagcgcctcctcgccgaacgcgcgcaggtctccggcgcggaggtctacgccgcgacccctccggagttccggcgactgggcctcctggtgagcctgctcgacgccgctgccgaacgggactcggtgctcgacggcgtcgacaccgtgcgcatcgcggtggagggcgagaccgagcgcgaagtgaccttcccgcgcacccgcttcggcggcgcggacgatgagacggccgcgacacgcggcgggaggacggagcgatga

SEQ ID NO: 44085 - DNA, 705 bp, Leifsonia aquatica ATCC 14665
atgaccgacacgatcgccgacgacacggatctcgacgaccgggcggaggccgtgacggccgacgcgttcggcgacgccgccgacgagcggctccccctgcccgcccgccgtgctctcgtcaccctcctgaccagccggttcatcacgcgggccacccatcccgaagcatggagcgggctcgtcgactacgaggaggacgtgcgcggccggctggaggagctcttcctcaccctgacgatcgatcgcgaccacgaggtcgccttcaagcggcagagcgccgaggacggcgcccccgtgctcctccgccgcgagaagccgctctcccgtgacgcttccctgctgctcatcctgctgcgccaggagcacgcgtacacggacgcagccgacgatgccgtcaccgtcagccgcgaccacatcgccgagttcctcgggcgcttccagacggacgcgtcgaacgacgaagtgcgcgtcgaccgccgcatccgcgccgcgatcgccgccatggagcgcctcgggctgctggtgcccgagtccgacgaccccgacctctacgtggtctcgccggccgtcgtgccgctggtcaccacgaccgagctggcccacctgacgcgactgttccaggaggcgagcggagcggagctgcgcgaggacgccgccccggagcccgcccacgcccacgtcgacgccccggaggtggacgagtga

SEQ ID NO: 44086 - DNA, 1111 bp, Leifsonia aquatica ATCC 14665
gtgaccgacctgatgaccgccgagcacgacgagctggaggaagacctccccctcgccgacggcctgatccacagcggccagttccgcatcgaacaggtgcagctgctgaactggggcagctacgacgacctccacaccatgccggtcgggcgcggcggcctcgccatcctcggcccgacgggccgcggcaagtcgaccgtgctcgatgcgatggccgcggtcatcatgcccaacccccaggagttcaaccgcgccgcgcgcgacgacacccgtcagcgctccgagcgcacggtgtacagctacgcccgcggcaagaccgacgaggtgcgcgaggcgggctccgacgtcacgaccacgcacttcctccgccccctcggtaccgcgttcgcgtcgggcgccgcgatcacctggcgcaccgaactcggtgagaccatcaccgctgcccggctcgcgtggctcggccgcgacaccgccacgcaggacgaggtgacctcctcgaccgtctacgtgttcgtgcacggggagttcccgctcacccggctggcggagctgcggcccgagcccggcagctcgtcgccgctgacgcggggatcgctcggccggctcgtggacccggtgcgcgacctcgtcaccggatcgcagcccgagttccgcgtgcgcctgtgcgaggagctcggcatcggcggcagcgacgaatcccagctgaaggcgctcaccctgctgcgccgcgctcaggcgtccaagggcgtcttctcgatcgacgagctgttcaagcagttcgtgctcacggaaccccgcgccctctcccgctgggagacgacgctgagcagctaccgcgaggcgtccgccctgtacgacgtcttcgagaccacgcggcgcaagctcgacgtgctctccgacgtaccggtgcgcgccgagcagtaccgcgctgcgctggaggacgcgaccggcaagcgccggctgctcgcgccgctggacggagaggagagcagccggctctgggtctggctgtcggcgagggtcgcggactgggtccgcggcgaggtcgaccgcgtgcgcgacgccaagcgcgagcaggaggccctccgccgcgccgccgcggacgaggaga

SEQ ID NO: 44087 - DNA, 1443 bp, Oribacterium sp. oral taxon 078 str. F0263
atgaggatttttgaaatcattccggagcgctttttcagcatcctcagcgcacagaaaaaggagctttatgtggatgcgctcatggtgctccggaccgcctttaagacggagcttctgatccgccgtccggagcttttctccatgatgctggactctttggaggacagctttctctcggcggatttctccgaggaggccatggagatcggagaggagggggagagccaggatctctccggcaaggttcacctcctgctccgtaagctccgggactgcggctggattgagatcgagtatgagcctggctcttttgaggagatcgtgacggtaccggactatgcggtggccttcatggatctcctctatgatttttcccatgagaggatccgggagtacaacagctacgtatatgcgagctatgcggcgctcaaaaatgcgggagagaatccggactttcagcttcaggctcttctgagcgcccatcagaacacggaaaaactggtggatgagctaaagagcctttttaatggcatcaagcgctactatcagcgcctcgccgggcagcaggacatcaatatccttctgagagagcatttggatcaatacaaggagaagctctttgatcagatctactatccccttaagacgatcgattccgtgccgcgctttaagggggagatcctccgcattctgaatgcctggagtatggatcgggaggtcatggaccgcatcgtcggacaggggatccggagaaggctcttctcctcggaggagcagggcagagaagagagctatgccatgctgaatgccgtcatcaatacctacgagaatatcgaggaactgattgccggagtggatgcgaagcacaacgagtatgtgaatgcctccattgacaggattcgctatatcgtaaatgcagaccggagcgcgagaggaaatctggtggatcttctgaaaaacgccgggagagaggatattctcaatgagatgagggggaagctcctcctcagccggcaccgcttcctggacagccagtctctctaccaccggatcaaaggggagagaagggagggggaaaaggcgaagcctctcgaaaggagagtggagagccccgccgcggtggatggctttctcacggagcttcgccgacagtacagcgatgcgaagatcgatcgctacatcctctcgattatgggggagaggggagagctttacagcgaagaggcctcgatccgttccccggaggacttcatcctctttctcctcggcacgcttcgaggggaagaaaagagggctcccttcagtgtagagttctttcaggggaatgtagagcgaaatggctgcagcctgccgcggctttgcttccgggaaaagggaaggaaaagagcggacagaggagaaggagagggagaaggagaggggaatgctggaggagcagtttga

SEQ ID NO: 44088 - DNA, 672 bp, Oribacterium sp. oral taxon 078 str. F0263
atgctggaggagcagtttgaaaagctgaatatgacggagaaggagcagttccggagaatggtgaataaacttcttgcccacagctaccttctctcccgaagctatgacttcacagatcatatcgcaaggacaaacccggagtatctctttgtggagcggaacttcgagctttttcaggaatatttttcctacagtgcctttcatcttgagagggataataattacggcgtgatcagccttcagagcgagtatgatgaaaaccggctgagactcgacaagcagagcacgctgatcctctatacgcttcgcctgatctacgaggaggagagagagaagctctccctctcgcgggagatcttcgtcagtgtcgcggacctcgtgcacaagatgatatcggtcggtgcgatccggaagaagccctcaaacctggcgctctcctcctcccttcgcatactctcgcattttcgcctgctggaaaaggcgggaggcaggtgggaggacgcggatacgaggcttttgatcctgcccacgatcctctttgtggtctccaacgagcagatcacggggatgcacagacttctcgaggagggggacgggaatttggcgggggaggaaagcgagtcccattcggaggagggagaagagttttccgcggaggacgaagggaaatga

SEQ ID NO: 44089 - DNA, 3420 bp, Oribacterium sp. oral taxon 078 str. F0263
atgaagaagctgacgagaatgctcatgatccgctggtacagctatgagaaggaactgatcgactttgatatgatcaatttcctgacggggaagacggcggccggaaagtccactattatcgacgccctgcagctggtaattctcggagacagcagcgggtcctattttaataaagcggccaatcagaaatccgtccgctctctcaaggggtatctctacggggagatgggggatgatggggatgcgggctatgagtatcttcgcacggggccgttcacgagctatgtcgcactggaattttatgatacggagaaggggaaatactttacggtgggatttgccgcggactgcgggagggagctttcggtgaattaccgctggtttctcatcccgcagaaaggaattccggagaactgcttcatcgacgagaggacggacataccctatgacctgaacgggctgaagctttttctgaatcgctatgcggggaagaagggctttgaattctatgatacgaatcgccgctatcaggaggtcacggagggaaagttcggccagatcaagaggaagtaccggctcctttttaaaaaagcggtgccctttacgccgatcacagatatcgaaaaattcatcacggagtcgatctgcgatgtgaagcatgagatccgcgtggaagagatgcagagcggtatccgccagtacaagagcctggaggatgaggcgaagcggacgacggaaaaggtggaggcgctgacggagattcgggttctcagtgagagatatgaggcggaaaaggagaagctgaagcagcagcgctatatcgtggtccgtgcggaaaaggaggggtatctccgggaggaagagggcttaaaggcacagcttctggagacagagcgactttttcgggagacggaagagaggattcagtctctgcggagagaaggggaagagctcttttgggagctcgaaaagctggaggaggagtatcacggctccgaccttgtaaagaaggcgagggagctggagggaaggatatctgaggcggaggaggagatccgggcgcttcatggctccgcggaggaagctctgaaaaagcttcgaagcttcggggagaactggagccttcggctgaaaagggcggaggaatgcggctttcggggaggggaggagcagcgcaccctgcttgatcggctctcccgccttcgtcttcccggagaggagggaggggagccggaggagagctcggacttccccttccgcttggcggcggagaagctcacagcgctcaaggaggatttccttctctatcgggaggagcttcgcgcaaggaggagacagctctcctcccgtctttcggagcttgaggcaaagatccgggatcttgagaagggatttaagccctatccttcctatgtcaccggccttaaggcggtccttgagaagactttctttgagaggactgctcacacggtcacggtatccatcctcgcagagcttttggaggtccggaatccggagtggagaaatgcggttgaggcctatctggaccggcagaaattctatctccttctcccggaggagtattacgaagaggctctgaaaatctacgatgaagtgcggagagagcggggactctatgatgccggtcttgtcgacatcggaaagcttaagcggagcgggagctttaaggcgcgggacggctcccttgcggaagagctggaggccgaaaatgaggacgcgcgcattttcatcgactacctcctcggacaggtcatgaagtgtgagagagtggaggagttgaaggagcatcggacctccattacgcgttccgttatgctctataagaattttgtggcgagaaaaatcgatcccaggcgatatcaggatccctttatcgggcggaaatccacgaagatcctgctgaaaaagctgaaggaggagcaggaggagctccaaagagaagagaggattttggcgaaaaaccatgcgcttatggaggagctgagccgtgcggaggctctgtccagctatgaggcggaaagtcatgcggagtcactccgtgcctatagggagcttcccaaactcaaagagagggtgaagattctttccgcggagcttgagaagctggacctaagctatgtcgatcggctccgggaggagattcagaaaaagagagcggagcagaagagacgggaggacgaacgggagagactccagaagcagcttggcagctttcaggagaggagaaggctcctgtcggaggaacagcttccgagactccggaaggaagtcgagaggataaaagaggcgatatccgagaacttctccccggactggattgagaatacgggggaagtgcgctttttaaaagagcaggcccggaagggcgctaggacgagcctttcccttcgggaaagctttcagagagcggcaaaactgacggaaaatgagatcaagaaaaaattcgatgagagagggcgtctcaggatgcgctataattctctctacaggatgccctttgacgtgaacagggactccaatgaggattacgacagggagcttcgggagaagaaggagattctgctccccgaatatatcgggaagatccgagacgcgaaggagaaggcctatgcccagttccgggatgatttcatcgcgaagctgaagtccaatgtggaatcggtccgggaacagatccaagagctgaatgaatcccttcgccgcagcgttttcggaacggaccgctatcattttgtgctgagtccgagatcggagtacagggattattacaatatgatcacagaccctctcctcatggatacgggcggctggaatatcgcctcggaatcctttaacaaaaaatatcaaaagcagatcgatgagctctttcagctcctcgtcatcagcgaggagcagccttccgcggagaggcagcgggagtacgaaaagaatattgcgaaatttacggattataagacctatctgagctttgaccttattgtgagcaatgagcagggggaggagcagcgcctctcaaagacgctccttaaaaaatccgggggagagacccagctccccttttatatttcactccttgcgtccttctctcaggtttgccggatccggatgaagggaagcgcggcggccaataccatccggctcatcatactggacgaggccttcagtaaaatggacggggagaggatccgggagagcattgtccttctccgaagattcgggctgcaggcgattttttccgcgccgccggataagataccggacattgcgcccattgtagaccgaaacatcgcggtttatcgggagcatcaccattcctttacccggtattttgacccaagagagatcgaggaggagacagagccggagtcgggctatgagccgggcggagagtcgcgatga

SEQ ID NO: 44090 - DNA, 1329 bp, Oribacterium sp. oral taxon 078 str. F0263
atgaactatagagaatatcttctcaggacacttttggaccgctatgaaaggagcgcgggctttcgaaagggggatgagggagggcggcgcagactgcttcatcccatgaaggaggccgcgctctcgcaggcaatggaaaatatcgatgagaaaaaaagctttctctcagagctggaccagctgaaggaggagggcatcctcgactacagctggctccgctatgagaggggaaatctcgtagagtccgtctggcttctctccggggaaaaggcaagagaaagggcttattatcttcttgacaggacgcctctttcctcccagcttgcgaggcttcgaatcaatatcgaggagacgctctctgcgatagaggtagaggacagggcttccgaaagtcaggaagagtccggggccccttccgcccgggaggggagaacgggggaggcggagcagcagcttggaatccggcgttttctcctcgatatgctggagagtatagaaaagaggcagaggattccgcgctttttccgaagaggagagagaatcaatggagagcttttacaggcccttctctttctctataaaaacaaaactgaggagacagagcgggtattcagcgcaagaaattatggggacagcaaatatttcgagaaaatactgaaggctccccttctctcgattcttcgagagattgatcggaattctccgtatgaaggacagggagatgagactctttttgagaattatggtctttgccgctggccggaggtactgcaattttgcggcggaatctccgtctggctggaagaagaggagcccatccgattttatggagaatgttacggagcctacctgaattccgagacatttcggcatatcaaaagactggagctttccggggtggagcgggtgctctttatcgaaaatctcgcaaattatctctggtatctgaaaaaacgctctcccttagagctcgtgatctggcacggaggcttctacagtcctctgaggggacgctggtttcggaaaatctatgaggcgggaaaaagggcggggagcgccatttcctatttccactggagtgatatcgacctcggaggctttcggatcttcgcaaggcttaagcgaaatatcgtcccggagctaaaaccgtaccgaatggacaccgagaccctgagaagctatagggacagagctcttccgctttgcggggagagctatcggaggaaactggaggctctgctcggagatccggagtaccggatttttcacagcttgatcgaagagatgcttcggagcggacttcggcttgagcaggaacagctgctctga

SEQ ID NO: 44091 - DNA, 1482 bp, Rhodococcus aetherivorans
gtgtccaccgccgacctgcaccgcctggcgcgtctgcgtcaggagcacccggcgtgggcgctgctgcggtcggacaatgcggccgcggtgctggcactgctgggccggcacttcgaccgcggcacgcgacggctgccggccccggagctgttcgcccgcctcgatgcggacctgcaggaactgcgcgacgagggcttcgagctgccgcgcaccggtcaggcctattgtgcggactgggtgcgcgcgggttacctgctgcgccgcgcgagcgccgacgcccgggaggagaccctcgagccgaccgaggcgacgttcgccgcgctcacgttcgtcgcgggcctgacgaccgccacgagctcggtcaccgagtcgcggctgaccaccctgtcgagccagctccaggcgctggcgcgggactcggaccctcgcagtgagagccgcctggcggcgttgcgggccgagcgcgacgagctggaccggcagatcgccgccgtcgagtccggggattttcccgtgctggacgggaaccgcgcggtggaacggtccgcggagatcctggcgctggccggggagatcccgggtgacttcgcgcgggtgcgcgccgagttggaggcgctgaaccgggagctgcgggcccggatcctcgacgacgagggcgaccgcggcgacactctcggcgaggtgttccgcggggtcgatctgatcggcagctccgacgccggccgcagcttcgccggcttctacgacatgatcatcgatccggagcggtcgtcgcagctcgacgactggatcgaggcggtgctgcaacgcccgttcgcgcagcagctcaccaccgagcaacgcaaccggttccgcaccctgctcaccgagatggaggacgccggcggcgaggtccacgcgacgatgacgtcgctgtcgcgttcgctgcgccacttcgtgcagtcccgccactacgaggagcaccggcgtctgcagcggctgttgcgctcggcccagcagcaggccctgcaggtggcgcagcgccgcaaaccatacgacctgctggacctcgagctggtgcgggtcggcatgggcatcgactccgtggcggcgctgcggctgcacaacccggccgacgacctggtggtcgagccggtggtgacgcagccggtcggcgaggtggatctggaggagctgcgccgcatcgtccgcgaatcggagatcgacatggacgagctggccggcaacgtcgccgccacgctacgttcccgcggcagcgccacgatcggcgacgtgctgcgcgatcatcccgccacgcagggtctggcaagcgcggtgggtctgctggtgctcgccgcggagcacggtcaccgcatcgacggcaccgaggagatcgcgtggacgtccccgtcgggcgcgacccgcgtcgcgacggtgcggcggcacctgttcgacccgaccgacaccgagttcaccgcccgcatcaccgaggacgcgtcatga

SEQ ID NO: 44092 - DNA, 606 bp, Rhodococcus aetherivorans
atgaccgaatcgaccacacgcaccgggctgtatgcgggcgacaccggcgaactcgacctcgacacccgccgcgcgctggtgcaactgctcaagggaccgctcgtcaccgccgacaagcacccggaggtgtggcggacggtgatccgcgacgagcgggtgctgcggtcccggctcgcggacgtgtttctcgatctcgtcgtcgacgaggacgatcagctcgcgttcacccgccccgccgacacgggcgaccacaaggccccgacggtgctgcgcaccgagcggctcacgttcatggacaccgtgatgctgctggcgttgcggcaccggctgctgcgcgcccagccgggcgagcgggtgatcgtcgacttcgacgaggtggccgggcagttggagatgtaccgcgcggcgacgagcaccgatccggccggcttccgcaagcgggtcaacgcgtcgtgggagaagctgaagaagtacacgctgctggcgtcgacgtccacggagggccggatggaggtctctccggtgttgcggcagttgttcgacgccgatcaggtcgccgccgtcgaagccgagttccggcgcatcgtcgaggaggacgcgccgtga

SEQ ID NO: 44093 - DNA, 3300 bp, Rhodococcus aetherivorans
gtgaacgccgcgccgatccaccccggccagttccggctcgcgcgggtgcaggtggtcaactggggcaccctgcacgggcatcacgacattcccttggcccgcaagggttttctcatcacgggcgcgtccggctcgggcaagtcgacgctcatcgacgcgatctcgacggtgctcatgccgggcggcagcgtgcggttcaacgcggccgcgcaggagtcggcggccgggtcgggccgcaacttcgtcagctacatccgtggggcgtggcggcgcgaggccgacgccgacaccgacgcgctcaccgcctcctacctgcgcaccggcgccacgtggagcgcggtcgcactgacgtacaacgccggcgacggcacggccccggtgaccctggtcaagctcatgcacctgcgccggggcgccaacgccaacaacgagatctcgcacctgcacctgatcctcgacaccgacgtggagctgaccgacctcgaaccgttcgtcgcgcggggaatcgacacccggggcatccgcaagcgctggcctgatgcggtcgtgaaccccagctacgcgccgttcgcccgcgcgttccggtccaagctcggcatctcgtcggaggccgcgcagcggctgctgcaccgcacgctgtccgcgaagagcctgaacagcctcgaccagctgttgcgcgactacatgctcgacgagccgccgacgttcgcgatggccgagcgggccaccacccagttccgcgagctgcgcgaggcgcatcgcgtcgtcgtcgacgctcgtcgtcaggtcgagacgctcgagccgctcgtcgcgctggccgacacccgtcgcagcggcctgcagtcacagcgcgacctgcaggacgagaccgatcacctcgacgcggtgcacgcccggatgacggtggacctgctcagcgacaggctcgacgagacgcgggcgcagacgggtctgctgcaggccgccgcggacaagaccgccgacgaggccgaccgcgccggcgaccgcaccctcgatctgcgggtgcgcgccgagagcgccggcgacggccggctcgcgaccctccgcgtgcacaaggagaccgccgagaccgcactcgaacgaatcacccagcaacgcaaacggttcgacattgccctcgcgcactgggaggcggagacaccggccaccgcggacgacttcgcgcatctacaggcccagctcgagagggaactacgcgagctcgacgcgaccgccgacacgcgcagggccgaactgtacgaggtggccggtgcgctcgccgaacgccggaagacgatccgcgaactgatcgccgaccgggaggtcctggcccggcgccgctcgaacctcgatcccgacctgctgcgcgcccgggaactggtgtgctcggcggccggactcggcgaggacgccctgcacttcgcgggcgagctgatcgcggtgcgcgccgagcacgccgagtggacgggtccgatcgagcgggtcctgggcggattcgggcgcaccctgctggtgcccgacgagctgtacccgcgggtggccgccgccgtcgacgcacaccatctcggtgcccgcctcgtataccggcgagtccgcaccggcgtcggtgcgccggacgcacccaccaccgccgacggctcgctcgtccgcaagctcgaggtgcgccccggcccgctcgccgcgtggctgcagcaccacctggcggaccgcttcgactacgcgtgcgtcgacaccgccgacgacctgcgccgcgtcccgcggggcgtgacccgggccgggcaggtcaagcacggtggcgaccggcacgagaaggacgaccggcggcgcatcgacgaccgcagccgctgggtcctcggcttcgacaacgaggccaagcttgccgacctgcgccggcgcatcggcgacgccgagaccgacgtcgacgcgctgcaacggcggcaggaggcgctcgaacgcgccgagtctgcgatccagctgcgccggcaggccgccgcggtgatccgcgagtccgcgtggtccgacgtcgacgtcgcggcggcggggaacgcggtggacgcgatcgaggaacggctgcgcgagtggatgcagggcaacaccgaatacgccacgctcacagcggatctggctcgcgccgagagcgaggaacgcgccgcccggcaggcgcacgccgcggcgctggccaagctcgaacagcaccgggacgagctgacccgggtgcaggcgcggctcgacgaggcgcaggcccacgccggcacggcggtgcccgacccgatcttcgcgcgcatccggacccggttcgccgcggcggtgcgccgcgtcaccgtcgacaacatcgaccgggccctgagcacggtgggtcgcgcgatcaacgtggagatgcggtccgcgcagcacgacaccgcggacgccgagcgccgcatcaccgccatcctcaccggctaccttgccgagtgggaggcgcggcgcgccgagatgcgctccgaggccgagtacgtcgacgacgccctcgcggtgctcgcccggctgcgcagcgacggcctgcccgcctacgaggacgagttcttccggctgctgcgcgagcagtcgcaccgcaacatcggggagctggcgcgcgcgatccgtaaggctccgggtgagatccgctcacgtatcgagccggtgaacgaatcgctgcgccgctcgccgttcgacaccgaccggatcctgcgcatcgacgtcaaggaccggcgctcccccgccgcgtcggagttcctggcggagctgctgcagatcacgagcggcgcgtggaaggaggaggaccgggccgcggcggagcggcggttcgaacagatggcggcggtgctcgaacggctcgactccggcgagcccgccgacctgcggtggaagcgcctcgtgctcgacacccgcctgcacgtcggattcatcggggtggaggtcgacccggagggcaacgacgccaactatcacgactcgagctccggtctgtcgggtggacaggcgcagaagctggtgttcttctgcctcgcggcggcgctgcgctatcagctggccgccgccggcgaggagctgccgcgctacggcaccgtgatcctcgacgaggcgttcgaccgcgccgaccccgcttacacgcgacgggcgctggacgtgttcacccagttcgggttccacatggtgctcgccaccccgctcaagctgctgcagaccctcgacgactacatcgacggcgtggccgcagtgagcatccgcgacaagcgctactcgcagatcgcactgttgccgatccgcggggacggcacgtga

SEQ ID NO: 44094 - DNA, 1137 bp, Rhodococcus aetherivorans
gtgagcgcactgtgcgtgccgccgtccgcggtcgccggcaaggcccaggttgcataccgcagccgccgcacccgatggatcaccgatcccactgcggccgaatcggattcgctgtcgatcgggctgcatccgccgtccgagcggcgggtcgcgcaggatcccgacgccgtcgtcgcgtgggtgcgtgcctggcacggctacccgggtgccgggcgggtcgagtgggagacgcggcgctggccgagcttcggcacgcaggaagtgccgatgcgcctgctgctttcgggcgcgtccgagatcgccgccgcggccgcacgaggacccgagtggcgcaccctcaccgaacggcaggcacgattgctcgacggactcggccccggcaccgcgacgctcgcgacagcgatcgccgcgacacatgcccgctggctggagttggacgagccggacttcgcgcggctcgtcgcggcggtgcgctggctggccgagcatccgtcgtcggggctgttcatccgccagctgccggtgcccggcgtcgacaccaaatgggtgtcgcggcaccgcggtctggtcgagacgctgctcgacggcgtgcggggcgatcgtgacctgggtgtgcggtctctgccgcggatgtgcgaggtggccgtgtgcgaccgggcgctgctggcggcggcgccgcggctcttcgcgacgtcgctcgacgagctggcggcactgccggtgaagccggcccgcaccctgatcctggagaacaaggagggcctgcacgcgctgccggagctgccggcgacggtggcggtgcacggcggcggctacgcggtgcacgagctggcggacgtgccgtggctcgcctcctccgacgtcgtgtactggggtgacctggacacgcacggtttcgcgatcctcgaccggctccgcggccgcctcccgcacgtgcgcagcctgctcatggaccgcggcaccgtcgagcggtggcgcgacctggccgtgcccgaggcgtcacccgccccgcacacgcccgcacacctgaccggaccggaacgcgacgcactcgcggtggtgcgcgccgagggtctgcggctcgagcaggagcggatcccgtggccgtacgtcgtcgcccatctcgaggcgctgtag

SEQ ID NO: 44095 - DNA, 1671 bp, Ralstonia pickettii DTP0602
gtggagcagtcgacggcggctgcggcggcgttgcagacgcaagcggggagcttggcgggggcggtggcagttcaggtcgagttgattcgctcagcctgccttcttgttgagtcacccacaatgctgccgatgcatcacttgtcgcaatcacccctggcgtacaatctggcatccgtcgcgcccgccgcgcggcttgcacacgccggccttttccaagtgagcctcgacttcgaaaccctcgagcgcctgcgccaggtccatcctgcctggcgcttgctgcgctccgaccatgcgagcctggtcgccgctttcctccatcgtgtctttgtccaacccaaccaacgttcagcgggccagtccgatctggccgaggcgctggaagacgagctcttcgccttgcgcgaacggctcgggcaggacgcgtttccccgatccgcactcgactacctgaacgactgggccgccaacgagaagggctggttgcgcaagttttatcgccaggggtccgatgaaccccagttcgacctgacgccggctaccgagaaggccattgcctggctcggcacgctggccgggcgcagtttcgttggcaccgaatcgcgcctgctgacgctgttcgacttgctcaaacagatgcacgacggcacgcagactgacccgcgcgtgcgcatggccgaactgcagcaacggcgcgacgagatcgacgctgagatcgcacgcgtggccgcgggcgacctgtcgctgctggacgacaccgcgctgaaggaccgcttccagcagttcgtcgcgctggcgcgcgagctgctgacggatttccgcgaggtcgaggacaacttccgcgcgctggaccggcgtgtgcgcgagcggattgcgctgtgggagggctccaagggcgcattgctcgaagagatcatgggcgagcgcgacgccatcgcagactcggaccagggccgcagcttccgcgcgttctgggacttcctgatgagcagcagtcggcaggaagagctttccgcgctgctggaacatgtgctggcgctgcgcccggtctcggaactcaaccccgatgctcgcctgcgccgcgtgcactacgactggctggaggccggcgagcatacgcagcgcaccgtagcccagctatcgcagcaactacgccgttttctcgacgacaaagcatggctggagaaccgccgcatcatggatatcctgcgcggcatcgaggccagggcactggccgtgcgcgacacgccgcccacaggctacgtgatggcagtggatgacaccgcggccgacatcgaattgccgatggagcggcccctgttcacgccatcggccaaaccgcgcattaccgaggccgacatcgaagccggcgaggccgaggtcgatgcagaagcgctgttctcgcaggttgtcatcgacaaggccgaacttgccgcgcatgtgcggcaggctctgcaaggccgcgcccaggtcacgctgcaggagttgtgcgacatgcgcccgctgcagcacggtctggccgaactggtcgcctacctgcaactcgcgggcgataccttccgcaccgtggtcgatgaaagcgccaccgactccgtctcgtggatagtgccgacgccggatgccggcacgctggtgagacaggcccggatgccccgggtgatttttgtcagataa

SEQ ID NO: 44096 - DNA, 708 bp, Ralstonia pickettii DTP0602
atggcgcaagacgacattttcgatgacgcggcaccagccgccactggcgcagtcgcgccggtggcgctggccctgtccgcgctggtgatcccgctgctcaagggcgtgctctaccgcgacgccgatgccaacctgtggcatgcgctgctcaacctgcagccgacggtgcgcgactatgtcgccgtgctcggcctggagctcgtactggatgacgccgagggctacgccttcctgcgctcgcagcctgacagcgacgacgacagcgccgagcgcccgccgcggttgatcgcgcggcgccagctgtcgttcccggtaagcctgacgctcgcgctgttgcgcaagaagctggccgagttcgacgccaccggcggcgaaacgcggctggtgctgacgctggacgacatcgccgagctgctgcgcgtgttcctccccgccggcaccaacgaggcaaagctgatcgaccagatcgagctgcacgtgaacaagatcgtcgagctgggcttcctgcgccggctcaaggccgacaccagcaccggcgcgagtgctcgcatgggaggccaggccgggtatgaggtgcgccgcatcctgaaggcattcgtcgatgcgcaatggctgtccgagttcgatgcgcggctggcggcctaccagatccagctgactggccagccgggaacgccggtggcaaacggagggccgtccgatgcatga

SEQ ID NO: 44097 - DNA, 3375 bp, Ralstonia pickettii DTP0602
atgcatgagccgcaaaccctgagcctcgatttcgccgacgacgacacgctgtcgggcttccggctgtcgcgtctggaggtcttcaactggggcactttcggcgaacgtgtctggaccatccgccccgcaggcaggaacgccctgctgaccggcgacatcggctccggcaagtccacgctggtcgacgcggtgaccacgctgctggtgcccgcacagcgcatcgcctacaacaaggccgctggcgcggaaagccgcgagcggaccctgcgcagctatgtgctgggtcactacaagtccgagcgcaacgaagtgagcggcaccgcgcggccggtggcgctgcgcgaccagaacagctactccgtcatcctgggcgtcttccacaacgccggctacgaccagaccgtgacgctggcgcaggtgttctggatgaaggatgcccatggccagcccgcgcgcttctatgtctgcgcagaacaggacctgtccgtcgccaccgactttgcccacttcgggagcgacatcgcctcgctgcgcaagaagctgcgcggcgtgaaggccgagttgtttgacgcgttcccgccctacggcgcatggttccggcgccgcttcggcatcgagaacgagcaggcgctcgaactgttccaccagaccgtgtcgatgaagtcggtcggcaacctgaccgactttgtgcgcagccacatgctggagccgttcgacgtggcacctcgcattgtggcattgctgggacacttcgacgacctggaccgcgcccatgaggcggtgctgaaggccaagcgccaggaggccatgctgaccccgctggtcgcggattgcgagcgccacgcggagctggtggctgcctcagagcagctgcgcgcgtgccgtgaggcgctgcgcccgtacttcgcgcgactcaagctggacctgctcgacaagcgcatcgccgggctcacggacgagtgggaacgccaggacacccgcgtgcggcgcctgcaggaccgtcgcgatgccctgcgcaacgatgaagccgaactgcgccgcaacattgccgagaacggcggcgaccgtatcggtcggctgaccgaagaaatccgccagcagaacgacgaatccgcgaaacgccggcacaggtcggatcgatacgcggagcttgtgcgcgccgtcgacgaaacgccgcctgagcaggaagccgccttcctggtcctgaagtcacgctttgccgagcttgcagagcgctccaggtcgcgcgaggcggaagttgataacgcgttgacggaacacggcgtcacgctgcgccagggcaaggccgagcacgatgcgctgagcgacgaaatccgcagcctgaaggcacgccgcagcaatatcccggccgcgcaggtcgcgatgcgcagcgcgctgtgcgaggcgctttcgctggccgaggacgacatgccattcgccggcgagctgctgcaggtgcgcgaggacgagcgcgactgggaaggcgcggccgaacgcctgctgcgcaacttcggcctgtcgctactggtaccagatgcgctctacccgcaggtgtccgcgtgggtggaccgcacgcacctgaaaggccggttggtttactttcgcgtgcgcgaaggcggcagggctgagccgcccgccctgcatcgcgattcgctcgcgcgcaagctggccatcaagcccgattcaccgttctacagctggctcgaacgcgaggtcgccgtgcgcttcgacgtcgcgtgctgtgccacacacgaacagttccgccgcgagacgcgcgccgttacgcgcgccggccaggtcaagatgcccggggagcggcacgagaaggatgaccgccaccgcctggacgaccgcagccgctacgtgctgggctggagcaatgccgccaagatcgcggcactggaaggcgagacccgcgcgctcgaaacacggctggccgaactggccgcacttacggccgggctggtgaaggagcgcgacgccctcagggagcggctcacggcgctgtcccagctcgacatttttgccgacttcgaggaactggactggcagacgcccgcgcgcgaggccgcgcgcctagccgaggagaagcgccagctggaatcggcctccgatttgctgcggcagttgacggtccggctcaacgaagtggaagcggaacagaaagagactgaggcgcagctggaggaccaccgcgacaaacgatccaaggcggagggcaggaagagcgatgcgctggagcagcgcgctgaaacgcaggccatgctggacgccaccggcgacttcgcggctgccgtaccggtcgagaccatcgacgcgttgcgcgccgaaatccttggccagcacaccctgaccgtggaggcgtgcagtggtcgtgaaaccgacatgcgcaacgaactccaggcccggctcgatgcggagagcaagcggctggtgcgcctgggcgagagtatcgtcaaggccatgtccgcctacaaggaagccttcaagctggagactagcgaggtcgacgccagcgtcttagccggcttcgagtaccgcaacatgctcgacaagctgcgcgccgacgatctgccacgcttcgaggcccgcttcaaggagctgctgaacgtcaacacgatcaacgagatcgccaacttcaacgcgcagcttggcaaggaacagcagaccatccgcgaacgcgtggagcgcatcaacgagtcgctgacgcagatcgactacaacaccggccgctatgtccggctggaggcacaggtcacgccggacgccgagatccgcgagttccagtcggagctgcgcgcctgcaccgaaggcgcactgaccggctcggaggacagccagtattccgaggccaagttcctgcaggtcaagcgcatcatcgaacgcttcaggggccgtacggggctgaccgaccaggacaggcgctggaccgccaaggtgactgacgtgcgcaactggttcgtcttcggggccagcgaacgctggcgcgaagacgatgcggaatatgagcactactccgattccggcggcaagtccggcgggcagaaggagaagctcgcctacaccatcctggcggcgagtctggcctaccagttcgggctggaatggggcgcggtgcgctcgcgctcgttccgcttcgtggtgatcgacgaagcgttcggtcggggctccgacgaatccgcgcagtacggactgcggctgttcgccaagctcaacctgcagttgctcatcgtcacgccgctgcagaagatccatatcatcgagccatacgtgtccagcgtggcgttcgtgcagaacgaggaaggacgcgcttccaaggtacgcaacctgtcgattgacgaataccgggccgaaaaggccaggctgaccgcatga

SEQ ID NO: 44098 - DNA, 1179 bp, Ralstonia pickettii DTP0602
atgaactggagccgccccgccgacctgcgtgcccagttgcagaggctttgggaccgtggagacatcctcggtgcgctggtcagcggcgccgcgctgttcccccggcggctcacgctgcgcgtgcccacatccggcgagctgactgagagcttcgaggcggttcgcaactggttgggcgaactaaagcagatgccgcattaccgcctggagatgcgcgagttccgccatcgcaccttcggcaccaatgcgctgccatgcgccgtgtggatcgacacgctggacgatgcagcggcgctgctgggcaagcgccgcgagatcgaacgctttaccgcattgctcgccactacgcgagaagcgcagccgttgctggtgccgtggctggctcagcgtccgctgcgggcactggatctgcacgacgcctgggaccggctgctggaaatcgtcggctggctgcagcggcatccgcgaccgggtgtgtacctgcggcaagtcgatcttcctggcgtgcacaccaaattcatcgaggctcatcgtggcgtgcttgccgagttgctggacctggcgctcgcgccggaagccattgcagcggaatttaccggcacaagccagttcccggcgcggtacggctttcgcgacaagccggagcggatccgcttccggatactggatcgcgccaaccggatgctgccaggcgaagcccccacccacgacgtgaccctagatgcagcgagcttcgccgcactccggccaggggtttcgtgtgtgttcatcaccgagaacgaaaccaacttcctggcctttccagaggttgcggacagcctggtgatcttcggtgcgggatacggattcggcttgctcgcgaaggcgaggtggctgtcgcactgccggctgcattactggggcgacatcgatacccacggcttcgccattcttgatcagctgcgcagcgtgttcgggcatgcggaatccctgctgatggatcgcgccacgcttgtggcgttcgaggcccaatggggtgtcgaggacagcccgacgctgcgcgatctgtcgcgactgcggccagaagagcaggcgctctacgacgacctgcgggacaatcggattcggaaaaacctgcggctggagcaggagcgggtggggttcgagtgggtgcgggaggcggtggccgggttggggtag

SEQ ID NO: 44099 - DNA, 1575 bp, Bifidobacterium animalis subsp. lactis ATCC 27673; identical to SEQ ID NO: 41902

SEQ ID NO: 44100 - DNA, 810 bp, Bifidobacterium animalis subsp. lactis ATCC 27673; identical to SEQ ID NO: 41925

SEQ ID NO: 44101 - DNA, 1221 bp, Bifidobacterium animalis subsp. lactis ATCC 27673
gtgacggatacggcgacgctcaagactccggcggatgtgcgcggcgatgtggcgcgcattgtacagcgcgagttgttcgccgccgagagtccatggccgcgcacgattcacattccgtggcccaaggagacgcagctcgtcgccgatgtggccggcgtgcatgcggcgaataatgcgttgaaggagttcgcggcacgattcggctgccaaaccgacttcatctcgcgcaaaatgggcacggccgtgtcgcttgtcgcgcatatccatgtgcctgacgaggccacggcgctcgccattgcggggcctacgctgcgacgccctcgcgaacgagtgttggccagagcggcgcagctcgagcaacgatgccatgtcgaccatgcgctcgccatggacgtggtacgcaggttgaacaacgaatccgacgtcgatttcgggttgttcgtcgaagccgcgcagtggttcggccggcattgggtcgaagtgccggggctcaccgctcgtgagatccccttgcccgggttttcggcgaaatggctggcaggttcacgatcccgcaggcgggcggcgatctgtacagtgctcggtgcggatcggctgccgctgcgggaacgcccgggcgaggtgcggtatcggtacatggaccaacggttcgccgccgaacctgaccgtgtggcgacctcggtgcagtgcgttcccgaacgccccgtctcgctggccgtcattgtggagaacaaagacacctaccaagccatgggccccattgacggagccgtatgtgtgttcggctccggattcgccgtgaaccgggtacccgaactgttgccctggcttgccggtgatggggtgcgcgttgtgtattggggcgacatcgatgctgcgggattcgagattctcagtgggctgcgggcttcgggggtcgcttgtgagagcatattgatggatcgcatgacctatgccgaatacgagcgtttcggcacgacgagggatgcgacgagccatgagattcgctgcggcgaaccgaagcatgggctgcatctcagtccggaggagtatgcgctgtaccgtgacctgtgcacgggcgaacttgccgtgccgcgcatcgagcaggaacgcattccgattgctgaattcatgcgcttgatcagcgcaggccggagcgatggaagtgacggtgcaagagccgaccaatgccatagccaatcgctgcgcacaccaaagtga

SEQ ID NO: 44102 - DNA, 1437 bp, Alcanivorax sp. PN-3
atgtttttcacggaagaccgccaccaattcttcaagccgctgaccggcaagtaccgcgagcaggtggccgagtgtctgcggctgttgcacgagcgtttgtacagcgcccaggccgattacggcgagtcgctcaagcgcgagcaggtgctggatgtgttcagcgaggcgctggagcgggcgcccttgctggagggcggcgatgaggacggcggccgcttccgcaacaaccgggagcaggccgcctggattctcaatacgctggtggagcacggctggctgaagcgggacaaggacgaggcgtcgtttcagtccacctatccgttcagccgcaccgggcgcctgttcacccagactctggcggaggtggacggccgcggcatccgcacccgccatcgcaatacccgcaatacgctcaatgcgctggccgcgtttctggatcgcggcgaggtctatgatctgctcgacgcccacgagcattccgaacgcatcatcgccgacttcaccgacatcatcgccgagctggaagagcgcaagcgggagttggtgaaggaagtggaggcccagcaactggtgcagcaggccagcgaccagttcttcgagttcatggagaagcgcttccagccggacgtggcgatccgcatgtccgccgacagcgtggagaaacaccgcgaccgcatccagaacaccattgagcgcattcgccgcaaacccaaggcgtggaagcgtaacgcggagctggagctgcggcggctggcgccggatctggtgatcaacccggagggctcggtgttgtggcagttgctggacagcatcgaaacccgcatgcgcagcgccgccgagatcatgctgccggccctgcgccggactctgcagggttttacccggcgggcggacattatcatccgccagctcagctatctgcacagccagcagcacagcgacattgtcggcctgtgccgggagctgtccgagctggatgacgccaccgccgccaagcgtttggaagccgccgggcaagccatggcccatttgcgtctggggctggtggatccggcccagaaccggctgcgcgagcagcgggagaaacggcaggtgcaaagccgcatgacgcagttggacgcgccggacccggccactctgcgcgatctggcgattcaacagttgctggagaaggcgttcagcatccacggcgaaggtctgcgtgactatttgcgccaagctctgggcgccagccgccgcatcgacaaccgcgacctgccggtgaacagcgccaccgatctgctggcgctcagccatgtgatcgagctgggcagcgccgaccatcgggccagcggtttccggctgcgcatcgaacccaccgaccccatcgtcggcgaacgctacttcgcccgccgtgatggttttctgctggaactggaacacgatgacgatacgtga

SEQ ID NO: 44103 - DNA, 669 bp, Alcanivorax sp. PN-3
atgacgatacgtgacgctttggccgaggctctggaggcccgcggcgtcggcccggatcagttctccgaactgatgatccggctgctggaccggggcgtgttgtgccgcgacgaaagcaaaaaagaaacggagctctacgatcgctacctgcaagtggccgatctggtggaggattatctgagcgtgctgcgcattcgcctgctgcacgaacggcgttttcattcgctgcggctgtttccacccggcgccgaggtacccggcctggccgacagcgaggacggcttcaaccagggcttgcgtgagcgcctgagccaacaggaagtggccgccattctggtgttgcgcgcggagtacgacaaagcgttgcgcgaaggccagatcgacgaacacggccaggtgatgctgccgctggaagcgttcaatctggccagcaagaatctgcttggccggccgctgccggaggcgctcaccgaacggcgcgccctgttccgccggctgcgtcagttacggctgatccgcaccgccaacgacgacggtctggaagacgccgagacctggctgaccatccgtccggacatcaccagcctggtcaccgacgcggtactcagccagctcaccggcgacgggccggacaccgaagccccctccccggaagagctgccatcatga

SEQ ID NO: 44104 - DNA, 3651 bp, Alcanivorax sp. PN-3
atgtttttgaaacgttccatcaccgtcaattggggcaacctgcccgccgaagagctggaatacgggcccatcaatctgttctccggcggtaacggctccggcaagaccaccgccgccgacgccctgcagacgctgatgaccgccgcccacgacaatctgttcaattacaacccgggccaggacgaaaccacccagcgcggccggggcggcaagcaggtgcgtactctggcctcctatattctcggctgcgacgacggcgccttcgcccgcccctatgacagcgacggttacctggccggcgtgtttcatcccaccaagggcgagaccgccgagccgttcacggcggtgattggcgtgcgcgcgcatctggaccgcgccggcgttaccgcccaggcgcggcaaaatgaactgctgttgatgatcgtgcctggcgagatgctgagcctgtcgcacttcgtgcacggcgagggcgccgagcgtcaggtggtggaaatcaccgagctgcccaatgcgctgcgccggacgttcggcaaaaagaacgtggaaacctacgagaagaaaggcgcttatctggcgcggctgtacggcgccctgcgcggccgccgcgacgcggtgtcccagcaggaagccaagaacgccgcccggaccttcgcccgtttcatggcgtacaaaccggtggactccattgatcagttcgtcgccggcgaagtgctggaagcccaggacatgggcgacacgctacgccgcatccgcgacatgctgcgcaccatccatggcatggagcaggaggcccggcaactgcgcgccagcgtggactatctggagcaggcccgtggcctggccgggcagtatcaggagacctggctggagcgcaccgccctcgcctacggcgccgccgcgcaacgttaccgccgcaaccagcgccagtatctggagaaaaaagaggaacaatcccagctccgccagcaacaacaggcgttgcgcgaagaagcggaacaggtggaacagcgcctggagcaggcccacgacgaactggtggggctggaagcacgcatacagggcatccccgcgctgcgtgataaacagcaactgcaggcacagctggaaagcctgacccaacagttgcagcaaggcgcccgccccctgctggagcaggatcagcagcgcagccgtaacttcaccgcgttacgcaatctgcgcgatctgctcaaccgtcacagcatcgagctggaactgccgctgttcgccagcaagggctggcgggccaccagcaaggagctgctggccctggagcagcgcccgataccggacctgaatcagatgctggcacgggactggatcgatctgtcgccgctcgaaagcggtctggagcaggcccgcgccgagcaacagttgcacaactatctggcggagcaattgcacgggcaagtggacagcgcctccgaccgggaaaatctctccctggcgcagcggctggaccgcctggtgacgcaaagagcgcaggctctggaaaaactggacgaacagcaaaagcagattcagcaccgcatcagcacactggaatcaaaacgggtgaactatccccgtgatgtggaagaagcgctgcaagcgatccgcgagcagtgcccccaggccgacccgcgcgtgctctgcgatcacgtggaagtgcaggacccggaatggcaaatggccatcgagggttacctgggcggcgcccgctttggcattctggtggagccggattacgaagcggaagcgatccgcgtggtacgccgattggccggccgccagcgcaacaaggcccgggtgatccagggcgaacaggcgcggcgggacgcggagaaagccgcgctgccggcggagtccatcttccatgtgctgcgtttttcccatcgcacggcggagcattatctgaaggcctcctatggcaatgtggtacgagtcggcgacgccgaaaccctgcgccgcacccggcgtggtattaccagcgatggcctgggctccggcaactacgcgctgttccgctgcgatctggacgacagccagttggtgttcggcgagaccgcccgcgagcgcaacctgtatgcgcagcgcaacgccctgatggacgtacaggaaagctaccgccacgccagcgatgactatcaggcggtgcggcaactgcaacagcaggtgctcgagttcaagccgctggactgggtggccaccgtcactcacctgctgcaatgccagcgccagctgtccgacaccgaacaggccctggccaatctcgacctcagtgaccatgaagagctggaacggcaacagcaggacgcccgtcagcggcacaagcagctgagccaacggcagggcgaattgaaggaggaaaacggcaagctcggcgagcagcaacacgcctgcgaacgtgccatcaatgccctcgccgaccagagtgagcaactgcaacaggatcaggaagacgccgaggaacacctgcacgcctgcacccggtactggccggatctggatgtactgtcccgtatcgatgccatggaccagcgtttgcaagccgcccaggacgacatcgatttcgacagcgaggagcgggccctgctcaacaccctgaacagcaacgccgtcactctggaacggcttgtcgctgactacaatcagcaggcccagccggcggatcagatccttatcgaaaccgccgaggagctgcacagcgccccgttctttggccacgtgcaccacctgcatcagcagctggacaacctgcacaaccggctgcgcaacaatgtcctgctgagcaaactggaacaactgggcggcctgcgtgacaccttcaacaccaccttcgtcagcgatctgtgcaaccagatccagcaagccatcaaggacggcgaacgtactctcaagaatctgaacaaggagctggaacaccattacttcggcgccgaccgggaacggttctccttcgactgggagtgggtgcaagaatacaaggaatactgggacttcttccgcgaagtcaccgagattcctaacctgggcgatggcgccagcctgttcgagagcaccctctccgacaaggccacggccgtgcgcgaccggctgctcgcgttgctgctggacggcgacgaacagcaggcgctgcgcgagctggagcggatcagcgactaccggcgctatcgccgctacgacatcctcaaacacccggaaggcaaggcgccgatccgtctcagccagtacggcaccggctccggcggccaattggaaacgcccgcctacattatccgcgccgccgccatcaccagcgcgttccgcttcaacgaaggcgacagccacctgcgcatggtgatcgtcgacgaggcgttcatgcacatggacgaaacccgctcgcgccaggtgatccgttacctcaccgaaaccctgggcctgcaactgatcttcatcatgcccaccagcaaggccggccccttcctggacctggtcagcaaccagttcgtgttcagcaaggtgccaagcccggtgccggtgggcgaactcaatacccgcgtgctggtggaccgccagcaactcaaccaggaacgcatcgccgagctgtgggatcaacaccggcgcgtgatccgccagcaaggcgcgctggacttcatggaagggatttcgtga

SEQ ID NO: 44105 - DNA, 1128 bp, Alcanivorax sp. PN-3
atgagcgcgccgccctggctggaggaggagccctggctgcggcggttactgagctggttcctggaccggctggagcgcccacgcacccaggccatcacccggcgggtcaaaaaaaccacggtgccggaattgttccgcttcagtgaggacacccgctatcgctggcaactggtggaacggctggcacgggaataccgggtcttcagcatccaatacgactcccggttggatccttttcaggaacgctacgagaacgcccaactgcgtcttgatccaagctgcgaagcgcttctgcgcgactggctcgatcgtccccgcgtggatccacggagacgagcctggcagaacgctctgagcggccatgaagcgcatttccaggatggcggcgcggctctgctcgatgcccaaccggcactggccggtgaatcaccggaagacatggtcggccacttcgtccttgccgctaatttgctggacagcgacctcaccttgcgcgagctttccgcccgctgctttcgcggcgactccaagtttctcgatggccgccaggacctgctcgcccgcctgttcggcgagcgcgcccaatgcctccggccacgtcctttactgctcaccgcctgggcgccggccggtttcgaccgcttactgatcgtggaaaaccaggacagcttcctgcgtctggtggaacaggcgcccgtcggccacgccttgctctacagcggcggtttccgcgccagcgctcagcgcctcaccagcccccacacccgtttcgcctttctgcccggcagcgacggcgctgatttccaggcgcgctggctcagtgacaccttgcccgcgttcttctggggcgatctggatttcgccggcctgggcatcctcgccgcgctgcgacacagcctgccgcaactgacggcctggcgcccgggctatgagcccatgctcctggcgctggaggatgcccagggccatggcgccgaacaggcgggcaaggcgcgtcagaacgatcccggcaacaccggctgcccctacgcggaccaacaattgctgcccgccctccgcgactgccggcgttttctggatcaggaaggcttcctcccagttctgtcctccccccgaacaccattgtaa

SEQ ID NO: 44106 - DNA, 889 bp, Marinobacter sp. ES-1
accttcagcggtttacgcaatccggcaattggacaaggcgttgcgaatccagttgattgaaggcggtgccacacggggtgaggtgctgctttcggtaatggaaaaagaagcgctgttgtcttcgaccgatgcgggcagtgccttcgagagtttcttccagttactgtgcgaccagaatcggcaaactgaattgcgtgaccaacttcacggtattctgaatcagcccattgcagagcagctatcgcaggcccaacggcagtttctcgcccatcttatgcgagagctgggccgggaaagcgatcgggtcttccaggtgcgccggagaactgaagagagtctgagagcctacgtagagagcggtgcggctagtgaaaatcgcgcggttgaccaactgttatccaggctggagaaggtcgctgttgctttgcgggatggaggggtgaatttgcgaacggaaaccctgttatccctgtctgtcgggccacttgaaatagcctctcctgaaaccatgcgcctccgtagtccggacgagaaacttgatactcgcggtgtgctagctcgcgagaatacgcgagagcccagcaagcagatcctcgaaagcctggaaacggttcgggttcgtgaggtcgctgaaaaagtttatcaagctttggctgctaacggacctatgaccatcgcagggctgctgcggcattacccgataaacgccgggcttgaagaacttgttgcatacgtgagggtggccaagtccgtcaacgcggcgcagctagacgatgtggagcgagtgcaatttactgacaaaaacggagcaaagcttcaagcgaccgtaccaacctttatgttgagtgcggaactgttccccacaaatcgggatgagctggtgctatag

SEQ ID NO: 44107 - DNA, 837 bp, Marinobacter sp. ES-1
atgacggataacaaagagaactctgcgaatcccagtttttttgacagagtgcggggccaaagtgacagccatttcccttccagtccctctcctgacctggaaaagggcacggacagtaactccgatgaggaggcggaggcaattgacgcgcccggaggtgactccgacggaggcttagagttgcctcatgaggcgaggcgggtcttggtttatttgatgcggcagggtgcggtcattggcacacagaaacccaaggtgtttgagagcctttgcaggtatgaatcccagatccgccgccatctggctgaagtttacctgcgattgattttggatgagaaagccggagttgcatttgtcgccctgaatgagacggatgaggatgatatctccattgacggcgagccagtttcactgatttcaaagcgcaccctttccctctatgacacccttttgctgttggtactccgccgccattatcaggaacgggaatcggccggtgagcagaaaattacggtcgatcttgaacgggtggagtcctatctcacaccctttttgccgttaacgaatcacgctaaagcagatcgcaagaagctcaacggtgctgttcagaagttgacacagaaaaaaatcctggctgcagcccggggagcagaggatcgttatgagattacgcctatcattcggtatgtggtggatgccgcctttcttgagtccatgttgaacgagtatctgcgattggctgaggaggaaaaccttgaggttgatgcagcgcttcatctcgattcggtatcggatgagtcccgggcgagccaagatgatttgctgggagggctttaa

SEQ ID NO: 44108 - DNA, 3369 bp, Marinobacter sp. ES-1
atggagcggtacggcgatacatttttccggcaggggcagattcgtctggcggagcttagcgtctataactggggctcttttgaaggattgcacacggcaaggatcgatccggaaggtacgttgattacgggcgacaacggctccggtaaatcgacgtttgtggacggcctgatggccctgttacttccggctgggagggcgaccttcaatgtggctgcggcgcagggtgaccgcacagatcgctctttgctttcttacatgcggggtagttttggggcggctcacgaaggctcaggcaccagagtcaaaagcaagcgggaaaaagctgttgtcaccgggctgagggcactctatcgcgctgatgatgattcggtgattacgttggcggcattgttttgggcaacacaggcgtccaactcactaagtgaggtaaagcgtgtttatgccgtttcaaggcgtaacctcgaattgaaagagttgctggaagcctttggcgaggggagtgtcaccgcgttgaagcaaatgttacgcaatgaccctcttatcacctgttgtgatgaccggttttcggattaccaggagctgtaccgaaaactcttgtttatggaaaacaagaatgccccggctctgttgtcacgggccctcgggctcaaaaagattgatgacctgaccaaattgatacgcgaattggttctggagcccagcaccatccgggaggatgccaaaaaggttgttgaggagtttggcgatctggtggcaacacatgaccggctggtggatacccgggcgcaggtagagcacttgagccctttgcctgacctgtcacaaacacttcgccaagccgagcaggcattgcagaggcttcgtctggaaaaagagcatctggggatttacttcggagaagtgctcgcacagttgtggtcggttcaggtggaggcacttaaagctgaagttgagaaactgcaggagaagttagagagtctcgcgggggaggagcaggaggcagaggctttagtcgaacgccgtcatggggagtatttgaagcatggcggtgaaaaggttgagtcactcaaaaaggatatcctccagtcatcaggcaagcttgccgaagtgagccagaaggcatctgcctatcagcaggatatgggggttcttggactgtctgatttattatcggaagaggccttctctagcaacaaaaaggcagtggcaactctccttgggacaatggcccagaaaaccgaggccagccaagaccactttgcggataccagcgcagaacttggcaaagcgcaagaagcgatcggggttcttgaatcagacattcgcgaaatcaaggcgcggccggattcgaatattgaccatccttatcagcggctacgtgaggagttggtgcaatctcttggcctgtctgccgatgaactcattttcgtgggcgaattaattgacgtgcaggaacatgagcgcccctggcaaggggctattgagcgagcgttgggaggtttacgaacaacgctgctggtgccgggagatagcttctccatggtgacccgatggcttaatgcccggcataccggcctccacgttcgtgctcaggtcgttgatgacaagtctggcaaccagcggccgccagagtttaaggaaagtggttttctgaaaaagctggattggcgtcaacacccttatcgcgattggctcaaacatcacctcagcaagtttgacctggcctgcgtgaacaccaccgaggacctggatgtcacgcccttctcaatgacccgggaaggactgattcataaggagcgagggcggttcgagaaaaaagacctatccagaattgatgatcgtcgtcaatggagccttggtttttccaacaaaagtcgtttgtccatattgaatagcgatctcggccaactcaagcagcgggtgacagaactggctgacgatgttgccaaagcccgaaaggcgatggatgaagttagcggacgcaaaacgctcctggaacgtgtggatacccttcgctgggaagaaatcgatgtacctcgttggaaaggcaagctcgagcagttgaaggaggatttacaggcgattgaggcttcgcaaggagatttggccgaagcaaaacgccgatgggaagacgcgaagctggcaaggcagagaattcagcacgaagttggagaagtaaaaagtaaattgggaggagtggacaatcagctgaagatctcgcgacaaacgctaaagcaagcgcaggaagccgcatctccgggtatgaccgatgagtgtcgaggattgctggataagcgtgtggggccgatcactctagatcaggcctatcaacagggagaagttgagaaagagctggattcattgatcaataaagagcaggcccgccacagcactgcatcgaatcgggccaacaatattatgggggcgtttagaggcaaggaccagtggttgccggttgttgtggattggccgacaggtctggatgcgctagatgattatctcgaatacctgaatcagctggagaccgagggccttccggtgttggtggatcaattcagggaacgcctgaacaagcatgccactcagtcgctcgcaaacatcaataataagctgagtgccgatcgtgaggatatcctggaacgtatcgacacgatcaatgaggttcttcgccgcaccgaattccgtgtgggtagttatctgaaactgggtacgagtaaagaaaggtatcctcatgtcgtggattttgagcgcaagcttcgcaatgttctaggccaggtaaccagtgacgaccacgaggggcgtttcaatgccctatcagacgtagtttctatccttgataaagccagctcatcgggaacttcaggttcgctggagagcttgcgcttgctggacccacgctatcagatgacgttcttcgcggaggaagtggacgccactacattggaaattcgcgacgtacttaggtcgtccagcggtaaatccggcggcgaaaaggagtcgtttgcaggaatggttgtggcagcgagcttggcctatgtcctgacgccagatggctatgaccggcctgtttacagcacggtgtttctggacgaagccttctctaacactgccgagtctgtgagccgtcgcgtgctgaaggttttcaaggagctgcatatccatgtcagtctgatcactccctataagaatcttaacctggcccgagagtcagcccgttcactgttaatcgctgagcgcgatgccgaaaatcatgagagccgcctgtgtgagctgacgtggcagcaaattgatcaaaagcttgcagaggcaaagcgcttgtcggttatgggtgacgcggagtcattgggaattgggattgatgagtga

SEQ ID NO: 44109 - DNA, 1224 bp, Marinobacter sp. ES-1
atgagtgatcgtagttgggggctgatgccgagagatgtcattgagcgccttcgggagaaagaatggtatcagcgacgagcactaaaggcccggcttaaaggcgaaaggccattccccgtcagtgttagcctcaagccaccacggggacaagaagctgtttcagacctggaacactttcatcgtttcgtttcagcatggagagcgttcccgaatcagggctgcgttcaatgggaaagccagagcttccgtcaactgtccgtccagagggtgccagttcgtttccgtgtcgcggacattgggacactagccgaattactgggagagcaagagcaaactgcattaggaaattgggagcgacgaattgggaatatccttgcgcaaccttttgcccaagatgaaaagattcagcgtggactattctctgcattggtggataaccttgaggcgctgacaagttttactgaggatgagttggggctgctggtcgggttggtgccgcaactcaaagcgggtttgggaggtggccgatacctgcgagcacttccgctcactcaggttgatacgaaattcgtggagcagaatctccatcttatcgaatgcttgctggatgttctttggcgtggggaggttagtgcgtcaggcggacttttggcttggctgacatgtatcgaaaacccaaaaggttggttgtttgtacgtccgctatgtgacagctcccaaactgctttgggtggccttccaattctgcaaatggacaccgctactttattagctgtagagcttccggctagcaacattctggttgtagagaatgttcaatccggccttggtttgccgccgctcgacaacactatcgcggtgtttgggggcggtaaaaacgtttcctggctttccgctccatggctccaagcaaaaaacgtggggtactggggcgatatagactcagaaggcttcgctatcctcagcgatgctcgccgtcgatgtaaaaatattgagtcgatcatgatggacgagcaagtggtggagaaattcacttctcgaatggttgatgaaccgaattcggttgacgcccctccggcctacttagaagaacaggaaagtcgcctatttcataaactgcgacaaggagattttgcaaagcctcgcctggaacaggagaaacttgccgccgattttattttccagcgtttaagatgctgggctataaaacggattgaggaataa

SEQ ID NO: 44110 - DNA, 1455 bp, Alcanivorax sp. P2S70
atgtttttcagcgacgagcgcgcccaattcttcaagcccctcaccggcaagtaccgcgaacaggtagtcgaatgcctgcgcctgctgcacgagcggctgtacagcgccaaggcggactacggcgaatcactcaagcgtgatcaggtgctggatgtgttcagcgaagccctggaacgggccccgctgctggacggcgacgaagacggtggccgctttcgcaacaaccgcgagcaggcgggctggatcctcaacctgctggtggaacatggctggctgaaacgggacaaggacgaagcctccttccagtctacctacccgttcagccgcaccggccgcctgttcacccagaccctggcggaagtggacgggcgcagcgtgcgcacccgccaccgcaacacccgtaacaccctcaatgccctggctgcctttgtggatcgcggcgaggtctacgatctgctcgatgcccacgaacattccgagcgcatcatcgccgacttcaccgacatcatcgccgagctggaagaacgcaaacgggagctggtgaaagaagtggaagcgcagcaattggtgcagcaggccagcgaccagttcttcgacttcatggaaaaacgcttccagcccgacgtggccatccgcatgtccgccgacagcgtagaaaagcaccgcgaccgcattcagaacaccatcgaacagatcaagcgcaaaccgaaaacctggaaagccaacgccgaaaaggaactgcgtcggctggccccggacctgatcgtcagccaggatgcctcggtgctgttccagctgctggacagcattgagacgcgcatgcgcaacgcctcggaaatcatgctgccggccctgcgccgcaccctgcagggcttcacccgccgggccgacatcatcatccgccagctcagctacctgcacagccagaagcacaacgacatcgtcggcctgtgcaaggaactctccgagctggatgaagaaacctataacgcgcgtctacaacacgccggcgacagtctcgccagcctgcacctgggctttgtggatcccgctcaggtacgcctgcgcgaacagcgcagccagcgggtggtgcacagccgcatggtggaactggaagacccggacgccgacaccctacgcgagctggccacccagcaactgctggaaaaggccttcaacatcaatggtggtgccctgcgcgattacctgcgcgatgccctcggcgccagccgccgcatcgacaaccgcgacctgcccattaacaccgcccgcgacctgctggccctgagccacgtgatcgaactgggcagcgccgaccacgccgccaacggcttccgcctgcgtattacccccaccgaccccatcaccgacgaacactacttcgtccgtcgcgatggtttcctgctggaactggagcacgatgagccaagcaccgctacaacacgccctgagtga

SEQ ID NO: 44111 - DNA, 693 bp, Alcanivorax sp. P2S70
atgagccaagcaccgctacaacacgccctgagtgaagccctcaacgcccgtggcgtcactcaagcgcaattctcggaactgatgatccgcctgctggatcacggcgtgctgtgccgcagcgaaagcaaaaaggaagcagaactctacgaccgctacctgcaaattcccgaactggtggaagactacctgagcgtgctgcacatccgcctgcaccacgagcgccgcttcacctccctgcgactgttcccgcccggtgccgaaatccccggcgaagcggacagcgacgacggtttcaacagcggcctgcgcaaccgcctcagccagcaggaagtggccctgatcctggtgctgcgcgccgaatacgacaaatccctgcgcgacggccagatcgacgaacacggccaggccaccctgcccctggaagccatcaacctggccagcaaaaacctgctcggccgcccgctcccggaaggccgcaccgaacgcgacgccctgttccgccgcatgcgccaactgcgcctgatccgcagcgacggcgacaacagcctggaagacaacgaaacctggctcaccatccgcccggacatcaccagcctggtcaccgacaccgtgctctcgcaactgctaggcgacgacaacaaacccgccagcaacgacgacgccgaagacaacaaggagcaggaccagcaatga

SEQ ID NO: 44112 - DNA, 3654 bp, Alcanivorax sp. P2S70
atgtatttaaaacgctccatcaccgtcaactggggcaatctgccccccggcgaactggaatacggcccggtgaacctgttctccggcggcaacggctccggcaagaccaccgccgccgacgccctgcaaaccctgatgaccgccgcccacgacaacctgttcaactacaacccggggcaggacgaaaccacccagcgcggccgtggcggcaaacaggtgcgcaccctggcctcctatgtgctcggctgtgacgacggcgcctacgcccgcccgtacgacagcgacggctacatcgccggggtcttccaccccaccaagggcgaaaccgccgaacccttcaccgccgtcatcggcgtgcgcgcccacctggacaaggccggcagcaccagccaggcccggcagcaggaattgctgctgatgatcgtccccggcgagatgctcaacctgtcccacttcgtacgcgaatacggcggcgaaaaagccacagtgccgatcaccgagatcgccaaccagctgcgccagcagttcggcaagaaaaacgtggaaacctacgacaagaagggccagtacctggcgcgcctgtacggcgccctgcgcggcaaacgcgatgccgtctcccaacaggaagccaagaacgccgcccgcaccttcgcccgtttcatggcctacaaaccggtggaatccatcaaccagtttgtcgccagcgaagtgctcgaaccccacgacatgggcgacaccctgcgccgcatccgcgacctcatgcgcaccgtccacggcatggccgaagaagccgaacagctgcagcagaacgtgaacctgctcgcccaggcgcaaagccacaccgacacctacctggacacctggctggaacgcaccacccaggcctacggcgctgccgcacaacaattccagcgcaaccagaaacagtatctggaaaagaaagaagagcagaacagcctgcgccagcaacaggaaggcaaccgcgaagaagccgaacaggtacagcagcgcctcgaccaggcccacgctgagctggtggaactgcaggcgcgcatcctcggcatccccgccctgcgcgataaacaacagctggaaaaacaactggccgacctgacccagcaactccagcaaggcgcccgcccgctgctggagcaggatcaacagcgtaacaaaaacttggaagccctgcgcaacatccagagcctgctggcccgccacagcatcgaactggaactgcccagcttcgccagcaaacactggcgcagcaccagcaaggcgctgctcgccgaacagagcaacgccctgcccgatctcaaccagatgctggcccgggactggatcgacctgtcgccactggaagacggcctcacccgggtgcgcagcgaacaacagctgcacaaccaactggccgaacaactgcacagcgaacgggaagacaaacccggccaggaagcactctctgtcgctcaaaggcttgaccgcatcgtcagcaagcgtggccaggccctggaaaccctggaccagcaacaaaagaaaatcgaacaacagatccgcaacctggaatccaaacgggtgaactacccgcaggatgtggagatcgccatccacgccatccgccaggaatgcccgcaggcagaaccgcgcgtgctgtgtgatcacgtggaagtgcaggccccggactggcaaatggccatcgaaggctacatcggcggcgcccgcttcggcattctggtggaacccaaccatgaagccgaagccatccgcatcgtccgccgtctcagcggcaagcagcgcaaccgcgcccgcgtgatccaaggcgaacaggcccgccgcgatgcagaacgggtgcagctacccgacgactccctgttccacgccctgcgcttcagccaccgcaccgccgagcactatctgaaagcctcctacggcagcgtagtgtgtgtggaagacgccgaagcgctacgccgcacccggcgcggcatcaccgccgatggcctcggctccggcggctacgccatgttccgctgcgacctgccggacagcgatctggtattcggcgaagccgcccgcgaacgcaacctgaatgcccagcgcaacgcgctcatggaactgcaggaaaactaccagcgcgcagccgacgattatcagtccgtgcgccaactgcacacccaggtcaaagccttccagcccctgcactgggtcaacgccgccacgcaattgctcgatgtccagcgccagctacaggaaaccgaaaaggccctggccaccctggacctcagcgatcacgaagagctggaagaaaaacagcaacaggcaaagaccctgcatcaggaactggaagccaaacaaaagcagctcaccgaagagaacggcaagctcagcgaaaaactcagcgcctgcagcaagaccatcagcaccctggccgaccagagcgaacagtttcaggaaaagcaggacgaagccgaagccaacctgcacggctgcacaaaatactggccggggctcgatgtggaaccgcgcatcgccgccatggatgaacgcctgcaaaacgcccacggcgacatcgactttatcgccgaagaaaccgcgctcaccgagcagctcaccaaaaccgccgtagcgctggagaaaaccctcaaccagtacaaccaacaggcccaacccgccgaccagatcctggcggacagtgcggacgccctgcacagcgccccgttcttcggccatgtgcaaagcctgcaccagcaattggataatctacacaaccgcctgcgcaataacgtgctgctggaaaagcaggaaaaactcaccagcctgcgcgacaccttcaacaccaccttcgtcagcgacctgtgcagccagatccaccaggccatccaagacggcgagcgcatcctcaagagcctcaatagcgaactggaacaccaccagttcggcgccgactgcgagcgcttttcgtttgagtggcagtggataccggaatacaaggaatactggaacttcttcaaggaagtcatcgacattcccaacctgggcgacggcaccagcctgttcgacacgcccctgtccgccaaggcagaagcggtacgcgaccgcctgctcaacctgctgctggacggcgacgaacaacaggccctgcgcgaactggaacgcatcagcgactaccgccgctaccgccagtacgacatcctcaagcacccgcagggcaaacagcccatcagcctcagccagtacggcaccggctccggcgggcagctggaaaccccggcctacatcatccgcgccgccgccatcaccagcgccttccgcttcaacgaaggcgacagccacctgcgcatggtcatcgtcgacgaagccttcatgcacatggacgaaagccgctccaagagcgtcatcaactacctcacccacaccctggggctacagctcatcttcatcatgcccaccagtaaagcaggccccttcctggacctgatcagcaaccaattcgtgttcagcaaagtccccagccccatggccgtgggcgaactcaacacccgggtactggtagacagacaacaactcaatcaggaacgcatcagcgaactgtgggagcagcacagaagagtgattcgccagcagggggcgttggactttatggaagaagtgaacggataa

SEQ ID NO: 44113 - DNA, 1404 bp, Marinobacter sp. EVN1
gtgagtttcgccacacttaacaccaatttgttcaaagcgatcgctggcgataatgggcggttaatgctcgacctgctattagagctcgatgcgtttcttgatccggcgcagctggcggatgagccgacgccactacaggtgagagtttttcttcgcgactatctcgccaacagtcacttacgcctggaaattgaatcaggtgaggcggcaaccaccccacaaagcccagaacattatgtttactaccggttgcgcgatacaggatggatccgggaagagctggaaatcggataccgttatgtggtctggatggctcaagaaggtaggcgactactgcaattcctcaggagtatgggtgctgaacacccatcgcttggtgtggtttgcctgtcggtgcgctccaatcttgccgaagtggttaaggatccggccaatgggtctttgatccggaaagcagccgatgacatggaaggcttcctcaaccgcctccgagccctcgtgggcaatattcgcgaaatacactatgtgattagcggcggagacgtgtcaggcagtgggaacttcaatttctactttgaagagtacctgggtgagctatttctgccgaacattgagaaactcgcgttgaagggcaaccccaaccttcacgccagcaaaattcgcaagctggtaagtgatatacggtttagtctggagcggttggaggtgtgtgctaaggcataccagcgggacgatatagcgaatccatcgattgaaacggtcgaagccgatctggatcgactgagtcttgcgtttgacggtattgggcccttgttcaaaaaaacacaggactatgcgcggcgcattactcgtcgaatgcatgaaagaattaaatacaccgtgcacactcccagcaatataggccaacagatcgaggatttgctcgatcttattggtcgggatgattcgattgaaaccctgcccagtccggtgatcagcgaaaaactgatctccgaaagccgtttggccaaacctaaggcgaaatcggtaccggcggtcgcaacggttcgcaggcaatccaaacctctgtgggaaaagcgagcctataaccagctcaaacaagagcacatacacttccagaggtatgaccctgaccgggtggtgagctttattgagacaaatatgggcgaccgagctcagatgaccaccgatgacctgaccatcaagactgctgacgacatgatggcagcgttgcacttgcgcttattggcgcaaggtgtttccaaaacccatgctctttatcccctgttagctgagtacagcgtaaccttcgacgagcacgaatggacacagcttgaatacatggccggtcgtcgattgattatcaccaggcaggccttctcggagatatcacgaaatgattaa

SEQ ID NO: 44114 - DNA, 663 bp, Marinobacter sp. EVN1
atgattaatgacattgtgctgagagagctaaaagaaattgcgtcgcgaaactccgacgactacgccgatactcttcgaaatacagctgcctacctgctccagaagcagtgggtctggaaaggtaagcgagggcagaaagagcatttcaaagtctgcgaggacaatgccacatacttccataagctattcgatgcactggacatggactggtattacgatcgcaactttgggtatgtgggggtgctgcccagaggcactggaagccagctggatgtcacggccaccgtgtttctgctgatattgcgcaaaatgtatgacactgaggcctcgatggggcgcacggaccttggccgcgtcacgccgccaaccgtggagctgcttaatcaatatgagcaagttaaaggtgaaagaccgatactgaccgctaccgtcgaggccctggatacccttcgaaagaggggcatcattgaacttgggcccagagatccggacaccaggcttcctgatgtgacggtgttgcccaatataacgcgagtggtaggcccggcctttcttggatcgctcgaaaacttcatgaacagctacgctccagattcagaacccggagatgagtcacacctgagcactgaccctgcggaggcgtctgatgacaacgctgaataa

SEQ ID NO: 44115 - DNA, 3498 bp, Marinobacter sp. EVN1
atgccagcgcatttccttcaaaattttgttttcgcacagtggtatctcttggatctggaaaccctggaggtgggagtagccgcatctctcttgtcgggtgagaatggggccgggaaaacaacgatatttgatgctatccagtttgttctgatgggaggagatcaaaggcgtattagctacaacgccgcctccgacggaaaagcgtcgggacgctctgccagaagctacgcgctgggcgaattcaaagaaaacgatgtcaccacgttcgagcgggaaagtgccaatacctacatttttctgaattggtacgaccatcaccagcagccctattcgtttggggtctctatccacgctactcagcaatcggccagcattgaaactcgtggtcacatcatcaaagggcgccatgtctccgaggtagaccttttatcgtcggaggacacatttttaccgtggcgtgaatttgttgatcgtatgaagttgaccgccaaagagtaccggggttcgatgagctacgagatgatcgacggggcaaggattatgcgcgaaaagttcgccgagatgatgtcggttgatcaaactcgcagcgggaaaattgagcccgaaatgctggtcaaaacattgtccagtgcgttgcagttgaagatggatagtccgattgattcgtttatccgcgatttcattttgccacccgaacctatagaaacagagcagcttcgtgaggatctgcttgagcaccgccgcattgaggatgaaatcacgcgcgcggagagtcacaaattggctcgtgaagctttgatcactgaagcagataaggtgacgaagcaccggactgatgctcactttgagttatgggtctcacaagaggctgaagtggcccggcttgatgaacgaaacagcggtctagaggaccgtctggatcagcagcaagacaagcttgaagaagcagagcggacgatcaagcaacaaacccctcgactgcctgaactcaaaaagcgtcatgaggaagctctgatagcatggcaatactcagatgccgcaagtctgagtaaaaccgtcgaggcggcggagcaaaatgtcacgcaagcaactacccgtttcgctgagctaaccacttccctcagaaacacggtaggtgaaatcacgcgccaacgctttgctgacactctggatattaccagttttgaacaactggcggagcggtgggtcgaatgttccgatcttcttgcccgcgctgacgttgccagtctcagtccatcagatcacgaaaataccgccaaggtcactgcggatcttttggatgccagaccggttttggatgaaatttccacacggcttgaaacagcagataaacatgtcagccatgaactgaaacaaatcacagatgatggcgcagcacttcaatcacgagttgaaaggttgaagaacgggctttcggacattcatccgtcaaccagcctaaccattgagctattaaagcagaagggcattcaggcggtgcccgtttgtgatgtatgcgagatcactaattcagagtggcaagaagctgttgaatcctatctcgggccgaatcgtgaagctcttgtagttgcaacagaagattttggtcacgcacttgagatctacgaagccactcagaaacaaagcccgcgcataaggcgagcacgccttatcaacccagatttagctttgcgcgaaaacaaatctcctactgtgggaatggtctcgacactcatcgaaacccaggacccggtagcccggggcttcatgaacatcatcttggatcgaaccaagatggccgcgacccgtgatgaactcaggcgcgaacgtaaagcactgatggcctccggtttaacggctggcggcgcaacgattggcggcacctctcaaattgacggtctgctgattggtaaacatgccaaagctcaacagctggaacggctggaaaaagagcttgatagtttggcccggcgagtagccaggttaagtggcccgtcgacaacgctgagcaagcttaatcgccagtgggcgggcgtttgcgcggcggtcaacgatggcgccgtcgcgctgcaagagcaaagtcagagtctggcagcctgtgagcaaactctctctcatgccagggaacagctgcagcctcttacctctgaagatgagcgtcttaagagcgccaaagagaaggcggagcaggcccactataactgcaatgaaaaaatcacacaggcaagaagcgacaaacaacaggcagaggctaccatcaaaagcctgaaagctgatttggagcaggttcgtcctttcctggagagggcccgggagcaacgccgccacacagaggcatctgaattgcacgacatgaataaggcgctggaacgctgggaagcctatgaacagaaatatgatggggctgaggggcgctacgcactgattcgaaatgaagcggaagggaagaaaaatactgcccgggaaaaagaactaaggtcacgtggagacctgcatgtaaaagtgatccaattcaccaatgatttttcagaagacattgccaatcgggctgagcttctgggggccgccaagcctgagaacgatgactctgatgcctattctgtcataaagaccgactgcaccgattgggtagagcgcatcctcgaagctcagttactggatcatagacaagccgctcaggaagctgctgagcaaatggaaatgaactttcggggcatcatcgtcggggagcttcagaatcgctttgatcagatgcgatacactttccagcagctcaacagtgtcctcaagagaattcctttccacgacaacatctacagctttcacttcaagctccgtgagaccgagagcttggccactgtttacgaatacataacaaccgtggatagggagcaggccgagttggttggcaccttgttcgagaaagattccgagcatccggccctcgaacttctgaaagaggctctgatctccggggatgacctgattaatgagatccgggattaccgctcgttcttccaatacgatatgaaaatgcgtaatcccaatacgggtgaagagcgtcgggtaaccgaaatgcaaagcaccggttctggcggggagaagcagactcccgcttatatcgctctggcggcgagtttcatgaatgtttacaagattcgtgaaaactctcctcggggtgcctctctggttctcctggatgaagcgttcaacaatatggatggggggaacgccagtggtgccgttgcctttctgaaagagattggtctgcagctaatagtggctgcgccgcctgaggtcaccctcaagatcggtaaggaaatggaccagatctataccatctgccgggaaggtcgtgatgtggttatcgaccacacaaaaattttcgagggagggcataagttgattgatcaacgcaaccctgtctaccaccctgagcttgtcattgagcgagccgctgaattaaaagccaaagcggagacaatcactggggtatga

SEQ ID NO: 44116 - DNA, 1251 bp, Marinobacter sp. EVN1
atgagcaatcacgtcgagacatttctcgcgcaactgatcaagcacatcgataggccggatggtgtagtgccccaagcacggatacgcattacagatcacgcctatcggtggtacttcgcacttaacaatagtgcgaagacagcccttcaccgaagtttagaagcgctggagcatctcgacattcagtatcagcgtagagtggccctgggtgcattcaagcatattgaggcggtccaaattactgatggatgccggctcatggcgtctcaagggctaaccccgttggcggatgacatagagctcgccttcgaacagcttgaggctgcagaattcaatataccctggtgggaaacgactaagcgagatatagcggaggcatggtcagccaacaaaacattcaatggtgttaagcgacagcaatccgcgcggcttttcgatgccatgaaggttgtcgagtggatcgttcagtctgaagacacctcgccagtccctgagatgaaaaccctcagcacgatgctctttaatgactccaagaagcttgaggaaaagagtttcgcgaatctgattcgtcgtttgatggtcggtcaactggacgatgacgtggcaaacctgatggacgatggaccgaagttgctggagcattatgggatcagcaaatacccaatgccaatgcggtttaaagcgaacgccctgctattctgccgaggtgttgttgatttgtccgcgctccactacgggatcggtgtttccccggatgaaattaaaggtattgagtggcgccaacgaccaccgtatttgctcttcattgaaaaccgagccagctttgagcggtatgtgcgggagattgatgatgcgggtgtcgtcatttacaccgctgggttcccgccccgtgcctggctgcatgcaatagagatcattatcgctgaagtccaagatgaggtgccggtttatcactggggcgatcgtgacgtgggtggttatagaatcctggcgtttctggcgaaacgacttaatatcgatattcagccataccttatggggctggatgcttcgatacgaagccaaggtgacgacgagctcaaggaaatacctgtggcagggttgatgcaagcgattgaatcagcgcgaggttatcctgccatttctgagctttatgaacatcttggtaactgccaacgaacaagcttactgtggattgagcaggaacaaattgcgcctctcagcccgctagacaaaaccagggccctatag

SEQ ID NO: 44117 - DNA, 681 bp, Candidatus Symbiobacter mobilis CR
atggacaccgtcgaacacgaaacaccgctagccccaacaccgactgctgcgcagccagccgtacccgaactatcgatcctgctcgtgcatctgctcaaaggcgtgctgtaccgggaggacgacgagcgactgtgggcaagcctgttgcgtttgcaggcccgcgtgcgcgagcaggccgccgtgctgctgctcgatctggtgctggacgagtccgaaggtttcgccttcctccaaagccgccctgacccggaggagtccgacggcgcgccgcgcctgccccggctggtcgtccgccgcccgctgtcctacccggtgagcctgatgctggcgctgctgcgcaagcgcatggcggagttcgatgcagcgggcagtgacacgcggcttgtgctgctgcgcgacgacatcgtcgagctgatgcgggtgtttctgcccgacggtacgaacgaggcacggctgatcgaccaagtggattcgaccatcaccaaggtcgtcgatctgggctttttgcgccggttgaaaggtgctgcgggcaccgcgccagaccgaggacgctacgaggtgcgccgcatcctcaaggctttcgtcgatgcgcagtggctggctaacttcgatgcgcggctggagcagtaccgcacggcgctgtccggcggggcgcagaccaaggaggccgccgatgcgtga

SEQ ID NO: 44118 - DNA, 2925 bp, Candidatus Symbiobacter mobilis CR
atgcgtgaggcgccgacgcagggactggacttcgtcgccgacgatagccgggtgggctttcgcctggaacggctggaggtgctgaactggggcacctttgatcagcgggtgtggaggttgcccctccacgggcgcaacgggttgctcacgggtgacatcggctcgggcaagtccaccctggtcgatgccgtcaccaccttgctggtatcggcgcaccgcgtggcctacaacaaggctgcgggggcagaaagccgcgaacgtaccttgcgctcctacgtgctgggccactacaaaagcgagcgcaacgaggggtatgaccagtccgtgacgctggcccaggtcttctggctgaaagacccccaggggcagcctgcacgcctgttggtcggggccgatcgctcgctcggcattgcggaagactttgcaggctttggcagcgacattgccgccttgcgcaagaaattgcgcggcgcaggttgcgagctgttcgacggctaccagtcctatggcgcgtggttccgccgccgctttggcatcgagcacgaccaagcgttggagctgttccatcagacggtatcgatgaagtcggtgggcaacctcaccgacttcgtgcggaaccacatgctggagcctttcgactcggagcaacgcatcgacgtgttgctccagcacttcgatgatctggaccgtgcgcaccaagccgtgctcaaggccaagcggcaggtcgagctgctgacgcccttgatcacagacgggcatcgccacgcggcgctgtcggcagagattcaaggcttgcgcgagggccgcgatgcgctgcgcccctactttgcgcggtgcaagacggtgctgctggatcgtcggctggagttgctgacgcaagatgccctgaagctggacgcgcagatcgagcgcttgagcgtagagcgtgacaccgggcgggaagaagtggggcgcatcgagcgcgccttgcgcgacaacggcggcgaccggctggagcaactggccaagctggaggagttcacgcactacccggacatcgactggcaagccgtggcccgcgacatcgcccagctcctcgacgagcgccaacggctggaggcagccgccgacgcattgcaggagctgggccgacagcttgccgctgcacgcgggcgcctcgctgtcaccgaaaggacgcttgatgacgcacgaggcaagcgcggcgaggtcaagagcaagctcgaagcagccgaagccttgcgtcagcaggcgccagccatcgtcgatgccaccgtgctggacgatggccagaccacgcgcctggacggctggcgcgccgaggcgctgggcgaacaccagttatcggtggaatcctgcgacaaccgcgagcaagacgtgcggcgctggctgcaagagcgcatcgactccgaagacaaacgcttggcccgccttgccgaaagactggtcaaggcgatggccggctttcaggacgaattcaaggccgagaccgtcgagatggacaccgcgctggctgcgttgccggaatatgagcggctgctgacgggcttgcaacgcgatgatctgccgcgattcgaggcgcgattcaaggatctgctcaacgtcaacaccatcaacgagattgccaacttcaacgcccaactggcccgcgagcgcgagacgatcaaagaacgggtcgagttcatcaaccagtcgttacaggccatcgactacaaccccggacgcttcatcaagctcgtggcccagcccagcccggacgccgagatccgcgactttcagcaggacttgcgcgcctgtaccgaaggtgcgctgactggatcgggcgacgaacagtattcggaagccaagttcctccaagtcaaggccatcatcgaccgctttcgtggccgagaagggctgtcggatgccgatcgccgctggacggccaaggtcacggacgtgcggaactggttcctgttctcggttagcgaacggtggcgcgccgacggtgtggaacacgagcactactcggattccggcggcaaatcgggtgggcagaaagaaaagctcgcctacacggtgctggccgcgagtctggcgtaccaattcggcttggagtggggcgcagtgcgttcgcggtccttccgcttcgtggtgatcgatgaagcgttcgggcgcggctcggacgagtctgcgcagtacgggctgcgcctgttccagcaactcaacctgcaactcttgatcgtcacgccgctacagaagattcacgtgatcgaaccctacgttgccagcgtgggcttcgtacacaacgagccaagacgccgcatatcacggtcgagtggcgggagtggacccatcgggtgcaaggacgccagcgtttgccggctgccgtgtgggtcgtgtcgcttgatgaagcgctcgcatggatcggcaaggggcgcgctgcggaaccattgcagggcctgtggcagcacaccggccatacacagcccgccttgcagccgtgggtgcgcaaacgtcccttgcaggcattggccttgcccgccgaagccatcgacgcgaacgctaccggcaccgcgcaattcgcccggcgctacgggtttctggacaagccagtgcgcattcgcttccgcctgctcgaccccacgctacccagcctgccggggtgcgtgggctgtacggatatcacgcttgatgctgcaagttttgcggggttggcgctgcctgtggagcgcgtgttcatcaccgagaacgagaccaatttcctcgcgttcccgcccgtgtcccgtgcaatcgtcgtgttcggggccggatatggatgggaggcgctggcccgcgcagactggctgcatcgctgccccctgcactactggggggacatcgacacccacggcttcgccattctggaccagttgcgcgggtactttccccataccgcatccttgctga

SEQ ID NO: 44119 - DNA, 270 bp, Candidatus Symbiobacter mobilis CR
atggacaaggaaacgctgctggcgcaccgggagcattggggcgaggagcctgaccaagcgtgccacgaccttcgacgactgacgcccgacgaggccagcctctacgatgctctgcgctgtgaccgttttcaagagcgcttgaggttggagcaggaacgcattgggtaccaccatttgcttgcgcaactgggcttggcgccctatccttcgcaaccccacccttttccccctgtgttcagccgaaccaacctacatgccagtgccggatag

SEQ ID NO: 44120 - DNA, 1452 bp, Leifsonia rubra CMS 76R
gtgtctgctctgagtaagtcgcatcaatttcgcttcctggtggagacagatgcaacgtggcgactcttgcgcacagacaacgccgccgtcatcgtggcgttgctgggcgaacacctcagtggcgaaaaccggcgcatgctggcagccgaactttacgaagccatcgaccacgacctcggaatgttacgcgccaacgaattcgagctccctcagacggcgcaagcctactgtgcagaatggcgtaaggcgggctttctgatacgccgaccggctgaagacactcgaggcgaaactttcgagctatcgcccggtgccctcggggcacttcggtttgtcgagcaactcgcggctccacggcaaacagtcaccgagtcacgattatcgagcatcgcaacgcaactcagccagctcgcaatcgacaccgatcccgacaccacccgacggcttgaacaactgcacgcccaacgcgaccgacttgatgcacaaatcgaacggatcaacgccggcgaagaagatatcatcgaccccgcccgtgccgcagaacgggttcacgatatcctcgcccaagccgaagagctccccagtgactttgccagagtgcgggcgaagttcgaagagttaaaccgcgatctgcgtgcacgcatcgtggaatcggatgcctcgcagcgtgccgtgctcgacgaagtttttcgcggcgtagacctgatcagcgaatccgaagagggactcagcttctccggattctccacccttgtgctcgaccctgcggtgggcacagccttcgacgacgacattgaacgcgtactcgatcgagactttgccggaaagctacggccatccgaccgacgcttcctgcgtcgattcatcacaacactcaaagatcacagcggcgagatccacgacgtgatcaccgctttcgcgcgcggcctccgacgctacgtgcagtcgcaggactaccagcacgatcgaaaattgcgagaacttctccgtgaagcgcaggcttcaggggtcgaagcctcccggcacatcaaaccgtactccccaacccacctgcgcctcgaactgtccgccgtcgcgctcagcagtgccggcgccatccgcctctacgatcccggcgaacaaaatgccagcacccccattgttcgacacgagccggaagcagctgatcttgaggtgctccgagcgctggcgcgagccaccgagatcgacttcgctgagctcaccaacaccgtcaacgaaatgcttgagcacgccgacaacttcacggtgggtgacgtgctcacccggtatccggcaactcagggggtcgcaagtgttgtgggcctgctcaccctcgcagcacatcagggcgagctcgctgatggtgtggagaccgtgcactggcgaggggtcgaccatcaggcacgcgctgccaccatccgaacccatcgtttcacccggagactgcaatga

SEQ ID NO: 44121 - DNA, 624 bp, Leifsonia rubra CMS 76R
atgaatgacgaaccagacctcgaagcatccatcaggcccctctggaatggagacaccggcgttctcgtcgagcaatcacggcgggccctgctcgaactaatcaaaggcccctacctttccggggcgaaaacgaccacactctggtcggcactgctgtccgacgaggtggctattcgatcacggcttcacgaactgtttcttgagctgatagtcgaccgggtcgcggagttcgcgttcgtccgcaatgtcgcaacagacgaacttggcattccgaacgccgtgcgtaccgcgccccttacttttctcgataccgcgatgctgctggtgctgcggcggatgctgctgagcgctgatagtgatgggcgggtgatcgttggccaagaggaagtttatgagcagttagatgtctaccgttctaccgaccgcgacgagcatgactttgatcgtcgattgaactcatcgtggaacaatatgaaaaataagttgcgcgtcatccaccaggctggtgaagaagatcgtgcagagatttcaccagtgctgcgactcatcgtcgatgctgaacagattagtgcaatcagtgccgaatatcagaggatcgccgccgatgagaggctaacctcatga

SEQ ID NO: 44122 - DNA, 3360 bp, Leifsonia rubra CMS 76R
atgacccttcttgagatgccggatgccgggcccaaggagcacggaaccgacggagacaatgggagcctgcacattggtcagtggaggctcgcccacgtcgaggtgctcaactggggtactttcgacggactctatgaggtcgacatcgcgcgcaaagggcacctgttcacgggagcctctggttccggcaaatcatccctactcgatgctattgctaccgtgctcacccccgaccgctggttgcggttcaacgctgcggcacaggagtctcagacccgcaacgatgaccgcagcctagtcagttatgtgcggggggcgtggagcaaagaagcggacgagcatctcgatcgagcggtgagcacccatctgcgtaaggacgctacctggagcggtattctgctgcgctacgagaatgagcgcgatgcgccggtcacagtcgtgcgactattccatctgcgcggatcaagcgtcgataagagcaacctgaaagatgcgtgtttcattgatcgcggcgaagtaaaactgctggacttcgaagagctcgttctctccggaatcgaagcccgtcgcattaaaggcacgtggccggatgccgtcgtcacgacaaactggtcgcacgctccgttctacgccaagctgcagcgcctgctaggcattagcagccacaacgccctgcacctgttgcacaaaacccaatccgccaagaacctcggcagccttgatcagctgtttcgctccttcatgctcgacgaaccagccacttttgcgcgcgccaagaatgcggtcgaacagttcggtgaactgcgtgacgcccaccatcacgtcgtcgaactgcgtcgccaatccgagcaccttcaggagcttgaggcgtcgatcgcgcaatacgaacaagcctccgcagaggccgcagaggccgagcgactcggcgacctcatcgatccgtttcaggaccggttgacgttgcgcctggccgacgaggaacgcgggacgctgcgggccgaacaggcacaatcgcaagagtccgcgcgccgcgcctacgcggcccgcgacgatgctgtcgagcgcctgcgggccgcggaacggcaagcattgcaactgggcgggtcagacgtgtcccagctgcaagccaggcttgcggatgcgacagctgcggccacgacaacaagcagcaggtgggagcgcttcggtgaggaagtcggcagcgtcggcatcacatcgccaccgacgaccggagcagagttcggggagttgcaggaatcatcgcgccgcgaactcgaacagccggcacccgagctagcccacgacaccgacgacaatcagcagtacttctcggcccgtgacgagttgaagaagatcgatcgggagcttgacgagctccgcagccgcaagagcaacctgccggccccactgttggttgctcgaaaacaactcgccgatgaactcgggctcggtgagacggcgctgccgttcgccggcgagctaatcgaggtgttgccggagtataccgaatggaccggcgcaatcgaacgggtgctgtacccgctggcgagcgccctgctcgtgcgtgacgagcacctggcggaggtgcgacgaaaagtggaacagcgcactctgggcgctcggctcgtctttgaggcagttcctgcgatcgtcgggcccaccaaggctgcgaagtcggaccaatcactgctgcaccgcatccgagtgacctcgggcggtttcggcagctggttacagaccagggttgcctccgaatttgattacgcctgtgtcgagcaccctgatcagctcgacacagtcgagcgcggggtaaccatcggtgggcaggtgaaaaagtccgcccgccggtacgagaagaatgaccggtacgcggtgactgaccgtcggcaatggattttgggcgcagacaacgaagcaaagattgagttgttgcttgaccgtcgccgggaggccagccagcagcaggacgagtcccggttacgacttgagcgtgcttccaccaagcgcgatgccacagtgaaacgtcgaacggttctggagagcatcgttcgtcacgattgggcagagctcgacagaactgcggcaaacgaactggtgcacgctcggcgacgacaactggatgaactgacaacgggtaacaccgaactccacgacgcaattgcggccgaaggcggggctcgtgaacggttgcgttctgccgagaccatcgcgcgcgacgcgacgctgcaactcggccgggtagagaaccgtcttgtcgaagtggacacgctgatcaccacactgtctaaccgaatggttgacaatgcaatcgcggacgtcgatgccatcgcactagagaaacgttatcgctcggtgcagcgcaagatcgacaggcagagcgtagagggagtgggacgcaaagttgccgaagccctccaccgagcatcaatctctgcgcaggcgacactgcggtctgcagagtcgactttcgcaaaaggggccatcggatttcgtgggcactggcccgccgcagccgccgatctcaccgaatcgattgacgaccgcgaaggctatcgagccttgctcgctgatatccaggcgcgcgggctccccgagcatgagagcaattttctgcgattattgcgggagaaatcgcgggacctgattgggcacttgctctctgatattcgcgatgcacccaagcaagtggtcgaccggatagaccccgtcaatgcatcgttggggcggtcacgattcgacatcgaacggtacctgcgcatcgaggtcaagactcgacgagctcccgaagtgactgagtttatgggcgacctgaagtccgtagtcgacggcgcctggaatgacgaaaatctggtggcagccgagtctcgattcgccgtcctaaaccgggtgatggccaggctcggatccagcgacaacgcagatctcgcctggaagcggcgctgtttggacacccgggaacatgtcactttcatggcacacgaggtcgacctagcagggcgggtcgtcaatgttcacgactccagtgctggactctctggcggacagcgtcaaaagcttgtcattttctgtctcgctgcggcactgcgttatcaacttgctgccgaccaagacgaagttccgtcctacgccacgatcatcctcgacgaggctttcgataaggctgacagtcggtacacgcggatggcgatggatgtttttgtagaattcggtttccacatgattttggcgacaccagagaagttgctgcagacgattgagccgtacgtcggcgcggtctcctcgatcacgaacccgacccgccgcgagtcgctcattgcaagtctcatgttcaaaccccatgaccctgcgtctggtgcatga

SEQ ID NO: 44123 - DNA, 1197 bp, Leifsonia rubra CMS 76R
atggcaacgcacagcatggtgacggtcgcagaagcgcagcaacgcgcacggaagatggtcgaaggcagccagcgacagtgggcggcaaccgggggtgaaaccgttcggctcgaagtcgttttgcatccgccgacggagcgcacagttcaactggatgtggtcggtgcgatcgcatggacccaatcctggcgcgagctagcatcgaccgaccccagcgcagatgtgacctggacggaccggcagtggccgagtgccgggaggcagtcggtaccgcagcggtgcgttctggttggggctgacgttattgctgctttcgcaggctcaggtgttgcccgcagctggcgcactctgcgggaccgcgctgcgcggcttcgtgcagaattttcttgtgccgccgatttcccgtccgcggaccccgagaaggctctcgatgcgctggcggctgcgatacgcacccacgcgggcaagttgcagcttctgccggagaaggacttcgagacgctcattcctgtgatctcttggcttgcggagcacccgacctcggggtggcgcatcagacagttaccgatccgcgggatcgacaccaagtggctcgaacgccaccgatcgatcgtagaggggttgcacacggcggtaacgggacgcagctccctcgggcttctcgcgtcgccgacgcaactacgggtacgtttcctcgatccgacgatgcgaccgggtggcatgtctgatgtgagcgcgtcagttgatgagttggcagcgctcgatatcgtgccacacgtcgtatttgtgtttgagaacctcgaaacggtgctcgcgatgccggaaacgccgggcgcggtcgtcgtgcacggaagcgggtacgccgcaccacgattgggcgccatcccctggattaggaacggagaagtgatctactggggggatctcgattctgacggcttttccatacttcacgcactgcgatcgggctgcccggacgtgaccagtgtgttgatggatgacgagactctctttgcctaccgggatctttgggtacccgaaaccaagcctgcggctggggtttacccgagcttgacacctaccgagctgagaacgctcgagcacatccgcagtgaaggcaacgttcgactcgagcaggagcgcatcgattggcagttcgcgctcggaaagctgcgggacgctgcaggaattgtctaa

SEQ ID NO: 44124 - DNA, 1470 bp, Corynebacterium sp. KPL2004
atgtctgttgaagctcgcgccctttcactgcggcgattattacatgattccgcggcagtgcggctgctggcggccgataatgccccggtgattttggcgctgattgctgagtattttccccgcggcactcgcgcgcggccggcggcagaagtatatgagctgatggtcaccgattttgaggtgcttgccagtgaattctcaatgccgcgcacaccgcaaagttattgcaatgactgggtgaaagctggttggctagtccgtaaatctggcaagagctcgcgcggggaaacgttggaaccgagcgaggaagcactgtccgcgctcgaggctgttgaacgttgggaaacgccggttactacggtcaccgcatcgcgcgtggaatctatcggctcggcgctacaacgcttggcgcgagatacaaatgaggatatttcgagccgcgtcgccagcttagaggcggagcgagaccgcattgaccgcgaaattgaaaaggcacatttagggcagtttgaaaggctgactgcggcagagacacaggaacgcgtccaagacgtgctgaacatggctatggcagtgccaagcgatttcgccagggttcgccacgaacttgaagccctcaaccaccgattgcgccgacagcttttggatccagaaggttaccgcggcgaagtgctcgaggaaatctttagcggtgtagaccacatcgcggaatcggacgcggggcgcagcttccgcggattctattcctacctcatggatagagaacgcagcgcgtggctggaccagtggattaagcaggttctagaaagcgacgttggccaagagctagcgccagaaaaccggcggcagctgcggaatctcttccgcgatatggaagaaacgagcttcgaggtcaatcaaactatgactggcttggcacgcagcttgcgcaactatgtctcctcagaacaattcgcagaagaccggcgcatgattgagctactgcgcgaggcgcggggcatggccattgatgcagcgcaggcatcggagctgaaagcctttcaccgcatggaaacacccctgcagcgcatcggcatgtgcattcattccgtatcgcgcatccacttggccaacccgggtcgggaggtcgtggaggaagcaccggaagccttccagccgggacaggagaatgcggaggcgttgtatgagctggtgcgcgaatcagaaattgattttgaggaattgcatggggcgattcgcggggccgtcggcaaggcgggtccgtgcacgattggccaagtattgcaggcgtacccgcccacgcagggcctggccagcgtcgtgggattggtacacattgcggaccagcacccactaccggcgctgcatgatgcgcacgagaagatcacctggaccgaagaagatgggaccattcgcgcggcgtatatccctactatgtatttcgatagcaccaccgttgaggagttgtag

SEQ ID NO: 44125 - DNA, 651 bp, Corynebacterium sp. KPL2004
gtgagcgctactgataatcaccgcgtcgattcggcgcatgagcccccgctgtgggaaagcgataaaggatcgctgacctataactcgcgccgcgcgttggtgcagctgttgaaggggccgctcgtgcgtgcgcacaaggaacctgtcttatggtccgccatcatctcggacgaagacaacctgcgcgcccgcctgcatgaggtattcctcgagctggtcgtcgatgaagcagaagggtttgcgtttacccggatggtagaagaggaaacgctgcccattccgcaggtgctgcgcacggataagctcaagcacatcgataccgccatcctgctgaacctgcgccaggaacttggtttagcgctgcccggtgaacgcgtgattgtggatgtagaagacctccgggagggaattggttacgtccgcgcggttgataaccgcgatgaagccgggttcaataaccgcttcaatgcggcgattaaacgcatccgcaatgaatactcgctgctgagtgccaccgagacagaggggcgctacgaggtatcacccgtcttgcgccagcttttcgatgccgccacggtcaccgccatccgggatgaatacgcccgcctcgcagaagccgagagcgaccaggaggaggcttccgatgactaa

SEQ ID NO: 44126 - DNA, 3372 bp, Corynebacterium sp. KPL2004
atgactaacctgtatccaggccaattccgcatcagccgtatccagctcattaactggggtacttttcacggctatttttccatcccggtagcccgcaagggcttcctcatcaccggcggatccggttcgggcaagtccacgctgcttgatgcgatgtcggcagtattggtgccgcagaaggacctcaagttcaacgcggcatcgcagcaggacctcggtcggcataatgggcgcaacctcgtctcctatattcgcggggcgtggcggcagcaagaaaatgcgcacacgggtgaaatcgccccggagtatttgcgtgagggcgcaacaaactcggtggtggcgttgacctacgataatggtactggcacgcagcacaccctcatcgccatcttccgcctcaacggcggtgaaaattcggtgagccagattaaaaggctctatggggtggtgcagggagatgaggacatcgataagctcagccccctactcacccgcagcctggatacccgcaagattaaggccatgtacaaggggccgggagcgtcatttacgccgacgtacaccacgtttgcggatcgcttccgcaaacgcctgggcatcaagagcgagcaggggcaggttctgctgcaccgcacgcagtctgccaagtctctctccagcctggaccagctcttccgggactatatgctggatacgccgtctaccttcgagcgggcggaggagtcggtggagcaattcgaagatttgcgccaggcatacctgcgggtagaggacgtcaaggcccagattgagacgctggcacccctgccccaattgcactcccaacgcaccaccgcagaggctgataagcacaaggccgaggcgatgaatgaggcgctgccggcggtgcgcgcccgcttggtggcagaagaactggactatcgcatccgcgtgctgaccgcccagcaggcagaggcgcactctgcggccgaggcgctcgaagcggaggtcacgcaccttgacgatgccgagcgccgcgccgccgtagccgtctcccaactcagtgccggcgagctggccgccctagaagccaaaattgaaaccgcggagaaggaaattgagcaccgctccaaggagttccaccaccttgccgctgccgccgaccagtggaccgatcactttgagctcagcccgcacggcttcgccgagctgcaagcaaatgcccgcctgcgcatcgcggacttcgaggctgactcggcccagcttactgagcagcagcaagaagccggcgtggccgcccgcgatgccgcgacagcatccgcgtccttagaaagtgagctgcactcatttagctcgcggcgcaccaatattgataaggccctcgtagagctgcgcacccaactcgcgcaagatactggctacgccgaatcggagcttcccttcgctggcgagctactggatattgccccgcagcaggcggagtgggagccggtgatccaaaaattgttacacggattcgccgccaccctgctcgttccggaaaccgcgcgggaagccattaaccagtgggtcaattctcgcaatgtgggcacccggctcgagtaccgcactatcccggagtttgcaccggcgcccgcgcccgcgcgcagcccgcaacagctcatccacaaattggagttccaggatcaccccatgacgccgtgggtgcgccaccatatttcgagccgttttaactacgaatgcgtcagctcggtggccgcactcgaacaagtaaccaagaccccggccgtcacgcgcgatggcttggaaagccggcccaaggataaagatggctcgacgcgttttatcaaggatgatcgcacgcgttataaaggcacgcggtggtaccgagtaggttccaccaataccgccaagattgagctcctgcgttcccaattgaatgaagcgaaagccactgctcgtgccatggccaaacaggtccacgagctcaaccggaagatggatatcctgcgcacgcagcgcgataaagcgcagcgcgtactggagactaaattccaggatattgataccgcttccgctgaggcgcgcaaacgcgatttgcaagaacagtatgattctttagcttcctccccagaagcgcaggccttagccacagcacacgaacaggcaaaggaaaaactcaccgccgcccgcgcccaactgaacgaagcacaaaaacacctcggcaacgtggaaggcgagctgaaccgctccacccagcggcgccaaagcatcggaacagtgcccacggtggcggatcagggcatcgccaaggcggtcgaagaagccctgcacaagggcaggagaaaactcaccatcgatgacatcgatgcccggcgcgatgaggtgcaggccagcctgcaagaaaccgcgcgtagggccgcacgccgcatcgaggagacgaatgccaagattgtctccgtcctgcacaagtacctatcgcagtggccggcggaagcggcggatttggagccacaggcgagcttcgccggcgaaggcatggagaagctgaaattcctgcgcgcggaccgcttggcggattttcgcgctaagttcttggagctgctcaatggcacgacggtgcagaacttatcgcacctcgcctcctcacttcgccatgcccgtagcgatatcgaacagcgcatggagtttattaataagtcactggagcgcacgcccttcaatggggaccgcaccctgcgcattgatgtgaaggatgcccggggccaggtggtgcaagacttccagcgggatcttgatgccgcaacgtcccatagcctggcggagattagcgccgatgatcctgaagctgcggtagcgcgctaccacgccctggacaagattctcagccgcttgggctcgtctgagccagaggatattcggtggcgcaacctggtcctcgatacccgcaagcatgtcagcttcatcggccgcgagtgctaccccgatggcacgaccgccaatacttatcaagattccgcatccctctccggcggccaggcccaaaagctggtgttcttctgcttggctgcggcgctgcgcttccgcctggcggagccggatcaggacgttcccacctacggttccatcattttggatgaggccttcgatcgcgccgaccctgccttcacgcgcaccgccatgtccgtgtttgcgtcctttggtttccacatgattttggcaacgccgttcaagctcatccagacgctatcgccgtacgtggatggcaccatcgtggtcaactacgacgagcccattatccagggacgcccgcaggcgcgtacgggctattcgcttatcgatgccaccacctacccccacaagtccccggagtccaccgatgcggatgcctag

SEQ ID NO: 44127 - DNA, 1134 bp, Corynebacterium sp. KPL2004
atgcggatgcctagtgacttgcacacccatgcggcaaaatacctgcacaaccactttgctgaggcactagccgccccggattcgctgagcatcgactggccgctgcatccgcctacggccgccgctgctgcgcgcaatgtcgccgccacccaggagtttatccgcgcctggcagcgctggccgcaccaagaagagatccactacgaaccgcgcaattggtcccgcacgggactcggcaccaattccgtgcctacccgcgcagcccttaccggtgcgccccgcatcgccgcggctgcaggcctcagcgccgaatactcccgcgcgcacaagcgcgcgcacgacatcgccgcgatcttccccgactcccctgcattcgccgacgccgtgtaccgcacctatgcccagtggaaggacctatgcgcatacgatctgcgctgcttaaagccatgcttgatctggctgcgcgcccatccgaattccggcgagtgggagcgcgccgttccggtcgaaggagtagacggcaaatggataggcacccaccgccgcctgctgctcgctctgctttcgccttttggcataacggatttggggctgcgccgcaccgacgcccgcctgcgcctgcgctacctcaatcacgcccccgcgttgtccgatatcgaggttcccctctcccaggcggcacagctctttcccaccgcgcctccgcgcgttctcatcgtagaaaacaaacagaccttcctagccctacccctgctttccgatgccgccccacctaccatcgccatcctcggttccggcaatgccgcccgccaacttcacgccatcgcctggctccaccacaccgaaatcacctactggggcgatctcgacgccgccggcttcagcatcctcaacggcgtgcgcgcccactttccccacacggaatctctcctcatggataccgccaccgtcaccgcgttccgccacctcgcggtccccgatcccggtgacggctccgccatacttagccacctcaccaccgaagaacagcgtgcctaccgcctcctcttcaccgagggcaagctacgcatcgaacaggaacggattccgttcgcgcatgccaatgacgcgattcaatctacgtttcaacgctag

SEQ ID NO: 44128 - DNA, 1470 bp, Corynebacterium sp. KPL1998; identical to SEQ ID NO: 44124

SEQ ID NO: 44129 - DNA, 651 bp, Corynebacterium sp. KPL1998; identical to SEQ ID NO: 44125

SEQ ID NO: 44130 - DNA, 3372 bp, Corynebacterium sp. KPL1998; identical to SEQ ID NO: 44126

SEQ ID NO: 44131 - DNA, 1134 bp, Corynebacterium sp. KPL1998; identical to SEQ ID NO: 44127

SEQ ID NO: 44132 - DNA, 1470 bp, Corynebacterium sp. KPL1996; identical to SEQ ID NO: 44124

SEQ ID NO: 44133 - DNA, 651 bp, Corynebacterium sp. KPL1996; identical to SEQ ID NO: 44125

SEQ ID NO: 44134 - DNA, 3372 bp, Corynebacterium sp. KPL1996; identical to SEQ ID NO: 44126

SEQ ID NO: 44135 - DNA, 1134 bp, Corynebacterium sp. KPL1996; identical to SEQ ID NO: 44127

SEQ ID NO: 44136 - DNA, 1470 bp, Corynebacterium sp. KPL1986; identical to SEQ ID NO: 44124

SEQ ID NO: 44137 - DNA, 651 bp, Corynebacterium sp. KPL1986; identical to SEQ ID NO: 44125

SEQ ID NO: 44138 - DNA, 3372 bp, Corynebacterium sp. KPL1986; identical to SEQ ID NO: 44126

SEQ ID NO: 44139 - DNA, 1134 bp, Corynebacterium sp. KPL1986; identical to SEQ ID NO: 44127

SEQ ID NO: 44140 - DNA, 1413 bp, Corynebacterium sp. KPL1859
gtgcggttactggcagccgaaaacgctccggtgattttggcgctgatttctgagtatttcccccgcggtactcgagcgcggccggcggcggagatatatgagctcatggtcaccgacttcgaggtgcttgccagtgagttcccgatgccgcgcacaccgcaaagctattgcaatgattgggtaaaagctggttggctagtccgcaaatctggcaggagctcgcgcggggaaaccttggagccaagcgaggaagcgctgtccgcgctcgaggccgttgagcgttgggaaactccggttactacggtcacggcatcgcgtgtggaatctatcggctcggctctgcagcgcttggctcgggatacgaatgaggatatttcgagccgcgtcgccagcttagaggcggagcgagaccgcattgaccgcgaaattgaaaaagctcatttggggcagtttgaaaggctgactgcggcagagacgcaggagcgcgtccaagacgtgctgaacatggccatggcggtaccaagtgatttcgccagggtgcgccatgaactcgaagccctcaatcacaggctacgtcggcagctgttggatccagaaggctaccgcggcgaggtgctcgaggaaatcttcagcggtgtagaccacatcgcagaatcggacgcggggcgtagctttcgcggattctattcctacctcatggatagagaacgcagcgcgtggctggaccagtggattaagcaggttctagaaagcgacgttggccaagagctagcgccagaaaaccggcggcagctgcggaacctcttccgcgatatggaagaaacgagcttcgaagtcaatcaaacgatgactggcctggcgcgcagcttgcgcaactatgtctcttcagaacaatttgccgaagaccgccgcatgattgagctactgcgcgaggcacggggcatggccattgatgcagcgcaaggatcggagctgaaagcctttcaccgcatggaaacgcccctgcagcgcatcggcatgtccattcattcagtctcgcgcatccaactagccaacccgggacgcgaggtcgtggaggaagcaccggaggccttccagccaggccaagagaatgcgaaggcgttgtatgagttagtgcgcgagtcagagattgactttgaggaactgcatgcggcgattcgcggggccgtcggcaaggcgggtccatgcacgattggccaggtattacaggcgtacccgcccacacagggcctggccagcgtcgtgggtttggtacacattgcggaccagcacccgctaccggctttgcatgacgcccatgaaaaggtcacttggaccgaagaagatgggaccattcgcgcggcgtatatccctactatgtatttcgatagcaccaccgttgaggagttgtag

SEQ ID NO: 44141 - DNA, 651 bp, Corynebacterium sp. KPL1859
gtgaccgctactgataaccaccgcgtcgattccgcgcatgagcccccgctgtgggaaaacgataaaggatcgctaacctataattcgcgccgcgccttggtgcagcttttgaaaggcccgctggtgcgtgcgcacaaggaacctgtcttatggtccgccatcatctcggacgaagacaacctgcgcgcccgcctgcatgaggtattcctcgagctggtggtcgatgaaggagaagggtttgcctttacccggatggtagaagaggaaacgctgcccattccgcaggtgctgcgcacggataagctcaagcacatcgataccgccatcctgctgaacctgcgccaggaacttggtttggcgctgcccggtgaacgcgtgattgtggatgtagaagatctccgggagggcattggatacgtccgcgcggttgataaccgcgatgaggctgggtttaataaccgcttcaatgcggcgattaaacgcatccgcaatgaatattcgctgctgagcgtcaccgagacggaagggcgttacgaggtatcgcccgtcttgcgccagcttttcgatgccgccacggtcaccgccatccgggacgaatacgcccgcctcgcagaagccgagggcgaccaagaggatgcttccgatgactaa

SEQ ID NO: 44142 - DNA, 3372 bp, Corynebacterium sp. KPL1859
atgactaacctgtatccaggccaattccgcattagccgtatccagcttattaactggggtacttttcacggctacttttccattccggtagcccgcaagggcttcctcatcaccggcggatccggttcgggtaagtccacgctgcttgatgcgatgtcggcggtattggtgccgcagaaggacctcaagttcaacgcggcatcgcagcaggacctcgggcgccataatgggcgcaccctcgtttcctatattcgcggggcgtggcggcagcaagaaaatgcgcacacgggcgaaattgccccggagtatttgcgtgagggtgcaacaaactcggtggtggcgttgacctacgataatggggctggcacgcagcacaccctcatcgccatcttccgcctcaacggcggtgaaaattcggtgagccagattaaaaggctctatggggtggtgcagggagatgaggacatcgataagctcagccccctactcacccgaggcctggatacccgcaagattaaggccatgtacaaggggcctggtgcgtcatttacgccgacgtacaccacgtttgcggatcgcttccgcaaacgcctgggcatcaagagcgagcaggggcaggtcctgctgcaccgcacgcagtctgccaaatctctatccagcctggaccagctcttccgggactatatgctggatgcgccgtctacttttgagcgggcggaggagtcggtggagcaatttgaagatctgcgccaggcatacctgcgggtagaggacgtcaaggcccagattgagacgctggctcccctcccccaattgcactcccagcgcaccaccgcggaggcggataagcacaaggccgaggcgatgaatgaggcgctgccggcggtgcgcgcccgcttggtggcagaagaactggattatcgcatccgcgcgctgaccgcccagcaagcagaggcacactctgcggccgaggcgctcgaagcggaggtcacgcaccttgacgatgccgagcgccgcgccgccgtagccgtctcccaactcagtgccggcgagctggccgccctagaagccaaaattgaaaccgcggagaaggaaattgagcaccgctccaaggagtttcaccaccttgccgctgccgccgaccagtggaccgaccactttgagctcaacccgcacggcttcgccgagctgcaggcaaatgcccacctgcgcatcgcggacttcgaggctgactcggcccagcttactgagcagcagcaagaagccggcgtggccgcccgcgatgcagcgacagcatccgcgtccttagaaagtgagctgcactcatttagctcgcggcgcaccaatatcgataaggccctcgtagagctacgcacccaactcgcgcgggatactggctatgccgaatcggagcttcccttcgctggcgagctactggatattgccccgcagcaggcggagtgggaaccggtgatccaaaaattgctgcacggattcgccgccaccctgctcgttccggaaaccgcgcgggaagccattaaccagtgggtcaattctcgcaatgtgggtacccggctcgagtaccgcactatcccggagtttgcaccggcgcctgcgcccgcgcgcagcccgcaacagctcatccacaaattggagtttcaagatcaccccatggcgcagtgggtgcgccaccatatttcgagccgctttaactacgaatgcgtcaactcggtggcggcgctcgaacaggtaaccaagaccccggccgtcacgcgcgatggcttggaaagccggcccaaggataaggatggctcgacgcgctttatcaaggatgatcgcacgcgctttaatggcacgcggtggtaccgagtaggttctaccaataccgccaaaattgagctcctgcgtgcccaattggaggaagcgaaggccactgctcgcgccatggccaaacaggtccatgagctcaaccggaagatggatatcttgcgcacacagcgcgataaagcgcagcgggtactggagactaagttccaggatattgataccgcttctgctgaggcgcgaaagcgcgatttgcaagaacagtatgattctttggcttcctccccagaggcgcaggccctagccacggcgcacgagcaggcaaaagaaaagctcaccgctgcccgcactcagctcaatcaaacccaaaaacacctcggcaacgtggagggcgagctaaaccgctccacccagcggcgacagagcatcggcacggtgcccagggtggaggatcagggcatcgccaaggcggtcgaagaagccctgcacaagggcagaagaaaactcaccatcgatgacatcgatgcccggcgcgatgaggtgcaggctaacctgcaagaaaccgcgcgtacggccgcgcgccgcatcgaggagacgaataccaagattgtctccgtcctccacaaatacctatcgcagtggccggcggaagcggcggatttggagccgcaggccagcttcgccggcgagggtatggaaaagcttaaattcctgcgcgcggaccgcctggcggattttcgcgcgaagttcttggagctgctcaatggcacgacggtgcaaaacctatcgcaccttgcctcctcacttcgccatgcccgtagcgatatcgaacagcgcatggagtttattaataagtctctggagcgcacgcccttcaatggcgatcgcacactgcggatcgatgtgaaggatgcccgcggccaggtggtgcaggacttccagcgcgatctcgatgccgcgacgtcccatagcctggcggaaattagtgccgatgagcctgaagctgcggtagcgcgctaccacgccctggataagattctcagccgcttgggctcgtctgagacggaggatattcggtggcgcaacttagttctcgatactcgaaagcatgtcagcttcatcggccgcgagtgctatcccgatggcacgaccgccaatacgtatcaggattccgcctctctttccggcggccaggcccaaaagctggtgttcttctgcttggctgcggcgctgcgcttccgcctggcggagccggatcaggacgttcctacctacggttccatcattttggatgaggccttcgaccgcgccgacccggcctttacgcgcaccgccatgtccgtgtttgcgtcctttggcttccacatgattttggcaacgccattcaaactcattcagacgctatcgccgtacgtggatggcaccatcgtggtcaattacgacgagcccattatccaaggccgcccgcaggcgcgtacgggctattcgcttatcgatgccacctcctactcccaggaatccccggagtccaccgatgcggatgcctaa

SEQ ID NO: 44143 - DNA, 1143 bp, Corynebacterium sp. KPL1859
atgcggatgcctaatgacctgcacacccatgcggcaaaatacctgcgcaaccactttgcgaaggctttgtcgactcccgattcgctgagtatcgattggccgctgcacccgccaacggccgccaacgccgcgcgcgatgtccccgccacccaggagttcatccgcgtctggcagcgctggccgcaccaagaagagatccactacgaaccgcgcaattggtcccgcacgggcctaggcaccaattccgttcccacccgcgcggtccttaccggtgcgccccgtatcgccgcggccgcgggcctcagcgccgaatactcccgtgcgcaacagcgcgcacacgacatcgccgcgatcttccccgactcccctgcattcgccgacgccgtgtaccgcacctatgcccagtggaaggagctaaacgcatacgatctgcgctgcttgacaccatgcttgacttggctgcgcgcccacccggactccggcgagtgggagcgcgccgtcccagttgaaggagtagacggcaaatggataggcacccaccgccgcctgctgctcgccctgctttcgccctttggcatcacggatttggggctgcgccgcaccgatgcccgcctgcgcctgcgctacctcaaccacgccccagcgctgtccgatatcgaggttcccctttcccaggctgcacagctctttcccgccgctcccccgcgcgttctcatcgtagaaaacaagcagaccttcctagccctgcccctgctttccgatgccgccccacccaccatcgccatcctcggcgccggccatgccgcccgccaacttcacgcccttgcctggctccacgatgccgaaatcacctactggggcgaccttgacgccgccggcttcagcatcctcaacggcgtgcgcgcccactttccccacacggagtccctgctcatggataccgccaccgtcaccgcgttccgccacctcgcggtccccgatcccggcgacggctccgcagcacttagccacctcaccaccgaagagcagcgcgcctatcgccaccttttcaccgaaggcaagctacgcatcgaacaggaacggattccgttcgcgcatgccgatgacgagattcaatctatattcggaggtcataaggtttag

SEQ ID NO: 44144 - DNA, 1413 bp, Corynebacterium sp. KPL1855; identical to SEQ ID NO: 44140

SEQ ID NO: 44145 - DNA, 651 bp, Corynebacterium sp. KPL1855; identical to SEQ ID NO: 44141

SEQ ID NO: 44146 - DNA, 3372 bp, Corynebacterium sp. KPL1855; identical to SEQ ID NO: 44142

SEQ ID NO: 44147 - DNA, 1143 bp, Corynebacterium sp. KPL1855; identical to SEQ ID NO: 44143

SEQ ID NO: 44148 - DNA, 1470 bp, Corynebacterium sp. KPL1824
atgtctgttgaagctcgcgccctttcactgcggcggttattacatgattccgcggcagtgcggctgctggcggccgataatgccccggtgattttggcgctgattgctgagtattttccccgcggcactcgggcgcggccggcggcagaagtatatgagctgatggtcaccgatttcgaggtgcttgccagtgaattctcaatgccgcgcacaccgcaaagttattgcaatgactgggtaaaagctggttggctagtccgtaaatctggcaagagctcgcgcggggaaacgttggaaccgagcgaggaagcactgtccgcgctcgaggctgttgaacgttgggaaacgccggttactacggtcaccgcatcgcgcgtggaatctatcggctcggcgctacaacgcttggcgcgagatacaaatgaggatatttcgagccgcgtcgccagcttagaggcggagcgagaccgcattgaccgcgaaattgaaaaggcacatttagggcagtttgaaaggctgactgcggcagagacacaggaacgcgtccaagacgtgctgaacatggctatggcagtgccaagcgatttcgccagggttcgccacgaacttgaagccctcaaccaccgattgcgccgacagcttttggatccagaaggttaccgcggcgaagtgctcgaggaaatcttcagcggcgtagaccacatcgccgattcggacgcggggcgcagcttccgcggattctattcctacctcatggatagagaacgcagcgcgtggctagaccagtggattaagcaggttctagaaagcgacgttggccaagagctagcgccagaaaaccggcggcagctgcggaatctcttccgcgatatggaagaaacgagcttcgaggtcaatcaaactatgactggcttggcacgcagcttgcgcaactatgtctcctcagaacaattcgcagaagaccggcgcatgattgagctactgcgcgaggcgcggggcatggccattgatgcagcgcaggcatcggagctaaaagcctttcaccgcatggaaactcccctacagcgcatcggcatgtccattcactccgtctcgcgcatccaactagccaacccaggacgcgaggtcgtggaagaagcaccggaagccttccagccaggccaggagaacgccgaggcgttgtatgagctggtacgcgaatcagagattgattttgaggaattgcatggggcgattcgcggggccgtcggcaaagcgggtccgtgcacgattggccaggtattgcaggcgtacccgcccacgcagggcctggccagcgtcgtgggattggtgcacattgcggaccaacacccgcttccagctttgcacgatgatcatgaaaaggtcacctggaccgaagaagatgggaccattcgcgcggcgtatatccctactatgtatttcgatagcaccaccgttgaggagttatag

SEQ ID NO: 44149 - DNA, 651 bp, Corynebacterium sp. KPL1824
gtgagcgctactgataatcaccgcgtcgattcggcgcatgagcccccgctgtgggaaagcgataaaggatcgctgacctataactcgcgccgcgccttggtgcagctgttgaaggggccgctcgtgcgagcgtacaaggaacctgtcttatggtccgccatcatctcggacgaagacaacctgcgcgcccgcctgcatgaggtattcctcgagctggtcgtcgatgaagcggaagggtttgcgtttacccggatggtagaagaggaaacgctgcctatcccgcaggtgctgcgcacggataagcttaagcacatcgataccgccatcctgttgaacctgcgccaggaacttggtttggcgttgcccggtgaacgcgtgattgtggatgtagaagatctccgggaaggcattggatacgtccgcgcggttgataaccgcgatgaagccgggttcaataaccgcttcaatgcggcgattaaacgcatccgcaatgaatactcgctgctcagcgccaccgcgacagaggggcgctacgaggtttcacccgtcttgcgccagcttttcgatgccgccacggtcaccgccatccgggatgaatacgcccgcctcgcagaagccgaaagcgaccaggaggatgcttccgatgactaa

SEQ ID NO: 44150 - DNA, 3372 bp, Corynebacterium sp. KPL1824
atgactaacctgtatccaggccaattccgcatcagccgtatccagcttattaactggggtacttttcacggctacttttccatcccggtagcccgcaagggcttcctcatcaccggcggatccggttcaggcaagtccacgctgcttgatgcgatgtcggcagtattggtgccgcagaaggacctcaagttcaacgcggcatcgcagcaggacctcgggcgccataatgggcgcaacctcgtctcctatattcgcggtgcgtggcggcaacaagaaaatgcgcacacgggtgaaatcgccccggagtatttgcgtgagggcgcaacaaactcggtggtggcgttgacctacgataatggcactggcacgcagcacaccctcatcgccatcttccgcctcaacggcggagaaaattcggtgagccaaattaaacggctctatggggtggtgcagggagatgaggacatcgataagctcagccccttgctcacccgaagcctggatacccgcaagattaaagccatgtacaaggggcctggtgcgtcatttacgccgacgtacaccacgtttgcggatcgcttccgcaaacgcctgggcatcaagagcgaacaggggcaggtcctgctgcaccgcacgcagtctgccaagtctctatccagcctggaccagctcttccgggactatatgctggatacgccgtctaccttcgagcgggctgaggagtcggtggagcaatttgaggatctgcgccaggcatacctgcgggtagaggacgtcaaggcccagattgagacgctggcacccctgccccaattacactcccagcgcaccaccgcagaagcggataagcacaaggccgaggcgatgaatgaggcgctgccggcggtgcgcgcccgcttggtggcagaagaactggactatcgcatccgcgcgctgaccgcccagcaggcagaggcgcagtcagcggccgaggcactccaagcggaggtcacgcaccttgacgatgccgagcgccgcgccgccgtagccgtctcccaactcagtgccggcgagctggccgccctagaagccaagatagaaaccgcggagaaggaaattgagcaccgctccaaggagtttcaccaccttgccgctgccgctgaccagtggaccgatcactttgagctcaacccgcacggctttgctgagctgcaagcaaatgcccgcctgcgcatcgcggacttcgaggccgactcggcccagcttactgagcagcaacaagaagccggagtggccgcccgcgatgccgcgacaacatccgcgtccttagaaagtgagctgcactcatttagctcgcggcgcaccaatatcgataaagcccttgtggagctgcgcacccaactcgcgcgggatactggctatgccgaatcggagcttcccttcgctggcgagctactggatatcgccccgcagcaggcggagtgggaaccggtgatccaaaaactgctgcacggattcgccgccaccctgctcgttccggaaaccgcgcgggaagccattaaccagtgggtcaattcgcgcaatgtgggcacccggctcgaataccgcactatccccgagtttgctcctgcgcccgcgcccgcgcgcagcccgcaacagctcatccacaaattggagttccaggatcaccccatggcgccgtgggtgcgccaccatatttcaagccgttttaactacgaatgcgtcaactcggtggccgcgctcgaacaggtaaccaagaccccggccgtcacgcgcgatggcttggaaagccggcccaaggataaggatggctcgacgcgctttatcaaggatgatcgcacgcgttttaaaggcacgcggtggtaccgagtaggttctaccaataccgccaagattgagctcctgcgttcccaattggcggaagcgaaagccactgctcgtgccatggccaaacaggtccacgagctcaaccggaagatggatatcctgcgcacgcagcgcgataaagcgcagcgcgtactggagactaagttccaggatattgataccgcttccgctgaggcgcgcaaacgcgatttgcaagaacagtacgattctttggcgtcctccccagaagcgcaggccctagccacggcgcacgagcaggcaaaggaaaagctcaccgccgcccgcgcccaactgaacgaagcacaaaaacacctcggcaacgtggagggcgagctgaaccgctccactcagcggcgccagagcatcggcgaggtgcccagggtggaggatcagggcatcgccaaggcggtcgaagaggccctgcacaagggcagaagaaaactcaccatcgatgacatcgatgcccggcgcgatgaggtgcaggctaacctgcaagaaaccgcgcgtagggccgcgcgccgcatcgaggagacgaatgccaagattgtctctgtcctccacaaatacctatcgcagtggccggcagaagcggcggatttggaaccgcaggccagcttcgccggcgagggtatggaaaagttgaaattcctgcgcgcggaccgcttggcggattttcgcgcaaagttcttggagctgctcaatggcacgacggtgcagaacctttcgcacctcgcctcctcccttcgccatgcccgtagcgatatcgaacagcgcatggagtttattaataagtccctggagcgcacgcccttcaatggggaccgcaccctgcgcattgatgtgaaggatgcccggggccaggtggtgcaagacttccagcgggatcttgatgccgcaacgtcccatagcctggcggagattagcgccgatgatcctgaagctgcggtagcgcgctaccacgccctggacaagattctcagccgcttgggctcgtctgagccagaggatattcggtggcgcaacctggttctcgatacccgcaagcatgtcagcttcatcggccgcgagtgctatcccgatggcacgaccgccaatacgtatcaggattctgcctccctctccggcggccaggcccaaaagttggtcttcttctgtttggctgcggcgctgcgcttccgattggcggaaccagaccaggacgttcccacctacggttccatcattttggatgaggccttcgaccgcgccgacccagcctttacgcgcaccgccatgtccgtgtttgcgtcctttggtttccacatgattttggcaacgccattcaaactcatccagacgctatcgccgtacgtggatggcaccatcgtggtcaattacgacgagcccattatccagggccgcccgcaggcgcgtacgggctattcgcttatcgatgccgccacctatccccaggaatcccaggagtcccccaatgcggatgcctag

SEQ ID NO: 44151 - DNA, 1134 bp, Corynebacterium sp. KPL1824
atgcggatgcctagtgacctgcacacccatgcggcaaaatacctgcgcaaccactttgctgaggcactggcctccccggattcgctgagcatcgactggccgctgcacccgcccacggccgccaacgccgcgcgcgatgtccccgccacccaggagttcatccgcgcctggcagcgctggccgcaccaagaagagatccactacgaacagcgcaattggtcccgcacaggcctaggcaccaattccgttcccacccgcgcggtccttaccggtgctccccgcatcgccgctgcagcaggcctcagcgccgaatactcccgcgcgctacagcgctcacacgacatcgccgggatcttccccgactcccctgcattcgccgacgccgtgtaccgcacctatgcccagtggaaggacctatgcgcatacgatctgcgctgcttaaagccatgcttgatctggctgcgcgcccatccgaattccggcgagtgggagcgcgccgttcctgtcgaaggtgtggatggcaaatggataggcacccaccgccgcctgctgctcgccctgctttcgcccttcggtatcacgaatttggggctgcgccgcaccgatgcccgcctgcgcctgcgctacctcaaccacgccccagcgctgtccgatatcgaggttcccctttcccaggctgcacaactctttcccaccgctcccccgcgcgttctcatcgtagaaaacaagcagaccttcctagccctgcccctgctttccgatgccgccccacccaccatcgccatcctcggcgccggcaatgccgcccgtcagctccacgccctcgactggctccacgatgtcgaaatcacctactggggcgatcttgatgccgccggcttcagcatcctcaacggcgtgcgcgcccattttccccacacggagtctctcctcatggataccgccaccgtcaccgcgttccgccacctcgcggtccccgatcctggtgatggctccgccatgcttagccacctcaccaccgaagagcagcgcgcctcccgcctcctctttaccgagggcaagctgcgaattgaacaagaacggattccattcgcgcatgccactgacgcgattcaatctacgtttcaacgctag

SEQ ID NO: 44152 - DNA, 1137 bp, Corynebacterium sp. KPL1818
gtgaggtgggaggcgttgcgcggctcatccccgctcacgcggggagcacctattggctcggctctgcagcgcttggcgcgagatacaaatgaggatatttcgagccgcgtcgccagcttagaggcggagcgagaccgcattgaccgcgaaattgaaaaggcccacctggggcagtttgaacgactgactgcggcagagaccgaggagcgcgtccaagacgtgctgaacatggctatggcggtgccaagcgatttcgccagggtgcgccacgaacttgaagccctcaatcaccgattgcgccgacagcttttggatccagaaggttaccgcggcgaagtgctcgaggaaatctttagcggtgtagaccacatcgcggaatcggacgcggggcgcagcttccgcggattctattcatacctcatggatagagaacgcagcgcgtggctagaccagtggattaagcaagttttagaaagcgaggtcggccaagagttggcgccagagaaccgtcggcagctgcggaatctcttccgcgatatggaagaaacgagcttcgaggtcaatcaaacgatgactggcctggcgcgcagcttgcgcaactatgtctcttcggaacaattcgcagaagatcggcgcatgattgagctactgcgtgaggcacggggcatggccattgatgcagcgcaggcatcggagctgaaggcttttcaccgcatggaaactcccctacagcgcatcggcatgtccattcattccgtatcgcgcatccacttggccaacccgggtcgggaggtcgtggaggaagcaccggtagccttccagccgggccaggagaacgcggaggcgttgtatgagctggtgcgcgaatcagagattgattttgaggaattgcatggggcgattcgcggggccgtcggcaagtcgggtccgtgcacgattggccaggtattacaggcgtgccttcccacgcagggcctggccagcgtcgtgggtttggtacacattgcagaccagcacccgctgccggctttgcacgatgatcatgaaaaggtcacctggaccgaagaagatgggaccattcgcgcggcgtatatccctactatgtatttcgatagcaccaccgttgaggagttgtag

SEQ ID NO: 44153 - DNA, 651 bp, Corynebacterium sp. KPL1818
gtgagcgctactgataatcaccgcgtcgattcggcgcatgagcccccgctgtgggaaagcgataaaggatcgctgacctataactcgcgccgcgcattggtgcagctcttgaaggggccgctcgtgcgagcgcacaaggaacctgtcttatggtccgccatcatctcggacgaagacaacctgcgcgcccgcctgcatgaggtattcctcgagctggtcgtcgatgaaggagaagggtttgcgtttacccggatggtagaagaggaaactctgcctatcccgcaggtgctgcgcacggataagcttaagcacatcgataccgccatcctgctgaacctgcgccaggaacttggtttggcgctgcccggtgaacgcgtgattgtggatgtagaagatctccgggagggcattggctacgtccgcgcggttgataaccgcgatgaagccgggttcaataaccgcttcaatgcggcgattaaacgcatccgcaatgaatattcgctgctgagtgccaccgagactgaggggcgctacgaggtatcacccgtcttgcgtcagcttttcgatgccgccacggtcaccgctatccgggatgaatacgcccgcctcgcagaatccgagggcgaccaggaggaggcttccgatgactaa

SEQ ID NO: 44154 - DNA, 3372 bp, Corynebacterium sp. KPL1818
atgactaacctgtatccagatcaattccgcatcagccgtatccagctcattaactggggcacttttcacggctacttttccattccggtagcccgcaagggcttcctcatcaccggcggatccggttcgggcaagtccacgctgcttgacgcgatgtcggcggtattggttccgcagaaggacctcaagttcaacgcggcatcgcagcaggacctcgggcgccataatgggcgcaacctcgtctcctatattcgcggggcgtggcggcaacaagaaaatgcgcacacgggtgaaatcgccccggagtatttgcgtgagggcgcaacaaactcggtggtggcgttgacctacgataatggggctggcacgcagcacaccctcatcgccatcttccgtctcaacggcggtgaaaattcggtgagccaaattaaacggctctatggggtggtgcagggagatgaggacatcgataagctcagccccctactcacccgcaacctggatacccgcaagattaaggccatgtacaaggggcctggtgcgtcatttacgccgacgtacaccacgtttgcggatcgctttcgcaaacgcctgggcatcaagagcgaacaggggcaggtcctgctgcaccgcacgcagtctgccaagtcactatccagcctggaccagctcttccgggactatatgctggatacgccgtctactttcgagcgggcggaggaagcggtggagcaatttgaggatctgcgccaggcataccttcgggtagaggacgtcaaggcccagattgagacgctggcacccctgccccaattgcactcccagcgcaccactgcagaagcggataagtacacggctgaggcgatgaatgaggcgctgccggcggtgcgcgcccgcttggtggcagaggaactggactatcgcatccgcgcgctgaccgcccagcaggcagaggcgcactctgcggccgaggcgctcgaagcggaggtcacgcaccttgacgatgccgagcgccgcgccgccgtagccgtctcccaacttagtgccggcgagctggccgccctagaagccaagatagaaaccgcggagaaggaaattgagcaccgctccaaggagttccaccaccttgccgctgccgccgaccagtggaccgatcactttgagctcaacccgcacggcttcgccgagctgcaggcgaatgcccgcctgcgcatcgcggacttcgagactgactcggcccagcttactgagcagcaacaagaagccggagtggccgcccgcgatgccgcgacaacatccgcgtccttagaaagtgagctgcactcatttagctcgcggcgcaccaatatcgataaagcccttgtggagctgcgcacccaactcgcgcgggatactggctatgccgaatcggagcttcccttcgctggcgagctactggatatcgccccgcagcaggcggagtgggaaccggtgatccaaaaactgctgcacggattcgccgccaccctgctcgttccggaaaccgcgcgggaagccattaaccagtgggtcaattcgcgcaatgtgggcacccggctcgaataccgcactatccccgagtttgctcctgcgcccgcgcccgcgcgcagcccgcaacagctcatccacaaattggagttccaggatcaccccatggcgccgtgggtgcgccaccatatttcaagccgttttaactacgaatgcgtcaactcggtggccgcgctcgaacaggtaaccaagaccccggccgtcacgcgcgatggcttggaaagccggcccaaggataaggatggctcgacgcgctttatcaaggatgatcgcacgcgttttaaaggcacgcggtggtaccgagtaggttccaccaataccgccaagattgaactcctgcgttcccaattggcggaagcgaaagccactgctcgtgccatggccaaacaggtccacgagctcaaccggaagatggatatcctgcgcacgcagcgcgataaagcgcagcgcgtactggagactaagttccaggatattgataccgcttccgctgaggcgcgcaaacgcgatttgcaagaacagtacgattctttggcttcctccccagaggcgcaggccctagccacggcgcacgagcaggcaaaggaaaagctcaccgccgcccgcgcccaactgaacgaagcacaaaaacacctcggcaacgtggagggcgagctgaaccgctccacccggcggcgccaaagcatcggaaccgtgcccacggtggcggatcagggcatcgccaaggcggtcgaagaagccctgcacaagggcaggagaaaactcaccatcgatgacatcgatgcccggcgcgatgaggtgcaggccagcctgcaagaaaccgcgcgtagggccgcgcgccgcatcgaggagacgaatgccaagattgtctctgtcctccacaaatacctatcgcagtggccggcagaagccgcggatttggagccgcaggccagcttcgccggcgaaggcatggagaagctgaagttcctgcgcgcggaccgcttggcggattttcgcgctcatttcttggagctgctcaatggcacgacggtgcaaaacctatcgcacctcgcctcttcgcttcgccatgcccgtagcgatatcgaacagcgcatggagtttattaataagtcactggagcgcacgcccttcaatggggaccgcaccctgcgcattgatgtgaaggatgcccggggccaggtggtgcaagacttccagcgggatcttgatgccgcaacgtcccatagcctggcggagattagcgccgatgatcctgaagctgcggtagcgcgctaccacgccctggacaagattctcagccgcttgggctcgtctgagccagaggatattcggtggcgcaacctggtcctcgatacccgcaagcatgtcagcttcatcggccgcgagtgctatcccgatggcacgaccgccaatacgtatcaggattctgcctccctctccggcggccaggcccaaaagttggtcttcttctgtttggctgcggcgctgcgcttccgattggcggaaccagaccaggacgttcccacctacggttccatcattttggatgaggccttcgaccgcgctgacccagcctttacgcgcaccgccatgtccgtgtttgcgtcctttggtttccacatgattttggcaacgccattcaaactcatccagacgctatcgccgtacgtggatggcaccatcgtggtcaattacgacgagcccattatccagggccgcccgcaggcgcgtacgggctattcgcttatcgatgccaccacctacccccaggaatccccggagtcccccaatgcggatgcctag

SEQ ID NO: 44155 - DNA, 1134 bp, Corynebacterium sp. KPL1818
atgcggatgcctagtgacctgcacacacatgcggaaaaatacctgcgcaaccactttgctgaggccttagccgccccggattcgctgagcatcgactggccgcttcatccgcctacagccgctaccgccgcgcgcaatgtcgccgccacccaggagtttatccgcgcctggcagcgctggccgcaccaagaagagatccactacgaatcccgcaattggtcccgcacgggtctgggcaccaattccgttcccacccgcgcggtacttaccggtgcgccccgcatcgccgcggccgcaggcctcagcggcgaatactcccgcgcgcaacagcgcgcatacgacatcgccgcgatcttccccgactcccctgcattcaccgacaccgtgcaccgcacctatccccagtggaaggacttaactgcatacgatctgcgctgcttaaagccatgcttgacctggctgcgcgcccatccgaattccggcgagtgggagcgcgccgttccggtcgaaggtgtggatggcaagtggataggcacccaccgccgccttttactcgcgctgctatctcccttcggcatcacagatttggggctgcgccgcaccgacgcccgcctgcgcctgcgctacctcaaccacgccccagcgctgtccgatatcgaggttcccctttcccaggctgcacaactctttcccaccgctcccccgcgcgttctcatcgtagaaaacaagcagaccttcctagccctgcccctgctttccgatgccaccccacctaccatcgccatcctcggcgccggcaatgccgcccgtcagctccacgccctcgactggctccacgatgtcgaaatcacctactggggcgatcttgatgccgccggcttcagcatcctcaacggcgtgcgcgcccattttccccacacggagtctctcctcatggataccgccaccgtcaccgcgttccgccacctcgcggtccccgatcctggtgatggctccgccatgcttagccacctcaccaccgaagagcagcgcgcctattccctcctcttcaccgaaggcaagctacgcatcgaacaggagcggattccgttcgcgcatgcaaatgacgcaattcaatctacgtttcaacgctag

SEQ ID NO: 44156 - DNA, 1413 bp, Corynebacterium sp. KPL1814; identical to SEQ ID NO: 44140

SEQ ID NO: 44157 - DNA, 651 bp, Corynebacterium sp. KPL1814; identical to SEQ ID NO: 44141

SEQ ID NO: 44158 - DNA, 3372 bp, Corynebacterium sp. KPL1814; identical to SEQ ID NO: 44142

SEQ ID NO: 44159 - DNA, 1143 bp, Corynebacterium sp. KPL1814; identical to SEQ ID NO: 44143

SEQ ID NO: 44160 - DNA, 1353 bp, Pseudomonas aeruginosa str. Stone 130
atggaggatgcgctgcaagcgctgtccgaaatgctggctgcttatgccagccaggatctttacgagatcgacccggatgcaacgcacatccaggcaggtcgtgaactccgtgaatggatcaagcggcgccttgttgtagagcgagagggccgcatctatgcaaccgacgcgctggagtccgccatacagttcgtcgactcgttggatagtcgtatcatgacctccacggcctctcgcctttcggtggtccagcgcgagattgaaaacctggaaacgggtctgaaccccagcccaagtggccgtattgccagcctgcgccgccgaatccaggacttggagcacgagctagcgcaggtagaagctggccacgtcgtcgtgctggacgaagctcaggcgatagagagtatacgcgaggtatataacctggccaccagcctgcgcgcagactttcgacgagttgaagactcttggcgcgaagctgatcgcgccttgcggcaatccatcatcagcgagcagtctcaccgtggagaaatcgtcgatcggttgctggacggtcaagatgcgttactcaacacaccggaaggacgtgtcttcgaaagtttccagcagcaactgaggcagtccgccgagctggaagtcatgcgtgagcgcttgcgtaccatccttcgtcatccagcggttccgaaggcactgaatcgtccccagcaacgtgagctgcgttggctggcgttacgcttggttcgggagtcgcaggctgtgcttcaggcgcgtgcccgaagcgagcgcgatgtacgtggcttcatgaagacgggcctggccgccgagcatcatcgcgtcggacagttactcaacgatttcttcaatctagcgctcagcgtcgactggcaacgccaggccgtgcgtcgtagcactgtccgtttgccgccggttggcgtagccattaccggagtcccagcgattgagcgtctacgtttcaagaccctggatgacgatgacacgggcgagctggatctgagtctgaagccagcggggctggaacagattgacgatgacttctgggatgctttcgacgggttggatcgcgaagcgctgattcatgacaccctggcggtgctggtggagcaggggcgacctgtgagtctcggggagcttgcgtctttgcttccacctgctcacgacctggaaacctttgcgctctggttggctatggcgcgcgaggcaggtactgaggtgctgacagaggagcgtcagctcgtggagctagttgacgaggatgagcaacgctggcgcttcaatctgccttatgtcggactcgaccacgaggcactcaaggacatcgattgggagttgtga

SEQ ID NO: 44161 - DNA, 750 bp, Pseudomonas aeruginosa str. Stone 130; identical to SEQ ID NO: 43256

SEQ ID NO: 44162 - DNA, 3306 bp, Pseudomonas aeruginosa str. Stone 130; identical to SEQ ID NO: 43232

SEQ ID NO: 44163 - DNA, 1182 bp, Pseudomonas aeruginosa str. Stone 130
atgaagtcgcccactgacatcggtcgcagcttggccaggcaatggcagcgttctagtgttcggttggaccgcttactcaattctgctagctggccgcaaagcttcaacatcggcaagccttcggcacgactattctctgacaacatccggacggtgcttcggcatgtggaaaattggcggagcgtgaaagtgggtaaggtcgactgggaacccgtcagctaccgagcagggttggctccaatttccttgccaatgcgctggcacttgcgcagtccctccgaatggattgccgcaaccgacgatccttcggtcagccaggaatacgctcaactcgagtatctggtcgagcaggtagatagttcctttcatgctctgctggtggcgcaacggagcctgtggttgacgaagccctctgaagaagtcatcgctacagcgcagctcgccactcaactatctccgggctgcgctcaaggccgcccattgcgcctgcttgcagagcacggagtggacaccaagtttttcgagcgaaacgctatcttgctgacgaaactcctcgatgagcgcttcgaaggcgcggcgtccgagcaaggtctgacgacttttctggatgcctttgaagaaaccagtcattgggttctagtcgttcctcttcagcctgagctgctgcccttcaagcggatcaggctcacgacttcggaactggccgaaacctcacttcccggttcgcgattgctcgtggtggaaaatgagcaatgtgttcacttgctacccgaaacgctgccggacaccctcgctgttctgggcgcagggctcgatttgcagtggttggcgtctgcgcatctggccgggaaacagatcgcttactggggcgacatggatacctggggcttactgatgctggcgcgagcgagacaccatcaacctgcagtcgaagcactgctaatggaccgggagctgtttgaccagcactccttgggaagcgcggtcgtcgagccagctaaagctcaggaattggctcccgaaggattgatgaccgacgaagctgatttctatcggtatctccttgcacaggagcgggggcgccttgagcaggagtatctgccacgcaggcaagtcgaacaggctattagtaaatggtttggagagtcggtagcgccggctcatcctgagcgaacggcttga

SEQ ID NO: 44164 - DNA, 1461 bp, Pseudomonas aeruginosa str. Stone 130
gtgaaagcagacaaagccatcgcgacctaccggcgcatgcgggcgcagccgctgtggcgtctgctcgcctcgactaccgggcccaccgtcattggcctgcttcaatctcatctgtatgagagcgagcgaagcctccctgcctccatttttcacgaacgcattgcaagggatctggaagagctgcgcgcccaaggcgaagactttccccaaacggcacaggcgtatgtcgccagctggctcgccgacgggtacctggagcgacgcttcccggctggggcttcagaagaggaatatgaactctcgacggcggccgtcgaggccattcggtttgtatcaggcctggctcagccgcactcagccgcgaccgaaagccgcctgacgctcgtcatcgaggccttggctcgactggccgaggacactgataccgacaagttccgccgcatcgaccggctcatggctgagcaagcccgcatcgacaaagagattgacgccatccagaaggggcagatgcgcgtgctgcctcatacaacggcgctcgagcgtacgcgggagatcatcacgctggccgacgatctggccggtgatttccgccgagtccgcgatcagttcgaccagctcaatcgcgatctccgtgaacgcatcatggacaacgatggcaatcgtggggatgtgctggattcgctgttcgccggaatcgacctgatttcagagagcgacgccggaaggactttctccgctttctggcgcttgctaacggacccagaacaggcggccacgcttgaccaggcgcttgatagcgtgatgtcgcgggagttcgtaggacagctcgaagccaaggagcgacgattccttctgcggctaacgcgcacccttcttgagcagggcggcatggttcacgaggtgctccaaaccttcgcgcgcagcctgaagcacttcgtccagagtcgtgaataccttgagcaacgccgactcaatcacctgctgaaagacgctcagcgcgcagcactggccctaaaggacgaagtcagggccacagaaaccctccagtacacgctggaactcacgagtagtcgtttgcgctccttgtcccaatgggttctgcacgacccatccttacaagctttgcctggccagatggcggaaggagacgcgccgccaatcgacctggaatgtgtgagcgaactggtcgcacagtccgagatcgacttccgaaccctgaaggccaacgtgctggcagtcctggagcaacgctcccaggcctcgattgccgacgtgctggaacagttccccgctgcacaggggctgggcagcgtcgtcggcctgcttgcgttgggcagtcggcatgggttcaaggccgaccacaatgaaaccgtagactgggttggaggcgacgacgagcgtcgtagcgcccgaattccaaagatcttctttttgagggagcgggccaatgaactggtctga

SEQ ID NO: 44165 - DNA, 708 bp, Pseudomonas aeruginosa str. Stone 130
atgaactggtctgagaacgacgaagcggcaatgccagccgaggcacaagcacccgatgctgctccggcacccgccaacaccctgttcctgggcgacagcggcgagttgccactggatacccggcgcgccctggtgcagctgctggcagggccatcgctcgacggacgtcggcatccaaaactctggccgatcttggtacgagacgaagcggtgatccgtcggcgtcttgccgagctgtttctcgaactggttatcgaccgagacgtacaagtggccttcacgcgccaggcagacaccggcgaacttgaggtacctctcctgttgcgtcgtgcccagctgacgttcattgactccattctgctgctccaccttcgccagcgattgacccaagcagactcgcagggcgaccgtgccgtggtgtcgacagacgagatcacggagtttctctccctctatgagcgcgccgccaacaccgaccgtgcagggttcgtgaaacgggttcatgcctccatcgagaagatcaagaagcacagcattcttcagaaaattcgctcaagcgacgatcgcttcgagatttcgccgacgctgaagctcctcttctcggcagaggaaatacaagcgctgactcacctgtatcagcgcatggcggccgcagagacaccagcgcaactggttcagactgatgctgatgaggaggccgaccaatga

SEQ ID NO: 44166 - DNA, 3375 bp, Pseudomonas aeruginosa str. Stone 130
atgatctcggaaccccaaaccgcctccttgttcacccgcgagcagttccggatgacccgcctgcaggtttacaactggggcactttctccggcctgcatgacgtgccgatcagcgagcggggctttttgtttgtcggtcgatccggcgctggaaagtcgacgcttctcgatgcattttcggcgttgctgacgccacctcgctggatcgatttcaacgctgctgcgcgcgaggcggaccgcagtggccgagaccggaacctcgtgacctatatacgtggcgcgtgggccgaacagaaggatggggagtcgggagaaatcgcaacccgctacctgcgcgcggggacgacctggtcagccttggcgctgacctaccagaatgctttgggtcagtctgtggtgctggttcaggtgttctggctgcggggcaatgcgaacggcagcaccgacgtcaaacgccactaccttgtcatggagcggacctttgacctgcgcgagctggaggactttggccaatccaacttcgacattcggaagctcaagcagtccttcccggaggcattcgcgcgcgacgaatttcgcccctactgcgaacggttctgccgtctgctcggcatcgagagcgaaatggcgctgcgtttgctgcacaaaacccagtcggccaagaatctcggtgacctcaataccttcctgcgcgacttcatgctcgacaagcccgagaccttcgaggtggcagatcgcttagtcagcgaatttggtgaactcaatgctgcccaccaggcagtagtcacggcccgcgagcaggttcaaacgcttgctcccgcgcgggatcagcaccagcgcagggactcgttgatgctgcgccgcaatggcttggatgagcttcggctgggcgttgatggctaccgggagacccgacgcatcgagcttctcaaggaacacgtggcatccctggaagttcaagccactggcacagaaggcgaagtgattcgacgtcaaggcaacctggataaccactccacgaccttgcgcaacttggagcgacagcaccgtgaagcaggcggtgatcagatcgaacaatgggaggccgagaagtcggggctagagagccagcgcacagaacgcctgcgcaaacgcagtcaggccgaagaggcttgcaagaagctgggctggagtctcccggattcgcctcaagccttcgcggaactgttgggcagcgcgcgtcaggaagtcgaaaactgggagcagcgcagcaacgctagccggaccgagcagttccgcctggacagagaaaagaaggatgccgaaaccgcgttttcgcaagcgctaaaagaggtgcaggcactccagcgccagccatcaaacattccagccgacatgctggaaatgcggcgagacatcgccgccgccatcgggatctcggagtctgcgctgcctttcgttggcgaactcatcgaggtgaagcctgatgaggttgagtggcaaggtgctatcgagcgcgtactgcacggatttgctctctcactcttggtggacgagcgccagtattcagcgctagccaatcacatcaacaacacccaccttgggcggcgtctggtgtactaccgaaccggtcgcccggagacctggcaggcgaagcccatcggggctaactcgctcgtcctcaagttgagcgtcaaagagggtacgtatgccgactggctgcaggccgagctacggcaacgcttcgattacgcgtgcgtcgattccatccagtcgttcaggagcaccgaccgagccatcacccgagagggccaggtcaagcacagcaaaacccggcatgagaaggacgaccgcagaagtgtcggtgaccgacgaaactgggtgctcggattcgataaccgcgagaagcttgcgctctttcaagcgcaggcccaggaactggctgccacgattacgcgcctcggaggagagatcgatactctcgccgaccaggacaagaatcgggcaactcgagcaatgcagtgccagaccctggtaaatctccagtggcaggaaatcgatgtaatcccattgctggaccgcatttccaccatcgaccgacagattcgcgaagcgcgggaaggcaatacagccttgctgcaaatcagtgagcggatcgacaaacaaaaagatctggttgatcaggctgacaaggatcttcgagaagccaaggtggcgcacgactcagttctcaagcagatcaaagacagcacgcagaaactggaagcccttcttcaagaagtttccagagtttcactgactccacatcaagtcacggggctcgatgaacgcttcgccaaacagtcagacgtagtccggctcgaaaacctcgacaaggttgcaacctctattgagcgtgcactcaatgcggagattgaagaggtcaaccgtggaattggcgtttgcgagaaggaaatagaagcgcgctttgccgatttcaaacgacagtggcccatggatgctggcgacatggataccagtctcgccagcgcaccagactttttcgccaagttggttcgactggagacggatggcctgccagcctatgagcaacgattcttcgaactgctgcagaaccaaagtcaccagaatctggcagcactctccacttacctgaacgacgcgcgtaaggccatccttgaacggatggatctggtcaacgacagtcttggtcaggtgcccttcaaccagagcgccaatcaacgcacctatctccacatcgacgccagtgaccggcagcttgtcgacgtcaaggagttcaagcaggagatccagcaggcgctgagccatgcatggacggaggatcgtgagtttgccgaggcacggtttctggccttgcgacgacttgttgatcgactcgccagtcaggaccccgagcaaaagcgctggcgtgagactgtgctcgatgttcgtcagcatgttgagttcatcggacgggagatcgatgaaggcggtgtcgaggtcgagatctaccgaagcggtgcgggtaagtctggaggccagcgccagaagttagccaccacgtgcttggccgcagccctgcgttatcaacttggagggaacgaccacggcgtgccgatgtatgcgcccgtcgtacttgatgaggcattcgacaaggctgacaacgaattcaccgcgttggcgatgaacatctttaccaatttcggatttcaaatggtggtcgctacgccgctgaagtccgtcatgaccctcgaacctttcataggtggcgcctgcttcgtggatatcagcgaccggcgagtgtcaggcgtcctgctgatcgagtacgacggtgaccgccagcggttgaagcttccggagcacgctcgagaggaggttggcgttgaaacttcctga

SEQ ID NO: 44167 - DNA, 1164 bp, Pseudomonas aeruginosa str. Stone 130
ttgaaacttcctgaagatgttagacagtttctggcccgtcgctttcagagcaagcaccgcgagtggttggtcggtgaggctagcgagagccaatggccactggaagttccgctcggcataccgacggaacaggctgcgctgaggcaagtcgacggcgttcgcgcttgggtgagcgcatggcaaggctggcaaggagtcggcaccctgtcctggtgtgagcgccgatggaaagcgcttggagtccagcgactgccagagaaactggcgttacgaggccctgaagatgttgccatgtggatcggtgcatccgctcggtgggttcgttccctgtctcggtatcagacgctcactgctcgctggccggtgcttgcgcagcagttgccgagatattttgatgtcctcgctgactacagcgatgccgatttccgtcgactggcagagatgctggattggatcagtcgcaatccgaaatcgaatctctacccacgacaaattccggttgccggtgccgacagcaaatggctggattctagaaagggcatcatctctgacttgattgcaacgctccagggtgacccaacaggagagcgcgacttcttctggcgctgcggcttgagggcacagccgcagttaatgcgcatgcgcgttctagacccggatctaagagcccgttttggcggtcttggcgatatctctgcgccttgtgatgaggtcgcgagaattagtattcgaccaaagaatgtcttcgttgttgagaaccttcaaactggcctggcctttgatgatctgccaggggcggttgtgatcatgcgactgggttacgcggttgacgttttgggacagcttccatggctacaacaggcgcaatgtatctactggggtgacattgatacgcatggctttgccattcttaatcgagccagaacatacatcccaagcctgaagactgtgcttatggacgagtctacgctgatgagtcatcgcgatttatgggtcgaagagaaagaccagcactcttccacagagctcccactactcaccaataccgaacaaaagctctaccagtcgattaaaggaaatgcctgggaccaacaagtccgcctcgaacaggagcggatacgctgggatgtggcgtggaatgccatacaggcaagtattcgatga

SEQ ID NO: 44168 - DNA, 1632 bp, Bifidobacterium longum D2957; identical to SEQ ID NO: 42476

SEQ ID NO: 44169 - DNA, 675 bp, Bifidobacterium longum D2957; identical to SEQ ID NO: 42399

SEQ ID NO: 44170 - DNA, 3549 bp, Bifidobacterium longum D2957; identical to SEQ ID NO: 42478

SEQ ID NO: 44171 - DNA, 1185 bp, Bifidobacterium longum D2957; identical to SEQ ID NO: 42479

SEQ ID NO: 44172 - DNA, 1461 bp, Photorhabdus temperata J3
ttgaacttccaagggttacaggcaaagtaccgtcgtctatttcaggaaagtgcagcctggaaactgttaagagcggataattcccctttaattttggcatttttgggtgagttattttcggaagatagtgaagtcccttttagtcgtgcccgtgtgtcactcgatgcagagttggtacgctgtcgtgaacttggtctttgggaaactgaaacgggtgccagcacgtacctcaataaatggattcgggagggctggttgcgtgagatggatgacgcattaactaaaacggatgccagtgaaattgcgctccgttttagtcagggacttgatgagcgcagttcaggaaccactgcgtctcatcttcgaattgttcaggaagcggtcagggactttgcggtggcgattagcccaaatgtcgatgagcgtgtcacgcttttggaagatagaaaatccgaaattcagagagagattgatgccctgagggccggtgttgtaactgagctgaccgaggttgagcagcgggaaagaattcgtgaaatttaccagttggcttctgttttaacgggtgattttcgccgggttgaagatgaaattcgtcggttggatcaggaaattcgtattcaaattattgagggagactccaccagaggagatatccttcttgctgttttagagaaagaagcgttgctggctaaaacagatgccggtagtgcgtttgaaagcttttttgatttgttatgtgatcaaaatagaactatggagctgcgggatcagcttcgaagcattttaaatcgtcccgctgcaaaacacttggttactcagcaacgtcagttcttaagtcagctcatgagagagttgagtcgagagagtgaccgagtttttcaaatcaggcgaagaacggaagagagcttgcgtgcttacatagagagtggtactgctcaagaaaatcgtgctgttgatagattgcttggtcaattggagcgactcgctgttgaattgaagaatgctgattgcgacttgcaaacaacaacagctctttcattgcccgttggggcggcaagtattagctctcccgaaagcatgctccttaaatcacctgatgaaaagctggatacctcaggtgttgaagaacagcttaactctcgagaaccgagtatacagatgctggattgccttgatgctgttcaaatccgattgatcgctgagaaggcgttagaaacgttaaaagcgtttggtccaatgacgattgcatctattgcacattatcacccgcttaattcagggttggaagagttagttgcctatttgcgggttgcgaaatctgtcggggctgcatcattggaagagaaggaatcaattgaaatcagtgacaaacagggaattcgcttgcgggcgtctatccccacttttcttctgagtgccgacctgtttccagacagtttggatgaattggtgttgtaa

SEQ ID NO: 44173 - DNA, 909 bp, Photorhabdus temperata J3
atgcataaagacaaaaagttgaataaagatcgtggtacccccgcaacccttgggaagtctgattcagatcctcaaaaagagcagcaaacagggtttttcgatcagttgataaaacatcatactcaatcagagtacaacccgcttacagacacaaccggtgttgaatctgctgtcgctgccaataagagttcatccgttgaagttgatgatgtgttagtcagtgatcaccctgaaagctcaaacagtggtatgccacctgatgcgcgccgagtgctggttagcttgctgcgtcagggcgttatattgtcttcgcagaaagccaagttgtttgaatcactttgtcgataccaatgtgctgtacgcaaacatctgtcagaagtctatttgaagctggtcttagatgagaaagcgggtgtcgcctttatagccggttttcaaaatgaggaagataccgaatcattgggcatagatggtgaagaggttgtctctctgattagccgaaggacgctctctttatacgatacgttgttgctgttagtgctgcgcaaacactaccaggatcgggaaacatcgggcgagcaaaggattatcattgatatcgagcgtatagaatcccatctgacaccgtttttaccgctgacaaacagtactaaatctgaccggaggaaactcaagggtgctcttgagaaaatggtgacgaaaaaaatattgagttcggtgcggggaagtgaagatcgcttcgagattacaccggtgatccgctacgtagttagtgctgaatttctcgagaatatgctgaatgaatacctgaaaatggcgggcgagaagggtattgagctaactaaaaacggcagcaacgctgttgattatcaagatgaagaggaggaaacaggagatgaaaatgactga

SEQ ID NO: 44174 - DNA, 342 bp, Photorhabdus temperata J3
atgactgatcaaactctttcggctgattcattatttcatgttggtcaaatcagattagccgaactttcagtttataactgggggtcatttaacggcgtgcataccgcgtttatcgatccgatgggaactttggtcactggggataacggcgcgggaaaatcgacgtttattgatggtcttatggctttgctccttcctgccggaaaggcaacctttaatgtggctgcggcgcagggtgatcgttctgaccggactttactttcttatatgcggggaagttttggatctgccatgatggagcgggtacgagagtcaaaagtaagcgtgaatctggcgtggtga

SEQ ID NO: 44175 - DNA, 1455 bp, Pseudomonas aeruginosa CF614
atgagcttgcacgagcagcaggcgcgttttaggcgattgctctccgagcatgcagcttggcgtctgctacgcgctgagaatgcgtccatcgttcttgccttcatcaatgatctattcgctcaagacagcgaagtgccgtttgggaaagcacgtgtcgcgctggaggccgagctgctgatctggcaggaggtctatggcctgcacgataacgcgggcacctatctgcgccaatggatccaggcgggctggttgcgtgagcttgatgacaagctcacgcgaaccgatgccttcgagttagcactgcgctttgcccagagcctggatcagcgagacagtaacgccacggcctcgcacctgcgcattgtgcaagacgccgtacgagacttggctgtcgccctgagcccaaaccctgaagagcgaatcactctgctgactgcccgccggcaggaacttgatctggagattgagcgcttgcagatgggcgaggtgccagagctgagcgcgccggagcagcgagagcgcatccggggactgtatcagttgacatcagtgctcacgggcgactttcgccggctggaggacgaaattcgccaactcgatcagcgcatgcggatccgcatgatcgagtcggagtctgggcgcggtgaagtggtgaaggcgctgatagagcatgaaggtgaactgctccagaccgatgccggacaggccttcgacggcttctatcagttgctctgtgatcagaatcgaatcactgagttccgtgagcaaatccggtcgatcttggcacgtccggcatcccagtatctgaagtcagacgaactgcgttacctatcccatctggtccgcgagttgggcaaggaaagtgagcgggtattccaggttcggcgccggaccgaggagagcctgcgggcttttgtagaaagcggcgttcagcaagagcgtcgtgcggtcgaacgactgcttcgccaactggagcggctggcggtgaatttcaaggaccaggagttgagcctgcgcgagccggtggttgtggacgtccccacgggcagtctgcgcgtgcgttctccgtccagtattcacctacgactacctgaagaacgcctggatacccggcaggtggccgcaaataccaatagtcacgtcgccagtctcggcatgctggatcacctcaacacggtcaaggtgctggaagtagcccaggatgtgaagcagttgctcactgagcacggcccgatgacggtggcgagcatcgttagtcaccgccccatcaccggaggattggaagaactggtggcgcacgtgcggatcgccaaagcagtcagcgctgtggtgttggaacacccagaaagtctggtggtagtggatcggaccggcaattggattcgggccaatattccctctttgctgatgtccgccgagcagtttccaacggatttggaggaactcgccttatga

SEQ ID NO: 44176 - DNA, 756 bp, Pseudomonas aeruginosa CF614
atgaacgaagaagagcagcattcccaacaggcccctgccctgttcgaccagtatcgaacgaatcggcctgaaacgccgtcaatcagcggcgaggtggagacgtttgaggatgctcccgttgagccgcccgtcgttgggggggctgaagtcggcatgccactggaagcccggcgcgctctggtgctgttacttcgccaaggggtggtgatggccgaaagcaaacgtctggcgttcgaagcgctgtgccggcacgagggcctcatcgcagagcacttgggcaacatgttcatgcgcatgttgctggacatgaaggccggtatcgccatcctgctccagcaggaggtggcagagcaggacgaggagactgacgaagcgtcacgcttgatcaacaaacgcacgctcagcctctatgacacgctgctgttgctggtgctgcgtaagtactaccaggagcgagaaacagcgggcgaacagaagatcatcattgatatcgagcggatcgaggcattgatgacaccctttttgccgctgacctacagctcccgctccgagcggaggacgctcaacggatcgcttgccttgttgaaagataagcgtctcatcagtgcggttcgtggggatgacgagcggtttgagatcacctctgtgatccgctatgtcgtcaatgccgattttcttgaacgtctgttgaaagagtacgaacgcctagccggtaatgcgggcgtcaaaacgggcgacgaggtgcaggatgcttga

SEQ ID NO: 44177 - DNA, 3387 bp, Pseudomonas aeruginosa CF614
atgcttgaggctagcgaggtaagtctgagtgagttgttcagcaccggtcagatccgtctagccgagctgtcggtatacaactggggctccttccatggcctgcactccgcgaagatagaccccgagggcaccctcattaccggtgacaacggtgccggtaagtcgacactcattgatgggttgatggcgctgttgctgccctccagcaaggcgtcgttcaacatcgcggctgctcaaggggaccgtacggatcgtaccttgatgtcctatgtgcgaggaaactatggcaaggcccatgatggcagcgagacggctacgctgctgaaacgctcaggggcgaccgcaacggggcttcgggcactgtaccaagcggacgatggttcgaagatcaccttggcggcccttttctggattacccaggccagcaactcgctcaacgacctcaaacgcctttttgtggtgggtaagcgcgatgtgggcttggatgagctgttgcatctcttcggtgagggcaatgcccgtgtgctgaaacagcacctcaaagaggacccgctggtcgaggcattcgattcgtttaccgagtatcaagagacctatgtgcgactcctgtgcatggagaaccgtaacgctccagccctgctctcccgggcgctgggtttgaagaagattgatgacctcaccagcttgattcgagatctggtcctggagcccagtcaggtcaaggagcatgcccggcttgcggtcagtgaattcgatgacttggtcagcgtccatagcgaactcgatgatgctcggcgacagcgggatgccctgattgagttgccagagaccagccaagcgctaaatcaggccagggaggagatgcggcggatctcagttgagctagccggcctgccggtctactttggcgaacagtgctctcgactgtggcaaatgcgcctgaagaaatatgaggcggaactgcttcagttggcagaggaaatgacccgccttggcgctttggaggagcaagcaacggaacgggtacaggcattgttccatgcctaccagtcgcaaggtggtgagcgactggaggggctgcggaaggacttgaaagcggcaacgcaggtgcatcacgacagcgtgcgcgatgcgcgcctgtatcagatggatgtacgagaccttagtctgcccgacacgctgtcgctcgacgtattcaagcaaaatcaggtgagagcgcaaacggaactggcggatatgccggcgttacgtcaagcgcgccaggatcagttcgcttcgtcggcagcgaacctctcccgtgagcaaacacagctcaaggagctggtaggtgaaatcgaagacatggagtcgcgaccggactccaacattgaaccttcctatcagaagctccgcgaccaactggtagagagcttgtcgctagatcctgcggaggttgttttcgttggcgagctgatcgatgtcctggaggcgcatcgaccttggcaaggcgccattgaacgggcgctgggagggcatcgcaccacactgctggtgcctgatgagcgatatcgcctggtgaccaagtggctgaacactcgccacacgggtctccatgtcagggtgcaggttgttcggctgaaccagcatccgcaggttgctgagttcctaccggatggctttctaaaaatgttggattggaagccgcacccctatcgtgattggctgaaaaagcacctctcacgcttcgacctgcactgtgtggaatcgactgaaatactggaccagaccgacttctcgatgaccatccagggcctggtgcacctggataaagggcgatttgagaagaaggaccagcagcgcattgataacccacgtttctggtgtttgggattcagtaacaaggggcgtctagcggcgttaaggaaggatcgtgtcgagttggaggcagaggtcaagaagttggcccagcttacagcagatgcgcgcatggccatggatgacctcgagaagcacactcgggtgtgggagcgcatcgcccagctcacctgggcggcaattgatgtccagtcagcgcaagatcggatgcagtcgctgagggcggatctagaggcgcttgaacggcctgatagtgaattgggagtggcgaaggctcggtgggagcaggcaggtgctgagctgaaggaagtacaaggcaagaaagaactggtcagcaaaaaagtcggggggctggagagcgacaagctcaaggcgaaccaacaactggagctggcgttagatgccgcccggaccggtttggtggatgaggtcagggagttgctttctaagcgtgtgggacagctagaccttgacgatttggagatggtttcagaactcgaaaatcgccatcgatcagcgctggaagaggcccgtaagggggcccacaaccgagagtttcgagcatcgaacaaggctagcgggattgtctccgagttcaaaacaaaatggccgctcatcgccaatgattggctcgccggcgtggatgccctagaagagtacgtcgatcacctggcccatttggagcaggaaggattgccagacctggtcgagcgtttccgagagcgcttgaaccgcaacgcaacacagtcgcttgctcgaatcagccaaaccatccaggccgaacgtgaggacatccaggaccgaatcgaaacgatcaacgatgttctggaacgcacggagtttcggcagggaacctaccttcgtctgggaagtcggccagaaatcttcgaacacgtgaaagcattcaatgcacagttgatgcgcgtgctggcgcgagctggaagtgacgatcatgaggctcgctttgtcgagctgaaggagctgatcgagaaactggagaaagccaccaatcctgcaacctcgggcaatctagagagtctgcgactgttggactcgcgctaccagctgtccttcttcgccgaggaagtagagaaaggcagcaaaaaggtacgcgatgtgctggagtcttccagcggtaagtcaggcggggaaaaggagtcgtttgccggcacgatagtagccgccagcttggcttacgtgctgacgcccgacggcagcgaccgtccgctctactgcaccgtgttcctggatgaggcgttctccaataccgccgaggcggtgagtcgccgggtgctcaaagtcttccgggaattgaagatccacgtgaatctgatcactccatacaagaacctcaaccttgcacgtgaatcggcgcgctcgctgttgatcgcagagcgtgaccaggacaagcatgagagtcggctctgtgaggtcacctgggaggaaattgacgagcagttggcgcgtcatgaacagcaggggctgcaaaaggcagccagttcactggggatcgaagtggagccagatctgtga

SEQ ID NO: 44178 - DNA, 1194 bp, Pseudomonas aeruginosa CF614
gtgagggattggggacggcttccagatgacgttgttgaggagctgcgccgactggagtgggaccatacaggccggctgcgggagcgactcttgggtacgcgtcctttccctattccttgcttgctgaagccgccaaccggtagccaggcgcttgaggatcttgaccatttccatggctatatcgcggcctggcggaaatggccgtggccacatcaagtggcatgggtgacgaagcgatttcggcaactgggtgaatgcgaagttccgataaggttggagatcgaatcaacgcaagccctcatcgctgcgctgggggctgaggctgttgaacgaagcagaggctgggcggagcgaatggagccgttgctctcgttggataaagctttgttcactacccttatcaagcagcttggagagctggagaagctctccatgactgacatacatttgctggcgtgcctgctgccgcaactccagtgtggaatgggccagcgtcgatacttgcgggccctgccactacagaaggtggatacaaagttcgtggagttgaaccagagcctaattgccgctctgttggattcgatgcacgaccaagaggtttccgctcatggcgggttagaggcttggttaggctgccgcgccacaccatccaactggcttcacgtgaaaccactttgccctgacgtgaaaggtcgccttgctgggcttgatctcgttcggctgtcctttgagcaactgatgacctatccgttacccgctcggagtgtgctggtgatcgagaacctccaggctggctacggacttcccgagctaccaggcaccattgcagtgttcggaggaggcgcaaataccgcctggctacaagccgagtggctgaaggacagaagggtaggttactggggggatctcgatacatgggggctgaaattcctcgccgatgcacggttgaggcagccccatgttgaggctgtgatgatggatcgcgacacgctgatcgcccatgttgagcgcggggtgtgcgaagagcgaccagccgagctaccggactatggcttgactcttactgagcgctctctttttgaggagctgcgctctggtcgacacggagttggtcgactagaacaggagcggttgtctcaagactacgtagagcagcaacttgacgtctggcttcatgccatcgctacgatatag

SEQ ID NO: 44179 - DNA, 1353 bp, Pseudomonas aeruginosa C52
atggaggatgcgctgcaagcgctgtccgaaatgctggctgcttatgccagccaggaactttacgaaatcgacccagatgcaacgcatctccaagcaggtcgtgaacttcgtgaatggatcaagcggcgtctggtcgtagaacgagaggggcgtatctatgcaaccgacgcgttggagtccgccatccagttcgtcgattcgctggatagtcggatcatgacttccacggcatctcgcctttcggtggttcagcgcgagatcgaaaacctggaaacgggtctgaaccccagcccaactggccgtattgccagcctgcgccgccgaatacaggatttggagcacgagctagcgcaggtagaggctggcaacgtcatcgtgcttgatgaagcgcaggcgatagagggcatacgcgaggtatataacctggccaccagcctacgcgcggactttcgacgagttgaagactcttggcgcgaggcggatcgcgcccttcgatactcgatcatcagcgagcagtctcaccgtggagaaatcgtcgatcggttgttggacgggcaagatgctctactcaacactcccgaggggcgtgtcttcgaaagcttccagcagcaactgaggcagtccgctgagctggaaaccatgcgtgagcgtttgcgcaccatccttcgtcatccagcggttccaaaggcactgaatcgtccccagcaacgtgagctacgttggctggcgttacgcctggttcgggagtcgcaggctgtgctccaagcgcgcgcccgaagcgagcgcgatgttcgtggcttcatgaagacggggctggccgccgagcatcatcgcgtcggacagttactcaacgacttcttcaatctagcgctcagcgtcgactggcaacgccagtcagaacgccgtaagcctgcatgtttaccaccagttggcgtagccattaccggtatcccggcaatcgagcgtctccgcttcaagaccctggatgacgatgatacgggcgagctggatctgagtttgaagccagcggggttggagcagattgatgatgacttctgggatgccttcgacgggctggatcgtgaagcgctgattcaggacaccctagctgtgctggcggagcaggggcgccctgtgagtctcggggagcttgcgtctttgcttccacctgctcacgacctagaaacctttgcgctctggttggcgatggcacgcgaggcaggtattgaggtgctgaaagaggagcgtcagctcgtggagctagttgacgaggatgagcaacgctggcgcttcaatctgccttatgtcggactcgaccacgaggcactcaaggacatcgattgggagttgtga

SEQ ID NO: 44180 - DNA, 750 bp, Pseudomonas aeruginosa C52
atggcagggatcttcgatcgaattgcaggcgcctctggcgccgacgaaacggagctgacggtggagcccatagcgttggatgacggcatggatgatgaacagcctcttatgagcgccgctgttcaggtcgatgagcgccggacgccgcaacgggtacgtgaggccgtacaggaaatgctcaagtacgggctgctggaagaaagtcacaagcccaatctgtatcgctcggcgcttgccaatatcgaggcggtcgacacaatcctggaacccctcgacctggccatgggggtcgacgaggttcgcgggctggtgttcgtcaccgttcgtcagggcgaggtggccgagcaggatgactggtcgcacccccttgtgcgcaggcaaaggctgaacctggagcagtccctgctgatcgccattctgcgccagcatttcatcgcctacgaacaggaaagcggtacgggcgccactcaggcactggtagctgttgatgagctgattccgcaattgcaggtttacctgggcgagctgggcagtgaggcgaaggagcgcaatcgcgtcatcacgctgctggatcagctcaaggggcatggtttggtgtcggctctggacgcccatgaccgcgtcatcatccgccccatcattacccacttggccaacccggagaacctgcaggcactggtggtttggctgcgcgagcaggtggagggcgcgactaccccggctgccgctgctgaggaggacgaggcgtga

SEQ ID NO: 44181 - DNA, 3306 bp, Pseudomonas aeruginosa C52
gtgaagcaagcactgctctggcgtgacagcgagaccctcattctcagcagcatcgaactctataactggggcggctttcagggctatcaccgtgccgagatcgatccctcaggcaccgccgtgatcggcccaacgggtagcggtaaaacgacgctggtggatgctctgatgaccttgctgtgcgccaacccgcgctacaacctggcttccacaggtgggcatgaaagcgaccgtgatctggtgtcctatgtgcgcggggttaccggccctggagacggaggtgtagagcaatctcatatcgcgcgccagggtaagacggtcaccgccattgccgccacgctcgagcgtgacggtgcgcaggtgcgactgggcgctgtactctggttcgagggcaccagctcctcggcgtccgatctgaaaaaactgtggctgttaagcgagtcccccgagcagacgctggagcattggctcagccaacatcacgcaggcggcatgcgggcgttgcgtcagatggagaaggatgggacgggtatctggccgtatcccagcaaaaaagccttcctggccaggctcagggattacttcgaagtcggtgaaaacgccttcaccttgctcaaccgcgctgccggcctgaagcagctcaatagcattgatgagatctttcgcgagttggtgctcgatgaccgctccgctttcgggcgggctgccgaggtcgctactagtttcgatgatctaacggacattcaccgggaactggaaaccgctagaaagcagcagcgctcattacaaccggttgccgatggctgggagcgttacaaggccttacaagaacagctgcaggataaacaggtgctcgaaggcattcttccggtctggtttgccgagcaggggtatcgcctatggttggctgaaaccaataggctagagaaggagcacaagcaggctgagctggatcgagaacactgcgagcgtcgacttgatgcccagaagggcgtggtcgatcaacatcgtcagcgctacctgcgcgtaggtggcgcagggctggatcaattacgcgggcgcatcgcggattggctcagggagtgcgataagcggcgcctgaaggccgagcagtaccaacgcctggccaaggggcttggactggcggaggcattatcggccgcagccctcgaggagaatcagcagcagatcgcggcgcgcctggaaatactgacccagcagattactgacgcgcggcaaacggcgttcgatgcgggtctcgtccagcaggagctcaatggccgcctgcaggccttacagcaggagcgtgccgaggtggagagacggccaggctcgaacctgcccgggcatttccatgcttttcgaggagatctggcgcaggcgcttggcgtcgatgaatcggccctgcctttcgtcgccgagctggtgcaggtcaagcccgaggaactggcctggcggggtgccatcgagcgggcaatcggcagccaccgcctgcgtatcctggtgccgcatggcgcgtccgaggctgcactgcgttgggtgaaccaacggcataaccgcctgcatgtgcgcttgctggaggtcaaggagccgtcgtcgcgccccgtgttcttcgacgatggctttacccgcaagctgaccttcaaggagcatccgtaccgagaagccgtgaaggcactgctggcggacaacgaccgacattgtgtggaaagcccggagcaattgcgtcataccccgcatgccatgacggcccaggggctgatgtcgggtaaggaacgcttcttcgacaagcaggaccagaagcgcctggatgaaggctggctgaccggcttcgacaaccgcgaccgtctggccttcctgactgaacaaattcgcgaggtcaatgaacagctcgcgcctgccaagctggccttggatgccgcccagggcgatgtccgcaagttggaggatcaagcttcgctgctgcagcgcgtcgaagaactgcagttcgaggagattgatctgccgggcgccgagcgtcagctggagtcgctgcgtgctcagctggacaccctgacacgccccgactctgacctcgcccttatcaaggctgagctggatgaagctgaggcattgctggactctctggatcgacagaggcaacaacttatcgagcagtgcggtcagttgaaaattcagttcgagcaggccgcatccgctacccgtaaggcttatcgcggcgccgaaaaggggctgagcgatacgcaacgtgagttggcgctagcgcacttcccgacgctgagcgctgctgacctcggcgatattgtcgagctggagcgcaagcatacgcatgagcttcaagggcagctcaaagcgctgggtgagaaactgggcgatcagaaatccgagcttgccaaacgtatgtccgacgccctgaaggttgacaccggtgcgctgtcagaggtcgggcgggagctggtggacgtaccaaagtatctggagcgtctacgtgtgctgaccgaggaagccctgcccgagaaactcaagcgcttcctggaatacctcaatcgttcctcggatgacggcgtcacccagctacttagctatatcgaccatgaagtctcggtgattgaggagcgtctggatgacctgaacagtacgatgcagcgtgttgactttcagcccgggcgctatctgcgcttggttgcgacaaaggtcatccatgcaagcctgcgcaccttgcaacaggctcagcgccaactgaactcggcgcgtttcatcgatgatgaaggcgagagccattacaaggcattacaggagctcgttggactgctcaaagatgcctgcgagcacagcaggaatcagggcgccaaagcgcttctggatccgcgcttccgcctggagttcgcggtctcagtgattgatcgagaaagcaagagtgtcatcgaaacccgaacaggttctcaggggggtagtggtggcgagaaagagatcatcgcctcctatgtgctgaccgcttccctcagctatgcgctctgtcccgacggcagcagccggccgttgttcggcaccatcgtgctcgacgaggcgttctcgcgcagctcccatgcggttgccggtcggatcatcgcagcgctgagggaattcggcctgcatgctgtcttcatcacgcccaacaaggaaatgcgcctgttgcgccaccatacgcgttcggccgtcgtcgttcatcggcgcggcgtggaatccagtctggtttccctgagctgggaagctttggatgagcatcatcaacagcgtagcaaggccatgcatgaagtcgcccactga

SEQ ID NO: 44182 - DNA, 1158 bp, Pseudomonas aeruginosa C52
atgaagtcgcccactgacatcggccgcagcctggccaggcaatggcagcgctccagtgtgcgcctggagcgtttgctcaatgccgctagctggccgcaaagcctcaacatcggcaaaccttcgccacgcctgttcactgacaacatccaggcagtgctcctgcatgtggagaactggcggagcgtaaacgtgggtaaagtcgactgggaacccgtcagctaccgagctgggcttgtccccatttccttgccgatgcgctggcatttgcgcaacccttccgaatggattgcagcgaccaatgatccgagggtctgcgaggaatacgctcaactcgagcatctggtcgagcaggtcgacagtgcctttcatgcgctgctggtggcgcaacgcagcctgtggttgacgaagccgtttgaagaagtcgtcgccacggcgcaactcgccacccgcttgtcgccaggctgtgcccgaggccgtccactgcgcctgcttgccgagcacggcgtagacaccaagtttttcgagcgtaacgccagcttgctgacccggctcctcgacgagcgtttcgaaggcgcggcgtccgagcaaggcctgacgacgtttctggatgcctttgaagaaagcagtcattgggtactagtcgttcctcttcagcctgagctgctgcccttcaagcggcttaggctcacgactgcggaactggctgaaaccccgcttcctggttcgcggttgctggtggtggaaaatgagcaatgtgttcacttgctgcccgaaaccttgccggacaccctggctgtgctgggtgcaggactcgatttgcagtggttggcgtctgcgcacttagccgggaaacagatcgcctactggggcgacatggacacctggggcttgttgatgctggcgcgagcgaggcttcatcaaccagcggtcgaagcactattgatggagcaggagctgtttgaacagcactcaccgggcaatgcagttgttgagccggccaaagcgcgggagtcggccccacctggtttgctggctgacgaagcggatttctatcggtatctgctggtgcaagagcgaggacgtcttgagcaggagtacctgccaaaggtacaagttgagcgcgctatcgagcagtgggctcgggcggtccctgtatag

SEQ ID NO: 44183 - DNA, 1353 bp, Pseudomonas aeruginosa BL23; identical to SEQ ID NO: 44160

SEQ ID NO: 44184 - DNA, 750 bp, Pseudomonas aeruginosa BL23; identical to SEQ ID NO: 43256

SEQ ID NO: 44185 - DNA, 3306 bp, Pseudomonas aeruginosa BL23; identical to SEQ ID NO: 43232

SEQ ID NO: 44186 - DNA, 1182 bp, Pseudomonas aeruginosa BL23; identical to SEQ ID NO: 44163

SEQ ID NO: 44187 - DNA, 1461 bp, Pseudomonas aeruginosa BL22
gtgaaagcagacaaagccatcgcgacgtaccggcgcatgcgggcgcagccgctgtggcgcctgcttgcctcgaacactggacctaccgtcattggcctgcttcaggcccatctttacgagagtgagcgaagtcttcctgcctccatttttcacgaacgaatcgcaagagatctggaagagctacgcgcccaaggcgaagacttcccccaaacggcacaagcgtacgtcgccagctggcttgccgatgggtacctggagcgacgcttcccggctggggcttcagaggaggaatatgaactctccacggccgccgtcgaagccattcgatttgtctctggcctggagcagccgcactcagccgcaaccgaaagccgcctgacgcttgttatcgaggcactagcccggcttgccgaggacaccgacaccgacaaattccgtcgcatagaccggctcatggccgagcaagcccgcatcgataaggagatagacgccatccagaaggggcagatgcgcgtgctgccccacgcaacggcgctggagcgcacgcgggagatcatcacgttggctgatgatcttgcaggtgatttccgacgcgtccgcgatcagttcgaccagctcaatcgagatctccgtgaacgcatcatggacaacgatggcaatcggggggatgtgctggattcactgttcgccggaatcgacctgatttcagagagcgacgccggaaggactttctccgctttctggcgattgcttacggacccagaacaggccgctacgcttgatcaggcccttgatagcgtcatgtcgcgggagttcgtggggcagctcgaagccaaggagcgacgattccttcttcggctgacgcggacccttctcgagcagggcggcatggttcacgaggtgctccagaccttcgcgcgcagcctgaagcacttcgtccagagtcgtgaatacctcgagcaacgccgactcaatcaccttctgaaagacgctcagcgagcagcactcgccctgaaggacgaagtcagggccacagaaaccctccagtacacgcttgagctcacgagcagccgtttgcgctccttgtctcaatgggtgctgtacgacccctccctacaagctttgcccggccaaatggcggaaggggatgccccgccaatcgacctggagtccgtcagcgaactggtcgcccagtccgagatcgacttccgaacattgaaggccaacgtgctggcggtcctggagcaacggtcccaggcatccatcgctgacgtgctggagcagttccccgctgcacagggtttgggcagcgtcgtcggcctgcttgcattgggcagtcggcatggtttcaaagccgaccatagcgaaaccgtaggctgggttggaggcgacgacgagcgtcgtagcgcccgaattccaaagatcttctttttgagggagcgggccaatgaactggtctga

SEQ ID NO: 44188 - DNA, 708 bp, Pseudomonas aeruginosa BL22
atgaactggtctgagaacgacgaagcggcaatgccagccgaagcacaagcgccagatgcttcgcaggcatctgctaacacccttttcatgggtgacagcggcgagttggcgctggatacccggcgcgccctggtgcagctacttgcgggaccttcgctcgacggacgtcgacatccaaagctctggccgatattggtgcgagacgaagcggtgatacgtcggcgccttgccgaactgtttctcgaactggtcatcgaccgggacgtacaagttgccttcacccgtcaggctgataccggcgaccttgaagtgccactcctgctgcgtcgcgcgcagctgaccttcattgactccattctgctgcttcaccttcgccagcgattgacccaagcggactcgcagggcgatcgtgccgtggtgtcgactgacgagatcatggagtttcttaccctctatgagcgtgcctccaacaccgaccgcgcagggttcgtgaaacgtgttcatgcatccatcgagaagatcaagaagcacagcatcctccagaaaattcgctcgagtgaagatcgtttcgagatttcgccaacgctgaagctcctcttctctgcagaagaaatacaagccctgacccacttgtatcagcgcatggccgccggtgagacgccagcgcaactggctcagaccgagtccgatgaggaggccgaccaatga

SEQ ID NO: 44189 - DNA, 3375 bp, Pseudomonas aeruginosa BL22
atgatctcggaaccccaaaccgcgtccttgttcgcccgggagcaattccggatgactcgcctgcaggtttacaactggggcactttttctgacctgcatgacataccgatcagcgaacgaggctttctgtttgtcggtcgatcaggggctgggaaatcgacgcttctcgacgctttttcggcgttgctggtgccacctcgctggattgacttcaacgctgccgcgcgggaggctgaccgcagtggccgtgaccgaaacctcgtcacctacgtacgtggggcatgggccgaacagaaggatggagagtcgggtgagatcgccacccgctacttgcgctcggggacaacgtggtctgccctggcactgacctaccagaacgcattaggccagtctgtggtgctggttcaggtgttctggcttcgcggcaatgcgaatggaagcaccgacgtcaaacgccactaccttgtcctggagcgggcctttgacctgcgcgagctggaggacttcggtcaatccaacttcgacatccgaaagctcaagcagtctttccccgaggcgttcgctcgcgacgagtttcgtccctattgcgaacgattctgccgcctgctcggtatcgagagcgaaatggcgttgcgtttgctgcacaaaacccagtcggccaagaatctcggcgacctcaataccttcctgcgcgacttcatgctcgacaagcccgagaccttcgaggtggcggatcgcttggtcagcgaatttggtgaactcaatgctgcccaccaggcggtagtgacagctcgcgagcaggttcaaacgctcgcgccagcgcgggagcagtatcagcgcagagattcgttgatgctgcaacgcaatgggctggatgagcttcggctgggcgttgatggctaccgcgaaacccgccgcattgaactcctcaagcagcatgtcgagtccctggaggtgcaagccagcggctcggaaggtgaagtaagtcgacgtcagagcatcctggataaccacaccacaaccttgcgcaatctggagcgacagcaccgtgaagcaggcggtgatcagatcgagcaatgggaagcagagaaatctggtctggagggccagcgcacggatcgcctgcgcaaacgcggccaggctgaagatgcgtgcaagaagcttggctggagcctcccggattcgcctcaggccttcgctgaactgttgggcaacgcgcggcaggaagtcgaaaactgggagcagcgcagcaacgagaaccgcgaagaacagttccgcttggcaggtcaaaagaaagacgctgagacggcattttcgcaagcggtgaaggaggtgcaggcactccagcgccagccatcgagcattcctgccgatatgctcgaaatgcgccgagacatcgccgcagctattgggatatcagaatcggctctgcccttcgtcggcgaactcattgaggtgaagtctgacgaggccgagtggcaaggtgccatcgagcgcgtactgcacggatttgcgctctcactcttggtggacgaacgccagtattcggcgctggccaattacatcaacaacacccatcttgggcagcgtctggtgtactaccgaactggccgctcggagacctggcaggcgaagcccatcggcgctaactcgctcgtcctgaagctgaacgtcaaggagggtacgtatgccgattggctgcaggccgagctacggcaacgattcgattacgcgtgcgtcgactccattcagtcgttcaggagcgctgatcgagccatcacccgtgagggccaggtcaagcacagcaaaacccggcacgagaaggacgaccggagaagtgtcggcgaccgacgaaactgggtgctcgggttcgataaccgcgagaagcttgggctctttcaagcacaggcccaggagctggctgcgacgattacgcgcctcaggggagaaatcgaaaccctcgccgaccaagacaagaatcgtgcgacccgagcgatgcagtgccaaaccttggtgaatctccagtggcaggaaattgatgtagtaccgttgcttgaccgcatttccaccatcgaacaacagattcgcgaagcgcgggagggcaatacagccctactgcaaatcagtgagcggatcgacaagcaaaagaacttggttgatcaagcagacaaggacctccgagaagccaaggtcgcgcatgactcagttctcaagcagatcaacgacagcacgcagaagcttgaatcgctccttcaagatgcttccagagttccattgactccccaccagatcaaggggctcgacgaacgattcaccaagcagtcagacgcgatcaggctcgaaagcctcgacaaggtagcaaccgctgttgagagagggctcaacacagaaatcggtgagatcaaagatgagatcggcgattgcgagaaggaaattgaagcacgctttgccgatttcaaacggcagtggccaatggatgctgtggacatggacacgagcctcgccagcgcagcggactttttcgccaagttggttcgactggaaacggatggcctgcccgcctatgagcagcgattcttcgaactgctgcagaaccaaagccaccagaatctggcggcactgtccacctacctgaacgatgcgcgcaaagccatcctagagcggatggatctggtcaacgacagtcttggccaggtgccgttcaaccaaagcgccaatcaacgtacctatctccacatcgacgccagtgaccggcagcttgtcgacgtcaaggagttcaagcaggagatccagcaggcacttagccatgcgtggacggaggatcgcgagtttgccgaggcgcggttcctggccctgcggcgacttgttgatcgactcgccagtcaggaccccgagcagaaacgctggcgcgagactgtgctcgacgttcgacagcatgttgagtttatcggacgggagattgatgaaagcggcgtggaggtcgaaatttaccgcagcggtgctggcaaatcaggcggtcaacggcagaagctggccaccacgtgcttggccgcagccctgcggtatcagctgggagggaacgaccacggcgtgccgatgtatgcgcccgtcgtgcttgatgaagccttcgacaaggccgacaacgagttcaccgctttggcgatgaacatctttaccaatttcggatttcaaatggtggtcgctacgccgctgaagtccgtcatgaccctcgaaccattcatcggtggcgcctgcttcgtagatatcagcgaccggcgggtgtcaggcgtcctgttgatcgagtacgacggtgaccgccagcggttgaagctgccggagcacgctcgagaggaggctagcgttgaagcttcctga

SEQ ID NO: 44190 - DNA, 1164 bp, Pseudomonas aeruginosa BL22
ttgaagcttcctgaagatgtttggcagtttcttgcccgtcgctttcagagcaaacaccgcgagtggttgatcggtgatgctggcgagagccaatggccgctggaagttccgctcggcataccgacggaacaggctgcgctaaggcaagtcgacggcgttcgcgcttgggtgagtgcatggcaaggctggcaaggagtcggcaccctgtcctggtgtgagcgccggtggaaagcgcttggcgtccagcgactgcctgagaaactggcgttacgaggccctgaagatgttgccctgtggattggggaatccgcacggtgggtgcgtgcccagtctcgctatcagacgctcactgctcgctggccggtactggcgcagcagttgccgagatattttgatgtcctcgctgactacggcgatgccgattttagtcggctggcagagatgctggattggatcagtctcaatccgaaatcgaatctctacccacgacaaattccggttgccggggccgacagcaagtggctggattctagaaagggcctcatctctgacttggttgcgacgctccagggtgacccgacaggagagcgcgacttttttagacgctgcggtttgagggcacagccgcagttaatgcgcatgcgcgttctagacccagagctgagagcccgtttgggcggtcttggcgatatctctgctccttgtgaggaggtggcaagcattggcatacgaccaaagaatgtcttcgttgttgagaaccttcaaaccggacttgcctttgatgacctgccaggggcggttgtgatcatgcgattgggttacgcggttgacgttttgggacagcttccatggctacaacaggcgcaatgtatctactggggtgacattgatacgcatggcttttccattcttaatcgagccagaacatacatccctagcctgaagactgtgcttatggatgagtcaacgctgatgagtcatcgtgatttatgggtcgaagagaaagaccagcactcttccacagaactcccactactcaaaagtaccgaacaaaagctctatcagtcgatcaagggaaatgcctggggtcaacaagtccgcctcgaacaggagcggatacgctgggatgtggcgtggaatgccatacaggccagtattcgatga

SEQ ID NO: 44191 - DNA, 1353 bp, Pseudomonas aeruginosa BL16; identical to SEQ ID NO: 43763

SEQ ID NO: 44192 - DNA, 750 bp, Pseudomonas aeruginosa BL16; identical to SEQ ID NO: 41752

SEQ ID NO: 44193 - DNA, 3306 bp, Pseudomonas aeruginosa BL16; identical to SEQ ID NO: 43765

SEQ ID NO: 44194 - DNA, 1146 bp, Pseudomonas aeruginosa BL16; identical to SEQ ID NO: 41754

SEQ ID NO: 44195 - DNA, 1419 bp, Pseudomonas aeruginosa BL12
atggaacctaatataccgccgctgttcgagcatttgcccaaggagctttttcgccctttggccgccgccaacaacctgcgctattgggatgtgctctgtcggcttatggcggccatgtggggagagggtggccgctcacccggggaagaagcgcccaagtcactggtccttcgaacgatcgaatcgtttctagtagccgatgacccttgggaggatatggacagctcccttacggtgaccggaagggctcatctgatcttcacctcgctccatgccagcgggtggctaagtcaacggcgcaaaggcgtagtagaacaggtcacggtcaggcctgttgtggcacggttttttggtcacctggtggagtttgccaatcagacccctgagttcctcgggattaggttccactcgatctacgtctccctgcgtgaagtgcgcgatgcaaacgcgcacggtctttatcatgaggcggcacgtcaggccaaacagtgcatggcacacatcaccaatacgagttgccgcattcaggatctgatggggaaactctcggcgaaggaaaccatgggcgagttcgttcgtggctttttcgaagagtacatcgagaacgttttcattgccgactatagcgacctgcgtactcacaaccatccgttgcagtttcgctcacagattatcgctctggttcgccaactccagtgtgacgatcagcagcgccagggattgatcggttggtatgcccagatgaagaccgacgacgacttcctacgcgctgagttgctctacgaacgggatacccatcagttgctgcgccttcgcgaagtcgaagagcacttgcagagattggatgaagaggtgcgtgacgccaatcagatggccattgcgctctttgagtacaagctgcgctcgcctggcaatttcgacgaactgatcgcgagggccctcaatgccgtggagatcctgggggaggggcatgcctcgcttccgggtaggtcaggcttctatcacgcttccgaggtcggcctgtccaaacctcgtgtaactccgcgggttcacgagccaacactggtcgaaacctacagtccgacaactgaggagcttgcaatggaagcccttcgacaacggatgaatgccaatcggcacgttacgccgctgaagctggcggagtacgtcacgcgacacgtcggctctgatctgcgcgtgacctcgagccaactgtcaatcgaatcggtcatagatctgtgctgctaccaaaggctgttattgatcgcctcgcgcgaggcatgccctccaggaaaacgcagagatgatgtccacctgcagttggtccctgggatacgtgtcgaatttgtccccgaagccatgactcgcaacgcgtacatggaacaccaagagttcatgattcatgtgaggatgccgtga

SEQ ID NO: 44196 - DNA, 603 bp, Pseudomonas aeruginosa BL12; identical to SEQ ID NO: 43604

SEQ ID NO: 44197 - DNA, 3426 bp, Pseudomonas aeruginosa BL12
atggtcttgcttgaacgggttaacctgattcagtttttcctttacgaggcccgggatgtcgatatcgggagaaatacggccttcctagggcctaatggaaccggaaaaacggcgcttctggatgcaattcaggtagtcatgttagcggccgatggcaaccgcataaacttcaacgcagcgagtgacagcaagaaaaagcgttctcgcagcatgcgtgattactgcctcggctcgattgtacctggtggcagttcctaccagcggacctccgcgaacacatacgtgggattggttttccgcaataccattacaggcgttccgttcactgccggcgtttcactacaagctcatatcgaggacgccaaagcggaggtgaatggatacttcatattgcccggtgtcgaactgtcggctaagcaatatttgcagaccgacggcgcacgcgaaaccgtgatgccctggcgagcttttcagcatgtagtcgctgatttgtgtcgcttggaggcaaacagtaccccttatataacgcctcacaatcgcgacgactttattcgacgcctcttgatcgatcatctggccggtccaggcgacaaaccgaactcacaggcatttcgggctgcgttttctcgttctctgaagctcaatgaagacatcgttgatcttaatgagacgttacgacagcatctcatcgagccgatgccaatccggattaccgagttccgcgagcgcctaaacgaggttcgtgacatgcgtgaccttattaggcgactgagagggcgcattacccaagcctcagaagtggctgacacctatgcccaagtgctgcaggctcgaacctccgaggcgaacctgacggccttgaagcatgtctacgcaaccgaacgcagcgcagaagcagtggatgctattcagatcaagcaagaagcgctagaggaggcgcttacccgagcgcagcgagaactcggaagggcatgtgcccaagcgcagttggccaatgccgcccgagatctggccctgactgcgctgacttccagccctgactttcaacagcaagcaggtcatgccggcgagctcttgctgttggagaagcaatttgatgagaaacaagcgcaactccgcacgcaattgcacgcgatgcagcgtgctctttccgacgccagcggcctagctgaaatcgcatccagtagagacctctttgacagcgggctcgagcaattgcaaagcttggagaaacggctggaatcagatgacatgccatcatctgaatcactccagcgtacgcttcaagcggtaagccaagccttcgaagtgctgcgtcgggcaatggcggagacagaaggcaaagcggaaaaggcagccaaccatctgcgtgacgctgagatggcaagtgcccgggctggccaaggccttgcgaaactgagcgataacaccaccgcattgttgcgtatcctcgcgaatgcgggtatcgacgcgactcccatctgcgacctggtaagtgtcgcagatgtagcatggcaagcagcgatcgagtcatggctggggcgccatgtagaggctttacttattccagaagatcgggagttggaggccattaaggtctatcgcagcgcagcggcagacggcgtttatcgcgtgaagttagctcttccttcacgtatccgggactggcacggatacgatactgagccttacgcagctcagttggtccaagggcagaacctacttgccgtgcgctacctacagggcgcgcttgggcgaacgatactagccgaatccaacgagcaactgcgcgttggtgtcaaagcgctatccaaggacggcatggtcagttcaggtgcggccgtggagcgacaatccttacctaaaccctcagagcttaggttgggccgtaaagacgtcgatgccatgcgccaacaggcagaacaggcgttgcagattgcgcaggcacaatccaggcaacacgaggaggcggtcattcggcttcgcaacagcttgcagaatctcaccccgtttgccaacaccgagacgctgcagaccagccttgaaagcatctttatggcgaaggtgcaggcaaacgcccatgccgcgcatttgcgcgagcggttggcgcgtacacaaactgctggtttggttgaactggaggcaaggaaacagcttgccgacgaggcggcccacaccgccaatgagttggttcttcgatggactaaggatgaggccagcttcgtcgagcaacttaagctattgggcgaacagctcggcgtgctgaccaagcagttggaagtagaaagcgcccgggaaagagagagtcggcagcacccgctttacaatgcgaatgaagtcgatcggcatcgcaaacgatcggatgagcgccatggcgacgatgcgagcgcgaaggttattgctttggagcaggcgatcgtaacggttaacggagtggctggcagcaaagaccgcgaagcctggaacctgttcgcgaattacctgaaggactataacctgcagaacacggatatctgcagcaatgattggaagggcgcttacggcttcatactggaggaccagcagcgactagtgaatcttgaactggtcgagcaagaagagaaagctgaagaagcctaccaggctgccgtgaaggtttttcgctccgatgtcgctcaggcactgcttgcaggttttgatcgcatcgaggagcagatcgcgggcctcacctcaattctcgaaaacgcaccgatgttctccaacaacgaacgctatgagtttaagttcaaggtggtcgaagagcatcgaagcctgtatgagttcttgctacgcgtgcgtacccatgggacagaggacgacctttttggcggaccaggtgaggtgccggaggagtttcgcgcgcttgtcgaaggcgacagcaactcaccgctgctgaacgaggccagccccctgaatgaccaccgccgcttcttcagctacgacgtagaggtctatcaaatgtcggagagtctgggcttgctgagcaggcgcttcgagcaggcctctggaggagagcatagaacaccggtctacctcatattcggtgccgctttggcggcctgttacgggaagtcgaaggacagtctcagtggcggcggtatcatgctgttggatgaggcgttcgaaaagatggatcctcagaatatccgagccaccgtgcaattcttgaatgcccttggcctgcaattgatcctggcggggccggaatctgaccaagccaaactcagttctttcctgaatatctactatgacatgtcccgcttcggaacccgaaatgtgcagatgaagaagaatgtcgtccacgatgctgctcgtgaattgctgcaaagtgacaactacttgctcaatccagtgttgttgcagcaggaaatcaaccgtttgaaggaagaacagaatgagcctggatga

SEQ ID NO: 44198 - DNA, 1167 bp, Pseudomonas aeruginosa BL12
atgagcctggatgacgcaacccttgatcgactgctggttcgtgccgagcgcgctcgtctaagcggcagtacccgaactatccgtgagtccttcaagtcgctaacctcgccatactggcagctcagtctggacgagcgtgaccgcatgcacgaacgaatgcgggcagcggcgtcaactggcgcgattaagctggagtgggccaggcaaggagggggggatcgtccattggatgcggtagttcttcaggatctcgatcgactcgccgaccatctgcagcgtcccacctccagtgcaatccttggccaggctgctgcactactggcgccttggcacggacagggacaggtggacgagttgcttgcatgctgggcccagctcaagcaggtgaggctcctgggacctggttcggctgctgatttcgctgatgcgttgcgggcgctcgatgcgatggccggaaccaaggaggatcgcatcgtccgccaactcagtactcagcttttcggcgactccaagcgtctggaagccctgagcaagcatttggatctgctcaccgcggaaaccctgaatgcgccggcccgacattggagtgaagttttcggagcgatcggactcatcaaagagcctcaaccttttctcgtggcgggtatgggcaagctccggctgaccgaccaggatgactgcacagtcattcggccgtatttgggtgtcgccaataccgtgatccaaggttacatgggtgcgcctgcttggttattgacgatagagaatctcacaaccttccaccaggcagcgcgggaactaagcaagaatccgtcgggagtgattatctacacggcaggtatgccatcgccaagttgggggcaagcttacgttcgaatcttatcctcgcttgagcacaagcctccaatttaccactggggcgatcatgatgaagggggctttcgtatcgccgctcgaatcgcccagttcgccacccagtcagggtttcgattgcagccatggtctatgcaggcttcacgctggcctgatcgcggtcaagacgccaaagctgagcagcatcgtgcgatgaagagaaatgctgcccgcgcaggctgggcggaattggccgatcaacttgcccctgtactgttcgagcaggaaggacaacctttgaatcttcctacctag

SEQ ID NO: 44199 - DNA, 1353 bp, Pseudomonas aeruginosa BL12; identical to SEQ ID NO: 43230

SEQ ID NO: 44200 - DNA, 750 bp, Pseudomonas aeruginosa BL12
atggcaggggtcttcgatcgacttgcaggcgcctctggtgccgacgaaacggagctgacggtggagcccatggcgttggatgacggcatggatgatgaacagcctctcatgagcgccgctgtacaggtcgatgagcgccggacgccgcaacgggtacgggaggccgtacaggaaatgctcaagtacggtctgctggaagagagtcacaagcccaacctgtatcgctcagcgctttccaatatcgaggcggtcgacagaatcctggagccgctcgaccttgccatgggggtcgacgaggttcgggggctggtgttcgttatcgttcgccagggcgaggtggccgagcaggatgactggtcgcaccccctagtgcgtcggcaaaggctgaatctggagcagtctctgctgatagccatcctgcgccagcagttcatcgcctacgaacaggaaagcggtacgggcgccagtcaggcatcggtagtggtcgatgagctgattccccaattgcaggtttacctgggcgagctgggcagtgaggcaaaggagcgcaatcgcatcatcacgctgctggatcagctcaaggggcatggcctggtgtcggctttggacgcccatgatcgcgtcatcatccgtcccatcattacccacttggctaacccggagaacctgcaggcactcgtggcatggctgcgagagcaggtggagggcgcggcgacgccggctgccgatggcgaggaggatatggcatga

SEQ ID NO: 44201 - DNA, 3306 bp, Pseudomonas aeruginosa BL12; identical to SEQ ID NO: 43232

SEQ ID NO: 44202 - DNA, 1182 bp, Pseudomonas aeruginosa BL12; identical to SEQ ID NO: 44163

SEQ ID NO: 44203 - DNA, 1455 bp, Pseudomonas aeruginosa BL11; identical to SEQ ID NO: 44175

SEQ ID NO: 44204 - DNA, 756 bp, Pseudomonas aeruginosa BL11; identical to SEQ ID NO: 44176

SEQ ID NO: 44205 - DNA, 3387 bp, Pseudomonas aeruginosa BL11; identical to SEQ ID NO: 44177

SEQ ID NO: 44206 - DNA, 1194 bp, Pseudomonas aeruginosa BL11; identical to SEQ ID NO: 44178

SEQ ID NO: 44207 - DNA, 1353 bp, Pseudomonas aeruginosa BL08; identical to SEQ ID NO: 42083

SEQ ID NO: 44208 - DNA, 750 bp, Pseudomonas aeruginosa BL08; identical to SEQ ID NO: 43206

SEQ ID NO: 44209 - DNA, 3306 bp, Pseudomonas aeruginosa BL08
gtgaagcaagcactactctggcgtgacagcgagaccttcattctcagcagcatcgaactctataactggggcggctttcagggctatcaccgtgccgagatcgatccctcaggcaccgccgtgattggcccaacgggtagcggtaaaacgacgctggtggacgcactgatgaccttgctgtgcgccaatccgcgctacaacctggcctccacgggtggacatgaaagtgaccgggatctggtgtcctatgtgcggggagtaaccggcccaggggacgggggtgtggagcaatctcatatcgctcgccagggtaagacggtcaccgccattgccgccacgctcgagcgtgatggtacgcaggttcgactgggtgctgtgctctggttcgagggcacaagctcctcggcgtccgatctgaaaaaactttggcttttaagcgagtcccccgagcagacgctggagcattggctgagccagcatcacgcaggtggcatgcgggcgctgcgtcagatggagaaggatgggacgggtatctggccttatcccagcaagaaagctttcttagctaggctaagggattacttcgaagtgggtgaaaacgccttcaccttgctcaaccgcgctgccggcctgaagcagctcaacagtattgatgagatctttcgagagttggtgctggatgatcgctctgccttcgagcgggctgccgaggtcgcaagcagcttcgatgatctaacggacattcaccgagagctggaaaccgctagaaagcagcagcgctcattgcaaccggtcgccgatggctgggagcgttacaaggccttgcagcaacagttacacgataaacagacgctcgaaggcattcttccggtctggttcgccgaacaggggtatcgcctgtggttggctgaaaccaacaggcttgagaaggcgcaaaaacaggccgaactgaatcaggagcaatgcaggggacagtttgatatccagaagggcgtggtcgatcagcatcgtcagcgctacctgcgagtaggcggtgcagagatagatctattgcgcgcgcgcatcgcggattgggttcgggagtttgataaacggcgcctgaaagccgagcagtaccagcgtttggccaaagggctaggactcgtggtggagttatcagccgctgcgctcgaggaaaatcagcagcagatcacggcacgcctggaagtactggccgagcaaattactgaggcacggcaaaaggcgttcgatgcaggcatcgtccagaaagaactcgatggccgcctgcagagcttgcagcatgagcgtgccgaggttgagcgacggcccggctcgaacctgcctgggcattttcatgcttttcgaggtgatctggcgcaggcgctttgcgtcgatgaatcggcccttcctttcgtcgccgaactggtgcaggtcaagcccgaggagctggcttggcggggggccatcgagcgggcaatcggtagccaccggctgcgtatcctggtgccgcagggctcgtccgaggctgcattgcgctgggtgaaccaacgacacaaccgcttgcatgtgcgcttgttggaggtcaaggagccgtcatcgcggccagtgttctttgacgatggttatacccgcaagctgactttcaaggagcatccgtaccgagaagctgtaaaggttctactggcggacaacgaccgacattgcgtggaaagcacagagcaattgcgtcataccccttacgccatgacggcccaggggctgatgtcgggcaaagagcgcttcttcgacaagcaggaccagaagcgcctcgatgaagactggctgaccggcttcgataaccgcgaccgtctggccttcctgactgaacaaattcgcgaggtcaatgaacagctcgcgcctgccaagctggccttggatgctgcccagggcgatgtccgcaagttggaggatcaagcttcgctgctgcagcgcgtcgaagaactgcagttcgaggagattgatctgccgggcgccgagcgtcagctggagtcgctgcgtgctcagctggacaccctgacacgccccgactctgacctcgcccttatcaagtctgagctggatgaagctgaggcattgctggactctctggatcgacagaggcaacaacttatcgagcagtgcggtcagttgaaaattcagttcgagcaggccgcatccgctacccgtaaggcttatcgcggcgccgaaaaggggctgagcgatacgcaacgtgagttggcgctagcgcacttcccgacgctgagcgctgctgacctcggcgatattgtcgagctggagcgcaagcatacgcatgagcttcaagggcagctcaaagcgctgggtgagaaactgggcgatcagaaatccgagcttgccaaacgtatgtccgacgccctgaaggttgacactggtgcgctgtcagaggtcgggcgagagctggtggacgtaccaaagtatctggagcgtctacgtgtgctgaccgaggaagccctgcccgagaaactcaagcgcttcctggaatacctcaatcgttcctcggatgacggcgtcacccagctacttagctatatcgaccatgaagtctcggtgatcgaggagcgtctggatgacctgaacagtacgatgcagcgtgttgactttcagcccgggcgctatctgcgcttggttgcgacaaaggtcatccatgcaagcctgcgcaccttgcaacaggctcagcgccaactgaactcggcgcgtttcatcgatgatgaaggcgagagccattacaaggcattacaggagctcgttggactgctcaaagatgcctgcgagcacaacaggaatcagggcgccaaagcgcttctggatccgcgcttccgcctggagttcgcggtctcagtgattgatcgagaaagcaagagtgtcatcgaaacccgaacaggttctcaggggggtagtggtggcgagaaagagatcatcgcctcctatgtgctgaccgcttccctcagctatgcgctctgtcccgacggcagcagccggccgttgttcggcaccatcgtgctcgacgaggcgttctcgcgcagctcccatgcggttgccggtcggatcatcgcagcgctgagggaattcggcctgcatgctgtcttcatcacgcccaacaaggaaatgcgcctgttgcgccaccatacgcgttcggccgtcgtcgttcatcggcgcggcgtggaatccagtctggtttccctgagctgggaagctttggatgagcatcatcaacagcgcatcaaggccatgcatgaagtcgcccactga

SEQ ID NO: 44210 - DNA, 1158 bp, Pseudomonas aeruginosa BL08
atgaagtcgcccactgacatcagtcgcagcctggccaaacaatggcagcgctccagcgtacgcttggaacgcttgctcaatcccggcagctggccgcaatgcttcaacatcggtaagccttcggcacgagtcttcgctgaaaacatccatgcggtgctccagcatgtggagaactggcggagcgtgaaagtggggaaggtcgactgggagtcagtcagctatcgagctgggctggccccaatttccttgccgatgcgctggcacttgcgtagtccctccgaatggattgccgcggccaatgatccaacggtcagccgggagtacgctcaactcgaatatctggtcgagcaggtagacagtgcctttcatgcgctgctcgtggctcaacgcagcctgtggttgacgaagccgtctgaagaagtcgtcgccacggcgcaactcgccacccgcttgtcgccaggctgtgcccgaggccgtccactgcgcctgcttgccgagcacggcgtagacaccaagtttttcgagcgtaacgccagcttgctgacccggctcctcgacgagcgtttcgaaggcgcggcgtccgagcaaggcctgacgacttttctggatgcctttgaagaaagcagccactgggttctggtcgttccccttcagcctgagctgttgcccttcaagcggctcagactcaccactgcggaactggccgaaaccccacttcccggttcgcgattgctcgtggtggaaaatgagcaatgcattcacttgctgcctgagaaattaccggacaccctggctgtgctgggctcaggactcgatttgcagtggctagcgtccgcgcacctggccgggaaacagatcgcatactggggcgatatggatacctggggcttgctgatgctggcgcgagcgagactccatcaaccagcagtcgaagcactattgatggagcaagagctgtttgaacagtactcaccggtgagcgcagtcgtcgagccgaccaaagctctggattcggccccacctggtttgctggctgacgaagcggacttctatcggtatctgctggtgcaagaacgaggacgtcttgagcaggagtacctgccaaaggaacaagttgagcgcgctatcgagcagtgggctcgaaagatccctgtatag

SEQ ID NO: 44211 - DNA, 1455 bp, Pseudomonas aeruginosa BL06; identical to SEQ ID NO: 44175

SEQ ID NO: 44212 - DNA, 756 bp, Pseudomonas aeruginosa BL06; identical to SEQ ID NO: 44176

SEQ ID NO: 44213 - DNA, 3387 bp, Pseudomonas aeruginosa BL06; identical to SEQ ID NO: 44177

SEQ ID NO: 44214 - DNA, 1194 bp, Pseudomonas aeruginosa BL06; identical to SEQ ID NO: 44178

SEQ ID NO: 44215 - DNA, 1455 bp, Pseudomonas aeruginosa BL04
atgagcttgcacgagcagcaggcgcgttttaggcgattgctctccgagcatgcagcttggcgtctgctacgcgctgagaatgcgtccatcgttcttgccttcatcaatgatctattcgctcaagacagcgaagtgccgtttgggaaagcacgtgtcgcgctggaggccgagctgctgatctggcaggaggtctatggcctgcacgataacgcgggcacctatctgcgccaatggatccaggcgggctggttgcgtgagcttgatgacaagctcacgcgaaccgatgccttcgagttggcactgcgctttgcccagagcctggatcagcgagacagtaacgccacggcctcgcacctgcgcattgtgcaagacgccgtacgagacttggctgtcgccctgagcccaaaccctgaagagcgaatcactctgctgactgcccgccggcaggaacttgatctggagattgagcgcttgcagatgggcgaggtgccagagctgagcgcgccagagcagcgagagcgcatccggggactgtatcagttgacgtcagtgctcacgggcgactttcgccggctggaggacgaaattcgccaactcgatcagcgcatgcggatccgcatgatcgagtcggagtctgggcgcggtgaagtggtgaaggcgctgatagagcatgaaggtgaactgctccagaccgatgccggacaggccttcgacggcttctatcagttgctctgtgatcagaatcgaatcactgagttccgtgagcaaatccgctcgatcttggcacgtccggcatcccagtatctgaagtcagacgaactgcgttacctatcccatctggtccgcgagttgggcaaggaaagtgagcgggtattccaggttcggcgacggaccgaggagagcctgcgggcttttgtagaaagcggcgttcagcaagagcgtcgtgcggtcgaacgactgcttcgccaactggagcggctggcggtgaatttcaaggaccaggagttgagcctgcgcgagccggtggttgtggacgtccccacgggcagtctgcgcgtgcgttctccgtccagtattcacctacgactacctgaagagcgcctggatacccggcaggtggccgcaaataccaatagtcacgtcgccagtctcggcatgctggatcacctcaacacggtcaaggtgctggaagtagcccaggatgtgaagcagttgctcactgagcacggcccgatgacggtggcgagcatcgttagtcaccgccccatcaccggaggattggaagaactggtggcgcacgtgcggatcgccaaagcagtcagcgctgtggtgttggaacacccagaaagtctggtggtagtggatcggaccggcaattggattcgggccaatattccctctttgctgatgtccgccgagcagtttccaacggatttggaggaactcgccttatga

SEQ ID NO: 44216 - DNA, 756 bp, Pseudomonas aeruginosa BL04
atgaacgaagaagagcagcattcccaacaggcccctgccctgttcgaccagtatcgaacgaatcgggctgaaacgccgtcagtcagcggcgaggtggagacgtttgaggatgctcccgttgagccgcccgtcgttgggggttctgaagtcggcatgccactggaagcccggcgcgctctggtgctgttacttcgccaaggggtggtgatggccgaaagcaaacgtctggcgttcgaagcgctgtgccggcacgagggcctcatcgcagagcacttgggcaacatgttcatgcgcatgttgctggacatgaaggccggtatcgccatcctgctccagcaggaggtggcagagcaggacgaggagactgacgaagcgtcacgcttgatcaacaaacgcacgctcagcctctatgacacgctgctgttgctggtgctgcgtaagtactaccaggagcgagaaacagcgggcgaacagaagatcatcattgatatcgagcggatcgaggcattgatgacaccctttttgccgctgacctacagctcccgctccgagcggaggacgctcaacggatcgcttgccttgttgaaagataagcgtctcatcagtgcggttcgtggggatgacgagcggtttgagatcacctctgtgatccgctatgtcgtcaatgccgattttcttgaacgtctgttgaaagagtacgaacgcctagccggtaatgcgggcgtcaaaacgggcgacgaggtgcaggatgcttga

SEQ ID NO: 44217 - DNA, 3387 bp, Pseudomonas aeruginosa BL04
atgcttgaggctagcgaggtaagtctgagtgagttgttcagcaccggtcagatccgtctagccgagctgtcggtatacaactggggctccttccatggcctgcattccgcgaagatagaccccgagggcaccctcattaccggtgacaacggtgccggtaagtcgacactcattgatgggttgatggcgctgttgctgccctccagcaaggcgtcgttcaacatcgcggctgctcaaggggaccgtacggatcgtaccttgatgtcctatgtgcgaggaaactatggcaaggcccatgatggcagcgagacggctacgctgctgaaacgctcaggggcgaccgcaacggggcttcgggcactgtaccaagcggacgatggttcgaagatcaccttggcggccctattctggattacccaggccagcaactcgctcaacgacctcaaacgcctttttgtggtgggtaagcgcgatgtgggcttggatgagctgttgcatctcttcggtgagggcaatgcccgtgtgctgaaacagcacctcaaagaggacccgctggtcgaggcattcgattcgtttaccgagtatcaagagacctatgtgcgactcctgtgcatggagaaccgtaacgcaccagccctgctctcccgggcgctgggtttgaagaagattgatgacctcaccagcttgattcgagatctggtcctggagcccagtcaggtcaaggagcatgcccggcttgcggtcagtgaattcgatgacttggtcagcgtccatagcgaactcgatgatgctcggcgacagcgggatgccctgattgagttgccagagaccagccaagcgctaaatcaggccagggaggagatgcggcggatctcagctgagctagccggcctgccggtctactttggcgaacagtgctctcgactgtggcaaatgcgcctgaagaaatatgaggcggaactgcttcagttggcagaggaaatgacccgccttggcgctttggaggagcaagcaacggaacgggtacaggcattgttccatgcctaccagtcgcaaggtggtgagcgactggaggggctgcggaaggacttgaaagcggcaacgcaggtgcatcacgacagcgtgcgcgatgcgcgcctgtatcagatggatgtacgagaccttagtctgcccgacacgctgtcgctcgacgtattcaagcaaaatcaggtgagagcgcaaacggaactggcggatatgccggcgttgcgtcaagcgcgccaggatcagttcgcttcgtcggcagcgaacctctcccgtgagcaaacacagctcaaggagctggtaggtgaaatcgaagacatggagtcgcgaccggactccaacattgaaccttcctatcagaagctccgcgaccaactggtagagagcttgtcgctagatcctgcggaggttgttttcgttggcgagctgatcgatgtcctggaggcgcatcgaccttggcaaggcgccattgaacgggcgctgggagggcatcgcaccacactgctggtgcctgatgagcgatatcgcctggtgaccaagtggctgaacactcgccacacgggtctccatgtcagggtgcaggttgttccgctgaaccagcatccgcaggttgctgagttcctaccggatggctttctaaaaatgctggattggaagccgcacccctatcgtgattggctgaaaaagcacctctcacgcttcgacctgcactgtgtggcatcaactgaaatactggaccagaccgacttctcgatgaccatccagggcttggtgcacctggataaagggcgatttgagaagaaggaccagcagcgcattgataacccacgtttctggtgtttgggattcagcaacaaggggcgtctagcgacgttaaggaaggatcgtgtcgagttggaggcagatgtcaagaagttggcccagcttacagcagatgcgcgcacggccatggacgacctcgagaagcacactcgggtgtgggagcgcatcacccagctcacctgggcggcaattgatgtccagtcagcgcaagatcggatgcagtcgctgagggcggatctagaggcgcttgaacggcctgatagtgaattgggagtggcgaaggctcggtgggagcaggcaggtgctgagctgaaggaagtacaaggcaagaaagaactggtcagcaaaaaagtcggggggctggagagcgacaagctcaaggcgaaccaacaactggaactggcgttagatgccgcccggaccggtttggtggatgaggtcagggagttgctttctaagcgtgtgggacagctagaccttgacgatttggagatggtttcagaactcgaaaatcgccatcgatcagcgctggaagaggcccgtaagggggtccacaaccgagagtttcgagcatcgaacaaggctagcgggattgtctccgagttcaaaacaaaatggccgctcatcgccaatgattggctcgccggcgtggatgccctagaagagtacgtcgatcacctggcccatttggagcaggaaggattgccagacctggtcgagcgtttccgagagcgcttgaaccgcaacgcaacacagtcgcttgctcgaatcagccaaaccatccaggccgaacgtgaggacatccaggaccgaatcgaaacgatcaacgatgttctggagcgcacggaatttcggcagggaacctaccttcgtctgggaagtcggccagaaatcttcgaacacgtgaaagcattcaatgcaaagttgatgcgcgtgctggcgcgggctggaagtgacgatcatgaggctcgctttgtcgagctgaaggagctgatcgagaaactggagaaagccaccaatcctgcaacctcgggcaatctagagagtctgcgactgttggactcgcgctaccagctgtccttcttcgccgaggaagtagagaaaggcagcaaaaaggtacgcgatgtgctggagtcttccagtggtaagtcaggcggggaaaaggagtcgtttgccggcaccatcgtagccgccagcttagcttacgtgctgacgcccgacggcagcgaccgtccgctctactgcaccgtgttcctggatgaggcgttctccaataccgccgaggcggtgagtcgccgggtgctcaaagttttccgggaattgaagatccacgtgaatctgatcactccatacaagaacctcaaccttgcacgtgaatcggcgcgctcgctgttgatcgcagagcgtgaccaggacaagcatgagagtcggctctgtgaggtcacctggaaggaaattgacgagcagttggcgcgtcatgaacagcaggggctgcaaaaggcagccagttcactggggatcgaagtggagccagatctgtga

SEQ ID NO: 44218 - DNA, 1194 bp, Pseudomonas aeruginosa BL04
gtgagggattggggacggcttccagatgacgttgttgaggagctgcgccgactggagtgggaccatacaggccggctgcgggagcgactcttgggtacgcgtcctttccctattccttgcttgctgaagccgccaaccggtagccaggcgcttgaggatcttgaccatttccatggctatatcgcggcctggcggaaatggccgtggccacatcaagtggcatgggtgacgaagcgatttcggcaactgggtgaatgcgaagtcccgataaggttggagatcgaatcaacgcaagccctcatcgctgcgctgggggctgaggctgttggacgaagcagaggctgggcggagcgaatggagccgttgctctcgttggataaagctttgttcactacccttatcaagcagcttggagagctggagaagctctccatgactgacatccatttgctggcgtgcctgctgccgcaactccagtgtggaatgggccagcgtcgatacttgcgggccctgccactacagaaggtggatacaaagttcgtggagttgaaccagagcctaattgccgctctgttggattcgatgcacgaccaagaggtttccgctcatggcgggttagaggcttggttaggctgccgcgccacaccatccaactggcttcacgtgaaaccactttgccctgacgtgaaaggtcgccttgctgggcttgatctcgttcggctgtcctttgagcaactgatgacctatccgttacccgctcggagtgtgctggtgatcgagaacctccaggctggctacgggcttcccgagctaccaggcaccattgcagtgttcggaggaggcgcaaataccgcctggctacaagccgagtggctgaaggacagaagggtaggttactggggggatctcgatacatgggggctgaaattcctcgccgatgcacggttgaggcagccccatgtagaggctgtgatgatggatcgcgacacgctgatcgcccatgttgagcgcggggtgtgcgaagagcgaccagccgagctaccggactatggcttgactcttactgagcgctctctttttgaagagctgcgctctggtcgacacggagttggtcgactagaacaggagcggttgtctcaagactacgtagagcagcaacttgacgtctggcttcatgccatcgctacgatatag

SEQ ID NO: 44219 - DNA, 1353 bp, Pseudomonas aeruginosa BWHPSA027; identical to SEQ ID NO: 43763

SEQ ID NO: 44220 - DNA, 750 bp, Pseudomonas aeruginosa BWHPSA027; identical to SEQ ID NO: 41752

SEQ ID NO: 44221 - DNA, 3306 bp, Pseudomonas aeruginosa BWHPSA027; identical to SEQ ID NO: 43765

SEQ ID NO: 44222 - DNA, 1146 bp, Pseudomonas aeruginosa BWHPSA027; identical to SEQ ID NO: 41754

SEQ ID NO: 44223 - DNA, 1500 bp, Pseudomonas aeruginosa BWHPSA006
atggaagaaagcgcacaacagcgttcagaacgctatgtatccgcccgcagccagcaccccgcgtggcttttgctcgcctcgcgccgtgctccgctcgtattgggctgcctgcgcacgctgttcgagcgggcgcacgatgggatccccatggaggatgcgctgcaagcgctgtccgaaatgctggctgcttatgccagccaggagctttacgaaatcgacccggatgcaacgcatctccaagcaggtcgtgaacttcgtgaatggatcaagcggcgtctggtcgtagaacgagaggatcgtatctatgcaaccgacgcgttggagtccgccatccagttcgtcgattcgctggatagtcggatcatgacctccacggcatctcgcctttcggtggttcagcgcgagatcgaaaacctggaaacgggtctgaaccccagccctactggccgtattgccagcctgcgccgccgcatccaggatttggagcacgagctagcgcaggtagaagctggccacgtcgtcgtgctggacgaagcgcaggcgatagagggtatacgcgaggtatataacctggccaccagcctgcgcgcagactttcgacgagttgaagactcttggcgcgaggcggatcgcgcccttcgacactccatcatcagcgagcagtctcaccgtggagagatcgtcgatcggttattggacgggcaagatgctctactcaacacgccggaggggcgtgtcttcgaaagcttccagcagcaactgaggcagtccgctgagctggaaaccatgcgtgagcgcttgcgcaccatccttcgtcatcccgcggttccaaaggcactgaatcgtccccagcaacgtgagctgcgttggctggcgttacgcctggttcgggagtcgcaggctgtgctccaagcgcgcgcccgaagcgagcgcgatgttcgcggcttcatgaagacggggctagccgccgagcatcatcgcgtcggacagttactcaacgacttcttcaatctagcgctcagcgtcgactggcaacgtcagtcagagcgccgtaagtctgcatgtttaccaccggttggcgtagccatcaccggtatcccggcaatcgagcgtctccgcttcaagaccctggatgacgatgatacgggcgagctggatctgagtttgaagcctgcggggttggagcagattgatgatgacttctgggatgccttcgacgggctggatcgtgaagagctgattcataacaccctggctgtgctggtggagcagggtcgccctgtgagtctcggggaacttgcgtctttgcttccacctgctcacgacctggaaacctttgcgctctggttggcgatggcgcgcgaggcaggtatcgaggtgctgacagaggagcgtcagctcgtggagctagttgacgaggatgagcaacgctggcgcttcaatctgccttatgtcggactcgaccacgaggcactcaaggacatcgattgggagttgtga

SEQ ID NO: 44224 - DNA, 750 bp, Pseudomonas aeruginosa BWHPSA006
atggcaggggtcttcgatcgaattgcaggcgcctctggcgccgacgaaacggaactgacggtagagcccatggcgttggatgacggcatggatgatgaacagcctctcatgagcgccgctgtacaggtcgatgagcgccggacgccgcaacgggtacgtgaggccgtacaggaaatgctcaagtacggtctgctggaagagagtcacaagcccaacctgtatcgctcagcgctttccaatatcgaggcggtcgacagaatcctggagccgctcgaccttgccatgggggtcgacgaggttcgggggctggtgttcgtcaccgttcgccagggcgaggtggccgagcaggatgactggtcgcaccccctcgtgcgtcggcaaaggctgaatctggagcagtctctgctgatagccatcttgcgccagcagttcatcgcctacgaacaggaaagcggtacgggcgccagtcaggcatcggtagcggtcgatgagctgattccccaattgcaggtttacctaggcgagctgggcagtgaggcgaaggagcgcaatcgcatcatcacgctgctggatcagctcaaggggcatggcctggtgtcggctctggacgctcatgatcgcgtcatcatccgtcccatcattacccacttggctaacccggagaacctgcaggcactcgtggcatggctgcgagagcaggtggagggcgcggcgacgccggctgccgatggcgaggaggatatggcatga

SEQ ID NO: 44225 - DNA, 3306 bp, Pseudomonas aeruginosa BWHPSA006
atgaagcaggcactcctctggcgtgacagcgagaccttcattctcaccagcatcgagctctataactggggcggctttcagggctatcaccgtgccgagatcgacccctccggtaccgccgtgatcggcccgacggggagcggtaaaacgacgctggtggacgctctgatgaccttgctgtgcgccaatccgcgctacaacctggcatccacgggcgggcacgaaagcgaccgcgatctggtgtcctatgtacgcggcgtcaccggccccggggacggaggtgtagagcaatctcatatcgcgcgccagggtaagacggtcaccgccattgccgccacgctcgagcgtgacggtgcgcaggttcggctgggcgccgtgctctggttcgagggcaccagctcctcggcgtccgatctgaaaaaactttggctgttaagcgagtcccccgagcagacgctggagcattggctcagccagcatcacgcaggcggcatgcgggctctgcgtcagatggagaaggatgggactggtatctggccttatccgagcaagaaagctttcttggccaggctgagggattacttcgaggtcggtgaaaacgctttcaccttgctcaaccgcgctgccggcctgaagcagctcaacagtattgatgagatcttccgagagctggtactggatgaccgctccgccttcgagcgggctgccgaggtcgccagcagcttcgatgatctaactgacatccaccgagaactggaaaccgctagaaagcagcagcgctcgttgcaacccgtcgccgatggctgggaacgttatagggccttgcaagaacagttgcaggataagcaagcgctcgaaggcatcctcccggtctggttcgccgagcaggggtatcgcctgtggttggctgaaaccaacaggcttgagaaggagcacaaacaggctgaactggatcaggcgcaatgcaggagtcagcttgagatccagaagggcgtggtcgatcaacatcgtcagcgctacctgcgagtagggggcgcagggatagaccaattacgcgggcgcatcgctgattgggtcagggagtgcgataggcggcgcctgaaagccgagcaataccaacgcttggccaaggggcttggactcgcggatgagttatcggccgctgcgctcgaagaaaatcagcagcagatcgcggcacgcctggaaatactggcccagcaaattacaggcgcgcgccagaaagcgttcgacgcaggtctcgtccagcaagagctcaatggctgcctgcagagcttacagcaggagcgtgctgaggttgagaggcggccaggctcgaacctgcccgggaattttcatgcttttcgaagcgatctggcacaggcgcttggtgtcgatgagtcggccctgcctttcgttgccgagctggtgcaggtcaagcccgaggagctggcctggcggggtgccatcgaacgggcaatcggtagccaccggctgcgtatcctagtgccgcagggttcatcccaggccgcactgcgttgggtgaaccaacggcacaaccgcttgcatgtgcgtttgttggaggtcaaggagccgtcgtcgcgccctgtgttcttcgacgatggttttacccgcaaactgaccttcaaggagcatccgtaccgagaagctgtgaaggctctactggtggataatgaccgccactgcgtagaaagcccggagcaattgcgtcataccccttacgccatgacagctcaggggctgatgtcgggcaaagaacgcttcttcgacaagcaggatcagaagcgcctggatgaagactggctgaccggcttcgacaaccgcgatcgtctggccttcctgactgagcagattcgcgaggtcaatgaacagctcgtgcccgccaaactggcactggatgctgcccagggcgatgtcggtcagttggagagtcaagcttcgctgctgcaacgcgtcgaagaactgcagttcgaggagattgatcggccgggcgccgagctccagctggcgtcgctgtgtgctcagatggacaccttgacgcgccccgattctgaccttgccatgatcaaggccgagctggatgaagctgaggccctgcaggagtcgctggatcaacagctgcaacaacggatcaagcagtgcgttcagttgaaaactcagtttgaccaggccgcatccgctacccgtagggcctatcacggtgccgagaaggggctgagcgacacgcagcgtgaactggcgcaaatgcatttcccgaccctgacggcagatgacctcgacgatattgtcgagctggaacgcaagcatacgcgtgagcttcaagggcagctcaaaacgctcagcgagaaactgggcgaccagaaaacagagcttgccaaacgtatgtccgacgccctgaaggtagacaccggggcgcttgccgaggtcgggcgagaactggtggatgtacccaggtatctggagcgtctccgtgtgctgaccgaggaagccctgcctgagaaactcaagcgcttcctggaatacctcaatcgctcctcggatgacggcgtcacccagctgctcagctatatcgaccatgaggtctcgatgatcgaggagcgcctggatgacctgaacagtacgatgcagcgtgtcgactttcagcccggacgctatctgcgcctggtggcgaaaaaagtcatccatgaaagcctgcgcaccttgcaacaggctcagcgccaactgaactcggcgcgcttcatcgatgatgaaggcgagagccattacaaggcattgcaggcgctcgttggcctgctcaaggatgcctgcgaacacagcaggaatcagggcgccaaggcgcttctggatccgcgcttccgcctggagttcgcggtatcggtgatcgatcgggcaggcaataatctcatcgaaacccggacaggttctcagggcggcagcggtggagagaaggagatcatcgcctcctatgtactgaccgcttccctgagctatgcgctctgtcccgatggcagcagccggccgttgttcggcaccatcgtgctcgacgaggcattctcgcgcagctcccatgcggttgccggtcggatcatcgcggcgctgagggaattcggcctgcacgctgttttcatcacgcctaacaaagaaatgcgcctgctgcgccaccatacgcgttcggccgtcgtcgttcaccggcgcggcgtggaatccagtttggtttctctgagctgggaagctttggatgagcatcatcaacagcgcatcaaggccatgcatgaagtcgcccactga

SEQ ID NO: 44226 - DNA, 1158 bp, Pseudomonas aeruginosa BWHPSA006
atgaagtcgcccactgacatctgtcgcagcttggccaggcaatggcatcgctccagtgttcggttggaacgcttgctcaatcccggcagttggccgcaatgcttcaacatcggtaagccttcggcacgagtcttcgctgaaaacatccatgcggtgctccagcatgtggagaactggcggagcgtgaaagtggggaaggttgactgggagtcagtcagctatcgagctgggctggccccaatttccttgccgatgcgctggcacttgcgtagtccctccgaatggattgccgcgaccaatgatccaacggtcagccgggaatacgctcaactcgagtatctggtcgagcaggtagacagtgcctttcatgcgctgctggtggctcaacgcagcctgtggttgacgaagccgtctgaagaagtcgtcgccacggcgcaactcgccacccggttgtcgccaggctgtgcccgaggccgtccactgcgcctgcttgcagagcacggcgtagacaccaagtttttcgagcgtaacgccagcttgctgaccaggctcctcgacgagcgcttcgaaggcgctgcgtccgagcaaggcctgacgacgtttctggatgcctttgaagaaagcagtcattgggttctagtcgttccccttcagcctgagctgctgcccttcaagcggctcaggctcaccacttcggaactggccgaaaccccacttcccggttcacggttgctggtggtggaaaatgagcaatgcattcacttgctgccagaaaccttaccggacaccctggctgtactgggctcagggctcgatttgcagtggttggcgtctgcgcacttggccgcgaaacagatcgcatactggggagacatggacacctggggcttgctgatgctggcgcgagcgagacttcatcaacctgcagtcgaagcactattgatggagcaggagctgtttgaacagcactcaccggtgagcgcagtcgtcgagccgaccaaagctctggagtcggccccacctggtttgctggctgacgaagcggatttctatcggtatctgctggtgcaagagcgaggacgtctcgagcaggagtacctgccaaaggtacaagttgagcgcgctatcgagcagtgggctcgaaagaaccctgtatag

SEQ ID NO: 44227 - DNA, 1353 bp, Pseudomonas aeruginosa 6077; identical to SEQ ID NO: 42083

SEQ ID NO: 44228 - DNA, 750 bp, Pseudomonas aeruginosa 6077; identical to SEQ ID NO: 43206

SEQ ID NO: 44229 - DNA, 3306 bp, Pseudomonas aeruginosa 6077; identical to SEQ ID NO: 44209

SEQ ID NO: 44230 - DNA, 1158 bp, Pseudomonas aeruginosa 6077; identical to SEQ ID NO: 44210

SEQ ID NO: 44231 - DNA, 1353 bp, Pseudomonas aeruginosa 19660
atggaggatgcgctgcaagcgctgtccgaaatgctggctgcttatgccagccaggagctctacgagatcgacccggatgcaacgcatctccaagcaggtcgtgaacttcgtgaatggatcaagcggcgcctcgtcgtagaacgagaggggcgtatctacgcaaccgacgcgctggagtccgccatccagttcgtcgactcgctggatagtcggatcatgacctccacggcatctcgcctttcggtggtccagcgcgagattgaaaacctggaaacgggtctgaaccccagcccaactggccgtattgccagcctgcgccgcagaatccaggatttggagcacgagctggcgcgggtagaggccggccatgtcgacgtgctggatgaagcgcaggcgatagagggcatgcgcgaggtatataacctggccaccagcctgcgcgcagactttcgacgagttgaagactcttggcgcgaggcggatcgcgcccttcgacactccatcatcagtgagcagtctcaccgtggagaaatcgtcgatcgattgctggatggtcaagatgctctactcaacacaccggaagggcgtgtgtttgaaagcttccagcagcaactgaggcagtccgctgagctggaggtcatgcgtgagcgcttgcgcaccatccttcgtcatcctgcggttccaaaggcgctgaatcgtccccagcaacgtgagctacgttggctggcgttacgcctagttcgtgagtcgcaggctgtgctccaggcgcgcgcccgaagcgagcgcgatgtccgcggcttcatgaaaacggggctggccgccgagaatcatcgcgtcggacagttactcaacgacttcttcaatctagcgctcagcgtcgactggcaacgtcagtcagagcgccgtaagcctgcctgtttaccaccggttggcgtagccattaccggtgtcccggcaatcgagcgtctccgcttcaagactctggatgacgatgatgcgggcgagctggatctgagtttgaagcctgcggggttggagcagattgatgatgacttctgggatgccttcgacgggctggatcgtgaagcgctgattcatgacaccctggctgtgctggtggagcaggggcgccctgtgagtctcggggagcttgcgtctttgcttccacctgctcacgacctggaaacctttgcgctctggttggcgatggcgcgtgaggcaggtatcgaggtgctgacagaggagcgtcagttcgtggagctagttgacgaggatgagcaacgctggggcttcaatctgccttatgtcggactcgaccacgaggcactcaaggacatcgattgggagttgtga

SEQ ID NO: 44232 - DNA, 750 bp, Pseudomonas aeruginosa 19660
atggcagggatcttcgatcgaattgcaggcgcttctggcgccgacgaaacggagctgacggcggagcccatggcgttggatgacggcatggatggtgagcaacctgccatgagcgccaatatacaggtcgatgagcgacggactccgcaacgggtacgtgaggccgtacaggaaatgctcaagtacgggctgctggaagaaagccacaaacccaacctatatcgctcagcgctcaccaatatcgaggtggtggacagaatcctggagccgctcgaccttgccatgggggtcgacgaggttcgggggctggtgtttgttaccgttcgccagggcgaggtggccgagcaggatgactggtcgcaccccctcgtgcgtcggcaaagactgaatctggagcagtccctgctgatagccattctgcgacagcatttcatcgcgtacgaacaggaaagcggtacgggcgctagtcaggcgctggtggcggttgatgagctgattccccaattgcaggtttacctgggcgaactgggcagtgaggcgaaggagcgcaatcgcatcatcacgctgctggatcagctcaaggggcatggtttggtgtcggctctggacgcacatgatcgtgtcatcatccgtcccatcattacccacttggctaatccggagaacctgcaggcactcgtagtatggctgcgagagcaggtggagggtgcggttacgccggctgccggtggtgaggaggacgaggcgtga

SEQ ID NO: 44233 - DNA, 3306 bp, Pseudomonas aeruginosa 19660
gtgaagcaggcactactctggcgtgacagcgagaccttcattctcaccagcatcgagctctataactggggcggctttcagggctatcaccgtgccgagatcgatccttccggcaccgccgtgatcggcccgacggggagcggtaaaacgacgctggtggacgctctgatgaccttgctgtgcgccaatccgcgctacaacctggcatccacgggcgggcatgaaagcgaccgcgatctggtgtcctatgtgcgcggcgtcaccggccccggggacggaggtgtagagcaatctcatatcgcgcgccagggtaagactgtcaccgccattgccgccacgctcgagcgtgacggtgcgcaggttcgactgggcgctgtgctctggttcgagggcaccagctcctcggcgtccgatctgaaaaaactttggctgttaagcgagtcccccgagcagacgctggagcactggctcagccagcatcacgcaggcggcatgcgggctctgcgtcagatggagaaggatgggatggggatctggccgtatcccagcaagaaagccttcctggccaggctgagggattacttcgaggtcggtgaaaacgctttcaccttgctcaaccgcgctgccggcctgaagcagctcaacagtattgatgagatctttcgagagctggtactggatgaccgctccgccttcgagcgggctgccgaggtcgccagcagcttcgatgatctaactggcatccaccgagagctggaaaccgctagaaagcagcagcgctcgttgcaacctgtcgccgatggctgggaacgttatagggccttgcaagaacagttgcaggataaacaagcgctcgaaggcatcctcccggtctggttcgccgagcaggggtatcgtctgtggttggctgaaaccaacaggcttgagaaggagcacaaacaggccgaactggatcaggcgcaatgcaggagtcagcttgagatccagaagggcgtggtcgatcaacatcgtcagcgctacctgcgagtagggggcgcagggatagatcaattacgcgggcgcattgctgattgggtcagggagtgcgataagcggcgcctgaaagccgagcaataccaacgcttggccaaggggcttggactcgcggatgagttatcggccgctgcgctcgaagaaaatcagcagcagatcgcggcacgcctggaaatactggcccagcaaactacagacgcgcgccagaaggcgttcgatgcaggtctcgtccagcaggaactcaatggccgcctgcagagcttacagcaggagcgtgctgaggttgagagacggccaggctcgaacctgcccgggcattttcatgcttttcgaggtgatctggcgcaggagcttggcgtcgatgagtcggccctgcctttcgttgccgagctggtgcaggtcaagcccgaggagctggcctggcggggtgccatcgagcgggcaatcggtagccaccggctccggatcttggtgccgcagggctcatcccaggccgcactgcgttgggtgaaccaacggcacaaccgcttgcatgtgcgcttgttggaggtaaaagagccgtcgtcgcgccccgttttcttcgacgatggctttacccgcaagctgaccttcaaggagcatccgtaccgagaagccgtaaaggcactactggcggacaatgaccgccactgcgtcgaaagcacggagcaattgcgtcatacccctcacgccatgacggcccaagggctgatgtcgggtaaagaacgcttcttcgacaagcaggaccagaagcgcctggatgaagactggctgaccggcttcgataaccgcgaccgtctggccttcttggctgagcagattcgcgaggtcaatgaacagctcgtgcccgccaagctggccctggatgctgcccagggcgatgtcggtcaattggagagtcaagcttcgctgctgcaacgcatcgaagagctgcagttcgacgatattgatcggccgggcgccgagcgtcagctgcagtcgctgcgtactcagctggacaccctgacgcgtcccgattctaaccttgccgtgatcaaagccgagctggatcaagccgaggccctgcgggagtctctggaccaacagctgcaacgactgattgagcagtgtgtgcagttgaaaactcaatttgaccaagccgcatctgctacccgtaaggcctatcgcggcgccgaaaaggggctgagcgatacacagcgtgaactggcgcaagcgcatttcccgatcctgagcacggatgacctcggcgatattgacgagctggaacgcaagcatacgcgtgagcttcaagggcaactcaaaacgctcggcgagaaactgggcgaccagaaaacagagcttgccaaacgtatgtccgacgccctgaaagcagacaccggggcgcttgcagaggtcgggcgagaactggtggatgtacccaggtatctggagcgtctccgtgtgctgaccgaggaagccctgcccgagaaactcaagcgcttcctggaatacctcaatcgctcctcggatgacggtgtcacccagctgctcagctatatcgaccatgaggtctcgatgatcgaggagcgcctggatgacctgaacagtacgatgcagcgtgtcgactttcagcccggacgctatctgcgcctggtggcgaaaaaggtcattcatgaaagcctgcgcaccttgcaacacgctcagcgccaactgaactcggcgcgcttcatcgatgatgaaggcgagagccattacaaggcattgcaggcgctcgttggcctgctcaaggatgcctgcgaacacagcaggaatcagggtgccaaggcactgctggatccgcgcttccgcctggagttcgcggtatcggtgatcgatcgggaaggcaataatctcatcgaaacccggacaggttctcagggcggtagcggtggcgagaaggagatcatcgcctcctatgtactgaccgcttccctgagctatgcgctctgtcccgatggcagcagccggccgttgttcggcaccatcgtgctcgacgaggcgttctcgcgcagctcccatgcggtggccggtcggatcatcgcagcgctgagggagttcggcctgcacgctgtcttcatcacccccaacaaggaaatgcgcctgttgcgccaccatacgcgttcggcagtcgtcgttcatcggcgcggcgtggaatccagtctggtttccctgagctgggaagcgttggatgagcatcatcaacagcgcatcagggccatgcatgaagtcgcccactga

SEQ ID NO: 44234 - DNA, 1146 bp, Pseudomonas aeruginosa 19660
atgaagtcgcccactgacatcggccgtaacctggccaggcaatggcagcgctccagcgtgcgcttggagcgcttgctcaatcccggtagctggccgcaaagcctcaacatcggtaagccttcggcacgtctattcactgacaacatccaggcggtgctccggcatgtggagaactggcggagcgtgaacgtgggtaaggtcgactgggaacctgtcagctaccgagcaggtctggcccccatttccttgccgatgcgttggcatttgcgtagcccctccgaatggattgccgcgagcgatgatccaagggtcagccaggaatacgctcaactcgagtatttggtcgagcaggtagacagtgcctttcatacgctgctggtggcacaacggagcttatggttgacgaggacgcctgaagaagtcgtcgccacggcgcaactcgctactcaattagctccgggctgcgctcaaggccgcccattgcgtctgcttgcagagcacggagtggacaccaagttttttgagcgaaacgctaccttactgacgaagctcctcgatgagcgcttcgaaggtgccgcgtcggagcaaggcctgacgacctttctggatgcctttgaagaaagcagtcattgggttctagtcgttcctcttcagcctgggctgctgcccttcaagcggctcaggctgacaacttcggaactggccgaaaccccacttcctggttcgcgattgctcgtagtggaaaatgagcaatgtgttcacctgctacctgaaaagttgccggacaccttagcggtgctgggggcaggactcgatttgcattggttggcgtctgcgcatctggccgggaaacagatcggttactggggcgacatggatacctggggcttgctgatgctggcgcgagcgagactccatcaacctgcagtcgaagcactcctaatggagcaggagctgtttgaacagcactcacaggggaatacagtcgtcgagccggctaaagctctggaatcggctccccctggtttgctggctgacgaggctgatttctatcggtatctgttggtgcaagagcgggggcgtcttgagcaggagtatcttccaaaggctcaggtggagttggccataagaaagtgggccagatga

SEQ ID NO: 44235 - DNA, 1353 bp, Pseudomonas aeruginosa X24509
atggaggatgcgctgcaagcgctgtccgaaatgctggctgcttatgccagccaggatctttacgagatcgacccggatgcaacgcacatccaggcaggtcgtgaactccgtgaatggatcaagcggcgccttgttgtagagcgagagggccgcatctatgcaaccgacgcgctggagtccgccatacagttcgtcgactcgttggatagtcgtatcatgacctccacggcctctcgcctttcggtggtccagcgcgagattgaaaacctggaaacgggcctgaaccccagcccaagtggccgtattgccagcctgcgccgccgaatccaggacttggagcacgagctagcgcaggtagaagctggccacgtcgtcgtgctggacgaagctcaggcgatagagggtatacgcgaggtatataacctggccaccagcctgcgcgcagactttcgacgagttgaagactcttggcgcgaagctgatcgcgccttgcggcaatccatcatcagcgagcagtctcaccgtggagaaatcgtcgatcggttgctggacggtcaagatgcgttactcaacacaccggaaggacgtgtcttcgaaagtttccagcagcaactgaggcagtccgccgagctggaagtcatgcgtgagcgcttgcgtaccatccttcgtcatccagcggttccgaaggcactgaatcgtccccagcaacgtgagctgcgttggctggcgttacgcttggttcgggagtcgcaggctgtgcttcaggcgcgtgcccgaagcgagcgcgatgtacgtggcttcatgaagacgggcctggccgccgagcatcatcgcgtcggacagttactcaacgatttcttcaatctagcgctcagcgtcgactggcaacgccaggccgtgcgtcgtagcactgtccgtttgccgccggttggcgtagccattaccggagtcccagcgattgagcgtctacgtttcaagaccctggatgacgatgacacgggcgagctggatctgagtctgaagccagcggggctggaacagattgacgatgacttctgggatgctttcgacgggttggatcgcgaagcgctgattcatgacaccctggcggtgctggtggagcaggggcgacctgtgagtctcggggagcttgcgtctttgcttccacctgctcacgacctggaaacctttgcgctctggttggctatggcgcgcgaggcaggtattgaggtgctgacagaggagcgtcagctcgtggagctagttgacgaggatgagcaacgctggcgcttcaatctgccttatgtcggactcgaccacgaggcactcaaggacatcgattgggagttgtga

SEQ ID NO: 44236 - DNA, 750 bp, Pseudomonas aeruginosa X24509
atggcaggggtcttcgatcgaattgcaggcgcctctggtgccgacgaaacggagctgacggtggagcccatggcgttggatgacggcatggatgatgaacagcctctcatgagcgccgctgtacaggtcgatgagcgccggacgccgcaacgggtacgggaggccgtacaggaaatgctcaagtacggtctgctggaagagagtcacaagcccaacctgtatcgctcagcgctttccaatatcgaggcggtcgacagaatcctggagccgctcgaccttgccatgggggtcgacgaggttcgggggctgttgttcgttatcgttcgccagggcgaggtggccgagcaggatgactggtcgcaccccctagtgcgtcggcaaaggctgaatctggagcagtctctgctgatagccatcctgcgccagcagttcatcgcctacgaacaggaaagcggtacgggcgccagtcaggcatcggtagtggtcgatgagctgattccccaattgcaggtttacctaggcgagctgggcagtgaggcaaaggagcgcaatcgcatcatcacgctgctggatcagctcaaggggcatggcctggtgtcggctttggacgcccatgatcgcgtcatcatccgtcccatcattacccacttggctaacccggagaacctgcaggcactcgtggcatggctgcgagagcaggtggagggcgcggcgacgccggctgccgatggcgaggaggatatggcatga

SEQ ID NO: 44237 - DNA, 3306 bp, Pseudomonas aeruginosa X24509
atgaagcaggcactcctttggcgtgacagcgagaccttcattctcaccagcatcgagctctataactggggcggctttcagggctatcaccgtgccgagatcgacccctccggtaccgccgtgatcggcccgacggggagcggtaaaacgacgctggtggacgctctgatgaccttgctgtgcgccaatccgcgctacaacctggcatccacgggcgggcatgaaagcgaccgcgacctggtgtcctatgtccggggagttaccggccccggggacggaggtatagagcagtctcatatcgctcgccagggtaagacagtaaccgcaattgcggccacgctcgagcgtgatggtgcgcaggtacgactgggggccgtgatctggttcgaaggcacaagctcctcggcatcggatctgaaaaaactgtggctgttaagcgagtcccccgagcagactctggagcattggctcagccagcatcacgcaggcggtatgcgggctttgcgtcagatggagaaggatgggacgggtatctggccttatcccagcaagaaagctttcttggccaggctgagggattacttcgaggtcggtgaaaacgcattcaccttgctcaaccgcgctgccggcctgaagcagctcaatagcattgacgagatctttcgcgagttggtgctggatgaccgttccgccttcgagcgggccgccgaggtcgccggcagcttcgatgatctaaccgacattcaccgagaactggaaacggctagaaagcagcagcgctcattgcaaccggtcgccgatggctgggagcgttaccaggtcttgcaagaacagctgcacgataagcaggctctcgaaggtatcctcccggtttggttcgccgagcaggggtatcgactgtggttggctgaaaccaacaggctcgagaaggagtacaaaaaggccgaactggatcaggagcaatgcaaaagtcagcttgaggcccagaaaggtgtggtcgatcaacatcgccagcgctacctgcgagtagggggcgcagggatagatcaattgcgcgagcgcatcgctgattgggtgagggagtgcgataagcgcagcctgaaagccgagcaataccaactcttggccaaaggccttggactagcggatgagttatcggccgctgctctcaaggagaatcagcagcatatcgcggcacgcctggaaatactggaccaacaaattactgacgcgcgccaaaaggcgttcgacgcaggcctcgtccagcaggaactcaatggtcgcctacagaccttacagcaggagggtgctgaggttgagaaacggccaggctcgaacctgcccgggcaatttcatgctttccgaagcgatctggcgcaggcgcttggtgtcaatgagtcggccctgcctttcgttgccgagctggtgcaggtcaagcccgaggagctggactggcgtggcgccatcgagcgggcaatcggtagccaccggctacgcatcctggtgccgcaggactcatcccaggccgcactgcgttgggtgaatcaacggcacaaccgcttgcatgtgcgcttgttggaggtacaggagccgacgtcgcgccccgtgttcttcgacgatggttttacccgcaagctgaccttcaaggagcatccgtaccgagaagccataaaggcactgctggcggacaatgaccgccactgcgtcgaaagcccggagcaattacgtcatacccctcatgccatgacggcccaggggctgatgtcgggcaaagaacgcttcttcgacaagcaggaccagaagcgtctggacgaagactggctgaccggcttcgataaccgtgaccgtctggccttcctggctgagcagattcgcgaggtcaatgagcagctcgagccagccaagctcgccttggatgctgcccagggcgacgttcgtcagttggagactcaagcttcgctgctgaatcgtgtcaaagaactgcagttcgaggatattgatctgccgggtgcccagagtcagctggagtcgctgcgtacgcaactggccaccctgacgcgccccgattctaaccttgccatgatcaaggtcgagctggatgcggccgaggccctgcaggagtctctggatcaacagctccgccaactgatcgaacagtacgttcagttaaaaactcagtttgaccaggccgcatccgctacccgtaaggcctataacagcgcggagaaagggctgaacgatacgcagcgtgaactggcgcaagcgcatttcccgactctgaccgcggatgacctcggcgatattgtcgagctggagcgcaagcatacgcgtgagcttcaagggcagctcaaagcgcttggcgagaaactgggcgatcagaaatcagagcttgccaaacgtatgtctgatgccctcaaggtagacaccggggcgcttgcagaggtcgggcgagagctggtggatgtccccaggtatctggagcgtctgcgtgtgctgaccgaggaagccttgccagagaaactcaagcgcttcctggaatacctcaatcgctcctcggatgacggcgtcacccaactgctcagctatatcgaccatgaagtctcgatgatcgaggaacgcctggatgacctgaatagtacgatgcagcgtgtcgactttcagcccggacgctatctgcgcctggttgcaggcaaggtcatccatgaaagcctgcgtaccctgcagcgcgcccagcgccaactgaactcggcgcgtttcatcgatgatgaaggcgagagccattacaaggcattgcaggatctcgtggggttgctcaaggacgcctgcgaacacagcaggaatcagggagccaaggcgcttctggatccgcgcttccgcctggagttcgcagtatcggtgatcgatcgagaaagcaggaatgtcatcgaaacccgaacaggttctcagggcggtagcggtggcgagaaggagatcattgcctcctacgtgctgaccgcttccctgagctatgcgctttgtcccgacggcagcagccggccgttgttcggcaccatcgttctcgacgaggcgttctcgcgcagctcccatgcggttgcaggtcggatcatcgctgcgttgagggaattcggcctgcacgctgtcttcatcacgcccaacaaggaaatgcgcctgttacgccaccacacgcgttcggcagtcgtcgttcatcggcgcggcctggagtccagtctggtttccctgagctgggaagctttggatgagcatcatcaacagcgcatcaaggctatgcatgaagtcgcccactga

SEQ ID NO: 44238 - DNA, 1182 bp, Pseudomonas aeruginosa X24509; identical to SEQ ID NO: 44163

SEQ ID NO: 44239 - DNA, 597 bp, Pseudomonas aeruginosa CF27
gtgctccaagcgcgcgcccgaagcgagcgcgatgttcgcggcttcatgaagacggggctagccgccgagcatcatcgcgtcggacagttactcaacgacttcttcaatctagcgctcagcgtcgactggcaacgtcagtcagagcgccgtaagtctgcatgtttaccaccggttggcgtagccattaccggtatcccggcaatcgagcgtctccgcttcaagaccctggatgacgatgatacgggcgaactggatctgagtttgaagcctgcggggttggagcagattgatgatgacttctgggatgccttcgacgggctggatcgtgaagcgctgattcaggacaccctggctgtgctggcggagcaggggcgccctgtgagtctcggggagcttgcgtctttgcttccacctgctcacgacctagaaacctttgcgctctggttggcgatggcacgcgaggcaggtatcgaggtgctgaaagaggagcgtcagctcgtggagctagttgacgaggatgagcaacgctggcgcttcaatctgccttatgtcggactcgaccacgaggcactcaaggacatcgattgggagttgtga

SEQ ID NO: 44240 - DNA, 750 bp, Pseudomonas aeruginosa CF27
atggcagggatcttcgatcgaattgcagggggctctggcgccgacgaaacggagctgacggtggagcccatggcgttggatgacggcatggatgatgaacagcctctcatgagtgccgctgtacaggtcgatgagcgccggacgccgcaacgggtacgtgaggccgtacaggaaatgctcaagtacggtctgctggaagagagtcacaagcccaacctgtatcgctcagcgctttccaatatcgaggtggtcgacagaatcctggagccgctcgacctggccatgggggtcgacgaagttcgggggctggtgttcgtgaccgttcgccagggcgaggtagccgagcaggatgactggtcgcaccctctcgtgcgtcggcaaaggcttaatctggagcagtctctgctgatagccattctgcgccagcatttcatcgcctacgaacaggaaagcggtacgggcgccactcaggcactggtagcggttgatgaactgattccgcaattgcaggtttacctgggtgaactgggcagtgaggcgaaggagcgcaatcgcatcatcacgctgctggatcagctcaaggggcatggcctggtgtcggctttggacgcccatgatcgcgtcatgatccgccccatcattacccacttagccaacccggagaacctgcaggcactcgtagcatggctgcgagagcaggtggagggcgcggctacgccggctgccggtggtgaggaggacgaggcatga

SEQ ID NO: 44241 - DNA, 3306 bp, Pseudomonas aeruginosa CF27
atgaagcaagcactactctggcgtgacagcgagaccttcattctcagcagcatcgaactctataactggggtggctttcagggctatcaccgtgccgagattgatccttccggtaccgccgtgatcggcccgacggggagcggtaaaacgacgctggtggatgctctgatgaccttgctgtgcgccaatccgcgttacaacctggcatccacgggcggacatgagagcgaccgcgatctggtgtcctatgtgcgcggcgtcaccggccccggggacggaggtgtagagcaatctcatatcgcgcgccagggtaagacggtcaccgccattgcagccacgctcgagcgtgacggtacgcaggttcggctgggcgctgtgctctggttcgagggcacaagctcctcggcgtccgatctgaaaaaactttggctgttaagcgagttccccgagcagacgttggagcattggctcagccaacatcacgcaggcggcatgcgggcgctgcgtcagatggagaaggatgggacgggtatctggccgtatcccagcaaaaaagccttcctggccaggctcagggattacttcgaagtcggtgaaaacgccttcaccttgctcaatcgcgctgccggcctgaaacagctcaatagcattgatgagatctttcgcgagttggtgctcgatgaccgctccgctttcgggcgggctgccgaggtcgctactagtttcgatgatctaacggacattcaccgggaactggaaaccgctagaaagcagcagcgctcactacaaccggttgccgatggctgggagcgttacaaggccttacaagaacagctgcaggacaaacaggtgctcgaaggcattcttccggtctggttcgccgagcaggggtatcgcctatggttggctgaaaccaataggctagagaaggagcacaagcaggctgagctggatcgagaacactgcgagagtcgacttgatgcccagaagggtgtggttgatcagcagcgtcagcgctacttgcgagtaggtggcgctggaatagatcaattgcgcgagcgtatcgctgagtggggcaaggtatgcggtaggcgtagtctgcaggccgagcaataccgacgcttggccaagggtcttggactatcggaggagctatcggccgcctctctaaaggagaaccaggagcagatcactgaacgcctggaaatcctgacccagcagcttgatggcgcgcgcgaacaggtgttcaaagccggcctcgcccagcaggagctgaatggtcggttacagaccttgcagcaggagcgtgctgaggttgagagacggcccggctcgaatctgccagggctatttcatgcctttcggagtgatctggcgcaggagcttggactcgatgagtcgaccctcccttttgttgccgagctagttcaggtcaagcccgaggagctggcctggcggggcgctatcgagcgggctatcggcagccaccgactgcgcattctggtgccgcagggctcatcccaggccgcattgcgctgggtgaaccagcggcacaaccgtttgcatgtgcgcctgttggaagtgagagagcctgcttcgcgaccggtgttctttgatgatggttttactcgcaaactgaccttcaaggagcatccgtaccgagaagccgtaaaggcactactggcagacaatgaccgccactgcgtcgaaagcccggagcaattgcgtcatacacctcacgccatgacggcccaggggctgatgtcgggcaaagaacgcttcttcgacaagcaagatcagaagcgcctggatgaagactggctgaccggcttcgataaccgcgaccgcctggctttcttggccgagcagattcacgaggtcaatgaacagctcgcgcctgccaagctggccttggatgccgcgcaggacgatgtccgtcagctggagactcaagcttcgctgctgaaacgcgttgaagaactgcagttcgaggatattgatctgccgggcgcggagagtcagctggaatcgctgcgtacgcaactggccaccctgacgcgccccgattctgaccttgccatggtcaaggtcgaactggatgaagccgagaccctgctggagtctctggaccaacagctccgccaactgatcgagcagtgcgttcagttaaaaacacagtttgaccaggccgcatccgctacccgtaaggcatataacggcgcggaaaaagggctgaacgatacgcagcgtgaactagcgaaagagcacttccctactctggccccggaagacctcggcgacattgtcgagttggagcgcaagcatacgcgtgagcttcaacagcagctcaaatcgctcggcgaaaaattgggtcatgagcaaacagagctagccaaacgaatgtccgacgccctgaaggtcgataccggcgcgcttgcagaggtcgggcgagaactggtggacgtaccaaggtatctggagcgtctgcgtgtgctgactgaggaagccctgcccgagaaactcaagcgctttctggaatacctcaatcgttcctcggatgatggcgtcacccagttgctcagctatatcgaccatgaagtctcgatgattgaggagcgcctggatgacctgaacagtacgatgcagcgtgtcgactttcagcccggacgctatctgcgcttggtcgcgaaaaaggtcattcatgaaagccttcgcaccttgcaacaggctcagcgccaactgaactcggcgcgtttcatcgatgatgaaggcgagagccactacaaggcattgcaggcgctcgttggcctgctcaaggatgcttgcgagcacagcaggaatcagggcgccaaggcgctgctggatccgcgcttccgcctggagttcgcggtctcggtgatcgatcgcgaaagcaggagtgtcatcgaaacccgaacaggttctcaggggggtagtggtggcgagaaagagatcatcgcctcatatgtgctgaccgcttccctcagctatgcgctctgtcccgacggcagcagccggccgttgttcggcaccatcgtgctcgacgaggcgttctcgcgcagctcccatgcggttgccggtcggatcatcgcagcgctgagggaattcggcctgcatgctgtcttcatcacgcccaacaaggaaatgcgcctgttgcgccaccatacgcgttcggcagtcgtcgttcatcggcgcggcgtggaatccagtctggtttccctgagctgggaagctttggatgagcatcatcaacagcgcatcaaggccatgcatgaagtcgcccactga

SEQ ID NO: 44242 - DNA, 1158 bp, Pseudomonas aeruginosa CF27
atgaagtcgcccactgacatcagtcgcagcctggccagacaatggcagcgctccagcgtacgcttggaacgcttgctcaatcccgctagctggccgcaaagcctcaacatcggcaagccttcggcacgtctattcactgacaacatccaggcggtactccggcatgtggagaactggcggagcgtgaacgtgggtaaagtcgactgggagcctgtcagctaccgagcagggctttcccccatttccttgccgatgcgttggcacttgcgtagcccctccgaatggattgccgcgagcgatgatccaagggtcagccaggaatacgctcaactcgagtatctggtcgagcaggtagacagtgcctttcatgcgctgctggtggcacaacggagcttgtggttgacgaagccgtctgaagaagtcgtcgccacggcgcgactcgccacccggttgtcgccaggctgtgcccgaggccgtccgctgcgcctgcttgccgagcacggcgtagacaccaagtttttcgagcgcaacgccagcttgctgacctggctcctcgacgagcgcttcggaggcgcggcgtccgagcaaggcctgacgacttttctggatgcctttgaagaaagcagccactgggttctggtcgttccccttcagcctgagctgttgcccttcaagcggctcagactcacaactgcggaactggccgaaaccccacttcccggttcgcgattgctcgtggtggaaaatgagcaatgcattcacttgctgcctgagaacttaccggacaccctggctgtgctgggctcaggactcgatttgcagtggctagcgtccgcgcacctggccgggaaacagatcgcatactggggcgacatggatacctggggcctgctgatgcttgggcgagcgagactccatcaaccagcagtcgaagcactattgatggagcaagagctgtttgaacagcactcaccggtgagcgcagtcgtcgagccgaccaaagctcaggagtcggccccacctggtttgctggctgacgaagcggacttctatcggtatctgctggtgcaagaacgaggacgtcttgagcaggagtacctgccaaaggaacaagttgagcgcgctatcgagcagtgggctcgaaagatcactgtatag

SEQ ID NO: 44243 - DNA, 1440 bp, Salmonella enterica subsp. enterica serovar Muenster str. 660
gtgatagcagaagcactttcaccagccatattcaaacctcttgcatcaaataaaaatgccagagtgtatacggcttgcatatgggcactgtacgacaggttagtgcggcatcagcactcactggacgaatgtcatccgaaagaagcccgtgagattattcgtcgggctttggttcagtacaatctgcaacttgatgttgaagacttttctgagaaccctgactcagtcgaaactgatgacacacatcgtatttataccttacttcgtgaaactgggtggcttcatgagcaggcaacaactggatacaggcgcatatgctatatccctcagatcccatcacaacttgtcgccgcgctggatctgatcaaggagggacgcattgatgaagtaggggcgacctgcaaaggtgtttatctgcaacttgttgccgctatgcaggatcccagagaaaatgcatcacaaatcgctatcgcacgctccatggggatcaattttctaaataccctctctgcaatgcaggggcagatgcgtgatctgatataccaggcaactgaaaatgaagccggatttaaaattatcaagctgttttttgaggatttcctgaaaggcattcttcttaaagggtactcccacctgaaaaatgccaatcatccctaccgataccgggaaataaccatccaaaaggctattcatatcatgacggatgacacactgatggataacctgactctttctttgtgctcagaaaacaaacagacttcgacagaaaaagtccggcaggaactgaaaaccgacctgagcataataattgatacattcgataatattgacaaactgctttcccgaattgatgactacaggcgcagtcttactacgcgcacccgtgaaactatcgaatatatgcgttcatcgctaccaggactagatcagcaacttgttgaccagattgtcaaagtcagtggaatgtctgatacaacaatgctgcccagccctggtgaacaatattcttcccttaatgaatatcgattacgacgaccatcgacgctccaggtcaagccgcaggctactgagctggaaatgccatataaaaaccccttaaaactggcagaaaacatggccatccgcgagtacctggagagacgcagagagaatcccgcccgcgtgtacgcctatctggaacgtcatctgggtaaaaagagctatatcacctcagatgagctgcaaatagaaacgctggaagatatgctggcatttattcagttacgtcgcctactccataatgcagtccctcctaaaagcaggtattacaaacttacacaacactttctggttatgcccattgcaggggaatacaccgagaataaataccttagtaccccaaaattgaagattgaacgtcgttcaccgttacagagtaaggagacccggtatgttaagtga

SEQ ID NO: 44244 - DNA, 663 bp, Salmonella enterica subsp. enterica serovar Muenster str. 660
atgttaagtgatttgactaaaacaattacccgttccggtgagggaaatattggtccggaagactttaggcaggcagcccgcgcgttgcgtaagcgtcaatttttgtgggccgatcgtccccatgaccgcaaacattacgaacttatccgcaggttcgaagaatacttcagcaatctgtttgatgcatttgatgatgagcttattaaagatcatctatttgggtacattggtatcattcctcgctcgcctggtgacagtgtcatgggggttctgcctacattgatgctgctcattatggctcgtcttcacgatctggaaagccgtcgggcctgcacggtaaatggacgggcgtcccccagtccggaattgttggtagatacctatgttgaactaacaggaaaaccgaagcccaaattatctgatttaaatcaggctctcgatgccatacgccgtcacaacgtgattgagttgggtgaaaaacaggaatccagcgatatgcgggcaattactattttaccgaatatccacaaggtagtgaacagccagtacctgcagacactggaactctttgcgctcgaatctgggcagccgcttcctgtagttatagcctcacaaagctcagacatcacgttttcagatactgatcagagaattatattatga

SEQ ID NO: 44245 - DNA, 3513 bp, Salmonella enterica subsp. enterica serovar Muenster str. 660
atgaataccgaagtatccacacatcgcatggtacgtatcactttgatgaactggtatttattcggcagtgaggaccttgatgttgacgcggccagcgtcatgatcagcggagctaacggagcaggtaaaagctcaatcatcgatgccattcaaactgtactgagtggaggaaacgaaaatgtgctttcgatgaatgcacagagcagcaacaaccagaagtccttacgcagcattcaaacttatgcgttgggtgtcattgatgatcaggagtttggcggcgaactgtctgcttgtcgaaatgaatcaaacacgtatatagctctgacattcagacgccccgatggcactcattatgctatcggaatgggattccatgctcgatctggcgacaggaaggtggagaagctttggtttgtgacaaatagctttagcctttcatctgtcgattttatggacgggaacagagtgatgacgctggctgattttcagcgccgccttaaggctatggatcccgcagtattgcttgccaaaaatgctaagaactttcgtctggactactgccagtcaatgtcaagggagggggcgggcttacaaatcaaccctgacgcgatgtggcatgcaatcaaaaatggaattgcgtatcatggcgaaatgagtatttctgattttatcagccgttatattcttccggctgaaaatgttgatattaacaggcttcataacgattatctggaacacgagcgcatcctaaatctgatcgaaaaaaccgaactggaaattaacgcgttacgttcccttttaaagcattatcaccgttatgagatgcttatggttgaccaaatctgttatggatgggtatcagctgaggcctccttgcaggcccttgacttggtgatagagcagtgcgccagtaaacatcaggctcttggcgaaaaactcgaaaaattgattcgccggcaaacagaaatgcagacaaaagaagccggtgtaaacagagaacgtgatgaagcccgcgatctatttataaactctgcagcagcccgtgtgattgaaaaaaatgatgaaatcatcagaaacgcccgggaacatattgttggtattgaagaacggcttaccactgcaaaacagtcactggccagattccttaaccttatctgtcccccagaaatgactgctgatttcaggaaaaagtatgttgaatattacaactccctgaatgatattgctgccttgtctgacaacccattgatcccctggccttctcatgaacggcagggaaaagaaattgtttcaaccctcattgccttcgaaacgctccgggatgctatatctgaagagcgtgacaatgctaaagctcaattaacagaagtagaaaacgatctgcgggagttgctgcaggccgttaagaagctcgaatcaggcgaggccccactttcagcgtcaactgacatcgtcattcggatgtttaaactacataagattactgccgttccggtatgcgagctttgttcgatcagcgattcttcttggcaggaaggaattgaacgatatcttggacgaaatcgtgaggcactggttatcattgatggcagctattctgatgcactaaaaatttaccggaaagcaatcagagaagaaaataaccatgtgtctttacgtggtgtccggctggtgaaccccgattacgattttggttaccagggaacgcccaggaaaggaactgctgctgaacttatcaaatcagacaatgcggtcgcccttaaatttctgcatgggttgttgtggtttgtgaatctggttaacactgaagaagagttacgcaaggaaaaaagggctatcactccagatggcatggttgcagcaaatggttccattagcggtggcaatgacattaaaggcattatgatcggagcagaagctcgtcgacagtatgctatgacaatgcaggttcaggttgatgaggcgacttcgcgtttttatgcgcagagaacggtgtatgaccccatagatgaatttaacaaatcattcttgtcagaacttagtcatgtgcgccatctgagcctccagattgaacccgcatataaatcactccttgcagagcaagcaattatcaaagataagacccgaattatagatgaagcgagaaagaattcggatacatcgttagagaatgcctttaatcttgcagatgaagcattagcgaaatttaacgaagaaaaaacaactcttgctgttgaaagaaataaaattgaagaacaaatcgaaaaaattgaaaaagaacgctctgccacagaagacagaataaaatacgtattgggcaaaagaaatgagttcagcgaacatccgctttttgatcagagccgggctagcaaccatattgaaaaactgacagagtcgaaaagtattgaactcagagcggaacagcagaatgacgctatcgcttcagagattgaggttaacaatgccgttgcaattgcagcccagagacgcgtggacagtgctgagaatagtgcccggattgcaggtgatgaggctagggaaggaaaaatccatttcatggctaattttgagccagctaaccgcgatatattaagggatttagacccgtatgaatcccgcaaatcatttgaaaagcatcttaaatatcttgaggataccgaactagccttacaccgtcacgatgcagaaaaggcctgcacagagatgctcgccacgtttcgtgccgatgtcgtatcgactttgcaggatgcttttcagcgcatgcgacgtacgttcaagcagcttaatgatcaacttaaggacttacctttcaacaacaacacatatcgttttgtctatccagttgttgaaaccaaaacactgaaagatgtgcataactatgttattgaacaaagcagagctgatacagaagcagtaggaacgttgttcgatttctcacagaaacatccggcaatttcagtgatccaggatgtactaatggaagggagagtcgttgagctatccgattaccgcaattttttcacctatgacattatggctaaagatctgagtaccggaaaagaacgtcgcttcagcaatctactcggtaccggttccggtggggagcagcaatcacctttctatgttgcttttggtgcctcttttatgactgcattcagggtccagcgacgactgaaccaggtcaatgccggagcagtgctggcaatatttgatgaagcttttagccgtatggacgggaataacacctttgccgcacttgagtttttctcgcaaatcgggctacaggctttcctggctgcgcctttggatgcagaggttaaaatgggccatcatgtagagcgtgtcatcacaattattcgtgacggcctgtcagtctttaccgatagtcgtcaaatcagtgatgctggttgggaactgcttgaaagtgataaccccaaacgccatcctgagttgatcgacgcaatgctgacacaggcaaggaaacagttgcatgttgaaaaaagggatgcctga

SEQ ID NO: 44246 - DNA, 1245 bp, Salmonella enterica subsp. enterica serovar Muenster str. 660
ttgaataaaacaactcgcaggatactggaacacatagccaggcaaatcaaccaccccggtatgccaccaaaagaggcaagcatcacgctgacatctaaacggtttgagtactattttggactatcaataaaagaacggctaactgtccatgaagagttacaggtattattcgagcggtataaatgtgcaacagttctgtttgggcctgtggctttaggtgaggttgcttcagttcatgcaatcgacatcaccagaccgagattgtttcttgaagccgctggtgtacagtgtctttacgatgaaattgaacgcgcctgcaaacaacttgctttgctcaggacaacctccgactggcttcaggttatcattgataaagcgcaatatggctggcggcaaggtcgccaggcatatggagtcaaaccttgtgatatcgtgcgcttaactgatgcaatcaggttactggactggctgggcaataatgaacagatgaggatccctgatattcgtaccctcagcgtagttcttttcaatgatacaaaacgtattgaagccatttctggtatcattgttcggctctaccgccctcggttacccgaatatctcttgaatgcagacaatgatcaaattctcgactttttaggtattcgtaaattctctccattaatcaggttcaaaggatcatttaaagttgttatggcctcaggctctatcgactgcactgacgtcagtccttatatagggttcccacccgatgctattaaaggaattcatccagtacaatatcctggatacatattatttatagaaaatgaaacaacattcaatcgttacacacgagatattatagataatggatgggttatttataccaacggttttccatcaagaagctggactgctatttttcgagaattagtaatccaaagtaatccaggtacgccagtataccactggggggatattgatataggaggctacagaattttagtccatatgcaatccattctgggtatagatttgcatccttttcgcatgttacctactgcagagcaatttacagatgatgaaacaaagttaatttctgttaatagattacattccattatttcggatgttgattctcactcaatacaaaatatggcaaagaagcttttaatactcaataaaaaaatcgagtatgttccatgggttgagcaggagaggttgaagctagtttctcctcaatcttttgaaaatagtgattga

SEQ ID NO: 44247 - DNA, 1497 bp, Salmonella enterica
  subsp. indica serovar 6,14,25:z10:1,(2),7 str. 1121
atggaagaaaacgcaaggcagcgtacggaaaattatatttcagcaaaaaaccagcatccagcctggatacttcttgccatccgccgcgccccgctggtattgagctgcctgaaaacgctgtttgaaaaatcacatgatggtatcccccttgaggaagcgattcagtctcttaccggcattcttgttgagcacgtgagtcaggaacagtatgacattaatcaggacaacccttctcttcaggccagtcgtgaactgcgggaatggattaaacgccgtctaatcgtcgaacgggatggccgtatctttgctactgatgcgcttgaggttgcgattacgtttgttgagtctctggataatcgtttcatgacctctacggcttcccgtttgtccaccgtacagcgagaaattgaaaacctggaaacccagcttaatccaaatccggcaaaccgggttgcaaccttacgccgtcgtattgtcgaactggaacgtgaattacaggaggcagaggccgggcatattgaggtgttggaagcgcatcaggcggttgaacatattcgagaggtcttcaatttagcttccagcctgcgggctgactttcgtcgagttgaagactcttggcgtgaggccgatcgcgcgcttcgtcaatccattatcggcgagcagtatcatcgcggcgatatagtagaacgcctgctcaacgatcaggacgctctgcttaatacgcctgagggaagagtcttcgacagttttcagcaacagctccgtcaatcttccgaacttaaagcaatgagcgagcgactgcgcgtaatccttagccacccttcggcttccgatgcgcttaaccgtctgcagcggcacgatttgcgctggttggttaaacgcctggtagatgaatcgcaaaccgtactccaggctcgcgcccgtagcgagcgggatgtacgaggttttatgaaaaccggtcttgccgcagagcatcaccgtgttggtcatctgcttaacgattttctgaatctggcgttaaagctcgactggcagcgtcagatgatccgtaaacaagaggttccactccccgccgttggcgtagcggtaacgggcattcctgcaattgaacgcttacgttttaaagaagtggatgatgaagcggaacagacattggatctcagtaaccacgccgctgatttaacgcagattggcgatgatttctgggatgctttcaacggcctcgatcgtgaggcgttgattcagcaaacgttgcaggtactggcaaaagaaaatcgccccattggattggctgaactggcggcgctgttgcccccggctcacgatctggaaacgttcgccgtctggattggcatggcgagagaagcgggcattgaggttattgattcacagcgcgaatttgctgaacttagtgatggagaaggtcgccgctggcgatttaatttgcctactaccggtctggaaagtcaggcattaatggatatcgattgggagtaa

SEQ ID NO: 44248 - DNA, 750 bp, Salmonella enterica
  subsp. indica serovar 6,14,25:z10:1,(2),7 str. 1121
atggcgggcttttttgacagactgattaaccggaacgttgctgcaaatgcaggcagtaaaccagaaccatcggacgaagatgttactgatgagttggttgatgacagtgcggccagtagcgaaacgcgaacgctgaaaaaaatacgcgaagcggctcaggaattgctcaaatatggcctgctggaagaggccagtaaacccaatctgtaccgcgtggtacttacccatcctgaagaggtgactcgcattctggaacctctcgatctggatatcggcattgatgagatccgcggtctgctgtatgtcaaagtcaggcttgatgaaacgccagaacaggatgaatggtctcatcctctggtgagacggcaacggcttaacctagaacaatcattattagttgccatactgcgtcagcattttgttgcctgggagcaagaaagtggaactggcgccagccaggcgcagatcgctatcgacgatctccttccccaattgcagatttaccttggcgatccggggagcgaatcaaaagagcgtactcggttgcttaccttactggatcaattaaaggggcatgggctggtcacgtcgccggatgcgcatgagcggatcgtgattcgtccgattattgctcatcttgccgaccctatgaatcttcaggcattactggcatggctgcgggaacaaattgctcaacaaacctctccagatgattcgtcagaaaaggagagtagtgaggaggacgtatga

SEQ ID NO: 44249 - DNA, 3291 bp, Salmonella enterica
  subsp. indica serovar 6,14,25:z10:1,(2),7 str. 1121
atgaatcaaatagcgcgtctggctggaaaggaatcttttattctcacccgtattgagttgttcaactggggcggttttcatggattgcatcaggcagtaatccatcaggaaggtactgccgttattggtcctaccgggagcggaaaaacgacgctggtcgatgccttgatgacgctgctctgcgctaatccccgatacaatctggcctcaaccggcggccatgaaagcgacagggatcttatctcttacgtccgcggcgtatccggccccggtgatgggggagaggggcaatcgcatattgccagaccgggtaaaaccgtgaccggcattgccgccacgtttgaacgtgaagggcaactggtgcgtctgggggcgctactgtggtttgattccaccagttccagcgcagcagatttgaaaaagctttgggtgttcagtgataaccccacacagacgatggagcactggctgaatatctggcatgacggtggaacacggtcattgaagcaaatggaaaaagagacgaccggaatctggatttggctgaacaataaaaagcagtacctggcgcgcctgcgggatttcttcgaggtgggggaaaacgcgtttacgttgttaaatcgggcggcagggttaaaacagctaaacagcattgatgagattttccgcgagctggtgctggacgatcactccgccttcgatcgcgcgatggaagtggccaatagttttgatggtctgactgaaattcatcaggaactggaaacggcacgcaaacagcagcagtccttgcaacctgttgccttgagttgggataagtaccagaagcaagagcaaaaacttgctgacaggaaggcgctggaatcgctgttacccatctggtttgcacaacaggcaagtcagctctggcgggaaaagatcgagcaccttgacgccgaacttggcgaggcagaggccagtgaagaacggttaaagtcgcagtttgagctgcaaaaaaaggtggttgctgattgcatgcaacgttattaccaggctggcggcgcaaatattgacgatctgaatgagcgcatcaaggactggcaaaaaacgctcgacagtcgagagactcaggcgcgccagtatcaacaactgacccgcaatcttggattgccgcctgacctgagtcagccacagctggaagcgaatcagcatgaagccgaggcccggcgtgagcagcttggcgatgatataaaactgaaacaggaagaggcgtatcaaaaaggcgcgctcagccatcgcattgctgaagaacttcgggaacgggaaactgaacgtgccgagatcgcgcgtcggccggattctaaccttcccgcacattatcaggcgtttcgcagcgatctggcaaaagcgctgaacgttgatgagtctgaactgcctttcgtcgctgaactgattcaggttaaaccggaagaagcgcagtggcgcggtgcgattgagcgcgctgttgggaataacaggctgcgtattcttgttgcgcctgaatctgcacaggaagcgctgcgctgggtaaatcagcgcaacaatcgtctgcatgtgcggctactggaagtcaaattaccgcactcgcccgcccggttttttgacgatggctttacccgcaagctgttgtggaaagagcatccgtggcgagaagccgtcaaagcattactggcagaaagcgaccggcattgtgttgacagcccagaacagctgcgagacacgcctcatgccatgacggttcaggggttaatgtctggtaaacagcgtttttatgacaagcaggatcagaaacgccttggtgaagactggctgacgggattcgataaccgcgatcgcctgagcttccttgccaaagaaattaccgcgcttcaggagcaggttaaaaccgcaaacgaggcacttgagtttgcgaaaggcgaggtggggcttttgcaaagtcaggaaatttcattccagaaaatacaacagattgattacgatagtattgatgttcccggcgcaaagagccaactggaagcgctcaaggaacggctggataatctgatccgcccggattctgacgccagcgtagcgaaagcaaaacttgatgaggctcaagcggttgaatctggacttgataagcagctcagagccgccaataaagtcactaacgggctggatacagaactcacctcagcccgggccgcagaacgtaaggcccagcaaattgcgcaacaaggtatgcaggatgaagagagagcactgtgcgcgtcacattttcctgcggtgactctggaacaactgcctgacattcgcgatctggaacgtcaacatgagcggggaattcagcaagaaattgagggtgttaaaggtgaactgcatcgactgaacattgagttgaccaaacgtatgtctgaagccaaacgtgtggatacaggggcgctcgttgaggcaggggctgatttggacgatatccctgtctatttacagcgtttgcaggaactgaccgaagaagccctgccggaaaagctcaaccgcttccttgactatctgaatcgttcatctgacgacggcgtaacgcagttgctcagccatatcgatcatgaggtgctggtgattgaggagcgcctcagtgaactcaatgaaaccatgttcagggtcgatttccagccgggccgctacctgcggttggatacgaggaaggtgttccatgaaaaactacatacatttggaaaggcgcagcgtcagctgaacgctgcccgatttgtcgatgataatggtgaaagccactataaagcgctgcaagccctggtagggcaccttcgggatgcgtgtgaaaagaaccgaacgctgggagcgaaggcgttgctggatccgcgttttcgtctggagttcgccgtatcggtgatggatcgtcagagtggaagtgtgattgagtcacgtacaggctcacagggcggtagcggtggagaaaaagagattatcgcttcttacgtgttgaccgcatcactgagctatgcgctttgtcctgcggggagccgttatccgcttttcggcaccattatccttgatgaagccttctcccgtagctctcatgccgttgcgggcaggattatcgccgcgcttaaagaatttggcctgcacgcagtatttatcacgcccaataaagagatgcgcctgctgcgcgaccatacccgttcggcgattgtcgtccaccggcgcggtcaggattcaaatatggcctccctgagctgggaagagcttgagcagcactaccagcggcgggagaaagcgtaa

SEQ ID NO: 44250 - DNA, 1149 bp, Salmonella enterica
  subsp. indica serovar 6,14,25:z10:1,(2),7 str. 1121
atgtattctcctgacgagctgcgcaaaaagctcgcccgacaatgggataacgccaaacttcgcgctgagcgtctgctcgcgtccggtagctggccgctcagtctgtccattggtaaaccctctgctaaggtattcgcggagcaggcccagagcgttttgcgacatgtgcagttatggcggcaagtcgcagttgggcgcgtggaatgggaagatgtgagttatcgggtgagcgacggaccggtaccaatgccgttgcgctggatcctgaatggcccttctgactggatcaacgcagcggtggatccggtggtgagtcgggaatttcgcttgttggagggcattattgagcaggttgatcccatttttcatccgctgttggtcagtcatcgttctctctggcggcacaaagatcctcaggacatcatcagcgccgccaggctggcctgccagttaacgccaggctgcgcaaaagggctgccgttaaggctgctttccgggcagggggtggataccaaatttatcgagaataatatttcgctattaacccgcctgctggacgtgcgtttttccggcgaagccagcgagcagggattaacgacctttcttgatgcctttgatgagtccagccactgggttctggttgcgccgctatcgcccggcttgctcccttttaaaaaatgccgggtgacgacggcggaactggcggaaacgacgttgaccgcgtcacgtgttctggtgattgaaaatgaacagtgtctgcatcaacttccagcgttatctgacactatcgcgattttagggtgtggccttgacgtgcaatggttatccagctctgttctggatgataaacgcgttgcctattggggggacatggatagctgggggctgttgatgctggcgagagccagacgctgtcgtccgacgcttgatgtcctgctgatgaatcgcgagttgtttgagcaatatgccagccatagcgctgttcctgaaccggtaaaggctcaggaggcaatacccgatggcttgcttaatgaagaggccgatttttattgttacttgacccgctcgccgcgtggtcgtctggagcaggaatttttgcctgcgggggtggttgaagaagcgctggtcatgtggcagaaaggattataa

SEQ ID NO: 44251 - DNA, 1398 bp, Firmicutes bacterium ASF500
atgaaactatttgacgcggttcccaatgagcttttttctgtcctggcttctcctaaccggagtttgtatgcagatgcgctggatgtcctctatgagtcgtaccaggaaaatttaaagattcctgaagagacgttatactccatgctgcggggcaaactggaacagcaactggcggaggcaacctttgagggggaagacattgacgaggaagagctgcgtgatgtctccggtcgtgccagatttctgattcggaagctgaacagcaagggctggttagagaaacagcggggagatgattttaacgaatatatcaccgttccggggtacagcagccggctgctggagctgtttcaccagctgagggacgacagccccatgcggggctactgctacgtctttggcacatattctgcattgaaggtggccagcgagggaaccagcgtctatgatagaatggcggcagtttacagtgcctatgataacacgcagtcgctgattaaattgttgcaaatggtctaccacaatgtaaagcattttttccagctgcaaatcaatatgcagcaggtcaatacggttcttgcctcccacttcgatgattttggccagaaagtggtggaagcatacatccgcccactgaaaatcaaggactccgtccccaaatatcgggtaccgatccagaaaatattgaccggctggctggaggacgacgccctgctgaccgccatgtccaacgctgcccttcaagacagacgtgggagtgatctgaacgcctgccggagcgacctgctgcgcaagatattctgggtcaaggagcgctacgacaatattgagcatgaatttctggatgagatcgaccagcaggtccggcggtatacccgggcaaccacacaaaaaattgagaacctgaccaaccgggatcacaatgtccggggcaatttgaattatttgctgaccgcgctgtccagaaaccgaagggcctccgagctggtggagcagatccagcccgcctttcagctatatgagcagtccttcctctcggagaaaagtgtctggtaccggaagcggccgggcaaacggacaaaggcggctccagtgctgattcaggagggagaaatcgacccggagatggccaggcaggcccagcttctactgcactcggaatatggcaggagcgagatcgccgcctatgtggaacaatggctgggagaggccgaagtgtgctactcagaggacttgaacctggaggacgacaaagcctacatcatgagtttgcttgccgtgttgactggcggcgacaggtcttccacttacacagtccgtgagctggaaggagtttactcggaaaacggatacgctatcccccggcttcaaatcaaacgcagggaggaaaagacatga

SEQ ID NO: 44252 - DNA, 630 bp, Firmicutes bacterium ASF500
atgaatgtggactggatcaatggagcgacacagaaagagctggatcagtttaaatctgtctgcaaccagctgctcagccggacgtatcttgtgaagaccctgtgcagggcggacaaagttcggatcaataatccggactatctcttcctgtccagccactatgcggaggtgcgggaatatctggcactgctggactgggacctgcgcaaggacgatttcaatggctatttctatgtcattaacacggatgaggccaaccgctgtcaattggataaagatcagactgccattttgcttgcgatccgtatgatatatgatgaaaatcaggagcgcctggggttggagcacgacgctatctgtaccgtgcgggatctgctggaaaaggtggtaacggattacgcaatcctttcggcacggcccaacatgaaggacgtgaagcgggcgctaaccctgctggacaaccactgtgtgattcagcggattgagggaaaatacagccagggaaactgtaagttcgcgattttgcccacggtattgtcggtggtatccagcgaaaagctggacgcggtggtgtcggtgctgagaaaggaggaagacagtgaagaagctgaagaagattctgctgattaa

SEQ ID NO: 44253 - DNA, 3363 bp, Firmicutes bacterium ASF500
gtgaagaagctgaagaagattctgctgattaattggctctatttctcaaaacagctcatcgaggtggagtatatcaacttcctgacagggaaaaacggagcgggtaagtccaccgtaatcgatgcgctgcagattgtccttctgggcgagacgaacgccaggaatttcaaccaggccgccaatgaaaagtcccaacggacgctggacggatatctgcgggccgacatggacagcggttccccctattccagacgaggcagagacttttccagctacatcgtctgcgaatttctggatgaggaggagggcagccgctttgtgaccgggatcgtcttcgactgccgcagcgacgggagccggcaggagcgcttttttatttacgacggcggtattccggagaactgttttctggatgggcaggaggcaatggacattcccagcctccgtgtctatctgaaacaacagtatggcctgcgtcaaaagctgtatgacagccacaaggagtaccgcaccgatatgctggccaagtggaacgtccacaacgaacaggtcagccgtatgctgaaaaaggcggtctccttccgccctattgtggatatccagaaattcattacggaaaacatctgcgacatcccggacaagccggatatcgaggctatgcagcagaatatccgggactacaagcgccatgagcagctggcccagcggcaggaggaaaagctggaaaaactgatggagatcagccgcctctaccgggatatgcagactgctatcgaccgctgggagcagcagaccttcttggttctgtgggcgcagaaggaggacctggagggccggatcaaccggcatcaggcggaggaggcggactgcaaagcggaggcggagagggccgccgccgggtttgccagcgtatcggaggagatcgacctcaaacgcaggcggcaagatgaactaaaagcggcctgcgcccagagcagtgtggctcaggaggaggacaggctgcgttccggcagggaacgtctgctcaaggaacaacggaatctgctgctccagctgagaaacaccgcgcaggaaattaagcgggaggcaatttctctgtgcagtttgtgtgaaagaatttcggagtggcagaaccgacagcttttagccccggtattctccacggctggtaacatccagaaggcttatgggatattcctcaactgtgacgaacagatatttgacagttccccggctccctttgagcaggcccaggaggctgccgcccaatttatgggggcagttcgggaggtatcctacaagctggaggagatgctccacagcttgagggaggagcaggaccgccggagggccgctctggtagatctgcgcaaaaatatcaaggactacccccaaggactgctccagctccggaatcagattgccgcggagctgaagcagcacagcggccagaacgttccaattgacattctagctgatgttctggagatcccggaggcggaggagtcctggagaaatgcggtggagggatatttgaacacccagaagttctatctactcatcccgccagagcactaccagcgggcgctggctttctatgaccagatcaagcgcgattataacaaccgctctttcggtctggtggatattgccaagctgagggaaaaggagcaccttgccccctgggatgacagcctggccagaaaggtggagacagagaataatttggcccgtacctatatcgactacctcttaggccgtgtggtgtgttgtacccacgttagccagctccggaaacacaggacagctatcactgcggagggcatggtctatcaaggctatgtggcccgcccgctgcggaaagagttgatggaggacgccttcattggacgccgggcggtggccctgaggattgaaaagctggaatcggagctgagaacagctgagacagaattgtccggctgggagcccattggggctgagctggcaaagcacaagggcaaggatccactctttagccgtttttttgtacacagcactgtggagcagcgtagggatgattaccagcgaggcatagagatcacaaaagaggtggaacagatggaagaggatctgtcccacctggatttgttctggctggaggaacagcgccggcagatcggcatattggatcaggaaattaaggatctggatcagcaaaaaatacagtataacagcgagaaaacacagatggaggtgcgaatccataccttggagtatgatgtgcttccgggcttatatcaggagctgagcgaaaaggaggacagcttgtcagagcgtttttctccgtcgtttatcgaaacggtaggccgtccccgctaccggcaggagtttgcgcggctgaagagagcctccgctgttgcaaagaactttggagaccagatgattcggacggaaaatgagaggaattccacccagcgaaagctgtttcaggcccgggccgattatgtcagcgcgttccagccctgttccttccggaccgacgccatgaccaacgaggaatttgaccgagagaggcagctgctggaggagagtgagctgcccaagtatcgggagaagatcaaagccgcccgggagagtgctatggagcagttccagaacgactttctggccaaattgaagtccagcattgaacaggtgcaggatcaggtaaagagcctgaacaaggcgctgaagcagacacagttcggcacagaccggtaccaattccgggcggaccggaaccctgactatgccgagtactacgacatgatcatggctccggagctaatggagggggagggaggactgttcgccatgcccttccagcagaagtacgggcagctgatcgatgagctgtttggccgtctggccatgtctgatgacacacagctcaacgccagaaaacagagcgagcttcagcagaatattgagcgatacaccgatttccgcacctatttgaaatttgacctggagactaccgaccagaacggttccaaacagctgctgtcccagacactgaacaccaaatccggaggtgagacccagacccccttttatatcgctgtgctggcttccttcgcccagctctatcaggtgaacaacctctcgccgctggccagcaacacggtccggctggtagtgtttgatgaagcgttcaataaaatggacagcgaccgtatcattgaaagcgtgcgccttctccggaagatgggcttgcaggcgattatctgtactccgccggacaagcttcccgacattatgcctctggcggataaaacgcttctggttctgaaagaaaaataccagatgcacgtcatgccttggcggaaggagatgggttga

SEQ ID NO: 44254 - DNA, 1242 bp, Firmicutes bacterium ASF500
atgacggaacagggtattattcttacccgcctactagataaatacgaaaaaagtaagcacctgttggagccggggagctccaacaggcgggtcatgctgcgtatcgagaagaaagaactgccggaatacaggcatgagacagccagcatccgggatgctttcaatcaggctgtgcaggaattggaacaggagcagttgatttcggctgaatggctgaagggacggccagtcctgtcggcggttatcctcaatttagatcaggtagagcgctgctaccaaatgaccgacaggacacatcccagacggcaggcagagatcgtggaacagatggtacaaagcgctttagacagggtagaaacggcttggatcaccgcctggcgggacgatatatgcgcaaatgcaaaagatacatatacagttccgggttattgtagaaaagataccggctttctggctgatttgctatccgcactggtacaatatgacttcctgcgcggggaaccaattactatgcgggcgttcagcagcatgtgctatcataacagcaagacctttgaacgggaagtgcgtgatacctttttgcatatcgccgaaaaataccacccaggtctggcagaggtgtgtgagcaggagaaaatgggtatccgggacaagctggcctatctcggcatctacgcacgtccggaactctacgaactttccggaaattgcagctttacaatgctggcaggaacagtaaatattggcgcggcgtatccttacggaatagccctgcccagcacagcggtagactcgattacaaaaattgatctcagcggtgtccacagtatcatatttatcgaaaataagacaaattatgatgaatatttactttctgaattgaaaccgaataccctggctgtgtatcatggcggtttccttagtccccagaaaagaaaactgtttttaaaaattcgggatgcagagtctaaaggtacgcaaacctatttttgggcagatattgatttgggtggttttcagatgtatgctcatttgcaggagatttttccggatgttcagcctatacgaatgtttggcgaggatgttgtgaagcactgccgcaatgggttaaagcggccagtaaagtatttaaagcaattggagcagatgctaacagaggggacatatcctgtgtttgaggacgcaattcgtgagattttgaatcttggtgttactattgagcaggagagttttttgacctaa

SEQ ID NO: 44255 - DNA, 1497 bp, Enterobacter sp. MGH 24
atggaagaaaacacaaggcagcgtacggaaaaatatatctcagcaaaaaatcagcatccagcctggatacttcttgccacccgccgcgccccgctggtattgagttgcctgaaaacgctgtttgaaaaatcacatgatggtatcccccttgaggaggcgattcattctcttacaggcattcttgttgagcacgcgagtcaggaacagtatgacattaaccaggacaatccctctcttcaggccagccgtgaactccgagaatggattaaacgccgtttaattgtcgaacgggatgaccgtgtctttgctaccgatgcgcttgaggtcgcgattacgtttgttgagtccctggataatcgctttatgacttctacggcttctcgtttatccaccgtacagcgagaaattgaaaacctggaaacccggcttaatcctaatccggcaaaccgggtttcaaccttgcgtcgccgtattgccgaattggaacgtgaattacaggaggcagaggccgggcatattaaagtgctggaaacgcatcaggcggttgaacatattcgagaggtctttaatttagcttccagcctgagggctgacttccgtcgcgttgaagactcctggcgcgaggccgaccgcgcgcttcggcaatccattattggtgagcaatatcatcgcggcgatatcgtagaacgtctgctcaacgatcaggacgcgctgcttaatactcccgaaggaagagtcttcgacagttttcagcagcaactccgtcaatcttctgaacttaaggcgatgagtgagcggctacgtgtgatccttagccatccgtccgcttccgatgcgcttaaccatctacagcgtcatgatttacgctggctggttaaacgcctggtcgatgaatcgcaaaccgtactccaggctcgcgcccgaagcgagcgcgatgtccgtggttttatgaaaaccgggcttgctgctgaacatcaccgcgttggtcatctacttaacgaatttctaaaccaggcgctgaaacttgaatggcagcgccagatcgttcgcaaacaagaggttccgcttcctgctgttggcttagcggtaacgggcgtccctgcgattgaacgtttgcgtcttaaagaagtggatgatgaagcggaacaaacgttggatctcagtaataatgcggcggatttaactcagattggcgatgatttctgggatgctttcaacggcctagatcgtgaggcgttgattcagcagacgttgcagcttctggcaaaagaaaatcgccccgttggtctggctgaactggcggcgctgttgccaccggttcacgatctcgaaacattcgccgtctggattggcatggcgagagaagcgggtattgaggttatggattcacatcgcgaatttgctgagcttagtgatggggagggtcgtcgctggcgatttaatctgcctactaccggtctggaaagtcaggcattaatggatattgattgggagtaa

SEQ ID NO: 44256 - DNA, 750 bp, Enterobacter sp. MGH 24
atggcgggcttttttgacaaactaattaaccggagcgttgctgcaaatgcagacagcgagccagaaacatcggacgaagaagttaccgatgagtcggttgaagaaagtgcagtcactagcgaaatgcgaacgctgaaaaaaatacgcgaagcgactcaggaattgctcaaatacggcctgctggaagaggtcagtaaacctaatctgtatcgcgttgtactgacccatcctgaagaagtgactcgcattctggaacctctcgatctggatattggcattgatgagatccgcggtctgctgtatgtcaaagtcaggctcgacgaaacgccggagcaggatgaatggtctcaccctctggtgagacgacagcgacttaaccttgaacagtcgttgctggttgccatattgcgccagcattttgttgcctgggagcaagaaagtggaactggagccagccaggcgcagattgctatcgacgatctcctccctcagctccagatttaccttggcgatccggggagtgaatcaaaagagcgcacccggctacttactttgctggatcaattaaagggccatgggctggtcacatcgccagatgcgcatgagcggatcgtgattcgtcctattattgctcatctggcggacccgatgaatcttcaggcattactcgcatggctacgggaacaaattgcccagcaaacctctccagatgattcgtcagaaaaggaaaatagtgaggaggacgtatga

SEQ ID NO: 44257 - DNA, 3288 bp, Enterobacter sp. MGH 24
atgaatcaaatagcgcgcctgtctggaaaggaatcttttattctcacccgtattgagttgttcaactggggcggttttcatggattgcatcaggcagcaatcaatcaggaaggtaccgccgttattggcccaaccgggagtggaaaaacgacgctggtcgatgccttgatgacgctactctgcgccaatccccgctacaatctggcctcaacaggcggccatgaaagcgacagggatcttatctcttatgtgcgcggcgtatccggacccggcgatggcggtgaggggcaatcgcatattgccagaccgggaaaaaccgtgaccggcattgccgctacgctggagcgtgaagggcagcaggtccgtctgggggcgcttctatggtttgattccaccagttccagcgtgacggatatgaaaaggctttggctgttcagcgataaccccgggcagacgctggagcactggctgaacgtttatcatgatggtggcacacgattgctccggcaaatggaaaaagaagcgaccgggatctggacatatccgaataaaaagcagtatctggcgcgcctgcgggactttttcgaagtgggggaaaacgcgtttacgctgttaaaccgggcggcagggttaaaacagctaaacagcatcgatgagatttttcgcgagctggtgttggacgatcgctccgccttcgatcgcgcaacggaagtggccaatagttttgatggtctgacagaaatccatcaggagctggaaacggcgcgcaaacagcagcagtccttgcaacctgtcgccctgagttgggataagtaccagaagcaagagcgacagcttgctgacaggcaggcgctggaatcgctgttacccatctggtttgcacaacaggcaagtcagctgtggcgtgaaaaggtcagccatcttgaagtcgagcttggtgaggcacagactcgcgaagaacagatccaatcgcagcttgagctgcaaaaaaaggtggtcgctgattgcatgcagctttattaccaggctggtggcgccaatattgacgatctgaatgagcgcatcaaggactggcaaaaaacgctcggcagtcgggaggctctggcgcgccagtatcaacaactgacccataatcttggattgccgactgacctgagtcagccgcagctggaggcgaatcagcatcaagccgaggcccgatgtaaacagcttgccaatgatataaagctgaagcaagaagagacgtatcaaaagggcgcactcagccataacatcaccgttgaactgcgtgaacgggaaactgaacgcgccgaaatcgcgcgtcgtccggactctaaccttcccgcacattatcaggcgtttcgtagcgagctggcaaaagcgctgaatgttgatgaatctgaactacctttcatcgcggaactgattcaggttaaaccggaagaggcgcaatggcgcggcgcgattgagcgcgcagtcgggagcaacaggctgcgtattcttgtttcgccagaatcagcgccggaagcgctgcgctgggtaaatcagcgcaacaatcgtctgaatgtgcggctactggaggtcaaattaacacacgctcccgtccggttttttgacgatggctttacccgcaagctgttgtggaaagatcatccttggcgagacgttgtcaaagcattgctggcagaaaacgacaggcattgtgttgacagccccgaacagctgcgtgacacacctcatgccatgacggttcaggggttaatgtctgggaaacagcgtttttatgacaagcaggatcagaaacgccttgatgaagactggttgacaggattcgataaccgcgatcgcctgaacttccttgccaaagaaattgccgtgctccaggagcgggttaaagctgcaaacgaggcatttgagtttgcgaaaggcgaagtggggcttttgcaaaatcaggccgttttattacagaaaatacaacaaattgattacgatagcatcgatgttcccggcgcaaagagccaactggatgcgcttaaggcgcggctcgataatctgatccgcccggattctgacgccagcgtagcgaaagcaaaacttgatgcggctcaaacggttgaatctgaacttgataagcagcttagagccgctaataaagtcactaacgggctggatactgagctcacctcagcccgaaccgcagaacgtaaggctcagcaaaccgcgcaacaaggtatgcaggatgaagagcgagaattgtgcgcgtcacattttccagcggtgactttggagcaactgcctgacattcgcgatctggaacggcaacatgagcggggaattcagcaagaaattgagggtattaaaggtgaactgcatcgactgaatattgagttgaccaaacgtatgtcagaagccaaacgtgtggataccggggcgctcgttgaggccggggctgatttggatgatattcctgtctatttacagcgtttgcaagaactaaccgaagaagccctgccggaaaagctcaaccgtttccttgattacctgaaccgttcatctgatgacggcgttacgcaactgctcagccatattgagcatgaagtactggtgattgaagcgcgactcagcgaactcaatgaaaccatgttcagggtcgattttcagccaggtcgctacctgcgtctggataccaagaaagttgtccatgaaagcctgcgcacgcttgaaaaagcgcagcgtcagctaactgccgcccggtttgttgatgacaacggcgagagccattataaggctttgcaggtgctggtggtgcagctgcgggatgcctgtgaacgaaaccgtaccctgggggcgaaggcgctgctcgatccccgttttcgtctggagttcgccgtatcggtgatggatcgccagagcaaaagcgtgattgagtcgcgtactggctcgcagggcggtagcggtggagaaaaagagattatcgcgtcttacgtgctgaccgcatcacttagctacgcgctatgccctgcgggaagtcgttatccgcttttcggcaccattgtccttgatgaagcattctcccgcagctctcatgccgtagcgggcaggattattgccgcgcttagagaatttgggctacatgcagtatttatcacgcccaataaggaaatgcgcctgctgcgagaccatacccgttcggcgattgtcgtccaccggcgtggccagaattcaaatatggcttcgctgagctgggaggagcttgaacaacactcccagcgacgggggaatgcgtag

SEQ ID NO: 44258 - DNA, 1143 bp, Enterobacter sp. MGH 24
atgtattctccttatgagttgagtaaaaagcttgcccggcaatgggataacgcaaagctacgggcagagcgcttacttccacccggtaactggccgctctgtctgcccattggcaaaccttccgcgaaaatatttgcagagcagccccagcgagttttacaacacgtgcagttatggcggcaagtcgcggttgggcgtgtggactgggaagaggtcagctaccgggcgagcgacggagcggtatccatgccgttgcgctggatcctgaatggcccttctgactggattagcgccgcagcggatctggcggtgagccgggaatttcgtttgctggagggaattattgagcaggttaaccccctctttcatccgctgttggtcagccatcgttcgctctggcggcacaaagatccgcaggacattgtcagcgccgccaggctggcctgccgattagaaccgggttgcgcaagtgggctgccgcttaggctgctttcagggctgggggtagatactaaatttatcgagaaaaataattcgttattaacccggctgttggatgtacgtttttccggcgaagccagcgagcaggggttaaccacctttctcgatgcttttgatgaggccagccactgggttttggttgcaccgctatcacccggtttgcttccttttaataaatgtcgggtgacgacggcggaactggcagaaacgatattgcctgcatcccgtgtgctggtgattgaaaatgaacagtgtctgcatcaacttcccgcgttatctgacaccatcgcgattttagggtgcggtcttgacgtgcaatggctatcaagttctgtgctggatgaaaaacggattgcctattggggtgacatggatagttgggggctattgatgctggcgagagccaggcgctgtcgtccgacgcttgatgttctgctcatgaatcgtgagttgtttgagcaatatgccaaccaaagcgccgttcctgaaccggtaaaagtgcagcaagcaatacctgatggcttgcttaatgaagaggccgatttttatcgctacttaactgacttaccgcgtggtcgtctggagcaggaatttttgcctgcggggatagttgaagaggcgctgtgcaggtgggggaaatag

SEQ ID NO: 44259 - DNA, 1497 bp, Klebsiella pneumoniae MGH 19
atggaagaaaacactaggcagcgtacggaaaattatatttcagccaaaaaccagcatcccgcatggatacttctggcttcccgccgtgccccgttggtgctgagttgcctgaaaacgttgtttgaaaaagctcatgatggtatcccccttgaggacgcgattcagtctctttccggcattctcatcgagcatgtgagtcaggaacagtatgacattaatcaggacaatccctctcttcaggccagtcgtgaactgcgggaatggattaaacgccgcttaattgtcgaacgggatggccgtatcttcgccaccgatgcgcttgaggttgcgattacgtttgttgagtcgctggataatcgtttcatgacctctacggcttcccgtttgtctaccgtacagcgagaaattgaaaacctggaaaccaggcttaatcctaatccggctaaccgggttgcaaccttacgtcgtcgtattgctgaactggagcgtgaattacaggaggcggaagccgggcatattgaagtgctggaaacgcatcaggcggttgaacatattcgagaggtcttcaatttagcttccagcctgcgggctgactttcgtcgcgttgaagactcctggcgtgaggccgaccgtgcgcttcgccaatccattattggtgagcagtatcatcgcggcgatatcgtagaacgcttgcttaacgatcaggacgcactgcttaatacccctgaaggaagagtcttcgacagttttcagcaacagctacgccaatcagttgagttaacggcaatgagcgagcgactgcgcgtaatccttagccatccttctgcttccaatgcgcttaaccgtctacagcgtcatgatttacgctggctggttaaacgcctggtcgatgaatcgcaaaccgtactccaggctcgtgcccgaagcgagcgagatgtccgcggttttatgaaaaccgggcttgctgctgaacatcaccgcgttggtcatctgcttaacgagtttctgaatctggcgttaaaactcgactggcagcgccagatgattcgtaaacaagaggttccgcttcctgccgttggtgtggcggtgacgggagtccccgcaattgagcgtttacgttttaaagaagtggatgatgaagcggaacaaacgttggatctcagtaatcatgcgacggatttgacgcagattggcgatgacttctgggatgctttcaatggccttgatcgtgaggcgttgattcagcagacgttgcagcttctggcaaaagaaaatcgccccgttggtctggctgaactggcggcgctgttgcccccggctcacgatctcgaaaccttcgccgtctggattggcatggcgagagaagcaggcattgaggttattgattcacagcgcgaatttgctgaacttagtgatggggaaggtcgccgctggcgatttaatctgcccacgaccggtctggaaagtcaggcattaatggatatcgattgggagtaa

SEQ ID NO: 44260 - DNA, 750 bp, Klebsiella pneumoniae MGH 19
atggcgggcttttttgacaaactgattaaccggagcgtcgctgcaaatgcaggtagtgaaccagaaacatcggacgaagaaattactgatgagttggttgaagacagtgcggccagtggcgaaacgcggaccctgaagaaaatacgcgaagcgattcaggaattgctcaaatacggcctgctggaagaggccagtaaacccaatctgtaccgtgtcgtactgacccatcctgaagaggttactcgcattctggaacctcttgatctggatatcggcattgatgagatccgcggcctgctgtatgtcaaagtcagacttgacgaaacgccagagcaggatgaatggtcccatcctctggtgaggcggcaacggcttaatctggaacaatcattattagttgccatactgcgccagcattttgttgcctgggagcaagaaagtggaactggtgccagccaggcacagatcgctatcgacgatctcctccctcagctccagatttaccttggcgatccgggcagcgaatcaaaagaacgcacccggttgctcaccctggtggatcaattaaaggggcatgggctggtcacgtcgccggatgcgcatgagcggatcgtgattcggccaattattgctcatcttgccgacccgatgaatcttcaggcattactggcatggctgtgggaacaaattacgcaacaaacttccccggatgattcgtcagcaaaggagagtagtgaggaggacgtatga

SEQ ID NO: 44261 - DNA, 3291 bp, Klebsiella pneumoniae MGH 19
atgaatcaaatagcgcgtctggctggaaaggaatcctttattctcacccgtatcgagttgttcaactggggcggttttcatggattgcatcaggcagcaatccatcaggaaggtaccgccgttattggtccaaccggaagcggaaaaacgacgctggtcgatgccttaatgacgctactctgtgccaatccccgttacaacctggcctcaaccggggggcatgaaagcgacagagatcttatctcctacgtgcgcggtgtatccggacccggcgatggcggggaggggcaatcgcatattgccagaccggggaaaaccgtgaccggcattgccgcgacgctggagcgtgaagggcagcaggtacgtctgggggcgctattgtggtttgattccaccagttccagcgcggcagatttgaaaaagctttggatgtttagtgataaccctacacagacgctggatcactggctgaatatctggcatgacggtggcgcacggtcgttgaagcaaatggaaaaagagacgaccggaatctggatttggctgaacaataaaaaacagtatctggcgcgcctgcgggacttcttcgaagtgggggaaaacgcctttacgctgttaaatcgggcggcaggattaaaacaactcaacagtatcgatgagattttccgcgagctggtactggacgatcactctgcttttgatcgcgcgacggaagtagccaatagttttgatggtttgacagaaatccatcaggaactggaaacggcgcgtaaacagcagcagtccttgcaacctgtagccctgagttgggataagtatcaaaagcaagagcaacaacttgctgacaggaaggcgctggagtcgctgttaccaatctggtttgcacaacaggcaagccagctctggcgagaaaaggtcagccatattgaagtcgagcttggtgagtcacagactcgcgaagaacagatccagtcgcagctcgagttgcagaaaaaagtggtgacggactgcttacagcgctatctccaggtcggcggcgccaatattgatgaactgaacgagcgtatcaaggactggcaaaaaacgctcggcagtcgggagactctggcgcaccagtatcaacagctgacccgcaatcttggattgccgcctgacctgagccaaccacagctggaggcgaatcagcatgaagccgaggcccgatgtgagcagtttgctgatgatataaagttgaaacaggaagaggtgtatcaaaaaggcgtgctcagccatcgcatgaccgaagaacttcgggaacgggaaactgaacgcgccgagatcgcgcgtcgtccggattctaaccttcccgcccattatcaggcatttcgcagcgagctggcagaagcgctgaacgtcgatgagtctgaactgcctttcgttgctgaactgatacaggttaaaccggaagaggcgcaatggcgcggtgcgattgagcgcgctgtcgggagtaacaggctacgtattctggttgctcctgaatctgcacaggaagcgcttcgctgggtaaaccagcgcaataatcgtctgcacgtgcgcctactggaggtcaaattaccgcactctcccgccaggttttttgatgatggttttacccgtaagctgttgtggaaagatcatccgtggcgagaggccgtcaaagcattattggccgaaaacgacaggcattgtgttgacagccctgaacaactgcgtgacacacctcatgctatgacggtgcaggggttaatgtctggtaaacagcgtttctatgacaaacacgatcagaaacgtcttgatgaagactggctaacgggattcgataaccgcgatcgcctgaacttccttgccaaagaaatcgccgcccttcaggagcaggttaaaaccgcaaacgcagcgtttgagtttgcgaaaggcgaggtgggggttttgcaaaatcaggccatttcattccagaaaatacaacaaattgattacgatagcatcgatgttcccggcgcaaagagccaactggacgcgctcagggagcggctggagaatctgatccgcccggattctgacgccagtgtagcgaaagcaaaacttgatgaggctcaaacggttgaatctgaactcgataagcagctcagagccgccaataaagtcactaatgggctggatacagaactcacctcagcccgggcagcagaacgtaaggcccagcaaactgcgcaaaaaggtatgcaggatgaagagcgagagttgtgcgcgtcacattttcctgtggtggctctggttcaactgcctgacattcgcgatctggaacgtcaacatgagcggggaattcaacaagaaattgagggtattaaaggtgaattgcatcgactgaacattgagttgaccaaacgtatgtctgaagccaaacgtgtggatactggggcgctcgttgaggcaggggctgatttggacgatattcctgtctatttacagcgtttgcaggaactgaccgaagaagccctgccggaaaagctcaaccgctttcttgactatttgaaccgttcatctgacgacggcgtaacgcaactgctcagccatatcgatcatgaggtgctggtgattgaagcgcgactcagcgaactcaatgaaaccatgtttagggtcgattttcagccggatcgctacctgcgtctggataccaaaaaagttgtccatgaaagcctgcgcacgcttgaaaaagcgcagcgtcagctaaatgcagctcggtttgttgatgataacggcgagagccattataaggcgttgcaggtgctggtggcgcaattgcgggatgcctgtgaacgaaaccgtaccctgggggcgaaagcgctgctggatccccgttttcgtctggagttcgccgtgtcggtgatggatcgccagagtggtaatgtgattgagtcgcgtactggctcgcagggcggtagcggtggagaaaaagagattatcgcgtcttacgtattgaccgcatcacttagctatgcgctttgtcctgcggggagtcgttatccgcttttcggcactattgtccttgatgaagcattctcccgcagctctcatgccgtggcgggcagaatcatcgccgcgctcagagaatttggcttacatgcagtatttatcacccccaataaggaaatgcgcctgttgcgtgaccatacccggtcggcgattgtcgtccaccggcgcggtcaggattcaaatatggcttcgctgagctgggaagaacttgaacaacactcccgacgacgggagaacgcgtaa

SEQ ID NO: 44262 - DNA, 1149 bp, Klebsiella pneumoniae MGH 19
atgtattctcctgatgaactgcgtgaaaagcttgcccggcagtgggataacgcaaagctccgggccgagcgtttacttccacccggtaactggccgctctgtctgaccattggcaaaccttccgcgaaaatattcgcagagcagcctcagcgtgttttacaacacgtgcagttatggcggcaagtcgcggttgggcgggtggaatgggaagaggtcagttatcgggcgagcgacggaccggtatcaatgccattgcgctggatcatgaatggcccttctgactggatcaacgcagcggcagatgcgacggtaagccgggaatttcgcttgctggagggaattattgagcaggttgatcccattttccatccgctgttgattagtcatcgttcgctctggcgaaacaaaggctcgcaggacatcatcagcgctgccaggctggccagccgattagagccgggctgcgcaaaagggctgccgctaagactgctttccgggcaaggggtggataccaaatttattgagaataatatttcgttattaacccgactgttggatatgcgtttttccggcgaagccagcgagcaggggttaaccacctttcttgatgcttttgatgagtccagccactgggttttggttgtgccgctatcacccggcttgcttccttttaaaaaatgccgggtgacaacagcggaactggcggaaacaacattgcccgcgtcgcgtgtgctgatgattgaaaatgaacagtgtctgcatcaacttccagagttatctgacactatcgcggttttagggtgtggccttgacgtgcaatggttatccagcgttgttctggataaaaaacgcgttgcctattggggggacatggatagctgggggctactgatgctggcgagagccaggcgctgtcgtccgacgcttgatgttctgctcatgaatcgtgagttgtttgagcaatatgccagccaaagcgccgttcctgaaccggtaaaagcacaggaagccatacccgatggtttgcttaatgaagaaggcgatttttatcgctacttaacctgcttaccgcgtggtcgtctggagcaagagtttttgcctgcgggggtagttggagaggaactggttaggtggagaaaagagagttaa

SEQ ID NO: 44263 - DNA, 1008 bp, Burkholderia pseudomallei NCTC 13179
atgcgcgggtgccgcaatgcgctcgaggctgcgttgtccgaacgaggcgacgcacatgacttggtggatgcctacgaatacgccgagaaggttatcgaggacctcgcggacggcatcgattactttcaagaactggtccggcacttgatgcaagccgcgtctgctcatacgcaatggaacgaattcgttgactttctcgacagattccagcgggactactccaagcaacttacagcggataacgcgacgctgaaccgccaagccattcggcaaaagcttgagaaactccgggccgttccggaggcgaagttcaatcgaatggatgcgcagttgcgcgatatcgcgcactggatggcgaaggagtacaccggaagctcgctctatgattggctgctcggtcgtattgaagacatcgtagacgcggcgtgcgagtctaagcagccgggctttctcaaggccatggagacttatctgaagcgtgtgaacggcctcgctttgcagtcgatgatgctacgctcggggcagactcggcatgcctacttagcagccgttcagaaagtggccgagtctcccaagttggaacaggaccgcttgctgaagcttgttggccagttcctcgcaccagcggaggtgcgcgtcctagacccagctagcttcaagctgaagactgcaacgcagcgccgcaaagcagtaaccgtgtctattcgaccgcgcccgacaagggaagagcggctcgctgcggcgatggcgcgagcagaggccgaagtgttctcaataccgaacgaggatgtcgcgcaggggctgcgtgcggacctgcgactcttccaacatccaatccgcgtttccgcaatgcctacggcaagtgcccgcgacgtcattcgcgcaatgcaagcggtggaagccgcgcgaagcgccatcggcggggacctcatcgtcaagaagctgccgacccgtttggagaatgagttctacggggccaacgactacgaaatcgacctgaaaaaatga

SEQ ID NO: 44264 - DNA, 672 bp, Burkholderia pseudomallei NCTC 13179; identical to SEQ ID NO: 42091

SEQ ID NO: 44265 - DNA, 3633 bp, Burkholderia pseudomallei NCTC 13179
atgaagctcgaccgcatcgttctggtcaactgggggcagttgcggccgggcgactatgaccttggaaacatgactcttcttaccggcccgacgggcgccggtaagtccactatgctcgatggcctccagaccatcatgactgccgcgtaccagggtatcgtcgcatacaaccctggccaagaagaggtacagcaggggcaacgcagtgggaagtccaagcgcaccttggagtcatttgtcgtcggtgctgagtacagtcgtttctctcgacctcatggcgcgcacgggtatatggcggctgtgttccgccccgggcccgatgaggactcggccaagacctttacggcgctcgtcgccgcatcggcacaggtggatggcatcggggagcgcagggttccgaagctggagcgactcgaactggttatcgtagacgacgccgcgctgaccgttgacgattttctaaaggacgcggagcagagcgagtgggtggctgtcgaagaaatcgtcaagcgattgaaggctcggtattcgaaggtggtgacctatgacgggcataagcgagactacctttgcgcactctacgggcgcttccgggggcgcatctcgattacctgggatgaggcccagaacgctgcgaaggcttggtgccagtcaatagcttacaaaaaaattggctcggtccacgacctcgttcgcgatgacattctggagtatgacggcaagcagttgcaggagagcatcactcgcatcagcgacctgatgcgccaagtcacgaacctgaagcaagaagggcagcgactggaagcgactgttgggcggttgcgagggttgaagactgctatcgcgcaaacgacgtcggcgtttgaagagcaagtccagtatgacttgctgctggccaagatgctggtggcggcggacgacgaacgtatcgcccaagagcagaaacgcatcaacgatgactcggcactggtaacgcggtgcgagcaaaaggtaaaagcagaggagcgactgaaggcaggcgtggaccggagccgcatcgacattgcagcgaagctcagtggaatcgccgccaacgccgagaaagagcgcctggaccagcagctcgagctcgccaattccgcagctcggcacaaactggctgagctcaatactgggcttcaagaggccgcccaaatcgtcaatgcggctaccggtttgttgcggaagcccattccggagcagttccccaagctcaaggcgtcggttgacgcggtcggtcgagttacagcatcgactgacgttgctcgcttggacggtctgttgggcgctgtcctcgatgcctcaagtgatgcgcagcttaacgtcgagaagctgttccgattgacccctgcattcgctggtgtggaagagggactcgccgcgctgcactcatatctagtggggaccgaagatagtgtcttgatggctgttgcgtccgagacgtcggaattgacgcaacgtgtcgaagccactcgcaaggcgcgcaaggaattggctgaccgcaaggagctgttggcgagcggcgctagcgattacaaccgcgacactcgcatggcgcttcctcgcatccgagagtgtctgcccgaagctggtgtccaagttctctgcgacctcgtcgaacctgtgtcggatgaatggcaggaggccatcgaagggtacttggacaatgcccgcttcaatctcattgtgaagcctgagtgggaagcacgaactatcgatttgcttcactcatggggctcgcgctgtaaggtcatccagggtaaacgatgtcttcagcgtgccgatgccggtcgtgtgccatctgactctatcatccatgagctccgcactgaccatcccattgcacgtgcgtatctcatcgagcagtatggcgccgtcgtcaaggtcagggactccgagcaactgcgcgataccgcgcgtgggttgaccaaggacggcaaaggaagcggttctcgcactatgtttgttggtgagcggcgggaccttgttcttgggcgcaaagctcgcgagcaggcgctgcgggctaccatcgagaaactcgatgcggcagaccgaggaattcgagagttcgagcaactgcaggatacgctgtcgagcgttaaacggcttcttggcaacctgcgtgaacccgtattcgatgcgatgccgcttggccaagcagcgggcgaaatcgacagcactcggcgctcgcttgcgcagctggacctcaccgaggtggaacagttgcgggcggagcgagcgaagctggaactgctcatcgcagggcacgatgcggaaattaccgcggtaaacaaagagattaccctggcgagtcagcgtatcacggacgcccaaggcgccattgagcgcatcaatggaggccgagacgcgcgatttcgggagcgtgaagaccagattcgtcggctcgggcagatgtgcgaaacaaactcagagaaaacctacacggttattgccgaggaagtagagggcttgctcaaatcccggaggtttgacgtgcactccgttcaggtgcggctcaacacgctgcgcgcgcagccggacaaattgctgggcgatgtgcgggaaatgctcgcggagtacaacgcgaacgcgcgccaagaggagcgcttccagtcagcgctgcctcatcttcacgacgccaccatgttcgacccgtactatggcccccttgttgcgctcggccgcgcggtgggtgcactccacagcgagcttgagggcattggcctctacaacaatcgggccaaggtggaagaagcggagcgctctttccatgacgtgttcaccaagcagttttgcgtcgaaatcaaaagcaaggtggatgatggcgtccgactgctacggcaacttaatatggagttggaaaggcttaagttcggcacggaccgcttcagcatcgactggtcgaagtgggagccggagttccaggagtactacagcttcttctcggccgtcaccgaccttgcggactcagtcgaaacggtcgacctcttcggagagacggagctcacgccaaagcacgtagaggtacgcgaccgcctggtgaagctcctgctcgactcagaccaagagagagcggggcgggagctattgcgcattgccgactatcgaaactacaggcgctacgaaatttggaatgattcagacagtggggggcgcatcgcgctttcgacatggggcacggggtctggtgggcagcttgagacgccggcttacatagttcgcgcggccgtggtgacgaaccggctaaagttcttcgagaagggacccagcctgaagatgctcgttagtgacgagtcgttctcgacgatggatgaacctcgcgctcgggccgtgctgcagtacctacgcgaaagcctcgatattcaggtcatcagtgcgatgccgacacgaggcgctggtggcttacggccagagttcgaccgggagtacagctatagccgggttcctgttgacgctaacggcgaactcgacttcatcctcgaatacgacgagcgcatcttcaagaaggacaagatgcgagagctctgggaaaagcagcgggcggcggcccgtgcgcaggccgagctggcgtttggcgccgccgaggccgcacagcaggcggaggcgcttaaatga

SEQ ID NO: 44266 - DNA, 1134 bp, Burkholderia pseudomallei NCTC 13179; identical to SEQ ID NO: 44028

SEQ ID NO: 44267 - DNA, 1461 bp, Pseudomonas chloritidismutans AW-1; identical to SEQ ID NO: 44187

SEQ ID NO: 44268 - DNA, 708 bp, Pseudomonas chloritidismutans AW-1
atgaactggtctgagaacgacgaagcggcaatgccagccgaagcacaagcgccagatgcttcgcaggcatctgctaacacccttttcatgggtgacagcggcgagttggcgctggatacccggcgcgccctggtgcagctacttgcgggaccttcgctcgacggacgtcgacatccaaagctctggccgatattggtgcgagacgaagcggtgatacgtcggcgccttgccgaactgtttctcgaactggtcatcgaccgggacgtacaagttgccttcacccgtcaggctgataccggcgaccttgaagtgccactcctgctgcgtcgcgcgcagctgaccttcattgactccattctgctgcttcaccttcgccagcgattgacccaagcggactcgcagggcgatcgtgccgtggtgtcgactgacgagatcatggagtttcttaccctctatgagcgtgcctccaacaccgaccgcgcagggttcgtgaaacgtgttcatgcatccatcgagaagatcaagaagcacagcatcctccagaaaattcgctcgagtgaagatcgtttcgagatttcgccaacgctgaagctcctcttctctgcagaagaaatacaagccctgacccacttgtatcagcgcatggccgccggtgagacgccagcgcaactggctcagactgagtccgatgaggaggccgaccaatga

SEQ ID NO: 44269 - DNA, 3375 bp, Pseudomonas chloritidismutans AW-1
atgatctcggaaccccaaaccgcgtccttgttcgcccgggagcaattccggatgactcgcctgcaggtttacaactggggcactttttctgacctgcatgacataccgatcagcgaacgaggctttctgtttgtcggtcgatcaggggctgggaaatcgacgcttctcgacgctttttcggcgttgctggtgccacctcgctggattgacttcaacgctgccgcgcgggaggctgaccgcagtggccgtgaccgaaacctcgtcacctacgtacgtggggcatgggccgaacagaaggatggagagtcgggtgagatcgccacccgctacttgcgctcggggacaacgtggtctgccctggcactgacctaccagaacgcattgggccagtctgtggtgctggttcaggtgttctggcttcgcggcaatgcgaatggaagcaccgacgtcaaacgccactaccttgtcctggagcgggcctttgacctgcgcgagctggaggacttcggtcaatccaacttcgacatccgaaagctcaagcagtctttccccgaggcgttcgctcgcgacgagtttcgtccctattgcgaacgattctgccgcctgctcggtatcgagagcgaaatggcgttgcgtttgctgcacaaaacccagtcggccaagaatctcggcgacctcaataccttcctgcgcgacttcatgctcgacaagcccgagaccttcgaggtggcggatcgcttggtcagcgaatttggtgaactcaatgctgcccaccaggcggtagtgacagctcgcgagcaggttcaaacgctcgcgccagcgcgggagcagtatcagcgcagagattcgttgatgctgcaacgcaatgggctggatgagcttcggctgggcgttgatggctaccgcgaaacccgccgcattgaactcctcaagcagcatgtcgagtccctggaggtgcaagccagcggctcggaaggtgaagtaagtcgacgtcagagcatcctggataaccacaccacaaccttgcgcaatctggagcgacagcaccgtgaagcaggcggtgatcagatcgagcaatgggaagcagagaaatctggtctggagggccagcgcacggatcgcctgcgcaaacgcggccaggctgaagatgcgtgcaagaagcttggctggagcctcccggattcgcctcaggccttcgctgaactgttgggaaacgcgcggcaggaagtcgaaaactgggagcagcgcagcaacgagaaccgcgaagaacagttccgcttggcaggtcaaaagaaagacgctgagacggcattttcgcaagcggtgaaggaggtgcaggcactccagcgccagccatcgagcattcctgccgatatgctcgaaatgcgccgagacatcgccgcagctattgggatatcagaatcggctctgcccttcgtcggcgaactcattgaggtgaagtctgacgaggccgagtggcaaggtgccatcgagcgcgtactgcacggatttgcgctctcactcttggtggacgaacgccagtattcggcgctggccaattacatcaacaacacccatcttgggcagcgtctggtgtactaccgaactggccgctcggagacctggcaggcgaagcccatcggcgctaactcgctcgtcctgaagctgaacgtcaaggagggtacgtatgccgattggctgcaggccgagctacggcaacgattcgattacgcgtgcgtcgactccattcagtcgttcaggagcgctgatcgagccatcacccgtgagggccaggtcaagcacagcaaaacccggcacgagaaagacgaccggagaagtgtcggcgaccgacgaaactgggtgctcgggttcgataaccgcgagaagcttgggctctttcaagcacaggcccaggagctggctgcgacgattacgcgcctcgggggagaaatcgaaaccctcgccgaccaagacaagaatcgtgcgacccgagcgattcagtgccaaaccttggtgaatctccagtggcaggaaattgatgtagtaccgttgcttgaccgcatttccaccatcgaacaacagattcgcgaagcgcgggagggcaatacagccctactgcaaatcagtgagcggatcgacaagcaaaagaacttggttgatcaagcagacaaggacctccgagaagccaaggtcgcgcatgactcagttctcaagcagatcaacgacagcacgcagaagcttgaatcgctccttcaagatgcttccagagttccattgactccccaccagatcaaggggctcgacgaacgattcaccaagcagtcagacgcgatcaggctcgaaagcctcgacaaggtagcaaccgctgttgagagagggctcaacacagaaatcggtgagatcaaagatgagatcggcgattgcgagaaggaaattgaagcacgctttgccgatttcaaacggcagtggccaatggatgctgtggacatggacacgagcctagccagcgcagcggactttttcgccaagttggttcgactggaaacggatggcctgcccgcctatgagcagcgattcttcgaactgctgcagaaccaaagccaccagaatctggcggcactgtccacctacctgaacgatgcgcgcaaagccatcctagagcggatggatctggtcaacgacagtcttggccaggtgccgttcaaccaaagcgccaatcaacgtacctatctccacatcgacgccagtgaccggcagcttgtcgacgtcaaggagttcaagcaggagatccagcaggcacttagccatgcgtggacggaggatcgcgagtttgccgaggcgcggttcctggccctgcggcgacttgttgatcgactcgccagtcaggaccccgagcagaaacgctggcgcgagactgtgctcgacgttcgacagcatgttgagtttatcggacgggagattgatgaaagcggcgtggaggtcgaaatttaccgcagcggtgctggcaaatcaggcggtcaacggcagaagctggccaccacgtgcttggccgcagccctgcggtatcagctgggagggaacgaccacggcgtgccgatgtatgcgcccgtcgtgcttgatgaagccttcgacaaggccgacaacgagttcaccgctttggcgatgaacatctttaccaatttcggatttcaaatggtggtcgctacgccgctgaagtccgtcatgaccctcgaaccattcatcggtggcgcctgcttcgtagatatcagcgaccggcgggtgtcaggcgtcctgttgatcgagtacgacggtgaccgccagcggttgaagctgccggagcacgctcgagaggaggctagcgttgaagcttcctga

SEQ ID NO: 44270 - DNA, 1164 bp, Pseudomonas chloritidismutans AW-1
ttgaagcttcctgaagatgtttggcagtttcttgcccgtcgctttcagagcaaacaccgcgagtggttgatcggtgatgctggcgagagccaatggccgctggaagttccgctcggcataccgacggaacaggctgcgctaaggcaagtcgacggcgttcgcgcttgggtgagtgcatggcaaggctggcaaggagtcggcaccctgtcctggtgtgagcgccggtggaaagcgcttggcgtccagcgactgcctgagaaactggcgttacgaggccctgaagatgttgccctgtggattggggaatccgcacggtgggtgcgtgcccagtctcgctatcagacgctcactgctcgctggccggtactggcgcagcagttgccgagatattttgatgtcctcgctgactacggcgatgccgattttagtcggctggcagagatgctggattggatcagtctcaatccgaaatcgaatctctacccacgacaaattccggttgccggggccgacagcaagtggctggattctagaaagggcctcatctctgacttggttgcgacgctccagggtgacccgacaggagagcgcgacttttttagacgctgcggtttgagggcacagccgcagttaatgcgcatgcgcgttctagacccagagctgagagcccgtttgggcggtcttggcgatatctctgctccttgtgaggaggtggcaagcattggcatacgaccaaagaatgtcttcgttgttgagaaccttcaaaccggacttgcctttgatgacctgccaggggcggttgtgatcatgcgattgggttacgcggttgacgttttgggacagcttccatggctacaacaggcgcaatgtatctactggggtgacattgatacgcatggcttttccattcttaatcgagccagaacatacatccctagcctgaagactgtgcttatggatgagtcaacgctgatgagtcatcgtgatttatgggtcgaagagaaagaccagcactcttccacagaactcccactactcaaaagtaccgaacaaaagctctatcagtcgatcaagggaaatgcctggggtcaacaagtccgcctcgaacaggagcggatacgctgggatgtggcgtggaatgccatacaggcaagtattcgatga

SEQ ID NO: 44271 - DNA, 1353 bp, Pseudomonas aeruginosa PA1; identical to SEQ ID NO: 44235

SEQ ID NO: 44272 - DNA, 663 bp, Pseudomonas aeruginosa PA1
atggatgatgaacagcctctcatgagcgccgctgtacaggtcgatgagcgccggacgccgcaacgggtacgggaggccgtacaggaaatgctcaagtacggtctgctggaagagagtcacaagcccaacctgtatcgctcagcgctttccaatatcgaggcggtcgacagaatcctggagccgctcgaccttgccatgggggtcgacgaggttcgggggctgttgttcgttatcgttcgccagggcgaggtggccgagcaggatgactggtcgcaccccctagtgcgtcggcaaaggctgaatctggagcagtctctgctgatagccatcctgcgccagcagttcatcgcctacgaacaggaaagcggtacgggcgccagtcaggcatcggtagtggtcgatgagctgattccccaattgcaggtttacctaggcgagctgggcagtgaggcaaaggagcgcaatcgcatcatcacgctgctggatcagctcaaggggcatggcctggtgtcggctttggacgcccatgatcgcgtcatcatccgtcccatcattacccacttggctaacccggagaacctgcaggcactcgtggcatggctgcgagagcaggtggagggcgcggcgacgccggctgccgatggcgaggaggatatggcatga

SEQ ID NO: 44273 - DNA, 2940 bp, Pseudomonas aeruginosa PA1
ctgggggccgtgatctggttcgaaggcacaagctcctcggcatcggatctgaaaaaactgtggctgttaagcgagtcccccgagcagactctggagcattggctcagccagcatcacgcaggcggtatgcgggctttgcgtcagatggagaaggatgggacgggtatctggccttatcccagcaagaaagctttcttggccaggctgagggattacttcgaggtcggtgaaaacgcattcaccttgctcaaccgcgctgccggcctgaagcagctcaatagcattgacgagatctttcgcgagttggtgctggatgaccgttccgccttcgagcgggccgccgaggtcgccggcagcttcgatgatctaaccgacattcaccgagaactggaaacggctagaaagcagcagcgctcattgcaaccggtcgccgatggctgggagcgttaccaggtcttgcaagaacagctgcacgataagcaggctctcgaaggtatcctcccggtttggttcgccgagcaggggtatcgactgtggttggctgaaaccaacaggctcgagaaggagtacaaaaaggccgaactggatcaggagcaatgcaaaagtcagcttgaggcccagaaaggtgtggtcgatcaacatcgccagcgctacctgcgagtagggggcgcagggatagatcaattgcgcgagcgcatcgctgattgggtgagggagtgcgataagcgcagcctgaaagccgagcaataccaactcttggccaaaggccttggactagcggatgagttatcggccgctgctctcaaggagaatcagcagcatatcgcggcacgcctggaaatactggaccaacaaattactgacgcgcgccaaaaggcgttcgacgcaggcctcgtccagcaggaactcaatggtcgcctacagaccttacagcaggagggtgctgaggttgagaaacggccaggctcgaacctgcccgggcaatttcatgctttccgaagcgatctggcgcaggcgcttggtgtcaatgagtcggccctgcctttcgttgccgagctggtgcaggtcaagcccgaggagctggactggcgtggcgccatcgagcgggcaatcggtagccaccggctacgcatcctggtgccgcaggactcatcccaggccgcactgcgttgggtgaatcaacggcacaaccgcttgcatgtgcgcttgttggaggtacaggagccgacgtcgcgccccgtgttcttcgacgatggttttacccgcaagctgaccttcaaggagcatccgtaccgagaagccataaaggcactgctggcggacaatgaccgccactgcgtcgaaagcccggagcaattacgtcatacccctcatgccatgacggcccaggggctgatgtcgggcaaagaacgcttcttcgacaagcaggaccagaagcgtctggacgaagactggctgaccggcttcgataaccgtgaccgtctggccttcctggctgagcagattcgcgaggtcaatgagcagctcgagccagccaagctcgccttggatgctgcccagggcgacgttcgtcagttggagactcaagcttcgctgctgaatcgtgtcaaagaactgcagttcgaggatattgatctgccgggtgcccagagtcagctggagtcgctgcgtacgcaactggccaccctgacgcgccccgattctaaccttgccatgatcaaggtcgagctggatgcggccgaggccctgcaggagtctctggatcaacagctccgccaactgatcgaacagtacgttcagttaaaaactcagtttgaccaggccgcatccgctacccgtaaggcctataacagcgcggagaaagggctgaacgatacgcagcgtgaactggcgcaagcgcatttcccgactctgaccgcggatgacctcggcgatattgtcgagctggagcgcaagcatacgcgtgagcttcaagggcagctcaaagcgcttggcgagaaactgggcgatcagaaatcagagcttgccaaacgtatgtctgatgccctcaaggtagacaccggggcgcttgcagaggtcgggcgagagctggtggatgtccccaggtatctggagcgtctgcgtgtgctgaccgaggaagccttgccagagaaactcaagcgcttcctggaatacctcaatcgctcctcggatgacggcgtcacccaactgctcagctatatcgaccatgaagtctcgatgatcgaggaacgcctggatgacctgaatagtacgatgcagcgtgtcgactttcagcccggacgctatctgcgcctggttgcaggcaaggtcatccatgaaagcctgcgtaccctgcagcgcgcccagcgccaactgaactcggcgcgtttcatcgatgatgaaggcgagagccattacaaggcattgcaggatctcgtggggttgctcaaggacgcctgcgaacacagcaggaatcagggagccaaggcgcttctggatccgcgcttccgcctggagttcgcagtatcggtgatcgatcgagaaagcaggaatgtcatcgaaacccgaacaggttctcagggcggtagcggtggcgagaaggagatcattgcctcctacgtgctgaccgcttccctgagctatgcgctttgtcccgacggcagcagccggccgttgttcggcaccatcgttctcgacgaggcgttctcgcgcagctcccatgcggttgcaggtcggatcatcgctgcgttgagggaattcggcctgcacgctgtcttcatcacgcccaacaaggaaatgcgcctgttacgccaccacacgcgttcggcagtcgtcgttcatcggcgcggcctggagtccagtctggtttccctgagctgggaagctttggatgagcatcatcaacagcgcatcaaggccatgcatgaagtcgcccactga

SEQ ID NO: 44274 - DNA, 1182 bp, Pseudomonas aeruginosa PA1; identical to SEQ ID NO: 44163

SEQ ID NO: 44275 - DNA, 1353 bp, Pseudomonas aeruginosa PA1R; identical to SEQ ID NO: 44235

SEQ ID NO: 44276 - DNA, 642 bp, Pseudomonas aeruginosa PA1R
atgagcgccgctgtacaggtcgatgagcgccggacgccgcaacgggtacgggaggccgtacaggaaatgctcaagtacggtctgctggaagagagtcacaagcccaacctgtatcgctcagcgctttccaatatcgaggcggtcgacagaatcctggagccgctcgaccttgccatgggggtcgacgaggttcgggggctgttgttcgttatcgttcgccagggcgaggtggccgagcaggatgactggtcgcaccccctagtgcgtcggcaaaggctgaatctggagcagtctctgctgatagccatcctgcgccagcagttcatcgcctacgaacaggaaagcggtacgggcgccagtcaggcatcggtagtggtcgatgagctgattccccaattgcaggtttacctaggcgagctgggcagtgaggcaaaggagcgcaatcgcatcatcacgctgctggatcagctcaaggggcatggcctggtgtcggctttggacgcccatgatcgcgtcatcatccgtcccatcattacccacttggctaacccggagaacctgcaggcactcgtggcatggctgcgagagcaggtggagggcgcggcgacgccggctgccgatggcgaggaggatatggcatga

SEQ ID NO: 44277 - DNA, 2745 bp, Pseudomonas aeruginosa PA1R
ttggccaggctgagggattacttcgaggtcggtgaaaacgcattcaccttgctcaaccgcgctgccggcctgaagcagctcaatagcattgacgagatctttcgcgagttggtgctggatgaccgttccgccttcgagcgggccgccgaggtcgccggcagcttcgatgatctaaccgacattcaccgagaactggaaacggctagaaagcagcagcgctcattgcaaccggtcgccgatggctgggagcgttaccaggtcttgcaagaacagctgcacgataagcaggctctcgaaggtatcctcccggtttggttcgccgagcaggggtatcgactgtggttggctgaaaccaacaggctcgagaaggagtacaaaaaggccgaactggatcaggagcaatgcaaaagtcagcttgaggcccagaaaggtgtggtcgatcaacatcgccagcgctacctgcgagtagggggcgcagggatagatcaattgcgcgagcgcatcgctgattgggtgagggagtgcgataagcgcagcctgaaagccgagcaataccaactcttggccaaaggccttggactagcggatgagttatcggccgctgctctcaaggagaatcagcagcatatcgcggcacgcctggaaatactggaccaacaaattactgacgcgcgccaaaaggcgttcgacgcaggcctcgtccagcaggaactcaatggtcgcctacagaccttacagcaggagggtgctgaggttgagaaacggccaggctcgaacctgcccgggcaatttcatgctttccgaagcgatctggcgcaggcgcttggtgtcaatgagtcggccctgcctttcgttgccgagctggtgcaggtcaagcccgaggagctggactggcgtggcgccatcgagcgggcaatcggtagccaccggctacgcatcctggtgccgcaggactcatcccaggccgcactgcgttgggtgaatcaacggcacaaccgcttgcatgtgcgcttgttggaggtacaggagccgacgtcgcgccccgtgttcttcgacgatggttttacccgcaagctgaccttcaaggagcatccgtaccgagaagccataaaggcactgctggcggacaatgaccgccactgcgtcgaaagcccggagcaattacgtcatacccctcatgccatgacggcccaggggctgatgtcgggcaaagaacgcttcttcgacaagcaggaccagaagcgtctggacgaagactggctgaccggcttcgataaccgtgaccgtctggccttcctggctgagcagattcgcgaggtcaatgagcagctcgagccagccaagctcgccttggatgctgcccagggcgacgttcgtcagttggagactcaagcttcgctgctgaatcgtgtcaaagaactgcagttcgaggatattgatctgccgggtgcccagagtcagctggagtcgctgcgtacgcaactggccaccctgacgcgccccgattctaaccttgccatgatcaaggtcgagctggatgcggccgaggccctgcaggagtctctggatcaacagctccgccaactgatcgaacagtacgttcagttaaaaactcagtttgaccaggccgcatccgctacccgtaaggcctataacagcgcggagaaagggctgaacgatacgcagcgtgaactggcgcaagcgcatttcccgactctgaccgcggatgacctcggcgatattgtcgagctggagcgcaagcatacgcgtgagcttcaagggcagctcaaagcgcttggcgagaaactgggcgatcagaaatcagagcttgccaaacgtatgtctgatgccctcaaggtagacaccggggcgcttgcagaggtcgggcgagagctggtggatgtccccaggtatctggagcgtctgcgtgtgctgaccgaggaagccttgccagagaaactcaagcgcttcctggaatacctcaatcgctcctcggatgacggcgtcacccaactgctcagctatatcgaccatgaagtctcgatgatcgaggaacgcctggatgacctgaatagtacgatgcagcgtgtcgactttcagcccggacgctatctgcgcctggttgcaggcaaggtcatccatgaaagcctgcgtaccctgcagcgcgcccagcgccaactgaactcggcgcgtttcatcgatgatgaaggcgagagccattacaaggcattgcaggatctcgtggggttgctcaaggacgcctgcgaacacagcaggaatcagggagccaaggcgcttctggatccgcgcttccgcctggagttcgcagtatcggtgatcgatcgagaaagcaggaatgtcatcgaaacccgaacaggttctcagggcggtagcggtggcgagaaggagatcattgcctcctacgtgctgaccgcttccctgagctatgcgctttgtcccgacggcagcagccggccgttgttcggcaccatcgttctcgacgaggcgttctcgcgcagctcccatgcggttgcaggtcggatcatcgctgcgttgagggaattcggcctgcacgctgtcttcatcacgcccaacaaggaaatgcgcctgttacgccaccacacgcgttcggcagtcgtcgttcatcggcgcggcctggagtccagtctggtttccctgagctgggaagctttggatgagcatcatcaacagcgcatcaaggccatgcatgaagtcgcccactga

SEQ ID NO: 44278 - DNA, 1461 bp, Mycobacterium abscessus subsp. bolletii CCUG 48898 = JCM 15300; identical to SEQ ID NO: 42792

SEQ ID NO: 44279 - DNA, 750 bp, Mycobacterium abscessus subsp. bolletii CCUG 48898 = JCM 15300; identical to SEQ ID NO: 42793

SEQ ID NO: 44280 - DNA, 3348 bp, Mycobacterium abscessus subsp. bolletii CCUG 48898 = JCM 15300; identical to SEQ ID NO: 43029

SEQ ID NO: 44281 - DNA, 1620 bp, Bifidobacterium longum E18
atgcgggagctggaacggctgcgaccggtgtatgagacgggcgtcctgcggttgctgttgcgccagaacgcgatgctgtacgtgtcgctgctgcgttccacgttcgacccgctcaccggcgagctgccgcgcgagaccgtggaggagcggttcgcgcaaagtctgagcagtctggccgacgccggcgagtatgcgccgcgcgaggaccagaccttcgccgaggccgcccatcagatcctcgccgacctgacccgtgaaggcgaaggcgactacgcctggctcgccaactcgcatgatgcggcctcacaccgattcctctaccgtttgacggcccgcgcccaccgcgccatcgaggcgctgagcaggctcgaagacgaatcacgcgccctgtccggcgcgcaggccaacagcatcatcatggaaatcgagcacgcgcgcatgcagctgaccgccgaccccggcgagcgcatcaaactcctcaaccgtgaaatcaaggaacgcaagcacgagatcaaacgcatccaacagggcaagcagcatgccacgctgagcgaagcccaggtggaggacgtgatcgccgtgatccacaacacgctgcgcggcgtgcccatcgacctgcgcgaactcgtgctcgacgagcgggacaacggcgacgccttgcgtcggcgcatgcaggccggcgacatcagcgtggacgagaacctgacccgctaccacgatgaataccgccgctcgttccgcgaatcagacagcggccgccgcttcgaggacgccttccaggtgatcatcaccgacgagggtcgccagcaaatcgacgaagccctgcgcgccatcgccaaaaccccgtatctggccggcgaatccggcgtgctgctcggccagatccgcgacgaactggcccgcatctacgacggcatcgaagccgtgcgccgccagatgcgcgtctccgacgaggcgatcagccggctcgtgcgccagcaaaccgacactcgctaccgtacgatgctcacccgcttgaaccgactgtacgcgcgcctcaacgcggatgcgaaaacccatatgggagacgcctcgcgcccgtacgacacggccacctcggacgcgctgttcgcgccattgccgatgcgcccggccaaatccatgacccgcgccaccgcacccggcctgagcgacctcgccgccgaagccccgcagtcgactccggtggccgatctgcgggacatggtcaacagcggcggcccccgactcctgcgcatggtcagcctcatccggcgcaacccggtgaccgttgacaggtccgatgacaggcccggcgcaaccctcgtggacatcgccgccagcttcaaccggctgcccgaaagcgaacgccgcgaaagcgagatcgtcggcttcctgggcgggctgggagccgtaagcggcaacgccatcgccgacgagccgtccactgacggcgtcggcgtcggggtcgacagcgacatcgccaccgagccggccccggcgcagcgcggcgataccgcgacctggcattgcgtatcgatcgacggcgagccccggaactggatcactagaccggtgctggccgacatggacgagctgagcatcattgtggaggaaggatga

SEQ ID NO: 44282 - DNA, 684 bp, Bifidobacterium longum E18; identical to SEQ ID NO: 42481

SEQ ID NO: 44283 - DNA, 3549 bp, Bifidobacterium longum E18
atgatgcaggcgacagacgtgcagatgatcgcggaccggtggatgctggaatcccgccgactcatcaactggggctcctatgagggctaccacgaattccgcccctccacggaccacaagctgccggtgaccctgctcgccggcgccagcgaatccggcaaatccacgctggtcgacgcgcagatctccctgctgtacccaaccggtacgccgttcaacaaggcctcgaactccggccgctccgaacgcagcgactacacctacctgcgcggcatggtcggcgtgggcagcaccgaaaccggcgacgagccgctctacctgcgcggccgcgacgagaacggcgcaccgcaacccgtgtggggcgccatcgtggacacctatcgcaaccagaccaccggccaggtgctctcctgcgccaaattcctctacctgatgcccggcgacggccgcggcgacgtgcgccgacagtacgtggtctggggcaagcccgtggaccccaggcgcatggaccaataccgtgacgccccgttcacgccggcccagctcaaagccacctaccccgactgcctcacattccccagcgccgaagcgttccacacacacatctggagcgcaatgggcctgagcgaggccgcctgccgactgctgcacaagatccagtccgccgacgcgccctcccggctcgacgacatcttcaaacaaggcgtgctcggcgtgcccgaagccctggacctggcccgcaccacggtcgaggactacgaacgttacgacgagaacttccacgccatggacgagaagacccgccgcatggacacgctgcgcggcatccaacaggcctacggcgaatacgccgccgcacgcggcaaggcccgcgccttcgaaccggtcaagccggccgtcgacggcacggtgccggccgtgctgcgcgactgggcattggcccgcatgcgcggcgaagtcgccgtccaactgcccgccgaccgcgccgaacaacagaacagcgaggcggaagccaagctgctgcgccgccgaaccgaagacctgcacacccgtctcgacatgatccgaggccagatgcagggtctggacggcggcaacctgacccgactcgaactcgaactcgaccaggcccgccgcaccctcgaagacgtgcaagccaaccgaacacgaatcgaacaaacgttcgcatccatcggcgagacgctgcccggcgacgaacaggcctggaacgaacgccgcatcaacgccgtgaacttcaaacgcgaatacaacaaacgagacggcgaatgcgaggaagccctcaccgccgccatcaacgcgcgggccggcgcacgcggcgacctcgaacgactgcaacgcgacttcgaccggcaacgctcccagcgcacccgcatctcccagcagatggacgaaacccgcgccatgctctgtcgcgccaccggactcacccccgccgaactgccgtacgtggccgaactcatggacgtgaacgaacacgaggaagactggcgtctcgccatgaacgtcgcctacgcgcccatcgcccagaccatcctcgtcgacaagcgccacgaacagggcttcgccgccaaagtcagcaccatcgacccgcgcaccatgccccgacgcacctggcagttcgtggacaccgcacgccactacgacgacaccggcgcgcacgcgaacatactcaccggagaacaggacggcgactggctgtccggcaaactgcgctaccgcgacgactcgcccttcgccgactggctgcgctcgcagacccaggacgaacgattcgacgccctatgcgtcaccgccatcgacgacaccggccgcaccaaccgtcaggtgcaggccgacggtcagatcaaatccggcgcacgcggccagcacggcaccaaagaccgcgcccaggtcatcggattcgtcaacgaaacctacctcaacgcgctcgcagcgcaggtcgacgccgcccgcaacgcgctcagccaagccgacaccgactacacggccgccaaaacacagtccgataacctccaccgcgaactcgaactggccaaccagctcgcctacacgtcctgggagcgcatcgacatcgccggcgcgcaacggaccatcacggacacgcaggacgccatcgcatccatcaaaaacgatcccaagctcgccgaactcgccaaacagcgcgacgaactgaacgccgaactcgaccgtgtggaacgccagcgcatcgaatccgaccaggccgcggcccgcgccggcagcgccgtcgaagcggcgctcatctggctgcgcgaccatgccgacaccggcacgacggacgccgccggtgccaccgccgacaatgacgatgacgccgcgtccggcccgctgccggacgaagtcacggcggcgctcgccgaatcctacgacaaccgattcgccggactggcggacgccgccatgcgcgcgcacatgatcatcggcgcgggcgcggcaggaacgcaggctccgggggagagcttccccgaacgcaccatcgccggcatcggcaaggacatggcctcccgcatcaacctgctgaacggccaggccgatgccgcacgcaccggcgtcgaatcgaaaatgagcacctacatcgcgctctacgcggccgacgatgattcgctgaccgccagcgtggaggactaccggtactatctcgacgaactcgccagcctcacccagctggccgcggttgccgccaccgacgccgaataccggcgctgcctcgaacagctgctcaggagcttcctgaccatcaaacgcgccatcgacacggatgccagcgacatccacgaccagcttgaccgcatcaacgccatgctcaaaggccagcagttcggtcccaagcacggcagcctgtccctgcacgcggacgtgcgccgtcccgagcgcaccttctgggcgcagctcatccgcgtcatcggcaccctgaacgattggaaatccgccgacgtcaacgattccgacgcctcgcgcaaggctttcgcggcctgcgcgccgatggtcgggctgctgcgcgccgaactcgcgcaggtcaaggacgcgaacggcgtgaaaagctacggcgcccgcaacctcgacccgcgttgccgctcgtccttctacgccatcgtgcatcatgccgacggcccggatgaacgcatcacctccaccggcggccgttcgggcggcgccttgcaggagctcacctcattcgtatacggcgcggcgctcatctacctgctcggcggcggcctgaccagcgagccctcgtacaccacgctgttcctcgacgaggcgctcatcaaggccgacggccgttacacgcagcgcgccctcacggtgctgccgcgcctcggattccaggtcatcgtctccgccccggaaagcaagaccggcgaaatcctcgaggtctccaccaaggcctacgtgacctacaaggaccctgacaccggcctcacctccctgcgcgaggccgtgctgcatcagaatgacatggacgatgaatcatcgtcggatatattgaaggatgacggggttgccgaatga

SEQ ID NO: 44284 - DNA, 1194 bp, Bifidobacterium longum E18
atgggaactgtggccggcatgaaagacatcgctgcgatcaccacatgcgtgaagaaacatatgcgttcacatatgtacgacatcgaaccggcatggccatttcccgtgccggtgggattgccggaccaagcatttttggaaaccaatgcgattgcggtgcatgacaacaacaatgagatacggcaatgggcaagcaagaatggttgcgaaatcataaccaagcatcgcaccataggcacctctgtcgagctgatctccaaagtcgtcgttcctgacgaatcaatagccatgcgtgtggttggtcgtacgctggcggcggaatgtcgcgaagcgcgccgccgcatagcatgtctggttgctgcttgtgacgttgctccggaaacaatcgaatcggccgctcgcatgacaggccatgaacagcctgacgacttcgatctgcttgtcagcgcagttcgatatttcaggcatcatgacgtgaccggtatgacgccgcgacagattccactgacaggattcagcggcaaatggctgaatgagtcaaaaaccaatcgtcgtaaggccatttgccgactgctcggtgtcgaaacgttgggtctgtcaaaacggccgaccgaactgcggttccgttatctcgatccggtccgcgacgatgctgagctcgaacgcatcatatggtgtccgtgggaaggcgaagcgttatccggcattaaatatgctgtcatcgttgagaacaaagacacgtatcagactatgccgccgattgcgcagggcatctgcatatggggttctggtcgcgctgtaagcgatgctgtacctgcggttcctgcactgcgtgacatgcgtatcgtgtattggggtgatatggatgcggatggactggaaatactttcgacattacgtgaatcaggtatcgaatgcgactccatcctgatggattgcgatgcatacgatcggtaccacagatttggtaccgatcgtactgaacgcagcgcgaagattgctatgcgggagcctaagccgacgcccggtcttcaatcggcggagcgacgtctttatgaacgactgtgtgctgacaaaaccatcgcttatcggcgcatcgaacaggaacgcattcccatgcgtgatgcagttgacgaattacgcaagcttggcatccccgtggagtccattgaaaatcaggatttgccgatttag

SEQ ID NO: 44285 - DNA, 1461 bp, Mycobacterium abscessus MAB_082312_2258; identical to SEQ ID NO: 42721

SEQ ID NO: 44286 - DNA, 750 bp, Mycobacterium abscessus MAB_082312_2258; identical to SEQ ID NO: 42722

SEQ ID NO: 44287 - DNA, 3348 bp, Mycobacterium abscessus MAB_082312_2258; identical to SEQ ID NO: 42723

SEQ ID NO: 44288 - DNA, 1461 bp, Mycobacterium abscessus MAB_091912_2446; identical to SEQ ID NO: 42721

SEQ ID NO: 44289 - DNA, 750 bp, Mycobacterium abscessus MAB_091912_2446; identical to SEQ ID NO: 42722

SEQ ID NO: 44290 - DNA, 3348 bp, Mycobacterium abscessus MAB_091912_2446; identical to SEQ ID NO: 42723

SEQ ID NO: 44291 - DNA, 672 bp, Burkholderia pseudomallei MSHR6137
atgagcctatccaatctaattgacgaacagctcgccatcgcgaatgtcaagcgcgagcggttccgggaaatcttggtgcgcctgatggcctacggggtcatcgtgcgcgacgaagacaaaaccgaacaacttctgtatgacgatgctcggcgcgttgagagtctgttggatgagtacctcgatttcgcgggcttccgccttcatcacgaccgcgacaaccggttctacaggctgtacgccgccggcgcggtcgtagacggcttgccgccggacgtttacgaacctgccccatctttacgcgcgcgcgtgtcccccgacttcgttgcgctggcgcttacgttgcgtttcctctatcagaacaagttgaatgccggcgacatccagcctcagggtgaggcgcttgttaatttcgaggaaatcgccgcgacgatgcaaacgcaattgaagcgagcgcttccatccagcatgggcgacaagatggctctgctggccgagcttaggcgtcataggctgctccggtatgccccagaattttctatctcggatgaggacgcactacttgcgattcgcccgaccatcctgggtgttgtctcaaacgatgcactgaccgctgcgctcgatgcagacggcgtgcttgaacaacagaccaccgttgaggagaaggacgcatga

SEQ ID NO: 44292 - DNA, 3633 bp, Burkholderia pseudomallei MSHR6137
atgaagctcgaccgcatcgttctggtcaactgggggcagttgcggccgggcgactatgaccttggaaacatgactcttcttaccggcccgacgggcgccggtaagtccactatgctcgatggcctccagaccatcatgactgccgcgtaccagggtatcgtcgcatacaaccctggccaagaagaggtacagcaggggcaacgcagtgggaagtccaagcgcaccttggagtcatttgtcgtcggtgctgagtacagtcgtttctctcgacctcatggcgcgcacgggtatatggcggctgtgttccgccccgggcccgatgaggactcggccaagacctttacggcgctcgtcgccgcatcggcacaggtggatggcatcggggagcgcagggttccgaagctggagcgactcgaactggttatcgtagacgacgccgcgctgaccgttgacgattttctaaaggacgcggagcagagcgagtgggtggctgtcgaagaaatcgtcaagcgattgaaggctcggtattcgaaggtggtgacctatgacgggcataagcgagactacctttgcgcactctacgggcgcttccgggggcgcatctcgattacctgggatgaggcccagaacgctgcgaaggcttggtgccagtcaatagcttacaaaaaaattggctcggtccacgacctcgttcgcgatgacattctggagtatgacggcaagcagttgcaggagagcatcactcgcatcagcgacctgatgcgccaagtcacgaacctgaagcaagaagggcagcgactggaagcgactgttgggcggttgcgagggttgaagactgctatcgcgcaaacgacgtcggcgtttgaagagcaagtccagtatgacttgctgctggccaagatgctggtggcggcggacgacgaacgtatcgcccaagagcagaaacgcatcaacgatgactcggcactggtaacgcggtgcgagcaaaaggtaaaagccgaggagcgactgaaggcaggcgtggaccggagccgcatcgacattgcagcgaagctcagtggaatcgccgccaacgccgagaaagagcgcctggaccagcagctcgagctcgccaattccgcagctcggcacaaactggctgagctcaatactgggcttcaagaggccgcccaaatcgtcaatgcggctaccggtttgttgcggaagcccattccggagcagttccccaagctcaaggcgtcggttgacgcggtcggtcgagttacagcatcgactgacgttgctcgcttggacggtctgttgggcgctgtcctcgatgcctcaagtgatgcgcagcttaacgtcgagaagctgttccgattgacccctgcattcgatggtgtggaagagggactcgccgcgctgcactcatatctagtggggaccgaagatagtgtcttgatggctgttgcgtccgagacgtcggaattgacgcaacgtgtcgaagccactcgcaaggcgcgcaaggaattggctgaccgcaaggagctgttggcgagcggcgctagcgattacaaccgcgacactcgcatggcgcttcctcgcatccgagagtgtctgcccgaagctggtgtccaagttctctgcgacctcgtcgaacctgtgtcggatgaatggcaggaggccatcgaagggtacttggacaatgcccgcttcaatctcattgtgaagcctgagtgggaagcacgaactatcgatttgcttcactcatggggctcgcgctgtaaggtcatccagggtaaacgatgtcttcagcgtgccgatgccggtcgtgtgccatctgactctatcatccatgagctccgcactgaccatcccattgcacgtgcgtatctcatcgagcagtatggcgccgtcgtcaaggtcagggactccgagcaactgcgcgataccgcgcgtgggttgaccaaggacggcaaaggaagcggttctcgcactatgtttgttggtgagcggcgggaccttgttcttgggcgcaaagctcgcgagcaggcgctgcgggctaccatcgagaaactcgatgcggcagaccgaggaattcgagagttcgagcaactgcaggatacgctgtcgagcgttaaacggcttcttggcaacctgcgtgaacccgtattcgatgcgatgccgcttggccaagcagcgggcgaaatcgacagcactcggcgctcgcttgcgcaactggacctcaccgaggtggaacagttgcgggcggagcgagcgaagctggaactgctcatcgcagggcacgatgcggaaattaccgcggtaaacaaagagattaccctggcgagtcagcgtatcacggacgcccaaggcgccattgagcgcatcaatggaggccgagacgcgcgatttcgggagcgtgaagaccagattcgtcggctcgggcagatgtgcgaaacaaactcagagaaaacctacacggttattgccgaggaagtagagggcttgctcaaatcccggaggtttgacgtgcactccgttcaggtgcggctcaacacgctgcgcgcgcagccggacaaattgctgggcgatgtgcgggaaatgctcgcggagtacaacgcgaacgcgcgccaagaggagcgcttccagtcagcgctgcctcatcttcacgacgccaccatgttcgacccgtactatggcccccttgttgcgctcggccgcgcggtgggtgcactccacagcgagcttgagggcattggcctctacaacaatcgggccaaggtggaagaagcggagcgctctttccatgacgtgttcaccaagcagttttgcgtcgaaatcaaaagcaaggtggatgatggcgtccgactgctacggcaacttaatatggagttggaaaggcttaagttcggcacggaccgcttcagcatcgactggtcgaagtgggagccggagttccaggagtactacagcttcttctcggccgtcaccgaccttgcggactcagtcgaaacggtcgacctcttcggagagacggagctcacgccaaagcacgtagaggtacgcgaccgcctggtgaagctcctgctcgactcagaccaagagagagcggggcgggagctattgcgcattgccgactatcgaaactacaggcgctacgaaatttggaatgattcagacagtggggggcgcatcgcgctttcgacatggggcacggggtctggtgggcagcttgagacgccggcttacatagttcgcgcggccgtggtgacgaaccggctaaagttcttcgagaagggacccagcctgaagatgctcgttagtgacgagtcgttctcgacgatggatgaacctcgcgctcgggccgtgctgcagtacctacgcgaaagcctcgatattcaggtcatcagtgcgatgccgacacgaggcgctggtggcttacggccagagttcgaccgggagtacagctatagccgggttcctgttgacgctaacggcgaactcgacttcatcctcgaatacgacgagcgcatcttcaagaaggacaagatgcgagagctctgggaaaagcagcgggcggcggcccgtgcgcaggccgagctggcgtttggcgccgccgaggccgcacagcaggcggaggcgcttaaatga

SEQ ID NO: 44293 - DNA, 693 bp, Burkholderia pseudomallei MSHR6137
atgacggaggtcgtggagcagttgaaccggcttccggcgctggccgagaaatcgatgctgctgcgcgaggtgtcatcgcagttattctgggggatgtccaaggtcctcgacaagcgccaaggattggttgcggccattctaggtatggacgattgcccattcccagagtctcccatccaattgcacgtgttcttgcctgccggcggccatcgtggagtgctcttcattgagaattcggtgagcttcgaatgcgcaatgcgcgagccccgcggagtgttcggtgagttggctttggtctacgcgtccggctttaaagggagtgcgcagcggttgcgcaccacggaggggtgctcgctgttttacgcggcaggcggcggtctcgaacgggacttgcgtgcaacgtttgaaggttggttgttcggccggcaagagataccgtcgtacttctggggcgacctcgacttcgcgggaatgcgcatactcgcggctatgcgggcgaccttttcggggctgacagcctgggtgccgggttatgcgccgatgctaaccgtgctaaagggtggcggagggcacccccctgaggccgccgacaaacaagggcagaagccaatcgcatcgacagggtgcgagtacgccgatgagcaactagtgccagccctgcagaccttccggcgtttcgtagaccaggaatag

SEQ ID NO: 44294 - DNA, 1467 bp, Mesorhizobium sp. LNJC405B00
gtgcccgctatgaaccagatgaggcgcgaggcggtcatgcccgatgtcacctgcgaaagtctgcttcgggtcacgtcacgacgatgttcgcaccgaattaaagttccgggcgagcatgctgaactctggcgagaggacgaggccccgatcgttctcgaccagttggccactcgccgcggacgccgcatcaggcggcgaaaatttggaagcggccgatccgcaggcgacaaacgaagcgatatacgggcgcgccacatctataaccggctcattgcaacaggctggatcgaagagagccgttatggcctaaaggtaaccgtggacatgcctgctggcgccatgcgcctcgccgagtttctctgcgatctgcgcgagggcctgacagagcagttgagcggcttggttattcaggtaaagaatgaactcgatgctctattgctaaatgcacgggagaacgcaccggggctgcacaaagccgcccgcgacgccgccacatttgggcgctatctgcgtagcgtgctgagcgcgctgcgtgaaatcgacaagcaggtcttggcaagcgacagcgtcggacgcaggctgcgccactacttcgaagacttcgtcgagcggatcctactgcaggactatgccgcgatctcgacgacttctcatccctaccggtttcgtcatcgcatcttcacggcgctcgattcaatcgaagattcgatcgccgacgttggcgcaatcgccgaagcctattgcgaggttcgactcgccccggacatcactgctgcacgggacttggtgtacgacgaccttcacaaggtccggcgtgttttcgatcagatcgaagaagcgttcgagcggatccaacagcatcgcagccggctcgaaacgcgcctgcgcaacacggtgcgctatgcaggccgtcgtggcggcactttccttcaacgtagcaagccgatcatgcttcggcttgataaactgctcggggggcaccgagccgattacagcctatccggactgctcgagtcccgacagacgtattggtcgccgctgctactcgcgcgagcacgcaactaccgcacgacagtgacgggcggggttctcgtcctaccccctccagatcccctgcgagaaattcggaagcagctcgagcgcgggtatctgaatcgcctcgcggtgacgccggaaaaagtaagccgctttttggagaagcgggttcctccattcggtgcaagcgacgctagccatttctggatcgacaacgttgacgattttcttgcgttcgagactttgcggctctcggttctggcggcagaccaggatggccgaggcaacgctatagctgatcaccttgcttcagcgtttggcttttcgcctgccctcgggcactgggtcgacaatgcctggttaagttgcactggcttcaccgtcacacgccgaggcgacagcataacgctcgagggctcgcatgctcagtga

SEQ ID NO: 44295 - DNA, 516 bp, Mesorhizobium sp. LNJC405B00
atgtcgaacggcttgcttccgactactttgacgttgccggctatcgatattgtgcgcgagagcgaaggatgggcaggcattctgcctgacacggaacagatcagccatccgcgcatgcggatcgacgagaccctggtactacttctctttcgcaggctttgggaagaaggcgttcaggagggcgatgtcgagcgatacgggagtgtgctggtaacgcttaatgccgcttacgacgcatatcaggacatggtggcgcgcgcccgccggccgaccctgtcgattgccgattttaaagcactggtcgcgactctcgagcggcgcgccatcattcgcctgggtgagctcgacgacgaattggaagatattccactcacgatccgcgccctggtggctaccgtcgccggtgacgaattcctcgcccatcttgaagagctgctctcccgcccggactttcaggacaccgacttggagccggtgaacaacaatacggacgccaacgaggaggatgaggcatga

SEQ ID NO: 44296 - DNA, 279 bp, Mesorhizobium sp. LNJC405B00
atgatgcagctcgtccacatcgcgctcgtacaatggcacttgttcgaccgcgaagatctggcgattgccggtgacaccgcgatcttgggccaaaatcgttcgggcaaatcaacgctgatcgatttaatccaggcagtgatgacagggggggggcccggcgttggtaccaattcaaccgctcggcgggcgaaaccggcaaccgcaaatcggagcggaccttgcgcggctactgcttgggtcaactcaacgagcatgagtttttgcgagaagaggctgtaa

SEQ ID NO: 44297 - DNA, 1419 bp, Brevibacillus panacihumi W25
atgatgaacttgtttgatgtagtaccggaaggattatttcatcttctgacgggttccaatcggaagatatatgcggaagcactgctgcttttatacgagcattcgcaaagggagcggttcggcattcgctatgaagtcatgcgggatctgctgcaggagctgctggagactcaacaagaaacgggtatggtcatttctgccgatgaggatgagccggttggagctggaagagaggatcagcttacgttagaggatgtctccagagctcaggccaatgcattgctgcgacggctggaacgggcgaagtggattgatgtggaaacccgcagccagttcgaagcttatattgtacttccccattatgccagccggctgattgcggtgtttcaggaattatgcgaagcacggacggtcgaatatcaacggtttgcttttgtaacttatcagcttcttaccggcgaggaggccaaaatgcgcccttgtttcgccgtaatggaggcggcacaggtaacaaggcaatttcgccatgaattgattgggttatacaataatatgaagcatcacatggagacagttgttcaaaaaacttcgattcgcgaagtgctggaccatcattttgaaacctataaatcgcaaattgtagataaaagctatcaccggctcaaaacgtcggatcatgtggcgcgctatcgttttcaaatccttcatacggttcagaagtggctcctagatcggggtttgctgcaggaagctgcaatggacggcgtcaagagcgagctgtatgaaacggttgaacaagcggaatatgccgtcaaggaagctttattcttcattgaagaaacctttgtcgggctggaagagattttctatcagattgatgtgcggcataaccagtatcttcgttcttcctacgaccgggccagatatttgagtcagcagcatgaaggattggaccgccggttgacacgtctgctggagttgctcggccagcaaaagcaggatgcggaatactcgctgttcgcgattaatcaggttcgcggatggtcagagcagtcactcctgccgccgcgccgccgaaggatggctcatcagccggagacccatgttacggttccgattccggcacacgtgatggaggagctgcgacagaggaacgtagagaaaatgcgcaaggccattacccgtaaaaaagtggatgattacgtcatgacccggcttggtgaccgaaagcgcatggaactgatcgagctcgctccaagtagtgccgaggaatttcttatgctggggtatgtttatttgtatggctcggatggtggctcgcgtttcagcttggaccggcaaggcaagcggcagacggttagtgtcggaagatatcgattccacaatcacgacattgtccgtaaagagcggggaggataa

SEQ ID NO: 44298 - DNA, 609 bp, Brevibacillus panacihumi W25
atgatgtttcaagatttgagcgactctgaacaatcgaaggtcaaagaagtaatccagcgactcatggaggttaaccttctgatcaaagacaaggaccgggagttgtatgcgacaattcgtcgctaccgtaccgcgttggagggctattatcgattccttggttgggaacttgtcgtggacgagcggcatgaatgcgtctatctgcatattcccgatggccgtcttcgccgtaggcttgaccgggaacagacactatggctgctggtgctgcgcttactatatgaggagaagaggcaaggcctatcgctggcggattatcctatgattaccctttatgaaattcgcagcaagtacgagacgttccggctggaatgggtaaaccgtaccgcattggacaggctggttagattgtgcgtacaggcccaattgattgaaccgctggattccgacattcgttccgatgatgcccggttcaagctgttccatacttggatctatatgattcagacggatgagatgcagtcgttgcttgataagctagaattgtacctgacgaacgcggagggaggattgctggatgaaatggatgaagcggctgcgtctgattaa

SEQ ID NO: 44299 - DNA, 3456 bp, Brevibacillus panacihumi W25
atgaaatggatgaagcggctgcgtctgattaactggcattatttcaaggacgaggagctggaattcggaaaacagacgttgatcactggacagaacgccgcgggaaaatcgacgattattgacgcgctgcaggtgcttttcgttgctgatcatcgaatgatcaagttcaatgcggctgcacacgatgacgccaaacgcagctttatcaattatcttaggggaaaaatcggcagcgacgagcgctcctttttgagggacggcgattttacgacttatattgcagctgaattccgggacgaggaccgtaaggaatggttcgttgtcggggtagcgattgatgtataccgaggaagcacgaccggggaagaagagtatttcattttgtcagatcggcggttggatgatttgcagtttgtcaaatccaacggccagctgctcaatcgagacgaattccgcaagcgctacggtggggaaagcgtcagggtcagcgggctctccggaaaaaaggctttgtttgaaaggaacaagaccaactatcagaaagccttactcgcccggatgggacagcttcatgatcggtttttcacaatattcaccaaagcgctctcgttcaagccgatccagaatatccgtgcttttgtcaacgattatatactcgaccgaaaagagctgcagttggatttgatgcggcaaaatttcgagatccacgaacggtatcgccaggagctggagcatcttcaggagaagaagctgcacctgcaatccatacgtgagtgttatgcccagtatgccaaatacaaggagactgccattgagcaggattatgtgatccggcgcttgaaagcggattacgagagtgagaatctggagcagaccgaacgggacaatgtccggctggaagaagagctgcgacagcttgcggatgatattgaccttgccgcccggttgcaggcggaagcccgggacaagcaacaggatgcttaccagcgctggcagaaccatgctgcggagaagcgcaagaaagagctgcacgaggacattgcccggctcaccgctcaacagagcgagggagagaggctcttgctcacgtatcggagacaaattgaacgggagcttcagctattggcgaacttgtacgattggccggacaatccgtactggacatggaagcctggagagagggagacgctccgcagttatcaggagagcctggcgcgtcttgacgctgtggcacgttgcggaatcattgaagtccatgaggaagaagagtggacacgggatctggctgagattggagaaggtctaacggcgtggcgtgacaggatgctcgttcaacataaccagttgcaggaaaagctgggtgaaacggacgctcgaatcgaagagttaagaacgatcattcgtgatctggagcagcagaagcgcagctatgccgaaccggtgcgccagttgaagggcatcttggaggaacggctgcggggccgctcggcggtttgggtgttttgcgagcacatggagctcaaggaagagctttggcgtaatgcggtggaagggtatttgaacacccagcgcttcgatctgttggttgaaccggaatgtttcgcagaggcattgtctatttatgaaagggagaagcgaacctatcggctggaaggcgtcggtctcgtcgatacggagaaggagaagcggtatttgggaacggccgtaaccggttccctggcactcgagctgcaggcggagcatcccgtaatccaggcgcacgtcgagcatttgctgggcaaggtgatgaaggctgcaaacgagcaggaactgcgacaccatcgtacagcggtgacccaatcatgcatggtttacaacaacctggtagcccggcagatgcgcaaggagcaatacgaggttccgttcataggcgccaaagcgatcgcccgccagttggaaatccgccgctccgagctggtgtctgcccaggacgaacggcgcatgctgtatgcttggggtgaacacctttccgaatggatcggcaaattgaaggaaacgggctgtaccaagcttgccgaccatcttggcctgatgcggcatatccacgaatgctcggaaatgctattgcagaagacagaggaactgaatggtctcgatttcagcgaagcggagcggctgcaggcggagtatgagcagtggaagaaggatgaacagaagtggcaacaaaaatggggatccttactccaaaagcaaacggaaaccgaatcgaaaaagtccgaagcggaaggaaagctgcacttgcttcggattaaggtgcaagagtacgaagccgcatggcggaattggatcaatgagcacggcagcgagcgggaagcgggagcgatgcaaagatacgaagaagcatgcaattcgtccgcctccacttggcagaaaatccaaaattgggaaggcagctggaagggtcagcagacactgcgcgacagccagttcaacaagctgcaattaatgcggcaaaaatataatatcgatcaaaattttatcgccgacatccagaaggtcacgaacgaggattacgatcggctgcttgaaacgatcgaacacctgaatattccggaatatcaggataaagttgcggcggctttgaaagaatcggaagaggagttcaagtcccactttatttttcggttaagggaagcgatcgagatggcccgtagggagtttcacgagctgaactatgcgctgaggcattttcctttttccgacgacaagtatcattttgaggtttcccctagtgaacgttacaagcgcttctatgatgccgtgatggatcccatgcttttggaaaagggttcattgttcgaattaccggacaatgatcgtaccgaggttctgcatgagttgttcgatcttctggtcaaaggtgaggccggacaattggaggagttctcggactatcggcaatacttggatttcgatattatcgtaacatccggcaacggcaaataccgcttctcgcaagtgctgaaggagaaatcgggaggcgagacgcagacaccgttctatattgcgatattggcttccttccaccacttatattccggaaaaagcacgcggcttgtcattttcgatgaagcgttcaataaaatggacgagcagcggattcaatccagtctgcggttgattaagcaaatgggtctgcagctgattgccgccgttcccgatgagaagatgcagcatatggctcctgaggtgtccaccacgctgttcgtcagcaagcataactaccagtgttatgtagacatgattgacaaatgggacaacggggcggaagacgagatggcgagagcgggagccgtggaaatagcggaatatgaggctgaggcggctgccacatcgaatttatcgaacgttgacaacgggaaatccccctcagccgatgatgcggatgaaggaaacggtcaaggctttttattctag

SEQ ID NO: 44300 - DNA, 1275 bp, Brevibacillus panacihumi W25
ttggagattcatgaaacgccatataaatccaaatttgtctcccagctgctaaacctcctgttggacaaatacgagttaagccagtcttttgtaaccgggcagccttccaagcaaaggccgcagctatctcttaacaaaagtccattctggcaagattatacagacgaagtggatttccgtaaacgaatttggatcaacgaagcagcttccgagttggagcggctcggacttgttgaactcaattgggcccggtttcgcaccggcgagcagttggaaagaatctatctgcgatggagtgagttgaagacggcttatcgcgttgcggggcggatgccgaagcgggacaagctggaacgcttgcggcacatccttactcccttatcccgccatccttgggaatgggtcagggtgtggtctgaacaagccgatgtatcgctagccgaaggtaaaactgcccacctggaggtggacgatccagaggggtataaggatcttgtttgtgtattgctggagcttcctaggctcgagcgagccgttccaataagattacttagccagaagctgttcaaggactccaagcacatggaaagaaacgttcaacgaaggttgctttcgctcgccaagcaggcatcaggagaggagcgtgaaaccgaggaagaatggcttgatttcctcggggtggccaaaaatccacaaattgtgctggtaagcgggcctctttcattccgtactaccgacagtcgtaaggttgatattggagtgtttgccggtggggttggcttatcggataaaacgggggaagaaatgtatcaagtgcaaacagttgccactcggatagtaacaattgaaaacttggcgacttatcatctgtggctcgaacacgcttccgagctccgcgaaacagagcttgttctatataccgggggatttccccatcggtcattgcaatcctttttgtgtagactggcagagcatttggcctcggcatcggaaaagaacattgaagtgtatcattggggtgatattgatctgggaggaatccggatttttgaatacctgcggaagaaattcttttctaatctgaggcccatgctaatggatgcggagacgcttcttcgttacgagtcctcagcggcgtcaatcagcgatgaatatgccggaaagcttgaggaggctctaaaggatacccgactgacccattggaggcaggtgctgcaaacgatgcttgatcgaaggatacgcttggaacaggaaagtattgtggaattggattaa

SEQ ID NO: 44301 - DNA, 1473 bp, Gordonia alkanivorans CGMCC 6845
gtgccgccggaatcggtgcaggtcacgctgggtgacgccctcgacgccaaccggtcgctgcagaagtcggcggcggtcaagctgttcgccgcgaacaactcggccctctacgtcaccttgatggagcgccacctcgactacggcaccaagatgtccgaggtcgagctcacgatgcggctcgaacgcgacctcgccgaactcgacctcaccgacgatcagcccaccggcctcgaactggtcaaactgtgggcccgtcagggttggctgcaccgcgtcaccgacaccaccgaccccgacgcccccaacctctgccacctgaccagcgaagcccgctcggtcctggacttcatgcgccgccagcgccgcgaggactccatcgccaccggcggctcgatcaccggcatcgccgccgaactccgacgcgtcgccggacaggtcagcaacgaccccgagaccatccgcctcgagctcgaagcgcagatgtccgacctcgacgccgaactcgccgacctcgaagccggccgtcgcccacccgtcgatctccgcgtcgccgaggactccgcccgcgccatcggctaccagatggagcagatcatctccgacatcggccagtacggcacgatgctcgaccgcatcaccaccgcgctgctcgacgacccgggggactccgacctcgcctaccgcgaccgtcagcgccagctcttcgacgactacgaggccctgctgcagtcgtcgcagtcggcgtcgtaccaggcgttcagccagatgatccaggacccggagcgtcgcgcacgcctcaaggtcgacatcgacaccatcatcgagaacttccccggcatggacgccggcttgcggtcggtgatggacaacttcttcggcctggtcacccagcagatggccgaggtcggccgcacccgccagcgctgcgcccgtcgtatccgacgcttcgtcgcgtcgggcaccctcgagcagagccgcggtctggcacgtcagctcaacgacgccctcgccaccgccaacgacctcctcaagacctccctcgcggaccgtcgcctcggctacgagctgccgctggccgccccgaccctcaattcgatcggccgcctcgccttcgagatccgcgaacacgtcccgcccgcccccgcgctgcccgccggcggcgccgacgccgacctgactgccttcgcctcgatgaccgggcaggtcgacaccgtcgaactcaccgagaccgtcaacaacgccgtcgccgccgggccggtcgcgctcaccgacgtcatcgagggtctcgacgagccgtacctcgcgcacgtcatcgtgctgtggtcctgggcccagaaacaagccgcagcaggggagaaggtgccgatgaccaccgtgcgcttccgatccctcctcggggaggaccacgccatcgaagtccccgacctgaccttcaccgaaccgattccgactgcggaggtcgacgccgaatga

SEQ ID NO: 44302 - DNA, 927 bp, Gordonia alkanivorans CGMCC 6845
atgacatctttgccccctgagacggaaccctcgctccctgaggtgcgagcggaggccgacccttcgctccctgaggtgcgagcgcagcgagccacgaagggcgaccctgaggtgcgagcggaggccgatccctcgctccctgaggtgcgagcgcagcgagccacgaagggcgccgaaaccgacctccccgacgagttcgccggcttcgacgatctccccaccgtcgcgaaccgcgccgcctcgcacgccccgagcgcaccccgcttcgatggcgacgtcagcgagatgcccgaccgtgcctgctgggcgctgcagaacctgctggcccgccgctacgtcagcggtgaccggcagccgcagctgtggtcgtgggtgtccgaataccaggacgtcctgcggatccgcctctccgaactcgaccttcgcctgcgcctcgtcgacgaactgcaggtcgccttcgtcgagcaggccggttacgactcccgttggggccgacgcattctcaagcgcgagaccgtccacacctacgacgcgatcctggcgctgcatctcgccaagtacatccgtgccgcccgcgacgaggacgcgctgatcacccgcgaggagatccacgaactcttcgccggcgtcaccaacaccatcgaccgcgacctcgcgctgttcgacaagcgcatcgagcgggccatcgacaagatggaagaactcgagttcctgcgcaagcagcgtgacgacgccgacaccttcaccgtcagcccggtgatctccgcggtgatgacggcgtcggtgatcaccgacctgcagcgccagttcgaacagttcatcggctccggcgacacgggggaggagccgccggagagcgcggccgacgaacccaaggaacccgatgctgaagacggcttcggcgacgacgaaggagacgactggtga

SEQ ID NO: 44303 - DNA, 3345 bp, Gordonia alkanivorans CGMCC 6845
gtgagcgggcaggtcgaccagtaccacctgtcccggttgcagctgatcaactggggcgtgttcgacgggtatcactcgatcccgttcagctccaacggttctctgatcaccgggtcgtcggggtcgggtaagtcgtcgttgctcgacgccatctcgctggcgttcctgcccgaccatcgccgcaacttcaacgcctcgggcgacgccaccgcggccggttcgtcgagcggtaagcgcaccgtcggcaagtatgtgcgcggcgcgtggggtgagcggcgcgacggcaccaacgcgcaccgcgagatcatgtacctgcgcggcaccggcccggcgtgggcggccatcgcggtcacctacacctccacctcgggcaccgcgatcaccggcctggtcctgaagtggctggccgcgggcaagatgaccgacgcgcacagctcgtacttcatctacgacggcgacgccgacatcgtcgacgcctgcaacgagtgggccgcgtccaactacaactcggccaagttccgcgaccgcggctggcgcggcggacccggcgagggcaagtacctctcgacgctgtactcgctcatcggcatccgcggctccgacgccgcgcagcaactcctcggaaaagccaagtcgctcaagagcgtcggcggtctcgcacagttcgtgcgggagttcatgctcgacgccccgacgtccatcgtcggcatctccgacgccctcgaacagatcgacccgctcgtcgaggcccgtgaactgctcgacgtcgcgcgccgcaagcgcaccatcctcggcaacatcgaggaggtccacgagcgctacgccgcagagtcggcgaccttcagcgtcctcgacaccatcgacagcaccaccattcgcagctacgttaacaatctgcggatccgcaacgcacagcccgaggtcgccgacctcgacgaccagatcacccgcctcgacagtgatctcgccgcgctgaccacccagcacgaccagctgcgccaggaccacagcctgctgctggcccgtatcgccacctccaccggcgacctcgccccgctgcgtgaacagctcggcggtgcacagaaactcagcaccgaggtcaccgcacgccgaaatgcgtacgaggacaaggtctccgccctcggcttcagcgcacccaccaatgccgagggcttctggtcgctgcgcgaggagctcatcgaagaggccaccaagatcgacggacagctcgacgccggtcgcgcccactacgccgaggcgctggcccgcgaggtcgccgcgcgtagccgccgcgacaccgcgcaggaagaactcggtcgcgtcgaacaggccggttccgccctcccgcgcaccgaacacgagatgcgtcgcgtcatcgcgcacgcgctgcaaatcgacgagtccgagctcaagtacgtcgccgaactcgtcgagctcgaccccgacgaggaacgctggcgcctgtccgtcgagaaggtcctgcgcaacgctggcctgcgacttctcgtccccgacaagcacttccgctccgccctgcgcttcgtcaactcgcatgacatgcgcggccggattcagctgcaccaggccgagacccgcccgatgcccgacgtcgagccgggcaccctggcctctaagctgcgtcccgtcgacccgggtcacccgtgtgccgccgaggcgatgaccatcctggcgcgcctgggcaaccacatgtgcgtcgacaacccaggggagttttcgcagtacgcgaaggccgtcaccgaccagggtctgcgcaaggactcggcgaagctcgccgtcaaggacgaccgccagcagctgcgccggtcgcagtacatcttcgtcggcgacgtcgaatccaagatcaccgcgctgcgcgacgaactcgcctacgaggagcgcgctttcgaggacgcccgcgaggactgtgccgagctcgatcgcgaacgttccgccaaggaacgacgccgcgacgcctaccgccgcgtctgcgagcagttcacgcagtggaacgagatcgacgtcgactcggtcgacgatcgcgtcgaccagctcaccgaccagtacgacctcctcatggaggagcaccccgacgtcgaggccctgcagcgcaaggccgaggacctctgggagcaggtccgcaacgcgatctcgcaggccgcgctggtcaaggacaagatcgcccgccaggacgagcgccgcacccagctgctcgacctcatcgaccggctgaagcccgaagacgttcccgcgcaggcggagaagaccctcgacggtttccgcgaggacctctcggcgaccctcgacgtcctcaaccccgagccgtaccgccaggagatcgtcaaggccgccggacgcgagcgcgaccgcatgcggtccgatgcccgacgctcccgcgacgagctggcccggatcctcgacacctacgacgaggaattccccgacgccatcccgaacgacagcgacgacttcgacgaacgcatccacgactacgtcgccgtctgccgccgcatcgacgaacgcgagctgccctccgcctacgagcggatgcgccgcctcatcaccgagcaggcgccgggcgcgatcctgggccttcacatggccgccgacgccgaggaacgacgcatcgtcgagcagatcgagcgcgtcaacaccggcctcggtgcggtggcgttcaaccgtggcacccgcctgcggctggtcccgggccgcaagaagctcgccgctgtcgaggagctgaccgagaaggctcgtcagatctccaatcgcgcaacggcggtcagtttcggcgacgagcaggccatcctcgagcagtactccgacatcctgctgctgcgcgaacgcctcgccggcaacaccccggaggaccgccagtggacgcgcgacgccctcgacgtgcgcaaccgcttcgacttctactgcgaggagcacgacgccgaaagcggcgagaccatccgcacctactccaacgccggtgacaactccggcggcgagcaggaaaagctgatggcgttctgtctcgccggcgcgctgagcttcaacctggccagcccgcacggcaacgacaaccggccgatcttcgcccagctgatgctcgacgaggcgttctccaagtctgacccccagttcgcccagcaggcgctatccgcgttccgcaagttcgggttccagctgatcatcgtcgccacggtgcaaaacaccagcacaatccagccgtacgtggacaacgtggtgatggtgtcgaagacggaggtcgggcccgagttgcgtccggttgctacggcaacgtcgacgacgatcaaggcgttctcggagttgcgacggtcggggagtcagttgtcggtgtag

SEQ ID NO: 44304 - DNA, 1443 bp, Gordonia alkanivorans CGMCC 6845
atggacttccacgcgttcaccggtttgtgggaacgacatcccgcatggcggctgctgcgtgctcaccattccccgctcatcctgacgttcctcgggaactacttcgtcgagggtaaccggggtgcgagttcggccaacgacctcgccgcggcgttggacgacctcctctacgacctgaacaccgcagccgcagcggaagacggacaggctcgattcccgaaggaacctcgtgcgtacctcgaggactgggccgcaacggaggcgggctttctccgtcgcttctacccgccgggggacgacgaagtccactacgaggtgacgccggccttcgagaaggcatactcctgggtcgtctccctccagggcagagccttcgtcggaaccgagtcgcggttgcacaccgtcgtcgaactgctccggcagatcgtgcacggcgtcgaatccgacccgggggtccgactcgcggagttgcggcgtcgtcgtgccgagatcgacgccgagatcgacgccgtcgagtccggccacatcgcggttctcgaccagacaggggtccgagaccgttaccagcagctgtcgtcgaccgcgcgtgagctgctctccgatttccgcgaggtcgaggacaactttcgcctcctcgaccgcgccgcccgcgagaagatcgccgcctgggacggcccgaagggcgaactcctcgccgagttggtgggcagtcggtcggagatcgcctcgtccgaccaggggcgcagcttccagtcgttcttcgagttcctgctctccgactctcggcagaccgaactgtccgccctgctcgacaaggtgtcctcgctcgacttcgtgaaagtcgaccaccgcatccgcggcatccaccacgactggtcggaggcagccgaccgcacccagcgcaccgtccgccagatctccgaacaacttcgccgcttcctcgacgaccaggtgtggctcgagaaccgccgagtcttcgacctcgtccgtgccgtggagagcaccgcgctcgagctccgcggcgacacactggatttcggtctcgacgtcgaccagcccgggatcgagatcgccttgcccttcgaacggccgctctaccagcagcccgcctcggcgaccgtcgagagccacatcgagcacgccaccgaggacctcgacgccgagctgctgttcacccaaaccttcgtcgaccaggcccgtctggctgccaacatccgcgcgatcctgcccgagcggtcgtccgcgctcctgtccgatgtggtcggcatgtacccgatcgagcagggcgcagccgagatcgtcggctatctcgcgctcgacgacggtgacgtcagcatcgacatcgacgcctccgacgagaccctgttggaataccccgatcccaacgatccggacaccatccggcgtgcccggcttccgagagtcacggtgaggcgacgatga

SEQ ID NO: 44305 - DNA, 588 bp, Gordonia alkanivorans CGMCC 6845
atgaccgacgaacgcgccgtcgcgagcaccatcatccggctgatgcagggcgtggtctaccgcgaatccgacgcggatgcctgggccacgctcgagcgatccggggccggcgtacgcgaccatttcgccacgatcggagtcgacgtcgtcgtcgacgactccgagggctacgcctacctccgctcacggccggaacaagcagaacaggaaccacttccgcggctggtccgacgccgcgcactgacctacaacgtcagcctgctactggtactcctccgcaaacgcctgctggagttcgagatcaccggcggcgagggccgactcgtcctgtcgaccgaccagatcgtcgagatgctgcgcctgttccaggccgagtcgaccaacgaggcacgcctcgtcgaccaggccgagagcaccatcaagaagactgtcgaactcggattcctgcgccaactgcggggccacaccgaccagtgggaggtccggcgcatcatcaaggcctacatcgacgcgcagacactgtcggatttcgcgggcaagctccgcgagtacgccggacggccggccgatgacggaggaagccgatga

SEQ ID NO: 44306 - DNA, 2347 bp, Gordonia alkanivorans CGMCC 6845
gcgggccggcggtgaccgcgtcggcgaactcgaacggctcgccgccgcggcgcgcgacgatctgcagaaacgccggcacggccgggcactgttcgacgccacaatcgccgatgccggattcgatccggtgacctccgccgagcagttcagcgctctgcgcggcctcatcgacgacgaacgttcccggctactggcgaccaaacgcgcattggacaccacgatcgccgacgccatcggacgcgagaaagacacggtccgacgggcggatgcgatccgcgacgaactcgacgacctccgcaaccgcaccagcaatctgccgcccgaccaggtacaactgcgcgatcagctcaccaccgacctcgggctcacccacaccgatcttccttatgccggcgaacttctcgatgtcgccgcggagcacggtgagtggcgcggcgcggccgagcgggttctgcgcggcttcgcgctctcgctgttggtgccgcagcaacactacgattcggtcgcggagtgggtcaacggccgacgattgacctttcgaggcgccggcggccggaacgtcggtgcgcgcctggtatatgagcgcgtgccggggcgacagattccgttacagcgccagccttccgacgttcccgtgctcgccgagtgcctggagatcaaggacgggcccttcgaggactacctgcgtgccgaggtgttcaaacgagccgaccaccggcgcacggagaacatcgccgagttccgggcggccacgcgcgccgtcacacgcgaaggccaggtgcgctccggtggtcgtcatgagaaggacgaccggcaccgcgtcgacgatccccggcgatgggtcctcggctgggccaacgaacgcaagatcgccgcgctgcgtgacgatctcgatgagttcgagcgtctgcagtcggccgccgccacggagatcaccacgatgtcggaacagcgagacgtcgtgcagaagcgcagcgaagcactcgcccggctagagggattccattcctggaccgaactcgacgtcgacgaggcccgtcatcgcgtcgaggcgcacgacgcagagcgggcccgtctcgaatcgggttcctcacggctgcaggagatcacggtggcgctggaacgcaatgccgagcacgccgaggccctcaacgcgacgatcaacgagctgaccggcaaactggcaaccactgcggcggcccgacaccaggccgagcaacttcgtgccgggaccgacgcgttcatcgcacagcacgccgaggccgacctcacgaccgcacgggcgtcgtatgacgctctggcacaacgcctcgacgtcatgccgaccacggcagatgactgccccgcggcggaatcgacactctcgtccgtgctgcatcagcggatcgaacgactcacccgtgagctcggtggtcacggccagaacctcgctcagtacatggccgaggtcctgcgacgatggcccgacctgcgcgccgacatggacgccgacgtcgggtcccgagcagacttcgtcgccttccgcgagcgcgtcgcgaccgacgacctcccacgtttcgaggccgagttcaaggaccagctgaacaagaacgccatccaggagctcgccgggttcaacaactggctcaaccggcaggccgcgtcgatcgacgagcgcatcgcccggatcaacgaggcgctgggcgcggtgccgtacaacccgggccgctgtatccggctggagcgagaagccaccacgaatcaggaagtggtgcagttccgatccgatctgcggaacctgaccaacgacagccttgcggtcgacggtgaccagtactcggagcagcggttcctggacgtcaagcggatcatcgaacgattccgcggtcgggacgggcacgccgactcggacaagaactggacgcgccgggtcaccgatgtgcggaactggttcgtgttctccgcctctgagcgggacgtggagaccgacatcgagtgggagcactacagcgattccgacggcaagtccggcggtcagaaggagaagctcgcctacacgattctcgccgcctcgctggcatatcagttcggtttggaatggggcgtgcagaagtctcgtgattttcggttcgcggtgatcgacgaggcgttcgggcggggatcggacgtgtccactcgttacgcgctggacctgttcgccaagctcgggctgcagttgctgatcgtcacgccgctgcagaaggtgcatgtgatcgagccgtatgtgaaggcgatcggcttcgtggacaaccccaccggcacgttctcacggttgcagacgatgacgatcgaggagtaccggtcccgccgagacggacagttgcggtga

SEQ ID NO: 44307 - DNA, 1197 bp, Gordonia alkanivorans CGMCC 6845
gtgagcggtcgctggacctcgcccgacgacatcgttgcccgggtccgacgccggtggatcgacggaaccctgttgcgcgcgtatgcaagtgacggtctgttcgagcccatcgagatcccgctgcgcggccccaccccatcgcagatcgccgaggacctcggcgcggcccgcgaatgggtgttcgcactggaccgggggcgatgccacgatgggcactacacgctgtgctggcagtcgatcggtggacggcaggtcgggcggaacgagcttccggtgcgagcggtcatcgactcgttcgagcaggcatggtcgctgctcggcgtggcgagcgacgtcgcacagttcgacgatgtaatgcgtctgtctgccgacacgccggcggtgagcgcctgggtcctccggcatccgctccgcgcagtcgagctcagctcggagttcccgcggttgatcgcggcatacgagtggctcgatgcacaacgcggatcgggccgctacctacgcgagatcaccgcccccggcgtcgacaccaagttcgccgaacgctaccggtcggtactggcgtcgatgctcggtgtgtcctcgaccgccgccggtttcctcgccgggctgggcttgcgcgcgaagcccgagttcgtgcggtttcggccgtcatcgacgttgggattgcccgagcttctgaccgagctcagcgtccgggccgacgaactcgcgcaggtggcgttgagaccgcgacgtgtcctcgtcgtcgagaacgagatcacctatctcagtgtggatgtccccgaggacggcatggtgttgtggggcaaggggttcgaagtggatcgcatcggccggctcccatggctcaccgatgttccggtcttgtactggggcgacatcgatacacacggctttgccattctcgaccgactacgagcctggctcccccagaccgagtcgatcctgatggatcgcgacactcttctcgcacaccggggtcgctgggtcaccgaggatcgtccggcgacgtctgcactcacccggctcactcccgccgagcgagccctctacaccgacctcgtggaagactcactcggcacgcgtgtgcgcctcgaacaggagcgagtcgcttgggaatgggttctcgcacggttctcgtcgacgtcgttgcggtgcgctgagagtgccggacgagcctcgggccggttccgctga

SEQ ID NO: 44308 - DNA, 1470 bp, Xanthomonas hortorum pv. carotae str. M081
atgaagcaccaggcacgcatcgccggctatcgccaattgcgcgagcagccggtgtggaaactgctcgccgccgaccacgcgccggagctgatcggcctgctgcagacggtattgatggacggcgaacgccgcctgccctcggccgtgctgcatgagcgcctgcagcgccagctcgatgtgctgcgcgccgacgaactctcgcgcgagttgccgcgcactgcgcaggcctacctggcgcattggctggcgcagggctggctggaacgccgcctgcctgaaggcgcggccgaagaagaatacgaactgtcgcgtgcggccacccaggccatccgcttcatcgtcggcctgcgcgagagcagcagcagcgccaccgaaagccggctgtcgctggtgatccagcagctggtgcaattggctggccagaccgaagccgacccggaactgcgtctggccgccttgcgcgaagaacgcgcgcgcatcgatgccgagatcgagcgcgtggcctccgggcgcgtggccgcgctggatggcaagcgcgcactggagcgcgcccgcgacctgatccatctctccgatgagctggccgaggatttccatcgcgtgcgcgatgatttcgaacagctcaaccgtcagttccgcgagcgcatcatcgacgacgaaggcgcgcgcggcgatgtgctggagcagctgttcaacggcgtggacgtgatcgccgacagcgaggccgggcgcaccttcgaggcgttctggagcctgctcaacgacacccagcagagcagccagctcgatcaggcactggatgcgctgctggcacgcggcttcgcccgcaagctcgaccgccgcgaacgcgccttcctgcgcgggctcaccggtacgctgctggagcgcggcggcgaggtgcacacggtgatgcagcacttcgcgcgcagcctgcgcggtttcgtgcagagccgcggctatctggagcagcgccggctcaatcagttgctcaagcaggcgcagggcgaagccttgcagctgcgcgacagcctgcatgccaccgccgccaccggctacacgcaggcattgagcgctgcccgcctgcgctcgctgtcgcaatggcgcctgcacgacccacgcctgacccaggtcgatggccgcgtgcaggccgccgatgcggcggacatctcgctcgacagcgtgggcgatctggtggcgcaatcggagatcgacgtgcgcagcctgcgccgcgacctgcacgagctgctcggtcaacgcccgcgcctgaccatcggcgatgcgctgcagcagcgcccggccacgcagggcctgggcagcgtgatcggctacctgtcgctgggcacgcgccacggcgtggtgatcgacggacagatggaaacggtgcaatgggaaggcggcgacggcgccctgcggcgcgcacgcattcccttggtgtggttcacccgggagaaacgcaatgaactggtctga

SEQ ID NO: 44309 - DNA, 702 bp, Xanthomonas hortorum pv. carotae str. M081
atgaactggtctgaggacacccgcctggatgcggacgaggacagcggcgcgtcggccgatgccggccgtattccgctgacggagacatcgcttgcacaaccgcgtggcgaactgtttctcggcgacaccggcacgctgccgttcgacgcgcgccgcgcgctgtgccagctgctggccggccccagcatcgacgcgcaacgccacggtgcgttgtggcctgcgctgttgcgcaacgaagcggcgatccgccaggtgttgtgcgagctgttcctggagctggtactggaccgcgagggcggggtggcctttacccgtcaggccgataccgccgagctggaatcgccaaccctgctgcgcagcgcgccactgacctttatcgagtcggtgttgctgctgttcctgcgtcagcaactggccgaagccgatacgcgcggcgagcgtgcggtggtggacgaggcgcagttggtggaggcgttgtcggtctacgaaaagaacgtgtccaccgaccgcgccggattcgcgcgacgggtgctgacggcgatcggcaagatgcgcgagaaccagttgctgtcgcggttgcgcggcagcgaggagcgctacgaggtctcgccggtgctgaagttgttgttctcggcagaggacgtgcaggccttggtggtggcgtatcgcggcttgcgcgagggagatgtcgcgctcgactaa

SEQ ID NO: 44310 - DNA, 4062 bp, Xanthomonas hortorum pv. carotae str. M081
atgaattcccagtccaacctatcgccggcgcagccggacgcgtccctgttcaccgattcgcttgccgagcagcgcgcgcagcagttccgcatgcggcggttgcaggtgcacaactggggcacgttcaacggcttgaccgaggtgccgatcgccgagaaaggcttcctgttcgtcggccggtccgggtccggcaagtcgaccttgctggatgcgatgtcggcactgctgaccccgcccagcatcgtcgacttcaacgccgcagcacgcgaggccgagcgcagtgggcgcgatcgcagcctggtgtcgtacgtgcgtggggcctgggccgatcagcaggacagcgcgtcgggcgaaatcgccacccaatacctgcgcaagggcgccacctggtcggcgctggtgctggaataccgcaacgcgcatggcgagacggtgagcctgattcgcctgttctggatcgccggcagcggcaatgccgcggccgatgtgcgccgccattacatggtcgcgccgcgcagcttcaatgtggccagcgagctggatggcttcgatctggatctgcgcaagctcaaggcgcgtcttggcgaggaggtcgcgcatttcgatggctttgccggctacgcagagcgcttccggcatgtgctgggcatcggcaacgagatggcgctgcggttgctgcacaagacccagtcggccaagaatctgggcgatctcaatgtgttcctgcgcggcttcatgctggacgagccgcgcacgttcgaagcggccgatcggttggtggaagacttcgccgaactcgacggcgcccatcatgcggtggtcaccgcacgccgccaggtggaaacgctgagcccggcacgtgaacaccatgcggcgctgatggccctgcgccacagcgtcggcgagttgcgcgagctgcagctgggcgtggacagctatcgcgaacagcagcgtctggccttgctggagacgcgcctgcacgaactagacagccaggaccgcgggctggccggcgaagaaggccagcggcgcgagtcgctggacaatcacgaacagaaactcgccgggctggaacgcgaacaacgcgccgccggtggcgagcagatcgaggaactcgaacgcgagcgcacccgggtcgagcgcgagcgcgacgagcgtctgcggcgccgcgtgcagatcgaacaggcctgccgccagctcggcaccgccctggccgcaggcgccagtggctttgccgagcagatcgcccatgcccagaccgtgctggagaacggcaagcacgacgccagcgcgctggatgaggcgatcgccgagcgcatgggtgcgcgccgcgacgatgagcggcgatttgccgagatccgcgccgaactggatgcgttgaagcgcgcgccgtccagcatgccggcaccgatgcaggccttgcgtgcgcgtctgtgcgaggacaccggcattgccgaagccgcgctgccattcgtcggcgagctggtgcaggtgcgcgaggatcaggcagcctggcgcggtgcgatcgagcgcgtgctgagcggttttgcgcagtcgctgctggtggacgagcggcattacgcgcaggtcagcgaatgggtcaaccgcactcacatcggcacgcggctggtgtatttccgggtgcgccgcaacgacgcgctgcatgcgcgcgcgccggatgcacgtgcattgcctggcaagctgcagctgcgcgagcacgccttcaccgagtggctgcgcaacgagttgatgcgtcgcttcgattacgaatgcgtcgacaatgccgccgcgctgcgaaatgccgaccgcgccatcacccgcgaagggcaggtcaagcatcccggcgaccgttatgaaaaggacgaccgccatgcggtcaacgaccgcaaacgctggttgctgggtcacgacaaccgcgacaagctcaaggtgttcgagcgcgaggcgcagacgctggcccagcgcattgccggttgcgatgccgacgtggccgcgctgcgcaagcagcgcgagcaggaccaggaacggcagctggccgcgcatacgctggtggagcgcgactgggacgagatcgatgtcggccccaagctgcagcgcctgagcgatatcgacgaacagctgcagcagctgcgcgaaggcaacagcggcctgcgcgcgctcggccaggcgatcgagaccgcgcgcaccttgcgcgaccaggccaagcgcacctacgaggaagtgcggctggagcgcgcgcagctggcgcgcgagcgtgtccggctcgaacagcagcacgccgcctgcgccagccgtgccggcaccgccgcgctcacgcccacccagctgcagggcctgcgcgaacgcctggcggcgttggcaccgctgtcgctggacaacctggaagcgcatttccgtgtggtcgagcgcggcctggccgagcaactggccgagagccagggccgcgacagccggctcagcgcgcagctgctcgattgcttccgcaagtactgccagcaatggccggaagacagcggcgatttcaccgtaagcctggccagtgccgacgatttcctcgcgcggctggatcgcctggaaagcgatggcctgccgcgccacgagcaccgcttcttcgacctgctgcagacccagagcaagaacaatctgctcgccctgcagcgccacaccgccgaggcccacaagggcatcaagcaacgcatggacgaggtcaacgccagtctggagcaggtgccgttcaatcgcggcacgctgctgaccatcgaggtcagcgaccgtcgcctgagcgaagtgcaggaattccagcaacaattgcgtgcggtgctgtcgcatcaacagaccgaagaccgcgcactggccgaggcgcagttttccaccttgcgcgagctggtggcgcgcctgggcgcgcaggaaccggaggcacgccgctggcgcgagcaggtgctggacgtgcgcctgcatgtggaattcatcggcgttgaactggacgcacagacccgcgcgcaggtggagatctaccgcagcggcgccggcaaatccggtggtcagcgccagaagctggcaaccacctgcctggccgctgcgttgcgctaccagctcggcggcgaagacggcgagttgccgcgttactgcgcggtggtgctggacgaagccttcgacaaggccgacaacgaattcaccgcgctggcgatgaacatcttcgagaacttcggtttccagatggtggtggccacaccactgaaatcggtgatgacgctggagccgttcatcggcggcgcctgctttgtggaaatcagcggccggcacaactccggcgtgctgctgatcgaatacgacgagcaggcgcagcgactcaagttgcccgagcgctcgcgtgcagacgaggctggtcctgcaattgcggagcagtctgcgagtgttacgcagcgcgaggatgcagcccgttcgacgcggggtgaaacgcgtatggacagcaccggtcctgtctctggcgctgagggtgcggcgcttcaggacgtccctgcgcaggacgacttggcagccaaggcgagcaagcgcgccagcaaggtcacgccggcattggcgccagctgttcaagccgcgccgaagacctcgaaaaccgccgcttccagcgcacgtgcgggatcaggcaagtcggcatcggcgaagaccgcagcgggcaaggccgcgtccgccaagactgcaccagccaaacctgcatcagccaggcgtgcatcgcctgcagcgggcacagcgcgcaagccggcaacgccgaccaaaccctccaagacgcaggcagataccgggaaggcatccaggcgtacgaccgcgtccgccaagccgactgccaagccgaccaaagccacggcagtgccgaagacacctgctgccaagtcggcagtggcgaccagacgcggtaacacatcgctgggtggcgcaaccaaagcaaccaaagcaaccgcggcgcgcagcactgccaggcccgcgccagccaaagccacagtggccaaggaacgtcctgcgtccacgcgcggatctgcaagcaagccgcgcggaaaacgctga

SEQ ID NO: 44311 - DNA, 1527 bp, Williamsia sp. D3
atggcacgcccgacagcggcgcagctctacgccgcctacggggacaacgcggacagcgatgtcaccctgcgactgctgaggtcccggaacgcggtgccctatctcgcgatcatggccgcgcgtctggccgacggtcaggtggacggcgaccatctcgcggcgggtatcgaccgcgacctggcggacttggccgtgcactggaccgagcgagggtgggaactgcccacggccgatgacctgttggaccgctgggtgcgggccggttatctcgcccgcactctgcacgccgactcccagcgagagcggtaccagctcacccgcggtgccacgcaggccatcgcgcaggttcaggccgtacgccgtaaccgcacggtggccaccgagaccgtgctcgaactagtgatgtcgcggctgtcgaacatcgctgtgtcgatcaacccggatcccggcgagcacatccgcgacatcgaccagaagatcgccgagctcaccagacggcgggaagaactcgcagcgggcgccatccctgcggtcgattcgcggcgggtgctcgacgacatccggatggtcacgtcgctggccgagcggatgcccgccgacatcatcggatacggcgagaagatgcgcgagaactcccgcgcgctgctcaccagtggcctcgatgccgagcacggctcgcatgccgacgtgctcaaccggatgttcgacggccatgacgcgctggcggactccgacgagggaaaggctttcgacaccttctacacgctgatcgcggatcatcggttgcgcgacgacctcgagtcgagcatccggcagatcgccgagggtatcccgaatctcccacacgacatcctcgacacactcacgggtttcatcgaccggatgtgggatgaggtgcagtcggtggacgaggtgcgtggtcaggtctaccggcgcatcaacaccttcgtcaaagacggcgacttcctgcactatcgcgcgttgcgcagccagatcgccgatgcgcagcgcgccgccgccgctgcgtttgtacacgcggggccgggcaaagacctgggcatcgcggtaccgatgagcgccgcggtgtccaattcggtcggcgcgttgatctttcacgacgggatcgtggattcgcctggggcggttgccgataccgtgggtgagatcaacatcgaccctgccgacctggtgggcgcagaatcgatcgactggcatgcactgaccgacgcggtgaacgaggccgtggccgacggtcccgccgagatcgacgatgtgctggcgttgttgcccacggcccgtaccggtgacgtgatcggcatctggtcgctggctcagcgccatggtgcggcagaacacggacgggacgaggtcaccgtgcttgcccacactgctcgcgggatgcgcgagatccgtttgcctgcagtccgattcacacacatgctgcccgatccgataaccgctcagccacacgaggtgatgcatttgctcgatgaaccagccgagcctgtccgaggtgcgacccggtga

SEQ ID NO: 44312 - DNA, 771 bp, Williamsia sp. D3
gtgagcacgccagaagatgacgtcgtggtccaggagggcgacgacctgttcgtcgactcacccgaagcgatcactgaaccatcggtcgacctgtcacacttcgcattcgatggatcagagccggtcggaacgatcagtgaggcgcggatcgacgcccgattcgacggtgacacgtcggccctgcctgcgccggtctgttacgcgctgcaggagttggttgccgccgcacacgtatcggcgcggtctcgtaactggaagaccatcgaggtgcacgaggagatcattcggtctcgcctgtcggagctgaatctccagctggagatcaaccgagagcacaagtacgcgttcacccgccaggtgtcggagaacgacccgcggcagcggaacatcttgcgcgcccagacactcaccctggcagcgtcggtccttgcgctgttcctgcgacagaagtacttgaccagtgccgatgaatcggtggttaccgaacggggcgagatcatcgaccacatgctcacctacaagccggtgtccgacaccgacgaggcgggcttcatcaagcgaatcgatgcggccatcaatcagctcgaatcacgaaagatcattcgcgcgttgccgggaacggaccggtttgtggtgcacggggtgatcgcttcgctcctcgggcccgaacaggtggccgcctacacagaggcctaccgcaggctcgccggtgagcacaccgaagagggcaccgacctcaccgaactcgatgaccaggagcgcacgtcatga

SEQ ID NO: 44313 - DNA, 3459 bp, Williamsia sp. D3
atgaccgagatcctggaagtggacgcagccggcggatctcgaccggttgaccgcgatacgccatcgccactggccgcccctgcgggcaagcgcaccctcaacatcggccaattccgtttgaccagactgcaactggtcaactggggaaccttcgacgggtacaaggactatccgatcgacgagcggggcgtgatgctcaccgggccgtccgggtcgggtaagtcatcgatgatggacggccattcggtggtgctgttgcccacctacgatcaggtgttcaacgcttcggccgatctgtccgcgaagggtgcgaagaaggcggctcggtcgatggccgactacgtgcgcggcgcgtgggcggagaacgacgaccggtacaaccaatcgcaggtgcagtacctgcgggccgatggcgccacctggtcggcgatcgcggcgacttacgacaacggcgcaggatctgccaccaccgcggtggcgatcaagtggttcccggggtcgggcaccgacggcagctcactgcgttcgtggtaccagctacatgacgggcatttcgacctgctcggcctgaacacgtgggcgcagaacggattcgacatccgccggtaccggtcggccaacccgaccgtggagtgtttcgatgtgcagagcgcctaccaggaggcgctgaggcgacgtgtgggaatcggccagtcgtcggcagccctgtctttgatgggcaaggcaaaggccatgaagaacgtcggtgacctcaacctgttcatccggacgtacatgctcgatcgacccgacacctacgccaaagccgaacggctggtggagaacttcactcaactcgacgaggcttatcaggccgcggcccgcgccaacgcgcaggagcaggtcctgaggccgatcccagcggcctgggaaacgtactgcagtgctgaagaatccaccactcgagcgggcacgctgctgggtccgccgatgagggcgttcatgcgcgagcatcggctgacgctgctgcaacaacgtctggatcagatcgacgccgaccggatgaggttggacaacgaggtggccaactgggagaacctcgcggacgaacgcgaggagcgccacagctcgctgcgtgaccaattgaccgccgagaagggcgagctgaccactctggagtcggagctcaaatccttcgaggcgcaggtgacggcccggaaccgcgcctacgaacggtatgcgacgctggtgggcggactgggggagcagacccccgaaacccaggacgagttcgccgcgctgcggatgcgtgccccggagatcgccagggcggcaagagaagccgccgacaggttggccaccacggcacacagcttcttcgccgcagagaccgatgccaggcgcgagttcgaggcggttgtggaagagctggcgagcctgaacacccggcggtcgttgctgccacgcgaagtactggcacaacgcgacggcatcgctcaggccaccggggtcccgtacgccgaactgccgttcgccgccgaactcatcgacgtcgatcccgccgccaaggaccgctgggccggggccgccgagagagtgctgcgcggactgggcatgaccatgctggtgccggctcggcaccgaaccaccatcggcgagttcgtcaaccggaccaacatcggcggggtgctcgaataccgcgtctaccaggaagactcagcggttgctgccgaccctgttcgcggttcgctcgccgagaaactgatcgtcgaccggaaacaccccgccggagcgtggctggcaacagttgtcgcccatggcgctgaacatatctgcgtcgatctgccgtcccagctcgacgagcacacactcgcggtcaccccgcagggattggtgaagtccggccgcgaccgtttccgcaaggacgaccggcgttcggtgtccgaccgcacacagtggatcctcggctccaacaccgacggcaagcgcacggctctcgaagagctcaaagctgagctcgaactccggtatcagcaggcgcggcaggcggctcaggacaagcgggacctgttggagcagaaccgcgaacgcgcgaagaacgccgatgccctgaccggctatgcgtcgtgggcagagttgaactggtggtcgtcgcggcgcgacgccgacgaactcaacgcccgcatcgatcgcgttcgcgagaaccgggtggatctcgccgaactcgaggagcaggtggagatcgcccgggccgattggcgagaggccgtcgctcgggtgggtgcgctgggcgatcaactaggacacatcggctcggactgggatcgatggttcgccgagttcgagcaggtcaagaacgagggcaccaaactcgacgattccgaccgggagtatctcgccgaggtgctcgccgagacgctcgccgacggcggcaagacgctgaccctggacaactacggtgaggtgcggtctgatcttcgcaattcgctcgaagccgttgtgggcaaggccaatgccgaacgggacggtgccgagaaccgaattgtccgcgccgccgaggccttcctgcgggaatggccggaggccgcgtcgaacttgagtgccacggtggagtacgcgtccgatctcgtgtcgattcatcagagcctcgtcgagcacggtctcgcgtcgacacagcaacggttccgacagctcatcaccaccgacatcagtcactcggtctccaacttgtacaaagagatcggcgacaccaacaagcgcatcacacagggcattgccgaggtcaatatcggcctgcgcagggtcgacttcaacgagggcacctacctgcagatcgcgcagctgcacaatcccactgatgagtcgcgggagttcggcaagatcgtcgacgccatgatccgcgacgcgcctgcggccaagtcgggtgacggcgcggtcttggcgcggcagttctaccgcatccgagggctcgtgggccggctcaccggcaccgacgcggagagccgccgctggtgcgacaacgtgctcgacgtccgcaacagctacaccttctacggcaaagagctgagttttgatgccgcaccggacgatccgcccgtgcacacctaccgcaacaccgcatcaaactccggcggcgagcaggagaagctggtggcgttctgtctggctgcggccctgagcttttcactgagtcacggcgaggaccatcgtccggggtttgcgccactcatgctcgacgaggcgttcagcaagtccgacgagaccttcagttcgcagtcactccgcgcatttgaacagttcgggttccagctgatcatcgccgctccgattcgtatggtgggcatcgtggagccgttcatcggccaggtcattctggtggacaagcagatcggcgatacgggtgcccgatcggatgcacgcgcggccacgttcggagaattggcgaaggcgcgggcgtcgtcgggccgacgcaaatcatga

SEQ ID NO: 44314 - DNA, 1542 bp, Xylella fastidiosa 32
atgaccgagatggaccatgccaccctgaccaccttgcgtgagcggcaccccgcctggcggttactgacctcaccgcatgcccccctggtcgcaagctttctgcaccgcgtgttcgtcgcaccaaacgcgcgcatgatcagcgaaaccaagatcacccaggcactagaagacacgctgtatgcgctgcgtgaacacgaaggaccggaagcctacccgaagggcgccctggactacctcaatgactgggccgcacccgacaaaggctggctacgcaagttctacacaccaggcacggatgaagcgcagtttgacctcaccccggccactgaaaaagccatcctctggctgctatccctcacggaacgctcatttgtcggcaccgaatcgcgcttgctgacactgtttgcgctgctggagcaaatgagcaccggcaccgagaccgacccaatcaagcgcctggacgaactgcgcaagaagcgcaacgcactggacatcgaaatcgcccacgtcctggaagggcatacaccgctgctggacgacaccgcggtcaaagaccgcttccagcaattccagcaactggcgcgtgagctgctgttcgacttccgccaagtgcaagacaacttccgccaactcgaccgcaaggtacgcgagaaaatcgcactgtgggaaggcaccaagggcgcgctgctcgacgaaatcatgggcgagcgcgatgccatcagcgattctgaccagggccgtagcttccgcgccttctgggacttcctgctctccagccggcgtcgcgaggaactctccgagcggctggaccaggtgctagcactgcccgcagtggcggcgctgcatccggagccgcgtacccgttacgtacactacgactggatagacgccggcgaacaaacccaacgcacgatcagccaactatcgcagcaattacgccactttgtggagagccgagcttttctggagaaccgccgcattctggacctgctgcacagcattgagcgcaacgcactcggcctgcgtgacataacaccctccgacacagtgatgtatctggatgcgatcggagcggatattcaactgccgctggagcgccccttattcaccccacgcgcaaagccgcgtctggctgatctggtccttgtggccggtacagacgacatcgacaccacccccttgtttaaccaaattgtgatggacaaagcacgcctgcgcttagccatccaacgcgcactgcgcacccaatcgcaaatctccctgcgcaccctgttacaaaccgagccactgcaacaggggttggccgaactggtcgcctacctggaactggcccacgccagcaacagcagtgatccggacggtttgcgcggcatcgtcgacgaaacggtagaagagccgatccgctggcaggccaacaataccgtgggtgagacagtcacccgcgaagcacgcttaccccgcatcatcttcgcgcggcgtgccctctcagatcatcagaaatcatcacaaggagacagagaccatgaaggacacgctgtatga

SEQ ID NO: 44315 - DNA, 705 bp, Xylella fastidiosa 32
atgaaggacacgctgtatgagaatgatgtcgtagagaccccacgcaacgcactgccgacagtgcccgaactgtcgtacctgatggtgtacttgctcaaaggggtgctgtaccgcaaccaagaagaacgcctctggtccagcttgctgcgcctacagacacaggtcagagaacacaccgccgtgctgtggctggatctagtactggaccaagccgagggctacgccttcctaaagagccgccccgacccggacgccgccgaaggcagtgcccgcccgcctcggctgatcgcacgccacgcgctgccctacccggtgagcctgatgctggcactgctgcgcaaacgcatggcggagtccgatgcgcgcggcggcgacccccggctggtgctgacacgcgaggagattgccgaactgatgcgggtgttcttacccgacgccaccaacgaggcacggctcattgatcagctcaacacgaccatcaacaaggtcgtcgacctggggtttttgcgccccttgccctccccctccagcagcacaccaaaccacggcaactacgaagtaagccgcatcttgaaagcctttgtagatgcccagtggctggccgaattcgatgcacgcttggaggcctaccatgcctggttgtccagtgatcaagacgaacctgacaccaggcctgaagcagaacgggagtcaggcgatgcgtga

SEQ ID NO: 44316 - DNA, 1218 bp, Xylella fastidiosa 32
atgagttgggccaccccagccagcctatgcgcccaggtggaacgcctgtggaagcggggcgacttactgcgggcgctggtcacggacacccacgccatgacgtggccgcaccgcctgacgctgcagacgcccagggctgcggatctgtccaaccgcttccaggcggtgcgtgattgggtgcagaccatctctgacaccccgcagattcggatccaatggggggaatggaaccaccgcgtccaagggacacaacggtttcctgaggccgtctatctggacaccctgcaagacgcgttggctttcatcggtaagacgcatgaagcgcagcagtttgaagcggtgtggcagcagaccgcagccacgcagcccgtgctcctggcgtggctgttacgacgtccgacccaggcgctggaggtggccgagcgctgggaacgtcttttagccgtggtcgcctggcttcagacgcatcctcgtccaggcgtctacctgcgccaagtggatgcgcccaaggtggacagcaaattcattgaggtgcacaaaagcgtgttgaccgagctgctggacttggcgttgccgccagagagtatcgagacggccgccagcggcgtgagtcagttcacgcgccgcttcggcttcctcgataagcctgtgctgatccggtttcgtctgcttgacgccacgcagcccagcctgccgggctgcgcggggctgccggacatcaccctagacgcggctcacttcgcggcactgacgctccctatcacgcgcgtcttcatcaccgagaacgaaatcaacttcctcaccttccccaaggtggccggtgcgatcgtcatcttcggcgctggctacggctgggaacagctggcacgcgccgcgtggctgcatgcctgccaactgcactactggggtgatatggatacccacggcttcgtcatccttaaccggctgcgtggctactttgggcacgtgacttctgtgctcatggaccaagacacattgttggcgcatcgcgtgcactgggacgaggaatccaagccgacacgccaggccttggagcacctcaccgcagaagaggctgccgtctacgatgacctccgatacgatcgccaccagcccaggctgcgcctggagcaggagcggattggctttcgctgggtgtgcgatcggctggcctgcttgctctcaacagcccacgtagcaccgccccaggatgcgtaa

SEQ ID NO: 44317 - DNA, 1392 bp, Clostridium pasteurianum NRRL B-598
atgaaggaaattaatatatttgaaatagttccagaaaacttttttattccgctttctagtcaaggaaagactctatatattaaaattatttctttaatatatagattagttcaaaatggtttgtcttatgggattgataaagaaatattagtagatgaaattgaagaatatttaggattaattaattatgatattgaaaatgatgaggatgaacaattaaataataatagggaaaaagcaaattatttaattagaaaacttattagttatggatggatttatccagaacagactaataactataaacaaattataaattttcatgattatacaattgttatcttagaagctttcgtaaaaatagtaagtaaagaatctttagagtatcaaggaaatataataagcattcattctatgttgtattctaatgaaaaagcaggagttgttattaagcaggtttttgaaaatactaaaggaattataagtggattgaaaaacttgaattcaaatataaaaaagtatatggatagattaactaaacagaaaacacctgaagaaattatgcaggagttttttggaaactatactaaagaagtaattgacaaggcatatcatagattaaaaacttcagaaaatgtctcaaaatataggcccaaaattattgaaaggcttaatgaaagcttaaaaagtagtgaatttttaaatgaagctggagagttttatagagaagatgaagaattaggctctttagatgagggaatagaaaaagttaaggatataattcataacataataaatgcatttagtgaattagacgatattatgcatgatattgatagtaaaaatgctaaatacataagggcagcagtaactagggctaaatttttacttaacaattctaaagatatgacaggtcttgtaaaaggaattttagagtacataagtaatgaatataaagagcttgaattaagtttatcagcagattatctagaggaagttacagatttatttactttatattcttatggatatatagatgaaacttctctatatattgcgaacgaaggaaaaaaatcatttaatccaggtaaaatttcaactgataatctttcaaaggaagagcgtcaaagaaagattgatgaatttaagaaaaggcaggaaaagcagtattctccaaagaaggtaaatgaaatagttgatgaacttttaaaagagaaaaagatgattcttgcaagtgatattgagataaatggtgtagatgattttattaagatcatttatataaggctatatggtaatcatattttagctaagtattccataaacagaaaagatgggattgtttcgagtaaaggatttacttttaaaaactttgagatatggaggaagtaa

SEQ ID NO: 44318 - DNA, 606 bp, Clostridium pasteurianum NRRL B-598
ttgatatatgattcattgtccattaaggataaagaggaatttaaaagggtttgtaataaactattgagttattgtttaatttgcaagcaaaaggaagacaccaaaaaggattattattttgtagaaggacataaggatgcaattaatgaatattttgaacccttaggatttgagcttgaaattaataaatctataaaggccgctcagcttattaataagtttggaaataataagatttcactaaaacttattgatagtattgctcttttaatactaaggattttatatcaagaaaaaatgcaggaattatctttgtctcaagtagtgattgtggatatagaagaaatacaaagcaggtttatggctcttggttttaaagatagattaatggataaaacattacttagacaggcattaaggacgttaaagaaatttaatattattgaaaccttggatagagatattactttaagtgattcgagaatcatagtttatccaacaattcaaatgatagtaagaagtgaaaatataactagtatttatgaaaaattagaaacttataaaagaaagggggtaaaagatgatgaagaggttaacggggattag

SEQ ID NO: 44319 - DNA, 3255 bp, Clostridium pasteurianum NRRL B-598
atgatgaagaggttaacggggattaggcttattaactggcatgcatttaaagatgaaacaattgaaattaaaaactcaactcttctatcaggagaaaatggagccggaaagtctacaattttagatgctattcaatttgtcttaacttgttctaaaaataattttaataaagctgccaatgaaaattccaaaagaagcttatcaggttatgtgagatttaaaacaggaagagaagacaatgaatttgaaagaagcggagatatttcagctcacgtagccttggaattttatgaggaaagtaaaaaaaatcattttataattggggccgtgattgattcagcgtctgaaacttcagaaaaggttctttggtatagattagaaaagtgcagatttgaagatgtaactttcatagttaataatgaacctactgatatatctaattttagaacatatggtaaagaagtgaatatgccattttcatcaacaaggatagtagatgctaaaaaagatttttctcacagacttggacggttaaatgaaaaatttttcgaattgcttccaaaggctttagcattcaaaccaatttctaatgttaaagaatttgtatatacttacatattagaagagaaatcagttaatattgatgaacttagggaaaatatacgaacttttaaagaatttgaagacattttaaatgaagtaaaagtaaaaattaaaaagcttcaggaaataaaagttaagtactcttcatatgaaagtattagaaggacaataagcattcatgaatttatggtattaaaagcagaagaagagctattaaaagaagaaattgaacaaaaaataaaagaaattactgcttttaatgttaatattgatacgttaattaacaagaataatgttatttatgatgaaataactgataaaacaaagattgctaataatattcaggccgatttgtattctaattctgaatataatgcgctaaaggctatgaagaattctttagaacaagctgaaaaagattatagacatgaaaaagaaaataaaaatggatttttaaaacaatttagtgaacaaaaatcttatattaaagaattaagcagacttctattggatgcggatactataagtgatttttacaataaaatgatttcgctagatgaaaatagtatagaagaatataaaacaacatcaataaatactgaaaatgtaattgataaaactaaacaggataaggaaaagtatagggctgggaatgagtatgaattaaaacagaaagaagataataggaaagatatagaaaaacaaatttctgaacttgaaaagagaaatcttcaatatcctaaggaagttatacttttaaaagaggaaattataaaggaaacaagaaaactaggaagagaaattgttcccaaaatcttgtgcgaattattggaagttacaaatccagtttggaaaaatgctgttgaagggtatttaaatactcagagattttatcttattgtagatgaagaagattttgattcagtacttaaaatttatgagagattaagtaaagcacaaggattacattcagttggagtaataaacactagggggcttgaaaaatatgataatcctttagagaattctttagcagaggtggtagtgtcaaaaagtattgatgccaaaagatatattaatatgatactcggaaatgtaattagatgcactcatgtttcagagttaaaagaacataaaacatccattactcctacatgtatgatgtataaaaataatgttgcaagagccataaatccaaggatatataaaactccttatataggtgaagatgcttataaatatcaactagagcaggcgaaagataatcttaacatattattatctgaaattaatattttaaaaaaagatattaatatagttacaaatataattaaaacaattaataagcttaggcttgaaaacttaagggaaaagtgtgatgttttaaaaagaatagtagatataagtaataaggtttcaacacttaaggacgagattcttgaattagaaaagaataacagctatatggctcttcaaataaaacttaatgaagttcaagaggaaattgaaagtttaaatttaagtaagaagaatatagaatatgagttaattaataaaaaaggaaatttatcttcaattaataacagtgttgatgaaaaaagaagagttctttctataaaaaaagggcacgtagaggaaactataaataaaatcggctttctagctaaagaggcagaggagagatttattaaagaaactgaaagtaaatcttttgaagtcattaaaaataattttaatgtgagtaaggaaggaaataaaactaaattatcaaaaactgaagaagatttaaagaatcttcaaggatcatataatattacttatgatttcggagcagaagttgggataaatggtattaatacttttttagatgaacttgataatcttgtaaaaagtaaagttatcgaatatgaagagcaagttaaagcttcaaggaaaaatgcagaagaagaatttaaggaacactttttatctaaaattcaagaaaatatcaatactgcaaaatctgaatttaagggtttaaataagggacttaaagatgttaaatttggaaatgaagaatacgagtttaaaattggaaaaagtaaagaaaacaaagaatattatgatatgataatggataatgaaaatataggtgaaggtttcactttatttagtacatcttatgaaaataagcataaggaactgctaaatgaattatttgataagttaactttagataatgaaagtaatgaagcagaacttattaaattaactgattatagaaattatatgagctatgatatagagattaaatataatgataatactacatcattattttctaaagtatgcagggagaagagtggaggagaaactcaaactccattttatgttgcaatggcagcatcatttctgcagctttacaaaggggtatcttcatcttcagaatctataggaattatattatttgatgaagcctttgataaaatggatgatgcaagaattatgtctatgatggaattttatgataaatttaattctcagctgcaattattaataggagcaccaccacaaaaaattgagcctataactccttacgtaaatacagtgcttcttgcaataaaagcagataaattcagtattatagaggatatgataaatgaaaaattataa

SEQ ID NO: 44320 - DNA, 1182 bp, Clostridium pasteurianum NRRL B-598
atgaaaaattataaaaaaatactattaaataagttaattgattcttatgaaagcagtgtcatttataagggggatgcgttaagagatacacagatatatttgaaatttaatttgaaaagtataaaggaatattttgatgaactaaattacaaatataaagaagaaattgatgtagcttgtaatcagctagaaattgaaaaatttataaaagtatataaaggaaaaggatacaaaagccatattatagaaaagattcaattaaaccttgagaatatagaagcagcatatttatatctcaataggaaagaaaaaaagcaaaaagaagatgaagtatcattattattggaaagttataaagaaagagaagatgttcttggaaactttgcaaaatatattacatatagacttaaaagcaatggatctgtaaagaaatatttagatattgaaaattcattagaatgtaaagatatattgaaaggtatagacgaagtactaaaacaagatgatgaaatttttagaaggaatttttcagttaaagtttatggcgattccaaaaggtatgaggctatagagagtaaagtaattaaaattataaaagacttttctagtgatgaagttcttaatgattataacattttgaagaattatacctatgtttattttaaaggagatataagcttgaggcttaaagaaagtaaaataaatgcaaatgattttcttggaggtatagctgtaagttcaaaggatatagaaaatattaaagaaattaaagtttcaggaagtaaactagtaacaattgaaaatttaacatcatttaataattatactggagatggaggtgtaatttatttaggtgggtatcataatagtgttagacaaaatttattaattaaaatttattctgaaaatcctaatacaaattattatcattctggtgatattgatgccgggggttttaaaattttagttcatttaataaaaaagacaaaaataccatttaaaactctaaacatggatagcgaaacattacgtgaaaatattaattatgctaaggaacttacagctaatgatgtaaatgagattaatagattgttagaaagtgaagaatataaggactatacagacgttctatctacgatcattaaattgaataaaaaattagagcaggaaataattttttga

SEQ ID NO: 44321 - DNA, 1533 bp, Xylella fastidiosa 6c
atggaccatgccaccctgaccaccttgcgtgagaggcaccccgcctggcggttactgacctcaccgcatgcaccgctggtcgcaagctttctgcaccgcgtgttcgtcgcaccaaacgcgcgcatgatcagcgaaaccaagatcacccaggcactggaagacacgctgtatgcgctgcgtgaacacgaaggaccggaggcctacccaaagggcgccctggactacctcaatgactgggccgcacccgacaaaggctggctacgcaagttctacacaccaggcacggatgaagcgcagtttgacctcaccccggccactgaaaaagccatcctctggctgctatccctcacggaacgctcctttgtcggcaccgaatcgcgcttactgacactgtttgcgctactggagcaaatgagcaccggcaccgagaccgacccaatcaagcgcctggacgaactgcgcaagaagcgcaacgcactggacatcgaaatcgcccacgtcctggcaggggatgcaccgctgctggacgacaccgcagtcaaagaccgcttccagcaattccagcaactggcgcgtgagctgctgttcgacttccgccaagtgcaagacaacttccgccaactcgaccgcaaggtacgcgagaaaatcgcactgtgggaaggcaccaagggcgcgctgctcgacgaaatcatgggcgagcgcgatgccatcagcgattctgaccagggccgtagcttccgcgccttctgggacttcctgctctccagccggcgtcgcgaggaactctccgagcggctggaccaggtgctagcactgcccgcagtggcggcgctgcatccggaaccgcgtacccgttacgtacactacgactggatagacgccggcgcacaaacccagcgcacgatcagccaactatcgcagcaattacgccactttgtggagagccgagcttttctggagaaccgccgcattctggacctgctgcacagcattgagcgcaacgcactcggcctgcgtgacataacaccctccgacacagtgatgtatctggatgcgatcggggcggacattcaactgccgctggagcgccccttattcaccccacgcgcaaagccgcgtctggcggatctggtccttgtggccggtacagacgacatcgacaccacccccttgtttaaccaaattgtgatggacaaagcacgcctgcgcttagccatccaacgcgcactgcacacccaatcgcagatctccctgcgcaccctgttgcaaaccgagccactgcaacaggggttggccgaactggtcgcctacctggagctggcccacaccagcaacagcagtgatccggacggtttgcgcggcatcgtcgacgaaacggtagaagagccgatccgctggcaggccaacaataccgtgggtgagacagtcacccgccaagcacgcttaccccgcatcatcttcgcgcggcgtgccctctcagatcatcagaaatcatcacaaggagacagagaccatgaaggacacgctgtatga

SEQ ID NO: 44322 - DNA, 723 bp, Xylella fastidiosa 6c
atgaaggacacgctgtatgagaatgatgtcgtagagaccccacgcaacgcactgccgacagtgcccgaactgtcgtacctgatggtgtacttgctcaaaggggtgctgtaccgcaaccaagaagaacgcctctggtccagcttgctgcgcctacagacacaggtcagagaacacaccgccgtgctgtggctggatctagtactggaccaagccgagggctacgccttcctaaagagccgccccgacccggacgccgccgaaggcagtgcccgcccgcctcggctgatcgcacgccacgcgctgccctacccggtgagcctgatgctggcactgctgcgcaaacgcatggcggagtccgatgcgcgcggcggcgacccccggctggtgctgacacgcgaggagattgccgaactgatgcgggtgttcttacccgacgccaccaacgaggcacggctcattgatcagctcaacacgaccatcaacaaggtcgttgacctggggtttttgcgccccttgccctccccctccagcagcacaccaaaccatgacaactacgaagtaggccgcatcttgaaagcctttgtagatgcgcaatggctggccgaattcgatgcacgcttggagacctaccgtcccgtgctatcgggcgatcaggacgatcaggacgatcaagacgaacctgacaccaggcctaaaacagaacgggagtcaggcgatgcgtga

SEQ ID NO: 44323 - DNA, 3435 bp, Xylella fastidiosa 6c
atgcgtgagacctccacactcggcctaaatttcgttgccgacgacaagcgcgtcggcttccggctacagcacctagaagtagtgaactggggcaccttcaacacccgggtgtggtgctacaccctgggcgggcgcagcggcctgctcaccggcgacatcggttcgggcaagtccacgctgattgacgccatcaccaccctgttagtgccagcgcagcgcgtggcctacaacaaggccgccggagccgatgcccgcgaacgctcgttgcgctcctacgtgttgggctactacaagagcgagcgcaacgatgccaccggcactgctaagcccgtggcactgcgcggtacgtcgaactactccgtcatcctcggcgtcttccacaacgtcggctatgacaaggtcatcaccctggcccaggtcttctggctgaaggactcgcaaagccagcccgcccggctgttcgtggtggcagaacgcgcccttggcatcgccgcggacttcaacaatttgggcggcgacatcaagaccctacgtaagaagcttcgcgatgcagggtgcgcgctgttcgacagcttcccaccctacggggcgtggtttcgccgacgcttcggcatccaacacgagcaagcgttggagctgttccaccaaaccgtctcaatgaagtccgtgggcaatctcaccgacttcgtgtgcagccacatgctagaaccctgtgatatgggcagccgcattgaggatttgatctgccacttcgacgacctggaccgggcgcatcacgccgtgctcaccgccaagcagcaggtgaagttgctcgtccccctggtcgacgacggccagaagcaccagacgcagctaggcaacattcaaaccttggaggctggacgcgacacactgcggccctacttcgcacagctcaagggggaactactgaagcaccgcctggacgcactggcagccgaagcggcccagctaactgtgaagatccagcacctggaagaacagcgcaagaccgcagacagtaaagtcacccaactgcaacaggatctgcgagacaacggcggcgaccgcctggaaaagctggcggcagagattgagcaactggagcaaaccaaggcacaacgccacaagaaatccgaccgctaccaaacgctactgaccaagattgacgagacagcgccagccgatgcaataggcttcttcacccagcaacagcgctttgcgcaacataccgaggaattaaacgcagccattgcgacgttgcataacgacaagagcgaaaaggatcgtgctctctacgatgctcgggaaaagcacaccaccctattggcagaaatcaacagcctgcaacagcgccagagcaacatcagcgccgcccagatccgcatccgtcatgctctgtgtgtggcattgtccattgatgcggaggcattgcctttcgcgggcgaactcatccagatgcgtgaggacgcacgcgattgggaaggcgccgccgagcggttgctacacggctttggcctcaccctgctggttccggacgcgtactacaaggctgtcgccacgtgggtgaaccacaaacagttggatggccgactggtgtatttccatatgcgtccacgcaatacgacgcaggaggcggcgttacatgcgcaggcgctggtacacaaactcatcatcaaaccggagtcaccacactacccgtggctgcaacaggaacttcagcggcgctgcaacgtcgtctgctgtgacaccatcgagcagttccatcgtgaggtccgcgccatcacgcaggccggccagatcaaagaccccagtggccgccatgagaaggacgaccgccatcgcatcgatgaccgcagccgctacgtcctcggctggagcaatgccgacaagctgcacaccttgaacgcgcaacggcaacacctggaagacagcatgggcatgttgggacaagacatcggcaccattcaacgggaatgccagaaacaacaggaacggctggatgcactcaacaagctgggggagtacacggactttgtggacatcgactggatgagcctggtccgccagattgccggacgcaaagaggaacaggaacagctccaagccacatctaacattttgcaaatcctgcaacagcaactcacagcggcgcagacgcaagtcagcgtgctggagcgcaagtgcaagaacgcgtggcacgagcagggcgaggtcaagagccaacaaaaaacggcgcagcagatgtggaatcaggccgttagcgcttgggatgatgcgccgctgagccaagcgcagatcgcgctattggctggctggcgccagcaagcgctgggggagcacgtgctatcggtcgaatcttgcgacaaccacgagcagcaagttcgccaatggctacaaaaacgtatcgatgcggagaacgctcacctgagacaactaaatgaccgtattacaggcgccatgcaccgcttcaaggatcagttcaaggctgagaccgtggagatggacgcagacctggcggcgctgccagagtatgcgcggatgctcaacgacttgcagaaggacgacctgccccgattcgaagcgcgcttcaaagcactgctgaacgtcaacaccatcaacgagatcgccagctttaacgcccaactcaaccgtgagcgggagacgatcaccgagcgcatcaaggacatcaaccaatcgctgcacggcattgactacaaccaggatcgctacatcaaccaattactgcacggcattgactcccaaaaggggcgctacatcacgctgctggcacaacccagcccagacgctgagatccgcgacttccagcaagatctacgggcatgtaccgaaggcacgttgaccggttcggacgatgagcagtattcggacgccaaattcctccaggtcaagcgcatcattgaccgcttccggggccgtgaagggctgtcggatgccgaccggcgctggacggccaaggtcaccgacgtgcgtcactggtttgtgttttcggccagcgagcgctggcgcgccgatgaaagcgagtacgagcactacgccgactcgggcggtaaatctggcggccagaaagaaaagctggcctacaccgtgttggcggcaagcctggcctaccaatttgggttgaagtgggatgaggtgcgttcagaatcgttccgcttcgtgattattgatgaggcgttcgggcgcggctcggacgagtcagccgagtacgggctgcgcctattcgaaaagctcaacctgcaattgttgatcgtgacgccgctgcagaagattcacatcattgagccgttcgtctccagcgtggggttcgtgcacaacaagggcgggtgtgattcgcagttacgctgtctgtcgattgaggagtaccaggcggagaaagccaatggaagcgcgacgggaggcgccgcagccccatga

SEQ ID NO: 44324 - DNA, 1206 bp, Xylella fastidiosa 6c
atgagttgggccacaccagccagtctgtgcgcccaggtggaacgcctgtggaagcggggcgacttactgcgggcgctggtcacggacacccacgccatgacgtggccgcaccgcctgacgctgcagacgcccagggctgcggatctgtccaaccgcttccaggcggtgcgtgattgggtgcagaccatcgctgacaccccgcagattcggatccaatggcgggaatggaaccaccgcgtccaagggacacaacggtttcctgaggccgtctatctggacaccctgcaagcggccttggccttcatcggtaagacgcatcaagcgcagcagtttgaagcgctgtggcagcagaccgcagccgcgcagcccatgctcctggcatggttgttacgacgcccgacccaggcgctggaggtggccgaccgctgggaacgccttttagccgtggtcgcctggcttcaggcacatcctcgtccaggcgtctacctgcgccaagtggatgtgcccggagtggacagcaaattcattgaggcgcacaaaagcgtgttgaccgcgctgctggacttggcgttgccgccagagagtatcgacacggccgccagcggcgtgcgtcagttcacgcgccgcttcggcttcctcgacaagcctgtgccgatccggtttcgtctgcttgacgccgcgctgcccggcctgccgggctgggcagggctgccggacatcagcctagacgcggctcacttcgcggcactgacgctccctatcacgcgcgtcttcatcaccgagaacgaaatcagcttcctcaccttccccaaggtggccggtgcgatcgtcatcttcggcgctggctacggctgggagccgctagcacgcgccgcgtggctgcatgcctgccaactgcactactggggcgacatggatacccacggcttcaccatcctcaaccggctgcgtggctactttgggcacgtgacttctgtgctcatggaccaagacacattgttggcgcatcgcgtgcactgggacgaggaatccaagccgacacgccaggccttggagcacctcaccacggaagaagctgccgtctacgatgacctgcgatacgatcgccaccagcccaggctgcgcctggagcaggagcggattggctttcactgggtgtgcgatcggctggcctgcttgctctcagcaccaccccaggatgcgtaa

SEQ ID NO: 44325 - DNA, 1452 bp, Salinispira pacifica
atgacatatgatgatctacgctattatcacaagaacaatgcagcctggaaacttcttgctgcaactaccgcaccattaattctaggtttttttcagcggatcatcgataaatactcccgaaatcctgtatcgcgtacagattatctatatgaacttgagtcttatttaggacttttggaacgtgattatcctgaggagagtttccagaccccggaaaaatatctcacacaatggagcagcggggatagggggtggctggacagtttttatcctcgggggaaagatgagccacactaccggatgaccgcaggaatcgattctgccctccaatttctgcaggcccagctgaatcccagctatacggctaccgatacaaagctggccaccctcttgcgggaacttgaaaaccttgttacccaaagcgaagaggatccgacactcaggcgaaaagcgcttcgcacacagataaaagctctccagaatcagatgaatgatattggagagaaccgtatgaaaatgatggatgatcggactgtccaggatacttatcggcatatatccagcatcgcaaactcattggtaaccgatatccgcagtgtgacccgggagttcgaggaactgaataagagcatccgtgaacaggttgcccaggccggtgaaaatcgggcagaaattatccgcgatattctccagttccgtggaagtatagacaattcacctcaaggccagtcgtttcatgcatttggccgtcttctgatgaatgcgaatcagaatgccagtctccaggaacatattggtaaaattcattccttagctgccgttcagaaactcgacacttcgattcttgataacttttattttgaacttcttgaagccaatgaaactgcccagaagaccctttcctatgtggctcagtcactgagacgctttcttgaggaacagtcaacacgggaatcgaggagaatgcatcagcttctcaatgatattgaacgactggcgattacacttgcgaagcatcccccccgggagtttgtactggagctcgagcatcgcaaactcgatatttctgtgcccttcgatcggccgcttttttccccggctgcggagttaaaggttgaaggtgtgaccgataccgcagtggatttacccgatctggtggatattattcctgaaacacagatgaatcttgaattacttacacgacacatcgctatccagctcagcaaggagtcacagacaagtttgcagagactggtggaagcatatcccgttgctgggttggaagaaatagtcgggtattttgctcttgtcgattcgcagtttcagggaattattctaactgaagacggggtcgatataagctggtatgaccaggcggggaatcggcgggttgcccggtcagtcccgaatattattttttataagcctgaagacgaggagacagcaccttga

SEQ ID NO: 44326 - DNA, 627 bp, Salinispira pacifica
ttgagcataatggacgaaacaaatagtgaactgtctgatgtccttataactctgctgaagggaacctggatattgaggcatggtgaccagaagcagcagcgtctgtgggctatcctgaagaaacggctgaaagcggtgagcaatcatctggagcttcttcgtctcaaactcatcgtcgatgaagttgaggggtttgcccatctacgcgggatggatattgaagaaggcggtgagggaccccggcttacgatgcgtacccagttgccgtaccgggtaagctatctgctggttatgctgcggaaaatgctggatgaatacgatgcatctgatggatcacatcgctgtgtggtaagtactgaagtgatttttgaccgtatccgccttgccaacaaggacggtacgaataaagcccgcatgaaggatgagtttagtgctgatctgaaaaaagtaaaggatatgggttttatctctcccattccaggggataaggagagggtcgaaatcagtcgcgtaatcaaagcctatgtggatgctgctttggtgagctccatggccgagcagcttgaaatatatgcagaatatgccaataaacggtatggcgacagcgagggagcaccatccgaatga

SEQ ID NO: 44327 - DNA, 1182 bp, Salinispira pacifica
atgaaccaggaactattcagggctatcgccagaagttatgaatctggctcagcttttcaggatatgtattctgactcggtttacccacttcagatcgtcctcaagcggcctttccccttatctcagattgccagacgcatggatgagtttctccggtggaaacacgaaattgaggaagattgcgggagattctccctctctctcaactaccgggaggagggcagcagagcttacgggagacagcggataccggaatctgttctcatctctgatgctggaacacatgctgatattcttggccgcagtacagaatattcccgggttaggtcaattttggagcaaatagacagggaagctccggagcttttgcgatgggacggcgaaaactatcctgtacttcttgaaatagcacctgatctggatgcattgctctgtgtataccgctggcgggttaatcatcctgatcagaccccgtttttaagagagttgcaccttcatggggtccataccaaactgatagaaaagcacaaacgggtattggccgcatggttcagaatcggaatggatcctgaatggcttgaacagcggaagcatttcaaagattttccgaggcgatacggatttgcccgggagagacgaaggttcagattccgtttcttacaccccgatgattcgccattgcaaggcattctcgacttcgaaatatttcttcacgaaatgaaggacaatctcctcaaacacatacagaacatcatcatcatagaaaatcatctcagctttctctgtctcgaaccacggaatggagtattggccatcgatggtatgggatatgccgcagtcgatctggtaaaacaggattggataagtagtaaaacaattctgtatttcggtgactgcgatgcccatggcctggatattctctcccggctgcgagccgtgcgaccggatatcatatcggtatgtatgtctgtaagtacctttcaagattttttcagcttcgctaccatagattcaacccccgccattccgcttcctgagcacctgaatagtgatgaggttcgactgtttacgaatcttcatgagaattcactgaaaggtaatccaaacagactggagcaggaacgaatttccattcagtatgtgatgagtgagatggatttaaagttggctgatccgtcttaa

SEQ ID NO: 44328 - DNA, 1371 bp, Ruminococcus lactaris CC59_002D
atgcagtcacattatgaaatcccggatacattttggagcttattccgctcggtgaatagagaaatttatatagaatcactgctgtgcattaatcaggaatatgagtacagcaattatttcctgacgagagaagtctgcctgcagatcttaagtgataggaatacgcagaagaggatcaggctggagcgtgaggagtcagagacggagctggatctgctggagactacttcttcccggattctgaactggctggtgaagacgggctggttaaaaaaaattgaagattatacttcactgacaacgaatatcgtgatcccggattatgcggcgatttttattgaggcatttgagaagctgtcttcgcaggagctggaagagacggatatttatattcagaatgtctatgctacgttgtattcatttcagaataatccgaaagtcaacctgaatatgctgcggactgccctggtgaatacaaagaagttgaacaaagccctgcaggatatgcttcataatatggataagttttttgagcggctgctggataagaagacgtatggtgaactgcttcgggagcatttggacggatacgtggaagaggttgtgcggaagaaatatcatattcttaagacttcggataatttttatatttacaagatggatattaagaaatgtctccgggaaatgcgggagaatgatgaatggatcgaaagcgtgcgtgcaagagcgaaagctgcaggggatgagaaagaagatgtgctggagatcctggatcagattgagcgtggatttgatgatattgaacaccggattgccaatatggataaagagcatacaaaatacgtgcgtgccacggtgacacgtctgaactatctgctcagcggtgagacggatacaaaggggctggtggtacagcttctgaatcggatttcggcagaggagaacggtgtaaagaaggaggagaagctgcggaagacagcggaacggatgaatctttcttatctggagatcctgtcagagaaatctttgtataagagaagaaagaatcggacggatttcatcagtaagatggaaacggaagaggagacggaagatctgaaccgtgaagaggtactgaagatgaaccggattcagatgcgatacagccgggcggagatcgaagaatttatccaggctcatatgaccggggatatcatggatgcaggggcaatgaaggatatgacggatgaggattttgaaaaactgatccttgcgtatgattacagtacacgtcggaacagcaaatatgctgcgttgaatgaagaagacaggatggtggagaacggcaggtatcgttatccggatctgaaatttatacagaggaggccctga

SEQ ID NO: 44329 - DNA, 645 bp, Ruminococcus lactaris CC59_002D; identical to SEQ ID NO: 42150

SEQ ID NO: 44330 - DNA, 3351 bp, Ruminococcus lactaris CC59_002D
gtggagacgagacagcagttcaaggcactatcgaagatatgcctgaataactggcattatatagacagaaaaatattaagctttcacgaaggaatcaatttctttacagggcattcaggaagtggaaagtcaaccgtgatcgatgcgatgcagcttgttctgtatgcgaatacagacggaagaggattttttaataaggcggctgcggatgattcagaccggtcactgatcgagtatctgcggggaatggtgaacattggtgagaacaatgagtcccagtatttgagaaataaaaatttctccagtacgatcgtgctggaatttacagaaacggaaagccggcagagtcagtgcgtcggggttgtatttgatgtagagacagctacaaatgagatcagccgtcttttcttttggcacaaaggcgggcttctggaaaatgattaccgggcagataagcggtgtctgacaacaggagagatccgggaatatttgcagagaaatttcagtacgacggacttttactgtgggccgagtaatgaaagattccgcaagcagctttatgacatttatttaggcgggctggatatggaaaaatttccacggctgtttaagcgtgcaatcccgtttaagatgaatatcaagctggaagattttgtgaaagaatatatttgtatggagcaggatatccatattgaggatctgcaggaaagtgtgatgcagtatggaagaatgcggagcaagatcgaggagacgctgaaggagatccggcatttggaagagatccgtgacagatatgccgtgtatcagacccaggtgaaggaagttgaaaatgatcagtatcagatcgaccggctggaaatcttacgactggaggcgaaactgcaggaactgctggataagatcaaagagagtcaggaagatatcggtcggcaggagcaggcaaaagcagaactggagacaaagcagcagacagtccagggacagtatgaggaagtgctgttaaggatcgccaacagtgggtattctgcgttggaacagaagcttggaaatgtgaatgagatgctggagcatttgcagttgagccgtgcaaaatggcagaggacagcagcagggcttgcagcatggaaatcaaaagatgtgactccgaatcagacgctttgggatattgaaaaatttgaaactgtggcactggatgaggaaactttgaagcggcttcagacaagccttgtacagattcgggaagaactgggggaagatctgaaggatgcagaagcaaagttaagagtcattaagaaagaagaaaaggatgcaagagaggaattaaaggaattaaagcaggggaggaaggcatatccgaaggaagtggaggaagcaaaatatgagcttcgtacccggctgcaggagcgttgtggcaggcttgttccggtacagatccttgcagatcttctggatgtgcgagatgaaaaatggcataatgcgatcgagggatatatgggcaataataaacttctgctcgtagtggaaccgaactatgtaaaagatgccatggaaatttatcagggaatggataagaagcggttttcacgggcagcagtgctggatacagagaaggtcctttccagtgataaaaaggcaaaggcaggttctctggcagaggaggtgctggcgaaagaagagtatgtccgggcgtatattgatttcttccttggaaatgtgatcaaatgtgatggaattgatgaacttcgtgaacagaccatcggaatcacagcagattgtatgttgtatcaggggtatcgtctgcagcacatcaacccggaaagttatacaaggcgggcatatatcggtgaaaccagtatgcgtcagagaatccgcagactggaggaacgttgtgatgctttacagcaggaacgtcttccgctgcaggaaatgaaggaagaaattcagagggtactgacattagaagcactttcccaaccggcagaggagtacatgagctggaagaaagagatcgatgaaattcagaaaaaggaaagagaaaaacggcagatccaggaagagatgaagaaactccaggatggagaggtttcggctctgaaagctcagaaggaagatcttttgcggcagcaggcacagctcaagcaggagctggaggagctgatcggaaagatttcagagagcagaggaaatgcacagcgaaatcagaatttttatcagaccgtggaaaccgaattgcaggacagacagaaagaatttcacgaagatccgcagaaagaagaaggattccgggcctatctggatacgaagcgttctgtaaattatgagtacctcagacagcagcggagtaaagaactggacgcagttgaagttgagaaggacaaggcatacagtcagcttgtagacaggagaaccatctatctgaagctgtatccgaaccgtacattttctcctacgattgaagagaatacaccttatgaaaagctcctttctgaactgcagtgtgatgagctggaagatttcaggctggcggcaaaggaacaggcaaaatcagcggtagaacattttaaagaggatttcatttacaagatacgaagtgccatcaaagaagcctaccagcggagagatgagctgaaccgtatcatcagtcggctggattttggtaaagacaaatatcagtttgtcattacgaagaataaaggaccggacggaagatattataaaatgttcatggatgattcgttgagcattaatccgtcccagctttcggattctatggaaaatcagatgaacctttttaccatggaacacgatgaggaatatggggatatgatgaacgagttgatcaatatctttattccgccggaagatgcgacaagagaggaactggatactgcaaagaagaatatggagaaatatgcggattaccggacgtatttatcctttgatatgcagcagatcatccacggtgaaaaggatatgaagatcggactgagcaagatgatcaagaaaaattccggcggagagggacagaatccgctgtatatcgctctgctggcaagttttgcacaggtctacaggatcaatctgtcaccgaagatccgcagaccgtctacaatccgtcttgtagtgctggatgaggcattttccaagatggacgcagagaaagtggcaagctgtatttctctgatccgtggactgggatttcaggcaatcatcagtgcgacgaatgataagatccagaattatctggaaaatgtagacaagacgttcgtctatgcaaatccgaataaaaagcatatttcaatccaggaatttgaaaaagttgagtatgaccagttgaaggttgaggaatag

SEQ ID NO: 44331 - DNA, 1224 bp, Ruminococcus lactaris CC59_002D; identical to SEQ ID NO: 42152

SEQ ID NO: 44332 - DNA, 1365 bp, Ruminococcus gnavus CC55_001C
atgcagttacgatacgagatcccggacacattctggagtttgttccgttcggtaaaccgggagatttacatggagtcgctgctggtgatcaatgaggaatatcagtacagtaattattttctgacgaaagaaatctgtgtgcaggtattgagtgatatgaatgcacagaaacaggttttgcttcagcgggaggagaacgagacggattttgacatgctggagacgacagcatcccgcattttacggtggcttttaaagaccggatggctgaagaagatcgaagattacagtacgatgaccacaaatattgtgataccggattatgcggcggtttttattgaggcatttgagcgactcacgtccgaagagctggaagaaacagaattatatattcagaatgtatatgctacgctgttttcctttcagaataattccagagtaaatctgaatatgctcaggacggccctgatcaatacaagaaagctgaacaaagcgctgcaggatatgcttcataatatggacaagtttttcgagaggcttttggatcaggagtcttacggggaacttttgcgggagcatctggacgggtatgtggaagaaattgtcaagaaaaagtatcatattttaaaaacatcagacaatttttatatctacaagatggacattaaaaaatgtctccgggatatgcgggaaaatgaagaatggatcgaaagcatccggcagaaagcaaaagcagcaggagatacgaaagaggatgtgttagatctgttggatctgatcgaacggggatttgatgacattgaacacaggatctccaatatggacagagagcattccaaatatgtgcgggcaaccgtgagccggatgaattatctgttaagcggagagactgataccaaagggctggtggtgcagcttctgaataaaatatctgcgcaggaagaaccggagaagctgcttacggaagcaggaaaacggatgaacctgtctctgtttgagatgatttccgaaaaatcattgtataagagaagaaaacagaggacagactttatcagccagatgggacaggatgaagaatatgaagatctgaaccgggaggatgtgctgaagttaaaccggattcagatgcgctacagcagacaggagattgaggattttatcgaagagcatatggaaaacgaagtgatggacgccggaacacttcatattacagaagagacagcatttgaaaaactgatcctggcatatgactacagtaccagaaagaacagtaaatatcgggtattgaatgaggaggagacagtcatccaaagtggacagtatcaatatccggcattaaaatttgtgcgaaggagaccgcaatga

SEQ ID NO: 44333 - DNA, 645 bp, Ruminococcus gnavus CC55_001C; identical to SEQ ID NO: 42616

SEQ ID NO: 44334 - DNA, 3357 bp, Ruminococcus gnavus CC55_001C; identical to SEQ ID NO: 42617

SEQ ID NO: 44335 - DNA, 891 bp, Ruminococcus gnavus CC55_001C; identical to SEQ ID NO: 42618

SEQ ID NO: 44336 - DNA, 1392 bp, Marinomonas profundimaris
atgctatttaaacatctaccagatgagatttttcaagcactcagtggctcaaatagagccttaattgaagcggtgttacatgatcttgcagacgttttttacgatcatgccgaagacccaataaaagacaagtcaacaattatagaatccattgaagacacccttcataaattggatacgcttgcgtggcatgatgaccaaaaggaatctttcgactcaccaaaaaccattcatgattacgcattaagaatatatcaccgtttggtcaatactggctggttagttgaagagcaagagctgtatcgtgtcagcgtgttaatgacgcctcagatttccatgttgctgcgttcgttagtagaaataggccgtcacggtaaacgcaattatggtgccactgttttaagcatcctcagtaatttagaagccgtcgcaaagcagccaaaagagcgcggagtgacacttcgtcaatccgcagaggcttctcgagagttttcggcgcacttgaatcaaatactccttggtattcgaagcttgcaaagagagctatttgcgagtcgagacccaaaagcaattgttgcgggattctttgatttatttgtagaaggcattctcattgccgactacaaaaccattaaaaccagtaataacccttttcgttttcgccgccagattcttgaacttactcaagactttttagccaatcctgacactatggggctcgttgctcagtgctatgtcgatcagcagcttattacgatggcagaagcacaagccatggttgagaaagactgtcgcgatatcattcagacgttcagcaacatagagcaacgtttagagcgaattgatgaatatcgataccgtttggaaaaacgtgccgcagacaccgctcgatatatggacagttctcgtcctggcatggcaaacaaagtcgccggtatcattactgatgtcgcaaaatataaccatttacccatattgaaagaagtggtgggagcgcgttttgtcggaatggcttctgcggcacaacccaccaaaagacgcgagccgccgccgccgcgagtgatgacgcctgccgaagtgtctgctgacgccatcaaagtacgcgaccagcaacgccgtttccatgaagctagacaagtcaccattccaaaaatgcaaagctatctagaaaaacaaatgtcttctggtaacaacaaacacatcttagatttcacgattgaatcagttgaagattttgtgtgttttgaccatttacgctatatcggttcacttggcgttagcgccaaaaaactagaagacgcatttgaaatacactttactaatcagtatttggatgtgcatgagttcgttgaatgtcgcgaatttaatgtgattcgtaggagcaaagcgtaa

SEQ ID NO: 44337 - DNA, 648 bp, Marinomonas profundimaris
atgcttagagaattaaaaaaagtcgttgaagagtccggtaaagacgcgcaagaattccagcagacagcaaatttcgtcatcgctaatcaattcgctagtgcctataaacacggacaaagaaagcattaccttcttttagaatcttaccaagaatactttgatcgcttgtttgacgccttgggcatgaaactttacatcaatgaaaatgagcgtcttgctggtgtattacccatccaaaaagaagcgtttgtccgtttgaaaacagacgaaacattgttcctattggtgcttcgtcagatttatgaagagaaaattgaaaactttgaagtagataatggctttgttgcgaccaatactcacacgattttggatcgttttgtgcaattggtaaaacgagaaatccccaacgaaacacgctttaaagatattttggcgttgtttagccgtcatggcattgtcattcgtggtaaatcctacgaagaagacagcaaaaaccagatgatcaacatcacacctgtggtccgacttattgtgacagaagcgtatttgagacaacttgagtcttttaatggcacagatccagaagaagatgatgtatcagattcagacattgaaacagaagcaacgccagaaacgactcaagactag

SEQ ID NO: 44338 - DNA, 3417 bp, Marinomonas profundimaris
atgaaaaagttaaatcgaatcgtattagtcaattggtacctactgggtgctgaagaaattaatattcgtggcaataccgctattgttggtccaacaggttctggtaaatcgtctttgcttgatgcgattcaaacggtactcactggcgccagcaaacgccatcttaattataacgccagcgcaaatgacggaaaagccagtggacgaagcatccgctcttacattttgggaatgatcgactcaggtcaagccaatgtaaaatcattaggtactcaaccaagacaagatgccaccagctatcttgcgttggtgtttgaagacagcgttacgggtaaagaatcaaccgttggtttgacattaagcgcatctttggcgtcgccagaagaagatgtattaggccgttttgtattaccaaatttcggcgcaagaaagttagattttatcgacgcaatggaagggaaaagctacaaagcaaaaccttggattgaagttcgtgagtcaatgaaaaaagtctgtctagacccttatatcaaatctggtagcgcgtctgccactcaatatattaatcgttatcttgaagagttaagtccaagcgccgatcaactgatcacattggacagtttccttaaaaacttcaaaaacgcattaaagttcgttccgattgcatcgccaactcgttttgttcaggatttcgttttagcagaagcaccgttacaagttggcgcgtaccagaaatcattaaacgaatatcgacacttggaagcgaaaacgctggaagtgtctaagcgcatcgatgatctcaaactcattcagctggattgcgagaaaaaacatcaacaagagcaaagtgcgatcaattatcagtggatagccaccgaagcgcgctttgatgagctgggtagcaaacaagacgatatccaagatcagtacgagctgcaaaaagaacgcgaagaagaaattgaagaagagctcgcaacgcaaggcagtttattaaaacagctgcagggacagttattacgcttcgaacaacaatacgaacattctgatgttggcttgaagttgcaacaactggaacagaacaaaaagttattggtactacaaggtcagcaagaccaaaaggccattttgcaagttcgtcagcttactttgcttttatccgcactgaactcttttgaagacttactttcaaaagaaaccacgacgttggtaaaagagttttctgaatttaatgggttaattactgaagatggccgaattgaaggcaatctcaaacccttgacgcagaagctagtagcactaaatgaccttcttgataaagagaagtcacaggtatttgctcaacggtctgaactgaaccgtaatattctgaatttgaaagacgaatgtaagcaactcgagtctgatgtttcttctcttaaaggtggcgtgagtccgctttcacagaatacaaagcgtcttattgccttgctaaaagacgcgaacattacagcaaccccattaagtcacctcgctgaagtcactgatagaaaatggcaagatgccattgaagggtatttgggtgcgcaacgagaagcattaattgtagagccagaagatgcagaagaagccattcgtatcttccgtgctcatcgtcgtcaattgatggggtgccgtgtcatcgacacaacgcaaacacgattatggttgaatcgcggcgataataactcagcactgcgctttattcgctgtaataatgatcatgctcaagcctatatcaatcgtcgattaggtggtattaaacctgttgagactgagcgtgagcttcttcgtgaagacagcgcaatgacagcagatggcatgttaaaactggccggaaccatctctaccattcgttttgttcctcatatgatggtaggtattaatacggaaggaatgcgtgactctcgcgaaaaacaacttgccagtttgagcggtgagttaatgaattttctgaaagcagaccaacgattggaacaagccgattctttgcttggccgagtcatcgcaaacaatcagtttgatgtggaaagtcttgggaatgcaagccacacagtgactcgcttaacacaagaactggaggcggtcgaagtagaaatatcgcaacttcagaaacacgatgatacagaactgcaagaacgcatcgaagaactgaaatcaagaatcaccaatgttgagttagaacagaaaaaattggatcgagagcgtcaacaaattgcagagcaattcggttctcttaatactcaaaagagccaattaagctcagcactgtctgcattagatgaagagcgcaaccgcttaacctctaatccgcgatacgatgctgaatttgccagtgagcgttattccttattggaaagcagtatggtaaatggcgcggctatctataaagaggccattagccgagcagataaagcgagcgaaaaggcccgcagttttgatcagaaagttcgaaaagaagtggcggatcactatggtaaattccatcaagcgaacttagacaatgacgttcagttggattatttggaatcgaaatttgaagagtttgagcattatgtctcgtatcagattgacattcttagtgaaacagaattggctaaatacgctaagcgtgcagagttagcgcgtaaagaagcagaagaaaccttccgttctgattatgtttctaaattgaaagactcactagatcaagtcgcccatatcatccgtgaattgaatcacagccttaagcgtcgacctttcaaccaagaaatctaccaattccgctactaccctaacggagacatgaaagacattttggatcttgttgaacgctttagtgcacaagaccaagctaatgtaggcggtttattcgacccgcatttgagtgacgaccctgaacatgcgcgtgccattgcatcgattcaagagctaatatctgacgaagaaaagcaacaagaccttgcggattatcgtaaattttacaattttgaagtcgatattttagattcagaaggcaataaaaaaaccaccttgagccagcgaattcaaaccggttctggtggtgaacatcagataccattttatttggccattgccgctgcgctctctacaacgtatcgactacatgaaacaatggaaggcgatatcgtgggtggattctctttggcaatgtttgatgaagcgtttaacaaaattgatatggtgaaaacatcaacctgtatgggctttatgaaagacattggcttacaggttattgccgcggcacctgatgataaacgtgctgtaatggcggcaaatatggacacaattatcagtgtttggcgcgaaggtggggctgtttcgatcgatgtcgcttacccaaaagaaaagggtcaagtgttactcaatgggcagtctgacactatgttaacgtctgcataa

SEQ ID NO: 44339 - DNA, 1557 bp, Sphingobium sp. C100
ttggcaggttccgcgaccacttcgattccagacgctcagcgtccgcagctcttcgctcaacttcctccggacatcttcgcggtgttctcgggcgggaaccgcgcgctctacgaactcgcgatcctggcagtctatgacgggctctacagatccgagcttctgtacccgaccgaagcggaggtcgttggcgtaatctacgactgtatcgcgcgggagcccggtgtgtggaccgaggacgaagccccggtggaccttgaccgcctggtcacccggtccggccgccgcgtccggcggcgccgcggcgtcggtgttgatgaccaagccaccggatcggtgatcagccgctcgcggcacatctacaaccgcatgttgcagaccggctggctcgacttgacgagctacgggctcaaggtcaccgtcgagatgaccgcggggccgatgcggctcgccgagttcctttgtacgcttaaggaaggcggcgcggagcagctcggcggcctcgtcgtcgaggtcaggaacgccatcagggcggtgcgcgagaagccggccgagaacgccctcgggctcaacaaggcggcgcaggatgcggcgcgtttcggccgatacctcaggagcgtgctctctgccctccgtgaggtcgatcggcaagtgctgtcgtcggagacactggccgaccgtctccggcactacttcgaggacttcgttgagaaggtgctcctgcgagattacacgtccatcgccacgaccgcgcacccgtatcgccatcgccgggcaatcgtcgcgtcgctcgacgagctggaggattcggagatcgatctcgcagccgtggccgacgcctatctcgacgcgcggctcgtccaagaccgtaaggccgcccgggatctcgttcacgaggaccttttccggatccgacgcgtcttcgagaggatcgaggagtccttcgaggcgatccagcagcatcgctcgagactcgaaacgcgcctgcgcaacgtcgtccgctacgccggacgtcggaccagcttcctccagcggagcgagcaggtgatccacgcgctggacgaggcgctgtccgccggtaccgcgctcgcgatcgaaggcatgatcgaggcgaaggtatccgttctcgcacccgatctgatggcaaagccccgcggggcgaggcccgcgattgccgacgctgatttggacctgccagcggacgacccgataagcgagtttaggcgccagctcgagcgcgactaccttgaccgcctcacgatctcgccagccaaggtcagccggttcctcgagcgcaaagtcccgcctttcggcgagacgtccgcagcctacataagcattgaaaccatcgacgacttcctggccttcgaggcggtccgcgtgctccttgcaggggggctgggcaccgacggagcgtcgcgtctctcaaaggctctggaggggcgcttcgtgctcgaggtctcggaagagcccgtctccaacgactggctcgattgcaccggcttccgagtgaagcgcctcgacgacatcatcacgctggaggacggatatgctcgttga

SEQ ID NO: 44340 - DNA, 651 bp, Sphingobium sp. C100
atgctcgttgagttcggaaacctcgaggccaacaacccgcgcggcttccagcgggtcacccagctcattgcccaacttatgcggcaccagttcgtccacgccgaggacaggggggcagccgtgctcctcgagacgttgaaccggccggagctcgcgcgcctggttgaaggctacttcgacgtcgcgggataccggctcgtccaccgcgagagcgagggttgggctggcatactcccggacccggagcggacctcgcttccccgcatgcgtatcgacgagacgatcgcgctgctcgtcatgcgtcgcctctgggaagaggccctccagctcggcgaaatctacgcgaacgggacagtgcggaccaccctcaacgaggcctatgcggcctaccaggggaccgtggccggcagtcgccgtgcggcgctttccccgaacgacttccgcgatgtgctccgccaaatcgagcggcggtcggtcgtgcggcttggcgatctcgatccggatgcgcaggacatggacctcgacatccgcgccctcgtcaccagcgtggcgggcgacgacttcgtcgcctcactcgagcagatactgacgcgaccggtcgctagcgcaacggagaccgaagacgcgcccgaagtggagcgcgacgtatga

SEQ ID NO: 44341 - DNA, 3432 bp, Sphingobium sp. C100
atggagctccgccgcatcgccctcgtcaactggcacatgatgccccgcgcggacctcgagcttgccggcgacgcggccatcctggggcagaaccggtccgggaagtccaccatcatcgatctgatccaggccgtgatggccggcggatcgtctcggctctaccgcttcaaccgttcggctggcgagggtggcggccgatccgaccgcacgctgggtggctactgcctcgggcagctcaacgaggacacattcctcagaaaccaggcgcgcacccatgtcgcgctcgtcttcgaggacgcggatggcggcaggaagcccgtcagcgtcggcctttccatcgaagcagccagggggcagcagacagaggtcgtcggccacttcgtcgccgaaggcgtcgccgtggacacctccatgatgctcgacgcaggagagggcacgctgaggccgaccgcctggcctgccgtgcgacgccggctagagcaggcatgcactggagccggcggtcagcttctcacgccggatgacgccaggaccttcatccgggaatacatgcgcgcgctgtttactggccggcgggcgtcggatcccgaccggttcgtccgcactttcgtggcggcgctgtccttcacggacatcccctccgtcgagcagttcgtccatcgctatctgctcgagcccaagccgatcgacatcgcggaactccgggactcgatcggccgctaccgcgagatccagaagacgatctccgacctcaaccggaggctcgaggccctgcgggcgatccaggtccagatcgaggagttcgaccgcctcctcgccgaggagctggcgtgccgcgcgatcgagaggaccgccctgctggtcgagggtgtgggaggccttctggcgaacctcaccgagcagcggacgaaggttcgggaactcgaagaggcccaggacgagctgaagcgcgtagaggacgagatcgaacgcgagaaggagaccctcgcatcggtccagaggcagctggcagccactggggcgcagggccagcgcaccatggtggagcaggagatcaagggctgggagcgcgatcacgcctcggtgatgggccgcctccaggtccgccacctcggcgcggcgcgggccatgcagctcctcgagctgcgggaccggctgggcgtgatcaatccgggagagctgttccgggccctggagcgtatcgaggaggcgagccgggggctggcgccgccgaactggccccgcgatccggccgccatggacgctctgctcgagaccgtcgccggcgcggccgccgaccgcgttccgaaggcgaccgagcggcgcgacgacgccatcgtatggacaagccgtctcgaggcggagcaggcggccgaccgcgagcaactcgcgaacgcgcgcaaggggcagatcacgctcaactccgcgacgacgaagctcatggatgcgctccgtcgcgaaggaatggcgccccgcactctctgcgaggtggccgacgtcgtagacgagcgctggcgcaacgcgctggaatcgctcctcatccgagatcgcgaggcgatcatcgtcgagcccgagcacgcttcccgcgcgaccgagatcctccgctacgggcgcgacgcctatcccgggtgccgcgtcgtgaacacgcggaagctgcagtcgcgatcggcggtgccgcaggcgggcacgctcgcctccatgatccggagcgaggaccaactcgcgacggcgttcgtggtgttccggatcggcaatgttagcctcgcggaggatcaggaggagcttctctccggcgggcgcgccgtcatggccgatggcgcctactacgacggcctcatcacagagatgcgccggccggacggccttaagatcggcagggcggccgcgccgctgatggaggcgacgctcggcgagcgtatcgcgagccgagcagagaacctcaatgctcacgccgagcggaagaggttcttcgaggacgtgatccgccggctggaggactgcagccggcccgtcggcgatgcggacaggctcgacgctctcgcgctcgcgctgggcgatctcgcggacaagagggcggacgcgcatcggcggctggaccgcatctccgcccaggtcgatcccgagctgctcgacagcgagcggcggtcgcagacgcttctcgccagcctgacgatcgaccgcgacgagctcatcgacgcccgcggttcgctcaggaccaaggtcgcggagatcagaggcaggctcgaggccggcgaacagtcggtcggctcctatctctgcctggctgtgcgccgccgtcagttcagaggctcagtgacgtcggccgcccacctccgatcgctgcgcgaaagatatgcgaagcatcccgccaggacgccggcgaggatcgccgccgacatggcgaaggtcgccatcgacgcgctgcaggggcatcgcgctctcgatcacgacataagggcggcgctcggccgatacgcaatcgacttcccggatccgctcgaaggctatgcggaagtgccgatcatcgggacggccaagccttgggtggttgaggggatcgcgacgctcgagggcaacgagctcatccgctaccgagagcacgccgacgaggcggcgaaccgcgtgtcgcggctcttcaagacaacattcatccacgaactcaacagccgcttcggccagctccactccgacatggagaagctctccagcgcgctcaggacgcggccgctccacggcgaaacctaccgcctgatcgagctggtgaagcccgaattcgacgacctctaccacctcgccaaggcgagcgagaccgacgagtccgtgctcgacgcgctgttcggacgggccgagccgcgggatgagcgtcatggacgcgccctccggcaaatcgagcagctgctctccgacgacagctttgatttcaccgttttccaggactatcgcagctacttctcctacgatctgcgaatgcgggacgagaaggcgggccggacctatagcttcgacaagcgccgcggcgtcgcgagtggcgctgagcggcaggtgccgttttacgtcgtcattggcgccgcgctcgctagcgcgtatcacggtacgcgccaagcgacgacgcccggcgccaccggcatgggcctcgccgtcttcgacgaggcgttcagcaagatggacggccccaaccagcggacgctgctcgacttctaccgggccatcggccttcaagtcgtcatcgccgccccgaccgagaaacgggccgtcgtctacgagaacctcgactgcatcatcgatgttttccgcagcggagacctgtccctggcggagtcgatacgtatcaagggccacgcacgggaggagatgcgcgccgctaatccgcagcatgcaacagatgaggagctcgcgaaacgactgggcttggaggcgaaggcagccgaatga

SEQ ID NO: 44342 - DNA, 1206 bp, Sphingobium sp. C100
atgagccgtcgcggattctcgagcattgccacactcgtcgaagacctcctcgctcggcacgaacggagcccagaggcgcgtgggctgatcgccgccatcgacgacgacgggttcgccaatatggacctgcgcgacgccttcgacgaggcgctctccgatctcgagcgggatggcggcgtcgagctgatccggaagggccccaaaacggaccggcgagtcacgggcgcgcgtctgaaaagctcggaagtgctctacggttttgtcgggcggcggccggcagttcacgttgcccttcagtcagtggcatcactgcggtcgcgacccgacctgcctcacggcgccgtagatctgatcgacgccgttgccgcggcgtgggggaggggcgtctcgcacatcggcgtccggccgggcgaggtcagcacgctttcggacgtgatcggcctcgcgatcgccgtccagagccgactttccggcgagttccaggccgatcaggacttccgcacattctcccgactgtcggtcgccgacagcaaggcgctcgaacggaacctgagatccgtcgctgccgcgttgcagaggatctacggcgcggacgacaggctgatcgggatggagcccgacgagattttggccaccgccggtatcacccggcttccccaaccgatcctcgtccacggcgacgtcgatctgcacggtgcgccgttcccaagcatgccatacgttggcatccccgccgacatcgtcggaggactgcgtctccggtccggtccggactacgtgctcaccatcgagaacttcacgtcgttcgtccgttatgcgcgcgaaattgctcgcttggacaacgcgctgatcatctacgctggcggcttcccatcgaggcctgcgcttgcgacgatccgcaggctggccgagcaggcgcttgcgccgacataccattggggtgacatggacagtggcggcgttcgcatcttccgccacatcgaacgcgaactcgcgaaaggcggagtccggttgcagccgcacatgatggacgcgcagctcctcgccgcagtgggccgtccatcggacggtgcaacgagcgcacccggcgacgtgacaggtagcgcgattgccgcgctcgcagaagctctgcggacgacagggttcgtgcatgagcaggaggagcttgatccgcggcgcccagtcgtcggcggagccgccgaatga

SEQ ID NO: 44343 - DNA, 1353 bp, Pseudomonas sp. FH1
atggaggatgcgctgcaagcgctgtccgaaatgctggctgcttatgccagccaggaactttacgaaatcgacccagatgcaacgcatctccaagcaggtcgtgaacttcgtgaatggatcaagcggcgtctggtcgtagaacgagaggggcgtatctatgcaaccgacgcgttggagtccgccatccagttcgtcgattcgctggatagtcggatcatgacttccacggcatctcgcctttcggtggttcagcgcgagatcgaaaacctggaaacgggtctgaaccccagcccaactggccgtattgccagcctgcgccgccgaatacaggatttggagcacgagctagcgcaggtagaggctggcaacgtcatcgtgcttgatgaagcgcaggcgatagagggcatacgcgaggtatataacctggccaccagcctacgcgcggactttcgacgagttgaagactcttggcgcgaggcggatcgcgcccttcgacactcgatcatcagcgagcagtctcaccgtggagaaatcgtcgatcggttgttggacgggcaagatgctctactcaacactcccgaggggcgtgtcttcgaaagcttccagcagcaactgaggcagtccgctgagctggaaaccatgcgtgagcgtttgcgcaccatccttcgtcatccagcggttccaaaggcactgaatcgtccccagcaacgtgagctacgttggctggcgttacgcctggttcgggagtcgcaggctgtgctccaagcgcgcgcccgaagcgagcgcgatgttcgtggcttcatgaagacggggctggccgccgagcatcatcgcgtcggacagttactcaacgacttcttcaatctagcgctcagcgtcgactggcaacgccagtcagaacgccgtaagcctgcatgtttaccaccagttggcgtagccattaccggtatcccggcaatcgagcgtctccgcttcaagaccctggatgacgatgatacgggcgagctggatctgagtttgaagccagcggggttggagcagattgatgatgacttctgggatgccttcgacgggctggatcgtgaatcgctgattcaggacaccctagctgtgctggcggagcaggggcgccctgtgagtctcggggagcttgcgtctttgcttccacctgctcacgacctagaaacctttgcgctctggttggcgatggcacgcgaggcaggtattgaggtgctgaaagaggagcgtcagctcgtggagctagttgacgaggatgagcaacgctggcgcttcaatctgccttatgtcggactcgaccacgaggcactcaaggacatcgattgggagttgtga

SEQ ID NO: 44344 - DNA, 750 bp, Pseudomonas sp. FH1; identical to SEQ ID NO: 44180

SEQ ID NO: 44345 - DNA, 3306 bp, Pseudomonas sp. FH1
gtgaagcaagcactgctctggcgtgacagcgagaccctcattctcagcagcatcgaactctataactggggcggctttcagggctatcaccgtgccgagatcgatccctcaggcaccgccgtgatcggcccaacgggtagcggtaaaacgacgctggtggatgctctgatgaccttgctgtgcgccaacccgcgctacaacctggcttccacaggtgggcatgaaagcgaccgtgatctggtgtcctatgtgcgcggggttaccggccctggagacggaggtgtagagcaatctcatatcgcgcgccagggtaagacggtcaccgccattgccgccacgctcgagcgtgacggtgcgcaggtgcgactgggcgctgtactctggttcgagggcaccagctcctcggcgtccgatctgaaaaaactgtggctgttaagcgagtcccccgagcagacgctggagcattggctcagccaacatcacgcaggcggcatgcgggcgttgcgtcagatggagaaggatgggacgggtatctggccgtatcccagcaaaaaagccttcctggccaggctcagggattacttcgaagtcggtgaaaacgccttcaccttgctcaaccgcgctgccggcctgaagcagctcaatagcattgatgagatctttcgcgagttggtgctcgatgaccgctccgctttcgggcgggctgccgaggtcgctactagtttcgatgatctaacggacattcaccgggaactggaaaccgctagaaagcagcagcgctcattacaaccggttgccgatggctgggagcgttacaaggccttacaagaacagctgcaggataaacaggtgctcgaaggcattcttccggtctggtttgccgagcaggggtatcgcctatggttggctgaaaccaataggctagagaaggagcacaagcaggctgagctggatcgagaacactgcgagcgtcgacttgatgcccagaagggcgtggtcgatcaacatcgtcagcgctacctgcgcgtaggtggcgcagggctggatcaattacgcgggcgcatcgcggattggctcagggagtgcgataagcggcgcctgaaggccgagcagtaccaacgcctggccaaggggcttggactggcggaggcattatcggccgcagccctcgaggagaatcagcagcagatcgcggcgcgcctggaaatactgacccagcagattactgacgcgcggcaaacggcgttcgatgcgggtctcgtccagcaggagctcaatggccgcctgcaggccttacagcaggagcgtgccgaggtggagagacggccaggctcgaacctgcccgggcatttccatgcttttcgaggagatctggcgcaggcgcttggcgtcgatgaatcggccctgcctttcgtcgccgagctggtgcaggtcaagcccgaggaactggcctggcggggtgccatcgagcgggcaatcggcagccaccgcctgcgtatcctggtgccgcatggcgcgtccgaggctgcactgcgttgggtgaaccaacggcataaccgcctgcatgtgcgcttgctggaggtcaaggagccgtcgtcgcgccccgtgttcttcgacgatggctttacccgcaagctgaccttcaaggagcatccgtaccgagaagccgtgaaggcactgctggcggacaacgaccgacattgtgtggaaagcccggagcaattgcgtcataccccgcatgccatgacggcccaggggctgatgtcgggtaaggaacgcttcttcgacaagcaggaccagaagcgcctggatgaaggctggctgaccggcttcgacaaccgcgaccgtctggccttcctgactgaacaaattcgcgaggtcaatgaacagctcgcgcctgccaagctggccttggatgccgcccagggcgatgtccgcaagttggaggatcaagcttcgctgctgcagcgcgtcgaagaactgcagttcgaggagattgatctgccgggcgccgagcgtcagctggagtcgctgcgtgctcagctggacaccctgacacgccccgactctgacctcgcccttatcaaggctgagctggatgaagctgaggcattgctggactctctggatcgacagaggcaacaacttatcgagcagtgcggtcagttgaaaattcagttcgagcaggccgcatccgctacccgtaaggcttatcgcggcgccgaaaaggggctgagcgatacgcaacgtgagttggcgctagcgcacttcccgacgctgagcgctgctgacctcggcgatattgtcgagctggagcgcaagcatacgcatgagcttcaagggcagctcaaagcgctgggtgagaaactgggcgatcagaaatccgagcttgccaaacgtatgtccgacgccctgaaggttgacaccggtgcgctgtcagaggtcgggcgggagctggtggacgtaccaaagtatctggagcgtctacgtgtgctgaccgaggaagccctgcccgagaaactcaagcgcttcctggaatacctcaatcgttcctcggatgacggcgtcacccagctacttagctatatcgaccatgaagtctcggtgattgaggagcgtctggatgacctgaacagtacgatgcagcgtgttgactttcagcccgggcgctatctgcgcttggttgcgacaaaggtcatccatgcaagcctgcgcaccttgcaacaggctcagcgccaactgaactcggcgcgtttcatcgatgatgaaggcgagagccattacaaggcattgcaggcgctcgtcgggctgctcaaggacgcctgcgaacacagcaggaatcagggcgccaaggcactgctggatccgcgcttccgcctggagttcgcggtatcggtggtcgatcgcgaaagcaggaatgtcatcgagacccgcacaggttctcagggcggcagtggtggcgagaaggagatcatcgcctcctatgtgctgaccgcctccctcagctatgcgctctgtcccgacggcagcagccggccgttgttcggcaccatcgtgctcgacgaggcgttctcgcgcagctcccatgcggttgccggtcggatcatcgcagcgctgagggaattcggcctacatgctgtcttcatcacgcccaacaaggaaatgcgcctgttgcgccaccatacgcgttcggcagtcgtcgttcatcggcgcggcgtggaatccagtctggtttccctgagctgggaagctttggatgagcatcatcaacagcgcatcaaggccatgcatgaagtcgcccactga

SEQ ID NO: 44346 - DNA, 1158 bp, Pseudomonas sp. FH1
atgaagtcgcccactgacatcagtcgcagcctggccaaacaatggcagcgctccagcgtacgcttggaacgcttgctcaatcccggcagctggccgcaatgcttcaacatcggtaagccttcggcacgagtcttcgctgaaaacatccatgcggtgctccagcatgtggagaactggcggagcgtgaaagtggggaaggtcgactgggagtcagtcagctatcgagctgggctggccccaatttccttgccgatgcgctggcacttgcgtagtccctccgaatggattgccgcggccaatgatccaacggtcagccgggagtacgctcaactcgaatatctggtcgagcaggtagacagtgcctttcatgcgctgctggtagcacaacggggcttatggttgacgaagccccctgaagaagtcgtcgccacggcgcaactcgccacccgcttgtcgctaggctgtgcccgaggccgtccactgcgcctgcttgccgagcacggcgtagacaccaagtttttcgagcgtaacgccagcttgctgacccggctcctcgacgagcgtttcgaaggcgcggcgtccgagcaaggcctgacgacgtttctggatgcctttgaagaaagcagtcattgggtactagtcgttcctcttcagcctgagctgctgcccttcaagcggcttaggctcacgactgcggaactggctgaaaccccgcttcctggttcgcggttgctggtggtggaaaatgagcaatgtgttcacttgctgcccgaaaccttgccggacaccctggctgtgctgggtgcaggactcgatttgcagtggttggcgtctgcgcacttagccgggaaacagatcgcctactggggcgacatggacacctggggcttgttgatgctggcgcgagcgaggcttcatcaaccagcggtcgaagcactattgatggagcaggagctgtttgaacagcactcaccgggtaatgcagttgttgagccggccaaagcgcgggagtcggccccacctggtttgctggctgacgaagcggatttctatcggtatctgctggtgcaagagcgaggacgtcttgagcaggagtacctgccaaaggtacaagttgagcgcgctatcgagcagtgggctcgggcggtccctgtatag

SEQ ID NO: 44347 - DNA, 1008 bp, Burkholderia pseudomallei NCTC 13178; identical to SEQ ID NO: 44263

SEQ ID NO: 44348 - DNA, 672 bp, Burkholderia pseudomallei NCTC 13178; identical to SEQ ID NO: 44291

SEQ ID NO: 44349 - DNA, 3633 bp, Burkholderia pseudomallei NCTC 13178
atgaagctcgaccgcatcgttctggtcaactgggggcagttgcggccgggcgactatgaccttggaaacatgactcttcttaccggcccgacgggcgccggtaagtccactatgctcgatggcctccagaccatcatgactgccgcgtaccagggtatcgtcgcatacaaccctggccaagaagaggtacagcaggggcaacgcagtgggaagtccaagcgcaccttggagtcatttgttgtcggtgctgagtacagtcgtttctctcgacctcatggcgcgcacgggtatatggcggctgtgttccgccccgggcccgatgaggactcggccaagacctttacggcgctcgtcgccgcatcggcacaggtggatggcatcggggagcgcagggttccgaagctggagcgactcgaactggttatcgtagacgacgccgcgctgaccgttgacgattttctaaaggacgcggagcagagcgagtgggtggctgtcgaagaaatcgtcaagcgattgaaggctcggtattcgaaggtggtgacctatgacgggcataagcgagactacctttgcgcactctacgggcgcttccgggggcgcatctcgattacctgggatgaggcccagaacgctgcgaaggcttggtgccagtcaatagcttacaaaaaaattggctcggtccacgacctcgttcgcgatgacattctggagtatgacggcaagcagttgcaggagagcatcactcgcatcagcgacctgatgcgccaagtcacgaacctgaagcaagaagggcagcgactggaagcgactgttgggcggttgcgagggttgaagactgctatcgcgcaaacgacgtcggcgtttgaagagcaagtccagtatgacttgctgctggccaagatgctggtggcggcggacgacgaacgtatcgcccaagagcagaaacgcatcaacgatgactcggcactggtaacgcggtgcgagcaaaaggtaaaagccgaggagcgactgaaggcaggcgtggaccggagccgcatcgacattgcagcgaagctcagtggaatcgccgccaacgccgagaaagagcgcctggaccagcagctcgagctcgccaattccgcagctcggcacaaactggctgagctcaatactgggcttcaagaggccgcccaaatcgtcaatgcggctaccggtttgttgcggaagcccattccggagcagttccccaagctcaaggcgtcggttgacgcggtcggtcgagttacagcatcgactgacgttgctcgcttggacggtctgttgggcgctgtcctcgatgcctcaagtgatgcgcagcttaacgtcgagaagctgttccgattgacccctgcattcgatggtgtggaagagggactcgccgcgctgcactcatatctagtggggaccgaagatagtgtcttgatggctgttgcgtccgagacgtcggaattgacgcaacgtgtcgaagccactcgcaaggcgcgcaaggaattggctgaccgcaaggagctgttggcgagcggcgctagcgattacaaccgcgacactcgcatggcgcttcctcgcatccgagagtgtctgcccgaagctggtgtccaagttctctgcgacctcgtcgaacctgtgtcggatgaatggcaggaggccatcgaagggtacttggacaatgcccgcttcaatctcattgtgaagcctgagtgggaagcacgaactatcgatttgcttcactcatggggctcgcgctgtaaggtcatccagggtaaacgatgtcttcagcgtgccgatgccggtcgtgtgccatctgactctatcatccatgagctccgcactgaccatcccattgcacgtgcgtatctcatcgagcagtatggcgccgtcgtcaaggtcagggactccgagcaactgcgcgataccgcgcgtgggttgaccaaggacggcaaaggaagcggttctcgcactatgtttgttggtgagcggcgggaccttgttcttgggcgcaaagctcgcgagcaggcgctgcgggctaccatcgagaaactcgatgcggcagaccgaggaattcgagagttcgagcaactgcaggatacgctgtcgagcgttaaacggcttcttggcaacctgcgtgaacccgtattcgatgcgatgccgcttggccaagcagcgggcgaaatcgacagcactcggcgctcgcttgcgcaactggacctcaccgaggtggaacagttgcgggcggagcgagcgaagctggaactgctcatcgcagggcacgatgcggaaattaccgcggtaaacaaagagattaccctggcgagtcagcgtatcacggacgcccaaggcgccattgagcgcatcaatggaggccgagacgcgcgatttcgggagcgtgaagaccagattcgtcggctcgggcagatgtgcgaaacaaactcagagaaaacctacacggttattgccgaggaagtagagggcttgctcaaatcccggaggtttgacgtgcactccgttcaggtgcggctcaacacgctgcgcgcgcagccggacaaattgctgggcgatgtgcgggaaatgctcgcggagtacaacgcgaacgcgcgccaagaggagcgcttccagtcagcgctgcctcatcttcacgacgccaccatgttcgacccgtactatggcccccttgttgcgctcggccgcgcggtgggtgcactccacagcgagcttgagggcattggcctctacaacaatcgggccaaggtggaagaagcggagcgctctttccatgacgtgttcaccaagcagttttgcgtcgaaatcaaaagcaaggtggatgatggcgtccgactgctacggcaacttaatatggagttggaaaggcttaagttcggcacggaccgcttcagcatcgactggtcgaagtgggagccggagttccaggagtactacagcttcttctcggccgtcaccgaccttgcggactcagtcgaaacggtcgacctcttcggagagacggagctcacgccaaagcacgtagaggtacgcgaccgcctggtgaagctcctgctcgactcagaccaagagagagcggggcgggagctattgcgcattgccgactatcgaaactacaggcgctacgaaatttggaatgattcagacagtggggggcgcatcgcgctttcgacatggggcacggggtctggtgggcagcttgagacgccggcttacatagttcgcgcggccgtggtgacgaaccggctaaagttcttcgagaagggacccagcctgaagatgctcgttagtgacgagtcgttctcgacgatggatgaacctcgcgctcgggccgtgctgcagtacctacgcgaaagcctcgatattcaggtcatcagtgcgatgccgacacgaggcgctggtggcttacggccagagttcgaccgggagtacagctatagccgggttcctgttgacgctaacggcgaactcgacttcatcctcgaatacgacgagcgcatcttcaagaaggacaagatgcgagagctctgggaaaagcagcgggcggcggcccgtgcgcaggccgagctggcgtttggcgccgccgaggccgcacagcaggcggaggcgcttaaatga

SEQ ID NO: 44350 - DNA, 1134 bp, Burkholderia pseudomallei NCTC 13178
atgagtggcgcgtctctttggctgaagtccatgccagtgcaagaattgctcaacatgcttgttgaccgattggacgcggccgagcagagaggaagcactaaagcgaaatcagtccagctcgacgagcgcacttggccagcgctctacatgtcgccagtggagtcgcagaaggaacacctttgggagcatgtcgtcgcgatggtgcgatgcggatggctagctgtgaagccagaaaccgcgctcaaaagtcggtccggttacgcatcatcgccgcgtgtgagtgtggtcgaccagcgagaactgcgtgcggcggtcggccggcaggaaagggtgaagtcgtccgctgagcgctggcgcgacgccgtgtcgtctggcttactagcaagcgatacggtaaagcgacttgtctcagagtattgcatcgatatccccggtcgcacgatgacggaggtcgtggagcagttgaaccggcttccggcgctggccgagaaatcgatgctgctgcgcgaggtgtcatcgcagttattctgggggatgtccaaggtcctcgacaagcgccaaggattggttgcggccattctaggtatggacgattgcccattcccagagtctcccatccaattgcacgtgttcttgcctgccggcggccatcgtggagtgctcttcattgagaattcggtgagcttcgaatgcgcaatgcgcgagccccgcggagtgttcggtgagttggctttggtctacgcgtccggctttaaagggagtgcgcagcggttgcgcaccacggaggggtgctcgctgttttacgcggcaggcggcggtctcgaacgggacttgcgtgcaacgtttgaaggttggttgttcggccggcaagagataccgtcgtacttctggggcgacctcgacttcgcgggaatgcgcatactcgcggctatgcgggcgaccttttcggggctgacagcctgggtgccgggttatgcgccgatgctaaccgtgctaaagggtggcggagggcacccccctgaggccgccgacaaacaagggcagaagccaatcgcatcgacagggtgcgagtacgccgatgagcaactagtgccagccctgcagaccttccggcgtttcgtagaccaggaatag

SEQ ID NO: 44351 - DNA, 1407 bp, Lachnoanaerobaculum sp. MSX33
atgaatatatttgatgaagtagatgaaaatctgttcagacctctgacaggcacaaataaaagaaaatatgtagatattcttgctcttatttgggaaaagtgcaagcgaatgcctatgtatgctatagaaaaaagtacaatatttgatatggcggaggaatatctcctgggacttgatgagaaggttgaaccggatatggaagagcaggaatatgcaagcggaaatatagcagatatgaggactatttccggaagctttataagaagacttagagatacaggctggcttttggaaaagccgggcgaatatgaggatgaggataatctggcaattcattataaggtggtgcctatattgaaatcctttcaggaaattatcagtcccactatcatcacttataagggaaagctttttaaaatatattccatgtttgaacatatatcggaacaaggcagcccttatgaaggagtcttaaaagaagcttctgaggattttgacaatctgaatcaagccctcaggacattggcggcatctattgaagatcatataaatgatctgacattgggaaaaagtcctgaagaaatattggatttttttgaaaaatatgaagaaaagatagttgtgggatcatatcacagatttaagacaaatgataatttgttttattatagaagcagtttgtatgagagtcttgacagatgtgaagataatcttttcgatgctttggtacttgattatatggatacagagcgtgttgaaagggatgaggcaggtgtaaaaataaaagagcttatacaaaagcttcgtatggatatcgaggaaatggaagctataatgcgaaccattgatgacaggcatattttatatagaaccagggcggtgcaaagagcacaatttttgctcctgtctgacggaagcagtaagagtaaaataaataatatacttaagttttacgcaagtcagataaacactaaagaggatgtatatgaagaagatgacagcattgcatccgatatttttcagatatttgtacaaaacttctttgactgtaactctctttccacgcctgttaaaaagcgaaagcctactgctattgaatttatggatattattgaggaactggaccaagagcttatagatgagaaaaatcgaaagatgatggaatacataaaaaatgcattgacatctgaaaatgttaacagattcgcaagagatatactaaacggaaatcatgcggtgcaaataagctcgatatttgaaaataacccggatactttaataaaaattataggtctgtatacctattccaagacttcagaaagagagtatgatataaggcttagagataatgtggtggagtcaaacggtgtgaggttcaaagattttattgttgaggaaagaaggtaa

SEQ ID NO: 44352 - DNA, 576 bp, Lachnoanaerobaculum sp. MSX33
atggcaacagatataaaagaagagatagctaattatttattgaataattgttttctgatgggaacagtggatactacaagagagaagtattactatgttataaaccatgaagaaagtttcagacagattttcttgcctatcggatatactttggtcattcatagaaatttgagagttgttcagcttataaataatcatggcagcggaagaattgcattaaggaaatatgagagtattatcttgcttattttcaggctcttatatgtggaaaagagagaaagtttatccacaaatgaagacagaatttatgctacagttgaggaaattaaaaatgaatatgagaagctgaatttgccaagaaaatttgacagagcttttttagaggattctatcagaaatataaaaagatataatctggtacaggtagcagataaattagttgatatggatgccaaaatacagatctatccttctgttatgcttgcaatgcctgataccgatatttcaaaagcatatgatgaaactgttaagttgctttctcaatacgaaaattctgaagaggaggatgaagaatga

SEQ ID NO: 44353 - DNA, 3330 bp, Lachnoanaerobaculum sp. MSX33
atgataagaatgacaagacttcatctgataaattggcataattttcaagatgatattatagattttaaaaatatcacatatcttttgggcgtaaatgcagtaggaaagacaactataatggatgcagtcaggtattgtctcaccactaataaggactttaatactgccggaaataaaaagagcggcagaactcttttaggctcggttcaccaaaaacagagagcggaggacagctatcttcgtccggggcatacagtttcctatataggcattgaatttttggacgaggctattaaaaagacatttgtaataattgcacgtgtggaatcggaaactccaaagcaggatttgaggggagtatatcaggattggtatattacaaagccgggatacagccttttggatattcctttttttgcaaagagcaaagaaggaaaaagtcctgcttcaagagaagcttttaagcttgataataaggggatggacagggcttcaaatcaggctgatgccagaagaaggatctgtcgtatgctcggtatcggtgaggcggattctcctatcggaaagaaatttaatgaagtattccatatgggtacaagtctggaggatataaaggatataagagagttcatttatacctatattttaccggagcctgaggtaaatattgattttttgcaaaaggatatgattgagctggaaaggctacaggagatacttcaggaggcatctgacagagaggctttattaaaagagataaatgaaaaaataaagagtgcaagagagctcttggttaaggtgaaaataaatgagattttagttgcctacgcaaatcttcaaggaaatatagaagaaacaaatgaaagaaaatatcttattgaagagtgggaagtaagtgtatctttgatggaggaaaaacttacagacctttcaggcagagaatcaaaagcctcagaatttttatatgaagcacaaagggcagctgaaaacaatgctgaaaataaggagatgctttctcttgagagtgaaaataaaaataataaagttgaagagaaaaggcttacagaagaagcggcaaagtttgataatgtggctaaagacttatttgaattaaaggataaattaaataagcttggatttatttttgatatagatagttgtataagagatgaaaattgctttgaagaaacaaagattgcagagataaaaagaattgccaaaatttttgcagatatggaagaacagataaaaaactatgatgcaaaaataaggactgatatagcgaagttaaatgaggaaggcaacggactttcaagtaaaataaaatcacttgagtcaggtgttatgtgttatcccaaagaagcaatatttgtcagaaacaagataaatgaggccttgagtgaacagagcaagaaggcggatgccagacttttgtgtgagctcttatatatgacagacaggagttggcaggatgcagtggagagctacttaaatacacagagatttaatatcattgtagaacctgataattatattttagcaaagaaagtttttatctctttgggagataaggtcaacggtataggacttatagatacgagaaaaataaaaaatgtagaatataagactgagaaagactcttatctgggagataagattgaatctgaaaatatatatgccaaggcatatgcaagatttgtgatgaaagatgttatatgttgtgaatcttcagatgatttggagaaattttcaaagagtgttaccaaagacagacttagatttcaaagcttttgcttacagagaatggcaaaaagagaacattttatcggtgtggatgccattgaaaagcagttaaaagctgcaaaaaaagaacttctggatatacaaaacagcttgaaagagcttgaagatgcaaagaaaaactttgacttggtatataacggatatacaaagtttagagccggagagggctttagtaagcttgaaaagtattgtgaatcggggaaaaaagctaaggagcttggaataaagatagcggatatagctaagaagatagaagaatttaagcaaaatccaatattgctcgcaatgtatgacagagtcaaggaatgcaaaaagaatgtaaatgatataagagatgagataacagataccaaggcaaaaaagaaaaatataattgataatataagaaaatcaaatttgcttatagaagagcttaaaaagaatttggaagagcttaaaattgtatatgaaaacagcataaaaggatattcggaatttgcacttgatgtggaaaagaaatatttgaacgaaagaaagtcaaaaaaagcttctgctattgcatataatttttcaaatcgtatggcacatgataatatagcactaaacagttacttgaatcaggaattgatacctttgcaacaaaaatataccgccacatatacttgtgactatgctataggcttggaaggggcgaatcggtacatgcaggaataccttactctgcaaaatattgagctggaaagacataagaatgaacttgcaaaggctcagattcgctgtaaggacagatttcgcaaggaagtgctctttaggatgaaggacgatatcttaagggcaaggcagcagtttaagcaaataaatcgtgttatggaaaatctggaatatggtgaggaaagctatagattcggaattgacaagagcaaagataaggaactgggacttttctacgatattattatggataaggacaatcagcaaattgacagagaaaatgatatgcttgcatatatggctgaggtaaataagtccgaggtatttgaaagtcagattgatgactttatgagtagaataatgatagatgtggaagagcatgcgaaacaaaatctcacaggtcaaaagtcaaaggccaagagtatgggaatgtatgtggactataggacttatctggactacgatattattataaaaaattcagtgacagagaaggaagttgcattgtcaaaggtaagcggtgagggcagcggtggagaaaatcaagcaccgttttatgtagcaatatgttcttcacttttgcaaatttatgagcaaagtaaggaagagtctatgaggctcatattgttggatgaggcattcaacaatatgaccagtgacagaatcgagcctatgatgaacatgtttaagaagttgaatttgcaactggtgcttatagctacagccgagaaggctacatcgattttaccatattgtgatattacctactcgatagttaaatccggaaacagaaatgcaatacgagccttcgagaggttggaagatggattacggtaa

SEQ ID NO: 44354 - DNA, 1212 bp, Lachnoanaerobaculum sp. MSX33
atggattacggtaaggatattttaaatagtttagtggatatgtatgaaagaagagagggctatataaaagagccttcttctttgcgtgcaatacaaatagatataaaaaagaattatccggcatatgtagacagatatgatcataatgcatataaggatataaatgcagctatagaaaagttgataagtgaagacgtgataatatcaaaacttgaatctaccggagtgtatagcaaggtcagattaaatattgacagaatatcggattgctataagagattaaacagaaaaagtattccggagcaatgtgaatatataaaacaaattctatcctcatttgcggacagtaagtataggctgctgaataatataatatccgattggatgaatttggctgtaaattataggaagctgccatatgatttaaagtatgacggtaaaagattaaaatatgtacttacaatattggaagctgtatttaagatagagcaggaaagttacatcagaaatttctcaactgccgtatttaaagattcaaagagatttcaaaaggaatttaagtcctgtatagagagtatattatttgattatacggatgatcctatagagaaggataagatacttgaatattataatttatatgagaatcctacatatgtatatataaagggagatgtgataataagttttgaaaattctacaatatatgctagcgagttaccggatggaatagctctctccaatgcttcacttaaaaggataaaaaatataaaggtacttacaaaagctgttattacagtggaaaatctgactacataccatgatgaaaataagaaagaagcagtatatatctatcttggaggatatcacaataaatcaaagaaagaattacttgaaaaaatatataaagataataaatattgtgaatatctacatgaaggggatatagatatctacggatttttgatacttgaaaacttaaaagagaaaacaggtataccgtttaggcctctccttatggatgtaaatacattgaaaagattttatgaggcgggaatatacaaggaacttaatgtatcagatatcagaatgattgagaaaaacagagaaaatcttaaagagtattcagaggtattggattttatgtttttaaatcattgtaaggtggagcaggagtcattaagggctgtacgattacttgaaaacagttaa

SEQ ID NO: 44355 - DNA, 1533 bp, Bifidobacterium sp. MSTE12
atggaaggcgaatcgccattggctgacgtgagacgagaaatggagcggctacggcccgtgtacgagaccggcgtgctacgactcctgctacgcggcaattcgatgttgtacgtcgcattgctgcgttcctcgttcgatccgctcaccggcgaactgccacgcgatgtattggaggagcgtatctcacgcagcctgtcgcggctggccgaaaccggcgattatacggtgaaagacgaccagacggtaagacaggccgcgcatgcgatcctgctcgaactgtcccgtgaaggcgatgatgactacgcctggctcgccaattcactggatgtcgcctcgcaccgttacctgtaccgtctgacggctcgcgcacatcgtgcgattgaagcgttgcatcgactggaagacaccacgcaggcgttatccggcgcgcaagccaacagcatcatcatggaaatcgaacacgcacgcatgcagctgaccgccgacccacgtgaacgcatcaaactgctcaggaaggacatcgaggaacgtcaaaaagagatcgacgagcttgaacgcaacgaaaccatcgaaagactgacttccgagcaggtcggcgacatcatcaacgtcatccacaacacgcttcggggcgtgccgatcgatctgcgcgaactggcgctcgccgaacgtgacaacggcgacgcgctgcgccggcgcatgcagtcgggtaccatgagtgtggaagacatccttaccgcctatcatgacgaataccgtaaatcgttccgtgaatccgacagcggcagacgcttcgaggacgccttccaggtgatcgtcaccgacgaaggacgtcaggaaatcgacgatgccgtacgtgacatcgccaaaaacccgtatctggacggtgagccgggcgcgctgctcggtcaggttcgtgccgaactcgaacgcatttattcgggcatcgaggatgtgcgcaggcagacccgcgcctccgatgaggcaatcagccgactcgtccgccagcagaccgacacccgctaccgtaccatgctggccacattgaaccggctgtttgccaaaaccaacgccgaagccaaggcgaatccgaacgccacggaccggccatatcacactgatacgggtctgtcacagattgcggtattgcctaccaagccggccaaggccatggtacggaacgccaccgcggcactgaatgacagcgctccaaccgtcggcctgcccgacctcaaggccatgatcgaagtgtgcggaccacgtctgcgccacatggtcgatctgattcatcgcaaccccgtcatgtcacatgacggcacgcgcgtggacttcgcggcaagctttaaccgactgccggccagcgaacgccgagaaagcgaaatcatcggcttcctcagcgcgttacgcaccgaaaacgacatggcatgcgccacctggaactgcgtatcgctcgacggcacccccagaacatggcgaaccagaccgatactcgctaccgcacagacgcttgatgacatcatcagggaaggctga

SEQ ID NO: 44356 - DNA, 708 bp, Bifidobacterium sp. MSTE12
atgacagacgaacacagcgaaaccgtcggcatcgaacggtctcttccaaccgtcgaacaacccgccctcttcgacggcgacaccggcgacatgaccgccgatgcccgcatggccgccatcgcgctgaaacgagaacgctacatttccggagaactgttcgacctggtcaaagacaacgtcgaagccgtcgaacgatccctgaacaacgacatgcttcgcctcgtatccaacgataaataccacgtcatgtacgcggcacccgtcagcggcatcgaatcgaacatccgttcgttgaaaacccgtgcgagtctcagccgtgaggatgcggccatgctcgcattcctgcgcatccacgtactcgaatacgagaaccagaaaaccccggtggccgactggcaggtcagccgcgatgaaatccgtgccgcgctcgccacgggcgccggctatctcgcgggcggcaatgatgaggaaggcacgacgaagaagatcgccgccgccatctcccgtatgacgacctacgggtatctcgagccgaccgatgacgacgagatgcttgcgatcacgccgctggtaccgattgtgcttgaccggcagctggccgacgagtggctggacatgaccacgccgtccatgacgcacgataccgatgcgggaatgttggatcccatatccgaagaaaacgaaatgaccgacgaagaggagcgatga

SEQ ID NO: 44357 - DNA, 3507 bp, Bifidobacterium sp. MSTE12
atggcgggagacgatatgaaaatcatcgccgatcgatggatgatggaaagccgacagatcgtcaactggggttcctatgacggctaccaggaattcaggccgtccatcgacgccgaatcgccagtcaccctcctggccggcgccagcgaatcaggcaaatccacgctcgtcgacgcgcagatttccctgctataccccaatggcacgccctataacaaggcgtccaatgcgggtcgatccgagcgcaacgattacacgtacctgcgcggcatgatcggcatcagtgacggtgataacggcgaaacgccgatcttcctgcgaggacgtgacgccaatggcacgccacaggccatatggggcgccatcgtcgacacatacgtgaaccgtaccaccggaagtacgctctcctgcggcaaattcctctacctgcccgccggagacggcaaagacgaggtgcgccgtcgctacattgcatggaatcgcaaaatagatccgcaaatcatggaccggtaccgtgatacgccattcacccccagcatgttcaagaaagcgtatccggattgcagcatattccccaatgccagcgcattccacgcatacatctggcaagagatgggcctcagcgccgaagcatgccgactcctgcacaaaatacaatccgctgacgccccgtcgcgactcgacgacatcttcaaacaaggcgtgctcgacgtgcccgaggcgctcagactcgcacaggacaccgtcgacgactacgatcggttcaacgccaacttccatagcatggaagacaaagccagacgcgtcgccaaactccaagacatccaaacccaatacgacgcatacgccaaacacctgacccaagtgcgtgaatacgaagccgtgaaccccgaaagccagcagggcctcgaaaccctgaccctatggatgcgttcgcgcatggccagcgaagtgcgagccggactgcccgccgccgaacgcaaggtgaagcagcaggaatgcgacctgcacgaggcacaggagcggatctccgatgtgaacaggcaacgcgaagccatcgtcgaacgcatcaaaggcattgacggcggaaccttgcaacggctgagcgatgacctggaacgcgcccgacgcgacatgcaggatgtgcgctcgcagcgtcaaagcatcgtcgagaaattcgagggcgtcgaaggtgcattgccatccgacgagacgtcctggaacgcgaaacgtgacgcattggcccgatccatggaaacgttcgacgaacgcatgggggatctggaatccaagcgggatcgtctgatcggcgagcgcaccgcagccagtcaggaatgtgcgcagttgcgccgggactatgatcgcaaacgcaggcagagaacccgcatcacccaggcgatggatgaggctcgtgcgctgatcgcgaaggcggtgggcctgagcccggacgaattgccgtatgcggcggagctgatggatgtgtccgagagcgacgaacgttggcgcaccgccatgaacgtcacatatgcgccgattgcgcagaccattcttgtcgacagccgccacgagcggggattcgcggcgaagatcagcgcgatcgatccggcgctgatgatccggcgcacctggcagttcgtggatgtggacaagagctatgattgcacccgcaatgacggttggatgtcgtcgaaattgcagtatcgtgaggattcgccgtttgccggatggctgaaggaacagaccgcttcggcccgtttggacgcattgtgcgtggagactatcgacgatgccgcacacgaacgccgtcaggtgcaggctgatggtcagatcaagtccggcgtgcatggtttccatggcatcaaaggcatgaatccgatcatcggtttcgtcaatgaaggctatctgacggaattgaagaaacagcttgacgaagcgcatcatagattgtccgataccgaacgtcgctgcggcatggtgcgcaagagcatcgacctgatgcacgcggaaaagaatcttgcggatctggtcgcgaatatgacgtggaataaaatcgatgtggtcggtgcggaaacgcttgtcgagaatctgaaaaggcgaatcgaacagattgaagacaatcctgaaatgacgcggcttgccgagcgacgcgaggaaatcgacaggctgcttgatgaagcgaatgcccgcttctaccacgccaaaagcgaaatgcaatcgacccaggcggcggtcgatgccgaacatgcgtggctggaagcatatgagggcatcgaatttgacgatgatgcgctatccggcgatgtatcgaacatgctggccgacgtatatgagggatgtttcggtggtgtggtccatgccgaggacagaccgaagctgatcgccggcgggaacgatgagatcggcgggcattcgttcgagacacgcgtcgggcacgccatggaacgcgccatgcgcgaacagaacgcggcattgggcaaacgtgcaggggagttgcgcaccgtcgtggaacagagtatggcctcctacttggagagatacgctcccgacgatgattccgcgacaggcggcgttgaggattacaggttctatcttgaggagctgcacagtctgcagatgctcgtcacgcgagaggcgaccgacgaagaatacgccaacagcctcgacaagctcaccaagaatttcctgcaactcaaccgtgcgctcaacaccgaccaggaaaacgtcaaggaccagctcgaacgcatcaacggcatgctcgccgggcagaaattcggcccgcgcggcggcaggctgtccatcgacgtggaattccgccccatcgaacgtgcattcgtctcatccttgaaggccacgctgaacaagctcgacgaatggttcaggaacgacaaggacgatcctgatgccacacgcaaggcattcacctcctgcgccacgttcatcgaacgtgttcgtcgggaactggaacaggtacgcgacgtgaacggcatcagaagctacggcgcacgcaacctcgaccctcgtgcacgaagcacgttctacgccatcgtgcatcatgacgacggtcctgacgagcgcatcagctccaccggcggcaaatccggcggcgccctgcaggaactgacatcgttcatctacggcgcggcgctcatctacctactcggcggcgacgtgaccggcagccccacctatacgacgctgttcctcgacgaggccctcatcaaggccgacggccgctacacgcaacgtgcgctcaacgtgctgcctcgtctcggcttccaagtcatcgtatccgcaccggaaagcaagaccgccgaaatcctcggcgtatccaccaaagcgtatgtggcctacaaggatccgtcggtaggccgttcgttcctgcaggagcttacctccgaagacatcgcccgtcaggaagccgagctccacgatgcaatcgacgacatgccggcggccccgaacgatatagggcccacaacggccacgattctcgaacaggtgttctaa

SEQ ID NO: 44358 - DNA, 1461 bp, Photorhabdus temperata subsp. khanii NC19
ttgaacttccaagggttacaggcaaagtaccgccgtctatttcaggaaagtgcagcctggaaactgttaagagctgataattcccctttaattttggcatttttgggtgagttattttcggaggatagtgaagtcccttttagtcgtgcccgtgtgtcacttgatgcagagctggtacgctgtcgtgaacttggtctgtgggaaacggaaacgggggctggcacttatctcaataaatggattcgggaaggctggttgcgtgagatggatgacacattaactaaaacggatgccagtgaaattgcgctccgttttagtcagggacttgatgagcgccgatcaggaactactgcgtctcatcttcgaattgttcaggaagcagtcagggactttgcggtggcgattagcccaaatgtcgatgagcgtgtcacgcttttggaagatagaaaatccgaaattcagagagagattgatgccctgaaggcaggcattgtaaccgaactgaccgaggttgagcagcgggaaaggattcgtgagatttaccagttggcttctgttttaacgggtgatttccgccgtgttgaagatgaaattcgtcggttggatcaggaaattcgtattcaaattattgagggagactctaccagaggagatgtccttcttgctgttttagaaaaagaagcgttgctagctaaaacggatgccggtagtgcgtttgagagcttttttgatttgttatgtgatcaaaatagaacgatggagctgcgggatcagcttcgaagcattttaaatcgcccggtcgcagaacacttaagtaccccgcaacggcaattcttaagtcagctcatgcgagaattgagccgtgagagtgaccgagtttttcaaatcagacgaagaacagaagagagcttgcgggcttacatagagagtggcactgctcaagaaaatcgtgctgttgatagattgcttggtcaattggaacgacttgctgttgaattgaggaatgctgattgcgacttgcaaacaacaacagctctttcattgcccgttggggcggcaagtattagttctcccgaaagtatgctccttaaatcacccgatgaaaagctggatacctctggtgttgaagagcggtttaactctcgagaaccgagtatacagatgctggattgccttgatactgttcaaatccgattgatcgctgagagggcattagaaacgttaaaagagtttggtccaatgacgattgcatctattgcacattatcacccgcttaattcagggttggaggagttagttgcctatttacgggttgcgaaatctgtcggggcggcattattggaagagaaggaatcaattgaaattagtgacaaacagggagttcgcttgcgggcgtctatccccacttttcttctgagtgccgacctgtttccagacagtttggatgaattggtcctgtaa

SEQ ID NO: 44359 - DNA, 909 bp, Photorhabdus temperata subsp. khanii NC19
atgcataaagacaaaaagttgaataaagataatggtacccccgcaaccctcgagaagtctgattcggatcctcagaaagaacagcaaacagggttcttcgatcagttgataaaacatcatactcaatcagggtataacccgcttacaggcacatccgctgttgaatctgatgtcgctgccaataaaagctcatccgttgaagttgatgatgtgttagccagtgatcactctgaaagttcaagtagtagcatgccacctgatgcgcgccgggtgctggttagcttgctgcgtcagggcgttatattgtcttcgcagaaagccaagttgtttgaatcgctttgtcgataccaatgtgctgtacgcaaacatctgtcagaagtctatttgaagctggttttagatgagaaagcgggtgtcgcctttatagccggttttcaaaatgaggaagataccgagtcattgggtatagatgatgaagaggttgtctctctgattagccgaaggacgctctctttatacgatacgttgttgctgttagtgctgcgcaaacactaccaggatcgggaaacgtcaggtgagcaaaggattatcattgatatcgagcgtatagaatcccatttgacaccgtttttaccgctgacaaacagtactaaatctgaccggagaaagctcaagggtgctcttgagaaaatggtgacgaaaaaaatattgagttcggtgcggggaagtgaggatcgcttcgagattacaccggtgatccgctacgtagtcagtgctgaatttctcgaaagtatgctgaatgaatacctgaaaatggcggatgagaagggtattgagctaaataaaaatggcagcaacgctgttgattatcaaaatggagaggaggaaacaggagatgaaaatgactga

SEQ ID NO: 44360 - DNA, 3405 bp, Photorhabdus temperata subsp. khanii NC19
atgaaaatgactgatcaaactctttcggctgattcattatttcatgttggtcaaatcagattagccgaactctcagtttataactgggggtcatttaacggcttgcataccgcgttgatcgatcctatgggaactttggttactggggataacggtgcgggaaaatcgacgtttattgatggccttatggccttgctccttcctgccggaagggcaacctttaacgtggctgcggcgcagggtgatcgttctgaccggactttactttcttatatgcggggaagttttggatctgcccatgatggagcgggtacgagagtcagaagtaagcgtgaatttggcgtggtgactgggcttagagctttatatcagggcaacgatggctcaaaaatcacgcttgcggcacttttctggatcactaaatcgacgaatgtgcttgcggacgtgacacgagtttatattgtcgccaaaagagacctgactcttaaggaaatgcttgatgcctttggggatggtaatgcccgatcattcaagcaatggctccgtgatgatccggcaatgacatgctgtgatgataatttttccgattatcaggagctgtaccgaaagcttctgtatatggacaataagaatgcgcctgcattgttgtcgcgggcgttgggcctgaaaaaaattgatgatttaaccgggttgattcgtgaattggtacttgaaccgagtacagtcaaagatgatgccaaaaaggtagtggaagagtttgctgatctagtggcaattcatagtcaattagtggatgcaagagcacaaaaagagcatttatccaggttacctgaactcagctcaattatcgaaaaaaagacgaaagaatttgaggaattaacggccgaaaaaaacagtctcccggtctactttggggaaatcttcgcacaattgtggagtgagaaaattgccgatattgaggctgaacttgaagcactatccctcggaattaagcaagctgaagggcagaaagtcgatgcggataacctggttgaacgaagacatgaggaatatcttcagtttggcggggataaaatagaatcgcttcgaaaagaaatgggccatacccaagatcaattgaatcgtgtggttcgaaattcatcgcaatatcaaactcatgctaatgaactggctcttccttctgtattagaggaggctgtatttctcaaaaatcaatccgaagcatcagccaggcttgccagtattcagcgtgacgaagaagagtatcaggacaggtttgccaccatcagtgccaaattcagtgagttgcaagcaaatatccatgatatctctcaggaaattcgggaaatcgaggcaaggccggattctaatattgatgtgaaatatcagcaactgcgggatgaactggttaactccttagaattaagtaaagaccaatgtatatttatcggtgagcttatcgatgtcgaagatcatgaaaagagatggcaaggcgcgatagagagggcgttaggcgggttacggacaacacttgctgtgccacatcattgttattcgatggtgactcgctggttaaacgcccggcatacgggtttacatgtacgtgttcaagttgtgaatgatgctgcgactaacctgggtcaatcggcggagtttaagcctgacggttatttaaggaaactggtatggcgcactcacccttatcgggagtggctcaagcatcacttgcagcgatttgacctgcaatgtgtttcgaatacggaagaattggatcaaaccccgttttcgatgacgcaacaggggttaatgcacatggataaggggcgctttgataaaaaagatcagcaccggatagatgacaggagacactggtgtctgggtttttcaaataaatcacgtttagccattcttaataacgataaaaaagagttaactctgcaactggcggaaaccgggaaaaatgtgagtcaggcccgtcaagatttgaattctgtttctgatcgtaaaatactttgggagaagatccaaagttaccgctgggatgatattaatgctccttactggcacgaaaagctttctgatttgcaagctgaccttaaggtgttagaacaatcaggcggtgatcttgataaggccagagagcgttgggaatcggctaaagagcaattggctcaaattcaatcggcattaaatcagcttaactctgattctggtggcgttaaaaatacgctgaaaaatgcgcaagaagaatggagcaaagcgcaggcaaaagcgtcgaggggattacctgattcagccaggcagttacttgcgattcgggttggcgtgcttaatacaaacgatttaagccggatggctgaattggtgtcgaaagttgaagaagatttggatcgtctgttagattctagccggaacaataaagacagagcggaaagatcagccatcagcattatggtttcgttcaggtctaacgataaatggcaagtcttcacggttgactggcaaagtgatattggcagcttacctgattatcttaatcatttacgacaactggaagaggaagggcttcccaacctggtagagcagtttattgaacgtttgaataagcatgcaacgcagtcgctggcgcggattaaaactaagcttgaatctgaacgggaagatatcctcgagcggattgacattattaaccgggtcctcaagcgtacagagtttcgatcagagacacatttaaagttgggttcaaaaagagagaaattcccgcatgttaatgaatttgaacagcatctgcgtaaggtgcttagtcaggtaaccagtgatgaccatgaagcacggttccgtcagttggctaaggtagttgaaatccttgggaaagcaagtgcgccaggttcctcaaatacattggaaagtttaaggctgcttgattcccgttatcagatgtcattttatgccgaagaattggatatcaatacgggtgagattcgtgatgtattggagtcatccagtggaaagtcaggtggggagaaagagtcatttgcggcaactattgttgcggcaagtttggcctatgttttgacgccgaatggctatgatcgacctgtctactgtactgttttcctggacgaagcattctcgaatacggccgaaacagtaagccggcgtgtgctccgggtatttagggaactgcatattcacgttaatttgattacgccttataaaaacctgaatttggcgagagaatcggcccgctcgttgctcattgcagaaagagaccaggaaaaccacgatagccatttatgtgaagtcacctgggaagagattgatcggagaatgagggaagagaaggggaaaaagttagctgctgaggttgctggtctgggcatcgaacttgaaaaactgatatga

SEQ ID NO: 44361 - DNA, 1197 bp, Photorhabdus temperata subsp. khanii NC19
atgaaaaaagggctgtgtgaaacgcgctgggggttattgccggcacaagttaagagcatcattaggcaacgtgagtgggataatctttcctcactaaaggcccggttactgggcatcaaagcattccctgtccgtgttggcttaaaaccaccgagaggcagttctgctatatcagatatggttcattttcagcggtttgttgatgagtggaaatcatttccctatcaagaccatgtggagtggtcttccaaaaatttccgggagttgtctgagcagcgaatcccgacttttgttgctattgaatcaatgcaacatttgattcaatttttagggaatgatgctctttcgcgaagtaaggtatgggaaagaaatatgaagccattcttgcgggttgataaagatctctatcctgcattggttaagtgtatagatattgtggaaaaactctctttgagagatgcggaattactggcaaagcttcttccacaattaaagccaggcttgggggaaggacaatatttaagagcattacctctcattggtattgatactaagtttcttgagaaccaccaaatcctgatcgaagagctgaccgatgtgattcacaaaggtgcggtttctgcatttggaggtcttactgcctggttgggttgtttaacaaatcccaagggctggttaaccatcagaccgctttgccatactgctatggccgcgcttggtggaattccgatacttcaaatacctggtgaattacttaaacagcacgaacttccagcatcgaatatattagtagtcgaaaacttacagtctggtttggcattacccgacatgcctgacacagttgcggtgataggaggagggaaaaacgttgcatggatggatgcgacatggttgagaagcaagcgtgtagggtattggggagatattgatacctggggcttgtctattctcagtgacgccagagacaagtttgtggatattgaatccctgatgatggatgttgaaaccgttaaagttcatgaagatagaatggttcctgaaccaaatccagttgaatccaatccttcatcgctaaatgaggatgaaacaaagttgtttaataatctcatctctggccggttccagtcttcacgtttagagcaggaacgtctttcatctgattacattagaaacaagcttatagattggctgtcttaa

SEQ ID NO: 44362 - DNA, 1482 bp, Rhodococcus rhodochrous ATCC 21198
gtgtccaccgccgacctgcaccgcctggcgcgtctgcgtcaggagcacccagcgtgggcgctgctgcggtcggacaacgcggccgctgtgctggcgctgctgggccggcacttcgaccgcgggacgcgacggctgccggccccggagctgttcgcccgcctcgatgcggacctgcaggagctgcgcgacgagggcttcgagctgccgcgcaccggtcaggcctattgtgcggactgggtgcgcgcgggttacctgctgcgccgcgcgagcgccgacgcccgggaggagacactcgagccgaccgaggcgacgttcgccgcactcacgttcgtcgcgggcctgacgaccgccaccagctcggtcaccgagtcgcggctgaccaccctgtcgagccagctccaggcgctggcgcgggactcggacccacgcagcgagagccgcctggcggcgttgcgggccgagcgcgacgagctggaccggcagatcgccgccgtcgagtccggggattttcccgtgctggacgggaaccgcgcggtggaacggtccgcggagatcctggcgctggccggggagatcccgggtgacttcgcgcgggtgcgcgccgagttggaggcgctcaaccgggaactgcgggcccggatcctcgacgacgagggcgaccgcggcgacactctcggcgaggtgttccgcggggtcgatctgatcggcagctccgacgccggccgcagcttcgccggcttctacgacatgatcatcgatccggagcggtcgtcgcagctcgacgactggatcgaggcagtgctgcaacgcccgttcgcgcagcagctcaccaccgagcaacgcaaccggttccgcaccctgctcaccgagatggaggacgcgggcggcgaggtccacgtgacgatgacgtcgctgtcgcgttcgctgcgacacttcgtgcagtcccgccactacgaggagcaccggcgcctgcagcggctgttgcgctcggcccagcagcaggccctgcaggtggcgcagcgccgcaaaccatacgacctgctggacctcgaactggtgcgggtaggcatgggcatcgactcggtggcggcgctgcggctgcacaacccggccgacgacctggtggccgagccggtggtgacgcaaccggtcggcgaggtggatctggcggagctgcgccgcatcgtccgcgaatcggagatcgacatggacgagctggccggcaacgtcgccgccacgctacgttcccgcggcagcgccacgatcggcgacgtattgcgcgaccatcccgccacgcaaggtctggccagcgcggtgggtctgctggtgctcgccgcggagcacggtcaccgcgtcgacggcaccgaggagatcgcgtggacgtccccgtcgggcgcgacccgcgtcgcgacggtgcggcggcacctgttcgaccccaccgacaccgagttcaccgcccgcatcaccgaggacgcgtcatga

SEQ ID NO: 44363 - DNA, 606 bp, Rhodococcus rhodochrous ATCC 21198
atgaccgaatcgaccacacgcaccgggctgtatccgggcgacaccggcgaactcgacctcgacacccgccgcgcgctggtgcagctgctcaagggaccgctcgtcaccgccgacaagcacccggaggtgtggcggacggtgatccgcgacgagcgggtgctgcggtcccggctcgcggacgtgtttctcgatctcgtcgtcgacgaggacgatcagctcgcgttcacccgccccgccgacacgggcgaccacaaggccccgacggtgctgcgcaccgagcggctcacgttcatggacaccgtgatgctgctggcgttgcggcaccggctgctgcgcgcccagccgggcgagcgggtgatcgtcgacttcgacgaggtggccgggcagctggagatgtaccgcgcggcgacgagcaccgatccggccggcttccgcaaacgggtcaacgcgtcgtgggagaagctgaagaagtacacgctgctggcggcgacgtccacggaaggccggatggaggtctccccggtgttgcggcagttgttcgacgccgatcaggtcgccgccgtcgaggccgagttccggcgcatcgtcgaggaggacgcgccgtga

SEQ ID NO: 44364 - DNA, 3300 bp, Rhodococcus rhodochrous ATCC 21198
gtgagcgccgcccccatccaccccggccagttccggcttgcgcgggtgcaggtggtcaactggggcaccctgcacgggcatcacgacattcccgtggcccgcaagggttttctcatcacgggcgcgtccggctcgggcaagtcgacgctcatcgatgcgatctcgacggtgctcatgccgggcggcagcgtgcggttcaacgcggccgcgcaggagtcggcggccgggtcgggccgcaacttcgtcagctacatccgtggcgcgtggcggcgcgaggccgacgccgacaccgacgcgctcaccgcctcgtatctgcgcaccggcgccacgtggagcgcggtcgcactgacgtacaacgccgccgacggcacggccccggtgaccctggtcaagctcatgcacctgcgccggggcgccaacgccaacaacgagatctcgcacctgcacctgctcctcgacaccgacgtggagctgaccgacctcgaaccgttcgtcacgcggggaatcgacacccggggcatccgcaagcgctggcctgatgcggtcgtgaaccccagctacgcgccgttcgcccgcgcgttccggtccaagctcggcatctcgtcggaggccgcgcagcggctgctgcaccgcacgctgtccgcgaagagcctgaacagcctcgaccagctgttgcgcgactacatgctcgacgagccgccgacgttcgcgatggccgagcgggccaccacgcagttccgcgagctgcgcgaggcgcatcgcgtcgtcgtcgacgcccgtcgtcaggtcgagacgctcgagccgctcgtcgcgctggccgacacccgtcgcagcggcctgcagtcacagcgcgacctgcaggacgagaccgaccacctcgacgcggtgcacacccggatgacggtggacctgctcagcgacaggctcgacgagacacgagcgcaaacgggtctgctgcaggccgccgcggacaagaccgccgacgaggccgaccgcgccggcgaacgcaccctcgatctgcgagtgcgcgccgagagcgccggcgacggccggctcgcgaccctccgcgtgcacaaggagaccgccgagaccgcactcgaacgaatcacccagcaacgcaaacggttcgacattgccctcgcgcactgggaggcggagacaccggccaccgcggacgacttcgcgcatctacaggcccagctcgagagggaactacgcgagctcgacgcgaccgccgacacgcgcagggccgaactgtacgaggtggccggtgcgctcgccgaacgccggaagacgatccgcgaactgatcgccgaccgggaggtcctggcccggcgccgctcgaacctcgatcccgacctgctgcgcgcccgggaactggtgtgctcggcggccggactcggtgaggacgccctgcacttcgcgggcgagctgatcgcggtgcgcgccgagcacgccgagtggacgggtccgatcgagcgtgtcctggccgggttcgggcgcaccctgctggtgcccgacgagctgtatccgcgggtggccgccgccgtcgacgcacaccatctcggtgcccgcctcgtgtaccggcgggtccgcacgggcgtcggcgcgccggacgcacccaccaccgccgacggctcgctcgtccgcaagctcgaggtgcgtcccggcccgctcgccgcgtggctgcagcaccacctggcggaccgcttcgactacacgtgcgtcgacaccgccgacgacctgcgccgcgtcccgcggggcgtgacccgggccggtcaggtcaagcacggtggcgaccggcacgagaaggacgaccggcggcgcatcgacgaccgcagccgctgggtcctcggcttcgacaacgaggccaagctcgccgacctgcgccggcgcatcggcgacgccgagaccgacgtcgacgcgctgcaacggcggcaggaggcgctcgaacgcgccgagtccgcgatccagcagcgccggcaggccgccgcggtgatccgcgagtccgcgtggtccgacgtcgacgtcgcggcggcggaaaacgcggtggacgcgatcgaggaacggctgcgcgagtggatgcagggcaacaccgaatacgccacgctcaccgcggatctggctcgcgccgagagcgaggaacgcgccgcccggcaggcgcacaccgcggcgctggccaagctcgaacagcaccgggacgagctgacccgggtgcaggcgcggctcgacgaggcgcaggcccacgccggcacggcggtgcccgacccgatcgccgcgcgcatccgcacccggttcgccgcggcggtccgccgcgtcaccgtcgacaacatcgaccgggccctgagcacggtgggtcgcgcgatcaacgaggagatgcggtccgcgcagcacgacaccgcggacgccgagcgccgcatcaccgccatcctcaccggctacctcgccgagtgggaggcgcggcgcgccgagatgcgctccgaggccgagtacgtcgacgatgcgctcgcggtgctcgcccggctgcgcagcgacggcctgcccgcctacgaggacgagttcttccggctgctgcgcgagcagtcgcaccgcaacatcggggagctggcgcgcgcgatccgtaaggctccgggcgagatccgctcgcgcatcgagccggtgaacgaatcgctgcgccgctcgccgttcgacaccgaccggatcctgcgcatcgacgtcaaggaccggcgctcccccgccgcgtcggagttcctggcggagctgctgcagatcacgagcggcgcgtggaaggaggaggaccgggccgcggcggagcggcggttcgaacagatggcggcggtgctcgaacggctcgactccggcgagcccgccgacctgcggtggaagcgcctcgtgctcgacacccgcctgcacgtcggattcatcggggtggaggtcgacccggagggcaacgacgccaactatcacgactcgagctccggcctgtcgggtggacaggcgcagaagctggtgttcttctgcctcgcggcggcgctgcgctatcagctggccgccgccggggaggagctgccgcgctacggcacggtgatcctcgacgaggcgttcgatcgcgccgaccccgcgtacacgcgacgggcgctggacgtgttcacccagttcgggttccacatggtgctcgccaccccgctcaagctgctgcagaccctcgacgactacatcgacggcgtggccgcggtgagcatccgcgacaagcgctactcgcagatcgcactgttgccgatccgcggggacggcacgtga

SEQ ID NO: 44365 - DNA, 1137 bp, Rhodococcus rhodochrous ATCC 21198
gtgagcgcactgtgcgtgccgccgtccgcggtcgccggcaaggcccaggttgcctaccgcagccgccgcacccgatggatcaccgatcccactgcggccgaatcggattcgctgtcgatcgggctgcatccgccgtccgagcggcgggtcgcgcaggatcccgacgccgtcgtcgcgtgggtgcgtgcctggcaccgctacccgggtgccgggcgggtcgagtgggagacgcggcgctggccgagcttcggcacgcaggaagtgccgatgcgcctgctgctttcgggcgcgaccgagatcgccgccgcggccgcacgagcacccgagtggcgcaccctcaccgaacggcaggcgcggctgctcgacggactcggccccggcaccgcgacgctcgcgacagcgatcgccgcgacgcatgcccgctggctggagctggacgagccggacttcgcgcggctcgtcgcagcggtgcgctggctggccgagcatccgtcgtcggggctgttcgtccgccagctgccggtgcccggcgtcgacaccaaatgggtgtcgcggcaccgcggcctggtcgagacgctgctcgacggcgtgcggggcgatcgtgacctgggggtgcggtcgctgccgcggatgtgcgaggtggccgtgtgcgaccgggcgctgctggcgggggcgccccggatcttcgcgacgtcgctcgacgagctggcggcactgccggtgaagccggcccgcaccctgatcctggagaacaaggagggcctgcacgcgctgccggagctgccggcgacggtggcggtgcacggcggcggctacgcggtgcacgagctggcggacgtgccgtggctcgccgcctccgacgtcgtgtactggggtgacctggacacgcacggtttcgcgatcctcgaccggctccgcggccgcctcccgcacatgcgcagcctgctcatggaccgcggcaccgtcgagctgtggcgcgacctcgccgtgcccgagacgtcacccgccccgcacacgcccgcacacctgaccggaccggaacgcgacgcgctcgcggtggtgcgcaccgagggtctgcggctcgaacaggagcggatcccgtggccgtacgtcgtcgcccatctcgaggcgctgtag

SEQ ID NO: 44366 - DNA, 1407 bp, Paenibacillus sp. FSL H8-237
atgaaattatttagcatagttccagaggagttttttaagccactgaacagcaagtataaatctatttatattgattgtatggggattatatacaacacttataaagcagagttatcttttggtgtagataaggagattatactctcagaacttgggaactattttgataatgaatccaaaatggaattgatttttgatgaggaccaagagatcgctagggattcaagggctaaagctaatggaatactccggagacttaaagatagtggttggattgaatatgaactgtcaaatgattatatagtaaaggtgaatttatttgattacgccgctactatgattgagtcttttaataagataattaagaatgaagaaatggaatatcagagtttagtatcgcaaatccatgcaaccctcataaaccgggaggcctatgctaagccctatgagtatattattaaacgtgttgctgagaatacagaagaacttatggtaggtttgaaaaaattaaacaccaatataaaaaaatacattgatgcgattaccaatgaaaaaactgctggtgaaattgttcaagatttctttgtctatcataaggatattggttcaaaggcttatcaccgtattaaaaccagcgacaacatttcctattttagaaccaccatcatcgataatttatacaccctcttaaatgataagcatatatttgatagagcggttttgggttatatggatgtagaacaagtagaagatagaggacaagcagaggattccctaaggggacgtattatgagtattatctctgcctttagaaactatgatgagatcgtatctgaaattgacaataagaattcaaaatatattaatagtgcggtggccagagcaaagtttttgcttacaaataccaataatgccgaggggaaaatttcaaagatattggctgatctttctgatgagttcaataaagacgatactttaaatctgtatgacgaggtagatgattcactatttaaggtttttaatatctttcctcaagggtttatggatagtgattcgttatatgttgttcctatttccaaaaagacagctacgccagaagaactggatgaccaactggggatgtccgaagaagagaggaagctacataagttagcgctacaggaaaaaaacagaaataggttttcccgcaagaatataaatgcttatgttgacgaacagctaaaagataaaaagtctgtgcttgcttctaccttacctttagagaacaaacgagatttgattaaaatcatatttataagcctttatgggaaagacaagaaatccatgtataaaactacagaaataaaagaaattatttcagttaatgattttcgattttgtgattttttgatagaaaggtgtgagtag

SEQ ID NO: 44367 - DNA, 624 bp, Paenibacillus sp. FSL H8-237
atggaagttttcagggaaagccttgtgcaaaaggagaaattcagagtggccgccaataaactgctcaacaattgttttatcataaagaaaaaggaagatacaagaagcgattacatctttatcattcaaaacaaggacctttttattgagtactttgatttgttgggatataagattgagataaatgatatacatggggttgtgtccctgaccagtataaatggaacaggaagattaaggatgagaaagattgaaagtgttattctgctcatagtaagactgctgtacatagaaaaacgtaaggaattaagcctaaatgaggatgtagtagttctggtggatgaaatacaacagaaatataatatgctgaaaattgatgttaagtcatatctggataagactattctcaaagatactgtcagattgctaaagagatataatattatttctaaccttgatactgatgttacaatgtctgactctagaataaagattttcccttcagtattatttgctgtacccaatgataatataacggctatgtatgatgccattaatgagaaattaaatagatatatgaatggaggggagcaaattgatgatgaagaagctatgcaggattag

SEQ ID NO: 44368 - DNA, 3204 bp, Paenibacillus sp. FSL H8-237
atgatgaagaagctatgcaggattagattgatcaattggcattattttgtgaatgaaaccgtcaatgtaaatggctcctttctaattagtggtgagaataccgcgggcaagtcaaccatactagatgcaattcaattagtactgactacgaataatagaaaattcaacacagctgcaaacgaaaaaagcaatcgtgacttaaaaggctatgtacgctgtaaaataggtaatgaagataggacttatatcagaacgggcagtgtgattacctatgtggccctagagttttatgaggaaaaaggagccaagtgttttacacttggagttaagatagattctccggatgaagaaagtaaactaacaactaagtggttccgggaggaaggcagacttgaggaattatctttcttaacagggggaagaccttccatagcagaagaatttcgtaagaacgataagaaagtacaattaatttcacaaatatctgaggctaaatcaaagtttggacaaaggctgggtaatttagaggaaagattttttgatatgattcctaaatcactagcctttaaacctatggacaatgtaaaagactttatcaataagtttatactttcagaaaaagttatagaagttgctacccttaaaaataatatagcggccttatcagaacttgaagatttaatggaagtcaccaaagaaaagatattagaacttcatacaatgcttaccaagaacagcgatattacagccaaagaacgggaaattaaaaccaatgaaattctgattaaaaaggcagatatagaggccaaaaagctggattgtgagcagcttgagaagaacctccatacctgtgagcaaagattaaaagcagagcaagatagtgaggatgctctaagaaaaatgcttaacaatgaaagggaaaggcttactaacttacacatttcaatacatcagaatgagactacccttcttatcaatgaaacgaaacataggatagatatgttagcaatggatctacggacttatgaattgaataataaaaagcttcagaatatgttgaacatagtagctgtagccctgaacttactgaagaaatatgatgtgtttatcctatcaaaggaagatcttataaatgtgggatcagcggattgcggaacagaagataaatcgcaaattgtataccaactaaagaaagaaattcaaagattagtgggtgacttcaattctgatatcttcagaacaagtgagttacttaaacaatacaaaaacagcaaagtcactattgaaaatgagatcaagaacttaaagaataggaaattcacttatccggaaaatacattgcggcttaaatcagctatagagaaggaattttcaaatctggagataaatagtgaggtgaggatattctctgatttattagatataactgacttaagatggcagaatgctgtagaagggtatttgaacagtcaaagattctatataattgttgagcctcagcattataaggtagcattagaggtttacaatagaataaaaagagaagtacatacagtcgggcttgtgaatacaagtaagcttgatattaattctgtagccgatattaattctctcgcttatgttataaagtgtgagcatcgatatgccaaggcatatgcaatttatctgcttaatcgtgtgattagatgcgatagtgtgcaaagcatgaaggaccacaaagtggctattacatcagacgctatgttatatcaaaattatgcagtaagaaaaatagatgagaaaatttataatactccctttatcggaacctttgcgttggagattcaactgaagaaaaaccaggaagacttggaaattttaattgatgatattaaagattctaatcaaaaactaactattttcttgcagctgttggatcatttaaatacatgcaaaatcgatgtgttggaagaaaatctaaatgctcctgaagaactgaaaaagattcaggaacttatagcaaatgaaaatatagaattaaaaaaagcagaggctaaccctggctatatagaaatacaatttcagattgatgagtgtaatagggttgttgataatttggaggaacagcatactgcatccaataaaaaaattggtgagttagagaaaacactaaaaatcaacaataatgatatagaaaatatgataggaactatatctagtttagagaaaaacttcaattccttatgtgagaaagaggctgaagcaactgatctgggacttcataaatataatgagcaaattaaaataaagtcacctgtcacgattgtacaaaacttttcacctcgaaaagcaggtctggagaatgaaagaaccaaatattgcgatgaactggtaaaacttcaagcgaattattgtagtaaatatgattgtgatctagggtctggatatgagcagatggatgaatatataaaggaacatcataggcttgattcatcagatattattaagtatggggaagatttgaaaaaagcaaaggataattgccaattagagttcaaggagtcttttttggccaggctcaaagaaaacattgagaatgcaaaattagaatttaaaaatctaaacgctgctttaagagatatttactacggagaagatagttataaatttgagttaacgcacaataagaaaaaagaaagcatctatcagatgattatatcaaaaaataatgaagcaggcttcaacttatggtccagttcctttgaggatgagtacaaagaagagatggaagatttatttgcaaaactgactgcccatgatgataaaggtgagaaggtacttgctgaatacaccgattatcgcagctatttggactatgatattattgtggagaagaaggatggtacagttcaacgcttttctaagatttatggtgaaaaaagcggaggggaaactcaaaccccatactatgtagccatcgcagcttcatttgttcagctatacaaacttggggacaccataagaatcattatgctggacgaggcctttgacaagatggatgacaatagaataatttctatgatggatttctttaatagtcagaactttcaaatcatactggcaactccaccttcgaagattgagatcattggagaaaaagtggacacaattctaatggctatgagggatggtaccacaagcatagttgaggagtatgatctatga

SEQ ID NO: 44369 - DNA, 1173 bp, Paenibacillus sp. FSL H8-237
atgataaacggatatgagaaagagattattaatatcctattagataagtatgagaaaagtaaaagttttattggcgaaaataagatgaatcaaaaatttagtgttaaggtttcttctcttttccctaattatatcgatcattcaaactatgaagtttttcaagaggtaaatgaagcaattgatatcatagctagaaaaaacttcgtaacagcaaaggcaaattccgccaaagtgtatcataatgttgttctgaaggtagatgagttagaagcaatatatagatatgtaggtagacgtcctaaaaaagatatcaacatgtcggtattggagttaatggagaactacaaaggaagaaatgaaatattagagcgatattgtaaaatgcaatatgaaagaattcattccaacagatctatacagttcttcaataatgatttagcagagctggagaatatattaatagcagttgatgagttgttgaaggttgacagtgaaacatttgtgagagatttttcaatcagggtttttaagggctccaaagtatttgaaggtatatcctctaaagtaataaatctactatttgaatatggggatttccctgaaaaggaacagttattgggcaatttgaacattataaaaaatcctacctatattaactttaaaggtgcggggagtataacaatcaagggacagaggattgatttaacaaatcttagtagtgacattgcgatctcatctggcatgttatctgatattgataaaatcgaggtagttggtgaggctgttataactattgagaacctgacaagttttcatacatttaaggataagaatatgttttccatttacctcggcgggtatcacaatagtcttcgacgagaatttataaaaaaaatatatcaacaaaatccaaagagtagttattttcactttggagatattgatgctggtggattttatatactggagcatttaaagaagcagacaggagtagacttcaaaccatataaaatggatataaaaacattagaaacctacagaaattatacgaaaaacttaacggataatgatagggataggctaatgaaactaaaagatagcgagtactgcaaagtcattaagtatatgcttgataacgactgtaagttagagcaggaagctattggtaaatag

SEQ ID NO: 44370 - DNA, 1434 bp, Paenibacillus sp. FSL R7-277
ttgaagctatttgaggtagtaccagagtccttttttcgattattatcgggaataaataagcaattaaacgttgaggctgttcaacttttatacgaacatgctaaacgtgagcgttttggcatccggattgaattgatgcgggacttgtaccaggaactgattgaatcgtgggaagagttagatacgcaactggagtgggatgaagaacctcggtctctctctccaggacaagtggacttagaagaagtatcgcgtgccaaggcaaatagcttgatacgaaggctagaaactttaggctggattgagctggaaacgcgggatcgttatgaaatttatattgtattacctcattatactattcggatgctatcactcattcaggaactatgtgagggaagggctattgaataccagcgttatgcttttgcgacctacggtatgctatctggtgaagaagctcgtgagcgtcctgctatggccgttcgggaggcattatccaatacccttcagttcgatcgagagttgtttactctctacaataatatgaaacatcatatggaacaggtggttagcaaaaaaacgattcaagaagtgctggaccatcactttgatcgttatcagaaagatattgtcgagaatagttaccatcgattgaagacttcagatcacgtagccaggtatcgtcatcaaatccttgatattgtgcagcaatggcaactagacagcgattggatggagcaggctgtacaggatggaatttcaggcgggctatatgagagttctgaagaagccaagtcccacctgagacagtctttacgggatattgaagcaatatatttaggacttgatgatacgttctataggattgatcttcgtcataatcagtatctgcgttcctcttatgaccgggcacgctatttaagccagcatcatcaaggaatagatcaaaagctggccttattactggaaatgctggggaattcatcgtttcctttaccagatgaagagctcattccactttcacgattgcagaatatacagagtttaaacgagggatcacttcttcctgtcagaaagaaacggattccgcatcagcctgaagaacattatgtaatacctatcccggaagaagtacgtgagcaattgcgtaaagaaagacttgagcgtatgcgcaaggccgttacgcgtaagaaggtggacgatttcgtcctttctcgcttgcagaataaagatagtatggagatcgcggaactggcgcctcagaatgtggaggaagtgctgcttctgacgtatgtatacttatacggccaggatggaggttccccctaccaaattgaacgcagtaaagatcgtttgattttacatgccgctccctatcgtttctacaaccataagatcaaaccacgaatatccggagggaggcaacaaacataa

SEQ ID NO: 44371 - DNA, 606 bp, Paenibacillus sp. FSL R7-277
atgtgggaagagatcagtgaacaagaacggcaaaaaatcaaggctgtgctaaatcatcttttggcggttaattatctagtccgggaaaaagatcgtgatagctatactatagtccggcgacataagagagctattgaagaataccttcaaatgctggattgggaagtgattgttgatgagagacacgaatgtgtatttttacaatccccagacagctcgtttcggcgctctttggatcgggatttaagcatttggatgctcattctacggctcttgtatcaggaaaaaagacaagggctgaccatcagtgccttccccacaacaacgattcatgaaattcgtacaaaatacgaaacctttcatctctcctggctggggaaaaccaagttggatcaagctattaagctctgtacaaggtaccagctcgttgaagcgcttgacgcagatatacgttctgacgattgcagaattgtgctttatcacacctggctatacgtgattgatttagaacaactggatgctattcaaagtcgaatcgaacaatacagggttgaggaagaaaaggggataactaatgaaatggttaaagaagctgcgtttgattaa

SEQ ID NO: 44372 - DNA, 3339 bp, Paenibacillus sp. FSL R7-277
atgaaatggttaaagaagctgcgtttgattaactggcattactttgctgacgaagtgatggatttcggtaagcaaactttgattaccggtaaaaacgctgcggggaaatcgaccattattgacgctatgcaagtattgtttgtagccaaccagcgaatgattaagtttaatcctgctgcccacgaggatgccaaacgtactttacttgattacttaaagggcaaaattggaagcgatgaacgaggatatgtacgggatggtgatttcaacacctatttgctcgccgaatttgaggatcaggaaaaacgggaatcgttcgttgtcggtatggttgcggatgtattctccagtctggaacacgctgaagagttttttattctggctcctatgaacttggacatgttggaactgattaagcccgatggacggttgcgaagccgtgatgaattcagaggatattatcaagggaatagcagtattaaatccgtgttcgagcagaacaaatcacaatatcagaaagcgttgctttctcgtatgggacatgtacatgagcgtttttttcagacttttacccgtgcattgtcctttaaaccaattcagaatattcgtgattttgtataccaaaatattttggatcgtcaggagctgcagcttggtttgatgaaagaaaactttgctgtacatgagcgctatcagtttgaattacaagaactacaaaagcgcaagaacaagttgggccaaattcaagagcgatttcagaatgttgaaaagtatagacatcttgtaattgagcaggattatgtaatccgctcattgcgtgtactcaaggaaaaagagacatttgatcaactggtcttggagttgcagggaataaacctgaaactggaacagactcggagtgaactggaactggccaaacagaagaaagaagaggcaacccggcaaaaagatgaactatcccgtaagttatatgaaaatagtgaagaaaaaagaaaaaatgaactggatctaaatatagaaagcggaaagaaaagcttgatagatttggaggagcggttttctgtctggaaacgttctatgcaaaaacaggctgaatttttagcgaatcttggaatttggaatggtaacagcatttggggtttttcagataatgaccggaagcaattgcaaaatgcagcagatgtacttagtggactatcagctaatttttcaaactatgagggtgatattgaaccggaaaaggaacggcttaggagaatgggagaccagctggaggaggttcaggaacgtatgtccgaaacacggacacgttccagtgataatctgagagaattagaacaacagatcagagaaacagaaggggttattcacaatctagagcagcacaagcgtccttatcatgaaggagtaatgaaacttaaaacattacttgaagaacgcctcggaacacgctcaccagtttggatattctgcgaagagatggagttgatggatgaaacgtggcggaatgcaattgaaggctatttaaatactcagcgatttgaccttctggttgagccatccgtatttcgtgaagctttgtccatatatgagcgggagaagcgtagccgccgtattgaaggaattggcctggtaaataccgcagcagaacagaagtatctgaatacgtctcaagatggctctctggcagagtcgattgacacatcgaattctgttatccaggcccatatggagcatttgttgggaagagtgatgaaagctgttgatgaccaggacttattgcgttaccgaactgcggtaacagctagttgtatgggatacagtaatctggtagctcggcaaatcccggagcgattatactctccgccttatattggagcacaggctgtaacccgccaattggagctgaaacgagaggagcttgtacagttacggaggcagcatgctctgctttctgtggatttggagcaactgcaagcttggttggatcagcttaaaggtaaacaatcccttttggtaatgctggcagatcagttggagcttcaacgggatgtagcaaattgcatggccgagttacagcggtgggaagaagaacgaaaaacaatagatttaagtgaagcagatcggttgcgggagcagattggaagctgggaaaagacggagaaacactgggaggaaaatagggacagtttaaaccgaaaaatcggttctcttgaagaaggagtcaaggaggttgagacgagaaggtttctgcaaatcaactttataaaagataaggaggccattgtggagcagtggaaggcagcatggccggaacgcttgcagtttgcacagggacgactggaagatcctattcgctctacgattgccacagagactaaattaatcaattgggagagcagccgcaaggggaatgaaaccaagcgtgatgaagaatctcaacaattggcccagctcagagctgagtataatgcgacctatacgtttacaaccaatatagacgcagaaaataatgaagtctacagccatttgcttgagcaaatagaagggttagatatccccgattatcagaagaaggtggaggctgcacttcgggtttccgaggaagagttcaagtcacatttcgtttttaaactgcgagaagctattgaaatggcaaaaagagagttcagggagttgaactacgcactggacaactttccattttcctccgacaagtatcatttccacgttgtaccaagcgagaaatatcgcagatattacgatgctgtgatggatccgaggctcatggagcgaggaaccttgtttgatgtgatcgatgatgaacgggctgatgcgctacaggaactatttgagcaacttgtacaaaacgaagcagaggacatggaagaattcacggattatcgtcggtatctggattatgatattttggtacgccagggggataaccaatatcgattttcgcaagtgctgaaggagaagtctggtggagaaactcagacaccgttttatgtggctatacttgcttcattctatcacctttatcgttctgaacgaactcttagaatagttgtgttcgatgaagcatttaataagatggacgagcaacggattcagaccagcctcaaattaatcaaaaaaatgaatctccaattgatagctgccgtacctgatgaaaaaatacagcatatggctcctgaagtgacaactacgcttattgtcaccaatcaggattacaggtgttttgtcgatatgattgatcgttgggaggacgaagaaactcaagtaatcgagcctagggaaactgaagcagattggcagcaggaaacattgttttga

SEQ ID NO: 44373 - DNA, 1278 bp, Paenibacillus sp. FSL R7-277
gtgaacgaacaggagtttaaaggggagtttaagaataagctacttaaccatcttttgaataaatacgagcgaagcaaggcctttattataggtgaagaaacgaagcaacgaccacagcttttattaattgaagagccgtttaaagcagactttgaggacgaaatgaattttcgtaagcgtgaatggatgcaccaagttatagaggtatgtttagctgaaggaatcgtcgatgtgagacgggaaagatcatcccatgtcatacagaaagtctatttgaaatgggaaaagatagaatttgtatataaacaagtgggtagacagccgaaaagagacaagctggctgaattgaggtctatccttggagaactgaatgatcatccctgggattggttagccaaatgggcccaagggacagtaatggtcttaggtggtcagcgctcggggggaatggatttaaatgatctgaaaagctatgtggatgcagtacgtgtactgaaggagttaccgtctatatcaggagacattcccaagcgtatgcttagtatgagagtctttggaaacagcaaatatttcgaacgatatgtagaacgaaggcttctttctattatcaagcaggggatgggggaagcatcggaactgggagaaggagaactggatctgatcggtattgtaccccatcccaaaccggtgctgttgggcggttgtgggcagttcacacttaacggaaaaccattatcattggaattgttcccggatggaatggctttgtaccccgagacactaaaagtttttcaatgggttgaattaaatgctgaacgcatcgtgatgatcgagaatttaagcacctaccaccaatggtttcgagtccggcagcctgtgagtgaattggttatatacacaggaggttttccacatcgaattcttcaatcatttttacgacggttgtgggatgaattacagattactaatgcttccttttcagtattccattggggggacattgacctgggtggactccagatctatcgctttttgcaacgtgattgtccttttgatattcgtcctttgtttatggatgagggaacacttacacaatttggagaagcgggtggagaacatctggagcggtattgtcagaaagccaatgatctgttgcagaatgattcttatgcaaattggcacattttactggaaactatggctaaaacaggattgcgtttggaacaagaggctgttccggatgaacttgtacaaaaggttttcaattcgtcaaagtaa

SEQ ID NO: 44374 - DNA, 1353 bp, Pseudomonas aeruginosa BWHPSA044; identical to SEQ ID NO: 43763

SEQ ID NO: 44375 - DNA, 750 bp, Pseudomonas aeruginosa BWHPSA044; identical to SEQ ID NO: 41752

SEQ ID NO: 44376 - DNA, 3306 bp, Pseudomonas aeruginosa BWHPSA044; identical to SEQ ID NO: 43765

SEQ ID NO: 44377 - DNA, 1146 bp, Pseudomonas aeruginosa BWHPSA044; identical to SEQ ID NO: 41754

SEQ ID NO: 44378 - DNA, 1443 bp, Mycobacterium gastri 'Wayne'
gtggactacgcgacgatcgacgccttgcgggagcggcaccccgcctggcgactgctgcgtgccggcaacgccacgctgatcctgtccttcctcggggtgtttttcgtcgagggcaaccgcggcgcgtgcccagcgagccaggtcgccgccgcgttggacgaccacctgtacgcactgaacgccgagatccccaccgagaacgggcaggaacggtttccgaaggacgcccggtcctatctggaggactgggcggccaccgacgccgcgtacctgcgacggttttacccggccggcgatgacgaagtccactatgaggtgacgccggcgttcgagaaggcctacgcatgggtcatgggcctcaagggcaggtctttcgtcgggaccgagtccaggctgcacaccgtggtcgagctgctgcggcagatcgtgcacggaactgaaagcaaacccgatgtccggctggccgaattgcggcgccgccgcgacgaactcgacgcagagatcgcggccgtcgaggccggcgttgtccacgtgctggatgcgaccggagtccgcgaccgctaccaacagctcgccaccaccgcgcgagaactgctctcggactttcgcgaggtcgaagagaacttccggctcctcgaccgggccgcgcgagagaagatcgcggcctgggatgggtccaagggcgaactgcttgccgagctggtcggaagccgctcgcagatcgcaggctcagaccagggccggagcttccaggcgttctatgacttcctgctctccgagtcgcgccaggccgaactcgcaaaactcctggccaaggtttccgccctgaagctcatcgaagccgaccatcggattcgcggcattcaccacgactggtctgaagctgccgatcgagcgcaacgcaccgttcggcagatatccgaacaactgcgccgcttcctcgatgaccaggtttggctggagaaccggcgagtgctcgacttggtcagagcggtggagagcacggcgctcgaagtccgcggcaacccgccgtctttcgggctcgaactcgaccagccgggcattgagatcgcgcttccgttcgagcgcccgctctaccagccgcccgcggccgtcggggtcgagagccacatccccccggagaccgaggagatcgacaccgacctgctcttcacccagaccttcatcgaccaagcacgcttgatcgagaccatccgcgatgttctgccggagaactcttcggctctgttgaccgacatcgtcgcggcccaccctatcgagcagggtgcggcagagatcgtcggctacctggcactcaacgaccaggaggtgacggtcgacatggacgacgcagacgagacgctcctggactactgcgaccctgctgacccggacgtcaccaagcgggcgaggctgccgaaggtgacggtgcggcgccgatga

SEQ ID NO: 44379 - DNA, 579 bp, Mycobacterium gastri 'Wayne'
atgagcaacgagcatgcgatcgccagcgccatcatccggctgatgcagggggtcgtctaccgcgattcggacgaggacacctggctgaccttggagcgcttgagcgccggcgtgcgagaccatttcgccaccatcggcgtcgacgtggtggtcgacgacgccgaaggctacgcctatcttcgctcccggtcagagcaagacggtgatgaggcgctcccgcgtctggtgcgcaggcgggcgctgacgtacaacgtcagcctgctcctggtgctgctgcgcaagcggctggtcgagttcgagacgactgggggtgaaggccgattggttctcgccaccgagcagatcgtggaaattctgcgactcttccaggccgagtccaccaacgacgcacgagtcgtggaccaggccgagacgacgatcaagaaggccgccgaactgggcttcctgcgccaactacgcggtcaacgcgaccattgggaggtacggcgaatcctcaaggcctacgtcgacgcccagaccctgtcggactttgcggcgaagctgcgggaatacgccggggcggtgaccagtgatgagtga

SEQ ID NO: 44380 - DNA, 2829 bp, Mycobacterium gastri 'Wayne'
atgagtgaaacaatttctgcgacaggcgatctcgggaacacccggcgggccggctaccggctgcagcacgcggagttgttgaactggggtaccttcgacacccacgtctggcggttcactcctggcaccgataccgcgctgctcaccggtgacatcggctcgggcaagtcgacgatcgtcgacgcactcaccacattgttggtgccgtcccataaggccgcctacaacaaggccgccggcgcggaggccagggaacgcaccctgcgttcttacgttgaaggccactacaagtcggagcgcaatgaggccaccggaaaatcccgcgccaagggcctgcgcgagaaccggcgaacgtactcggtgatcctcggagtcttcaccaaccacggctacgacgagacggtcaccctggcccaggtcttccagcagcgcgagagcaccggacagccctaccggttcttggtcacagcgacaaaagaattgtcgatcgcgacggacttcgccgacttcggctccgacctgcgtgatctgcgcaagcggctgcgagccgccggagccgacatcttcgacgaattccccaagtacgcaacctcgttgcgtcgcctactgggcatccgatcggagcaggccctggagctgttccaccagaccgtctcgctgaagtctgtgggcaacctcaacgatttcgtacgcgaccacatgctggaaccaagcgacgccagtccgcgcgtctgtgacattattggccacttcgaagacctgaccagggcacacgatgccgtcaagcgggcgcgggagcaactcgaagcgctcgagcccgtcgtagcgaccgcggcgaagtacgacgatgccctcgccgagcgcgacgcccgggagcgcgagcgatccgccgtgcggctcttcatcgcagagcttcggtcgaatctgctggccagcgagatcgcgcaactggaaaccgacggcgacgccctgtggcaggagcaggacatcgccaaagccaggcagcagacgctcacgcgcgaacgcgaatcccttatcgaggagcgcgcgaaagccggcggcgatcgcatcggcgagctggaacgcctcgcccgcgaggcgcgcgaccaggccgaaacacgccgtcgtaccaggactttgttcgacgccgccgtctccagcgccggcctgaaggcggtcaccggcagccaggagttcaccgccctatccgctctggttttcgccgagcgtccacggctagcagccgagaaacgagacctcgacgcagccagcgccgaagcgatcgggcgcgagaaagtgctgcaacgcaagtgcggtcacatcactgatgaggtcaccagcctgcagcagcgtaccagcaacctgcccgtcgagcaggtcgagttgcgcgccgaactgtgcgcggctctcgggctgacaccggaagatcttccttacgcgggtgagcttctcgacgtcttcgacgagcacgcgcagtggcggggagccgccgaacgcgtgttgcgcgggtttgccctctcgctgctggtgccgcagctgcactacgacgctgtcgccgcatgggtaaacagtcgacagctcacgttccacggccgtgggggcaaagtggccggagccaagctggtctacgaaagggttccccggcaacgggtacgcctccagccacctgagcacagcgggctgctacttgccgactgcatcgacgtcaaagacggcccgttccgcgagtacctgatcaacgagctcacgaaacgagccgacttccgttgcgcggcaagccttgaggagttccgcggccagcgtcgggcggttacccgcgagggccaggtgcgctccggggagcgccacgagaaggacgaccggtatcgcgtcgacgaccctcgtcgttgggttctcggctgggccaacgaacgaaagatcgccgcgctgcgcaccgagctcgccgaactggagaccgagcgcgaggccgcagcatccgagcaggccaggctcagcgggttgcgcgatgcgctgcaggaaaggctggacgcactccttcggatcgagggattccgctcctggtccgatctcgacgttgacgaggcccagtcgcgcgcgaacgactatgacgccgaacgggttcggttgcaggccggctcatcgcgtttggcagagatcgcccgagcgctcgaggacaacgccaaacaagctgatgccgtggccaattcgatcgagcaactcacgggcaagctggccaccacggccgcgaaagcaaatcaagcaaaacgggacaagaatcgcgacgacgaactcgtcgcgaaccagccggaggcacagctggcggcagcccgccaatcgtacccggccctcaccgagcgattggggaagaactgcccgacgcggtcagcggactgcgccgagaccgagaacgctctcgcagttgatctccatcaacgtatcgaccgacttaacaaggaacttggcggctacgcccagagcctgatccagtcgatgctcaaggtgttgatccggtggcccgaacttcgcgcggacatggacgccaatgtcgaggcacgccaagagttcctggcgttccgagaccgcattgcgaccgacgatctcccgcgcttcgagagcgaattcaaagaacagctcaacaagaacgccatccaggagctggccgggttcaacaactggctgcaccggcaggcctcgggcatcgacgagcgcgtcgaccgcatcaacgaggccctcggcgcggtgccctacaacccgggtcgtttcatccggttggagaaggagcccaccaccaaccaggacattgcgcagttccgtgcggacctgcgcaac

SEQ ID NO: 44381 - DNA, 606 bp, Xanthomonas arboricola pv. pruni MAFF 301420
ttgaccggcacgctgctggagcgcggcggcgaggtgcacacggtgatgcagcacttcgcccgcagcctgcgcggtttcgtgcagagccgcggctatctggagcagcgccggctcaatcaattgctcaagcaggcgcagggcgaagccttgcagctgcgcgacagcctgcacgccaccaccgccaccggctacacccaggcgttgagcgcggcccgcctgcgttcgctgtcgcagtggcgcctgcacgacccgcgcctgacccaggtcgatggccgcgtgcaggctgccgatgcggcagacatctcgctcgacagcgtgggcgatctggtcgcgcaatcggaaatcgacgtgcgcagcctgcgccgcgacctgcacgagctgctcggccagcgcccgcgcctgaccatcggcgatgcgctgcagcagcgtccggccgcgcagggcctgggcagcgtgatcggttacctgtcgctgggcacgcgccacggcgtggtgatcgacggacagatggaaacggtgcaatgggaaggcggcgacggcgccctgcggcgcgcacgcattccgctggtgtggttcacccgggagaaacgcaatgaactggactga

SEQ ID NO: 44382 - DNA, 702 bp, Xanthomonas arboricola pv. pruni MAFF 301420
atgaactggactgaggacacccgcctggacgcggacgagggcagcggcgcgtcggccgatgccggccgcacgccgctgacggagacatcgcctgcacagccgcgcggcgagctgttcctgggcgacaccggcacgctgccgttcgacgcgcggcgcgcgctgtgccagctgctggccggccccagcatcgatgcgcaacgccacggtgcgttgtggcctgcgctgctgcgcaacgaggcggcgatccgccaggtgttgtgcgagctgttcctggagctggtgctggaccgcgagggcggggtggccttcacccgtcaggccgacaccgccgagctggaatcgccgaccctgctgcgcagcgcgccgctgacctttatcgagtcggtgctgctgctgttcctgcgccagcaactggccgaagccgatacgcgcggcgagcgggcggtggtggacgaagcgcagttggtggaggccttgtcggtctacgagaagaacgtgtccaccgaccgcgccggattcgcgcgacgggtgctgacggcgatcggcaagatgcgcgagaaccagttgctgtcgcggctgcgcggcagcgaggagcgctacgaggtctcgccggtgctgaagttgctgttctcggccgaagacgtgcaggccctggtggtggcgtatcgcggcttgcgcgagggcgacgttgcgctcgactaa

SEQ ID NO: 44383 - DNA, 4068 bp, Xanthomonas arboricola pv. pruni MAFF 301420
atgaattcccagtccaacctgtcgccggcgcagccgggcgcgtccctgttcactgactcgcttgccgagcagcgcgcgcagcagttccgcatgcggcggttgcaggtgcacaactggggcacgttcaacggcttgaccgaggtgccgatcgccgagaagggcttcctgtttgtcgggcgctccgggtcgggcaagtcgaccctgctggatgcgatgtcggcgttgctgaccccgcccagcatcgtcgacttcaacgccgccgcacgcgaggccgagcgcagcgggcgcgatcgcagcctggtgtcgtatgtgcgcggtgcctgggccgatcagcaggacagcgcctcgggcgagatcgccacccaatacctgcgcaagggcgccacctggtcggcgctggtgctggaataccgcaacgcgcacggtgagacggtcagcctgattcgcctgttctggatcgccggcagcggcaatgccgcagccgatgtgcgccgccattacatggtcgcgccgcgcagcttcgatgtggccagcgagctggatggcttcgatctggatctgcgcaggctcaaggcgcgtcttggcgaggaggtcgcgcatttcgacggtttcgccggctacgcagagcgctttcggcatgcgctgggcatcggcaacgagatggcgttgcggttgctgcacaagacccagtcggccaagaacctgggcgatctcaatgtgttcctgcgcggcttcatgctggacgagccgcgcacgttcgaggcggccgaccggctggtggaggacttcgccgaactcgacggcgcacaccatgcagtggtcaccgcacgccggcaggtggaaacgctcagcccggcacgcgagcaccatgcggcgctgatggctctgcgccacagcgtcggcgagttgcgcgagctgcagctgggcgtggacagctaccgcgaacagcagcgtctggccttgctggagacgcgcctgcacgaactcgacagtcaggaccgcgggctggccggcgaagaaggccagcggcgtgagtcgctggacaatcacgaacagaagctcgccgggctggaacgcgaacaacgcgccgccggtggcgagcagatcgaggaactcgaacgcgagcgcgcccgggtcgagcgcgagcgcgacgagcgcctgcggcggcgcgtgcagatcgaacaggcctgccgccagctcggcaccgccctggccgcaggcgccagcggctttgccgagcagatcgcgtacgcgcagaccgtgctcgagaacggcaagcacgacgccagcgcgctggatgaggcgatcgccgagcgcatgggtgcgcgccgcgacgatgagcggcgctttgccgagatccgcgccgaactggatgcgttgaagcgcgccccgtccagcatgccggcaccgatgcaggccttgcgcgcgcgcctgtgcgaggacaccggcattgccgaagcggcgctgccgttcgttggcgaactggtgcaggtgcgcgaggatcaatctgcctggcgcggtgcgatcgagcgcgtgctgagcggttttgcgcagtcgctgctggtggacgaccgccattacgcgcaggtcagcgaatgggtcaaccgcacccagctcggcacgcggctggtgtatttccgggtacgccgcaacgatgcgctgcatgcgcgcacgccggatgcgcgtgcattgccgggtaagctgcagctgcgcgagcatgccttcaccgagtggctgcgcaacgagttgatgcgccgcttcgattacgaatgcgtcgataacgctgctgcgctgcgcaatgccgaccgcgccatcacccgcgaagggcaggtcaagcatcccggcgaccgttacgaaaaggacgaccgccatgcggtcaacgaccgcaagcgctggttgctgggccacgacaaccgcgacaagctcaaggtgttcgagcgcgaagcgcagacgctggcccagcgcatcgccggctgcgatgccgacgtggccgcgctgcgcaagcaacgcgagcaggaccaggaacggcagctggccgcgcacacgctggtggagcgcgactgggacgagattgatgtcggccccaagctgcagcgcctgagcgatatcgacgaacagctgcagcagctgcgcgaaggcaacagcggcctgcgcgcgctcggccaggcgatcgagaccgcacgcaccttgcgcgaccaggccaagcgcacctacgaggacgtgcggctggagcgcgcgcagctggcacgcgagcgggtccggctcgaacagcagcacgctgcctgtgccagccgtgccggcaccgccgcgctcacgcccacccagctgcagggcctgcgcgaacgcctggcggcgttggtgccgctgtcgctggacaatctggaggcgcatttccgcgtggtcgagcgtggcctggccgagcaactggccgaaagccagggccgcgacagccggctcagcgcgcagctgctcgattgcttccgcaagtactgccagcaatggccggaagacagcggcgatttcaccgtgagcctggccagtgccgacgattttctcgcgcgcctggatcgcctggagagcgatggcctgccgcgccacgagcaccgcttcttcgatctgctgcagacccagagcaagaataatctgctggccctgcagcgccacaccgccgaggcccacaagggcatcaagcagcgcatggacgaggtcaacgccagtctggagcaggtgccgttcaatcgcggcacgctgctgaccatcgaggtcagcgaccgtcgcctgggcgaggtgcaggaattccagcaacagctgcgcgcggtgttgtcgcatcaacagaccgaagaccgcgcactggccgaagcgcagttttccaccttgcgcgcgttggtggcacgcctgggcgcgcaggaaccggacgcacgccgctggcgcgagcaggtgctggacgtgcgccagcatgtggaattcatcggtgtggagctggatgcgcagacccgcgcgcaggtggagatctaccgcagcggcgccggcaaatccggcggtcagcgccagaagctggcaaccacctgcctggccgccgcattgcgctaccagctcggtggcgaagacggcgaactgccgcgctattgcgcggtggtgctggacgaagccttcgacaaggccgacaacgaattcaccgcgctggcgatgaacatcttcgagaacttcggtttccagatggtggtggccacgccgctgaaatcggtgatgacgctggagccgttcatcggcggtgcctgttttgtggaaatcagcggccggcacaactccggcgtgctgctgatcgaatacgacgagcaggcgcagcgactccagttgcccgagcgctcgcgcggggacgaggccgctgcagcggtgacggaacaggcggtgagtgctgcgcagggcgaggatgcggcgcgttcgacgcagggtgaaacgcgtatggacagcaccgctgccgtctctggcgctgagggcgcggcacttcaggacgtccctgcacaggacgacgtggcggctaaggcgggcaggcgggccagcaaggtcgcgccggcatcgacgccggctgttcgagccgcgccgaagcccgcgaaaacagccgctgccagcgcacgcgcgggatcaggcaagtcggcagcggcgaagaccgcagggggcaaggccgcgtccgccaaacctgcatcagccaggcgtgcatcgcctgcagcgggcaaaccgcgcaagccggcaacgccgaccaaaccggccaggacgccagcgaacaccggaacggcatccaggcgcacgaccgcgtccgccaaaccgactgccaggccgaacaaggccgcgacaacagcggcagcgccgaaaaagcccgctgccaagtcggcgttggcgaccaggcgcgccaccacatcgctgggtggcgcaaccaaggcaaccaagacaactgcggcgcgtagcgcggccaggcccgtaccaaccaagcccgcgccagccaaacccgtggccaaggcgcgtgctgcgtccacgcgcggatctgcaggcaagccgcgcggaaaacgctga

SEQ ID NO: 44384 - DNA, 1392 bp, Marinomonas ushuaiensis DSM 15871
atgttatttaaacatctacctgatgaaatattccaggcattaagcggttcaaatagagcgttgatagaggcggtactaacagatcttgctgagatcttttatgatcatgctgaagaccctataaaagataaatcgacgatcatcgaatccatagaagatactttgcataaagtggatacttttgcttggcatgatgatcaaaaagaatcattcgagtcaccaaagaccattcatgattatgcgttgcgaatttatcatcgccttgtgaacactggttggctggtggaagagcaagagctttatcgtgtgagtgttttgatgacaccgcagatatctatgcttcttcgatctttggtggaaataagtcgccatggtaaacgcaactatggcgctacagtgctaagcatactcagtaatttagaagcagtcgccaagcagcctaaggaacgtggtgttacattacgccagtcagcagaagcgtcaagagacttctccgcacatcttaatcaaatattacttggtattcgaagcttacaaaaagagctttttgcaagccgagacccgaaagccattgtggctgggttcttcgatttgtttgtagaaggtattctaattgccgattataaaaccatcaagacaagcaataacccgtttcgctttagacgacaaattttagaattaactcaagactttttagctaatcctgagacacttgggcaagttgctcaatgttatgttgatcagcagcttatcactatggcggaagcgcaagccatggttgaaaaagattgtcgagacattatgcaaacgtttggcaatatagaacaacgcttagagcgcattgatgaataccgataccgattagaaaaacgtgctgcagacacggctcgctatatggacagttctcgtcctggtatggcgaataaaattgcaggaataatttcagatgtagctaagtacgaaaaacttccgattttgaaagaagtcgtcggtgctcgttttgttggtgtctcatctgccgcacagccaactaaacgacgtgaaccaccaccaccacgaataatgacgccaacagaagtatcagctgacgccataaagattcgagatcgacaacgtcgcttccatgaagctagacaagtaaccataccaaaaatgcaaagttacttagaaaagcaaatgtccttagataaaaacaaacatattctagatttcactattgagtccgtagaagattttgtttgtttcgaccatttgcgatacataggttcacttggtgtaaccgctaaaaaactcgaagattattttgaaatacactttaccaatcagtatttggatgtacatgggttcgttgaatgtcgcgaatttaatgtggtacgtaggagcaaagcgtaa

SEQ ID NO: 44385 - DNA, 645 bp, Marinomonas ushuaiensis DSM 15871
atgcttaaagaattaaaaaaagtagtggaagagtcaggtaaagacgctcaagagttccaacagacagctaactttattattgcgaatcagtttgcgagtgcttttaagcatgggcagcgtaagcattatttattattggaagcttaccaagactactttgaccaattatttgatgctttaggcatgagactttacataaatgaaaacgagcgtttggctggagtattacccgtccaaaaagaagcgtttgttcgtttgaaaacggatgaaactttgttcttgttagtgcttcgtcagatttatgaagaaaaaattgaaaactttgaggtagacaatggatttgtggcgaccaatactcacatcatattggatcgctttgtaaatcttgtgaaacgagaaattccaagtgaaactcgcttcaaagatattttggctctttttaatcgtcatggcattttgattcgtggtaagtcttatgaagaagacagtaaaaatcaaataattaacattacgccagttgttcgacttatcgttacagaagcctatttgagacagctagagtcctttaatggtgccgaccctgatgaagatgatattgaatcagatttagatgtcgaaacaacgtcagaaactaaccaggactag

SEQ ID NO: 44386 - DNA, 3414 bp, Marinomonas ushuaiensis DSM 15871
atgaaaaagctcaatcgaatcgtattagtaaattggtacctacttggtgcagaagaaatcaacattcgtggtaatacagcgattgtcggaccgacaggttctggtaaatcgtctttattggatgctattcaaacagtattaacaggtgcaagtaagcgacatctaaattacaacgccagtgcaaacgacggtaaagcaagtggtcgaagtatccgatcttatattttgggtatgatagattcaggtcaagccagtgcaaaagtatttggcactcagccaagacaagatgcaactagctatttagctttggtatttgaagacagtatttcaggtaatgaatctacagttggtttggcactaagtgcttctttagcgtcaccagaagaagatgtgctcggtcgttttgtattgcctaattacggcgcaaaaaaatctgacttcatcgatgcaatggaaggtaaaagttacaaagccaagccttggattgaagtacgtgaatcgctaaagaaaatctgtcttgacccttacattaagtcaggtagtgcctcagcgactcaatatatcaaccgatatcttgatgagttaagccctagttcagataagttgattacgcttgatagttttttgaaaaatttcaaaaatgcgcttaaatttgtcccgatcgcttccccaactcgatttgttcaagattttgttttggccgaagcgcctcttcaggttggtgcgtatcagaaatctttaaatgaatatcgccatcttgaagcgaaaaccttagaagtgtctaagcgaatcgatgatttaaagctcatccaagtagattgcgagaaaaaacaccagcaagagcaggccgccgttaattatcaatggatagcaacggaagcacgttttgatgaacttggcagcaagcaagatgacattcaagaccagtatgaattacaaaaagagcgagaagaagaaattgaagaagagctggcaacacaagctagcttattgaagcaattacagagtcagttgctgcgctttgaacaacaatacgaacattcagatgttggtttgaaattacagcaacttgaacaaagtaaaaaattactggtattgcaggggcaacaagatcagaaagctattatacaagttcgtcagcttactttattgctgtcatctcttacctcgtttcaggacttagtttccaaagaaacaatgagcttagtaaaagagttttctgcgtttgatggtttgatcacagaagagggtcgtgttgaaggcaaccttaagcctctgacgcaaaagctaaatgaccttaatgcactgcttgataaagaaaaagcacaagtatttggtcagcgttcagagctaaaccgaacaattttaaatttaaaagacgaatgtaagcaattagagtctgacgtgtcatctttgaagggtggcgtgagtccattgtctcagaatacaaaacgtttaattgctttactaaaagatgccaacattacagcgacgccattaagtcacttagctgaagtgactgatcgtaaatggcaagacgctattgaaggctatttaggcgctcaacgtgaagctctgattgtagagccggaagatgcagaagaggctattcgtgtttttcgtgctcaccgtcgtcaactaatgggctgtcgtgttgttgatacaactcaaacaaggctttggttaaatcgtggggatcaaaattcagctttgcgttttattcgctgtaacaatgatcacgctcaggcatatttaaatcgtcgtttaggtggtattaaaccagtagaaacagagcgtgaacttttacgtgaagacagcgcaatgactgcggatggtatgttgaaattgtcaggtactatttctacgattcgctcagtgcctcatatgatggttggtattaatactgacggaatgcgcgaatcacgagaaactcaacttgccaagttaagtggcgaattgatgtctttcctgaaagcggatcaacgccttgagcaagcagactccttgcttggtcgtatcatggcaaataatcagtttgatactgaatcgatcgggaatgcgagccatactgttacacgattaacgcaagaattagactctgtcgaaactgaaattgctcaattacagaaacatgacgatacggatcttcaagaaaaaattgaagagctaaaagttcgtatctcaaatgttgagctggaacagaagaaacgagatcgtgagcgtcagcaaatttcagagcaatttggtgcgttaaacacacaaaaaagccaattaagttcagcgttggccgcacttgatgaagagcgaaatcgcttaacttctaatccaaggtacaatgcccaatttgccagtgagcgctatgcgttattagaaagcagcatggtaaatggagcagccatctataaagagtcaattagtcgagctgacaaagccagcgaaaaagctcgcagttttgaccaaaaagttcgtaaggaagtggctgatcattactctaagtatcatcaggcaaacctagataatgatactcaattggattatttagaatctaaatttgaagagtttgagcattatgtttcttatcaaattgatgttttgagtgaaacagagttggcgaaatacgccaaacgagctgaattagcacgccgagaggcagaagaaacattccgttctgattatgtttctaaattgaaggattctttggatcaagtagctcatattattaaagagttgaatcacagtcttaagcgtcgcccgtttaaccatgaaatctatcaatttcgttattacccaaatggtgatatgaaagatattcttgatcttgttaagcgttttagcgatcaggatcaagctaatgtaggagggttgtttgatcctcatttaagtgatgaccctgaacatgttcgtgccattacttctattcaagagttaatctctgatgaggaaaaacaacaagatctcgcagattatcgtaagttctacaactttgaagttgatattcttgatggcgaaggcaataagaaaactacattgagtcagcgcattcagactggttctggtggtgagcatcagattccattctatttggccattgctgccgcgttatctactacttaccgcttacatgaaacaatggatggcgatattgttggtgggttctcgctagctatgtttgatgaagcattcaataaaattgatatggttaagacatcaacttgcatgggctttatgaaagatattggtctacaagttattgccgcagcgcctgatgataagcgtgctgttatggcggcaaatatggacacgattattagtgtatggcgcgaaggtggcgcggtgtctattgatgttgcctatccaaaagaaaaagggcaagtgctccttaatgggcagttagacactctaccaacgatataa

SEQ ID NO: 44387 - DNA, 1485 bp, Candidatus Entotheonella sp. TSY1
atgacacatgacgagttacaagccacgttcaagcaggcctatagcgtcaaactcctcgtgagcccgaacgcgtcccttatcctcagctttctctacgcgcagtttaaacagccgggccgcgtggtgattgcgcaccatgagttgagagaagcgctcgaggaccaattgctggcgttgcgtactcaagatgcgcgccgctaccccagcgatgcccagagctatctgcgccagtggtgtgatgaggaccatcgctttttgcgcaaatattttgccgttggtcaggacgacccggtgtacgaattgacctcacacaccgagcgcgccatcgaatggatgatctccctgcacaaaacagacttcatcggcacggaatcccgctttttgcgcattcttgacttactcaaagagattgtcatcaactgcacgcccgatgtggcggttcgcctgcagtatctggaggcccaacgggcgatgatcgatgcgcaaatcgatgccttaaataccgccgttgaggcggctgaggatgacgaaccggacatctcgctctattccgagacccaggtcaaagaacggctgttcgaagcctcggatggcgcgcggcggctccttgccgatttccgtgaagtggaagaaaattttcgcgccattgcgcgctcggtacacgagcaacaattccggctcgggactcgcaagggcgagattctacgctattttctcaacgctgaagacgcgatcaaggagtcggatcaagggcgcagcttttatgcgttttggcagtttttaatgtctcagagccagcaggatgagctgcgtgaatggctcgataccattgaggcgatgcccgcatttgaaatcgattcggagcagccgccggtgcttcggcatctcaagcgctatttgctggaagccgggactcaggtggtggcctccaaccggcggctcatccagcaattgcgccaagttctggacgaacagcaggcaggccagatgcagcgcgtacacgatttgatcaccgacattggcaaattggctttggagctatcgccggattttcccgaagatgaggcgtttattgacctcgaaggcgcaccgggcgtggaaatgccgcttgagcggcagttgtgggagccgccggtgacatcgcgttttgatcatcgtcccttggctcagggcgaagccaatttagccgaggctgatttacaggcgctgtccaatcaggtatacgtcaacgagcagcagttgcgccgcaatatcgacactcttctcaagcgtagccagtcggtgaccctggccgatgtcgtgaaatcgtatccgattgagcgggggctcaccgaggtcatcacctatctctcgattgcggcgaaaagccgtcaacaccggattgataccgatgtgcatgatacgattgcggtgggacagcaggccgaggtgcgggatatgacactgcctcgcattgtctttgcacgtgcttcagtttcggattga

SEQ ID NO: 44388 - DNA, 621 bp, Candidatus Entotheonella sp. TSY1
atgagtgagaccctgttgccctatgcggcggccattttaaaacttctgcgcggggtcgtgtacttcgacgacaaagagtgggagaccctgttgtcgtacgaaaaggcgattcatctgcacatggccggtattggcttgcagctgcacgtggatgaagccgatggctatgcctatttgtcccagcccgatgacgacgacccgttagagggacaagaacctggccgggcgagtgagagcgtcgccgctcgcgaattgccacggctggtgcgccgcatcccgctcaattttgaggccacgctgctttgcgtggtcttgcgcgaagagctgttgaagttcgagatgcgggagccggatctcgaacgcatggtgctttccaagcagcaaattcaagaagccatgcaaatcttttatcccgaaccggctgacatgacccgtttgatggggcggatcgatcgcgtcatcggtcaggtggaacgggctggatttctgcgtcccatcaagcaccatgatgaagatgtgtacgaagtcaagcgcattatcaaggccaaaatctcggctgataaactggtcgaaattcgcgatcaactgcgtcagtacgccgattcgaggagggctgagtga

SEQ ID NO: 44389 - DNA, 3140 bp, Candidatus Entotheonella sp. TSY1
gtgatccgaagcgtatccgatcagcagggggacattgcgccgcacctggcgggccaagaaaatgggactgctctcgtgcagggggctcttggattgaacgacgcagtccgtagcgggtctcgtttgttccggcttgaggtgtttaattggggcacttttcacggtcgggtgtggagcatcaaaccgcgtggtgacaccgccctgttgacgggtgagaacggctcgggcaaatcgacgcttgtcgacgcgttgttgacgctgctggtgccgaatcaaaagcgcaattacaaccaggcctccggtgccgctgcccgccgcgagcgcaatgaattgtcctatgtccgaggcgcctacgccaagttgcaagggcagggcgatcacgccgcgcagacccagtatttgcgcgatcaagatagctactccgtgctgctcgcctatttccgcaatgaggctcagggacgcgatgtgacgctggcccaggtgttttggtaccaggatgggatcaagaaattctatgtcgtctcggatcaagagctcgatatcgcttcggggtttagccaatttgccaatatccgggcgctcaaagagcgcttgcgcagccatggggcagaggtctacgaccagtttgaacgctatagccgccggtttcgcgccctgctggggctgcagtcggccaagtcgttggatgtgctcaatcagacggtgatgattaaggacatcgatcggctgagcgatttcgtgcgccagcatatgctcgatccgactgatgtacacgagaaaatccggcaattgctggagcattacgataatctcactactgcttatgatgccttgcgcaatgcggaataccagtacaaactcttggtcccactcgaagaagaggctgggcaatacgccaagtgtgaaacggaaattgccgaactcgacacgtggatgggcatggtgccggcctattttgccggtgtgcgcacgcatttgattcaaaccgcgatgacccagacgcagattgagttggagcaaacgcatgagcagtaccaacagacagccgatcagctcaatacgttgcgagaacaggataagcggttgacgcttgcgctcaaccaagagcggtccgggccgcaactccaggcgttagagcagcagatgacctatgtgcggcaggaattggcccgcaaacagcggcaggctgagcactatgatatcttagctcactcgcaggagctgcaaacctatgggcatgaggctgacttttatgccaaccggcgtcaagccgagcaactgcaaccgatgcttagaacgcagcgtcaacaagtggaagcgcgcttgagcaccttgcaattggagcgcgaacaactcttgttgcaatgccgtaccttgcaacaagaactcgattccatggcccggtggaaaaatcagatccccggacaacagttgacgctgcggtcgcgtttgcttgaacctttgggcatgcgggaggacgagatcccgtttgtgggtgagctgttgcgcgtgttggagtccgagtcgctttgggaaggggcgattgagcgggtgttgcgcaattttgctctggacatgctggtgccggaatcgcactaccacgagttcagcagctatatcaatcgcacgcatttacgcggtcgtatcgtgtatcatcgcatccgagacctcgatggctttacggcgcctcgccatatcccggacaacgctttgattcacaaaatagaaatcaagcccgacagcatgtatcacgattggctccggcacgagctgcaccgccgttttgattacgagtgttgtgacgatatggatggctttgcggtggcgcgcaaagccatgacgccggagggattgattaaaagcggctacacccggcacgaaaaagatgaccgctatgacattcgcgaccggcgcaattacattctcggctgggacaatgcagccaaacgcctcgctttggagcaagagctggatgctttgacgcataagcagcagcaaaatgagagccagctcagtacctcgcaacaggcgctggatgccttaatggcgcggcaggaacagttgtcaactctcttgagttttgacgactttgaggcgattgactggcagcgcgaggcagctaaggtcgaacaattgcaagcgcaaaaggcacagttgacgctgaactcggatcgcctgatgcaattgcaggatgaacttgaagagctccagggccaaatcagacaagttgaaacgcagttgcagaatctaaacaaaaccacgggaggattggagcatcagtatcagcagtggcaacaagagctagcgagctacgaaacggagcagcaacacgttcaagccgatctcttggccaaagccgtgccacatcttgaggccctgatgaatggtgatttgaccctggacaacgccgccgcccagcagcgccaggtggaaggccacctgcgcaccgctaggggcgtggccgagcgtcagcggcaaggcgcggtgggcacgttgatccgtacgatgcagcgctataaatcgacgtttccggaaacgactcagcatctcgatgcatcgttgcaggcattgccactgttcgagcagattttggatgacctgagaaccgacgatctgcctcgttaccgcgagcgctttaaaaacttgctcaacgaaaaagtcctggagcacatcgcctttctctacggcgatttgcacaagcagatcgaagcgatcgatgagcgtctcaccacgctcaatattgccctccagggccttgactacaccccgtcaacttacatccagttgcaggctgaacccactcgtgatgccgaagtgcgcgcattccgggaacagctccaagcctgtttgccggacgtcgcggccacgctcacacatgaggattacgaggcaagttttcagcgcattcaggagctgattacccgcttccaagaggacacgcgctggaccggtaaggtaatcgatgtgcgccaatggctcgattttgctgccagtgagcgctaccgcagcaacggtcaagaaaagcactactactccgattcggctggcaagtccggcggccaaaaagccaagctcgcctacaccatactcgcctcggccattgcctatcagtacggtttgcaagctggtgtcgggacaca

SEQ ID NO: 44390 - DNA, 1473 bp, Candidatus Entotheonella sp. TSY2
atgacacatgacgagttacaaaccacgttcaaacatgcctatagcgtcaagctcctggtgagcccgaacgcgcccctcattctcagctttctctacgcgcaatttaaacaaccgggccgcgtggtgattgcgcaccatgagttgagcgaggcgcttgaggaccaattgctggagttgcacgctcaagatgcgcgccgctatcccagcgatgctcagagttatctgcgccagtggtgtgatgaggaccatcgctttttgcgcaaatattttgccactggtcaagacgacccggtatacgaattgacctcacacaccgagcgcgccatcgaatgggtgatctccctgcacaagacggaattcatcggcacggaatcccgctttttgcgcattctggacttgctcaaagagatcgtcatcaactgcacgcccgatgtcactgtgcgcctgcagcatctggaggcccaacgggccgtgatcgatgcgcaaatcgacgccttaaataccgccgtcgaggtggctgaggatgatgaaccggagatcgccctgtattccgagactcaggtcaaagaacggctgttcgaagcctctgaaggggcgcggcggctgcttgccgatttccgtgaagtggaagaaaactttcgcgccattgcacgctcggtacacgagcaacaatttcagctcggggctcgcaagggcgatattctacgctattttctcaacgccgaagacgcgattaaagagtcggatcaagggcgcagcttttacgccttttggcagtttttaatgtcgcagagccagcaggatgagctacgcgaatggctcgataccattgaggcgatgccggcgtttgaaatcgattcggcgtcgccgccggtgctgcggcatctcaagcgctacctgctggaggccggcacgcaggtcgtggcctccaaccggcggctcatccagcaattgcgccaagtccttgacgagcagcaagcgggtaagatgcaacgcctgcacgatttgatcaccgacattggcaaattggccttggagctgtcgccggattttcccgaagacgaggcgtttattcaccttgaaggcgcaccgggggtggaaatgccactggagcggcagttgtgggagccgccggtgacatcgcgttttgatcgtcgtccattgacccagggcgaagccaatttagccgaggccgatttcaatgcactgtccaatcaggtgtatgtcaacgagcaacaactgcgccgcaatatcgacacccttctcgaacgccgccagtcggtgacgctagccgatgtggtgaaatcgtatcccattgagcgcggcctcaccgaggtcatcacttatctctcaatagcggcgaaaagccgtcaacaccggattgataccgatgttcatgatacgattgtggtgggacagcaagccgagatgcgagatatgacgctgccgcgtatcgtttttgcgcgcgcctaa

SEQ ID NO: 44391 - DNA, 603 bp, Candidatus Entotheonella sp. TSY2
atgagcgaacccctcttgccttacgcagcggctattatcaaacttctgcgcggggtcgtgtacttcgatgacaaagagtgggagactctgttgtcgtacgagaaagcgatcgagcttcacatggccggcattggcttgcggctgcacgtggatgaagccgatggctacgcctatttgtcccagcccgatgacgacgagggtgaaagtgagaatgaaaccgctgtcgctcgcgagttgccccggctggtgcgccgtatcccgctcaattttgaggccacgctgctttgcgtggtgttgcgcgaagagttgttgaagtttgagatgcgtgagccgggtctcgaacgcatggtgctttccaagcaacaaattcaggaagctatgcaaatcttttatcccgagccggctgacatgacgcgcttgatggggcggattgaccgcgtcatcggtcaggtggagcgggccggatttctgcggccgatcaaacacggtgatgaagatgtgtacgaagtcaagcgcatcatcaaggccaaaatctcggctgacaaactggtcgaaattcgtgatcaactgcgtcagtatgccgattcgaggagggctgtgtga

SEQ ID NO: 44392 - DNA, 3387 bp, Candidatus Entotheonella sp. TSY2
gtgatccgaagcgtatccgatcagcagggtgatatcgcgccgcacctggcgagccaagagaatggtgtgcctctcgtgcagggcgccctcggattgaacgacgcggtccgtagcgggtctcgcttgttccggctcgaagtgtttaattggggcacctttcacggccgggtgtggagcatcaagccgcgtggaaacacggcgctgttgacgggtgaaaacggttcgggaaaatccaccctggtggacgcgctgctgacgctgctggtgccgaatcaaaagcgcaattacaaccaggcatccggcgctgccgcccgccgcgagcgcaatgaattgtcctatgtccgcggcgcctacgcgaagttgcagggccagggcgatcacgccgcgcagacgcagtatttgcgtgatcaagacagttattccgtgctgctcgcctatttccgcaatgaggcacagggccgggatgtgaccctggcccaggtgttttggtaccaggacggggtcaagaaattctatgtcgtttcaccccaagaactcgatattgcttcggggttcagccaattcaccaacattcgggcactcaaagagcgcttgcgcagccacggggcggaggtgtacgaacagtttgagcgctatagcagacgctttcgcgccttgctggggctgcaatcggccaagtcgttggatgtgctgaatcagaccgtgatgatcaaggatattgaccggctgagtgacttcgtgcgccagcatatgctcgatccgacggatgtacatgagaaaatccggcaattgttggagcattacgacaatctcacaacagcctatgatgccctgcgcaatgcggaataccagtacaaactcttggtcccattagaagaagaggccggacaatacgccaagtgcgaaacggaaatcgccgaactcgacacctggacgagcatggtgccggtctattttgccggtgtgcgcgcacatctcattcagacggcgatggcccggacgcaggttgagttggacggtgcgcatgagcagtaccaacaaacgaccgaccaactcaatgcactgcgagaacaagataaacggttgaccctggcgctcaaccaagagcaggccggaccgcaacttcaggccttagaacagcagatgacctatgtgcggcaagagttggcgcgcaagcagcgtcaagctgagcagtacgatacgttcgctcagtcgcaggacctgcaaacgtatgggaatgaggccggcttttacgccaatcggcgtcaagccgaacaacttcaacccatgctcaggacgcaacgccaacaggttgaagcgcgcttgagcaccttgcaactcgagcgcgaacagctctcattgcagcggcgtaccttgcaacaagaactcgaatccatggcccggtggaaaaatcaaatccccggacagcagttgaccctgcggtcgcgtttgcttgagcctttgggtatgcgggaagaagagattccgtttgtgggtgagctgttgcgcgtgttggagtccgagtcgctttgggaaggggccatcgagcgggtgttgcgcaattttgccctggacatgttggtgccggaatcgcactaccacgagttcagcagttacatcaatcgcacgcatttgcgcggccgtattgtgtaccatcgcatccgagagctcgacggctttaccgcgccgcgccatgtccccgataacgccctgattgacaagatcgaaatcaagcccgatagcatctatcacgactggctccggcacgagctgcaccgccgctttgattacgagtgctgtgataatatggacgcctttgccgtggcgcgcaaagccatgacgccggaggggctgattaagagcggctatacccggcacgagaaagatgaccgctatgatatccgcgaccggcgcaattacattctcggctgggacaacgcggccaagcgccatgccttggagcaagagcttgatgccttgacgcataagcagcagcaaaacgagagccagctcaacacctcgcaacagactctggaggcgctgaccgcccgtcaggaacagttgtcgaccctcctgagttttgatgactttgaggcgattgactggcagcgcgaggtggctaagatcgagcaattgcaggtacagaaggctcagttgacgctgaactcggatcgcctgatgcaattacaggacgaactggaagacatccaaagccaaatcaggcaagttgaaactcagttgcagaatctgaacaaaaccacgggaggattggagcatcagtatcagcagtggcaacaagagctagccggctacgaaactgagcggcaacacgttcaagcggatctcctgaccaaagccgtaccgcaccttgaggctctcatcaatgatgacagcaccctggataacgtggccgcacagcagcgccaagtggaaggccatctgcgcaccgccagaggcgtggccgagcgccagcggcaaggcgcggccggcacactgatccgcaccatgcagcgctataaatcgacgtttccggaaaccacccagcaccttgatgcatcgctgcaggccttgccgatgttcgaacagattttggatgacctgagaaccgacgatttgcctcgttaccgcgagcgctttaaaaatttgctcaatgaaaaagtgcttgagcacatcgcctttctctatggcgacttacacaagcagatcgaagccattgacgagcgcctcaccaccctgaataccgcgctccagggtcttgactacaccccgtcaacctacattcagttgcaggctgagcccacccgcgacgccgaagtgcgcgctttccgggaacagctccaggcctgtttgccggatgtagctgccgccctcacaaatgaggattacgaggcgagtttccagcgcattcaagagctgattacccgcttccaagaggacgcgcgctggacgggcaaggtgatcgatgtgcgccactggctggattttgccgccagtgaacgctaccgtagcaacggccaagaaaagcactactactcggactcggcaggcaaatccggcggccaaaaagccaagctcgcctacaccatactcgcctcggccatcgcctatcagtacggtttgcaagacgagtcaaacggcgctgacacgtttcgatttgtgatgatcgacgaaatctttagccgctccgaccacgaaaattcccgctacgccatggaacttttcaaagaactcggtctgcaactcctcgtggtcacgccgatgactgccctgcatgtggtggagccctacatttccgcctgtcactttgtgtttaacgacggagaagggcgcaattcgcaggtggaaaacatgacattagggcaattgcgccagcaaccgccggtatag

SEQ ID NO: 44393 - DNA, 369 bp, Candidatus Entotheonella sp. TSY2
gtgcctgagggtcaactcgatactcgtcatgtacaagcccaagccaatgcgactgcgcccaatgaggcgatgctggatcacttgcatagcgttaagttgatcgcagtcgccacacagatacgagacacgttaacccactatggccccttgacgatcgccggtctgctcaaacaccatccgttgacagccggcctggaagagttggtggcttatttgcgagtcgcccaagccgtgggggccacacaattggaagtcaaggagtcggttgtcgtcagggatcgccaaggtgaggttttgctggcctcgattcccggttatctactccaggcgactcagtttccccggcagcttgaggaattggcgttatga

SEQ ID NO: 44394 - DNA, 816 bp, Candidatus Entotheonella sp. TSY2
atgactcgagaccccaacaccgatttgtcggcgccaacgctgttcgaccagcttcgttatgttcgtgatgatgcctccgaacccatcgtgcacgacgcgccgaatgagcaaccaaaccccgattcctcgacagaagtcctcggtattcaggaggagctagaaatacctgggccggaagagccgagcaatggtcggctgccgcctgaagcacgccgtgcgttggtcaatctgatgcgccagggggtcatcctggctgacggcaaacgcgtgctatttgaagcgttatgccgctacgaagccttgattcaggaccatttggcagatatgtatttgcgcttgctgatcgaccggcaaggaggcgtggcgatcctgttgcagcgggaagtcaccggtgatgagccggacggcgacgatgacgatgatgatgatgaggtgacatcgctgattagccgccgcaccctctccctgtacgacaccttgttattgctggtgttgcgcaagcactatcaagaacgggaagcggcaggtgcacagcgggtgtttgtcgacatcgatcgcatcgaagcgcaactcaccccctttttgcccctgaccaatagcagccgtagcgaccggcgccaactcaacggcgctctgcaaacgatgaaggatcgccgcgtgctcacggcagtacgcggtgatgcagaacgctttgaaatcaccccggtcatccgctacgtggtcaatgccgcttttctagaggagatgctcgacgcctatcaccatctggcagagcaagccgggctatccgaatgcgaggaaccgagggatgactga

SEQ ID NO: 44395 - DNA, 2114 bp, Candidatus Entotheonella sp. TSY2
atgactgatcggcaagccgtgacctatgcagatctgtttagcagcgggcaaattaagctagccgagttgtcggtctacaactgggggtcgtttcacggcttgcatcgagcgcgcatcgatccggacggcacgctactgaccggcgataacggtgccggtaaatccaccctcgccgatggtctgatggccttgttactgccccccggccgagccacgtttaatgtcgcggcagcccagggagaccgccatgatcgcagtttgatctcctatatccgaggcaacaatagctcggcccatgacggctctcaaacgctgaccaaaagcaagcgcgaaggacccgtggtcaccgccctccaggggctttatcaagccgaagatggggcgcgaatgaccctcgccgccctgttttggatgacctcggcctcgcacgccttggcagatctcaaacgactctatctggtggccaagcgtcaactcgacttggaagaattgctacacgcctttggtcaaggcaatgtacgtgccttaaaacagcacttgcgcaatgacccctttgtgattgcctgcgatgaccgctttggcgagtatcaagagacctaccgccgcctgttatgcatggaaaaccgcaatgcaccggctttgttgtcccgtgctttagggcttaaaaagatcgacgatctcacgactttaatccgcgaattggtgttggagcccagtaccgtgcgtgaagatgcacgcaccgccgtagctgagtttgatgatttagtggccacccatgaccagttgttggatgcacgccagcagcgggatgcattggcctcgctacctgaaatcgagcgtgaactctcatcgacccaaggcgagctgcagcagttaatcgctgaacaagacggcttgcccgtctatgttgctgagcaatcccaccggctttggacccggaaagccaccgagctgagccaagccgtggtagaagctgaaatcgagttgaaacggatcgaacaggctgagatggatggcgctcaacgggttgagcagcgtcatgccgactatttacaagcaggcggcgtgcgccttgaaatcatcaagaaggagttgcaacaagcaagggagcaattgactgccgtcaatcaaaaagccagtgaatatcagcaaacagctcgcgtgctgggtctggatattcggctgacagaaacggcatttttggcaaatcgtcagctagcggatgcagcccaggatgatctagagcaagagaagctcgccgcccgagaccggctcatagaagcaggaacgcaatacagtgagttgcagaagcaactccgggcgttacgggatgaaatcgaagagattgaagccagaccggattccaatattgatccgagatttcagcggctgcgggacgacatgaccgagatgctcgggatcgatcgcgaacagttgatgttcattggtgaattggtggatgtgcaagagcggcatcgcgactggcagggtgcgatcgagcgagcctgcagtagcttgagtacaattctagcggtgccggagaatcgcttttctctggtaacgcgttggttaaaccaacgccataccggcttgcacgtcagagctcaggtggtgtatgccgtgcagggccaagcgtcgtttaaatccgacggctatcttcgcaagttgcaatggcgcgaacacccctatcgcgagtgggtcaagcactacctggccaagttcgacttgcattgcgtcgagaccacggacgaactggatcgcacgcccttctccatgacccagcagggcttgatgcatttacatcaaggccgattcgacaaacaagaccagcaccgtcttgatgaccgaaggaaatgggctctagggttttccaacaaagcccgtctaagcctactacgccaggatacggtgcaactggaggctgacctatcggcttgcagtgaaaagaggactgcaacccggtcggatttggaagcagtcgaccagcgtgctcgagactgggaaaaactgaccacctatcaatggcaagagatcaatgtgccctactggcaggagcgagtacagacggtcgagcaagatctcgcagccttggaaggtcaagagaatcatctggc

SEQ ID NO: 44396 - DNA, 1515 bp, Bifidobacterium moukalabense DSM 27321
gtggctgacgtgagacgggagctggaacggctccggcccatatatgagaccggggtgctgaggcttctgctgcgcaataactcgatgctgtacgttgcgttgttgcggtcctcgttcgacccgcttaccggtgaactaccgcgtgacgtgctggaggagcgcatctcccgcagtctgtcacgcctgatcgagaccggcgactacatgctgaaggacgatcagacgccaagacaggcctcgcatgcaatcgtacttgaattgacccgtgaaggcgacgatgaatacgcctggctcgccaattcgctggacgtcgcctcgcaccgttacctgtaccgtctgacggcacgtgcgcatcgcgcgatcgaagcgctgaaccggctggaagacaccacacaggcgctgtccggcgcgcaggcgaacagcatcatcatggaaatcgagcacgcacgcatgcagctgaccgccgacccgcgagaacgcatcaaactgctcaaaaaggacatcagggaacgtcagaggcaaatcgatgaactcgaacacgacgaaaccatcgaaagactgacctccgaacaggttggcgacatcatcaacgtcatccacaacacacttcggggcgtgccgatcgacctacgtgagctggcgcttgccgaacgcgacaacggcgacgcgctccgccgtcgcatgcaggctggcgccatgagcgtggaaggcatccttaccgcctatcatgacgaataccgcaagtcgttccgcgaatccgacagtggcagacgcttcgaagacgcgttccaggtgatcgtcaccgacgaaggacgccaggaaatcgacgacgccgtgcgcgatatcgccagaaacccgtatctggacggcgaaccgggcgcgctgctcggccaggtccgcgccgaacttgaacgcatctattccggcatcgaggatgtgcgcaggcaaacgcgcgcctcggacgaggcgatcagccgcctcgtccgccagcagaccgacacccgctaccgcaccatgctggccacattgaaccagctgttcgccaaagccagcgccgaagcgaagacgaacccgaacgccacggaccggccataccataccgacaccggactcgcgcaaatcgcgaccttgcccaccaagccagcgaaaccgatggtaagaaacaccattgcggaactggttgacggtcggccaacggtcgaaatgcccgatctcaaagccatgatcgaagtatgcggaccacgtctgcggcacatggccggattgatcaaccgcaatccggtcatgaccgccgacggtacacgcgtcgacttcgcggcaagcttcaaccaactgcccgaaaacgaacggcgagagagcgaaatcatcggcttcctcagcgcactacgcaccgaaaacgacacggcatacgccacctggaactgcatatcgctcgacggcaccgccagaacatggcgcacccaaccaatcctcaccaccacggcaacacttgacgacatcataggagaaaaataa

SEQ ID NO: 44397 - DNA, 708 bp, Bifidobacterium moukalabense DSM 27321
atgacggacgaagcaaacgaaaccacggaaatcgaacggtcattcccacccgtcgaacagcccgcactgttcgacggcgacaccggcgacatgagctccgacgcccgcatggcagccatcgcattgaaacgcgagcgctacatctccggcgaactgttcaacctggtcaaagacaacctcgaagccgtcgaacgctccctgaacaacgacatgctccgactcgtatccaacgagagataccacgtcatgtatgcggcacccgtcggcggcgtcgaaacgaacatccgttcgctcaaaacccgcgcaagcctcagccgcgaggatgcggccatgctcgcattcctgcgcatccacgtgctcgaatacgagaaccagaagacccctgtggccgactggcaggtcagccgcgacgagatccgcgccgcgctcgccacaggtgccggctatcttgcgggcggcaacgacgaagagggtacgacgaagaagatcgccgccgcgatctctcgcatgacgacctacggttatctcgagccgacggatgatgacgaaatgcttgcgatcacgccgttggtgccgatcgtactcgaccggcggctggctgacgagtggctcggtgtgacagcggaggccatgacggacgatgcgcatgcggaaacgtcggaatccatattcgatgaggatacgacgatcgacgaagaggagcgatga

SEQ ID NO: 44398 - DNA, 3489 bp, Bifidobacterium moukalabense DSM 27321
atgacaggaaacgatatgaggatcgtcgccgactgttggatgatggaaagccgacagatcgtcaactggggttcctatgacggctatcaggaattcaggccgtccatcgatgccgaatcgcccatcaccttgttggccggcgccagcgaatccggcaaatccaccctcgtcgacgcacagatctcactgctgtacccaaccggcacaccctacaacaaggcatccaactccggtcgctccgaacgcaatgactacacgtacctgcgtggcatgatcggcatcagcgacggcgaacacggcgaaacgccgatcttcctgcgagggcgtgacgccaccggtacgccgcaggccgtatggggcgccatcgtcgacacatacgtgaaccgcaccgacgggggcatgctctcctgcggcaaattcctctatctgtccgccggagacggcaaggatgaggtacgtcgccgctatatcgcatggaatcgcaaaatcgatccgcgaaacatggaccagtaccgcgatacgccattcacccccaacatgttcaggaaagcgtatccggattgcagcatattccccaatgccagcgcattccacgcatacatctggcaggagatgggcctgagcgccgaagcatgccgactcctgcacaaaatccaatccgcagacgcgccatcacggctcgacgacatcttcaaacaaggcgttctcgacgttcccgaagcgctcagactcgcacaggacaccgtcgacgactacgatcggttcaacgccaacttccatagcatggaggacaaggccaaacgcgtcgccagactccaagacatccaaacccaatacgacgcatacgccaaacacctgactcaggtacgcgaatacgaagccgtgaatcccaacagccggcaaggcctcgaaaccctgaccttatggacgcgctcgcgcatggccagcgaagtacgagccggactgcccgccgccgaacgcaaggtgaagcagcaggaacgcgacctgcatgaggcacaggagcggatcgccgatctgaacgggcaacgcgaagccgtcgtcgaacgcatcaaaggcattgacggcggaaccttgcaacggctgaacgatgacctggaacgcgcccgacgtgacatgcgggatgtgcgctcgcagcgtcaaagcatcgccgtgaaattcgagggcgtcgaaggcgcattgccgtccgacgaggcctcctggaacgcgaagcgtgacgcattggcccaatccatggaaacattcgacgaacgcatggaggaactggaatccaagcgggatcgcctgatcggcgagcgtgccgccgccaatcaggaatgtgcgcagctacgtcgggactacgatcgcaaacgcaggcaaaggacccgcatcacccaggcgatggacgaggctcgtgcgctgattgcgaaggcggtgggcctggacccgaccgaattgccgtatgtggcggagttgatggacgtacgcgagtgcgacgaacagtggcgcaccgccatgaacgtcacgtatgcgccgattgcgcagaccattcttgtcgatggacgacatgagcgaggattcgcggcgaaggtcagcgcgatcgatccgtcgctgatgacccggcgcacttggcggttcgtggatgtggacaagagttatgaattcgccggcaatgacggttggatgtcgtcgaaactgcagtatcgtgaggattcgccgttctccggctggctgaagaaacagaccgcttcgacccgtttggatgcattgtgcgtggagacgatcgacgatgccgcacatgaacgccgtcaggtgcaggtggatggtcagatcaagtccggtgcgcatggtttccatggcaccaagggcatgaatccgatcatcggtttcgtcaacgaagactatctgacggaattgaagcaacagcttgacaaagcagatcgtagattgtccgataccgaacgtcgctgcgacatggctcgcaagagcatcgacctgatgcatgcggaaaagaatctcgcggatctggtcgcgaatatgacgtggagcaaaatcgatgtggtcggtgcggaaacgcttgtcgagaatctgaaacggcggatcgagcagattgaaggcaatcctgaactgacgcagcttaccgaacgacgaaaggagatcgacaggctgcttgacgaggcgaatgcccgcttctaccacgcaaaaaacgaaatgaaactggcccaggcgacggtcgatgccgaacacgcatggctggatgcatatgaggacatcgaatttgacgatgatgcgctatccggcgatgtatcgaacactctggccgacgcatatgagggatgcttcggcggtgtggtccatgccgaggacagaccgaaactgatcgccggcgggaacgacgaggccggcgagcattcgttcgggacgcgcgtcggacatgccatggaacgcgccatgcgcgagcggaacgcggcattgggcaaacgtgcgggggagctgcgtaccgtcgtggagcagagcatggcctcctacctggaaaggtacgctcccgacgatgattccgtgacaggcggcatcgaggattaccgattctatcttgaggagctgcgcagcctgcagatgctcgtcacgcgcgaggcaaccgacgaggagtacgtcaacagccttgacaaactcaccaaaaatttcctgcaactcaaccgtgcgctcacaaccgaccaggaagacgtcaaggaccagcttgaacgcatcaacggcatgcttgccgagcagaaattcggtccacgcggcggcaggctgtccatcgacgtggaattccgccccatcgaacgtgcattcgcctcatctctgaaagccacactgaacaagcttgacgaatggttcagaaacgacaaggacaaccccgatgccacacgcaaggcattcgcctcctgcgccacgctcatcgaacggattcgtcaggaactggaacaggtacgcgacgtgaacggcatcaggagctacggcgcacgcaacctcgacccgcgtgcgcgaagcacgttctacgccatcgtgcatcatgacgacggacccgacgagcgcatcagctccaccggcggcaaatccggtggcgccctgcaggaactgacatcgttcatctacggcgcagcactcatctacctgctcggcggcgacatgaccggcagacccacatacacgaccctattcctcgacgaagcgctcatcaaggccgacggccgatacacgcaacgcgcactcaacgtactgccgcgactgggtttccaagtcatcgtatccgcaccggaaagcaagaccgccgaaatcctcggcgtatccaccaaagcgtacgtggcatacaaggatccggaaaccagccgctccttcctacaggaactcacatccgaaaacatcgccgatcaagaggccgagcttcagaccgaaaccgcagccggaccagaccaaagatttcgaacagacgttctaatgcagtcctga

SEQ ID NO: 44399 - DNA, 1455 bp, Paraburkholderia caribensis MBA4
atgaatctcgaccattcaaccctcgatgctttaaggattcaccatcccgcatggcggctgttgcgttccgaccacgccccgctggtggcgagcttcctgaatcgtgtattcatcgttccgaacgtgcgcgctatttcggcagcggacttgtccgaagcgctcgaagatgaacttttcgcactccgcgatcggctgggcgcggacgcttatccgaaacgcgccctcgactacctcaacgactgggctgccgcggaaaaaggctggctgcgcaagttctatcgtccgggctcggatgacccgtacttcgatctcacaccgtccacggaaaaggcgatcgtctggctgggctcgctaacggagcgtggctttgtcggcacggagtcgcgcctgctgacgttgttcgaactgctgcgccaaatgagcgaaggcagcgaatccgatcctgaaaagcgcgtggcggagttgctgaagcgtcgggacgaaatcgatgctgacattgcgcgggtgcagtccggcgagctgggtttgctcgacgacacggcgatcaaagaccgctttcagcaattcgtgcaattggcccgcgaactgcttaccgattttcgcgaggtcgaacaaaactttcgcatactcgatcgccgcgtgcgcgagcgcatcgccctgtgggagggttcgaaaggcgccttgctcgaagacatcatgggcgaacgcgacgcgatttccgactcggaccagggcaaaagctttcgggctttctgggatttcctgatgtcgagcacccgccaggaggaactcacggaacttctcgcacgcgtgcttgcgttgccggccattgcaggtttgaatcccgacacgcgcactgcacgcgttcactatgactggctggaagcgggcgagcatacgcagcgcacggtagcgcaactctctcaacagttgcgtcgcttcctcgacgatcaggtatggctggagaatcgccgcatcatggatattctgcacggcatcgaggccaaggctctggccgtgcgcgacgagccgccgggcggtgagatgatgcaactgtccgaggctggcgccgacatcgaactgccgatggaacgtccgttgtacacgccaacgcaaaagccagttatccaggatatcgagctggagtcgggcgatgtcgatctcgacgccgcggtgctgtattcgcaagtcgtggtagaccgcatgcagctcgctggccacattcgccaggcattgcaggatcgcgcccaggtgacgctacgcgaattgatcgaatcgcacccgttgcagcagggccttgccgagctggtcgcgtatctgcaacttgggagcgacgcgttcaagacggtcgttgacgaaggcatgcaggatgtcatcgtgtggcagacggcgcgtgacgaagaggggccaacggcgaggcgcgcccgactgcagcgagtgatctttgtgagatga

SEQ ID NO: 44400 - DNA, 648 bp, Paraburkholderia caribensis MBA4
atgacgatggaagaggaactgcaagagaaaacagcgagcgtcgatttgtcgacactcgcggtcacgttgctcaaaggcgtgatttatcgtgaaggcgatgagcgcctatggggcgcattgctcgacctgcaagtgcgagtgcgggactacatgtcggtgctgagtctcgaattggtgctggacgaggcggagggctacgccttcctgcgcagccgtgcggagccagccgaagccgacacagcgccaaagccgccgcgtttgatcgcgcgccggcctatctcttttccggtcagcttgctgctggcactgctgcgcaagaagttggccgagtccgacgccagcggaggcgattcacgactgatcttgtcacgcgatgaaatcgtcgaactcatccgggtcttcctgccggataccaacaatgaagcaaagctgatcgatcagatcgagacacacatcaacaaggtgatcgaactcggtttcctgcgcaggctcaagatcgcgagcgggccatcgagctttgaagtgcggcgcatattgaaggcgttcgtcgacgcgcagtggctgtccgacttcgatacgcgccttgccgcgtatcgggagcaacttggaggcgcttcggcggggaagggaggtgaggcagatgaatga

SEQ ID NO: 44401 - DNA, 3378 bp, Paraburkholderia caribensis MBA4
atgaatgagcgcaacggcgcgattccccaactgctcgaactggactacctcggggatgatacgctcgccggtttccgcctgacgcggctggaagtattcaattggggcaccttcgacgcacgagtctggacgcttcagctggacggcagaaatggactgctgacgggcgacattggttccggcaagtcgacgctagtcgacgcgatcacgaccctgctggttcccgctcaacgcattgcatacaacaaggcggcgggcgcggacctcaaggaacggacgctgcgctcgtacgtgcttggacactacaagtctgaacgtaacgaactgacgggcgcggcgcgtcccgtctctttgcgggaccacaacagctattcagtcatcctgggtgtttttcacaatgccggatatgaccagacagtctcgctcgcgcaagtcttctggataaaagaagggcacagccagccagtgcgtttttatgtggctgcggagcgcgatctgtcgatcgcggcggatttcacccacttcggcagcgacattgcccagttgcgaaagaagctgcgtggagcgggtgcggaaatcgaagatgcgtttccgaaatacggcgcgtggtttcgccggcgctttggcatcgagaacgaacaggcactcgaactgtttcatcagaccgtatcgatgaaatcggtcggcaacctgaccgattttgtgcgcagtcacatgctcgagccgttcgacattgcgccgcgcatcgccgcgttgatttcgcattttgacgacctgaatcgcgcacatgagtcggtgcttaaggcgaagcggcaagtggagttgctggtgccgctggtggccgactgtgaccagcatggcgcgctggcggcggaacaggaacgctcacgcgtttgccgcgacgcgttgaagccttatttcgcaggcctgaagctgagtttgctgcaacgacggctgcagttgctcgccgatgaccacgcacgtctttccgtacacagagagcggcgaatcgagcaatgcgatcaggagcgaacgcaagccgatcgcctcaaacttgcgatcgtcgagcaaggcggcgacagactggagcagcttgccgctgcgattcacgatgaggagcgcgagcgcgaccggcgtcagcgcagggcagaccgttacgcgcagttgttggctgccattggtgaatctcccgctgtcgaggaatcctctttcatcgcgcaacgccaacaggtggccgacctgcgcgaaggcgcgggcgtgcgggaagctgacctgcagaaccagatcaccgagtggggcgtggcactgcgggagggcaagcgggagcacgacgcgctcgccggagaggttgccagcctgaaggcgcggcgcagcaacatcccgagggatcaggtggcaatgcgcgcggccatgtgcgcggcgctgggcctcgacgaagatacgatgccgttcgccggcgaactgattcaggtgcgtaaagaggcgcacgaatgggaaggtgcgatcgagcgcgtcctgcacaatttcggcgtgtcgctgctcgtgcacgatacgcactatgcagacgtcgcggcctgggtggatcgcacgcatctggctggacggctcgtctatttcagggtgcgtcccgcacgggacccgaacaccgctgaactgcatcgtgaatcgctcgtgcgcaatgtcgcggtgaaaccggactcgccgttctacgactggctggagcggatgctcgcgcagcgcttcgattacgcatgctgtcagacgcaggaacagtttcgccgcgaggctcgcgccttgacacgtacgggacaggtcaaggcgccaggcgagcgccacgagaaggacgaccgccatcggctcgatgatcgcggccgttacgtccttggatggagcaatgcggccaagatcgcagcgctcgagcaacagatgcatgtccttgcaacgcgcctcggcacgctcgctgggcagattgcgcaagcgcaaggcgatcaggcaaaactgcggcaacaactggaagcgttcgctgcgctcaatgagttcaacgattttcgggagatcgactggcagaccacgtcggccaacatcgctcgcctgatagacgagaaggcgcgtctggaggctgccagcaacgcgttgctggagttggccgcgcaactcgaagcggtgaaggccgcactgaaggaaagcgagcacgccttgtcggaagtgaaccgggagcttggcggcatcgacgcgaaacgcgaagcagccgaggcgttgcgggagcagaccgaggcatcgctgactgacgtcgacggcgatacgcgggagcggctggacatgctacgcgccgagattctgggcgagcatcagctttcagtcgaatcgtgcgacaaccgtgagcgtgaactgcgtgaggcgttgcaggcccggatggacgcagagacgaagcgtctcgagcgactcaccgagcgcatcctcagaaacatgtcgaccttcaaggacgcatacaagctcgacacggcggactttgacgcgagcgtggaagcggcgttcgaatatcgcgagttccttgctcggctgaataccgacgatctcccacgctttgaggctcgcttcaaggagcttctgaacatcaacacgatcaacgagatcgccaacttcacggcacagctcgcgcgggagcgcgaaacgatcaaggagcgcatcggcctgatcaatgaatcgttggcgcagatcgattacaaccccgggcgttacatcgtcctcgaatcacaggcgagccccgatgtggacatccgggatttccagggtgagttgcgcgcttgcacggaaggaacgctgacgggttcggacaacgcccaatattcggaagccaagtttctgcaggtcaaggcgatcatcgaccggttccgcggccgtgaaggactgtcggatcaggatcgtcgctggaccacgaaagtgacggacgtgcgcaactggtttctgtttgccgcaagcgagcgctggcgtgaagacaacacggagtacgagcattattccgattcgggcggcaagtccggcggacagaaggaaaagctggcttatacgattctcgcagcaagccttgcgtatcaattcggcctcgaatggggagccgtgcggtctcgcacgttccggttcgtggtgattgacgaagcgttcggacgcggttcggatgagtccgcccaatatgggctcaagttgttcaggcagttgaatctgcagttgctgatcgtcacgccgctgcagaagattcatatcatcgagcctttcgttgccagcgtaggttttgtgcagaacgaaggcgggcgcgcttcgaagctgcgcaacctgtcgatcgaggaacatctcgcgcgcaaggtggagggcacggcgtga

SEQ ID NO: 44402 - DNA, 996 bp, Paraburkholderia caribensis MBA4
atggttggcgtcccccatgtccggatcgaatggcgtgagttcaaccatcgtgtgctaggtcttcagcgcgtgccgcaggctgtctggctggacgatctcgacagcgccctggggatgatcgggaaacgcgccgacgcagcgcgttttcggcggttgctggaccaggtgggcttgcgccagccggcgctgtcgccgtggtttcgccagcgcccgctgcaggcgctcgaactggccgaggagtgtgcgtgtttgctggcggccgttgaatggatcgcgcaacatccgcgtccaggtatttatctcaggcaggtcgatattgccggcgtgcatagcaaattcattgaacgccgccgtggtgtgctgaccgaatggctcgatctcgtgttgccggttgaagccatttcggccgatcgaagtggaagtgcgcaatttgcggcacgctatgggtttctggagaaacctgtccgtatccggtttcgcgcgctggatgccagcctgccgattcttcccggtacggctcttcccgacatcacactggatgcgggcagctttgcagcattgaacctgcctgtccggcgagtgttcatcacggagaacgagaccaactttcttgcattcccgccgatcgccgatgccatcgtcgtattcggtgccggatacggatgggacgccttgtcgaaagcggcctggttgtcgcgctgctgcatccactactggggggatatcgacacgcatggctttgcgattctcgaccagttgcgcagccgcttcgggcacgtgaagtcgttgttgatggaccgggcgacgctgatggagcacgaagcggtatggggtgaggagtctgatcaggtacggcgtgacttgccacggctcgaccatgcggagcgggcgttgttcgacgaattgcgcgacaaccgtctgcgcaacaaactgcgccttgagcaagagcatgttcgctttcgctgggttgaaactgcgctcgccgtgtttgcttga

SEQ ID NO: 44403 - DNA, 1461 bp, Mycobacterium abscessus MAB_030201_1075
atgaatgatctgacagtcgaagagctgttcgcgcacaacgatgacgtgcagaaatcccgtgcggtccgcctgttggccgccaagaatctggccccctacatcacgctcatggaacgccacctggaccgcagcgccaaagtctccgaacctcagctggtggccaagctggaccgggacctgagcgccgtcgggctgggagaacagtccgggctggccctcatcaagagctgggcgagcgacgggtggctgcaccgagcgtcggacggcaccggccctgatgccgagaacgtctgctcgctgaccgaggacgcgcgcagcgcgctggcctttgtgcgccgcctgcgccgtgctgacacggtggccacgggcgggtccattgccggtatcgcggcaggtctcaaacgggtggccacccagctggacggcgacccgtcacgcctgcgcgccgacatcgaagcccagatcgcagaactgcagacccagctgcatgccatcgacgacggataccgtccggaaccggatatcgtcgatcttgaggacgagacccgggccatcgcgtatcagatggaacaagtgatcaccgacatcgtccgctacggcagcatgcagaacgagatcaccgccggactcatcgacgccgccgaggactccgactccggcttccgcgaccgcgcccgcagaatgttcgcggactatgacgccctcttcgattcccgcgagcgtgcctcttattcggccttcacgcggaccatccaagatccggatcagcgagccgcgctacggagtgatattgcctgtgtcgcagagggtttgcctgatctcgaccccgggctgcgtgaggtcatgaggaacttcttcaagctcgtgtctcagcagatcgcggaggtctcccgcatcgaacagcgctgcgcacagcgcatccggcggttcttcgccgccggcaccacggagcaggctcgtggccgtgcgcgacagctcaatgacgcgctggcggccgggcacgctctactcaaggtatcgacggcggactctccgatcgacgccgagctaccgatcgggcgttccgccgcagcggcgatcggcgcgctgtctttcaccatcaaggacaccgcgccgccggtgctcgcacaggacgccccgtcggggccgctggatttgagcgggttctcggcgctggccacccaggtggatatggccgcattggccgatacggtcaacagtgctattgccggtggcccagtttccttgcccgacatgatctctcatgtcgaggccccctaccttggtgatgtgatcgtgttgtggtcgctggccctcaagcaggacaacactgccgaccgcgaatcggtaaaggtgaagttccggtccctcgacggacaggaccgggtgatggaggtacctcagttgatgttccgtgaaccggtgctggccaccctcgaagaggagggatcgacactgtga

SEQ ID NO: 44404 - DNA, 750 bp, Mycobacterium abscessus MAB_030201_1075; identical to SEQ ID NO: 41998

SEQ ID NO: 44405 - DNA, 3114 bp, Mycobacterium abscessus MAB_030201_1075
atgggcaagcgtaccgtcgacaagtatgtgcggggcttgtggggagagctgaaaaacccgggggagcgccccaagcagatgttcctgcgcggcaagggtggggcctggtcggctatcgccgtcacctactccggcaccgacggtcgggtgatcaccggcctggtactcaagtggcttgccccgggctcggactcggactcgtccagccgctactacctgatcgacgcggacgccgacatccgtgatctctgcaatgcatgggccagcaagggatacgccggctcggtattcgagggcgcgggttggcgcggccacaagagcgaacgctggtacctggaacagctatacgccgccgtcggtattcagggttcctctgccgcgcagcagctgctgggcaaggccaagtcgctcaagagtgtcggcggcctggagcagttcgtacgcgagtacatgctcgatgaaccggagtcgatggcagcgatatccgaagcgctagggcagatcacaccattggtcgacgcccgtgccgccttggcgatcgcgcagcgccagcggcagacgctgggcgatatcgaacagatccaacagacgtatgccagcgatgcggcgcagttggccaccgtggacgtcgtggaccatcacaccgtgcgcgactacgtggatcagcagcgcctggcgctggcgggcccggagatcgatctgctggataccgagatcacccggctgggcggtgagtgtgacgaaatccagtcgcgccaggacattctcacgggagagcgggacaaattgctcggccggatcgccgctgccgacagcaatctggcaccactcaaaagcgagctggctcatgctcgtgcccgcgcagaagaggtgtcgcgccggcgtacggcctacgacagtgcattgtgggacctgggtcatgaagacgatatcgaatctgccgaggaattcgaggccatgcgggtggagagcctgcgggcagtcacccggatcaacgctgagctcgaagccggccacgatgcatatgtcatggccgcgggtgcgctctcgacggcacgtgaccagctgcgtgccgcatccgccgaattcaagcgggtcgagcacctgggtaccccggtgccaccggatgaggaccgcatgcgcggggagatcgcggcggcgcttgggcttaccgccaaggacctgccctacgtgtgcgaactgatggatttgcgcccagggcaggaacggtggcgcaaatctgtggagaaggtgttgcgctccaccgggctctgcctgctggtgcccgatcagcaccaccgtcaggtgctgcgttacgtcaacgagaacccgatgcgtggctacctgcagatggagcgggtgattccctccggtaccccgcggcgcgccgagccgggcacgctcgccgactgtttgcgcctgaccaaccccaaccacgaatgcgccagtgccgccatgaatctggtggccggtgtcggcgactacgtgttggtcgacagccccgacgaattcagcaagcaccgccgggcggtcacagatcagggactccgcaaggacggtgaccggcgcgcggtcaaggacgatcggcgtgaattgcgggcctcccagtacatctatcagggcaacgccggtgacaagcgcgccgcgctttccgacgatgtggtcgaagcgcagcaggcggtgagtgatgccgaaaagttcattggcgaaatggacaccaagcgcgaagagctgcgttcggaggtggtgcggtggtccaagctgcacagccagtacgagtattggagccagattgatacggactcggccgaagctgccgtggcgcgtctgcaggaccagtacgacgcgatgctggaagccaaccccgacctgaccggattgcagcagcaggccgactcctacctcgacgagatcaagaggctctccgaacgcatcggagcattgcgcaagcaagaatccgagcatgattcgcgccggacccggctgctggatctgctggacaacctgagcccgcgtgaggtgggcgggcacacccgatcgggaatcgaggcctacgtgccccaactctcgtccagcctggatgtgttggaacccgatgcctaccgactggagctgtggcggcagatcgagaaggatcagtcggtgctgcgtgagagcgtcacccgctcacgtaacgagctgaaccggattctcaacgcgtacgaccgggacttccccgactctatccccaacgacagtgagaacttcgacgagaagatccacgactatgtcgcgctctgccgccggatcgatgaacgcgacctgcccgctgcctacgaacggatgctgcggctgatcaccgagcaggcgcccactgccgtgttgcggctgcaccagctcgccgaggaggaggcacaccgcatcaccgaccagatcgaccgtgtcaatagcggtttgggttcggtcgagttcaaccggggtacccggctgaccctgcgtgccgagccgaaggcgctcgaagcggtcggcgagctcaacgagcgtgcccggcggatatccgggcgtgccgtcgccgtttcgatgggggacgagaaggccatccacgatcagtaccaggacatcctgcaactgcgtaacctgttggccgctgagacacctgaggcgcgccagtggacgcgcgacgcgttggatgtgcgtaaccgcttcgtgttgtactgcgaggagcgcgatgccaggaccggcgaaccgatccgtacctacagcaacgcgggtgcgaattccggtggagaacaagagaagttgatggcgttctgcctcgccggcgcgctgagcttcaacctggctaacccggagacgggggacaaccggccggtcttcgcgcagcttatgctcgacgaggcgttctcgaaatcggatccgcagttcgcccagcaggcgctgtccgcgttccgcaagttcggattccagctggtgatcgtggccaccgtgcagaacaccaccaccatccagccctatatcgacagcgtggtgatggtgtccaagccggacggcccgggggtgcgtccggttgcttcgacgcgcacggtgccgatcggtgagctcggtgacgtacgcaaggccgtgagcgcccgctag

SEQ ID NO: 44406 - DNA, 1443 bp, Mycobacterium kansasii 662; identical to SEQ ID NO: 42193

SEQ ID NO: 44407 - DNA, 579 bp, Mycobacterium kansasii 662; identical to SEQ ID NO: 42194

SEQ ID NO: 44408 - DNA, 3399 bp, Mycobacterium kansasii 662; identical to SEQ ID NO: 42195

SEQ ID NO: 44409 - DNA, 1161 bp, Mycobacterium kansasii 662; identical to SEQ ID NO: 42196

SEQ ID NO: 44410 - DNA, 1461 bp, Mycobacterium abscessus MAB_082312_2272; identical to SEQ ID NO: 42721

SEQ ID NO: 44411 - DNA, 750 bp, Mycobacterium abscessus MAB_082312_2272; identical to SEQ ID NO: 42722

SEQ ID NO: 44412 - DNA, 3348 bp, Mycobacterium abscessus MAB_082312_2272; identical to SEQ ID NO: 42723

SEQ ID NO: 44413 - DNA, 1461 bp, Mycobacterium abscessus MAB_030201_1061; identical to SEQ ID NO: 44403

SEQ ID NO: 44414 - DNA, 750 bp, Mycobacterium abscessus MAB_030201_1061; identical to SEQ ID NO: 41998

SEQ ID NO: 44415 - DNA, 3114 bp, Mycobacterium abscessus MAB_030201_1061; identical to SEQ ID NO: 44405

SEQ ID NO: 44416 - DNA, 1461 bp, Mycobacterium abscessus 21; identical to SEQ ID NO: 42933

SEQ ID NO: 44417 - DNA, 1119 bp, Mycobacterium abscessus 21
gtgacgacacaggcttcagggaccgccctggggaacatcaattttgacgacctgccgggtgtcgaacccgatgcctcggcaccgcgaacggccaaggggccgcgattcgacggcgacaccagtgagcttccggacaaggcctgctgggcgctgcagaacttggtggcccggcgctacctgagtaaggacggtcagcccgaactgtgggcgtcgatgatcgagcatcgcaaggtgctggccgcgcgcctgtccgaattggacctgcggctgcgggtgttcgacgatctcgaggttgcctacgccgaaccagctccgttggagaaccccagcgtgtacggcgccagggtgttgcgccgggaaccgttgggcacctacgcgtcgatcgtggcactgcacctggccaagatcgccaggaccgcgcacgacgaacatgtattggtcagccgcgacgatattcacgaactcttcgccaacgtctcccacgacatcgaccgcgacgaggcgatgctgcgtgatcgcgttgacgaggcgatcaagcggctgtccaaggctgagattctgcagcgcacccgcgatgacgagcacagctacaccatcagcccagtcatcaacgcgctgatgtcggcgcagatgatcgaggcactgcagcgtcagtacgagcagttgcagcgcggcggtgccgccccgaagacgccgacggcgcagaccccaccgacgaagaagatggcgagaccgatgacgacgagtgatgcagcgacacaacagttctggttgtcccggctgcaggtcatcaactggggcgtcttcgacggctatcacagcatcgagttcagccgtcgcggtacgctgatcaccggctcctccggtagcggtaaatcatctctactggatgcgatctcgctggcattcttgtcttcgaaccgccgtaacttcaacgcttcgagcgacaccaccgccgcgggttccagcatgggcaagcgtaccgtcgacaagtatgtgcggggcttgtggggagagctgaaaaacccggggagcgccccaagcagatgttcctgcgcggcaagggtggggcctggtcggctatcgccgtcacctactccggcaccgacggtcgggtga

SEQ ID NO: 44418 - DNA, 2967 bp, Mycobacterium abscessus 21
gtgatcaccggcctggtactcaagtggcttgccccgggctcggactcggactcgtccagccgctactacctgatcgacgcggacgccgacatccgcgatctctgcaatgcatgggccagcaagggatacgccggctcggtattcgagggcgcgggttggcgcggccacaagagcgaacgctggtacctggaacagctatacgccgccgtcggtattcagggttcctctgccgcgcagcagctgctgggcaaggccaagtcgctcaagagtgtcggcggcctggagcagttcgtacgcgagtacatgctcgatgaaccggagtcgatggcagcgatatccgaagcgctagggcagatcacaccattggtcgacgcccgtgccgccttggcgatcgcgcagcgccagcggcagacgctgggcgatatcgaacagatccaacagacgtatgccagcgatgcggcgcagttggccaccgtggacgtcgtggaccatcacaccgtgcgcgactacgtggatcagcagcgcctggcgctggcgggcccggagatcgatctgctggataccgagatcacccggctgggcggtgagtgtgacgaaatccagtcgcgccaggacattctcacgggagagcgggacaaattgctcggccggatcgccgctgccgacagcaatctggcaccactcaaaagcgagctggctcatgctcgtgcccgcgcagaagaggtgtcgcgccggcgtacggcctacgacagtgcattgtgggacctgggtcacgaagacgatatcgaatctgccgaggaattcgaggccatgcgggtggagagcctgcgggcagtcacccggatcaacgctgagctcgaagccggccacgatgcatatgtcatggccgcgggtgcgctctcgacggcacgtgaccagctgcgtgccgcatccgccgaattcaagcgggtcgagcacctgggtaccccggtgccaccggatgaggaccgcatgcgcggggagatcgcggcggcgcttgggcttaccgccaaggacctgccctacgtgtgcgaactgatggatttgcgcccagggcaggaacggtggcgcaaatctgtggagaaggtgttgcgctccaccgggctctgcctgctggtgcccgatcagcaccaccgccaggtgctgcgttacgtcaacgagaacccgatgcgtggctacctgcagatggagcgggtgattccctccggtaccccgcggcgcgccgagccgggcacgctcgccgactgtttgcgcctgaccaaccccaaccacgaatgcgccagtgccgccatgaatctggtggccggtgtcggcgactacgtgttggtcgacagccccgacgaattcagcaagcaccgccgggcggtcacagatcagggactgcgcaaggacggtgaccggcgcgcggtcaaggacgatcggcgtgaattgcgggcctcccagtacatctatcagggcaacgccggtgataagcgcgccgcgctttccgacgatgtggtcgaagcgcagcaggcggtgagtgatgccgaaaagttcatcggcgaaatggacaccaagcgcgaagagctgcgctcggaggtggtgcggtggtccaagctgcacagccagtacgagtattggagccagatcgatacggactcggccgaagctgccgtggcgcgtctgcaggaccagtacgacgcgatgctggaagccaaccccgacctgaccggattgcagcagcaggccgactcctacctcgacgagatcaagaggctctccgaacgcatcggagcattgcgcaagcaagaatccgagcatgattcgcgccggacccggctgctggatctgctggacaacctgagcccgcgtgaggtgggcgggcacacccgatcgggaatcgaggcctacgtgccccaactctcgtccagcctggatgtgttggaacccgatgcctaccgactggagctgtggcggcagatcgagaaggatcagtcggtgctgcgtgagagcgtcacccgctcacgtaacgagctgaaccggattctcaacgcgtacgaccgggacttccccgactctatccccaacgacagtgagaacttcgacgagaagatccacgactatgtcgcgctctgccgccggatcgatgaacgcgacctgcccgctgcctacgaacggatgctgcggctaatcaccgagcaggcgcccactgccgtgttgcggctgcaccagctcgccgaggaggaggcacaccgcatcaccgaccagatcgaccgtgtcaatagcggtttgggttcggtcgagttcaaccggggtacccggctgaccctgcgtgccgagccgaaggcgctcgaagcggtcggcgagctcaacgagcgtgcccggcggatatccgggcgtgccgtcgccgtttcgatgggggacgagaaggccatccacgatcagtaccaggacatcctgcaactgcgtaacctgttggccgctgagacacctgaggcgcgccagtggacgcgcgacgcgttggatgtgcgtaaccgcttcgtgttgtactgcgaggagcgcgatgccaggaccggcgaaccgatccgtacctacagcaacgcgggtgcgaattccggtggagaacaagagaagttgatggcgttctgcctcgccggcgcgctgagcttcaacctggctaacccggagacgggggacaaccggccggtcttcgcgcagcttatgctcgacgaggcgttctcgaaatcggatccgcagttcgcccagcaggcgctgtccgcgttccgtaagttcggattccagctggtgatcgtggccaccgtgcagaacaccaccaccatccagccctatatcgacagcgtggtgatggtgtccaagccggacggcccgggggtgcgtccggttgcttcgacgcgcacggtgccgatcggtgagctcggtgacgtacgcaaggccgtgagcgcccgctag

SEQ ID NO: 44419 - DNA, 1461 bp, Mycobacterium abscessus 1948; identical to SEQ ID NO: 41997

SEQ ID NO: 44420 - DNA, 750 bp, Mycobacterium abscessus 1948; identical to SEQ ID NO: 41998

SEQ ID NO: 44421 - DNA, 3186 bp, Mycobacterium abscessus 1948
atgacgacgagtgatgcagcgacacaacagttctggttgtcccggctgcaggtcatcaactggggcgtcttcgacggctatcacagcatcgagttcagccgtcgcggtacgctgatcaccggctcctccggtagcggtaaatcatctctactggatgcgatctcgctggcattcttgtcttcgaaccgccgtaacttcaacgcttcgagcgacaccaccgccgcaggttccagcatgggcaagcgtaccgtcgacaagtatgtgcggggcttgtggggagagctgaaaaacccgggggagcgccccaagcagatgttcctgcgcggcaagggtggggcctggtcggctatcgccgtcacctactccggcaccgacggtcgggtgatcaccggcctggtactcaagtggcttgccccgggctcggactcggactcgtccagccgctactacctgatcgacgcggacgccgacatccgcgatctctgcaatgcatgggccagcaagggatacgccggctcggtattcgagggcgcgggttggcgcggccacaagagcgaacgctggtacctggaacagctatacgccgccgtcggtattcagggttcctctgccgcgcagcagctgctgggcaaggccaagtcgctcaagagtgtcggcggcctggagcagttcgtacgcgagtacatgctcgatgaaccggagtcgatggcagcgatatccgaagcgctagggcagatcacaccattggtcgacgcccgtgccgccttggcgatcgcgcagcgccagcggcagacgctgggcgatatcgaacagatccaacagacgtacgccagcgatgcggcgcagttggccaccgtggacgtcgtggaccatcacaccgtgcgcgactacgtggatcagcagcgcctggcgctggcgggcccggagatcgatctgctggataccgagatcacccggctgggcggtgagtgtgacgaaatccagtcgcgccaggacattctcacgggagagcgggacaaattgctcggccggatcgccgctgccgacagcaatctggcaccactcaaaagcgagctggctcatgctcgtgcccgcgcagaagaggtgtcgcgccggcgtacggcctacgacagtgcattgtgggacctgggtcatgaagacgatatcgaatctgccgaggaattcgaggccatgcgggtggagagcctgcgggcagtcacccggatcaacgctgagctcgaagccggccacgatgcatatgtcatggccgcgggtgcgctctcgacggcacgtgaccagctgcgtgccgcatccgccgaattcaagcgggtcgagcacctgggtaccccggtgccaccggatgaggaccgcatgcgcggggagatcgcggcggcgcttgggcttaccgccaaggacctgccctacgtgtgcgaactgatggatttgcgcccagggcaggaacggtggcgcaaatctgtggagaaggtgttgcgctccaccgggctctgcctgctggtgcccgatcagcaccaccgtcaggtgctgcgttacgtcaacgagaacccgatgcgtggctacctgcagatggagcgggtgattccctccggtaccccgcggcgcgccgagccgggcacgctcgccgactgtttgcgcctgaccaaccccaaccacgaatgcgccagtgccgccatgaatctggtggccggtgtcggcgactacgtgttggtcgacagccccgacgaattcagcaagcaccgccgggcggtcacagatcagggactccgcaaggacggtgaccggcgcgcggtcaaggacgatcggcgtgaattgcgggcctcccagtacatctatcagggcaacgccggtgacaagcgcgccgcgctttccgacgatgtggtcgaagcgcagcaggcggtgagtgatgccgaaaagttcatcggcgaaatggacaccaagcgcgaagagctgcgttcggaggtggtgcggtggtccaagctgcacagccagtacgagtattggagccagattgatacggactcggccgaagctgccgtggcgcgtctgcaggaccagtacgacgcgatgctggaagccaaccccgacctgaccggattgcagcagcaggccgactcctacctcgacgagatcaagaggctctccgaacgcatcggagcattgcgcaagcaagaatccgagcatgattcgcgccggacccggctgctggatctgctggacaacctgagcccgcgtgaggtgggcgggcacacccgatcgggaatcgaggcctacgtgccccaactctcgtccagcctggatgtgttggaacccgatgcctaccgactggagctgtggcggcagatcgagaaggatcagtcggtgctgcgtgagagcgtcacccgctcacgtaacgagctgaaccggattctcaacgcgtacgaccgggacttccccgactctatccccaacgacagtgagaacttcgacgagaagatccacgactatgtcgcgctctgccgccggatcgatgaacgcgacctgcccgctgcctacgaacggatgctgcggctgatcaccgagcaggcgcccactgccgtgttgcggctgcaccagctcgccgaggaggaggcacaccgcatcaccgaccagatcgaccgtgtcaatagcggtttgggttcggtcgagttcaaccggggtacccggctgaccctacgtgccgagccgaaggcgctcgaagcggtcggcgagctcaacgagcgtgcccggcggatatccgggcgtgccgtcgccgtttcgatgggggacgagaaggccatccacgatcagtaccaggacatcctgcaactgcgtaacctgttggccgctgagacacctgaggcgcgccagtggacgcgcgacgcgttggatgtgcgtaaccgcttcgtgttgtactgcgaggagcgcgatgccaggaccggcgaaccgatccgtacctacagcaacgcgggtgcgaattccggtggagaacaagagaagttgatggcgttctgcctcgccggcgcgctgagcttcaacctggctaacccggagacggggacaaccggccggtcttcgcgcagcttatgctcgacgaggcgttctcgaaatcggatccgcagttcgcccagcaggcgctgtccgcgttccgtaagttcggattccagctggtga

SEQ ID NO: 44422 - DNA, 1461 bp, Mycobacterium abscessus subsp. bolletii 1513; identical to SEQ ID NO: 43072

SEQ ID NO: 44423 - DNA, 750 bp, Mycobacterium abscessus subsp. bolletii 1513; identical to SEQ ID NO: 43073

SEQ ID NO: 44424 - DNA, 3348 bp, Mycobacterium abscessus subsp. bolletii 1513; identical to SEQ ID NO: 43074

SEQ ID NO: 44425 - DNA, 1461 bp, Mycobacterium chelonae 1518; identical to SEQ ID NO: 41997

SEQ ID NO: 44426 - DNA, 750 bp, Mycobacterium chelonae 1518; identical to SEQ ID NO: 41998

SEQ ID NO: 44427 - DNA, 3348 bp, Mycobacterium chelonae 1518; identical to SEQ ID NO: 41999

SEQ ID NO: 44428 - DNA, 1461 bp, Mycobacterium abscessus MAB_091912_2455; identical to SEQ ID NO: 42721

SEQ ID NO: 44429 - DNA, 750 bp, Mycobacterium abscessus MAB_091912_2455; identical to SEQ ID NO: 42722

SEQ ID NO: 44430 - DNA, 3348 bp, Mycobacterium abscessus MAB_091912_2455; identical to SEQ ID NO: 42723

SEQ ID NO: 44431 - DNA, 1461 bp, Mycobacterium abscessus MAB_110811_2726; identical to SEQ ID NO: 41997

SEQ ID NO: 44432 - DNA, 750 bp, Mycobacterium abscessus MAB_110811_2726; identical to SEQ ID NO: 41998

SEQ ID NO: 44433 - DNA, 3114 bp, Mycobacterium abscessus MAB_110811_2726; identical to SEQ ID NO: 43107

SEQ ID NO: 44434 - DNA, 1461 bp, Mycobacterium abscessus MAB_110811_1470; identical to SEQ ID NO: 44403

SEQ ID NO: 44435 - DNA, 750 bp, Mycobacterium abscessus MAB_110811_1470; identical to SEQ ID NO: 41998

SEQ ID NO: 44436 - DNA, 3348 bp, Mycobacterium abscessus MAB_110811_1470
atgacgacgagtgatgcagcgacacaacagttctggttgtcccggctgcaggtcatcaactggggcgtcttcgacggctatcacagcatcgagttcagccgtcgcggtacgctgatcaccggctcctccggtagcggtaaatcatctctactggatgcgatctcgctggcattcttgtcttcgaaccgccgtaacttcaacgcttcgagcgacaccaccgccgcgggttccagcatgggcaagcgtaccgtcgacaagtatgtgcggggcttgtggggagagctgaaaaacccgggggagcgccccaagcagatgttcctgcgcggcaagggtggggcctggtcggctatcgccgtcacctactccggcaccgacggtcgggtgatcaccggcctggtactcaagtggcttgccccgggctcggactcggactcgtccagccgctactacctgatcgacgcggacgccgacatccgtgatctctgcaatgcatgggccagcaagggatacgccggctcggtattcgagggcgcgggttggcgcggccacaagagcgaacgctggtacctggaacagctatacgccgccgtcggtattcagggttcctctgccgcgcagcagctgctgggcaaggccaagtcgctcaagagtgtcggcggcctggagcagttcgtacgcgagtacatgctcgatgaaccggagtcgatggcagcgatatccgaagcgctagggcagatcacaccattggtcgacgcccgtgccgccttggcgatcgcgcagcgccagcggcagacgctgggcgatatcgaacagatccaacagacgtatgccagcgatgcggcgcagttggccaccgtggacgtcgtggaccatcacaccgtgcgcgactacgtggatcagcagcgcctggcgctggcgggcccggagatcgatctgctggataccgagatcacccggctgggcggtgagtgtgacgaaatccagtcgcgccaggacattctcacgggagagcgggacaaattgctcggccggatcgccgctgccgacagcaatctggcaccactcaaaagcgagctggctcatgctcgtgcccgcgcagaagaggtgtcgcgccggcgtacggcctacgacagtgcattgtgggacctgggtcatgaagacgatatcgaatctgccgaggaattcgaggccatgcgggtggagagcctgcgggcagtcacccggatcaacgctgagctcgaagccggccacgatgcatatgtcatggccgcgggtgcgctctcgacggcacgtgaccagctgcgtgccgcatccgccgaattcaagcgggtcgagcacctgggtaccccggtgccaccggatgaggaccgcatgcgcggggagatcgcggcggcgcttgggcttaccgccaaggacctgccctacgtgtgcgaactgatggatttgcgcccagggcaggaacggtggcgcaaatctgtggagaaggtgttgcgctccaccgggctctgcctgctggtgcccgatcagcaccaccgtcaggtgctgcgttacgtcaacgagaacccgatgcgtggctacctgcagatggagcgggtgattccctccggtaccccgcggcgcgccgagccgggcacgctcgccgactgtttgcgcctgaccaaccccaaccacgaatgcgccagtgccgccatgaatctggtggccggtgtcggcgactacgtgttggtcgacagccccgacgaattcagcaagcaccgccgggcggtcacagatcagggactccgcaaggacggtgaccggcgcgcggtcaaggacgatcggcgtgaattgcgggcctcccagtacatctatcagggcaacgccggtgacaagcgcgccgcgctttccgacgatgtggtcgaagcgcagcaggcggtgagtgatgccgaaaagttcattggcgaaatggacaccaagcgcgaagagctgcgttcggaggtggtgcggtggtccaagctgcacagccagtacgagtattggagccagattgatacggactcggccgaagctgccgtggcgcgtctgcaggaccagtacgacgcgatgctggaagccaaccccgacctgaccggattgcagcagcaggccgactcctacctcgacgagatcaagaggctctccgaacgcatcggagcattgcgcaagcaagaatccgagcatgattcgcgccggacccggctgctggatctgctggacaacctgagcccgcgtgaggtgggcgggcacacccgatcgggaatcgaggcctacgtgccccaactctcgtccagcctggatgtgttggaacccgatgcctaccgactggagctgtggcggcagatcgagaaggatcagtcggtgctgcgtgagagcgtcacccgctcacgtaacgagctgaaccggattctcaacgcgtacgaccgggacttccccgactctatccccaacgacagtgagaacttcgacgagaagatccacgactatgtcgcgctctgccgccggatcgatgaacgcgacctgcccgctgcctacgaacggatgctgcggctgatcaccgagcaggcgcccactgccgtgttgcggctgcaccagctcgccgaggaggaggcacaccgcatcaccgaccagatcgaccgtgtcaatagcggtttgggttcggtcgagttcaaccggggtacccggctgaccctgcgtgccgagccgaaggcgctcgaagcggtcggcgagctcaacgagcgtgcccggcggatatccgggcgtgccgtcgccgtttcgatgggggacgagaaggccatccacgatcagtaccaggacatcctgcaactgcgtaacctgttggccgctgagacacctgaggcgcgccagtggacgcgcgacgcgttggatgtgcgtaaccgcttcgtgttgtactgcgaggagcgcgatgccaggaccggcgaaccgatccgtacctacagcaacgcgggtgcgaattccggtggagaacaagagaagttgatggcgttctgcctcgccggcgcgctgagcttcaacctggctaacccggagacgggggacaaccggccggtcttcgcgcagcttatgctcgacgaggcgttctcgaaatcggatccgcagttcgcccagcaggcgctgtccgcgttccgcaagttcggattccagctggtgatcgtggccaccgtgcagaacaccaccaccatccagccctatatcgacagcgtggtgatggtgtccaagccggacggcccgggggtgcgtccggttgcttcgacgcgcacggtgccgatcggtgagctcggtgacgtacgcaaggccgtgagcgcccgctag

SEQ ID NO: 44437 - DNA, 1062 bp, Mycobacterium ulcerans str. Harvey
ttgcgtcgccaggacaccatcgccaccggcggctcgattacgggcatcgccgcgcgcctcaagcaagtggccgtcaaagtggataacgaccccgcccggatccgcaaacacatcgaagccgaaatcgccgcgctccacgaggagcttgaccagctcgatgctggccagcgtccccaaaccgatgtcaccgactgctacgacgaggcccgcgcgatcgccctgcagatggaacgcctgatcaccgatatcggccagtacggcacgatgatcgagcgggctacctccgccctcgatgaacccatcgattccaacgccgagtaccgcgaccgccaacgccagatgtacagcgactaccaggccgcatgggactcccagggccgcgactcccaccgcgccttcctgcgcatgatcaacgaccccgaccaacgcgccgagttcgaggccgacgtcgccgccgtcgccgaagccctgcccaggctcgacccggccctgtgcaaggtcatggccggcttcttcgagctcgtgggccatcagatcgacgaagtcgagcgcatccagcagcgctgcgcccagcgcgtcaaacgcttcaccgcgttcggcaccatggaacagagccgcggtgtcgcccgccaactcaacgaagccatcgccgcagccgcgccctgctcaagtcgtcgttcaccgactcacgcctggacatcgaggtcccgctggcgcggcacgcgatcagttccgtcggtgccctcggcttccggatcggcgacctgtccaaccccaagcccgccaaacccggcgacaccgaggtcgacctcaccagcttcgccgccttcaccacccaggtcgacgcgcccgcgatgtccgacatgctcaaccacgcgatcaccgcggggcctgtcgcgctacccgacgccgtcgccatgctcgacaccgcctacctgggccacgtcatcgtgctgtggtcctgggccctcaaacagcccaaccccgacaccgccgagtcgaccgccgtccgcttccgctccctggacggccgtgacctcgaaatcgcggtacctcgtttga

SEQ ID NO: 44438 - DNA, 696 bp, Mycobacterium ulcerans str. Harvey
gtgaccctccaagacgatgaagtcgacatcgacttctcctcactccctcaggtcgaccagaatgcccgcccaccggttcagcgccggccgcgcttcgacggcgacgtctccgaactgcccgaccgggcctgttgggccctccagcaccggcttacccgccgctacatcagcgccgaagccgacgccgacgtctacagttgggtgctcgaataccgcaaggacctggccgtccggctctccgaactcgacttgctgctgcgcatcgtcgacgccgccgatgtcgcttttgtcgaacaggcccgctacgagtctgcgaggggaatcaagcttttacgccgcgagccgctcggcacctacgactcgatccttgccctgcacctggcccagatgatgcgtgcctccggtgggcagaccgtcctgatcagccgtgaggagatacacggcctattctccggggtgctcaacgacaccgaccgcgacgcggtctcgttcgccggccgcatcgacggcgccatcgcccggctgaccggcctagagatcctgcgcaagacccgcgacgacgaggacagctacacgatcagccccgtcatcaccgccgtgatgactgcctcggtgatcaccgagctgcagcagcagttcgagcagctgctcaacggcggtgcgccagcagaggaagaagaacccgaaggtgactga

SEQ ID NO: 44439 - DNA, 3294 bp, Mycobacterium ulcerans str. Harvey
gtgttcgacggctaccactcgatcccgttcagcgtaggcggcgcactcatcgccggagcctccggcagcggcaaatcgtcactgctggatgcgatttcgctgggattcctgccgttcaaccgccgcaacttcaacgcgtccggagacaacaccgccgccgggtccagcgccgggcgccgcactgtcgacaagtacgtccgcggcgcctggggccagcgcagcgacggcggcaccagccgggtgatgtatctgcgcggcgacggcaccgcctggtcggccgtggccgtcacctacgccagtgactctggccgcaccgtcaccggcctggtgctcaaatggctgacaggcgagtcccgcaacgactcgtcgagccgcttcgtactcggtgacggtgacctcgacatcgaggaagtctgcaaccgctgggcctccggccgtttcgacgcaggagtcttcaaagaagactggcggttttccaccaaggtcgaatcgcagtacctcgcccagctctacgcggcgatcggcattcgcgcgtccgacgccgcccagcagctgctcggtaaggccaagtcgttgaaaagcgttggtgggctagagcaattcgtccgcgaattcatgctcgacgaacccgacagcctggcccggctgcccgaggcgctcaagcagatcgaccccctggtcgaggctcgcgaactgctggccgttgcgcagaagaaacgcaagatcctgggcgacatcgaacagatccagcagcgctacgcctcggagtcctccgacctcggcatcatcgacctcgtcgacgcgccgatggtgcgcgcctacaccgaccacgcccggcttgcgcaatgtcccgcccagatcgccacgctcgacggcaccgtcgaccagctcgaaaacgaatacgaggacgttacccgcagcctcaatctggccaaggccgaggcggattcgctcaacgcgcagatcagcggttccagcgcgaacatcgctccgctgcaatcgcaggtcaccgccgccgagacccaggccgagcaggtggagcgccgccgaacgacctacgaggacatgctggccgcccagggtatcgaaatacccgacaccgcagacgagttctggaaccttcgcgaggaactgctcgcgcaggccaccgaactgctcgccaaggtcgaacgaaaccgagaggcatccaccgacgccgagtacgcgcagaaggctacccgcatcgcccgcgacgatgtcgccaaggagctcaagcgcgtcgaacacgtcggttcggcgctgccggagttcgcgctcgcgatgcgcgaccacatctgcgctgcaatcaaagtcgacgccgccgagctgccctacatcgccgaactgctggatctcaggcccggccagacccgctggcgcctcgctgtcgagaaggtgctgcgcggggtgggcctgcggctactggtgcccgaccagcattgggagaaggtcctgcggttcgtcaacgagaccgacatgcggggccgactgcagctgcaccacgtgcgggcgaagttcctcggcgccgaacctgctgagcccgagccgaacacgttggcgggcaagcttttccccgtcgatccgaagcatctttgtgccgccgaagctgtcgacgtcatcaccggagccggcgaccatgtgtgcgtcgatactcccgacgtattctcgcggttccgccgcgcggtcaccgacacggggctgtacaaggactccgaccggctggccgtcaaggatgaccggcgaccggtcaagctgtccgagtacctctaccagggcgacgtcaccgcgaagatcaacgcgctgaccgtcgagctgacggccgccgaggaggcctatcagaaggcccgccgcaccgccgacgacatcgccgcccagcgccagcagtggcgcgaccgggcggcggcgtgcaaggcgatctgcgagcaatacccgcagtggagtcagatcgacaccgagaccgccgacgggcatgccgagcggctgcgcgagcagtacgaactgctgatggccgacaatcccgacatcgaggcgctcaacgcccgtgccgacgaatgctggtcgcagattcagaaactgatgacgcgccgcgacagcctcgacgagcggcgcacccggctgctggagctccaggagcggctgtccccggcgttcgtgtccgagccgttgacagagctgctgcagcgctacgccgcgcagctgcccgtcgcgctagagctgcttgacccggaacctcaccgcgatgcgctgttcgccgcgatcaagaaggaacgtgaacaactgcgtgaaagccgccgtcgttcctatgacgaattggcccgcatcctgaacacgttcgacacgtcgtttcccgatgcgattccgaatgactccgacgattttgacgagcgtgtgcacgattacgtcgcgctgtgccgcctcattgacgaacgcgaacttcccgaagcctacgagcggatgatgcggctggtcaccgagcaggcgcccgatgcgatcctcacgctgcaccgtgtcgccgagcaggaggagcggcggatcagcggccagatcgaccgcgtcaacacgggtttggcggcggtggagttcaaccgtggcaccaggctgacgttgcgggcgaccccgcggcacctggtagcggtggatgagctgacccagatcgtgcggtccatctcgcggcgcatcgccgcggtcgggctgggcgacaagcaggcgatcctcgaccagtacgccgagatcctccgactacgcaaccggctggcctccacggcgccggaggacaaggcgtggacgcgcgacgcgctcgacgtgcgcaaccggttcacgttcgactgcgccgaatgggacgtcgacaccgaggaactgatccgcacgcacagcaacgccggcgacaactccggtggcgagcaggagaagttgatggcgttctgcctcgccggcgcgctgagcttcaacctggccagccccgaaagtgacaacaacaagccggttttcgcgcagctgatgctcgacgaggcgttctcgaagtccgacccccaattcgcgcagcaggcgctgcacgcattccgcaagttcggcttccagctggtgatcgtcgcgacggtgcagaacgccaccaccatcgagccctacatcgacagcgtggtgatggtgtccaaaaccgaacccaccggcggcaacgcgcgaccggtggcgtcggtggcgaccaggacgatctcggagttcacgtcgctgcgacaagagatgcgcaagacggcggaacgagtaccagccggggtgtga

SEQ ID NO: 44440 - DNA, 1443 bp, Mycobacterium kansasii 732
gtggaatacgaggcgatcaattcattgcgggagcgccaccccgcttggcgccttcttcgtgccggcaatgccacgctgatcctctccttcctcggggtgtttttcgtcgaggacaaccgaggcgcctgcccagcgagtcaggtcgcggccgccctggacgactacgtgtacgccctgaacaccgagattcccaccgagaacggtcagcaacgctttccgaaggacgctcggtcctatctcgaggactgggcggcccccgacgcggcgtttctgcgccggttttacccggccggcgacgacgaagtccattacgaagtgactccggcgttcgaaaaggcccacgcatgggtcatgggcctcaaaggcaggtcctttgtcggaaccgagtccaggctgcacaccgtggtcgagctgctgcgacagatcgtgcacggaaccgaagtcgaacccgatgtccggctggccgaattacggcgccgccgaaacgaactcgacgccgagatcgccgccgtcgaggccggggttgttcagctgctggacgcgaccggagtccgcgaccgctaccaacagctcgccacaaccgcgcgggaactgctctcggactttcgcgaggtcgaagagaacttccgcctccttgaccgggccgcgcgagaaaagatcgcggcctgggatgggtccaagggtgaactgctcgccgagctggtcggaagccgctcccagatcgctggctccgaccagggccgcagcttccaggcgttctacgacttccttctctccgagacgcgccaagccgagctggccgaactcctggccaaggtttccaccctcgagaccatcgaagccgaccatcggattcgcggtattcaccacgactggtccgaagccgccgaccgggcgcagcgcaccgtccggcagatatccgaacaactgcgccgcttcctcgacgaccagatttggctggagaaccggcgtgtcctcaatttggttcgggcagtggaaagttcagcgctggaactgcgcgacaacccgccgcccttcgggctcgaactggaccagccgggcctcgagattgcccttccgttcgagcgcccgctctaccaggtgccggcggcggtcgcggtcgagagccacctcccaccggcgaccgaggaggtcgacaccgacctactcttcgcgcagaccttcatcgaccaagcacgtctgatcgagaccatccgcgatgttctgccggagaattcttcggctttgttatccgacatcatcgcggcacaccccatcgagcagggtgcggcagagatcgtcggctacctggcactcaacgacgaggaggtgagcgtcgacatggacgacaccgatgagactctcctggaatactgcgaccccgccgacccggaaatcgccaagcgagcgagactaccgaaagtgacggtgcgacgacgatga

SEQ ID NO: 44441 - DNA, 579 bp, Mycobacterium kansasii 732
atgagcaacgagcatgccaccgccagcgccatcatccggctgatgcaaggagtcgtctaccgcgagtcggacgaggacacctggctgacactggaacgtttgggcgccggcgtgcgagaccatttcgccaccataggtgtcgacgtagtggtcgatgacgccgaaggctatgcctatcttcggtcccggccatccgaagatggcgacgaggcactcccgcggctggtgcgcaggcgggcactgacgtacaacgtcagcctgctcctggtcctgctgcgcaagcggctcgtcgagttcgagaccaccggcagtgagggccgactggttctgaccaccgaccagatcgtcgagatgctgcgactgttccaggccgagtccagcaacgacgcacgagtcgtggaccaggcggagacgacgatcaagaaggccgccgaactcggcttcctgcgcccattgcgcggtcaacgcgaccattgggaagttcggcgaatcctcaaggcctacgtcgacgcccagaccctgtcggactttgcggccaagctgcgggagtacgccggagcgtcgaccagtgatgagtga

SEQ ID NO: 44442 - DNA, 1185 bp, Mycobacterium kansasii 732
gtgttgaactggggtacgttcgacacccaggtctggcggttcagccctgccaccgataccgcgctgctcaccggtgatatcggctcgggcaagtcgacgatcgtcgacgcactcaccacattgctggtgccgtcccacaaggccgcctacaacaaggccgccggcgccgaggccagggaacgcaccctgcgctcctacgttgaaggccactacaagtcggagcggaatgaggccaccggaaagtcccgcgccaagggactgcgcgagaaccggggcacgtactcggtgatcctcggagttttcaccaaccatggctatgacgagacggtcaccctggcccaggtcttccagcagcgcgagagcaccggacagccccaccgcttcttcgtcgtcgcgacaaaacaactgtcgatcgcgacggacttcgccgacttcggttccgacctgcgtgatctgcgcaagcggctgcgggccgccggagcggaaatcttcgatgaattccccaaatacgcaacgtcgttgcgtcgcctgcttggaattcgatcggaacaggccctcgagctgtttcaccagacggtctcgctgaagtccgtgggcaacctcaacgatttcgtgcgtgaccacatgctcgaaccgagcgattcgacggagcgggtgcgcgacatcatcgcccatttcgacgatctgaccaaggctcacgacgccgtcaagcgggcgcgcgagcaactcgaagcgttggagcccgtcgtagcgacaacggcgaagtacgacgatgcgctgacgcagcgcgacgcccgggagcggagcgatccgcagtccgggtcttcatcgcagagcttcggtcaaatctgctggccggcgaaattacccagctggaaccgagggcgcggccctgtggcgggagcaggacagcgccaaagcccggcatcagatgctcacgtgcgaacgcgaatccctcatcgaagagcgcgcaaaagcgggtggcgatcgcatcggcgagctggaacgcctcgcccgcgaggcgcgcgatcaggccgaaaaacgccgtcgtgcaaggactttgttcgacgccgccgtctttgccgctggactggaagcggtcgccggcagcgcggagttcgcagccctatccgctctggtatccgccgagcgtccgcggctggcggccgagaaacgagaccttga

SEQ ID NO: 44443 - DNA, 1461 bp, Mycobacterium abscessus subsp. bolletii 103; identical to SEQ ID NO: 41997

SEQ ID NO: 44444 - DNA, 750 bp, Mycobacterium abscessus subsp. bolletii 103; identical to SEQ ID NO: 41998

SEQ ID NO: 44445 - DNA, 3348 bp, Mycobacterium abscessus subsp. bolletii 103; identical to SEQ ID NO: 41999

SEQ ID NO: 44446 - DNA, 1278 bp, Mycobacterium kansasii 824
gtgtacgccctgaacacggagattcccaccgagaacggtcagcaacgctttccgagggacgctcggtcctatctggaggactgggcggccactgacgcggcgtatttgcgacggttttacccggcgggcgacgacgaagtccattacgaggtgactccggcgttcgagaaggcctacgcgtgggtcatgggccttaaaggcaggtcctttgtcggaaccgagtccaggctgcacacggtggtcgagctgctgcgccagatcgtgcacggaaccgaagtcgaacccgatgtccggctggccgaattacggcgccgccgaaacgaactcgacgccgagatcgccgccgtcgaggccggggttgttcaggtgctggacgcgaccggagtccgtgaccgctaccaacagctggccacaaccgcgcgggaactgctctcggactttcgcgaggtcgaagaaaacttccggctcctcgaccgggccgcgcgagaaaagatcgcggcctgggatgggtccaagggtgaactgctcgccgagctggtcggaagccgctcccagatcgctggatccgaccaaggccgcagcttccaggcgttctacgacttccttctctccgagacgcgccaagccgagctggccgaacttctggccaaggtttgcaccctcgagaccatcgaagccgaccatcggattcgcggtattcaccacgactggtccgaagccgccgaccgggcgcagcgcaccgtccggcagatatccgaacaactgcgccgcttcctcgacgaccagatttggctggagaaccggcgtgtcctcaatttggttcgggcagtggaaagttcagcgctggaactgcgcgacaacccgccgcccttcgggctcgagctggatcagccgggcatcgagattgcccttcccttcgagcgcccgctctaccaggtgcccgcagcggtcgcggtcgagagcaccatcccaccggcgagcgaggagatcgacaccgacctgctcttcgcgcagaccttcatcgaccaagcacgcctgatggagaccatccgcgatgttctgccggagaattcttcggcgctgctatccgacatcatcgcggcacaccccatcgagcagggtgcggcagagatcgtcggctacctggcactcaacgacgaggaggtgagcgtcgagatggacgacaccgatgagactctcctggaatactgcgaccccgccgacccggaaatcgccaagcgagcgagactgccgaaagtgacggtgcgacgacgatga

SEQ ID NO: 44447 - DNA, 579 bp, Mycobacterium kansasii 824; identical to SEQ ID NO: 42194

SEQ ID NO: 44448 - DNA, 3399 bp, Mycobacterium kansasii 824
atgagtgaaacaccttctgccacagccgcgctcggggacacccgacgggtcggttaccgtctgcagcacgcggaggtgttgaattggggtacgttcgacacccaggtgtggcggttcagccctgccaccgataccgcgctgctcaccggtgatatcggctcgggcaagtcgacgatcgtcgacgcactcaccacactgttggtgccgtcccacaaggccgcctacaacaaggccgccggcgccgaggccagggaacgcaccctgcgctcctacgttgaaggccactacaagtcggagcggaacgaggccaccggaaaatcccgcgccaagggactgcgcgagaaccggggcacgtactcggtgatcctcggagttttcaccaaccatggctatgacgagacggtcaccctggcccaggtcttccagcagcgcgagagcaccggccagccccaccgcttcttcgtcgtcgcgacaaagcaactgtctatcgcgacggacttcgccgacttcggttccgacctgcgtgatcttcgcaagcggctgcgggccgccggagcagacatcttcgacgaattccccaagtacgcaacctcgttgcgtcgcctgcttggaattcgatcggagcaggccctcgagctgttccaccagacggtctcgctgaagtccgtcggcaacctcaacgatttcgtgcgcgaccacatgctcgaaccgagcgattcgaccgagcgcgtacgcgacatcatcgcccatttcgacgatctgaccaaggctcacgacgccgtcaagcgggcgcgcgagcaactcgaggcactcgagcccgtcgtagcgacaacggcgaagtacgacgatgcccagacgcagcgcgacgcccgggagcgcgagcgatccgccgtccggcttttcatcgcagagcttcggtcaaatctgctggccggcgaaatttcgcagttggaaaccgagggcgcggccctatggcgcgagcaggacagcgccaaagcccggcagcagatgctcacgcgcgaacgcgaatccctcatcgaggagcgtgcaaaagcgggcggcgatcgcatcggcgagctggaacgactggcgcgcgaggcgcgggatcaggccgaaacacggcgtcgcgcaaggactttgttcgacgtcgccgtcgccaccgcgggactgggagagatcgccggcagcgcggagttcgcagccctatccgctctggtttccaccgagcgtccccggctggcagccgaaaaacgagacctcgatacggcctgcgccgacgcgatcgggagagagaaggagctgcaacgcaagtgcgatcacatcgcgcaggagctcacgagcctgcagcagcgcaccagcaacctgcccgtcgagcaggttgaggtgcgcgccgagctgtgcgcggccctcgggctgacaccggacgatcttccttacgcgggtgagcttctcgatgttttcgacgagcacgcccagtggcggggagccgccgaacgcgtgttgcgcgggtttgccctctcactgctggtgccaccgcagcactacgacgccgtcgccggatgggttaacggtcgacggctgacgtttcacggcagcggcggaaaggtgaccggagccaagctggtctacgaaagagttgcgcggcaacgtgttcgcctacagcgctcggagcatgacgggctgctgctcgcggactgtatcgacgtcaaggacgggcagttccgcgagtacctcatcaacgaactcacgaaacgagtcgacttccgttgcgcggcgagccttgaggagttcggcagccagcggcgcgccgttacccgcgagggccaggtgcgctccggtgagcgccacgagaaggacgatcgctatcgcatcgacgacccgcgtcgttgggttctcggctgggccaacgaacgaaagatcgccgcgctgcgcgctgagctcgccgagctggaagccgagcgcgatgcgaccgcatgcgagcaggccaggctcagcggattgcgggaagcgctgcaagaacggctggatgcgcttctccggcttgagggattccgcgactgggccgacatcgacgttgacgaggcgcagtcgcgcgccagcgacctcgaagccgaacgggttcggctgcaggccggatcgtcgcgtttggaggagatcgcccgagcgctcgaggacaacgccaaacaagctgaggcggtagcgaattcgattgagcaactaacgggcaggctggccaccaccgccgcgagggccaagcaagcagaactggacaagaatcgcgacgacgaactcgtcgcgaaccagccgcacggagcgctggcagccgcccgcgaatcgtacccagccctcgacgagcgcctgggaaagaaccgtccgaagcgggcagcggagtgtgccgagaccgagaacgcactggccgcggatctgcatcaacgtatcgaccggcttaacaaagaacttggcggctatgcccagagcctgatccagtccatgctcaaggtcttgacccggtggccggagcttcgcggcgacatggacgccaacgtcgatgcgcgccaagagtttctggcctaccgcgaccgcatcgcgaccgacgatctcccgcggttcgagagcgagttcaaggaacagctcaacaagaacgccatccaggagctggccgggttcaacaactggctacaccggcaagcctcggtgatcgacgagcgcgtcgagcggatcaacgaggcgctcggggcggtgccctacaacccgggccgcttcatccggttggaaaaggagcccaccaacaaccaggacgtggcgcagttccgttcggacttgcgcaacctgaccaacgacagtctcgcgctcgacggcgaccagtactccgagcagcgcttcctcgacgtcaagcggatcatcgagcgcttccgcggtcgcgatggctacgccgaatcggacaagaactggacccgacgggttaccgacgtgcgtaactggttcgtattctccgcctccgagcgcgacgtggaaaccggcgccgaatgggagcattacagcgactctgacggcaagtccggcggccagaaggaaaagctcgcctacacgatcctggcggcgtcgctcgcctatcaattcgggctggagtggggtgcgcagcggtcacgagacttccggttcgcggtcatcgacgaggcattcgggcgcggctcggacgtctcgacacgttacgcactggatctttttgcgacgcttgggctgcaacttctcatcgtcacgccgctgcagaaggttcacgtcatcgagccgtacgtgaaggcgatcggattcgtcgacaatccgactggaacattctctcgcctccagacgatgacgatcgaggagtaccggacacgacgggacggacgacggccatga

SEQ ID NO: 44449 - DNA, 738 bp, Mycobacterium kansasii 824
atgagcgccgggtggaccacgccaaacgacattgccgccagggtcagacgccggtgggacgacggatcgctgttacgtgcctacgccaacggtgatcggtttgatccgatcgaagtcgcgcttcgcggccccaaaccgtcgcaagtcggcgacgatcttgccgccgcccgcgagtgggtgggcgctctggatgccggccgtcgcgacgacagccgatacaccttgcagtggcaatcgatcggaggccgacagattggccgtaaccggctgcccgtccgcgcggtggtgtcgatggaccaggcctgggcgctgttgggcgtgacgacgttggttcgctgtttcgacgagcttttggttctcgcacaacaacatccgcaagttcggaagtggatagttgacaatccgcatcgtgcgctggcgctggcgcacgaaatgccacagctgatcgctgcctacacttggctggacactcaccgcaattcgaaccggtatctccgtgagatcagtgcacccggcgtcgataccaaattcgctgaaaggcaccgaccggtcctggcagcgatgcttgccgtttcctcgacagccacgggattcctggccggcattggcctgagatgcaagccgggattggttcggttgcggcccgcgccttcgttgggcctgccgccccgctcaccgagctggcggtgcgttccgaggagttggcgcaactcgcggtgcaaccacgcgcagcggtaa

SEQ ID NO: 44450 - DNA, 1470 bp, Xanthomonas arboricola pv. pruni str. MAFF 311562
atgaagcaccaggcacgtatcgccggctatcgccaattgcgcgagcagccggtatggaaactgctggccgccgaccacgccccggagctgatcggcctgctgcagacggtgttgctggacggcgaacgccgcctgccctcggccgtgctgcacgagcgcctgcagcgccagctcgacgcactgcgcgccgacgaactctcgcgcgagttgccacgcaccgcgcaggcctatctggcgcattggctggcgcagggctggctggaacgccgcctgcccgagggcgcggccgaagaagagtacgaactgtcgcgcgcggccacccaggccatccgcttcatcgtcggcctgcgcgagagcagcagcagcgccaccgaaagccgcctgtcgctggtgatccagcagctggtgcagctggcgggccagaccgaagccgacccggagctgcgcctggccgccctgcgcgaagaacgcgcgcgcatcgatgccgagatcgaacgggtggcctccggccgcgtggccgcgctggacggcaagcgcgcgctggagcgtgcccgcgacctgatccatctctccgacgagctggccgaagatttccatcgcgtgcgcgacgatttcgaacagctcaaccgccagttccgcgaacgcatcatcgacgacgagggcgcgcgcggcgatgtgctggagcagctgttcaacggcgtggacgtgatcgccgacagcgaggccgggcgcaccttcgaggcgttctggagcctgctcaacgacacccagcaaagcagccagctcgatcaggcgctggatgcgctgctggcacgcggcttcgcgcgcaagctggaccggcgcgaacgcgccttcctgcgcgggttgaccggcacgctgctggagcgcggcggcgaggtgcacacggtgatgcagcacttcgcccgcagcctgcgcggtttcgtgcagagccgcggctatctggagcagcgccggctcaatcaattgctcaagcaggcgcagggcgaagccttgcagctgcgcgacagcctgcacgccaccaccgccaccggctacacccaggcgttgagcgcggcccgcctgcgttcgctgtcgcagtggcgcctgcacgacccgcgcctgacccaggtcgatggccgcgtgcaggctgccgatgcggcagacatctcgctcgacagcgtgggcgatctggtcgcgcaatcggaaatcgacgtgcgcagcctgcgccgcgacctgcacgagctgctcggccagcgcccgcgcctgaccatcggcgatgcgctgcagcagcgtccggccgcgcagggcctgggcagcgtgatcggttacctgtcgctgggcacgcgccacggcgtggtgatcgacggacagatggaaacggtgcaatgggaaggcggcgacggcgccctgcggcgcgcacgcattccgctggtgtggttcacccgggagaaacgcaatgaactggactga

SEQ ID NO: 44451 - DNA, 702 bp, Xanthomonas arboricola pv. pruni str. MAFF 311562; identical to SEQ ID NO: 44382

SEQ ID NO: 44452 - DNA, 4068 bp, Xanthomonas arboricola pv. pruni str. MAFF 311562; identical to SEQ ID NO: 44383

SEQ ID NO: 44453 - DNA, 1470 bp, Xanthomonas arboricola pv. pruni MAFF 301427; identical to SEQ ID NO: 44450

SEQ ID NO: 44454 - DNA, 702 bp, Xanthomonas arboricola pv. pruni MAFF 301427; identical to SEQ ID NO: 44382

SEQ ID NO: 44455 - DNA, 3666 bp, Xanthomonas arboricola pv. pruni MAFF 301427
gtgcgccgccattacatggtcgcgccgcgcagcttcgatgtggccagcgagctggatggcttcgatctggatctgcgcaggctcaaggcgcgtcttggcgaggaggtcgcgcatttcgacggtttcgccggctacgcagagcgctttcggcatgcgctgggcatcggcaacgagatggcgttgcggttgctgcacaagacccagtcggccaagaacctgggcgatctcaatgtgttcctgcgcggcttcatgctggacgagccgcgcacgttcgaggcggccgaccggctggtggaggacttcgccgaactcgacggcgcacaccatgcagtggtcaccgcacgccggcaggtggaaacgctcagcccggcacgcgagcaccatgcggcgctgatggctctgcgccacagcgtcggcgagttgcgcgagctgcagctgggcgtggacagctaccgcgaacagcagcgtctggccttgctggagacgcgcctgcacgaactcgacagtcaggaccgcgggctggccggcgaagaaggccagcggcgtgagtcgctggacaatcacgaacagaagctcgccgggctggaacgcgaacaacgcgccgccggtggcgagcagatcgaggaactcgaacgcgagcgcgcccgggtcgagcgcgagcgcgacgagcgcctgcggcggcgcgtgcagatcgaacaggcctgccgccagctcggcaccgccctggccgcaggcgccagcggctttgccgagcagatcgcgtacgcgcagaccgtgctcgagaacggcaagcacgacgccagcgcgctggatgaggcgatcgccgagcgcatgggtgcgcgccgcgacgatgagcggcgctttgccgagatccgcgccgaactggatgcgttgaagcgcgccccgtccagcatgccggcaccgatgcaggccttgcgcgcgcgcctgtgcgaggacaccggcattgccgaagcggcgctgccgttcgttggcgaactggtgcaggtgcgcgaggatcaatctgcctggcgcggtgcgatcgagcgcgtgctgagcggttttgcgcagtcgctgctggtggacgaccgccattacgcgcaggtcagcgaatgggtcaaccgcacccagctcggcacgcggctggtgtatttccgggtacgccgcaacgatgcgctgcatgcgcgcacgccggatgcgcgtgcattgccgggtaagctgcagctgcgcgagcatgccttcaccgagtggctgcgcaacgagttgatgcgccgcttcgattacgaatgcgtcgataacgctgctgcgctgcgcaatgccgaccgcgccatcacccgcgaagggcaggtcaagcatcccggcgaccgttacgaaaaggacgaccgccatgcggtcaacgaccgcaagcgctggttgctgggccacgacaaccgcgacaagctcaaggtgttcgagcgcgaagcgcagacgctggcccagcgcatcgccggctgcgatgccgacgtggccgcgctgcgcaagcaacgcgagcaggaccaggaacggcagctggccgcgcacacgctggtggagcgcgactgggacgagattgatgtcggccccaagctgcagcgcctgagcgatatcgacgaacagctgcagcagctgcgcgaaggcaacagcggcctgcgcgcgctcggccaggcgatcgagaccgcacgcaccttgcgcgaccaggccaagcgcacctacgaggacgtgcggctggagcgcgcgcagctggcacgcgagcgggtccggctcgaacagcagcacgctgcctgtgccagccgtgccggcaccgccgcgctcacgcccacccagctgcagggcctgcgcgaacgcctggcggcgttggtgccgctgtcgctggacaatctggaggcgcatttccgcgtggtcgagcgtggcctggccgagcaactggccgaaagccagggccgcgacagccggctcagcgcgcagctgctcgattgcttccgcaagtactgccagcaatggccggaagacagcggcgatttcaccgtgagcctggccagtgccgacgattttctcgcgcgcctggatcgcctggagagcgatggcctgccgcgccacgagcaccgcttcttcgatctgctgcagacccagagcaagaataatctgctggccctgcagcgccacaccgccgaggcccacaagggcatcaagcagcgcatggacgaggtcaacgccagtctggagcaggtgccgttcaatcgcggcacgctgctgaccatcgaggtcagcgaccgtcgcctgggcgaggtgcaggaattccagcaacagctgcgcgcggtgttgtcgcatcaacagaccgaagaccgcgcactggccgaagcgcagttttccaccttgcgcgcgttggtggcacgcctgggcgcgcaggaaccggacgcacgccgctggcgcgagcaggtgctggacgtgcgccagcatgtggaattcatcggtgtggagctggatgcgcagacccgcgcgcaggtggagatctaccgcagcggcgccggcaaatccggcggtcagcgccagaagctggcaaccacctgcctggccgccgcattgcgctaccagctcggtggcgaagacggcgaactgccgcgctattgcgcggtggtgctggacgaagccttcgacaaggccgacaacgaattcaccgcgctggcgatgaacatcttcgagaacttcggtttccagatggtggtggccacgccgctgaaatcggtgatgacgctggagccgttcatcggcggtgcctgttttgtggaaatcagcggccggcacaactccggcgtgctgctgatcgaatacgacgagcaggcgcagcgactccagttgcccgagcgctcgcgcggggacgaggccgctgcagcggtgacggaacaggcggtgagtgctgcgcagggcgaggatgcggcgcgttcgacgcagggtgaaacgcgtatggacagcaccgctgccgtctctggcgctgagggcgcggcacttcaggacgtccctgcacaggacgacgtggcggctaaggcgggcaggcgggccagcaaggtcgcgccggcatcgacgccggctgttcgagccgcgccgaagcccgcgaaaacagccgctgccagcgcacgcgcgggatcaggcaagtcgcagcggcgaagaccgcagggggcaaggccgcgtccgccaaacctgcatcagccaggcgtgcatcgcctgcagcgggcaaaccgcgcaagccggcaacgccgaccaaaccggccaggacgccagcgaacaccggaacggcatccaggcgcacgaccgcgtccgccaaaccgactgccaggccgaacaaggccgcgacaacagcggcagcgccgaaaaagcccgctgccaagtcggcgttggcgaccaggcgcgccaccacatcgctgggtggcgcaaccaaggcaaccaagacaactgcggcgcgtagcgcggccaggcccgtaccaaccaagcccgcgccagccaaacccgtggccaaggcgcgtgctgcgtccacgcgcggatctgcaggcaagccgcgcggaaaacgctgagcgcgccacctggatgcctgcgtcaccgcgctgcggtcgcaggcgtccaggtcagcagcgcagcaaggcgggcgcgcgcagataa

SEQ ID NO: 44456 - DNA, 1515 bp, Corynebacterium falsenii DSM 44353
gtgtcagtggaggcccgcgcgctttcggcgaagcgcatctgtgaagagtcgcctgtcgtccgcctgcttcgagccgataacgccccgattgttcttgccgtccttggcgagatctttccgcatggctccgtccaggttcctgcctccacgacgtacgagtacatggctggggccttcgacgtgcttcgcaatgccggtttcacaattcgccgcaccccggcggagtatgccgcggagtggatcaaagccgggtggttaatccggagggcaggatctccttccaccggcgagacgttggagcccactcgagaaggcctccaagccctgcagcttgtggaagaggtggacgctgggcgatcgacggtcacggcctcacgtattcaatccatcaccacggcgctggcccagctggatcgagagacggacccggatattgagactcggcgagccagcttgctgcgccagcgcgaggcaatcgaccggcagctggagcagctggacagcaacgtggtggatgtcctcccgcagtctgctgctcgggagcgcgtgcaggacattctcaaccaggccgctggcatccccgcggactttgcccgggtgcgccaggagcttgagcggctcaacctggatctccgccgcagcttgcttgatagcgacggcggccgaggcaccgtgctggagcagatcttcgagggcgtggacctcattagccaatccgaggccggacggagcttcaatggctttttcgaggtgctggtggacaacgaaaccatcgcctacgtggagcactacattgacaacgtagccaagcgcgtggcggcggagctgagcgctcaggaacgcgagcgcttcgtcaccctcctcaccaccttcgagtcagaggcatactcggtcaatagcgctatcacctcgctggcccggaacttgcggcactatgttgctagtgagcagttcgccgaggatcggcggctcatcgaactgatccgcaccgcacgcaagtatgcctccgaagcggtggaggctgcggatctcaaagcgtttcagaagatggccacgccgctgatgcgtatgggcatggaggtgcgctctgtcggtgcgctgcaacttcgcaatccaggtgctgaggttgtcgaggagcctctcgttgagtattccagcggctcggagacgttggagggcctgctggaagcggtgcgcgagagcgagatcgacttcgccgagctggagagttgtgtggctgaggtgctggaggagcagccggaggcgtctatcgcagacgtgctcgagcgccatccggcgacacaggggttggctagcgtggtggggctcatcattcttgtccgaaaggcagcgcaccatgctgagatggaagagttgggtgaggtggggatgcttggtggcgtcggcgagaaaaacaccgagacagtgagttgggatgaagaaggcacaacccggcgggcggtcattccgcggctagtgtttgtcagggagaggagaggcgatgagcgagagtaa

SEQ ID NO: 44457 - DNA, 624 bp, Corynebacterium falsenii DSM 44353
atgagcgagagtaactcaccggagcagcagatctttgagggtgatacggggacgctctcattggactcgagacgcgcgctggcgcggctgttgaaaggtccgctgctgacggcgcagggcgagccgcacttgtggaacgcggtggtgacggatacggcggcgatcacgtcggcgctgcacaacgtgttcctcgacctcgtgctggacgagaccgatcagattgcttttacccggatggtggagccggcggaaggggtgacaatcccgcgggtgctgcgaacggaaacgctcaagcatattgacacgcttattttgctgcagctgcggcaggagctcgcactgaacaatccgggtgagcgtgtgattgtggatgccgatgaactgcggcagcaaatctggtccatgcgcaacccagacaatagggatgaggccgggtttaataagcgcttcgacgcggcaatgaaaagaattagcgacacgtttagcctgctcaagaagacggaaacaccccagcgctacgagattagccgagcgttacgccacgtctttgatgtcaagaccaccacgtcgattattgaggaatatcggcgcctggcagagcaaggacggggtgtagatctatga

SEQ ID NO: 44458 - DNA, 3327 bp, Corynebacterium falsenii DSM 44353
ctgtatggccaattccgcctcgagaagatccagctgattaactggggaactttcaatggccattttgacattcccgtgacgcggcgtggtttccttatcaacggcgagtccggcacgggaaaatccacgctggtggatgccatgtccaccgtgctggttccccctgggcatgtgcgcttcaacgctgccacgcagtatgaggggcgcaagaaagacggacgcaacctcatcggctatgtgcgcggcgcgtggaagaccatcgaggatgcacagaccggcgacatccgtgacatgtttctccggccgcgggcgacgtacagcgtggtggggctgacctatcgcagcatcgaggaaggtggcaaggagtgcacgtacacgctcatggccatctactacgtccgtgctggcgtgatgcgggacgacgagatcgtgaagaatttcgcggtggcccctggtgccgtggatctgcgccgtctggtcgcccacttgggccatggcgttgacaagaagggcctcaaggaggaacttgaagaagcacgctggtttaccacctatagccctttcgccgcgtatttccggagcctgttggggttgtactcggaggaagcgcagctgctgctacaccgcactcagtccgccaagtctctgggtagccttgatcagttgttccgggattacatgctgcccaagccacagaccttcgatctcgccgacgtggccgtggaacaattcggagatctccgcgaggcctaccggcgagtggatgaagtgaagcagcagattgacgtgctggagccactccgcgcacagttcaacgcacgcagtgctgcggtggggaagaaggactacgcctcgaagctgcgggagaatgtcacgagtgtgcgtgacctgcgggttcatgaagctctcactgccgccatcgagatcacggagacggcgctgcgtgaccagaaggaggctctcgcacaggcggatgcggagctggctcgtgtgagggacacagagcggaggctctatgcacggatgaccgctacgcagaccgacgataccgcgaggttgcagcttgccattgactcaatcaaggagaaactcgtcaccgttcgtgccaaccgggcgcgtgcgcagggctattgcgagactctcggcacagtggagctcaccgatggtgcgtcctaccgggagatcctggccggagttgcggccttcttgcaggactacccggcggagctggaggccatggttgccggaggcgatgaactggctagcaccatcagaaccctgcaagaacagggcgcgggcttgcatcaggacatcacatctttggcgagcaggcgcagcaacatcgcccgtccgatgatcgagctgcgtacccgcatgtgcgaggagctggggcttagccccagcctgctgccgttcgctggtgaactcattgacatcaagcgggaggaagccaactgggaaccggtgatccagcgcctactccgcccactcggcagcacactgctggttcccgagaattaccggcgggatgttatcgcctgggtgaactcccaccacatcggccagcggttgacgctgcgctctgttccacaggatcaggttgagccgcagaaggtcagcaaccgccggagcttgagcttgaagctgcaggtcgtggaccaccccatgcagcagtggctgcgggcccacatccaggattactggcagtacatctgtgtggactccgtggaggacctcgaagaccaccgcatccgcgcggtcactatggagggcatggtgcgctatccggaggatcgaacgaggtcccgccggtatgacaaggacgatcgcttcgcactgggggatcgtcggcagtactgcctggggtccagcaatgatgagaagctagagctcttgcgcagccagctcaacgaggtgaccgccgagatccagtccctccaaggccaacgcgagcgattgagcgccgagcgttcccagctgcagaaccgccagaacgcaggtaatgagctgcagatgctccgctgggccgacatcgatgtccgcagcgttgaggagcagctcagccggctcaatgaagagtatgacgaggctctgagcgatcccgagcacgcccagctccgcgcccagcatgaacgcgccagcgagcagctccggcaggctgaggtcgcccgcgatggggaactgacccggcgctcctctctcgaggatcatctgcagaaactgcacggggaaagagaccgcataaccctcacggaagatatcgaccaggatgtccgacgtgcgatttccgagcggatcgatgccaaaggccgcaaccgctccgcagagaatatccgcacctacgctgaggaggttgataaggacctcgaaaccgagatcgcgcgcgccgagcagcggatcgacaccgccaacgtcgctatcagtcgaatcctcagcgagttcctgcgccgctggccttcggaactcgcggacctggcggctgagccgaccttcgccggtgaggcactggcccttcttgatcacctcacctctgagcgcctgggcgagttccgccgcaagttcctggagctcatgaacgatacggcgacgcgcaacctctcccagattaacgccgacattcggcgcgccaaggccgccatcgaccgcaggctggagccgattaatgcctccctgtccaagtctcagttcgcgccggggcgtttcctagccattgagacccgtgagcgccgcggcgccgaggtcattcagtttctggcagacctcaacgaggccgtctcgggtgggctgaatactacggatgaggccctggcgttgaagcgctaccacgttttggccaagctgttggagcgcctcggttcccgcgagtctggtgatcgccgctggcgctctgcagttttggacacccgccgccacgtgtctttcgtgggcaacgaggtctccccggagggggagacggtcagcacccacgttaactcggcctcgttgtccggcggccaggcccagaagctggtctttttctgcctcgccgctgccctccgctaccgcttggcggacgcgggtgcgcagtaccccacctacgcgacggtggtgctggacgaggcattcgaccgcgcggacgccgccttcacccgcatggccatggacattttcgttgctttcggtttccacatgattttggtgaccccgggcaagcaggtccagacgctttcccgctacgtcgacggcgtggcgatcgtttccctggatacgcgcgatgataagccccagtcgctgatcaccaacgtgaccatgaccactgataaggatgggggggatgaggatgcctag

SEQ ID NO: 44459 - DNA, 1263 bp, Corynebacterium falsenii DSM 44353
atgaggatgcctagttcccctcggcccgctggctctgttaactctgcggggtctatgcttttgccctctgaaatccgggagcgctgccgccgccacatcgagcgccatttgcgactctttatcgccgacgccaccccagactccgcatcctccatcgatttttcggcgcccacgcccgtccctgcccctgagcgtacggtgacggttgggttgaagccacctaatcagaaagaggcggtggaggatctagaagcggtccggcagtttgtggcgagctggcagggctacccgggcgtggagtgggggcagcggaggtggaaccgcgtgggcttgggcactcaggagttgcctgtgcgcatcacgcttgttggtgatgagatcgtggaggtggccggagctacggaggagatacaccggttgcgcgaagcagctcgcctgctggctcaggtatccccggatccgacgttccgggcgcacgtagaggccacggtgaagcaatggcggcgcgcagatatcaatccgctggtgcgcgtgtgccgctgggccctcgagaatccctacgacgatgtgcctttccggcagtgggatgtaccaggggtggatacgaagtggatcgagcgaaacacccgcgcagtccgcgcactcgtgaatattcccgccgcagcacgcccgagcgtgcgcgtctcggtgcggttgctggatccggagctgcaaccggagggcggccgactgccgcaatatttgcgggacatcaacgtgccccttgcagatgcagcgaggatgtttcccgagccggtccgtgtaatcgtggtcgagaaccagctgccatttcagcttctgccacaggccaaaccgggtagccgggtggtggcggtgtgggggagtggttaccaggctcccgcattggtggcaggcctgccgtggtgccgtgaggccctgctgtggagcgacctcgacgccgatggtttcgcaatcgtgaacggcatccgagcagtacttccggacgcgccgagcatctgtatggactcggagacgtgggatgcttttgagaaattcagcgtagaaagcgtgacctctggagagaggggcgagacgctcgtagccagccgggcggtgaacccagaccgcatcctcgaccgcctcacaccagccgagcaggccacctaccagcgcattgggactcttcgcttggagcaggagcgcctccccgtgcgccatgtcctcgccgagattgcccggcattggccggacattttcgagtga

SEQ ID NO: 44460 - DNA, 1353 bp, Pseudomonas aeruginosa PA38182; identical to SEQ ID NO: 43741

SEQ ID NO: 44461 - DNA, 750 bp, Pseudomonas aeruginosa PA38182
atggcaggggtcttcgatcgaattgcaggcgcctctggtgccgacgaaacggagctgacggtggagcccatggctttggatgacggcatggatgatgaacagcctctcatgagcgccgctgtacaggtcgatgagcgccggacgccgcaacgggtacgggaggccgtacaggaaatgctcaagtacggtctgctggaagagagtcacaagcccaacctgtatcgctcagcgctttccaatatcgaggcggtcgacagaatcctggagccgctcgaccttgccatgggggtcgacgaggttcgggggctgttgttcgttatcgttcgccagggcgaggtggccgagcaggatgactggtcgcaccccctagtgcgtcggcaaaggctgaatctggagcagtctctgctgatagccatcctgcgccagcagttcatcgcctacgaacaggaaagcggtacgggcgccagtcaggcatcggtagtggtcgatgagctgattccccaattgcaggtttacctgggcgagctgggcagtgaggcaaaggagcgcaatcgcatcatcacgctgctggatcagctcaaggggcatggcctggtgtcggctttggacgcccatgatcgcgtcatcatccgtcccatcattacccacttggctaacccggagaacctgcaggcactcgtggcatggctgcgagagcaggtggagggcgcggcgacgccggctgccgatggcgaggaggatatggcatga

SEQ ID NO: 44462 - DNA, 3306 bp, Pseudomonas aeruginosa PA38182; identical to SEQ ID NO: 43743

SEQ ID NO: 44463 - DNA, 1182 bp, Pseudomonas aeruginosa PA38182; identical to SEQ ID NO: 44163

SEQ ID NO: 44464 - DNA, 1461 bp, Xenorhabdus cabanillasii JM26
ttgaattttagagggttacaagcaaaatacagtcgtctttttcgggataatgaagcctggaaactattaagagctgataatgcaccgtacattttagcttttttaagcgatttgttttctgaaaacagtgaagttcccttcagtcaggctcgaatatcacttgatgaagaattaattcgtttccgggaattggatatttggaaaacagaaagatcagcaggcacttatcttaataaatggattaaagaaggctggctgcgggaaatggatgatgtcctgaccaaaacggatgccagtgaaattgctgttcgttttgtccaggaacttgatgaacataattcaggaacaacagcatctcatttgagaattgttcaggatgcagttagggattttgcagtggcaattaactcaaatgttaatgaacgtatcacgcttttaaaatccagaatatcagaaatacaaagagaaattgatgcattgcattctggtgttgttactgaattaaccgtagcggaacaaagagaaaggatccgtgaaatctatcacttggcatcaatcttaaccggggattttcgccgtgttgaagatgaagtccgtcgattagatcaagacattcgaattcaaattattgaagaagattccacaaaaggaaatattcttctttccgtgttggagaaagaaaatttattatcccaaactgacgcaggtagcgcatttgaaagcttttttcttttgctatgtgatcagcatagaacaacagaattgcgggaacagcttcatagtattttaagtcgcccggttgcaaagcatttaactgctcagcagcaacagtttcttaatcgattgatgagagaactgaatcgagagagtgaaagagtttttcagatcagacgccgaatagaagaaagcttacgtgcttatatagaaagtggttatgctcaggagaatagggcagtagagagattacttaatcgattggaaaaactggctgttgaactgaaaaacgcaggatgtaacttacaaacagaaacaaccctatcactgcctaccgggacagcaacaataaactctcctgacagtatgcaactcaagttacctgatgaaaaactcaatacttctggtgttgaagaaaatctaaactctaaggtgccaagcacgcaaatgttggattgtcttgatacagttcaagtcaggttaattgctgaaaaaatcctgattacattaaaaaaatatgggccaatgacgatagcttctattgtggttcataatcctattagtacaggactggaagaattagttgcctatttgagagtagcaaaatcgattggtgtagtgtcattagaagaaaacgaatcagtagagattaaggataaacagggtgttcatttgcgggcatctattccaacttttattttgagtgccgatttatttcctgacaatttagatgagttagtcctttaa

SEQ ID NO: 44465 - DNA, 852 bp, Xenorhabdus cabanillasii JM26
atggatgaatataagaaagaaaccggtttttttgatcagttaataaaaaatcatacacagtcagagcgttcctctaatactcctgacacagagttaaatgcagacttttcatttgaagaagtgcttcctgatgatcatatattgagagaagataaccgccattctgatatattgaatgatacggtgaataataaaggcatgcctgttgaagctcgtcaggtattagtcactttattgcgtcatggtgtcatattgtcttcgcaaaaaataaaactttttgcatctctttgtcgctatcaaaatgatattcgtgaatatttatcagaaatttatttgaaattaattctggatgagagagcaggggttgcgtttattgcaaatattaatgatgaagaagacaaaaaatctttggggatggatgatgatgaagagacattgtctatcattagccggagaacgctttctctatatgacactttgctgttgttggtgcttcgaaaacattatcaagatcgggaatcttcgggtgaacaaaaaattatcatcgatatagaacggattgaatccaatctgactccatttctgccattaaccaatagcaccaaatctgatcgcaaaaaactcaatggtgccctgaacaaaatggtgaataaaaaaatattgagttcggtacgaggaagtgatgatcgttttgaaattacaccaatcattcgttatgtcgttaatgctgagtttctcgaaaaaatgcttgcagattatctcaacatggcaaatgaaaaaggtataacttccggcaaaaagagtagtggtataaatgatgatggtgaaacaggtcatgactatgttaactaa

SEQ ID NO: 44466 - DNA, 3396 bp, Xenorhabdus cabanillasii JM26
atgatgatggtgaaacaggtcatgactatgttaactaactcattaatgcatacgaaccaaatcagattggctgaactttccgtatataactggggttcattcaatggattgcacaccgcgcggattgatgaggtgggaacattagttacgggggataatggttcaggaaaatcaacatttatagatggattgatggctttgctgctccccgcaggcagggcgacgtttaacgttgcagcagcacagggagatcgtactgaccgaaccttaatttcctatatgcggggcagttttggttctgctcatgatggtgctagcacaagagttagaagtaaacgtgaatctgccgtagtgaccggactcagagcattatatcggagtgatgacggtacagaaatcacactggcagcacttttctggaacagtaaatcaactaattccctgtcagatgtgacacgggtttacgccattgccagaagaaacctgacactgaaagaggttcttgatgcatttggtgaaggtaatgtgcgggcactcaaacagtggctccgtactgatcctgccataacatgttgcgatgaccgattctctgaatatcaggagttataccgaaagctcttgtatatggataataaaaacgccccggcattgctttcacgggcattgggtttgaaaaaaattgatgatctgacagagttaattcgtgaattggttcttgaacccagtaccgttaaggatgatgccagaaagatagtgggagaattttccgatctcgttgctatacacagccaacttgtagatgccagagcacaaagggatcatctggctaaattaccagagctgaatgctagtctggagaaatcaataaaagatttggaaaatctgacaacagagaaaaatgaattgcctgcctatttgggggaaatttttgcacaattgtggaatgaaaaaatcattgagattgaagcacaattgcaaaatattcatcagcaaatagagcaggctgagatacaagagagggatactcatgggttggtcgaacggagacacgaagaatatctccagcttggtggtactaaaatagagtcacttcgcaaagagattcagcatactaaagatcaattaaaaaggattattcgggaatccttacaatatcaggacaatgttaaggcgcttgaccttccttccacgctggaacataccgtatttgttcagaaccaatctactattgcaagcaggtctgccaatattcaggcagagcaggaagaatatgagcaacaattcggtgctatcagtggagaattcagccagttacaggggaaaataaagcatatttctcaggaaatcagtgagatagagtcaaggcctaactctaatattgatgtgagatatcagcagcttcgggatgaattggttaattcccttgaattaaacaaagatgactgcatttttattggggaattaattgatgttcaggagcatgaaaaggcgtggcagggggcaatagaaagagccctgggagggctgcgtacaacgcttgctattccacagcactgctacccaatggtgacacactggttgaatgcccgtcatactggcttgcacgtgagagtccaggttgtcaatgatattcaggataatgttgtcgagtttaagccgaatgggtatttaagaaaattagtgtggcgggaacatctttatcgggaatggctcaaacattaccttctgcgctttgatctgcaatgtgtcgataatacagaagagttagacaagacacggtattcaatgacgcagcaaggattaatgcacatggataaagggcgttttgagaaaaaagatcagcaccggatcgatgataggagacgctggtatttaggtttttcaaataaatcgcgtttagccatccttaatcatgacaaaaataatttcatacagcagctatcagcaattgaaaagcaggtcaaagaagcacgagaagcattaaattccattgttaataccaaaatattattggaaaaagtgcagaattatcgatgggatgatatcaatgcaccttactggcatgacaagcttttaactctggaaaaagatctggaagtactggaacaatccagtgattcacttgaaaaagcgatggaacgctggaaattagcgaaagaacagttattccagatacagtcaatgttaaaagggcttaacgaacaatcgggggcggttaactcaacattaaatgtggctaaaggggaattgagaaaagcgcaggccaaagcgtcgaaggggatatccgataccacgcggcagtggttaaccacacgagtgggtaagctgtatgcggatgtattggatcgggaatcagaattggtttctcagattgaagaaaaactggaataccaactggaaagtagccgcaacaataaaaaccgggcggaaaaatcctctgtcagcataatggcttcatttagatcccatgaaaagtggcaaatttatgcggtggactggcaaactgatattagcagcttgcctgactaccttaatcatctgcaacagttggaaagtgaaggcttgccgaatcttgcggataaatttattgaacgattaaataaacatgctacccagtcaatggcaactattaaaacgaaacttgaatctgagcgagaagatattcttgagcgaatagatattattaatcaggtattaaagcgtacagaatttcgttcaggtactcatttgaggctgggaagtaaaagggaaaaatacccacatgttcaggaatttgatcggcttttactaaaagtattgagtaaagtgacaagcgatgatcatgaagagcggttccgtgaactctctaatgtggtttttattcttgataaagccagcgcttccgggacattcaccacattggaaagcctgcgattgcttgatcctcgttatcagatagcattttatgccgaagagattgatgctaagacaggtgaggttcgtgacgtactggaatcatccagtggtaaatcgggaggagaaaaagaatcttttgctgccacgattgtagctgcgagtttagcgtatgtattaaccccggatggttatgacaggccagtttattgcaccgtttttttggatgaagctttttcaaatactgcggagcctgtgagccggcgtgtacttcgtgtattccgggaactctatattcacgttaatttgattaccccctataaaaacctgaactcagcaagagaatcagcacgttctttactaattgccgaacgcaatcaggaaaatcatgacagccacctttgtgaagttacctgggaagaaattgataggatcatggatgaggaaaaaagaaacaaactagaagctgaaatgcatgaatttggcattaagattgaaaactga

SEQ ID NO: 44467 - DNA, 1200 bp, Xenorhabdus cabanillasii JM26
atgcaaaaaacaccacatacatattcctggggattattacccacgcaggtgaaagaaatagtcagaaaaagggaatggaataacctgtcttccttaaaggcacgtctattgggagctaaaccatttcccattcgtattggcttaaaaccccccagcggtgcttttgcattatcggatttgacacattttcagcgagtagtcagtgaatggaaatcatttccctaccaagaaatggtgttgtggtcgagtaaaaaatttcgtgaattatctgagcaagttattccaattttggttgtgcttgaatccatgcaacagctgataaagtttttaggtagggacgccatccgccgaagtgtgatatgggaaagaaatatgagaccctttctacacattgatgaagtcctttatccggcattagtcaaaaatatcgatatcgtagaaaaaattacgttgaaagaagcggagttactggcgaaattacttccacaattaaaacaagggctggggaaagggcaatatctacgggcgctgcctataattggtattgataccaaatttttggagaatcatctgctcttgttggaggaacttgttgatacacttcatggcggtgcagtttctgaggttggcgggttggtggattggctaggatgccagacaaatcctaaaggctggctgacaatcaggccactttgtcctcatgttattaatgcgctgggagggttacctatcctccaattaccttatgaattactgaaacagtatgaattaccggcatcaaatatcctggtggtggaaaacctgcaatcaggtttagcattgcctgatatgccggatacggtggccgttattgggggcgggaaaaatattgcctggatggatgccttatggttgaagaaaaaacatgtcggatactggggagatattgatacatgggggctaaccaccttaagtgacgccagaggaaaatgtaccagattagaatcaataatgatggatattaacactgttaaaatccatgaagataggatggggattgaagatacaccaactcaaattgttcctgactttcttagtgaaggagaaactaatttgtttaatggtctgatttctggtcgctttcaatcttctcgtctggaacaagagcgtttgtcatcggattacattaaacatcagctttctgtttggttaacaaaatag

SEQ ID NO: 44468 - DNA, 1470 bp, Stenotrophomonas maltophilia 5BA-I-2
atgaagcaccgcgaacgcatcacccgttatcgccacctgcgcgaacagccgcaatggaagctgctcgccgccgaccacgcaccggaaatcatcggcctgctgcagggcctgctgatggacggcgatcgcacgttgccggcatcggttctcaatgagcgcctgcagcgtgcgctggaccagctcaacggcgacgagttgtcgcgcgagctgccgcgtaccgcgcaggcctacgtcgcccattggctcgcgcagggctggctggaacgccggctgcctgaaggcgccgaccaggagcagtacgagctctcgacccaggcgctgcaggcgatccgcttcgccgacagcatggagcaggcccgcgtggctgccaccgaaagccgtctggcactggtgatcgagcagctgtcgcagctggccgcgcagaccgaggccgacccggacgcacgcctgtccgcattgcgcgacgagcgcgaccgcatcgatgccgagatcgcccgtgtcagcgctggtcgcgtgacggccctggacggcaagcgcgcgctggaacgtacgcggcagatcatcggcctggccgacgagctgaccgaagacttccgacgcgtgcgcgacgacttcgaacagctcaaccgtgatttccgcgaacgcatcatcgatgacgaaggcgagcgcggcgacgtgctgtccaagctgttcgaaggcgtggacgtgatcggcgagagcgacgcggggcgtagtttccaggcgttctggcgcctgctcaacgacgccgaacagagcgcccagctcgatgccgcgctggagacgctgctggcccgtggcttcgcccggcggctggatcgcaacgagcgcaacttcctgcgcggcttcaccagcaccatgctcgagcgtggtggccaggtgcatgacgtgctgcagaacttcgcgcgcagcctgcgtggattcgtgcagagccgtggctacctggaacagcgccgcctcaaccagctgttgaagcaggcgcagtccgaagcactggcactgcgcgatgacttcccggcgcagcgcgccattggccgcgacctgcagctgaccaccagccgcctgcgttcgtggtcgcagtggaagctgcacgacccgcgcagcgcgcaggtcgatggcaacgtcgaatacaacgatgcggccagcatcagcctggaaagcgtgggcgatctggtggcgtcgtcggaaatcgatttccgcaccctgcgccgcgacctgcacgacctgctcgacaggcagccgaaactcagcattgcccaggccctgtcgcagcgcgaagcgccgcaggggctgggcagtgtcatcggctacctctcgctgggcacgcgctttggcagcgtgatcgccggcgaacaggagcttgctgaatggcgaggtggcgacggacagatccgtcgtgcccgcatcccgctggtttggtttacccaggagagacgccatgagctggcatga

SEQ ID NO: 44469 - DNA, 702 bp, Stenotrophomonas maltophilia 5BA-I-2
atgagctggcatgaagaccccatcgatgcaccgcatgccgacctggccgaagacgcttaccaggccgaaccggtggcgaccgtggcccagccccggcgcggcaacgacgtctactacatgggcgataccggccgcctgccgctggatgcgcgccgcgcgctgtgccagctgctgatcggccccagcatcgaccagctgcgtcacgccaagctgtggccggcactgatccgcagcgaagccggtatccgttcggcgctgtcggacctgttcctggaactggtgctcgaccgtgacagtggcgtggcgttcacccgccaggccgacaccgaagatgtcgatgcaccggtactgctgcgcacctcgccgctgaccttcatcgattcggtgctgctgctgtacctgcgccagcagctgggcgaagccgatgcgcgtggcaaccgcgccgtggtcgccgatgctgaaatggccgaagcactggccatctacgaaaagaacctgtccaccgaccgcgccggcttcaatcgccgtgtcgcctcggcggtgcagaagatgaaggacaaccacatcctgacccgcctcggcggccaggaagaccgccacgaagtctcgccggcgttgaagctgctgttctccgccgaagacgtatcccagctgtcggcggtttaccgccagctgcgcgaaaccccggccgctgaagcctga

SEQ ID NO: 44470 - DNA, 3381 bp, Stenotrophomonas maltophilia 5BA-I-2
atggccatttccaagcacactcccgccctgttcaacgaaggcctgccggacccgcgcctgcagcagttccgcatgcgccgcctgcaggtgcacaactggggcaccttcaacggcctgaccgaagtgccgatcgccgagcgcggcttcctgttcgtcggccgctccggttcgggcaagtcgaccctgctcgatgccatgtccgccctgctgacgccaccggccatcgtcgacttcaacgccgcagcgcgtgaagccgaacgcagcggccgcgaccgcaacctggtgtcctacgtgcgcggcgcgtgggccgaccagcaggacagtggcaccggtgaaatcgccacccagtacctgcgcaagggcgcgacctggaccgcgctggtgctggagtaccgcgccggcgatggccgcgtggtcagcctggtacgcctgctctggatcgccggcagcagcacctccgccggtgacgtgcgcaagcactacatgattgccgagcgtccgttcgacatcgccaaggatctgggcggcttcgatctggacctgcgcaagctcaagcagaagttggccgacgtccatcacttcgacacgttctccggctatgccgaacgcttccgccacctgctcggcatcgacaacgagatggcgctgcggctgctgcacaagacgcagtcggcgaagaacctgggtgacctgaacgtcttcctgcgcgacttcatgctcgacacgccgaagaccttcgacgctgccgaacgactggtcagcgatttcgccgaactcgatggcgcgcaccaggccgtggtcaccgcgcggcgtcaggtcgaaaccctgcagccggcgcgcgagcactatggcgatctgcaggcgatgagtcgccgtcgcggcgacgacgaagcgctcaagctcggcatcgacagcttccgcgaaagccgccgtcagttgttgatcgaagcgcgcctgcgcgagatggacacgcgcgaccgtggcctgctgggcgaagaagcgcagcgtcgcgcggcgctggacaaccacaccgaacgactggccgagctggaactgcagcgccgccagcagggtggtgagcgcatcgaggaactggaacgcgagcagggccgcgccgaagccgaacgtgatcgccgcctggccaagcaggcgcaggcgcgtgacgccgcacagaagctgcaggccgcgctgcccgaggatgcacatggcttcgccgagctggtcgagcaggcgcagtccgaactggaagaccgtcagcgtgcgtcgagcgccctggacgacgccatcagcgaacggttgggcggcaagcgcgacgacgagcggcgcttctccgaagtgcgtggcgaactggaggcgatgcagcgcacaccctccagcattcctgcgccgatgcagaagctgcgcgcacgcctggccgaagaaaccggcatctccgaagcggccctgccgttcgtcggcgaactgatccaggtccgctcggaagagcagagctggcagggcgcgatcgagcgcgtgctcggtggtttcgcgcaatcgctgctggtcgatgacaagcactacaacgacgtcgccgagtgggtgaaccgcacccacctggggatgcgcttcacctactaccgcgtgcgtcgcaatgatgatgcgttcgcccgcgaaccgtccgccaagtcgctgctgcacaagctggaactgcgcgatcacgtgttcgaaagctggctgcgtcgcgagctgggcaagcgcttcgactacgaatgcgtggacgccaagcagctgcgcaacgtcgaccgcggcatcacccgcgaaggccaggtcaagcatccgggcgatcgattcgagaaggacgaccgcagtgcggtcaatgatcgccgccgctggctgctgggcttcagcaaccgcgacaagctggccgtcttcgagaaggaagcccaggagctggccgcccgtatcgccagctgcgataccgacatcgcgcgcctgcgcagccagcgtgaccgcgacaacgaacgtcgcctggcctgccaccagctggtgggcatcagctggaacgaaatcgacgtcgccgcgccgcagcagcgcctggccgacatcgaggccagcctgcacgccctgcgcgaaggcaatgccgacctggccaggatcgcccagcagatcgacgccacccgcgccgatatcgagcaggcccgccgcacttacgaagacacccgcgtcgagcgcggccagctggtgcgcgaacgcgaccgcctggaccgtgcccgccagcagagccgtgcactggtcctgccagcgctggccgaagaccaggaggccggcctggccgagcgcctgcaggagcagggcccgctcagcctggaaacgctggaagcgcacatgcgccaggtcagcaacgcgctgaacgaacagctctcgtcttcgcagcaggacgtcaaccgcatcgagaacctgctgctgggctgcttccgccgcttcatccagcagtggccggaagaatcgggcgacttcaccgtgtcggtggcctcggccgaggatttcctcgctcgcctcgaacgccttgaacgcgatggcctgccgcagcatgaagaacgcttcttcgacctgctgcagaaccagagcaagaacaacctgctcgcgctgcagcggcacagcgccgaggcccgcaagtcgatcggccagcgcctggacgaagtcaacgccagcctggagcaggtgcccttcaaccgtggcaccctgctgaccatcgaactgaacgaccggcgcctgccggaagtgcaggagttccaccagcagctgcgcgaggtgttgtcgcagcagcagaccgagcagcgcgacctggccgaaacgcagttcaccgtcctgcgccagctggtcaaccgcctcggttcgcaggaaggcgaagacaagcgctggcgcgaagtggtgctggacgtacgcctgcacgtggagttcatcggcgtggagctggatgtggaaacgcgccagcaggtcgagatctaccgcagcggcgccggcaaatccggtggccagcggcagaagctggccaccacctgcctggcggcggcgctgcgctaccagctcggcggcgccgacagccagctgcccagctacgccgcagtcgtgctcgacgaagccttcgacaaggccgacaacgagttcaccgcgctggcgatgaacatcttcgacaacttcggtttccagatggtggtggccaccccgctgaaatcggtgatgacgctggaaccgttcatcggtggcgcctgcttcgtcgagatcagtggccgccacgattcgggcgtgctgctcatcgagtacgacgaagaaggcaagcgcctgaagctgccggagcgcagccgccagcaggccgacgaaccggaagaagccgaagcctga

SEQ ID NO: 44471 - DNA, 1482 bp, Mycobacterium aromaticivorans JS19b1 = JCM 16368
gtggacgacgacagcaccctgtcggccgtcgacctcctcgatatcaaccgcgagatccagggctcccccacgatccggctgctggccacgctcaacctgggcggatacgccactctgatggaacgccacctcagcggaggcgagatcagcgagaccgagttggtggtgcgacttgagcgcgacctcgacgaactgggccggcccggcggcgaacagtccggcctgggcctgatcaagagctgggccagccagggctggctgcaccgggtggccgaccagcgcagcggcgtcgagcgcaacctctgctacctcacccaggacgcccgaagggcgctggacttcctgcgcgggctgcgccgcgaggacaccatcgccaccggtgggtcgatcaacggcatcgccgcgcgcctcaagcagatcgcgctgcgggtcggcaacgacccgatccgcatccgcgccggaatacaggctgagatcgccgccctgcacgccgaactggatgcgctggaacgcggcgaggagctggaccgctctgccgacgtcgacatgaccgacatgtacgacgaggcccacgccatcgcgttgcagatggaacggctgatcaccgacattggccagtacggcacgatgatcgagcgggccaccgccgcgctcgacgagcccatcgacagcaacctggcctaccgcgaccggcagcgccagatgtacgccgactaccaggccgcctgggactcccagggccgcgattcgcaccgcgccttcctccggatgatcaacgacccggaccagcgcgcggagttcgaggccgacgtcgccgacgtcgcccacgcgctgcccgccctcgacccggcgttgcgcagggtgatggccggattcttcgagctcgtcggccagcagatcgacgaggtggagcggatccagcagcgctgcgcgcagcgggtcaagcggttcaccgcattcgggaccctggagcagagccgcggcgtggcccgtcagctcagcgacgcgatcggcgccgcccgcgccctgctcaagagttcgctgaccgactcgcggctcgacatcgaactccccctggcccggcacgccatcagttcggttggcgcactgagcttccggatcggcgacctgtcgtcgcccaggccggctcaggcttccgaaggcgagttggacctgaccagcttcgccgcgctgaccacccaggtcgacgccccggcgatgtcggagatgatcaacaccgcgctcgacgccgggcgctcggtctcgctgcccgacgcggtgcagatgctcgatgccgcgtacctgggtcacgtcatcgtgctgtggtcgtgggcgctcaaacaaccatcacagacggaccccgcctcgaacacaccggtcaccgtccggttccagtcgctcgacggacgggaccgtgagatggaggtcccccacttggtcttcaccgaaccgatctccagcttgttgggagccagcgcatga

SEQ ID NO: 44472 - DNA, 720 bp, Mycobacterium aromaticivorans JS19b1 = JCM 16368
atgacgaacgacatctccgacgtcgatatcacggcgttcagctcactacctcaggtcgaccagaccgcgcgcaccccgaatcagcggcgcccgcggttcgacggcgacgtgagcgagctgcccgaccgggcctgttgggcgctgcagcaactgctgacgcgccgctacatcagcgccgagggtgatgccgatctgtacagctgggtgctggaataccgtgcgctactgtcggtgcggctctccgaactcgatctgatgctgcgcgtggtcgagggtggctacgaaatgggcggagtcgcgttcgtcgagcaggctcgttacgaatccgccaggggcgccaagcttttgcgtcgcgagccgttgggcacctacgactcgatcctggcgctgcacctggcgcagatgtcgcgcgccgccggcggccaagccgtgttgatcagccgcgaggaagtgcacgggctgttctccggtgtactcaacgacgtcgaccgcgacaccgtgaccttctccgcccgcatcgacgcggccatcgcgcgactcgccggactggagatcctgcgcaagacccgcgacgacgaagacagctacaccgtcagtccggtgatcaacgccgtgatgaccgcatcggtgatagccgaattgcagcagcagttcgagatgctgctgtccggtggcacatccccggatcgcaatgaacaggagaccgcactcgatggctga

SEQ ID NO: 44473 - DNA, 3372 bp, Mycobacterium aromaticivorans JS19b1 = JCM 16368
atggctgaacagttccacttgtcgcggctgcaggtcatcaactggggtgtgttcgacggctaccacgacatcccgttcagcgaaggcggcgccctgatcgccggagcgtccggaagtgggaagtcctcactgctggacgcgatttcgctgggcttcctgccattcaaccggcgcaatttcaacgcctccggcgacaacaccgcggccggatccagcgcgggccggcgcacggtcgacaagtacgtgcgcggggcctggggtcagcgcagcgacggcggcgccagcaaggtgatgtatctgcgcggcgacggcacggcgtggtcggccatcgcggtcagctaccgcagcaacaccggacgcacggtcaccggcctggtcctgaaatggctgaccggcgagtcccgctcggactcatcgagccggttcgtgctcgccgacggtgaccgagacatcgaggacgtctgcaaccgctgggcggcagggcgattcgactccggggtgttcaaggacgacgagtggcggttctccaccaaggtggagtcgcagtacctcgcccagctgtacgccaccatcggcatccgcgcctccgatgccgcccagcagctgctcggcaaggcgaagtcgctgaaaagcgttggcgggctggaacagttcgtgcgcgaattcatgctcgacgaaccaagtagcctgacccgcctgcccgaggcgctcaagcagatcgatccgctggtggaggcccgcgagttgctggccgtcgcccagaagaagcgcaagatcctcggcgacatcgagaagatccagcagcgctacgcctccgagtcgtccgatctgggcatcatcgatctggtggatcagccgatggtccgcgcctacaccgaccatgtccggctcacgcagtgcgggccgcagatccagtcgctggacgccaccatcgatcagctcggcaacgagtacgaagacgtcacccggcagctgaatctggccaaggccgagggtgattcgctcaacgcgcagatcagcggatccagtgccagccttgggccgttgcagtcccaggtggccggcgcggaggcgcaggccgaacaggtgtcgcggcgccgggcggcctacgagacgatgctggccgcccaggacatcgacatccccgacaccgccgacgagttctggaatctgcgtgaggaactcgccaccgaggtcaccgaactgctggccaaactggatcggggccgcgaggcgtccaccgatgccgagtacgcgcagaaggccgcccggatcgcccgcgacgacgccgccaaggagctcaagcgcgtcgagcacgtcgggtcggcgctgcccgagttcgcgatcaccatgcgcgaacacatctgtgcggcagtcggtgtcgacgccggtgagctgccctacattgccgagttgatggacctgcggcccgaccagagccggtggcgggtggccgtggagaaggtgctgcggggtgtgggcctgcgacttctggtgcccgatgaccgctattcggcggtgttgcgattcgtcaacgagaccaacatgggcggacggctgcagctgcaccacgtccgcgcctcgctggtcggcgcggaaccggtcgacgccgaaccgaacacgttggccggcaagctttttgtcgtcgacccgacgcatccgtgcgcggccgaggccgccgacgtcatcgccgccgcgggcgaccacatctgtgtggacaccccggatgtgttctcccggtttcgccgcgcggtcactgatacgggcctgtacaaggactccgatcggctcgccatcaaggatgaccgtcgtccgctcaaacaggccgactacatctaccagggcgacgttcgggcgaagatcgacgcgctgaccgtcgacctcgccaatgccgaagagctgtaccagcaggcgcgtcggaaggccgacgatatcgccgcgcagcgtcagcagtggcgggatcgggcagcggcgtgcaaggcgatctgcgagcagttcccgcagtggaaccaggtcgacagcgataccgccgacgggcacgccgaccggctgcgcgagcagttcgagctcctgctggccgacaacccggacatcgaggcgctgaccgcgcgcgccgacgagtgctgggaggagatccagacgctgatgacgcggcgcggggccattcagacccgccgcgacgacctggacgcccggcgtacccagctgctggagctgcaggatcggctggcgcccgcgttcgtctccgaaccgctgaccgagttgctgaaccgctacgccgccctcgtgccggtggcgttggaggtgctcaatcccgagccgcaccgcgaggccgtgttcaacacgattcgccgtgagcgcgagcagctgcgcgaaagtcgcaggcgctcatacgatgagctggctcgcatcctgaacaccttcgacaccgcgttccccgatgcgattcccaacgacagcgacgtgttcgacgagcgggtgcatgactacgtggcactgtgccggcacatcgacgagcgcgaactgcccgatgcttacgagcggatgatgcgcttggtcaccgagcaggcgcccgatgcgatcctcacgctgcaccgggtggccgagcaggaggcgcggcggatcagcgagcagatcgaccgggtcaacacgggtctgggcgcggtcgagttcaacagcggtacccggctgacgctgcgggccacgccacgcagcctgaccgcggtggcggagctcaccgagatcgtgcgggccatctcgcggcgcatcgccgaggtgggcctgggtgacaaacaggcgatcttggaccagtacgccgacattttgcggctgcgcaaccggcttgcatcgacagcgccggaggacaaggcgtggacccgtgacgcgctggacgtccgtaaccggttcaccttcgactgcgccgagtgggacgtccgcaccgaggagctgatccgcacgcacagcaacgccggcgacaactccggcggcgagcaggaaaagctgatggcgttctgcctcgccggggcgttgagcttcaacctggcaagtcctgagagttcggacaacaagccggttttcgcgcagttgatgctcgacgaggccttctcgaagtcggacccgcagttcgctcagcaggcgctgcaggccttccgcaagttcggtttccagctcgtcatcgtagcgacggtgcagaacgccaccacgattcagccatacatcgacagcgtgatcatggtgtccaagaccgaggccagcagccgcaacgcccgcccggtggcgaccgtggtgtccaagacgatttcggacttcacgaccttgcgtgccgagatgcggagttcggccgcacgggaccgggtgccggccggggtgtag

SEQ ID NO: 44474 - DNA, 903 bp, Xanthomonas axonopodis pv. glycines str. 8ra
ttgacgcgtgaggcgctagctcaaaaggtagcctggaacgaattcaatgacttcatcgagaagcgcttcgcacgcgagtatgctgtacgtctagtggccgattctgccgaacgccaccgcggtcaaatcaacgaggcattagagcaggtgcgtgcactcgatggggagcagcgcgccctggtggacgcccacctgttgcagcgcgcaccatggctggaacagacgacgcagggccgcagcccgatgctgtggcttgccgatcgcatcgagagcatggtcgaggctgcctgcggcctgaaactgccgatgctgagatcggagatgaacaactatgtgcgtcgcttcaccagtctgctgcgacaggcgttgtccctggactatggtgccgaatctccgctgggtcgaaccatgacttggctgaaggagaggccggagccaggccgtgaagggttgctcgacgttctggccctgcgattggccaccagtgagatccgcattcccggcggtgtgcttcgctggtcggtgcgggaccgggagaccgaggccgttgcgcaggctccgctggttgtggatgagactagccgcctgaacgccttgctgcgcagagccgaagccgaggcgttcgccttcagcgatcagcaggtcctgcaaggcctgctaccgcacttgcgagaaggtcccatcacactggcggcactgccggtggacaccgccgaggacgcggtactcctgttgcatgctgtgggcgcagcgcgttcgacccaggggcggcgtctgttgcaggctcgcaagacggcagggcaggtgtgcacgccatattttcaggcagacgactacgagctgtgtgccgaaccaataaatggaattggcatgagtcccggtcacaccagcgaggagcattga

SEQ ID NO: 44475 - DNA, 480 bp, Xanthomonas axonopodis pv. glycines str. 8ra
gtgctggtccatgacagcgatgctcgactattgaggctgtacccccctggcgaaggcggcggcgatgacgaggaagatggtgtacggcgcctgcgtgcccgcctgtcgcgtgattttgtggctgcggtgattgccctgcgctttctttacacagaggcgctgacagggcgccgtacgcttgtggacgagcgcctggccattagtctggaggaactgtcacagacggttgtgtcacttctcgcgcacaaacttcccaatgcggtcagcgaacgcatggcactgttgcgagaactgcgcaaacatcgcgttctgtatttcgtcgagggcgatgacgccggggacatgcagatgggtctggcggtgctgcgtccggtgatgagctttgtcagcgacgaggcgttggaagaggccctacgaacggtggggcgcaagattcccgctgcgcctgcgatccaggcggcactcgaggatggtgcatga

SEQ ID NO: 44476 - DNA, 3762 bp, Xanthomonas axonopodis pv. glycines str. 8ra
atgaaaatcgccaaactgctcacttggcactggggatcgctggaagaccgagaatggccctttgctgacgccgtgttgttgacgggtgaatcgggttcaggcaagtccacgcttctcgatgccatccagaccgtactgacagccgcgcaccaacatgtggtgcagttcaatattggtcaggacgaatccacgcagagtcgtcgtggcggcaaggagccgcgtaccctggcggcttacgccctgggacaacaggctgatggcgtatacctgcgtacccgttcgaccagctatgccgggatcgtgttcgaggcttcagaacacgcaggcgagcaggtcgagcccttcactgcactggttggcgtggaggcctttgaggatggtcgacgcgccgtcctgcagggaacgcctcagtttttcatcgtgcgtcggaccttgtcgctggatcatctggcgcgtcgggtgggggaggcactggccccgtctccgttgccgctcaaggaactgtacgtgcaactccagcaccgccttcaggcgcatgcagaaaaggctgtagcggtagtgcaacgttttccggacaagggcggttacttgcagcatctgtacggcgcgctgaccggaaaaacagcggtgggcgagcacgatgccacacgtgcggcgaagtcactcgtcaaagcgatggcctataaggagttgggtaacgtcaacgacttggtgcgcgatgagatcctggagccacacgacttcagcaaagatctcgacaagatgcgcgagctgatgcgctccatcgccagcctgaagcttgaagccgagcgcttggcgctgaacttggagcggctcggtgccgccagcgccagcgcggatcaggcgttggacgaggcgcggcgttttgtcaccaccaccatcgcccatgccctgcgcacacgtagcgaagcacaggatgagttagcttcggtacagcgccagattgccgcccagggccggaagcaggcgcaattgcaagaaaagctagcatctctcggagctcaggaagaccagttgcgggaacagttgcgcgtagtagacaagcgcctggatgatagcgatgtggcaggtgagaagcaggcattggagaaccagatccgcctgcactcagaccagttccgtctgcactgggggcgtgtgcaagaggtggtacgcgggattagcgcaatggctacgcagcttgaacaattgatggcgctggatctgtcggtcgtgccggctttggctgttgcggtggaagtcttgcgtccagccgcactgcggatactccaatcttggccggcaatggccgatgcttatgggcgcagcgcgaccttggatgtggtgttgccggcctttgaactggaagctttcgacgcacagttggcggcgttgcgccagggtatccacgacgacgatgcctcagtacagggagcggtgctgcaagccttgaccgatgtgaatatgcagctgaaccagttgaaagacgacatcgagcagtgcgatgctgagctgcgtcgtctgcagtccggccgagtacaaggcccgaaggatgcacatgatgcggttgcattgatcgagcgtgaaattccttcggctcatccacacttgctggcgcaactggtggagcctagccccggaacccgctggcaaaacgccatcgagggctacatggggggtgatcgcttcgccatcatcgtcgaagccggcatggaggcgcagtgtgcccggttagtcaagcagcactaccgcatccgctcgcccaaagtcgtgcaaggtcgaaaagcgatggaagacacagaggggcgccagttggaagcccgttctgtgcttcatgaactcatctgccaacactctgtggcctatgccttcttgcttgcacagtatggccgcgtgcgtaaagtgaatactgaagaagagctcgcacgtaccccacagggtctgatggaagaaggtttgggcagtcggggctacggcatgtttgcttgccgtgcccccgatggcgaattggctttcggcgaagcggcgcgccaacgacgtcggcagtggtgcgaggatgagctgaagcggctagcgtcccagacacgggtcctcgacgcgttacggcagtcgctgctggcgatcactcgtatgtttaacggcgcagtattctcgccgctgactccgttggtgcttgcagtgcttgagagccaagtccagcatgcgcatgccgatcaggcgcttaaggcattggatctgtcggccatcgacgcgttactagccgagcaaagcgagctgaaggctcgtatcagcggtgtgacacggcaacgtgacgaagagctgaagcaggtcggggcaacggataaggaaatcgcagaattgcgccgccgcgagaaagtcttgatcgagcgcctccccgatctcgaaatcgcctgtaccaatgctactgtctgggcgtcgcgctttgtgggggctgtgccggccctagccaccgaggcgcaattgctggaagagtcctggaaactcgccggcgaacttgaaatcagcgtggacgcgctgcgccatcgtgtacagagtctgcgcgacggactgcctcgtaccttgcgagaactggcccaggccgtgggagtctacctgtccggagcacgcgacgatagcgagcgtgtcgtttgggtcgatgcgcctcgcagcgtagaccgcctggaggaactgctgcccctggttgagcgcacccgtgctgccatcttcgagcagactcagcgccagcgtgcaatcggactagcagacaacgcgcgagcgctgcgtgaggcagaaggtcagttcaaccacgtgttcaccagtagcttctgctttaaggtgcgcgacgacgtcaagcagggcgcgctgacgcttcaacggctcaatcggcaccttcaggacatccgcttcggtagcgacactttcagactggaatgggactgggtgccgcgcatgcagaaagtacaggagttctttgaggcggtggaaggcgcggtcgaagggctggaacatgacggtggatcgatcttcaactcgtccatgctcaccgacgagcagcacgccaccgcaaaagagattcgggggctgctactggcaaacgaccagggcgctagcgaacgcgcgttgcgcgaattagccgactatcgcaactatcggcgctatgacatcctgcgtactagtccggtgggcaccacgaggctgtctacctggggtaccggttcgggcggtgaactggaaacgccgttctacgtcgtgcgctcggcggtgctggcacatgcgcttgggcacttcggccgggaccgtcgcgaggcgccggctttacgcttgatgctgagtgatgaggccttctccaagatggatgaaacgcgctctcgcaacgtgttgcagttcctgtcgcagacgctggggcttcagctcgtcgtggcaatgccgacctccaaatcaggtgcggtcaagcccgagttcgacaaggaattcaccttctccaaggtgatggcgcgcagagccggcgaaggtctccaggagctgttcatcagcgaagcgcaggagaagactttcaaccgcccggcgctggcgagactatggggtacgcatgccgaacaggcccgcgaggctgcacgtgcccattggcaggcagcgaaacttgtggcgcaggtccctcagccgaccatgccgctagcctctccatcgatggagttgcaggtgcccgatccggtagctgaagagagcgaagctcatcaagccaacagcggtccgaggccttga

SEQ ID NO: 44477 - DNA, 1182 bp, Xanthomonas axonopodis pv. glycines str. 8ra
atgctgctcgccaaggtcgaacgcagcacaggccaggggccagtgcgcttgctggtggaccgtaaggttgcccccgagctgcacgacgcagtggacgccgaccaggtccagttgctttccatgcagattgatgacctgtgcgccacgggctgggtcgttttgctgttggaggcgccgcgtgcatttgctggtttctgcgatcgtaggccccggctggagctgcgtgattttgacgccttggcagcttgggctgattacactccgcaagcccagcgctggcgccagcaatggcgaacgcaccttgcagcgcactgggcagcatatccgcaggaagcgccagtcgaacccgcctccgtactggactaccttacccggaatcccttaattccggtggaggggctcccagtagaagaggctacctacagcctcactgtcttgatcgagttatgtcgtttgggtcaaacgatggccttgcgcgaagcttccgcgcgtgctttccagggccgctctaaggtgctggatcaccgggaggaattgctaaggctgctcggttcgtctgcgggacagttcaccgaggcaccgattcagctgttgctcgcgccaccatcctccaggaagctgacggacgccattgatggtgaaacaagagcccttactgaggttcttttcatcgagaatctggtcacctttgaacacatggctgatgcacggatcccaggttgggagagtagtctgttggtgtatgcggcgggtttccgtggcagtgcccggaggttgcgctcgcgcattggctgccgcttgtacctgcgtgagcccgctttcgcagcgtggttgccagtgatcgaagcgtggctgttcggttcgcgagatgatgatcggaacttgccaacagtgtctgtgcacttcttcggagaccttgattactctggcatgcagatacttgcaagccttcgcgaggtatttcccaaggctagggcttggcatcctggctacgtacaactgtcgagtttgctggtagttggcggaggtcacttgccagaaatggccacaaaggctcagcaagtggaccccggccacactgggtgcgcctacgcggatgatgaattacttccactgctgcgcagtaaaggacgcttcattgaccaggaggctcttgatttcagcgacatcaaactgaagtga

SEQ ID NO: 44478 - DNA, 1470 bp, Xanthomonas axonopodis pv. glycines str. 8ra
atgaagcaccaggcccgtatcgccggctatcggcaactgcgcgagcagccggtatggaaactgcttgccgccgaccacgcacccgaactgatcggcctgctgcagacggtgctgatggatggcgaacgccgcctgccttcggcggtgttgcacgagcgtttgcagcgccagctcgacgccttgcgcgccgacgagctctcgcgtgaactgccgcgcaccgcacaggcgtatcttgcgcattggttggcacagggctggttggaacgccgcctgccggaaggcgcagccgaagaagaatacgaactctcgcgtgccgcgacccaggccatccgcttcatcgtcggcctgcgcgaaagcagcagcagcgccaccgaaagccgcctgtcgctggtgatccagcaactggtgcagttggccggacagaccgaagccgatccagagctccggctggccgcgctgcgcgacgaacgtgcgcgcatcgatgccgagatcgaacgcgtggcctccggccgtgtggcggcgctggacggcaagcgcgcgctggaacgtgcgcgcgacctgatccatctctccgacgagctggccgaagatttccatcgcgtgcgcgacgacttcgagcagctcaaccgccaattccgcgagcgcatcatcgacgacgaaggcgcgcgcggcgacgtgctcgaacaactgttcgacggcgtggacgtgattgcagacagcgaagccgggcgcaccttcgaggcgttctggagtctgctcaacgacacccagcaaagcagccaactcgaccaggcgctggatgcgctgcttgcccgtgggtttgcccgcaagctcgatcgccgcgaacgcgcttttttgcgcgggctgaccggcacgctgctggagcgcggtggcgaggtgcacacggtgatgcagcatttcgcgcgcagcctgcgcggtttcgtgcaaagccgtgggtatctggaacagcgccggctcaatcaattgctcaagcaggcgcagggcgaagccttgcaattgcgcgacagcctgcacgccaccaccgccaccggctatacgcagccgctcagcagcagccgcctgcgctcgttgtcgcaatggcggctgcacgatccacggctcacccaggtcgatggacgcgtgcaggccgccgacgcggccgagatctcgctggacagcgtgggcgatctggtcgcgcaatcggagatcgatgtgcgcagcctgcgcaacgacctgcatgagctgctcggccaacgcccgcggctgaccatcggcgacgccttgcaacaacgcccggccgtgcagggcctgggcagcgtgatcggatacctgtcgctgggcacgcgccacggcatggtgatcgaaggacagatggaaacggtgcaatgggaaggcagcgacggcgccgtgcggcgcgcgcgcattcccttggtgtggtttacccgggagaaacgcaatgaactggtctga

SEQ ID NO: 44479 - DNA, 702 bp, Xanthomonas axonopodis pv. glycines str. 8ra
atgaactggtctgaggacactggcctatacgccgacgaggacaccggggcgccggccatcgacgaccgcatgccgatggcgcaaacatccagtgccgagccgcgcggcgagctgtttttgggcgacaccggcacgctgccgttcgatgcgcggcgtgcgctgtgccagttgctggcagggcccagcatcgatgcgcaacgtcacggcgcgctgtggccggcgttgttgcgcaacgaggtggcgatccgccaggtgctgtgcgagctgtttctggagttggtgctcgaccgcgagggcggggtggcctttacccgtcaggccgacaccgcagagctggaatcgcccacgctgctgcgcagtgcgccgctgacgtttatcgagtcggtgttgctgctgttcctgcgccagcaactggccgaggccgacacgcgcggcgagcgtgcagtggtggacgaggcgcagttggtggaagccttgtcggtgtacgaaaagaacgtgtccaccgatcgggcgggcttcgcgcggcgggtgatgacggcgatcggcaagatgcgcgacaaccagttgctgtcgcgcttgcgcggcagcgaggagcgctatgaagtgtcgccggtgttgaagctgttgttttcggcagaagatgtgcaggccttggtggtggcgtatcgggagctccgtgagggcgaggttgcgctggattga

SEQ ID NO: 44480 - DNA, 4023 bp, Xanthomonas axonopodis pv. glycines str. 8ra
atgaattcccagtccaatctgtcgccggcgcagccgggtgcctccttgtttgccgagacgctcgccgagcaacgttcgcagcagttccgcatgcggcgcttgcaggtgcacaactggggcaccttcaatgggctgaccgaagtgccaatcgcgcagaagggcttcctgttcgttgggcgttcgggctcgggcaagtccaccttgctggatgcgatgtcggcactgctgacgccgccgagcatcgtcgacttcaacgctgccgcgcgcgaagccgaacgcagtgggcgcgatcggagtctggtgtcgtatgtacgcggtgcgtgggccgatcagcaggacagcgcgtccggcgaaatcgccacgcaatacctgcgcaagggcgccacctggaccgcattggtgttggagtacgcgaacgcgcatggccagacggtgagcctgatccggttgttctggatcgccggcagcggtaacgcggcggccgatgtgcggcgtcactacatggtcgcgccacgccgtttcgacgtggcgaccgagctggatggcttcgatctcgacctgcgcaagctcaaggcgcgattgggcgatgaagttgcgcatttcgacggcttcgccggctatgccgaacgcttccggcatgcgctgggcatcggcaacgagatggcgctgcggctgttgcacaagacccagtcggccaaaaacctgggcgatctcaatgcattcctgcgcggtttcatgctggacgagccgcggaccttcgaagcggccgaccggctggtggaagattttgccgagctcgatggcgcgcaccatgcggtggtcaccgcccggcgccaggtggaaaccctgacccctgcgcgcgagcaccacgcggcgctgatggcgctgcgccacagcgtcggcgagttgcgcgagttgcagctgggcgtggacagctaccgcgagcagcagcggctggccttgctggaggagcggctgcaggagctggacaaccaggaccgtggactggccggcgaagaaggccagcgccgcgaatcgctggataaccacgaacaaaaactggtcggcctggagcgcgagcagcgcgccgccgggggcgagcaggtcgaagaactggaacgcgaacgcgcacgcgtcgagcgcgagcgcgacgaacgcctgcgccgccgtgcacagatcgaacaggcctgccgccagctcggtaccgccctggcggccggcgccagcggctttgccgcgcagattgcgcatgcgcagaccgtgctggataacggcaagcacgacgccagcgcgctggatgacgccatcgccgagcgcatgggtgcgcggcgcgacgacgagcgccgctttgccgaaatccgcgccgaactggaggccctgaaacgcgcgccatcgagcatgccggcaccgatgcaggccttgcgcgcgcggctgtgcgaagacaccggcattgccgaggccgcgctgccgttcgttggcgagctggtgcaggtacgcgaggaccagacggcctggcgcggcgcgatcgagcgtgtgttgcacggctttgcgcaatcgctgctggtggacgagcggcattacgcgcaggtcagcgaatgggtcaaccgcacccatatcggtacgcgcctggtgtacttccgtgtgcgccgcaacgacgagctgcattcgcggcgggtcgatcccggcgcgctgcccggcaagctgcaattgcgcgagcacgcctttaccgaatggctgcgcaacgagctgacccgccgtttcgactacgcctgcgtggacaacgccgcagcgctgcgcaacgccgaccgcgcaatcacccgcgagggccaggtcaagcatcctggcgatcgctatgagaaggacgaccgccacgcggtcaacgaccgcaagcgttggctgctcggtcacgacaaccgcgacaagctcaaggtgttcgaacgcgaagcgcagacgctggctcagcgcatcgccagctgcgatgccgatgtggcagcgctgcgcaagcagcgtgagcaggaccaggaacgccaactggccgcgcacaccctggtggagcgcgactgggacgagatcgacgtcggccccaagctgcagcgcctgagcgatatcgacgaacagttggtgcagctgcgcgaaggcaacagcggcctgcgtgcgctcggccaggccatcgacaccgcacgcaccctgcgcgaacaggccaagcgcacctacgaagatgtgcggctggagcgcgcgcaactggcgcgcgagcgcgtgcggctcgaacagcagcaggcggcctgcgcgggccgcgcaggttccgccacgctcacgcccacccagttgcagggcttgcgggaacggcttgccgcattgacgccgctgtcgctggacaatctggaagcgcatttccgcgtggtcgaacgtggcctggccgagcagctggccgacagccagggccgcgacagccggctcagcgcgcagttgctggagtgcttccgcaagtattgccagcaatggcccgaagacagcggcgatttcaccgtgagccttgccagcgccgacgatttcctagcgcgtctggaccggctggaaagcgatggcctgccgcgtcacgagcatcgtttcttcgacctgttgcagacccagagcaagaacaacctgctggccttgcagcgccacaccgccgaagcccacaagggcatcaagcagcgcatggacgaggtcaacgccagtctggagcaggtgccgttcaatcgcgacaccgtgctgaccatcgaggtcggcgaccgccgcctggccgaggtgcaggaattccagcagcagttgcgcgcggtgctgtcgcatcaacagaccgaagaccgtgccctggccgaagcgcagttttccaccttgcgtgcgctggtggcacgcctgggcgcgcaggaaccggaggcacgccgctggcgcgaacaggtgctggatgtgcgcctgcatgtggagttcatcggtgtggaactggacgcacagacgcgcgcgcaggtggagatctaccgcagcggcgccggcaagtccggcggtcagcgccagaaactggcaaccacgtgcctggcggccgcgctgcgttaccagctcggcggcgaagacggcgaactgccgcgctactgcgcggtagtgctggacgaagccttcgacaaggccgacaacgaattcaccgcactggcgatgaatatcttcgagaacttcggcttccagatggtggtggccacgccgttgaagtcggtgatgaccttggagcccttcatcggtggtgcgtgctttgtcgaaatcagcggccgtcataactccggcgtgttgctgatcgaatacgacgagcaggcacagcgattgaagctgccggagcgctcgcgcggcgatgagccggcagttgccgatgccactgacgctgcgccgtcgatcgaggctgcggccgagtcagcaggagtgcagggcgctgcaagcgcagatggcatggcaaccaacggcgtcccaatgcacacggcatcgcctgcgacggaggagaccccgcccgcagcgcaggaaacgcagactggtcagcgcaagccggcagtcgcgacgacgagcaagcagaacaagaccgccaagaccgcatcttccacgcgtgctgcggcacagcctcaagcaaaacgcccgaagaaatcgccttcgcgcactcctgctctggctagcaagccggcatcggacaaacgctcagcgggcgtgccggcggtgtcgtcaggagtcgcatccaggtctaccgtgggcaagaccactcggtcttcaaaaacgccgggcaagccgattgcggccacaagcgcgtccaacgccacatccaggaaggtcgccgccgcatctgcggcattgaaaactgccgcagccaagccacgtgcaacagccgcatcgactggtcagccagcgcgcggcgccggcaagacaacctcgacgcgcgcggtggctaaaccgtcaccggccacaacgcgcggcgccaaggcaggcgccccgcggtcgcgcggcaagcgctga

SEQ ID NO: 44481 - DNA, 1353 bp, Pseudomonas aeruginosa VRFPA06; identical to SEQ ID NO: 43230

SEQ ID NO: 44482 - DNA, 750 bp, Pseudomonas aeruginosa VRFPA06; identical to SEQ ID NO: 43256

SEQ ID NO: 44483 - DNA, 3306 bp, Pseudomonas aeruginosa VRFPA06
atgaagcaggcactcctttggcgtgacagcgagaccttcattctcaccagcatcgagctctataactggggcggctttcagggctatcaccgtgccgagatcgacccctccggtaccgccgtgatcggcccgacggggagcggtaaaacgacactggtggacgctctgatgaccttgctgtgcgccaatccgcgctacaacctggcatccacgggcgggcatgaaagcgaccgcgacctggtgtcctatgtccggggagttaccggccccggggacggaggtatagagcagtctcatatcgctcgccagggtaagacagtaaccgcaattgcggccacgctcgagcgtgatggtgcgcaggtacgactgggggccgtgctctggttcgaaggcacaagctcctcggcatcggatctgaaaaaactgtggctgttaagcgagtcccccgagcagactctggagcattggctcagccagcatcacgcaggcggtatgcgggctttgcgtcagatggagaaggatgggacgggtatctggccttatcccagcaagaaagctttcttggccaggctgagggattacttcgaggtcggtgaaaacgcattcaccttgctcaaccgcgctgccggcctgaagcagctcaatagcattgacgagatctttcgcgagttggtgctggatgaccgttccgccttcgagcgggccgccgaggtcgccggcagcttcgatgatctaaccgacattcaccgagaactggaaacggctagaaagcagcagcgctcattgcaaccggtctccgatggctgggagcgttaccaggtcttgcaagaacagctgcacgataagcaggctctcgaaggtatcctcccggtttggttcgccgagcaggggtatcgactgtggttggctgaaaccaacaggctcgagaaggagtacaaaaaggccgaactggatcaggagcaatgcaaaagtcagcttgaggcccagaaaggtgtggtcgatcaacatcgccagcgctacctgcgagtagggggcgcagggatagatcaattgcgcgagcgcatcgctgattgggtgagggagtgcgataagcgcagcctgaaagccgagcaataccaactcttggccaaaggccttggactagcggatgagttatcggccgctgctctcaaggagaatcagcagcatatcgcggcacgcctggaaatactggaccaacaaattactgacgcgcgccaaaaggcgttcgacgcaggcctcgtccagcaggaactcaatggtcgcctacagaccttacagcaggagggtgctgaggttgagaaacggccaggctcgaacctgcccgggcaatttcatgctttccgaagcgatctggcgcaggcgcttggtgtcaatgagtcggccctgcctttcgttgccgagctggtgcaggtcaagcccgaggagctggactggcgtggcgccatcgagcgggcaatcggtagccaccggctacgcatcctggtgccgcaggactcatcccaggccgcactgcgttgggtgaatcaacggcacaaccgcttgcatgtgcgcttgttggaggtacaggagccgacgtcgcgccccgtgttcttcgacgatggttttacccgcaagctgaccttcaaggagcatccgtaccgagaagccataaaggcactgctggcggacaatgaccgccactgcgtcgaaagcccggagcaattacgtcatacccctcatgccatgacggcccaggggctgatgtcgggcaaagaacgcttcttcgacaagcaggaccagaagcgcctggacgaagactggctgaccggcttcgataaccgtgaccgtctggccttcctggctgagcagattcgcgaggtcaatgagcagctcgagccagccaagctcgccttggatgctgcccagggcgacgttcgtcagttggagactcaagcttcgctgctgaatcgtgtcaaagaactgcagttcgaggatattgatctgccgggtgcccagagtcagctggagtcgctgcgtacgcaactggccaccctgacgcgccccgattctaaccttgccatgatcaaggtcgagctggatgcggccgaggccctgcaggagtctctggatcaacagctccgccaactgatcgaacagtacgttcagttaaaaactcagtttgaccaggccgcatccgctacccgtaaggcctataacagcgcggagaaagggctgaacgatacgcagcgtgaactggcgcaagcgcatttcccgactctgaccgcggatgacctcggcgatattgtcgagctggagcgcaagcatacgcgtgagcttcaagggcagctcaaagcgcttggcgagaaactgggcgatcagaaatcagagcttgccaaacgtatgtctgatgccctcaaggtagacaccggggcgcttgcagaggtcgggcgagagctggtggatgtccccaggtatctggagcgtctgcgtgtgctgaccgaggaagccttgccagagaaactcaagcgcttcctggaatacctcaatcgctcctcggatgacggcgtcacccaactgctcagctatatcgaccatgaagtctcgatgatcgaggaacgcctggatgacctgaatagtacgatgcagcgtgtcgactttcagcccggacgctatctgcgcctggttgcaggcaaggtcatccatgaaagcctgcgcaccctgcagcgcgcccagcgccaactgaactcggcgcgtttcatcgatgatgaaggcgagagccattacaaggcattgcaggatcttgtggggttgctcaaggacgcctgcgaacacagcaggaatcagggagccaaggcgcttctggatccgcgcttccgcctggagttcgcagtatcggtgatcgatcgagaaagcaggaatgtcatcgaaacccgaacaggttctcagggcggtagcggtggcgagaaggagatcattgcctcctacgtgctgaccgcttccctgagctatgcgctttgtcccgacggcagcagccggccgttgttcggcaccatcgttctcgacgaggcgttctcgcgcagctcccatgcggttgcaggtcggatcatcgctgcgttgagggaattcggcctgcacgctgtcttcatcacgcccaacaaggaaatgcgcctgttacgccaccacacgcgttcggcagtcgtcgttcatcggcgcggcctggagtccagtctggtttccctgagctgggaagctttggatgagcatcatcaacagcgcatcaaggccatgcatgaagtcgcccactga

SEQ ID NO: 44484 - DNA, 930 bp, Pseudomonas aeruginosa VRFPA06
atgcgctggcacttgcgcagtccctccgaatggattgccgcaaccgacgatccttcggtcagccaggaatacgctcaactcgagtatctggtcgagcaggtagatagttcctttcatgctctgctggtggcgcaacggagcctgtggttgacgaagccctctgaagaagtcatcgctacagcgcagctcgccactcaactatctccgggctgcgctcaaggccgcccattgcgcctgcttgcagagcacggagtggacaccaagtttttcgagcgaaacgctatcttgctgacgaaactcctcgatgagcgcttcgaaggcgcggcgtccgagcaaggtctgacgacttttctggatgcctttgaagaaaccagtcattgggttctagtcgttcctcttcagcctgagctgctgcccttcaagcggatcaggctcacgacttcggaactggccgaaacctcacttcccggttcgcgattgctcgtggtggaaaatgagcaatgtgttcacttgctacccgaaacgctgccggacaccctcgctgttctgggcgcagggctcgatttgcagtggttggcgtctgcgcatctggccgggaaacagatcgcttactggggcgacatggatacctggggcttactgatgctggcgcgagcgagacaccatcaacctgcagtcgaagcactgctaatggaccgggagctgtttgaccagcactccttgggaagcgcggtcgtcgagccagctaaagctcaggaattggctcccgaaggattgatgaccgacgaagctgatttctatcggtatctccttgcacaggagcgggggcgccttgagcaggagtatctgccacgcaggcaagtcgaacaggctattagtaaatggtttggagagtcggtagcgccggctcatcctgagcgaacggcttga

SEQ ID NO: 44485 - DNA, 1464 bp, Kutzneria sp. 744
atggatttcgagggcctcgaccagcttcggcgcaatgacgcggcgtggcggctgttgcgggccgacaacgcgccgctcgtgctcgggtttctcggcaaggtgttcgtcgacgacaacgtccggtcgatctcggccaccgagctgatcggccggctggacgacgagctgtacgccctcaacgagcggctcggagacggcacgttccccaagacagcgaaggcctacctcgacgactgggcggcgccggcgaacggctggctgcgtaagtactacccggccggctccgacgaggtgcacttcgacgcgaccgtggccgtggagaaggccctgacctgggtggattcgctccgagaacgatcgttcgtcggcaccgagtcgcgcctgaacacgatcttcgagctgctgcggcagatggcgtacggggccgagaccgacccggacacgcgactggccgaactgcgccggcgacggtccgagatcgacgcggagatcaaccgggtcgcgggcggcgatttcgccgtcctcgacacctcggcccagcgggatcgctaccagcagttcgccgcgaccgcccgcgaactgctggccgacttccgcgaggtcgaggccaacttccgcggcctggaccgggcgcttcgcgagcgcatagccggctggcagggcagcaagggccagctcctcgacgaggtggtcggcaaccgcaccaccatcgccgactccgaccagggccgcagcttccaggcgttctacgacttcctcctctcccacgagcgccagctggagctcgccgagctgctcgcgaaggtgcagtctctggaggccgtgggcgagcccgacccccgcatgcgccatgtccaccacgactggctcgacgcggccgaacgcacccaggcgacggtgcggctgctgtcggaacaactgaggcgattcctcgacgaccaggtgtggctggagaaccgccgggtgatggacattctgcacagcatcgagtcctccgcgctcaaactgcgtgaacacccgacgccgacgatcacctgcgacctcgacggcacggcgccgaccgtggcgctgcccatggagcggccgctctacacgcccaaggtgaaggttcccctgaacagcgcggacatcaccgcggccgacgaggacctcgacgcctcgccgctgttcgaacaggtctacgtggaccgtgagcgcctgtccgggatcgtgcgcggcgagctgcgggaacgtgcccaggtcgggctgggcgaggtgctggggcgtcggccgctggagcagggcatggccgagctggtcggttacctctcgctgggtgacccggcgttccaggtcgtcttcgacgagaccgcgcgcgagcaggtggaatgggtcgacgagaccggtgcggcccgggtcgccaccatcccccgggtgaccttcacgcgggtcgccggccgcggtcttgtcggtgggactccttaa

SEQ ID NO: 44486 - DNA, 609 bp, Kutzneria sp. 744
atgagcggcgtgaccacgtcgatacgccgggacgaactcgacctgccgctggtcgtcactcacctgatgaagggggtggtctacgcggacagccacgagaaggtgtggcgccatctgctgccgctacaggcccaggtgcgtgactacgtcggggtcatggggctgactgtcgtgatcgacgaggccgagggctacgccttcctgcggtcgaagttggacaacgaggaggacgggccgctgccgcggctgatcccacgacgtgccctgtccttccacgtgagcctggtgttggcgctgctgcgcaagaagctggcggagttcgacgcctccggcgcggagacgcgactggtcctcacccgggagcagctggtcgagatggtgcgcatgttcctgcccgagagcagcaacgaggcgcggctggtcgatcagatcgacacccacctcaccaagatcgtcgagctcgggttcctgcggcggatcatcgggcaggatgccgcgtacgaggtgcgccgcatactcaagtcgttcgtcgacggccagtggctgtccgagttcgaccagcggctcgccgactacaccgcactgctcgacggggagggcgaggactga

SEQ ID NO: 44487 - DNA, 3375 bp, Kutzneria sp. 744
gtgcctggtctcgacgccgagggggccgacctcgccggctatcgcctggaccgcttggaggtgtacaactggggcaccttcgaccagcgggtgtggacattccaccccgagggccgcaacagcctgctgacgggcgacatcggctccggcaagtccaccatcgtggacgcgatcaccacgctgctgctgcccgcccaccgcatctcctacaacaaggcggccggcgccgaggcgaaggagcgacacctgcggtcctacgtcctgggctactacaaggccgagcgcaacgaggcgaccggcgcctcccgaccggtcggactgcgggaccggcgtgcgttctcggttgtccttggcgtcttcgtcaatcgcggctacgactcgacggtgacactggcgcaggtgttctggttccgcgacgcctccgtcggccagcccgaccgcttcttcgttaccgcggagcgcggcctcaccatcgcgggcgacttcaccgagttcggcggggacatcgcggcgctcaagcgcaggcttcgtaagcaggacgtccgcgtccacgatcattttcccgcctacagcaaggacttctgccggcggctgggcatcgactccgagcaggccatggagctgttccaccagacggtgtcgatgaagtcggtcggcaacctcaacgacttcgtccgctcgcacatgctggagccgttcgacgccgccgactggaccgaccggctggtccgccacttcgaggacctgacccgagcgcacgaggcggtgctcaaggcccgtacccagctcacccagctcgaaccgctgctcgccgactgcgacgcatacgacgagttcgaccggcggatcggggcggccaaggccgaacgcgacgcactgcggttctactgcgccgaccggaaggcgacgttgctcgacgcccgggtcgccgcgctcaccatcgagatcggcgcacatcagaccgaactggactcgacgaaaggcgaactcgatcggttgcgccgtaaggaaacggacctcaccgtgcgacgcgcgggctccggtggcgaccgcatcgcccaactcgaagccgacatcgcgaccgaggagcaggaacgcgaccgccggcaggcacggcacgcccgttaccacgagttgctggcgtcggcggcgttgcccgccgtgaccgagcccgcccagttcaccgcccggcagcgcgacatcgcggagctggcaggctccctggaccaggcgcaggccgagctccagaaccagctcaccgatctcacggtcgagcagcgggaactcgacggtgaggccagggagctgaacgcggagctgctcagcctgcgcgagcggcgcagcaacatccccaaacgcagtctggacgtgcgggacacgctgtgtgcggagctgaacgtcgacccggccgcgctcccgttcaccggcgagctcatccaggtgcgcgccgactgcgcggagtgggaaggcgcggccgagcggctgctgcacggcttcggcctgtccatgttggtggacagcgagcactacgacgcggtgtccgactggatcaacgaccgccacctcggcgtcaaactcgtctactaccgggtgccccgacgtcagggcccgaccgcgccctccccgctgaccgagcggtccctgcgcaccaagctggagatcaaggagtcgccgttctcggactggctggaccgcgaactggcccaccgcgccgactacgagtgcgtggacaccatgctcgagttccggcgcgccccgaaggcgatcaccaaggccgggcagatcaaaggcgctcgcggccgacacgagaaggacgacgcccgtcgcatcgacgaccgccgtcactacgtgctcggctgggacaaccaggccaagatggacacgctgctcgaccaggccaaccggctgcaactccggttgcgtgagctggccgtgctggcggccggggtcggcaaggacctcgaggaccggcgccggctcgccaccacgctcaccttgctggccgagttcggctccttcaccgaggtcgactggcagtcctcggtgaaccgcatcgccgagctcgacggcgagaagtgcggcctcgaacagcagtcggacgagttgaaacggctcacccaggagctggcggccgtcggcgcacagatcaagaaggcggaaaccgcccagagtgcggcgcaaacgcggctcgggaagctcagcggccagtgcgaagacgccgagaggcaactgcgcgacacacggagcaccttggacgagcccgcgtgcgagtccgcacgggcgttttttcccatggtggacaagcgagtcgcagccagaagcctggccaccccggaggactgcgacgcctgccgcgtcgacgtgaacgaggacatcaccacggagatcgatcgactcaccggacggcagaacaaggtcgcgaaccgggtgaccggaaagatgagcgacttccgcaaggcgtatccgctggagaccgaggacttcgacaactccgtgcagtccgcgggtgagtaccgggccctgcacggccggatcgccttggacgacctgccccggttcgaatccgagttcaagacctacctcaacaccaacaccatccgcgacatcgccgggttccactcccagctgacgaagcaggccgacctgatcaagcggcggatcgagaccatcaacgactcgctggtggacatcgactacaacccgggccggttcatccggctcgaaccgcatcccacggtcagcgtcgagatccgcgacttccgcagggaactgcgggactgcaccagcgggtccctgcacggcgacgagtcggaccagtactccgagcagaagttcctccaggtcaaggcgctcatcgagcggtttcgggggcgggagggccagaccgagcccgaccggctgtggacccgccgggtcaccgacgtgcgcaactggttcaccttcgccgcgtccgagcggtggcgggccgacgacaccgagcacgagaactacaccgattccggcggcaagtcgggcggccagaaggagaagctggcctatacgatcctggccgcgtcgctggcctaccagttcaagctcgactggggcgcgccgaagtcgaagacgttccggttcgtggtgatcgacgaggcattcggccggggctcggacgagtcgacgcggttcgcgctcgacctgttccggcgcctcggcctgcaactgctcatcgtcacgccgttgcagaagatccacgtcatcgagccctatgtcgcggcggtcggattcgtggacaaccagaccggtgactgctcacgggtgcagaccctgaccattgaggagtaccaccgccgccagctcgcgcacgccctcgggtccacgtcggcacggggtgactga

SEQ ID NO: 44488 - DNA, 1197 bp, Kutzneria sp. 744
atggcggcagcctccgcctggaccgtgcccggtgacgtcgtgagcaggctgcggcgacgttgggaccggggcgagttgctgtcccggctcgcgtcgggtgccccgtgggagccgctggcagtcggcctgcgcgggccgagcgcacaggacaccgccgcgcgcttcgacgaggcgcgagcctggatcgaccagtggcgcagggcccggcatctccgggtcgagacgcgcacggtcggcggccgtgtcctgggcgcgaacgagctacccgctcgggcctgggtcgactcctacgagcagttgtgggccgcgcttggcgtccacgccgaggttcgaaccttcatgggcctgctggacacgacccggcgacgggcaccggcgatcgccgactggatggtcgtcaagccgatggaggtgctcggccaccagggcggctggacccgactggtcaacaccgtgctgtggatcgacgcgcacgcccgtcccgacatgtatctgcggcaggtcgacgtgcccggcgtcgacaccaagttcatcgagcgccatcgcacgatcctggccgcgttgctggaccggcaactcccggagcaccgggtcgaccgcaccaggccaccgtctgacttcgccgggcggtaccagtttcgcgccaaacccgcgtatgtccggttccgtcggctgtcggacggcgacggcttcagcgaactcgccgtcagagtgcccgaactggccgaccggccgcccacggcgcgcaccgtgttcgtcgtcgagaacgaggtcagctacctggccttcccgcccgtggcggacgctgtcgtgatcttcggcgagggctacgccgcctcccggctggaaccattgcggtggctggccggcaagaacctcgtctactggggcgacatcgacacccacggcttcgcgatcctcaaccgggtgcgccagactttcggccactgccggtccatgctcatggaccgggccacgctcctcgcgcacgaaagccactgggtcgacgagcccagcccggtcagcggctacctggaggcactgctgcccaacgaagccgcgctctacaacgacttggtcgaagacgccctcggccgtgcggtgcgcctcgaacaggaacgcgtctcctacgccgccgtcgaacacgccgcggcagcgcacggctccacgatgcaggacagtcccaagcggccatag

SEQ ID NO: 44489 - DNA, 1047 bp, Paenibacillus pini JCM 16418
gtgaacatttttgacacaattcctgaaaaatttttctctgtgctgtcatcggggaacaaagaaatatatgttgatgcgctcatgctgctacatcagatgttcaagtatgaacttaatatacgggtagacgattatatctcgtctttgatagcccaaattgaggataagtcctttatgctcgaagaagatgacgaagtaaccgaagtcaacttgacatctaatgttaaggcgcgtttgatattgaaccgcctgattaaaacgggatgggtagataaggagtttctggatggatcatttattgaaattattactccacgtgattatgccattaaagtaatgaagctcttgagtgaactaagtgatcagaccctgcacgagtataactccctcgtattcgcgacttattctggtctcaagcaagctaaaaatgaacatcaagggcaaatgtatgaggcagtcttgtccgcaaagacaaacacggagcaacttacttacgagctaaaaaggctttatcatggaattcgcagttatttgcggagaatacaggagcagagcgaagtgaatgtgctgctgaaaaaccattttgaagaatacaaaaggatgtccgacagtatttatcatccgatcaaaacaatggattctattcatcgttacatggcaccaattcaggagatattgtcagatattcttgcggatgaagaactcatggatggaatgcgatcaagagccatgacgatccgaaaatatgagaatgatgatgaggcggggcaggagatcatatcatcaattgattatgttttggatgtataccagtcaattggaggaattgtgaatgaaattgatagaaagcacagcgcatacacaaaaatctctattgaaaaaatccaatacctgatgactgcagaccaaagtatcaagggaaaactggttgagctgttgaaagaatactcaaaatcctcagataccaagcgcactgtaatcattgaaatgcttgaaaagaatataagagtcaatcgacaagaatttattgatggaaaatctctctaa

SEQ ID NO: 44490 - DNA, 642 bp, Paenibacillus pini JCM 16418
atgtggaatgagaagtacataggacttactacttatgagaaaggcgagttcaaacgtttggcgaattacctattatctcatacatatatggtgcgatatgaatatcagtcttcacagcagatgaccttgccaaactacgactatcagatagcttcacgtctattcggaattttgcaagattattttgcggtcactggctggaggcttgaaaaagatgataattatggaatcatgtccttaataaatatatttgaccataatcgcctgaggattgatcgattcactacattgtttttatatacatgccgtctcatatacgaagaagagcgagaacaagtaaatagcttccatacggttaaaacagatactcaagcagttgttgaaaaaatgcgaatgcttggtcttcttgataaggggaaaacaacacaaaaagaacgtattgaggctcaaagaacgcttgcgcatcataatattattcaaaaaatggaatcttctgcatggaacaatgaaggtaatcaaattctcattctcccatccatcttatctattatttccaatcaaggcatcaacgatatgataacagaattagatgagcttggagtagatgacgacactagcacaactggagaaaaggaggaatag

SEQ ID NO: 44491 - DNA, 3402 bp, Paenibacillus pini JCM 16418
atgaaacggatgacaaaactcttactgattcattggcactactttgtccatgaagtcattgagttagataaagtgaattttctgaccggaaaaaatgcctcagggaagtcgacggttatggatgctctgcagttgttactacttgccgatactagtggtagcttcttcaacaaggctgctagtggacgtggtaatcgaaccttaagtggatatttacgcggtgaattaggtgacgatgaagattcaggttttaaatatctacgtaatggacgttttacaagctatatcgctttagagttctttgatgaggaaaagaaaaaatattttaccgcagggtgttgctttgatacttattcggaaaacgatatgcaaaaactattttttcgatttgacggagccatgccgtcaaatgagttcgttattaataggaagccgatggatattacaactttgagggcacatatcaaggaacactattcgataggacgtagttatactaccgatgtaaatcgggattttaggcaggatttatatgggaaacttggaggcttgcgtgatcgcttcggccagttattgaggaaagctgtttcgtttaatcccgatgttgacatacaaaaatttatctcagaattcgtctgtgatacgcaacaaacagttgatgtcagccgtatgcaggaaaatattagaagctataaaagcctggagcaagaggctgatgtgcttaaggatcgaatcactttgcttgaacatattgttacggatcatcaaacctttgaaacccacagacaaaatgaaattctatattcctatctgattgaccgcgcgcaagtagatatcaaattgactactagtgcaggcgagaaagaaaaagtaaccgcttattccgcccagctaactgtattgaaggatacggtagctaaggaaactgagcgacagagcaaactgcagggtgaacgtaatatcatgcaagccaacctgctcagtaacaaggaagcgcaagttttagagaatcttcaatctcaaatctcagagaaagagcaactaatatctacgcttcatggggatttcggtaggacttctgcattactttcgagaagcattgcttcatggaggatgaacattaacgggttcattcagaatattcaagggacagatactagctctctcgatccgatattgacgactcgtgttcatgaccttgttgacgaaggacgacagttttatgcaaagcttgaaatactcggaaatagtgatgcagcagccattttaacagttggggagaaagggctcattcactatgcagccagagcggatgctatacgtatgcagtgcaacggcctcgtttcacgattctctgaagaacaacagaaggttgcagataatcgtaaaggattacagacggagcagcagtcccttgaaaatggtatctatcgctttccacaggatgtacttgatctcaaggaagctgttatagggcgtttacatacccaaactggttcatcagttaaggtagtagtagtgtcggaagcagctgaacttaggaataaacgctggcgtaatgttattgaaggatatcttaatacacaaaaattctatctgattgttccccccgagcactttgacactgcacttcgtgtttatgatgatattaagagacaacgaaacatctataacactggtattgtggatattgaaaagctacggagaataaatcccattgcagaacctggaagccttgctgaagaacttgaaacagatgatcccaatgtgcgcttatttttagattttacacttggtcgtgtaaaaaaatgtgaccgcgtcagtgatttacgccggcatcgaacagcgattacagacgatggaatgttataccagaattttgttgtaagagcgatgaatccagatagatgggctaaacctgccattggccaaggtgcgattcagcaacgcttggaagatgtaaaaagagagattaaagagttaactgataaaatagctgtttgtgcatctgtaaagattgcctttcaatcgggaaatgctctaatgattttaagcgaatcggacgccaaacaaactgttacggcagcggtaaatgttggacagattccagagatagaacaagaagtcattttgctgaataaaagtatggagtctattgataaaagcgctgttgaagcaatgcaggaacgcatcgagtcattggatcaacaactgggggctctttataaacacattgacatatataagcacgaattcagcaccatcgaagaacgcttgcgtgtatgcttagaggaaacaattccaagactttctaaagagttggaaacgatggagttagaactttctagaaaatacgaagcagaatggctccagagcacaggaaatacaagatatcaacgtgagctcttaagtagaggtaatgcagttgatattgaacgggcatttccgagagaacttagccgctccgtaaacgctaaaaacgctttgtgggacgggttgcgaactttgcgccgccaatataatgataagtatataatggggtatgatattgacgtcgtgagtaatgacgcttacgataatgcgtggattgagctcagcgatattaaacttccggaatatttgactcgtatcgccgatgcccgaagtaaagcttttgagcagtttcaggaggattttttaagccgtctacaatataacattaaggatgcaaggcggcagattgatggactaaacagtgcattaagcggaagttcctttggcgaggatacatatcgttttctgattattccaaaacaggaatataaacgatattatgatatgattgtagatccaatgctgctggaaggcgggtataatcttttgtctgatcagtttaatgcaaaatacaaggatgagattgcagaactgtttgcaattattacgaatgaaggaaccggttcgaaagcgcaggaacgcgatgattatgaaaaacgagtacaagcttttacggattatcgtacttacctttctttcgatttagaggtcattaaccgcgagggagaatcacaaagactctctaaaacacttgggaaaaaatctggtggagaaactcagacgccattttatattgcagtattagcatcgtttgcgcaattatatcgcattggccgggacaagacagctaatacatctcgtatcatcctgtttgatgaagcattttccaagatggatggcgagcgaattgtgcgtagtgttgaattgttacgtgagtttaactttcaagtggtactttcagcaccacctgataaaattggggatattgccactcttgtagataggaatttatgcgtgttacgtgtaggaaagcaggcatgcgtgcgtagtttcgaccctaggaagttggaggagcttgaatatgagtga

SEQ ID NO: 44492 - DNA, 1203 bp, Paenibacillus pini JCM 16418
atgagcgtagcagttttttttacgcggaaacgtccgacacgtcgaattatgctgaaattatatgatggaggtcaaacagagttcccacagtatgatatagagcaatatgaaaagcgcagtatgataaatcttgcagtacaggccttgtatgaggctcaacttttatcatatcgatggatgaagggtgaagaaagtcacatcatagcagaggtatggctgaattttgagaatatctcttctgcgtactccttaattgggcggcaaccaaagggcgatgtggtggatgaggtttgtttagaactgttaaattcaatagataaagttcgtagcggatgggcaaaacagtttctgagcgatgcatatgacatcatttctagaaaacgctctattggaaatagattaccaatagatagaagcgagcgtagtgatctccttcgtgcaatatgttttattgatcaaatgggtgagttagaaatgcttgagcgtgtattttcgcttcaatgtttcggagattcaaagagattcgagaaagcgataagagcacggctgcttggcatattgtccaaatatctagattatgaatatgataatactgatgaggaaattcttagacaagtaggtattacgaagtatccagaacaattggagttttgtgggcaagtaaccatgtcatttgatagcggaaccattgacttttcacatttgatttttgggggcgttgtgaactcgaaagatttccaacgaggtcagttaagattatctccaacaatagaacgtgtgatctcaatagaaaatagggcaaactatattgagtatatctataagcaaaaaaatgaccatgaattagttgtgttccacggagggcaatttagccctgctaagcggaaatttttaatggctgttgctgcatccatacctacgactagccattggtatcattggggagatatcgactttggtggattttctatgctagcaagactaagacgggaaattaagaacgatgttattccgtatcgcatggataaatcagaattgataagatattctttgttaacagcatcagtacagccgaaatatattgaaaagctatgtagcttgaagcggcatagcgagcttgtcgattgtttaccctgcattgaccatatgatagaaaatcgtgtcaaactggaacaggaagctatgttgaccgatcttatttaa

SEQ ID NO: 44493 - DNA, 1473 bp, Brachybacterium phenoliresistens
atgacaggcctcagccgcgcactgcagaaccgcgagctcatggaggactccggcccgctgaggctgctgcgcacggagcacgcgccgtacaccttgggcctcctcgcggagcacctcggcggggagcggcgcgtccggaccgccgcagagctctacgacctcctggacgccgatctcgaggagctgcggctgcacggcgtggaccttccgcgcaccgcccagcagtactgcgcgacctgggtcgcgcaggggttcctcacccgccgagccgcccggaccgagcgcacggaggagttctccctgaccgagcacgcccatgcggcgctgcggatcctggaccaggtgcacgccccacgagacgccgtgacgcgctcccgcctggccctgctcacggaccgactgcgtgctctcgcccaggagaccgatccggacaccgcccgccgcatcgctgcgctcgaggcggaacggcagcgcatcgaccagctgatcgactccatccgggagcgcggggctgagcccctgccgcaggcccaggccgtcgaggccgccgaggagctgtactcgctcgctcttgacgtcccctcggacttcacgcgcgtgcgcggcgagctggagcgcctgcaccggaagctgcgcctggacctcgtcgagcacgacggcccgcagggagagatcctcgaccagctgttcctgggcgtggacgcgatcgaggactccgacgccgggcgatccttcgccgcgttccacgccctgctcatcgaccccgtgcaggaggcgcgcttccacgaggcggtcgacgcgctcgcctcccggcccttcgccgccaccctgggccctgagcgcgtgctgttcctgcagtcctacctcactcgcctccagcgggactcccaccaggtccgacaggcgatgatcgacctctcgcgctcgctgcgggagttcgtgcgctcgcgccagttcgaggagttccgggcgctggccgaccggctgcgccgtccccagcgcctgggtctcgccatcgccccgcacgtgcgcccgcacaccaggctcgggatggagctgacgctgtccaccttcaccccgcgctccgtaggccagttccgcctgctctcccccggcgagtccacggcggccgaccccctggacctcgcccccaccgcgacgctcgacctggaggcgctgcgcgccaccatccgcgagtccgagatcgacctcgccgagctcgaggccgcggtcgatgccgtgctggcggagcagccctcggccacgatcggcgaggtgctcgccgcgcacccggccactcagggcctcgcctccgtggtcggcctggtcgtcctcgcccagcggcacggcgagcccgttcccgaggagggagcgaccgagctcgtcacctggcagacccgccacgtcaccagggccgcccggctccccaccctgcgcttcacccacccgctccgggagaacgtccatgactga

SEQ ID NO: 44494 - DNA, 708 bp, Brachybacterium phenoliresistens
gtgaccgatgccgaagcgggctcggccgacggccgggtgcagctgtggccgggggaccccggcaccctcccgctggacgtgcggcgcgtgctggtggccctgctgaagggcccgtacgtgtcccatcagaaggacccccttctgtggtccgccctgctcgcccacgagggggtggtgcgccgccgcctgggcgacctgctgctggacctcgccatcgacgccgacgcggaggtcgccttctcccgcaacctcgttcccgatccggacttcgactcccccgtgcccagcgtgctgcgcacggcgccgctcagcttcatcgactcggccctgctgctgcacctgcgccacctgctcctgcagggggcggcccgccaggagcgggtggtcatcggccgcgacgagatcgacgcgcacatgcaggcctacgtcgcctccagcggcaacgacgaggcgcagttccgcaagcgcctggacgcgtccgtcaagcgcatgtctgagtactcgatcctgctgcgcaccgagaccgaggaccgctgggagatctcctcgatcctggcgctcatcctcaccgccgaggagatcggcgggatcgaggaggagtacgagcgcctgcgcgaggccgccggccgggatccggacgaccgcgacgacgcgcccgatccggaccggaccgagggcgaggaccacgacgaggaggagctgcgatga

SEQ ID NO: 44495 - DNA, 3315 bp, Brachybacterium phenoliresistens
gtgtccgcggatcctctgcgccctgggcagatgcgcctgtcccacgtgcagctgcacaactggggcaccttccacggcgggcacgacctgcccgtccctcgcggcggcctgctgctcaccggcgagtcgggatccgggaagtcctcgatcctggacgctctcagcgccgtcctcatgcgccccggcgagacccgcttcaacgccgcggcgcaggacggccccgcgggcgaccgcgaccgcacccctatgagctatgtgcgcggcgcgtaccgcaagcaggcggacgacgacaccggcgaggtcacctccggatacctgcgtcccgccaccactgtctcgggcatcgccctgaccttcgaggacggccgggaccgcaccgtcaccgcggtccgcgttctgcacgtgagcggacgctcggccgccgctgcggacctgcgcaccgccttcgtcctgttcgaccgcccgatcgaactggccgacgtgctggccccctgccgctccgggatcgaccggcgcaggctcaagcggactctctcgccgctgctcgccgaggagtcgtacacgaagttcggcgtgcagctgcgacggctcaccgggatcggcagcgaaggggcccagaagctgctgcaccgcacgcagtcggcgaagtccctcacgtcgctggacgagctgctgcgggatttcatgctcgaggaacccgagacgttctccctggcccagcaggccgtcgagcagttccaggccctgcaggacgcccacgcgaccgtcctggacgcgcgcacccaggtggacgtgctgctgccccagcgcgagcactggcaggtgcaccggcgggcgagcgaggagcgcgatcgcctccagcagctgctggacgccgtcaccccctaccagcacacggtgctcgccgagctcgcctccgccgacctcgcctccctccgcgcgagggtcaaggtcgcgaccgtcgaccaggagaacgccgagaccgcccggtccgatgccgcgcagcgcgaacgggagctgcaggcccagcgggacgcgcgcggaggcgccgcgctccagctcatcgaccgcgacctcgcggacgcccgcgcgcaggccgaggggatcgccgctgccgtcgagcggctccggccggtgctcgagcggctcggcgcaccgcagcccacgggccctgaggagctcgccgccgcgcatgccctcgccgagcgggagcaggagaggatcgccacggtcaccgcggagctcgcgcagggggcgcgcccccactacgccgccctcgaggacgcggaccagcggcggaagacggccgagaaggagatcctctccctgcgctcgcgccgttcgaacctgtctgctgatctggtggccgtgcgcgaccagctcgccgaggccgccggggaggcgcccggctccctgcccttcgtcgccgaactgatggacgtgcgcgatcccgcctggcagggcgccgtggagcggctgctgggttcgctgtccgtgaccatcctcgtcccggagcggctgtacgcgcgggtgtcccggtccgtcgagggacggcactggggccagcggatcgcctacgagcgggtgcgcgaggccgcgcggcgggacaccggagggatcccgccgggtggcgagcgcaccgtgctgtccgtcctgcagctggccgactccccgttccgcgactggctgcgcgcccgcatcggccgcagctacccgcacgtgctggtcgacgacatcagcgatctccatcgccacgatcgggccctcaccatcgctggtcagatcaagaaccgcgaccatcacgtcaaggacgaccgccaccggatcgaggaccgctcccggtggatcatcggcaccgacaactctgctctgctcgagctgcgccggcagcagctgcaggaggcgcagcaggacatcggtcgggcgcaggcggcgctcgcggggctggagaagcaacggcgcgcgctgcaggagcggcagcaggcgctcggtcgcctgctcgagaccgaatgggcggacctcgacctcgccggcgcgcaggagcgcacccgcgcgctggaggcccgacgtaccgtcctgctcgccgacgctgatctggagtccctcgatcgtgccctcgccgaggccaccgcggatcacgccgaggcccgttccgggcacgacgacgcacggctgaccctgcagaccctgaagagggaggccgggcaggcgcaggccgacctcgagcgggcccgtgccgagctggaaggcatcgacccggacccggagctgcggcaggagctggaccgtaggatccgtgcgcgccgccgcgccgccctggaccgggccgcccttcccgacgccgtactgcacctcgagcgcgggatccgcgaggacctcgaggcgcggcgcgagacgatccgcagggccgagtccgccctcgggacggcccgcggcacctacctgcgacgctggcccgaccgatcggcgaacctggtcgacgacatcgacgccacggaggacttcctgcggatcctcgcccagctggagaccgatcgcctgcccgagttcgagcaccgcttccgggatctgctgcgcagccagtcgcagaacaacatcggccagctgcgggccgtgatcagccaggccatccgcgacgtgcaccagcgtctggcgcccgtcaaccggtccctggccgcgaccgccttcgacaccgagcgccgcacctggctgaccctcgtggcccagcagaagcacaccgaggaggtgcgggactttctgaccgccctgctggagatcacccagggcgccttcggacagggcgaggagaacatcgatcaggcggaggcccggtacgcccgcatggacgccctgatgcgccggctgggcagcgcggaggccgccgatgtctcctggcgccgccgggtgctggacacccggcggcacgtcgagttcgtggcccgggagctcgacgagtccggggaggtggtggacatctaccgcggcgccggcggtcgctccggcgggcagcggcagcgtctggtcacgttctgcctggccgcggcgctgcgctaccagctgaccgactccgccgatggggatccgccctacggcctggtggtgctcgacgaggcgttcggcaactccgacatgcattacacgcgggccgggctggaggtgttccgctccttcgggttccagatgctgctggccacccccctgaagatgctgcagaccatcgaggagtacgtcggcggggcggtcgtggtggcgaaggggaccgacagccggtcctctctggcggctgtcaccttcaccgcgcaggacgcgcgatga

SEQ ID NO: 44496 - DNA, 1182 bp, Brachybacterium phenoliresistens
atgagaggccccggggagatccgcgagcggctgcagcgcgcctggtcgcgcagcacctccgcctggctggccgatccggagggggcatcggccgacgtcccgctgcacccgccgaccggggccgatgccctctccgatccggcagccgtccatgcgtggatcaccggctgggcggacgccgggccgatggccgagcacgtggcttgggaggagcggcgatggacgcacctgggcgcgcagcgcgtcccggtgcgcttccaggcccaggaggccgggctcctgtgccgcctcgccggggccggccctgcccgcgagtgggtgctgctctccgcgcgatgccaggacgccgtcgccgcgctcgcgacgagctcctcccacgagccgtcggccctgcgggacaggaccgcggccgcgatcgcccgccgcaggacgcagtggctgcagatgccgccggtggacgccgagctgtgcatccgcgcggcggcctggctgctcgcgcatccggactccgggctgcgcatccgccaggtgccgctgcccggcatgcacacgaagtggctgcaggcccaccgatccgccgtcgaagggctggtcggggcggcgaggaccgacgggtccacggccctgggcctccggccctccccggtcttccatgatctcgtggtgctcgacccggcgctgcgtgccgccgctgcggcgctcccccgcgcctcgcgcctggacgtcctgggacttggggagacgggcctggaaccctcggccgtgatcgtctgcgagaactccgagaccgttcaggtgctgccggacctgccgggcgccgtggcggtcagcggggaggggtacaacctcgccgagctgctcgccgtcccctggatccgtgccgtccccgtcctgtactggggcgacctcgatgcggacgggctgcggatcctcgaccgggcgcgtcaccaccacgcccgtgtggtcagcgtgctcatgaatcgcgagaccctcgaggcgcaccgggagctggcggggtcgggcggcgagcgcagcccggccgcgctcacgcgcctcacacccgcggagtccgatcttcatgtcgagctcagcgccaccggggagcgtctcgagcaggaacggatcgagctgggatacgccgtcgagaggctgcgcgcggccgtgcgggagctcgatgcgtga

SEQ ID NO: 44497 - DNA, 1440 bp, Intrasporangium chromatireducens Q5-1
ctgtcccacgacgacctgagccggctgcgcgagcagcatcccgcctggcggctgctccgcgccgcgaacgcgcccctcatcgtgagcttcctgggccggaccttcgtcgaggagaacgtgcgggtcctcacccagtccgagctcgtcagccgcctcgacgacgagctctacgcgctgcgcgagcggctcggtgacggcgcctaccccaagtcggcgtccgcctacgtcgccgactgggcgagtcaggagtccggctggctgcggctctactacctcgagggcagcgacgagccgcacgtcgacgccaccccggcactggagcgggccgtcgcgtgggtcggcatgctgcaggagcgtgccttcgtcggcacggagtcacgcctgcacacgctggtcgggctgctccggcagatcgtcacgggcagcgacaccgaccccgagcaccggctggagcatcttcgcgccgagcgggcgcggctcgacgagcagatcgcccgcgccgaggccggcgagatcgacgtgctcgacccgaccggccaacgggaccgctaccagcagttcgcgagcacggccctcgagctgctctccgacttccgcgaggtcgagggcaagttccgcgccctcgaccggcagatgcgcgagacgatcgcgggctgggacgggtcgaagggcgagctgctcgaccagctcctcggtgaccgcaatgcgatctccgagtccgaccagggccgcagcttccaggccttctacgacttcctcctgtccgccgagcggcaggacgagctgagcgctctcctcgacgaggtgcaccgcctcgaggcgatcgccgccgacgaccgggtgcgccggatcgaccgcgactggctcgccgccgccgaccgcacccaggcaacggtgcggacgctctccgaccagctccgccgcttcctcgacgacaccgtctggctcgagaaccgccgggtcatcgagttgctccgcagcatcgaaagcagcgcggtcgtgctccgggacgagcgcgagccggtcgagatggagctcgagagcgcccggccggagatcgccctcccgttcgaacggcccctctactcgccgccggccgcaccccagatcgacagcaccgtcgcggaggcagtcgatgcggccgagacgaccgccctcttccatgtcgaccacgtcgaccacgcgcggctcgtcggccaggtgagggcagcgctgcggcaccgcacccaggtgagcctcggcgagatcgtcgacgagcacccgccggagcaggggcttgccgagctgatggcctacttcgccctgcacgaggacggcatcgacctcgtcatcgacgacacggcccgccagcgggtcggctggaccgacgacgacacgcgccgcgaggccgacatcccgaccctgctctacgtccgccctgacggcaaggaccgctcatga

SEQ ID NO: 44498 - DNA, 675 bp, Intrasporangium chromatireducens Q5-1
atgacaacgatcccgaccacctcgaccccgggcgccaccgatgatgcgctcgacctgtcccgcgtcgtcatcccgctcctgcgcggcgtcgtctaccaggccgacaacgccgcgctctgggccctgctgcgccgtcaccagacccgggtcaaggaccacatggccgtcatgggtctcgagctcgtcgtcgatgaggccgagggctatgcccacctgcggcagatggactacgacgacatcgacgtcccgcggctgatcccccgccaccggctgtcgttccgggtgagcctgctcctcgcgctcctgcgcaagcggctggccgagttcgatgcgagcagcagcgacccacggctcatcctgacccgtgaccagatcgccgacctgctccgcgtgcacctgcccgagagcaccaatgaggtgcggctcaccagcgaggtcgacgcactcatcacaaaggtcgcggcgctcggcttcctccgcccgatcacgggccaggaccgcacctacgaggtgcgtcgcatcctcaaggcctacgtggacgcccagtggctcaacgagttcgacgagcggctgcgtgactacctcgcgaccctcgagcccggcgcagcggaaggctccggcgacccggcggccgatcgcgacgcccccaacgggtgggagcccagcgatggatga

SEQ ID NO: 44499 - DNA, 3384 bp, Intrasporangium chromatireducens Q5-1
atggatgagcttcccctcgacgactcgctcggcaccgccggctaccgcctcgaccatgtggaggtgctcggctggggcaccttcgaccgggccgtctggcgcttcgatctcggcgggcacacctccctgctcaccggcgacatcggctctggcaagtcgaccctcgtcgacgcgatcacaacgctgctcctgcccgcccaccggatctcctacaacaaggccgccggcgccgagacccgcgagcggagcctgcgctcctacgtcctcggctactggaagtccgagcgcagcgagactacgggcgtctcacgcccggtcgggctgcgcgaccacacgtcgcactccgcgatcctcgccgtgttccgcaacgagcggctcgactcggcggtgaccctcgcacaggtcttctggatgccagacgaccacgccggccagcccaaccggttctacctcgtcgccgaccgcgagctcgggatcgtgggcgacctcagcgacttcggcaccgacgtcaccgcgctcaagaagcgcctccgcggtgccggcatcaccccccacggcacgttccccgactacgagcgggcctaccgccgggccctcggcatcccgtcgagccaggcgatggagctgttccaccagaccgtctcgatgaagtcggtcggcaacctcaccgatttcgtccgcgcccacatgctcgagccgttcgacgcggccgcggacgtccgcaagctcgtcgcccacttcgaggacctcaccgccgcccacgacgcggtcatcaaggcccgctcccagcttgccctgctcgacccgatcgtcaacggctgcgacgaggtggcccgggtccgcacggacctcgccgaggcgaccgctgcgcagcaggccctccggtatgccgcagccgaggtgacgctcaagctgctcgcgcacgaagtgacggagacccaggcgcagctcgcacacgagcgggagctccatgcccgtgcccaggggaccgtccagtcgctgcgcgcagagcaccagggcctgcgcgacgctcgcgccggccacgcgggcggaagggtcggcgccctcgaggaggcgagggagcggcataccgaagaacggaagacccgcgccaagcgccaccgcgcctggagcgaggacctcgcggcggcaggactcgagccgctcgccgatcccaccgagttcgagcgggtccggggcgaggcggacgccgcgcaggccgcagtcgatgacgagagcaagcgagttgccgaccagctgaccgagcacgcggtcgaccgccgtcagctgcgcggcgagtcggacgagatccgggccgagctgatcagcctgcgggagcgccggtcgagcatcccccgggagctgctcgcgttgcgcgaccggctctgcgaggagaccggagtcgccgacgagcgggtccccttcgtcggcgagctcgtccaggtgcgtcccggcgaggaccgttggcggggcgcggccgagcgagtgctgcggggcttcgcgctgtcgctcatcgtcgatgacgccgactacggccgggtcgccgactgggtcgacggccaccacctgggcacccgcctcgtctaccaccgggtccgggtcggtgagcgccaccagccggcgccaccgacggcaggcacgctcgcggcgaagctcgagctgcgcgacagcccgtatgccgcctggctggcggcggagctggctgcgagggccgcgcacgagtgcgtcgagagcctcgaggacttccggcgggtcagccgggcggtcaccgtgcgcgggcaggtcaagtcgggcagccgccacgagaaggacgaccggcaccgagtcgacgacccgtcccgctacgtgctcggctgggacaacaaggcgaagcaggacgccctcatcgggcgcggcacccgggtgcaggaggagctgaaccgcgtcgacgaggcgatccggcgggccgaggcccagcagcgggagctgcgcgcccggcgcgaggcgctgacccgcgtcctggtcgtcgacgacgctcgcgacatcgactggtgggcctcggcccgggcgctccaggaggtggagcgggagctggcgctcctcgtcgaggcctcgcgcgagctggccgcgatcgacgagcgcctggccgtcgtggaggccgagctcgccacggccgatgagcaacgggccagccacgagcgggccatcggcgcgcttgacgggcgccgcaccggtctggagaccgaccaggcgcgcaacacggcggtccttgccggggtcgacgaggccgaccgtccggccgtggaccgcgcggttcgtgccctgcggtcccgaggtgtcagccgagtcgatgcggtccaaggtctcgtcgaagagctgcgcgccgagctcgtggagcggtccgcggcgctgtcccgccggctcaacaccgcgacctcgcggaccgagcggctcatggacgccttccggcgcgactacccggccgagacgaccgacatggacgcgagcatcgaggccgccggtgagttccgcgagttccgcgaccgggtcgcccgcgacgacctgcctcggttcgaggcggacttcaagcgctacctcaaccagaacaccatccgcgagatcgctggcttccaaagccggctcatccagcagtcgaaggagatcaccgaacggatccgcaccatcaacgcctcgctgcgcgacatcgactacaacaccgaccgcttcatccgcctggacgcggtgccgacgcccctgaccgagatccgcgagttccgggccgacctgcgggcctgcaccgagggagcgctgctcggtggcgaggccgacgacctctactccgagcagaagttcgagcaggtccggtcgctcatcgcccggttccgggggcgcgagggcttcgccgagcaggaccggcagtggaccacccgggtcaccgacgtccgcaactggttcgtcttcaacgcgtcggagcggtggcgcgagtcggacgaggagcacgagacctacgccgactccgacggcaagtcgggcgggcagaaggagaagctcgcgtacacgatcctcgctgcctccctcgcctaccagttccgactcgacgccccgggcgggtccgcccgcaccttccggttcgccgtcatcgacgaggcgttcgggcgcggctcggacgagtcgacccggtacgcccttcggctcttcgaccggctggggctgcagctgctcgtcgtcacgcccctgcagaaggtccacacgatcgaaccgttcgtgcgccgagtcggcttcgtggacaacccgagcggccggtcgtcccgcctgcacaacctgacgatcgaggagtaccagcagcaacggtctgacgcggcgcttgcacgcgtcggcggcgcggtcaggcccgagcgggcatga

SEQ ID NO: 44500 - DNA, 1188 bp, Intrasporangium chromatireducens Q5-1
gtgacccgtcagccctggtcgacggtcgacgacatcaggtctgcgctgcagcggcaatgggacaagggcgagctgctgcgcgtcgcggcccagggtgcttgggagccggtccgggtgccattgcgagcgccctccgcccgtgagctcgccgcggccttcggcccggtccaggactgggccggtgccctgcaccgtgcggccgacggtggccggcagccggcgttcggcctcgaggtgcggccggtcgggggccgtctcgtcggcgcgaacgtcgtgccgtccgccgcatggttcgacgagccggagcaggtctggcgtctgctgcgggtcgcggaccaggtggcgaccttccagcgcgtgctccgcctcggggccgaggcgcatccggcgctggccgactgggtcgtcgcacacccgttgcgggcgctcagtcacgcggcggtgtggcccaaggtggtcgcgacggtcctgtggctgcgcgcgacggtcgggacagcggcatacctgcgtcagatcgacgtgccgggcgtcgacacgaagttcatcgaggggcaccgcgggctgctcgccgagctccttgacgccgtcgcccccggcgtcgccgacgagacccgttcaccgggcaaggattttgcccgccgctacggcttccgcgacaagccggcgatgacgaggctgcgttcgctcgacgggacgtccctgttcggtgggctcaccgacgtgtccgtccgggtcgaggagctcgccgcgaccacggtctcggcccgacacatcctcgtcgtcgagaacgaggtcaccttcctcgcgctgcctgcgctccccggggtcgtggcgttcttcgggtccggcttcgacgtgctgcggctggggcgcctcccgtggctcctggatcgcgacgttctctactggggcgaccttgacaccgacggcttcgtcatcctcgaccggctccggagccagctgccggccgtgcgcagcgtgctcatggacctcgagaccctgaccatgcactcgagccagtggacgaccgacccgaagccctcacggctgtccctcgcgcgactgacgcccggggaggccgccgtctatcgcactctccgggacaacgagctgggcacctcggtgcgcctggagcaggagcgcgtcaactatgctcacgtcgccagcgcgctcgagcaggcgctctga

SEQ ID NO: 44501 - DNA, 1353 bp, Yersinia similis
atggaagatgcgcttcaggcgctggcgggtatcctctccgcgcatgccagtcaggaactgtatgaaatcgagcctgataatacccatcttcaagctgggcgcgagctacgggagtggatcaaacgccgtctggttgttgagcgagaagggcgaatttttgcaacggatgcactggaagtcgcgatacagtttgttgaatcgctggatagccgcattatgacctccacagcttcacgtctgtccgtggtgcaacgtgaaatagaaaatcttgagaccagtcttaatcccaacccagagagccgaattaataagctgcgtagtcgaataaaggcgctggaggaggaactgtcgctggcagaagcgggacacatcgtggtgctagatgaagcacaggcggttgaagggatcagggaagtctacaatttggccacttccttgcgtgctgattttcgtcgtgtagaggattcttggcgagaggctgatcgggcgttgaggcaatctattatcagcgagcagtatcaccggggtgaaatcatcgaccgcctgcttgatgatcaagactcactgctgaacacacctgaaggtcgcgtgttcgacagcttccagcaacaacttcgccagacgattgaactggacaatatgcgccatcgcctgcgcaccattctgcgccatcccgttgtacccaaagcattaccatggtcacaacaacgggatcttcactttctggtgaagcgtctggttcaagaaactaaggtggtgttgcaggccagatcccgtagtgagcgggatgtgaaaggttttatgaaaaccggccttgctgcggagcaccaccgtgtagggcaactgctcaatgatatctttagtcttgctttgaatctggattggcagcggctggcgataaggcggcaagagatccctttgccgcccttgggaatggcggtgacaggcgttcctgcggtagagcggttacgttttaaaacactggatgaggatattgagccagaactggatctgagcaccacgtcagtcggcttggaacaagtgggtgatgatttttgggatgcctttgatggtttggatcgagaggcgctgatccaaggtaccctgagagttctcgcagaacaaaacagacccattagccttggtgaattggcggttttactccccccagcacacgatctggaaacttttgccctttggctgggaatggcacatgaagccggtatcaccattcagaatgaacagcgagaagcggttgaactgattgacgatgaacagcgcatatggcgcttctatcttccctatgctgggctggaaagtcaggcacttaaggatattgactgggagttgtga

SEQ ID NO: 44502 - DNA, 759 bp, Yersinia similis
atgacaggcatctttgatcggttagtgaatacaggcaacggagagctaacccaagatgtgctgtcgcatatcgaaagggatgatatgacaaccgatgcattgcctgatacggacagcgagtctaccgaagagaagcgcactcacaagcgagtacgtgaggctgctcaggagcttcttaagtacggtttacttgaagagagtcataaacccaatctgtatcgcatcgcactgatccacaccgaagaaatggccagcattttggagcctctcgatctgagtatggggatcgatgaggttcgtgggctactctttgtcatggtacggcagcaggaaacctcggaacaggatgattggacgcatccgttggtgcgccggcagcgcttgaatctggaacaatcgttactgattgccattttacgtcagcacttcattgcctatgaacaggaaaacggaataggtgccagccaggcattggttgtcgtggatgatttgatcccacagctacaggtgtatctgggggatctgggcagtgatgccagagagcgaacacgggtgattaatttattagatcagctcaaagggcatggattggtttctgctccagacgctcatgaacgggtgattgttcgcccaattattgctcatctggccaatcctgagaatttacaagctttgttagcatggctacgagatcaggtggaaaggagcgagttgccgggtgacgccagtgaactgatgggtggggaggagatgccatga

SEQ ID NO: 44503 - DNA, 3291 bp, Yersinia similis
atgaaacaatcccctctctggtgcgatagcgaaaccttcatattgacacatttggatctttttaactggggtggcttcaaaggggttcatcgggcggttattgatcccgcagggacggcggtgatcggccccacgggtagcggtaaaacaacgcttgttgatgctctgatgacgctgttgtgcgctaaccctcgctataatctggcgtctacgggggggcatgagagcgaccgggatctggtgtcctatgtgcggggggtatccggccccggcgatggcggtgccgggcagtcacatattgcccgacagggcaaaacaatcactggggttgtggctacgctggcatgtgatacacagcaaattcgcttgggtgtcttgctgtggttcgagggcaccagctctgctgcaacagacatgaaaaaactgtggctgttcagcgatgcccctggacacacccttgagcattggttgaatgtacaccatgaaggggggatgcgggcattgcgacagatggagaaagaaggcacggggatctggacctacccgagtaaaaaatcttatctggcgcgcttgcgtgattacttcgacgtgggtgaaaacgcgtttacgctactgaatcgcgctgccggcctaaaacagttaaacagtattgatgaaatcttccgtgaattggtgctggatgatcactcagccttcgagcgtgccgccgaagtcgccaatagtttcgatgatctcactgagatttaccaggaattgcaaatcgcccgtaagcagatacggtcactacaacctattgccgatagctgggggcgttatcaggtccagtcacgcctgctggaagaacggcaggcactcgaggtcattttgcctatctggttcgccgagcaggcccatggtttgtggttggtgcaaacacatcggctagagaaggaaatcagcgagactgaatccaccgtaaaagaattacagcggcaacaggccgaacagaaaaagcaggtgaatgagcagctgaaacgctattgggatgtggagggaggaagtgttgatgttctcaaagatcgcattaccgattggcagaaaacctgccatcaacgggagatgcaggcagcaaattatcaacggctagcaataaacctcgatctatcacaggagttgaccgctgcggggttgcaagcgaatcaacagaaagccgaaacacgcctgatggccctttctgaagagataagtgccgccgagcgaagcgcattcagtaaagggattaccgatcacgagttaactgagcagcttcagcagttatgtcaagaaaagatagacgttgagcgccggcccgaatctaacctgcctagccagtttcaagcttttcgcagcgcgttggctaccgagttgggcctggatgatacaaccttgcccttcgtcgccgagctggttcaggtcaagcaggaggagaaatcctggcgtggtgccatcgaacgagcaataggcagccatcgcttacgtatattggtcccccacgcgtcggctgatgctgccctgaattgggtcaatcaacgacataaccaactgcatgtgcgtttactcgaagtgaagtcgccagcgtcccagcccctatttttccatgatggttttacgaagaaacttacctacaaagaacacacctcccgagagaccgtgaaagccttgttggcagatattgatcgccattgtgtcgaaaataccgatcaattacggcataccccacatgccatgactgcgcaggggctaatgtcgggcaaggcgcgtttcttcgataagcaggaccaaaaacgtctggatgagggttggctgacgggttttgataaccgtgatcggctggcttttctggcggagcagatacaacagaaagaacaacagctacagatagcgacgcaagcgcttcgtcttgctcaggctgccgtgggtaaattgcaggaacaagccaatgcgttagcacatattcaggcgttgaacttcgagagtattgacctacccactgcgcagcgccaactggaagaattacaggctcgtctggataggctgacccatccgcagtccgatatcgctattgctaaggccgcactggatgaggctgaagcacggcaaaaagagcttgaaaggcaatatcaacaagaagtgactgcatgtgctggtttgaagaaggatctcgaacgtgcagcaatgctcagccgtaaagtccataacatcgcaaaacaaggcatgaccggtgcactacaagcgttaggcgcagcgcattttcctcaggtggcccccgagcaactggacgacattcaggacattgaacgtgagcatgcacgccaattgcaaggccgactcaatgaggtcaatgaccgattacaacggttacgggatgagcttatcaagcggatgtccgacgccaaaaaagaggatactggcgcgctttcggaagtggggcgggaattagacgatattcccaactatctggcgcgcctacagaccttgaccgaagaggcgcttcccgaaaaacttaagcgtttccaagaatatctgaaccgttcctctgatgatggggtgacgcagttactcagtcatatcgaccatgaagttgcgttgatcgaggagcgtctggaagaacttaatgacaccatgcgccgagtcgattttcagtctgggcgctacctgtgtttgatcgccaaaccggtggtgcatgacagtatgcgcacgttactgcgcacgcaacgccagcttaactcggctcgtttcgtcgatgatgatggcgagagccaatataaggcgctgcaagcgttggtcggattactgaaagatgcctgcgaacgcaaccgcacccaaggggccagagcgttgctggacccccgtttccgccttgaattcgccgtttcggtgattgagcgggaaaccgggagcgtcattgagactcgtaccggttcacaaggcggtagtggtggagaaaaagaaatcatcgcgtcttatgtactgaccgcatccctaagctatgcgctgtgccctgatggtcgcaccaagccgttgttcggtactattattctggatgaggcattctcgcgtagctctcatgttgtcgccgggcggattatcgctgccctgagggaatttggtctgcatgcggtcttcatcacgcccaataaggagatgcgtctgttgcgtcatcacacacgctcggcgatcgttgttcatcggcgtgggccggattccagtctggtctcattaagttgggaagatctaaatgaacatcatcagcagcgcaacaaaccaatatga

SEQ ID NO: 44504 - DNA, 1155 bp, Yersinia similis
atgaaatcacccattgatattggcaagcaattggccagacagtggcatcagtctaaggtgaggtctgaacgcttactcacacccggctgctggcctttgcaactgccaataggtaaaccgtcggcaaagatttttactgcaaatacgcaggcagtgcagcgccatgtcgaggtctggcgtcaggtcagtatcggtcttgttgaatgggaatccgttagctaccgtgccagcctcacgcctgtttcaattcccgttcgatggtgtttgcgcaccccctctgagtggatcaatgcagcatcgaacctgcaagtcagtcaggaatttcaacaacttgagcaactggtagcgcaggttgataaatcctttcatgccttgctgattaaccagcgggcgctttggctgcataaagatccacatgaggtgattaccgcggctaatcttgcctgcaaattgacacccggctgtgctcaggggcgacctttacgcctgctgtccgagtctggagtagacacgaagttcttcgaaagaaactattcgttgctgacaaaactacttgatgagcgttttgagggggaggcctctgggcagggtctggcaacctttcttgatgccttcgaagaaagcagccactgggtattggtcactccgttggctcccggcatactccccttcaacatgagtaaggtcacaacaacagaactggcgagcgtagatttaccatgctcacgcattcttatcgtagaaaatgaacactgtattcaccagttaccgcaattgcctgacaccattgctattctgggctcaggtctggacttgcagtggctgatttctcctaatttaaagagcaagtcgataggttattggggggatatggatacttgggggctattgatgttggcgcgggcaagagcgttccagccagcgattaccgcacttttgatgggccgcttgttatttgaacactacgcatcaggctcagcggtcgcagagccggtcaacgctcaacaggcggttcccgaagggcttcatcaccacgaagcagacttttaccgatacttattgtcacaaccgcgggggcgtcttgagcaggagtatttaccacggggcgtggtcgaaatggcgcttactgaatgggtcggtcacatttctctttaa

SEQ ID NO: 44505 - DNA, 1422 bp, Thalassolituus oleivorans R6-15
atgaccggcaagtaccgggcacagattatggagtgcttacgcgagctgtatcagcgactgtatagctccagcagtgcggattatggccaagcaattcaacgtgatacggtggttgaggtatttcaagaggcgcttgtacgtgcccctgtattggcggatggcagcgaagaagctgacgatacgccagacggtcgctttcgtaacagccgcgagcaagccggttgggtactcaatcaacttttagaacatggttggttagaaaagcaggtggatgaagccacgttgcaaagtacctttgcgtttactcgctacgggcgcttattcacagagccattcatcaccgaaagtcgttcaatggcgcgcactcgccatcgtaatacgcgcaacacacgtaactcgctagaatctttcttagagcgcggcgatatctatgacctgttggacgcctatgaatactctgagcgtattattagtgatttcaccgatgtgattgccgaactggaagagcgtaagcgtgatcttgtgcgtgagatggaagatcagcttcttattcagcgtgccagtgaagccttcttcgattttatggagaatcgtttccagcctgatctgtctgtgcgtttgtcggcggacaacgtggagaagcatcgcgatactattcaaaagatcatcaatgctatccgcaaaaaagacgtcgcttttaaagcgaagaccgagcgtcgcctacgtgaactcctgccggaactcgggcaagaaggccagtccgtgttctggactttgctcgatggcatcgaaatgcgtttgcgtaatgccagtgacatcatgctgccagcactgcgtcgcgcactgcaaagctttaccaaacgtgcagacatcattattcgtcaaatgagttatctcgcgtcgcagtctaaaaacgacgtactgaccgtgtgtaagcacttagccagtaagaccgagaaagaacaaaatagcattctagagcgggccggtgagttaatggctgtgccacaggtgcgattggtggatcctggccaagttcgtatggcagcgccgcgtactcgtcgtcaaattgaagcgcatttagatgatgggcaaggtgattttgatatcgaagcgcgtcgtgacatctatgtgcagcaagtgttggatcaagctttccttgttaatcagcaggctttgaaaaactacatgcaacgccaattggcgacaggtaagccggtatctacccgtgatatgccgattgaatcggcgcaagatttcctcgccgtagcgcatgctattggcctaggtgcagccgacggcttgtcgtctgaattcaccttccttattgattatgatgaaaatccagcccgagaacagggcgatgtgtatttcaccaaaaaagatcattttacctttgaactggttcagaaagagtcttga

SEQ ID NO: 44506 - DNA, 918 bp, Thalassolituus oleivorans R6-15
atgttgcagtcgattgaaaaagaattagaaaaagaaggactgagccagcgcgattactccgagttattaattcgcttgctggattacggcgttatctgtcgtgatgaatctcagatcgaacaaacactttatgatcgctatgtgcgtttagaagaattagtgggtgagtatttatcgctgattggcgtgcgtattcaacatgaccgtcgttttcaatttgtgcggttatttccaccaggttcgcaagttccgggcatggacgaagatcaagagtttggtggccagcagtccttccgcacgcgcttgaatcaagccgaagtcgcgttaactttggtattgcgtgctcagtacgacaaagcgttgcgtgaaggtgcagttgacgatcaaggttgcgtgatgacctcgctagaagcgttaagcatcgccatgaaaaaccttttgaagcgcaatttgcccgataacctaacggatcgtaaacagctatttcgtcgcttaaaacaattacgtttagtgcaaattgctaacgaagaaaccttaggtgatggcgacatgtggttgcgcattcgccctatgattatgagttacgtcagtgatcaagtcttaaccgaactgatggatggtgaagatgactctgatgatgttgaaatcacagcactagacactgcacctgcgctagaaaaagaagctgaagtcgctgcagaattgactgactccgaagatgaagaggcggtcgaagacgttgttgtcgccgacgccgaatctgaagcagaaattacggcagaagcggctgattcagatcctgctgaagaagctgatttagttgaaaatacagaacaaacagcagccgtaaaagctgacgaagacacaaataacgagccgcagcgttcacatcaacctgccagcttgtttggggaataa

SEQ ID NO: 44507 - DNA, 3663 bp, Thalassolituus oleivorans R6-15
atgtttttaaagaaatttatatacgttaactggggcaatattccggccactgaatttgaatttggccccattaatttgctctctggtggtaacggttcaggtaaaacgaccgcagctgatgccattcaaaccatcatgacggcagcacacgataccttgttccattacaaccccggtcaggacgaagctacccaacgtggtcgcggtaaaaacgtgcgtaccttggcctcttatgttttaggttgtgacgatggcagttatgcgcgccccggcggtgctgttggctatttagccgcggtatttcatccaacggcgaacagtgcggatggcacaggtggcgaaagtggtgagccgtttaccgcgattatcggcgtgagtgcgtcgattgatcgcgccggtagccagcctgttgcacgtcaaaatgatttgcagttttttattattgccggcgagcagttaacgctaaacgacttcttgttagatcaagccgatggtcagcgtaatgtcgtcgagttgaataaactcggtaaaaatctagcgcgtcgtatcgaaccgcacaatatcgaaaaatacgatacgaaaaaacagtatttacgtcgtttatatggagctttgcgtggtcgcaatgatgcggtgccagaacgtgaagccatgaacgcagcgcgtactttctcacgctttatggcctataagccggttaaaagtattaacggctttgtggctaacgaaattctcgaagccaaagatatgggcgatgctattcgcagcgtatcggacttaatgaaaaccatctatgcgatggaatccgatgctaataccttggctgaaaccatcgcaatattgaacagcaccaaaggcgcgacgggccggtatattgatcaatggattgattacaacgtactggaatataccgctgcgcgcagccgttttttaaatgatcaacgtggttatttaggcgcgaaagaacagcaacaaaactttcgtgagcaattaaataaaacgcaaaaagagcgtgatgttgcccaagatcgtcgtaaacaattacgcgaacagctgatcaccatggaagcgcgtcgtcgtggtatcgatgccctgcaagataaagatgcggctgaaagcgctttagctgatggcaaaaagaaattgcaacagcaagccattcctttattggaacaagagcagctattgcaggccagtttacgcgcgaccgagttagtacacggtgctttgcaaaagacgtctgttgccgcagaaattccgtcgttaggttccaagcgaattcttgatcaagcgaaacaagtattagccattaaagatcaagatgcggtcgatttccgtaaactgcttggtaaagactgggtcgatttgtcgccgctagaagcgcatttagatgaagcgcgtgagcagcaatcattgatgaatcaatggcgtgaccgcttccataatgtggaattagaaagcagcggcatttcattgcgcgaccaaattgcgcgtaacgtcgaccgtcgcgaacaaaaattccaacaagtacaagcgcgcatgaatcaaaaacaaggcgacattgatagccttgaagcgcgtcagttaaattaccccggtttcgtgcgccaagcacttgaagccattctgcgcgagtgcccacaagctgatccgcgcgtacttgccgactacgttgaagtgaccgatcctgcatggcagagcgccattgaaggttatatcggtggtgcgcgttttagtattatcgttgaagcagcattcgaagccgaagcggcgcatattctgcgttcgatccccggtggtagccgtgctcgcgttattcaagggcaaaaagcgaagaaagattgcgaacgtttaaagctgccgtcgaattcgattttaaatgtgatgtcgttcgaacatgcgaccgcacgttattaccttgaagccagctacggcacggtagaacaagtcgaagacctacacactctgcgtttaactcgtcgtggtgttactaaggaaggtttgggttcgggtgcgtattcgatttatcgttgcgacttagatgataccgaactggtgtttggtttgggcgcacgcgaacgtgcgctatcggccaagcgtggtgaattagaaaccttggctgaacaagcgaacgaagcaaatcatcagttccgccaagcacagcaattactggatgccgttaatttactgcgtcacgtaacattcgcagaccaaatgcaaggcatgttagatactcagtatcaaatggatcaagctgaaaaagctttgaaccaagttgacgtatccgactttagcaatatggaagacgaatttactggcttaaaagaaaaagccgatgaactcgatgccgtgattaaagagctggatggtgagctaggtcgtttacagcaaatgttaaacgacagcgaaaaattctgtaaaaacctcagcgatatgcaggaaaaaacctctgaaatcgccgataaaaaagaagaaaacctacgcgctatcgtgagtgtgtggccagactttgattcagaagcgcgtctcgccgccgccgatgcggaagccaacgacagcccagccgaagccatcgaaaatatgcgcaaaagcgtatcccaagagcttaatgccacggcttacgaaattgaacgcaatattaacgaacacaatctgcgttgccaaaccgccgatgcgattgtttatgcaccggattatcgcgaagagcacagcgcccatttctttaaaggcgtgtgtggtttgcagcgtgaaatcgaacgcgttcacaatcgcttaaagaacaatattttggttgaaaagcaagacaagctggcgcaattacgcgaaagcttcaataacgtctttatcaccaacttgtgtcactcgatttaccaagcgattaatgatggtaagcgtattctggaagacctaaacaaagaattggctcatcatcagtttggtgccgaccgtgaaacctattggtttgattgggaatgggtgcctgaatataaggaatattggcagttttttgatgaggtaattaaaaacccatcgttaggtgatggtgctaccttatttactgcggatatttctgcagcatcgaaaaaagtccgcgatcatctgatggcaatgctgttggatgacgatgagcaaaaagcgatgcgtgaattagagcgtatctctgattaccgtaattatcgtgcttacgaaatttacaagcagcctgcgaataaagagccgattgcacttagccaatacggcacagggtcgggcggccagttagaaacaccggcgtatattattcgttcagcggcgattacctctgccttccgctttaacgaaggtgatacccacttgcgtgtggtgctggttgacgaagccttctcgaaaatggatgaaactcgttcgaaagaagtgattaactacttaaccgaaagcttaggcttgcagttgttgtttattatgccgaccagtaaatcagggccatttatggacttggtttctaaccaatttgtatttagcaaagtgccgttagtgggtggccaaagcaagggtgaattgcaaacccgcgttctggtggatcgccaagagtgtaaccaagacaaagtgaaagaattgtgggcgaatcatcgccgcaccattcgccaccaggctgcgctcgactttatggaagagtttgcttaa

SEQ ID NO: 44508 - DNA, 1008 bp, Burkholderia pseudomallei MSHR520; identical to SEQ ID NO: 44025

SEQ ID NO: 44509 - DNA, 672 bp, Burkholderia pseudomallei MSHR520; identical to SEQ ID NO: 42091

SEQ ID NO: 44510 - DNA, 3633 bp, Burkholderia pseudomallei MSHR520; identical to SEQ ID NO: 42299

SEQ ID NO: 44511 - DNA, 1134 bp, Burkholderia pseudomallei MSHR520; identical to SEQ ID NO: 44028

SEQ ID NO: 44512 - DNA, 1461 bp, Candidatus Accumulibacter sp. SK-01
gtgaaagcagacaaagccatcgcgacctaccggcgcatgcgggcgcagccgctgtggcgtctgcttgcctcgacgaccgggcctaccgtcattggcctgcttcaatctcatctgtatgagagcgagcgaagcctccctgcctccatttttcacgaacgcatcgcaagggatctggaagaactgcgcgcccaaggcgaagactttccccaaacggcacaggcgtatgtcgctagctggctcgccgaagggtttctggagcgacgcttcccggctggggcttcagaagaagaatatgaactctccacggcggctgtcgaagccattcggttcgtatctggactggcacagccgcactccgccgcgaccgaaagccgcctgacgctcgtcattgaggcattggcccgacttgccgaggacaccgacactgacaaattccgccgcatcgaccggctcatggccgagcaagtccgcatcgataaggagattgatgccatccagaaggggcagatgcgcgtgctgccccaaacaacggcgctcgagcgcacgcgggagatcatcacgctggccgacgatctggccggtgatttccgccgtgtccgcgatcagttcgaccagctcaatcgagatctccgtgaacgcatcatggacaacgatggcaatcgtggagatgtcctggattcgctgttcgccggaatcgacctgatttcagagagcgacgcaggaaggactttctccgctttctggcgtttgctcacggacccagaacaggcggccacgcttgatcaggcgcttgatagcgtcatgtcgcgggagttcgtggggcaactcgaagccaaggagcgacggttccttctgcggctaacgcgcacccttcttgagcagggcggcatggttcacgaggtgctccagacatttgcgcgcagcctgaagcacttcgtccagagtcgtgaatacctcgagcagcgccgactcaatcacctgctgaaagacgcccagcgcgcagcactggccctgaagaacgaggtcagggccacagaaaccctccaatacacgcttgagctcacgagtagtcgtttgcgctccttgtcccaatgggtgctgcacgacccatccctacaagcattgcccgggcagatggcagaaggggatgcgccgccaatcgacctggagtctgtgagcgaactggtcgcacagtccgagatcgacttccgaacactgaaggccaacgtgctggctgtcctggagcaacgctcccaggcatccattgccgacgtgctggagcagttccccgctgcacaggggctgggcagcgtcgtcggcctgcttgcgttgggcagtcggcatgggttcaaagccgaccacagtgaaaccgtaggctgggttggaggcgacgagaagcgtcgttgcgcccgaattccaaagatcttctttttgagggagcgggccaatgaactggtctga

SEQ ID NO: 44513 - DNA, 708 bp, Candidatus Accumulibacter sp. SK-01
atgaactggtctgagaacgacgaatcggcaataccagccgaagcacaagcgccagatgctgctcaggcaccggcgaacacccttttcatgggcgacagcggcgagttggcactggatacccggcgcgcactagtacaactgctggcagggccatcgctcgacggacgtcggcatccaaaactgtggccgatcttggcgcgagacgaagcagtgatccgtcggcgtcttgccgaactgtttctcgaactggtcatcgatcgggatgtacaagtggccttcacgcgccaggcagataccggcgacctcgaagtgcccctcctgctgcgtcgcgcccaactgacgttcattgactccattctgctgctccaccttcgccaacgattgacacaagcggactcgcagggcgaccgtgccgtggtgtctacagacgagatcacagagtttctctccctctatgagcgcgccgccaacaccgaccgtgcaggattcgtgaaacgggttcatgcctccatcgagaagatcaagaagcacagcatcctgcagaaaattcgctcgagcgaggatcgcttcgagatttcgccgacgctgaagctcctcttctcggcagaggaaatacaagcgctgactcacctgtatcagcgcatggcggccggagagacgccagcgcaactggttcagactgatgccgatgaggatgccgaccaatga

SEQ ID NO: 44514 - DNA, 3375 bp, Candidatus Accumulibacter sp. SK-01
atgatctcggaacccaaaaccgcctctttgtttgcccgcgagcagttccggatgacccgcctgcaggtttacaactggggcactttctccggcctgcacgacgtaccgatcagcgagcgaggctttctgtttgtcggacgatccggcgctggaaagtcgacgcttctcgatgcattttcggcgttgctgacgccacctcgctggatcgatttcaacgctgctgcgcgcgaggcagaccgcagcggtcgtgaccggaacctcgtgacctacatacggggcgcctgggccgaacaaaaggatggggagtcgggagagatcgctacacgctacctgcgctccgggacaacgtggtcagccttggcactgagctaccagaacgccttgggccagtctgtggtgttggttcaggtgttctggctgcggggcaatgcgaacggcagcaccgacgtcaaacgccactaccttgtcatggagcgggcctttgacctgcgcgagctggaggacttcggccaatccaacttcgacatccgaaagctcaagcagtccttcccggaggcattcgcccgcgacgaatttcgcccctattgcgaacggttctgtcgtctgcttggcatcgagagcgaaatggcgctgcgtttgttgcacaaaacccagtcggccaagaacctcggcgacctcaataccttcctgcgcgacttcatgctcgacaagcccgagaccttcgaggtggcggatcgcttggtcagcgaattcggcgaacttaatgctgcccaccagtcggtcgtcacggcccgtgagcaggttcaaacgctcgcgccagcgcgggaccagcatctgcgcagggactcgttgatgctgcaacgcaatgggctggacgagcttcggcttggcgttgatggctatcgggaaacccgtcgcattgagctcctcaaggagcacgtggcatccctagaggtgcaagccaacggctcagagggtgaagtggggcggcgtcaaagcaccctggataaccacgccgcaatcttgcgcgatctggagcgacagcaccgtgaggcaggtggtgatcagatcgaacaatgggaggccgagaaatcggggctggagggccagcgcacagatcgtctgcgcaaacgcggtcaggccgaagaggcatccaagaagctggggtggagcctcccggattcgcctcaagccttcgcggaactgttgggcaacgcgcggcaggaagtcgaaaactgggagcagcgcagcaacgcgaaccgcgaagaacagttccgcctggccggtgaaaaaagggacgctgaggcagcattttcgcaagcactgaaagaggtgcaggcactccagcgccagccatcgaacattccagccgacatgctggaaatgcgccgaaacattgccgctgccgtcgggatctcggagtccgcgctgccattcgttggcgaactcatcgaggtgaagcccgacgaggccgaatggcagggggccatagagcgcgtactgcacggatttgcgctctcactcctggtagacgaacgccagtattcggcattggccaatcacatcaacaccacccaccttgggcagcgcttggtctattaccggactggccgcccggagacgtggcaggccaagcctatcggtgctaactcgctcgtccttaagctgaaagtcaaagatgggacctacgctgattggctccaggccgagctacggcaacggttcgattacgcgtgcgtcgactctattcagtccttcaggagcgcagatcgcgccatcacccgcgagggccaggtcaagcacagcaaaacccggcacgagaaagacgaccgtagaagtgtcggtgaccgacgaaactgggtgctcggattcgataaccgcgagaagctcgggctctttcaggctcaggcgcaggagcaggctgacgcgattgcgcgcctcggcggggagatcgacaaactctccgaccaagacaaaaatcgtgcgacccgagcgatgcagtgccagactctggtgaatctccagtggcaggaaatagatgtgttcccattgctggatcgcatctccaccattgagcggcaaatccgcgaagcgcgcgaggggaacgccaccctgctgcaaatcagcgagcagatcgagaagcaaaagaagttcgtcgaggatgctgataaggagcttcgccaggcaacgcgtgcgcacgactcgattgttgaccagatcaagaccagcacccagaaactggaatcgctcctgcaggacgcgtctatcgttccattgacaccccatcaggtttcgggtctcgacgagcgcttcgccaagcagtcagatgcagtgcggctcgacaacctcgacaaggtgacaacttctgtagaacgcacactcaatgcggaaatcgaagaggtcaatcgtgggattggcgtctgtgagaaggaaatagaagcacgctttgccgatttcaaacggcaatggccgatggacgcgggtgacatggacacgagtcttgccagcgcgccagacttcttcgccaaactggttcgactggagacggatggtctgcccgcctatgagcagcgattctttgaattgctgcagaaccaaagtcaccagaatctggcggcgctttccacctacctgaacgatgcgcgtaaggcgattctggaacggatggatctggtcaacgacagtcttggccaggtgcccttcaaccagagcgccaatcaacgcacctatcttcacatcgacgccagtgaccggcagcttgtcgacgtcaaggagttcaagcaggagatccagcagacgctgagccatgcatggacagaggatcgcgagtttgccgaggcacggttcctggccctgcgccgacttgttgatcgactcgccagtcaggaccccgagcaaaagcgctggcgtgagactgtgctcgatgttcgacagcatgttgagttcatcggacgggaaatcgatgaaagcggcgtcgaggtcgagatctaccgcagcggagcaggcaagtccggcggccaacggcagaagctggccaccacgtgcttggccgcagccctgcgataccaactgggcgggaacgaccacggcgtgccgatgtatgcgcccgtcgtgctggatgaagccttcgacaaagcggataacgagttcaccgctttggcgatgaacatctttacaaatttcggattccagatggtggtcgctacgccgctgaagtccgtcatgaccctcgaaccattcatcggtggcgcctgcttcgtggatatcagcgatcggcgcgtgtcaggcgtcctgctgatcgagtacgacggcgatcgtcagcggttgaagctgccagagcacgcacgagaggaggctagcgttgaagcttcctga

SEQ ID NO: 44515 - DNA, 1164 bp, Candidatus Accumulibacter sp. SK-01
ttgaagcttcctgaagatgttcggcagtttcttgcccgtcgctttcaaagcaagcaccgcgagtggttgatcggtgatccgggcgagggccaatggccgctggaggttacgctcggtgtgccgacggagcaggctgcactgaggcaagtcgacggcgttcgcgcttgggtgagcgcatggcaaagctggcaaggagtcggcaccctgtcctggtgtgagcgtcggtggaaagcgcttggcgtccagcggctgccagagaaactggtgttacgaggccctgaagatgttgccttgtggattggtgcatccgcacggtgggttcgtgccctgtctcggtatcagacgctcactgctcgctggccgctgcttgcgcagcagttgccgagatattttgatgtcctcgctgactacagcgattccgatttccgtcgactggcagagatgctggattggatcaatcgcaatccgaaatcgaatctctacccacgacaaattccggttgccggtgccgacagcaaatggctggattctagaacgggcatcatctctgacttgattgcaacgctccagggtgacccaacaggagcgcgcgacttcttctggcgctgcggcttgagggcacagccccagttaatgcgcatgcgcgttctagacccggatctaagagccagtttgggcggtcttggcgatatctcggctccttgtgaggaggtcgcgagcatttgtatacgaccaaacaatgtcttcgttgttgagaaccttcaaactggccttgcctttgatgatctgccaggggcggttgtgatcatgcgactgggttacgcggttgacgttttgggacagctttcatggctacaacaggcgcaatgtatctactggggtgacattgatacgcatggctttgccattcttaatcgagccagaacatacatcccaagcctgaagactgtgcttatggatgagtcaacgctgatgagtcatcgcgatttatgggtcgaagagaaagaccagcactcttccacagaacttccactactcaccaataccgaacaaaagctctaccagtcgattaaaggaaatgcctgggaccaacaagtccgcctcgaacaggagcggatacgctgggatgtggcgtggaatgccatacaggcaagtattcgatga

SEQ ID NO: 44516 - DNA, 1458 bp, Candidatus Accumulibacter sp. SK-01
gtgagcgctttggacttcgctaccctcgacgccctgcgcacgcaccaccctgcgtggcggctgctgcgttcggatcatgcgccgctggtggcgagctttctgcaacgagtgttcgtggcccccaatgtgcgcgtgatggcggcggcggacctggccgaggcgctggaagatgagctgtatgcgctgcgcctgcagctgggtgaaaccgccttgccaaagccggcactggactacctgaacgactgggccgcacccgacaagggctggctgcgcaagttctacaagcctggcacggacgaggcgcaatttgacctgacgcccgcgaccgaaaaggccattgcctggctggcacaactctccgagcggcagttcattggcaccgagtcgcgcttgctgacgctgtttgatctgctcaagcagatgagcgagggcagcgaggccgacccagccaggcgcatggccgaattgcgcaagaagcgcgatgacatcgacgccgagatggcgcgggtgctgtcgggcgatgtgccgctgctggacgatacggcactgaaggatcgctttcagcaattcatgcagggcgcgcgcgaattgctgacggattttcgcgaggtggagcacaacttccgccagctcgaccggcgcgtgcgcgaacgcattgccctgtgggaaggcagcaagggcgcgctgctggaagagatcatgggcgagcgcgaggcgattgccgattccgatcagggcaagagtttccgggcgttctgggactttctgctgtccagccgtcggcaggaggaattgaccgaactgctggattgcgtgctgcagcttcccgccgtgacggatctgaaacccgacagcagaatgcgccgcgtccattatgactggatggaagccggcgagcatacccagcgcacggtggctgccttgtcgcagcagttgcggcgctttctcgatgatcgggcctggctggagaaccgccggatcatggacatcctgcacggtatcgagagcaaggcgctggccctgcgcgggtcaccaccggcaggcacggtgatggagatggccgaggcgcgagccgacatcgagctggcgatggagcgccccctgttcacgccggcaaccaagccggtcattgccgacctggccttgcaggcaggcgatcaggacatcgatccctcggcgctgttcgatcaggtggtcgtggacaaagcacgcctgatacgccacatccgccacgccttgcaggaccgggcgcagatcacgctgagcgagctggtgcttacccaacccttgcaacaggggctggccgaattggtggcctacctgcaactgggcagcgggacattcagtacggtggtcgacgaggacacgccagaacccatccgctggcagtcgcgggcaatcgatggtcaggaaatcacccgcagcgcgcgcctgccacgcgtgcttttcatgcgctga

SEQ ID NO: 44517 - DNA, 678 bp, Candidatus Accumulibacter sp. SK-01
atggaagagccgcactcaagaaccgacgaagcacgtgccgtagcgcccgcgcccgttgcggatttgtcgatgttgctcatcagcctgctcaaaagcgtgctgtaccgtgatggcgacgagcgtcaatgggcggcactattgaatctgcaggtccaggtgcgtgactacgcggcggtactgaaccttgatctggtgctggacgaggcagaaggctatgcctttttcagaagccggccggaacctgccgatgacgaccccgcaccccgcttgccgcgtctggtggcgcgccggcccctgtcctttccggtgagtctgttacttgcgttgttgcgcaagaaactggccgaattcgatgccgggggcggtgatacgcgcctggtactcggtcgtgacgacatcgtggaactggtgcgggtgttcctgcccgatggtccgaatgaagccaggctggtcgaccagatcgagaccacgatcaacaaggtggtcgaacttgggtttctgcacaagctcaagcctgccagcggtgcttcggctggcgcgacgagctacgaggtgcggcgcatcctgaaggccttcgtcgatgcccaatggctggccgaattcgacgcgcgcctagccagttaccagtcacaactggcgggcgtgacccctgccggggagggggccgaccatgaatga

SEQ ID NO: 44518 - DNA, 3369 bp, Candidatus Accumulibacter sp. SK-01
atgaatgagccgccatcgctgggtctggactttgtggcagatgacaccctgtcgggctttcgcctgacccgtctggaggtgttcaactggggcacctttgacagccgggtatggacgctgcaactggatggcaagaatggcctgctcacgggcgatatcggctcgggcaaatcgacgctggtggatgccatcaccaccttgctggtgccagcaaaccggatcgcctacaacaaggcggcgggcgcggacagcaaggaacgaaccttgcgttcctacgtgctcggtcactacaaatccgagcgcaacgaagtcacaggcgcggccaggccggtatcgctgcgcgaccagaacagctactcggtgatcctgggcgtgttccacaacgcaggctatgaccagacggtgacgctggcgcaggtgttctggatgaaggacgcgcaggggcaaccggcccgcttctttctgggtgccgaacgcgggctgtcgattgcctccgattttgcccacttcggctcggacattgcccagttgcgcaaaagactgcgtcggctgggtgccgagctgagcgacagctttccaccctatgcggcctggtttcgccgccgtttcggtatcgacaacgagcaggcgctggagctgtttcaccagacggtctcgatgaagtcggtgggcaacctgaccgatttcgtgcgcaaccatatgttggaacccttcgaggtggccccgcgcattcaggccttgatcggtcacttcgacgatctcaaccgtgcccatcaggcggtgctgaaaacccggcagcaggttgaacggctcactcccctggttgccgactgtggccgccacagtacgctggtgaccgaaatcgaagccctgcgcgggtgccgggaaagccttcgctcccatttcgccggcctgaagctgggtctgatcgacaagcggctgggcttgctggccgaagaatgggatcgtgtggatggtcagcgacgacggctcgagctcatccatgaggagcaaggccgccaggtcgatgagctgaagcaggcgatcaacgacaacggcggtgaccgactggaacgtctcgccgccgagattcgcaagagagaactgctgcgggatgcgcgcaaagccaaggccgggcgctaccaggagttggccagcgtgttgggcgagccggtggcggtggatgcctcgaccttcgccgcgcagcggggcaagtaccaaagctggcgagaggaagcacgcaatcgtgatgccgatctgcagaacgccctcaccgaacacggcgtgaccttgcgtcagggcaagcaggaacacgatcggcaaagcaccgaaatcgaaagcctcaagcgccgccgcagcaacattgatgatccgcagatccagatccgcgccgcgctctgtgcggcattgggcatcgatgtcgatgagatgccctttgccggcgaactgatccaggtgcgcgtcgaagagcgcgattgggagggcgcagccgaacgtctgctgcggggattcggcctggcgctattggtgcccgatgcccattacaaggccgtcgccgaatgggtggatgctgcccatctgcgcggccgcctggtgtacttccatgtgcggccgcgcaaggccggcgaattgcccgatctgcaccgggattcgctgctccgcaagctggccatcaagcctgattccccgcattacgactggctggaacgcgagcttgcccatcgtttcgacgtggtctgctgcgccacgcaagaacagttccgccgggagacgcgggccatcacccgcgccggccagatcaaggatccgagcggccgacacgaaaaggacgaccgccaccgcatcgatgaccggagccgttatgtcctgggctggagcaacagcgccaagatcgccgcactggaaagcaggcgccgtcagcttgaaacgcagctcggcgacgtcggcagccggatcggtgaaattcagaaggaacgcaacggactgacgagccgtctcgatgcgctgattcgccttgaagagttcaccgcgttcgaggagctggactgggccagcgtggccaccgagatcgctcaactgacggatgagcggagccggctggaatcggcgtccgatgtcctcaagcagctcaacgaaaacctgcgcgagctgcagagggcgcaaaaggaaaccggcacggagttgcaaggttcgcgcgagaagcgggccaagctggaacagcgccgctcggatactcaggaacttcgacaacagaccgagctgctgcttgccggcgcggtcgtggatgaagcgctggcggcgacgctggaagtcatgcgcgcagaggccctgggcgagcatcaactgaccgtggagtcctgcgacaaccgcgaacaggacgtgcgcggctggttgcaaacccggatcgacaacgaaaccaagatcgcaaatcggctggccgagagaatcatcaaggccatggcttccttcaaggatgcgttcaagcttgaaaccgccgagatggatgccagcctggacgcggccttcgagtacgagaacctgctgacgcaactgaaccgggacgacctgccgcgctttgtggcgcgtttcaaggaactgctcaacgtcaacacgatcaacgagatcgccaacttcaacgcccaactggcgcgcgagcgcggaaccatcaaggaacgcatcgcgcacatcaacaagtcgttgggcgagatcgactacaacccggggcgctacatcgtgctggagtcgcagcccagtccggacgcggagatccgggactttcagcaggagctgcgcgcgtgcaccgagggggccgtgacggggtcggatgatgcccagtactccgaagccaagttcctgcaggtgaaagccatcattgaccgcttccgcgggcgcgagggcctgtcagaacaggatcgccgctggaccgcgaaagtgagcgacgtgcgcaactggttcctgtttgctgccagcgagcgctggcgtgaggacgacagcgaacacgagcactactccgactctggcggcaagtcgggagggcagaaagagaagctggcgtacaccatcctggccgccagtctggcgtatcagttcggactggaatggggtgcggtgcgctcgcgatctttccgtttcgtggtgatcgacgaggcctttggccgtggttctgatgaatccacgcaatacggcctgaaactgttccggcagctcaatctgcaactgctcatcgtgacgccgctgcagaagattcacatcatcgaaccgtacgtatccagcgtcgggtttgtgcacaacgagggcgggcgagcctccaagctccgcaatctgtcgattgaggaataccgggtgcagaaggcggtgttggcgcagtga

SEQ ID NO: 44519 - DNA, 1200 bp, Candidatus Accumulibacter sp. SK-01
gtgacgtggaccggcgcaaaggaattgaaggcgcaactggcgcgactgtgggagcgtggtgaactcctgcgcgacgcggtgacgggcaatgctcgctttcctttgcgcctggcgctcaagtccccgagttcggctgacatcacagatcgctttgaggccgttcgcgcttgggccgctgaattggcagccacggattccgtgtgtctcgaatggcaggaggttcgtcaccgcgtccagggggtgcaaaaactgcctgcgaccgcctggatcgaaaccctggaggaggcgttgacctggctgggcaagcgtcgagagtgggctcgcttttcggcacaggtctcggcaacccggcaaacacaccccgccttgctgccctggctggaaaagcgccccctgcaggcgctggcactgtccgccgaatggccccgattgctggcagtcgtggcctggctcgtcgagcatcctcgccccggcatttatttgcggcaggtggacctgccgggcgtgcacagcaaattcatcgaagcgcatcgcagtgtgctggccgagttgctcgatttggcactgcccggagacgctgtggacctcggcaagacgggtgtcggccagtttgctgcccgttacgggtttctcgaaaagccggcgcggattcgctttcgggtgcttgatccggcgaatcatgcagtacccggctcggtatgccccgacgtgaccctggatgccgacaacttcagtcgtatggaattcgctgtgcggcgcatgttcatcaccgaaaatgaaatcaattttctggccttcccgcgggttcgtgatgccatggttatttttggtgcgggttacggttgggatgcgctggcccgcagtcattggttgcagaactgctcaatccattattggggcgacatcgatacccatggctttggcatcctggatcagctgcgtggctactttggtcacgtcgagtcgttcctgatggacagggagaccctggatgcgcatgccccggtctggggctgcgaggagcagccgctgttggtggacctgcacagactgacgcctgaagaaagtgccctctacgacgaactgcgtgacaaccgcatccgtgcgaggctgcggctggagcaggaacacattggctttcattggctgggcgatcgccttgaacagcttctgcacgggcgccgcggtgccaattcatga

SEQ ID NO: 44520 - DNA, 1449 bp, Candidatus Accumulibacter sp. SK-02
ttggactttgctaccctcgacgccctgcgcacgcaccacccggcgtggcggctgctgcgttcggatcatgcgccgctggtggcgagcttcctgcaacgcgtgttcgtggcccccaatgtgcgcgtgatggcggcggcggatctggccgaggcgctggaagatgagctgtatgcgctgcgcctgcacttgggtgaaaccgcctttccaaagccggcaccggactatctgaacgactgggccgcacccgacaagggctggctgcgcaagttctacaagcctggcacggacgaggcgcaatttgacctgacgcccgcgaccgaaaaggccattgcctggctggcacaactctccgagcggcagttcattggcaccgagtcgcgcttgctgacgctgtttgatctgctcaagcagatgagcgagggcagcgaggccgacccggccagacgcgtcgccgagttgcacaggaagcgcgatgacatcgacgccgagatggcgcgggtgctgtcgggcgatgtgccgctgctggacgacacggcgctgaaggatcgctttcagcaattcatgcagggcgcgcgcgaattgctgacggattttcgcgaggtggagcacaacttccgccagctcgaccggcgcgtgcgggaacgcattgccctgtgggaaggcagcaagggtgcgctgctcgaagagatcatgggcgagcgcgaggcgattgccgattccgatcagggcaagagtttccgggcgttctgggactttctgctgtccagccgccggcaggaggaattgaccgaactgctggatcgcgtgcttcagcttcccgccgtgacggatctgaaacccgacagcagaatgcgccgcgtccattatgactggatggaagcgggcgagcatacccagcgcacggtggccgccttgtcgcagcagttgcggcgctttctcgatgatcgggcctggctggagaaccgccggatcatggacatcctgcacggtatcgagagcaaggcgctggccctgcgcgggtcaccaccggccggcacggtgatggagatggccgaggcgcgagccgacatcgagctggcgatggagcgccccctgttcacgccggcaacgaagccggtcattgccgacctggccttgcaggcgggcgatcaggacatcgatccctcggtactgttcgatcaggtggtcgtggacaaagcgcgcctgacacgccacatccgccacgccttgcaggaccgggcgcagatcacgctgagcgagctggtgcttacccaacccttgcaacaggggctggccgaattggtggcctacctgcaactgggcagcgggacattcagtacggtggtcgatgaggacacgccagaacccatccgctggcagtcgtgggcaaccgatggtcaggaaatcacccgcatcgcgcgcctgccacgcgtgcttttcatgcgctga

SEQ ID NO: 44521 - DNA, 678 bp, Candidatus Accumulibacter sp. SK-02
atggaagaacaacattcaggaagcgacgaagcacgcgccgcggcgcccgcgcccgttgcggatttgtcggtgttgctgatcagcctgctcaaaagcgtgctgtatcgtgatggcgatgagcgtcaatgggcggcactattgaatctgcaggtccaggtgcgtgactatgcggcggtactgaaccttgatctggtgctggacgaggcagaaggccatgcctttctcagaagccggccggagcctgccgatgacgactccgcaccccgcttgccgcgtctggtggcgcgccggcccctgtcctttccggtgagtctgttacttgcgttgttgcgcaagaaactggccgaattcgacgcagggggcggtgatacacgcctggtactcagtcgtgacgacatcgtggaactggtgcgggtgttcctgcccgatggtccgaatgaagccaggctgatcgaccagatcgagaccacgatcaacaaggtggtcgagcttgggttcctgcacaagctcaaggctgccagtggtgcttcggctggcgcgacgagctacgaggtgcggcgcatcctgaaggccttcgtcgatgctcaatggctggccgaattcgatgcgcgtctggccagttaccagtcacaactggcgggcgtgaccccggccagggaggagaccggccatgaatga

SEQ ID NO: 44522 - DNA, 3393 bp, Candidatus Accumulibacter sp. SK-02
atgaatgagccgccatcgctgggcctggacttcgtggcagatgacacgctgtcgggctttcgtctgacccgtctggaggtgttcaactggggcaccttcgacagacgggtgtggacgctgcaactggatggcaagaatggcctgctcaccggggatatcggctcgggcaaatcgacgctggtggatgccatcaccaccttgctggtgccagcaaaccggatcacctacaacaaggcggcgggcgcggacagcaaggaacgaaccttgcgctcctatgtgctcggtcactacaaatccgagcgcaacgaagtcacaggcgcggccaggccggtatcgctgcgcgaccagaatagttactcggtcatcctgggcgtgttccacaacgccggctatgaccagacggtgacgctggcgcaggtgttctggatgaaggacgcgcaggggcaaccggcgcgcttctttctgggtgccgaacgcgggctgtcgattgccgccgatttttctcatttcggctcggaccttgcccagttgcgcaaaagactgcgtaggctgggtgccgagctgagcgacagctttccaccctatgcggcctggtttcgccgccgtttcggtatcgacaacgagcaggcgctggagctgtttcaccagacggtctcgatgaagtcggtgggcaacctgaccgatttcgttcgcaaccatatgttggaacccttcgaggtggccccgcgcattcaggccttgatcgggcacttcgacgatctcaaccgcgcccatcaggcggtgctgaaaacccggcagcaggtcgaacggctcacccccctggttgccgactgtggccgccacagtacgctggtggccgaagtcgaagccctgcgcgggtgccgggaaagccttcgctcccattttgccggcctgaagctgggcctgatcgacaagcggctgggtctgctggccgaagaatgggatcgtgtggatggtcagcgacgacggctcgagctcatccatgaggagcaaggccgccaggtcgatgagctgaagcaggcgatcaacgacaacggcggtgaccgactggaacgtcttgccgccgagattcgcaagagagaactgctgcgggatgggcgcaaggccaaggccgagcgctaccaggagttggccagcgtgttgggcgagcccgtggcggtggatatctccaccttcgccgcgcagcggggcaagtatcaaagctggcgggaggaagcgcgcaatcgtgaggccgatctacagaacgccctcaccgaacacggcgtgaccttgcgtcagggcaagcaggaacacgatcggcaaagcaccgaaatcgaaagcctcaagcgccgccgcagcaacattgatgatccgcagatccagatccgcgccgcgctctgtgcggcgttggacatcgatgtcgatgagatgccctttgccggcgagctgatccaggtgcgcgtcgaagagcgcgattgggagggcgcggccgaacgtctgctgcggggatttggcctggcgctattggtgcccgatgcccattacaaggtcgtggccgaatgggtggatgctgcccatctgcgcggccgcctggtgtatttccatgtgcggccgcgcaaggctggcgaattgcccgatctgcaccgggattcgctgctccgcaagctggccatcaagcctgattccccgcattacgactggctggaacgtgagcttgcccatcgtttcgatgtggtctgctgcgccacgcaagaacagttccgtcgggaggcgcgggccatcacccgcgcgggccagatcaaggacccgagcggccgacacgaaaaggacgaccgccaccgcatcgatgaccggagccgttatgtcctgggctggagcaacagcgccaagatcgccgcactggaaagcaggcgccgtcagcttgaaacgcagctgggcgacgtcggcagccggatcggtgaaattcagaaggaacgcaacggactgaccagccgcctcgacgcgttgattcgccttgaagaattcactgcattcgaggaactggactgggccagcgtggccagcgagattgctcaactgacggacgaacggagccggctggagtcggcatcagatgtcctcaagcagctcaacgaaaacctgcgcgagttgcagagggcgcaaaaggacactggcacggagctgcaaggttcgcgcgagaagcgggccaagctggaacagcgccgctcggatgcccaggaacttcgacaacagaccgagcggctgcttgccggcgcggtcgtggatgaagcgctggcagcgaccctcgaagtcatgcgcgcagaggccctgggcgagcatcaactgaccgtggaatcctgcgacaaccgcgagcaggacgtgcgcggctggttgcaaacccggatcgacaacgaaaccaggagcatgaatcggctggccgagagaatcatcaaggccatggcgtccttcaaggaggcgttcaagcttgaaaccgccgagatcgatgccagcctggaagcggcctttgagtacgagaatctgctgacgcaactgaaccgggacgacctgccgcgctttgtggcgcgtttcaaggaactgctcaacgtcaacacgatcaacgagatcgccaacttcaacgcccaactggcgcgcgagcgtgaaaccatcaaggaacgcatcgcgcacatcaacaggtcgttgggcgagatcgactataatccggggcgctacatcgtgctcgagtcgcagcccagtccggacgcggagatccgtgactttcagcaggagttgcgcgcatgcaccgagggggccgtgacggggtcggaggatgcccagtactccgaggccaagtttctgcaggtgaaagcgatcattgaccgcttccgcgggcgcgagggcctgtcagaacaggatcgccgctggaccgccaaagtgagcgacgtgcgcaactggtttctgtttgccgccagcgagcgttggcgcgaggacggcagcgagcacgagcactactcggattctggcggcaagtcgggagggcagaaagagaagctggcgtacaccatcctggctgccagtctggcgtaccagttcggactggaatggggcgcggtgcgctcgcggtctttccgtttcgtggtgatcgacgaggcttttggtcgtggttcggatgaatccacgcaatacggcctgaaactgttccggcagctcaatctgcaactgctcatcgtgacgccgctgcagaagattcacatcatcgaaccgtacgtatccagcgtcgggtttgtgcacaacgagggcgggcgagcctccaggctccgtaatctgtcgattgaagaatatcgggtgcagaaggcgatgatggctttgcaaaccacccaggtgttggcgcagtga

SEQ ID NO: 44523 - DNA, 1206 bp, Candidatus Accumulibacter sp. SK-02
gtgacgtggactggcgcgaaggaattgaaggcacaactggcgcgactgtgggagcgcggtgaactcctgcgcgacgcggtgacgggcaatgctcgctttcctttgcgcctgacgctcaagtccccgagttcggccgacatcacggatcgctttgaggccgttcgcgcctgggctgctgaattggcggccacggattccgtgtctctcgaatggcaggaggttcgtcaccgcgttcagggggtgcaaaaactgcctgcgaccgcctgcatccaaaccctggaggaggtgttgacctggctgggcaagcgccgcgagtgggctcgcttttcggcacaggtctcggcaacccggcaaacacaccccgccttgctgccctggctggaaaagcgccccctgcaggcactggcactgtccgccgaatggccccgattgctggcagtcgtggcctggctcgtcgagcatcctcgccccggcatttatttgcggcaggtggacctgccgggcgtgcacagcaaattcatcgaagcacatcgcggcgtgctcgccgagttgctcgatttggcgctgcccgtggacgctgtagacctcggcaagacgggcgtcggccagtttgccgcccgttacgggtttctggaaaagccggcgcgcattcgctttcgcgtgcttgatccggcgaatcatgcagtccctggctcggtatgccccgacgtgaccctggatgccgaaaacttcagccgtatggaattcgctgcgcggcgcatgttcatcaccgagaatgaaaccaacttcctggcattcccgcaggtgcgtgatgccatggttatttttggcgcgggttacggttgggatgcgctggcccgcagtcattggttgcagaactgctcgatccattactggggcgacatcgatacccatggttttggcatcctggatcagctgcgtggctactttggtcacgtcgagtcgttcctgatggaccgggagaccctggatgcgcatgccccagtctggggctgcgaggacaagccgctgttggtggacctgcacagactgacgcccgaagagagtgcgctctacgacgaactgcgtgacaaccgcatccgtgcgaggctgcggctggagcaggaacacattggcttccattggctgggcgatcgccttgaacagcttctgcaggggcgccgcggcgccagtccatgcccctga

SEQ ID NO: 44524 - DNA, 726 bp, Candidatus Accumulibacter sp. BA-93
gtggcagcaaacaaaaacctggaagcacagctcgacctcgacagctcggctgccgcgacgtccacccccgagagcctcgacctctccgccctggtcattcccctgctcaagggcgtgctttaccaggaagcgggcccggcgcagtggaatgcgctgctcagcctgcaggcacgggtgcgcgactacgttgcggtactcgaccttgaactggtgctcgacgaggccgagggctatgcctttctgcgctcgcggccggaggctgcggcagaggagggtgacgcggggcggctgccgcggctggttccgcggcgcccgctgtcgtttccggtcagcctgttgctggcgctgctgcgcaagaagctggccgagttcgacgccggtggcggcgatacgcggctggtgctgtcgcgcgacgaagtcgccgagctgctgcgcgtcttcctgcacgaaggcagcaacgaagcgcgcctgatcgaccagatcgacttctatctcggcaaggtcgtcgagctcggcttcgtgcgtcgcctgaaagtgcaaagcggccagacggcgactttcgaggtgcggcgaatcctcaagtccttcgtcgatgcgcagtggctgtccgaattcgatcagcgcctgagcgcctaccgctcgctgttggccgcggaaagtggcgaagcgggaaagagcacgaagagtacaaagaccacaaagcgcaaggccgcccccgatgaatga

SEQ ID NO: 44525 - DNA, 3378 bp, Candidatus Accumulibacter sp. BA-93
atgaatgagccgcagagtctcgggctcgatttcgtcgccgacgacaccctttccggtttccgcctgcagcgcctggaagttttcaactggggcactttcgacggccgcgtttggaccctcaaccccggcggccagaactcgctgctcaccggcgacatcgggtcgggcaagtcgacgctggtcgatgcggtgaccaccctgctggtgccggcgcagcgcatcgcctacaacaaggccgccggtgccgacagccgcgagcggacgctgcgctcctacgtcctcgggcactacaagtcggagcgcaacgaggtcagcggcacggcgcggccggtggccttgcgcgaccacaacaactactcggtgatcctcggcgttttttacaacgccggttacgaccagacggtgacgctggcgcaggtgttctggatcagggacgcgcaggggcagccggcgcgcttcttcgtcgccgccgaacgcgagctgtcgatcgccggcgattttgctcacttcggctcggacatcgccgcgctgaggaagcggctgcggcggccggctgccgaagtcttcgacagctttccgccctacggcgcctggttccggcggcgcttcggcatcgacaacgagcaggcgctcgacctcttccatcagacggtgtcgatgaaatcggtcggcaacctgaccgacttcgtgcgcagccacatgctcgagcctttcgacgtcgcgccacgaatcaccgccctgatcggccacttcgacgacctcaatcgtgcccacgaggccgtcctcaaggccaagcggcaggtggcgctgctctcgccgctggtcgccgacggcgagcgccatgcgctgctcggggctcagatcgacgacctgcgcgcgtgtcgcgaggcgctcaaagcctactttgccggtctcaagctcgggctgctcgacaagcgcctcgccggtcttggcgaagactggcggcggcaggatgcgcagctcaggcgcatcgacgagcaacgcctggcgcagcgcgccgaggagggcgaactgaagcgcagcatcgccgagaacggcggcgatcggctcgagcgcctggccgccgacatccaccggctggagctggagcggcaggcgcgggcgcgcaaggcgcagcgctacggcgagctggtcggcgcgattggcgagcaggcggcgcccgacgaagccggttttctcgaccaatgccagcgcttcgcggcgctggccgaagccgcgcgcgagcgcgacgccagcctgcagaacgacctcaccgagttgagcgtcagcatgcgccagggcaggcaggaacacgacgagctggcggccgagatcaacagcctcaaggcccggcgcagcaacgttccggccgcgcaggtggcgatgcgcagcgcgctctgtcaggcgcttggcttcgccgaagagacgatgccttttgccggcgaactgctgcaggtgcgcgacgacgagcgtgactgggagggggccggcgaacgcctgctgcacaacttcggcctgtcgctgctgattcccgacgacgactacgcgcccgtcgccgagtgggtcgaccgcacgcagctgcgcgggcggctggtctattttcgcgtgcgcaagaccaggatcaagaccacgcccggcgacctgcccagcctgcatcgcgactcgctggtgcgcaagctggcggtcaagcccgactcgccgtactacgactggctagaacgcgagctggcgcagcgcttcgatgtcgcctgttgcgccacccacgagcagtttcgccgcgagaccaaggcgatcacccgcgccggccagatcaaggcccccggcgagcgccacgagaaggacgaccgccaccgtctcgacgatcgcagtcgctacgtcctcggctggagcaacgccgccaagatcagcgccctcgaagccaaggcccggcaactcgaaacgcggctcgccgagctcggcagccgcatcagccgaatcatgggcgaacagaacgcgctcaaggagcgcctgagcgcgctctcgaaactcggcgagtacggcgacttcagcgaactcgactggcaatcgtcggccaccgaggtggcgcgcctgcaggacgagaagcggctgctggaaacgacctcggacgtcctgcaggacctgagtgcacgcctgcagcggctgcagggcgagctgaccgaaagcgaggccgcgctggccgccaagacgcgcgagctgggcgccacgcaggccaaacgcgaagctgccgaggccttgcgcagcgacactctgctgctggtcggtgacccgcagcagagtgcctggttcgagcgccttgacgcgatacgcagcgaagccctcggcgagcaccagctgagcgtcgagtcctgcgaaaaccgcgagcacgacatgcgcacctggcttcagagccgcattgaaaacgaggacggcaagctgaagcggctgcgcgacaagatcatcgacgccatgcgcgcctactgcagcgcctttccgctcgacacccaggaagtcgacgtcgccatcgacgccgtcggcgaataccggaccatgctcgacaagctgcaggccgacgacctgccgcgcttcgaactgcgcttcaaggagctgctcaacgagaacaccatccgcgaggtcgccaacttcaacgcgcaactggcgatgtggcgcgaaacgatcagggagcgcatcgcacgcatcaacggctcgctgacgcagatcgactacaacaccggccgctacatcgcgctcgaagcgcaggccacgcccgacgccgacatccgcgacttccagagcgagctgcgcgcgtgcaccgaaggcagcatcaccggctcggacgacgcccagtactcggaagccaagttcctgcaggtcaagcacatcatcgagcgcctgcgcggtcgcgagggcctctcggaacaggaccgccgctggagcgccaaggtcaccgacgtccgcacctggttcgtcttcgccgccagcgagcgctggcgcgaggacgacagcgagcacgagcactactcggactcgggcggcaagtcgggcggccagaaggagaagctcgcctacaccatcctcgccgccagcctggcctaccagttcggcctcgaatggggcgccgtgcgctcgcgcagcttccgcttcgtggtcatcgatgaagctttcgggcgcggctccgacgaatccgcccaatacggcctgcgcctcttcgcgcagctcaacctgcaactgctgatcgtcaccccgctgcagaaaatccacatcatcgagcctttcgtcgccagcgtcggcttcgtacataacgaggaaggccgcacgtcgaaactgcgcaacctgtcgatcgaggagtaccgtgccgagaaggcgcgggcggtcggatga

SEQ ID NO: 44526 - DNA, 1206 bp, Candidatus Accumulibacter sp. BA-93
atgagctggacgcggccggccgggctgcgcgcgcaggtgcagaaactgtgggatcgcggcgaggtgctcgccagcttggtcagcggcgagtcaccgtttcccaggcggctggtcctcaagggcccgacctcggccgagatggccgagcgcttcgacgccgtgcgcgcctgggtcgccgagctgcgcgccatgccaaactgccgtatcgagatgcgcgaattccgccatcgcgtcttcggcgccaacgccgtcccgcacgaggcgtggatcgacagcctcgacgacgcgctggcgctgctcggcaagcgtcgcgacgtcgcgcgtttcaatgccctgctcgaactgacccggcagcgccagccgcagctgctggcgtggttgagcaaacggccgctgcgcgcgctcgaactggccggcgaatggagccggctgctggccattgtcgcctgggtcgcggagcgtgcgcagcaggtgcccaggcccggcgtctatctgcggcaggtggacattcccggcgtgcacagcaagttcatcgaagcgcatcgcggcgttctcgccgagtggctcgatctcgtcctgccgccggcagcgatcgatacctcggccacgggcgtgagcggcttcgcccgccgttacggtttccgtgacaggccggtgcgtattcgcttgcgcattctcgacccggcacactcgcgcctgccaaccaccttcggcgacgacatcagcctcgacgccgccagcttcgcccgcctcgaccccggcgtcgcgcgcgtcttcatcaccgagaacgagatcaacttcctcgccttcccggcagtgcgcgacagcctgatcgtcttcggcgccggctacggtttcgagatgctggcgcaggcgcaatggctgtcgcgctgccgcatccactactggggcgacatcgacacgcacggctttgccatcctcgaccagctgcgcgcgcacttcgcgcatgtcgattccttcctcatggaccgcgcgacgctgctcgcttttcgaacgcagtgcggcgaggaagacaggcagacgctgcgcgaactgccgcgactgagcgaggaagagcgcgcgctttacgatgacttgcgcgacaaccgcttgggcaggaatctgcgcctggagcaggagaggattgggtttggctgggtggaagagcggatcggggcgatcgcgacgatcgcgacgctgccgtga

SEQ ID NO: 44527 - DNA, 1395 bp, Nitrincola nitratireducens
atgctcttcaataaactaccggatgatatttttctgcctttatcgggacagaaccgccaagtctatcaagcggttcttcttgaattggccgatttattctttgatgaggatcttatcgatcctttcattgccaaggatctggtgcgctctaccatcgaaaacgccgttgttcggcttggggtccgtcgttgggtcactgaagccgacgaggacggagaccctccacgttcaagtgtggactatactaatcgtatctatcggcgcttggtgcagtgtggttggctggaggaagagcaaaaggtgtatcgaacctatgttcttttgtcgccgtctgtttcgtatttgctccggtcattggtgtcaatcgctaagcttgaaaagcgaagctatggtggtgcggtactgaacgtgcttagctcgttagaagctgccgtcaatgatcctgtgggacgaggcattactctgtcagaggcatcgcaaacggccgctgattttagtgcgcatttaacggatatgctgctggggcttcgtgaaatcaaaatctccctatcggaaatcaataacccgcaggatatagtgagggggttttttgatcgatttgttgagcatattttggtttcagactacaaaacgctcaagacgcgaaacaaccccttccggtaccgtcgccagattttatcgatgctccgtgatttgcaatttgatttattaaagttagagcaactgacgcagcactatcaacttcagtatgagttggattttgatgcggcggaagcgctagtgcatcagcacattaatcgaattattcgtatttttgagtcagtggatcagcgtttagccgcgattgatgacttccgttaccagttggaaaaacgtgtggcggatacggttcgttacatggataaaaccacgccgggaatggcagctcgcttgtcgcgtttgattgctgagctggcgaaaaagaaagatgacgagattccaacgctgaccaccttggacgaaactgggtttatttcacccatgagtattcgttcgccgatacgtaagcgagtggaagcgaaaccacgtgtgattactcaaagtgagatagatccccgtgtgttagaattgcgtcgtttatttaaagagtataaagagcgacgtgaggtgcgtgttgatcgaattgagcagtatctagaccgtcattttcttgatcgtacccgcatgagtgcaactgagttcacgattgaatcagttgaggattatatttgtttcagttacgtgcgccatttgccttcgttgggtaaaaaggcacgtaaaaccactgaaaaataccgtattgaatttgacgatacctatgtctgcgttgctgatgtagttgagtgtcgtggttttgtgatacacaggaacgcataa

SEQ ID NO: 44528 - DNA, 690 bp, Nitrincola nitratireducens
atgttaggtgatctgcaaaaaatcgtatcccggactgaacaccaccaggccgaagactttattcatgctgccaatttacttcttgtcagccagtttttgtacgctgatcgccctatccatcgcgatagctattttctgattgcggccaacatcgactactatcgcaacttgtttgccgccattggttggacgttagtgtatcagcctgacgaggcgtatttgggtgtgcttcctcagggagaagagcgggtgctcaagctcaagttggatgagtcgttgcttctgctgtgtttacgtcagatctatgagcaaaagttggaaaacttcgaggttgaaaatggcaaagccattaccaccacggatgctttgctgcgtctgtacagtaacttaacggcgaaagaaatcccgaatgaaacccgcttaaaagagattgtttcattgtttagccgccatggggtgattgaaagaggaaaagcggacgaaaccgatcccaaaaacctacctctacgaattaacccgactattcgtcatgtggttgttgaggactatattggtcagctagaggccttgtgtgatattgagtcgagccgttcgtcaacgcaagatgcggatgaagccgacgaggctagcgctgtaagccaagaaaaggctcaagcagaagacggagagaacaccaatgaaacagcttaa

SEQ ID NO: 44529 - DNA, 3426 bp, Nitrincola nitratireducens
atgaaacagcttaatcgtatcgttctggtcaattggtatgttctaggtgcaatcgagattcccatcaaaggcaatgtggcgatcgtcggtccgaatggctcgggaaagtcatcgttactggatgcgattcaaaccattctgatgggaggacataagcgccacttgagtttcaatgcctctgccggtgaaaagtcagaacgttctttgcggacctattgcttaggttttttggatgaccttggtaaaaaagtgaatgcccgagaagactctctgacctatatggcattaagcttttttgacactgaaaccgcaaaagaaagctgtgtcggcattgcaattagtgcgtcgacagcgaatgcggaagaggacattttagggcgttttatcctccctgatttttccgtcactcttgacgatttttcagtaaagcaaggtgcaggacgtttgccgcgtccgtgggctgaagttcgtgacagtttattaaagcagtgcccggatatgatccttgaaaagcgggcgacacgctttatccgggaaatggttacacacctgagtcacgatccgcaaatgcccaatgatgatgaaaaattcatcaagaactttaaaaacgccttgaagttcgttcccatcgatagcccaacacgttttattcgagaattcgttttggacgaaaatattgttcatgtcggtgcgttcagaaagtcgcttgacgaataccgggcaatggagcaaaaaacacgtgaagtggcaaaccgcattgctgagctcgaaaaggttcaggaaatgtgtaaaggaatctcgagaaacctcaagaatgccattgaatacgaatgggtggtgcatgaagcacgctttgagcacaccgatttaaaaaaggaagcggcagccgagcgcctagaaacctttactgaacaagagcagttgttacaagcggatttagaaaaaaacagtgaacagctgaatgaagcgatgcagcgcttggcgaatactcgcgcagagctcaataacaccgattccgcgcacaaggtgagtgcactcgaatcacgtatttcggctcgacagcatgaagcctctgtggtgaaagaaaagatacaacaggtgtacaacctgatgcgaaccacggtgggttttgccgccaacccggatctattgccggacgcttttagacccgttgttgaacagtcggttgcactctggcgctcaggcgaaaacaccttggcaggccaatggccggaagcgcctgttgaagtggataacgcgctgacacagctacgtgcgcagattgaccccgtgcgtaaagcgattgccaagcgttacgaagagtccgtgatacggattaatgagctgcgtacccagattcaaagtcaaaaaagtgccgtagagcaattgcagcaggggcgagcgcctgtccggcacgcgacccgtgaactcatcgacttgttaaaagaatatggcatcgactctacaccgatttgtgagttggttgatatcaacgatgataagtggcgaattgccattgagtcgttcttaggcgctcgcagagaagcgcttgtggtcgcaccggatcgagtcaaggaagcgattacgctctatcgtcgcaaagggcgtcacttaaaaggctgccgtattatcaatacgaccaagtctggtgagtggttgacgcgaacgaaagccggaagcttggctcagtttgttgacagtgacaatgagcatgctcaagcctatatgaaccgagctttaggggcggtgatggctgtggaaactgaaaccgaattgctgcgccatgaacgtgcattaacctatgattgcatgttacagagcgaaggttcgaccacttctattaatgagctgagcccgattatggggattcggcgtcggggtgatcagttggccttgcagggcaagcaggtggatgagctgatagctgagtttacgacactgggcaagcaacatgagtcactggaaaagctgcgtgatggcttaatccaaatggcatctggtttgttgcaggtgaatgagcgcgtttttgatcttgtgaatcagcgagagcagcttgcgtctgaaattgaaggctaccagcagggcattacggatcttcgcaatcatgatgattcgggtattcagcaacgtattgctgagtatgctgagcaacaaaagtcattagaagttcgccaaaaagccttgatggataagctgcaaaaaacacgaactgggatgatcaaagacaacgcgtcgcttgaagtgcttgagcgagaactgactgagcacgctatggcgcgtggtcgttgtcaggagaaacccgagttcgatgcgcagtctgcccaagaaaaacgtgactacctagatgatagctgtgattcagaccttgaacgcattatttttgaagcggcgaaaaaagctcagacggaacttcagctgcatgagaaaaagaaaaatggagtacgtgacgccgttgcacaatacaaggcacgttatcacgctggcggcttaagccatcaaggattggataatataagccctgactctagtcatgaggatttggaaggttacgttaatgaaacggttgtcaccttacaagagtctgagttggcgcagtatacccaaaaagcagagcgtgcacgcttagaggcggaaactgcgtttagatcggatttcgttgcgcatctaaacgatcagatcaataaaattaaggatttgattcgtgaacttaatagccatttgaaaaatcgtccattccacaaagaaatgtacagttttgaaatgatgcctaaccctgagttgcgcgatatccttgaactggttgaagcctatacacgtatggatcaagccaatgtggggtctttgttcgatattcatcacgaaacggacacagggcaccgggatgccttggcaaaaatccatgaagttctaaagaatgaaggtgaaagcgagttactgcaagattaccggaatttttataactttgagctagtggttaaggatttagacggcaaccgtaaaactaccttaacccaacgtattaagacggggtctggtggtgagcaccaagtgccgttttacgtggccatggctgctgcgttaggcgcaacctatcgtttgaaagaaggcagtgatgggcaacctgttgggggcttgagtttgtcggtgtttgacgaggcatttaacaaactggactcagaaaatacggtcacatccttaggctttatgacggacttaggtctgcaaacaattattgctgcacccgatgaaaagtattcattgttgagttcttgcatggatacgatcatcaacgtgtgtcgtgatgggcgagtggttgatattgatgttgaatttccgactgaaaaaggaaaggaattgttagcgtctgatcacccttacaaaatcatggcggctgatgcgttggagacagcggacgagagtctttaa

SEQ ID NO: 44530 - DNA, 1362 bp, Clostridium sp. ASBs410
atgatactaatgaatgaaataccggaccggttctggggattgttccgttccattaaccggtctacctacatagaagctttgttaaaaatcaatgaggaatatgaatacagcaactactttttaagccgggaggtgtgtattcaggttctggaggaatattttacggcaaaacggctggtcatctggcaggatgagctggaagatgaggcggatgccttagagccgactgcggtcagggtcttaaactggctgttaagggcaggctggcttcggaaagtggatgactatgcctccatgacggtcaatatcgtaatccctgattatgctgccgtcatgatcgaggcgttttttaagcttgcaagtgatgaagaggatgagacccagatttatatccagaacgtttatgctatcctattctctttgaaaaatgatccaagggccggcgtaagccttttgaatacggcttacattaatacaaagcggctgaacaagactttgcaggacatgcttcacaatatggacaaattctttgcaagccttttggagaagagagcatatggggaactgttaaaggaacatctggaaggatatgtggaagaaatcgtaaaaaagaagtaccatatgttgaaaacttcggataatttctatctttacaaaaatgatattaagcggtggatcagctccatgcgggaagatacagaatggatcgagcagatgagccgccgcagcggccagaaggtaacggcagggaatattgtagaaaagctggatcagatcgaacggggatttgacgatatcgagcaccgcattgccaacatggacaaggaacattcccgttatatccgcgctacggttacaaggcttaactatctgttaaatcaggaggacagcatgaaggggcttgttatcaggcttttaaatcatctttctgaaacagaggatccggatgaggctataaaggaagtgggaggcctcatgaatttatcacaggtatccattctctctgaaaaatccctctataaaaagagaaggaccaggacaggctttaaggaaaatttaatgccggaggaagagcccgcagagctaaccatggaggagatcctgaatctaaaccgtttaaaaagccgctacagccggaaggagatcgaaagctatatcgaagcccatctggaaaatggccgtatggaggtaaaggaagatacggtgagttctcctgaggaatttgaaaagctgatcctggcctatgattactctaccagaaggaaaagcatgtatcaggtggaggagcaggagacagagctcattgacaacggcagataccgctatcccaagctggtatttgtaaggaggaaagaatcatga

SEQ ID NO: 44531 - DNA, 651 bp, Clostridium sp. ASBs410
atgacctatgaagaaagtgctggcatcatcagccagattccatattttgacgctttgggacagggagaaaaggaagaggtaagagcaggtttaagacttcttttgcagcagacctttgttctggagcataagtacgacaagcgtaccaaccggtttgcctataatccggaatttaaaatctgcaacaagcatctggaattcatccgggcttatctggcagtcagcggagtgtctgttctggaaaacagtcatctgggcattatttatatccagggagagagcacggtgggagacaagcttcccaaactggctaccctttatttactgatcttaaaactgatctatgatgagcagatggcggcagtttccaccagtgtcaacatctacaccacattaagcgagattcatgaaaagctgggaaattaccgattatttaagaaacagcctacaccgacggaaatccgccgggctattacattgttaaaaaagtatcaaattttagagcctctggatattttggaggacttagacggggacagccgcatgatcatctatcccagcatcaatgtggtattgtttggagatgacgtgcgggccctgttagaagcacttggagaaggagacgatgacgatgacgaatcagaaatttga

SEQ ID NO: 44532 - DNA, 3384 bp, Clostridium sp. ASBs410
atgacgaatcagaaatttgaagccctgtcccggatactccttaataactggcattatatcagccggaaaaccttatcctttaaccaggggatcaacttctttaccggacattccggcagcggaaagtctacggttattgatgccatgcagattcttctttatgccaataccgacggccggggattctttaataaagctgcggccgatgattccgaccggagtctgatcgaatatctgcgtggtatggtgaacatcggtgagaataatgaatttgcctatttgcggaaccagaatttctccactaccattgtgctggaactgaaacagacggatacgggagaatgccagtgtgttgggattgtctttgatgtggatacgaccaccaatgaaatatccagaaaattcttctggcacaaaggccctctttgggaaaatggctaccgtaccggttccaggaccatgaccacccaggaggtgtccgcttatttacagaccctttatgccaaagaggattattttaccacctcccataatgagcggttccgcagacagttgtatgatgtatacttaggcggtctcgattcggaaaaattcccccttctgttcaaacgtgccattcccttccgcatgaatatcaagttggaggattttgtaaaggaatatatctgcatggagcaggacatccacattgaggacatgcaggaaagcgtcatgcagtacgggcggatgcgaaagaagattgaagacactggtgtagaaatcgcttatttaaaagaaatgagggaaacgttctcagccctccgggaaaaggaagaggagataggtgaaaatacttatttcttccgcaagatggagatcctggattatcaggccagaattcaggcattgacggataaatccgggcttgcaagagaagacttaagccgccaggaagagcaaaaagcggccctggaaaggcagatggaagatttgaccctgcagggaaatgagctgcttcggaggatttcttccacaggctatgaggatttgaaaaatcagttggattctgcaatggaattgttaagccatttaaataaaagctctgttaagtgggcgcagacaggggagaggttaaaggaatgggtagacgaagaggtcacctccaaccagaccatatgggacattgaagaatttaaaaagaataccattgatgaggaaaagctgaaccgactgaaaaaatccattgccgagatgcgcaaggaaacagaggaaactcagaaagaggcagaagggatcctccgggatatacggaaaaaggagcgccagacaagtgaggagctagctcagctaaaggccggaaacaaggcgtatcccaagtatctggaacgtgccagatctctgattcagcagcggcttttagaggaaaccggcaaggcggtggaagtccatgtgcttgcggatcttttggatatcagggatgaaacctggagaaatgcggtggaaggttatctgggcaataacaagctgtcattggtagtggctccggcttattccgaagcggctatggctgtttacgaggagctggaaaggtcagaatatttcaatgttgctatcctggacacggaaaaggtggggcagaattcttatgaagtgctgaaagacggtcttgcggaagagattgtagtaagagaagcctatttacagccgtacattgatctgcttttaggaaaggtagtaaagtgcaggaatttggaagaactgcgccgctgccgcattggggtgacccctgattgcatgttatatcataccttccgtttacagcatatgaatcccgataattatacgaaatatgcctacatcggcaaggacagcgtccggagaagaatccggttactggaaaagaacctgtcttccatggaagaagagaaaaagccccaggaacaggttttaaaggaatgccgccggattttatccatagaaggcttaagcgaggaagtgggggtttacttagagtggcagcaggatatggcggcctttaaggaaaaggaaaaagagatcaggcggctggagcaaaagctggaaaaactgaaggcccaggatgtagaggaatgggtgaaggaaagagaagccgtcttacagctttgcgataggaaaagagaggagcagagggcggttgataagctgatctttggcatcaacagcgagactgaacggtttcgcagggaatccttgcagttacaggaagagctggttttaaaagaacaggaatttgaaccggatgaagaactggaaatcaaggtaaaggaatttttaggaagcaaagaaactcatcggtacgaccaactgaagaataaattttggggaaaatgcagggaggcggaagaagcacgtgatcaggtattccaggtccttgtaggtgccagaggtgattacgcccgaaaatatcccaaccggaacttttccttaacaacaaaggaaaatggggagtacgaacgccttcttgagaccatggagtgcggaaatctggaggaatataaacagatggctgccgagcaggcaaagtctgcagtacttcattttaaagatgactttatgttcaagatccgaagtgccataagggatgcgcttttgcgtaaggatgagctgaacaagatcatcagcagactggatttcggcaaggacaagtaccaatttgtcattggaaggaataagggaccggatgggagatattatgacatgttcatggatgattccctggaggtaaatcctgcctatcttacggattccttggatgaccagatgaacttattcaccatggagcacgagaatcagtacggggaaatcatcaatgacttaataaacattttcatcccgccggaaaacgccacaccggagcagatggaggaggccaagcggaacatggataaatatgcggattaccggacgtatttatcctttgatatgcagcagatcatccagaacgaggatgaggtcattaagatccgcttaagcaagatgatcaagaagaattccggtggagagggacaaaaccctctttacgtggccttactggccagctttgcccaggcttaccggatcagcctgtctccaaagatacaaagaaatcccactctccgcctggtggtgcttgatgaagcgttttccaaaatggatgcagaaaaggtggcaagctgcattgagctgatcagaggactgggcttccaggccatcatcagcgcaaccaatgataaaatccagaattatgtggaaaacgtggacaagacctttgtgtttgccaatcccaataagaagtccatatccatacaggaatttgagagagaaagctttccggagctgatgcgggagctcgatgaagaggaggcttatccagacgctgattcatag

SEQ ID NO: 44533 - DNA, 1452 bp, Microbacterium sp. MRS-1
gtgcccgccgtcgcccaggttctcgagctcgctcagcttgctgagcgcgatgcggcgtggaagctgcttcgagccgacagcgcacccgtggtcgccggtcttctcggcacccacctgggtggagacgagcgccgagtcgacgctgaggagctgtacgagcggatcgatgctgacctcgagcggctccgtgcgcagggactgatcttgccgctgactgcgaaggggtactgcggggagtggcgatcggccggcttcctggtgcgtcggccgtcatcggaagcgcggggtgagacgctcgagctttccccggacgcgatcgccgggatccgcttcttgcagggtcgcgccgccccgcgttcgagtgtgaccgagtctcggcttgcgagtcttgcggcgcaggtccgtcgcctcgcgatcgacaccgatcctgacgtgtcagcgcgcatcgctctgctcgaggaagagatcgagtcgattgagcggcggatcgagagcctgcgttccggtgacgagtccgcgatcgatgaagaccgggcgatcgaacgcgttcgcgacgtgctggcccaggcggcggacgtgccggacgactttgctcgggtgcgtgctgagttcgagatgctgaatgcatcgctgagggcgaagatcgtcgagtccgatgtctctcaggcggccgtcgtcgacgaagtcttccgcggaatcgaccacatctccgactcggatgcaggccgcagtttcgctgctttctcccagctcgtccttgaccctgcactcggtgcggcgttcgaggccgacatccgccgcatcctcgaccgcggattcgctcgcgacctcacctcggatgagcgccgggcactgcgcgccttcctcacaacgctcaagggacgaagcgcggagatccacgacgtcatcacattgttcgcccgggcgctccgccgctacgtgcagtcgcaggactaccagcgcgaccgggtcctgagaactcttctgcgggaggctcagcacgcgggggtggaagccgccgcgcatacgcgtccttggcatccgacgttcctcacgctggatctctctgctgtcgcgctgtcgagcgtcggggggatcgaccttcacgatcccgccgaattcgccgccaccgaagagatcgtcacgcagacgacatccctcgcgagcctcgaggagctacgggcgatcgctcgcgaaaccgagatcgacttcgacgaactcacccggaacgtcaacgacctgctcgccgaggtgccctcgtgcaccgtcgcagatgtccttgctcgataccccgcgacgcagggggtcggcagcgtgatcggacttctctcgatcgccgccgagcagggcaccgttgacgatgagcccgaggtactcgcttggcagggcgccgacggagttccgcgtgcggcgattgtggccgcgcaccgattcacaggagcggtggtatga

SEQ ID NO: 44534 - DNA, 660 bp, Microbacterium sp. MRS-1
atgaccgaatcgaccacggcggatgtcgcccccgacgagcacactggcctctggcgtggcgacgccggcgagctccctgatcgcacgcgccgggtcttgctgcgtctggtgcgtggcccgtatctttccggcgcgcgcgaggcgcaactgtgggcagtgctgctcaccgacgaggctgtcctccgctcccggcttgccgacctgttcctcgaattggtcatcgatcgtgacaacgagttcgccttcgtccgcaacgctccgtccgaggacgccccgaaggcagtgcggtctgaggcgttgacgttcctcgacaccgcaatgctgctcgtcttgcgccagacgctgctgagcgaggagggtcgcggtcgggtgatcgtcgggcaggcggaggtgttcgagcagctcgccgtgttccgcaccccggaccgtgatgagaaggacttcgcgagccgcgtcaactcgtcgtggaacaagatgcagaacaagctccgcgtattgcacgccgttggcgatgcccgtgccgagatttcgcccgtgctccgactgctcgtcgatgccgaccagatccgcgcgatcacatcggagtaccaccggatcgcccgagagggtggaggagaatccgctgccccgtcgacggatgccgaggatgacacagaatga

SEQ ID NO: 44535 - DNA, 3354 bp, Microbacterium sp. MRS-1
atgacgatgctgagcttccccaccgacgagccggaggtcgatccgaccgggcccggccagtggcgccttgcccagatcgaactcgtcaactggggcacgtttgccggccacgtcgccgtggatgtcgcgcgtgtcggccacctgttcaccggcgcatccggatcgggcaagtcgtcgctactcgacgcgattgccgccgtcctcacccccgataggtggttgcgtctcaacgcggcggctcaggatggcgcttcccggcagagcgatcggacgctgatgagctatgtgcgtggcgcctggagcaaggaagctgacgagactgccgatcgggccaccacgacctacctgcgctcgagggcaacctggagcggcatcctgctgcgctacgagaatctccgcgatgaaccggtcgtcctgctgcgcgtgttccacgcaccgggcacgcgcaccgaaccgaccgcgttgaaggacgcgcggatcttcacccgaggtcacatggagcttctcgacgtgaagccgcacgtcgaaggcggaatcgacgcgcgtcgcatgtcgaaagccttccccgaggcgctgatcaccaccggcgggcgacacggacgctttcacgagcgggtcatccgtcagttcggcttccgcggagatgcgacgcttcagcttctccacaagacacaatcagcgaagaacctcggcaccctcgacgcgttgttccgcgggttcatgctcgaccagccggggaccttcgcgcgggccgagaccgccgttgagcagttcatggagctcgatgccgcgcacaagcacgtggtcgacctgaggaagcaggctgatgcgctccgcaaggtcgacgaggcgatcaccgcgttcgacctggccggcgctgagatggcggggatctccgatctgcacgacggggtcgagcccttcacagcgggactcaagttgcggctcgcgaaggaagccgcgggccccgcacgcgccgcgctggcgcgcgccgagagcgacctgagcgacgtcgcgcgagagcagcggttggcggcagaggcgctggaaaccgcgaaggcgcgggtccgggacgagggcggcgcgcgcgtcgagcttctgcaggagcgggtcgacagtgcgcagcgtgccgaggacgtcactaggcaatatcgagctcagttgaccgcagagctggtgcgcatcggcgcaccaatgcccgaagaccccgagcagtttgcggagctccttgccgcggccgtcaccgaggttgcgcgcgacatccccgctgtgtcgtatgaggtgcgtgacgccgcgagtcaggcgcgtaaggcactggacgaagtcaccaggcagattcaggcgctgagagatcaccggagcaacctcgacgagaagcttctgagtgcacgacgattcctcgcggacgctgtcggcgtgccggcatcggcattcccctttgcgggcgagctgatctcggtcaccgagcagcactccgcctggcgcggcgcggcagagcgagtgctcgccctgtttgcgtcgacgctcctcgtgcgggacgaacatcttgtcgccgcacgtcgggcagccgactcgcggacactcggtgtccggctcgtcatcgaagcggtcccgcacgccgtcgacgagccgcgtcgccctaaggatgcccgctcgctcgttcatcgcctcgcggtgagcgatgggcccttcgcgtcctacgtccgcaggcgcatggcctccgagttcgactacacctgcgtttcgcaccccgacgagctcgatgacgtcgagcgtggcgtcacgatcggcggcctggtcaagcgcaactcacgcaggtatgagaaggatgaccgtcacgaggccggtgatgccactcgatgggtgctgggcggcgacacccacgcgcggctcgaggctttgctggagcgtcggcgggaagcgatggcggcgatggaggaagcatccgcccgcgacgacgaggccgactcgtttcgtcaggacgctgtcagtcggcgcgacgtcttcacacgcgtatcgacgttcagctgggaccaagtggacctcgcatccgcgatggcggttaccgcggcccagcgcgacgatctccgggtgctcaccagcgaatcggggactctccgcgaagcacaggaggccgcggagcgagcgacccagcgactggacgaaacgaacgcgaagcacgcacgggcgctcggagcccacgctgtcgcccgcaatcacgtcgaaagcatcgaggcacacgtcgccgaactcgaggccaccccatatataccggtcgaggagcggatcgccgacgccctcgtgggccggttccgagccgagcgacgctccgtgagcctggagacggtggacgaagtcgcgcgaaaggtgcagtcggcactctcgaaggagaaggacgccgcggccagccgcgcagcggatgctgaggccagcttcgccgggcgcgccgccgagtttcggctcgggtggcccgctgcatccgcagagctgactgctgacatccgcgaccgctacggctaccgggaactgcgcgacggcatcctcgcccgcggcctgcccgagaaggagtccgagttccgcaagctgttgcgggaacgatcgcaggacgtcgtcgcacacttgctcagcgacctccgcgacgctccgggtctcatccgcgagcgaatcctccccgtcaacgcatccctgggacggtccccgttcgagggagcggaccgcttcctcgagatcgatgtgaagacgacgcggaccccggaggtcgaggagttcctcaccgacctccgccgcatcgtggaaggcaactgggccgacgagtcggccgccggcgccgagcaacgattcgccgtgctgcagcgcgtaatcggtcgactcggatccaaggaccgcgtcgacatcgactggcgcaaccgagtgcttgacacgaggcttcacgtgagcttcctcgcgcgggagaaggacgtcgccggccgcgttgtgcgggtgtatgactccgcagagggcttgtcgggtggtcagcggcagaagctcgtcatcttctgcctcgcggcagcgctgcggtaccagctgactgaagaagaggacgaggttccgaggttcgggtcgatcgtgctcgatgaggcgttcgacaaggctgacagccgatacacgcgcaacgcgatggaggtgttccgagagttcggattccacatgatcctcgcgacaccgcagaagctgttgcagacgctcgagccgtacgtgggcgcgatcacgtcggtatcgaaccccgatcgcaacgcctcacagctggcgaacgtggtgttctcggtcgatgaacctgaggtcgccaccccgccgcacgcggagtcgcgcgcgtga

SEQ ID NO: 44536 - DNA, 1122 bp, Microbacterium sp. MRS-1
gtgaccacgcttgtcacaccgtctgacctgcgcgcgcgagcgaagaaactcttcgaccgcgatgcccgcacctgggccgccgagcagcagaccgatgtcgtgctcgacgttccgctccgcccgccaacggagcgggaggcgctggacgatctcaatcgggttcgacagtgggtcgacgcctggcgcggcgtgagcgaggactcgggtatcgagctcgagtgggtcgtccgcaattggtcacgcatcgggtcgcaggaagtccccgttcgcgcggtgctgcgcggtacggattcgatcgctcgagcggcgggcgagacggatggctggcgacttctggtggcgcgacttgacgagttgagaggcctggccggttccgacgccagcagtgtgctccgcgcccatgccggcgcgatcgccgatctcgatggcgccgatttcgacaggctcgtccatgtgctggcctggttgcgcgagaacccggaatcgggccacctggtgcgggaactgccgatccgcggcatccacaccaaatggatcgaatctcgccgcggactcgtcgaggcgttgcatcgggcgggaaccggagcgcccggactgggtcttcgcgagccgtcaccgctcatacggatccgtgctctcgatgcgtcgctctcgttccaggggctcaccgatctgtcggcgcccgtcgacgaccttgcggcaagcacgatccgacccgagcgcgtgttcgtgttcgaaaacctcgccaccctgctcgcgatgccggatgtgccccaagcagtagcagtgcacggtggcggtcaccgcgtcgatctcgtcgcccgcctcccgtgggcgcaaacggtcacctactggggcgatctcgattcgcacggattcgccatactcaaccgacttcgagccaggggagtgaacgcaacgtcagcattgatggatatggatactctgttcgaccaccgtgatctgtgggggaccgatccggatccgaacgtcggcgtgttcgagctgctcacgcctgatgagcgcgcgactctccagtcgctgagcgcggagggcaacatacgcctcgagcaggagcgcattccgtggagctacgcgctcgcacggctcggggtgtcctga

SEQ ID NO: 44537 - DNA, 1497 bp, Rhodococcus opacus PD630
atgtccatcaccgccgacgttcatcggcttcttcgtctgcgccaggaccacgcagcctggacattgctgcgtgccgattcggcgccggcaattctggcgctgttgggccgtcacttcgagcatgggacccgccgcctcccggctccggaactcttcgcccgcttggactccgaccttcagaccatgcgcgacgagggcctcgacttcccgcgaaccggtcaggcctattgcaccgagtgggtgcggtccggatacctgctccgacgagcagcggccggtacccgtgaggagaccctggaaccgacggagggcgcgttcgccgcgatggccttcgtcgcgagcctcaccagtcaggcgagttcggcaaccgaatcccgcctgaccacgctctccacccagttgcaggccctcgcgcgcgattccgatccccgcgcggaaactcgtctcgccgcgctgctgaccgaacgggcgtcgatcgatgagcaggtcgcagcggtggagtcgggagttttcccggtcctcgacggcgaacgcgctgtcgagcgttccgccgagattctcgcgctggcctcggaggtccccgcggacttcgcccgcgtccgcgccgaactcgaggaactcaaccgtgatctgcgagcccgcatcctcgatgacgacggtgatcgcggcgacactctgggagatgtgttccgcggggtcgacctgatcggagattccgatgccggccgcagcttcactgccttctacgacatgattctcgatccggcccggtcgtctcagatcgacgagtggatcgatgcggtgctgcagcggccgttcgcctcccagttgacccacgatcagaaacgacggttccgcgcgttactgaccgagatggaaacggctggctccgaagtgcattcgacgatgacctccctgtcccggtcgttgcgtcacttcgtccagtcgcgtcactacgaggaacaccgccggctgcagcggtcgctgcgcaccgcgcagcagagtgctgtcgccgtggccacacgtcgccgaccctacgacctgctcgacctcgaactggtgcgcgtcggtatgagcatcgaatcggtcacagctcttcgcctgcacaaccccgccgacaacctcgtcaccgaaccggtgctgacccacgacgccgggaccgtcgatctcgacgaacttcgaaagctcgtccgagaatccgagatcgatatggacgaactgtccgacaacgtcgcggcgacgctccgtgcgcatggtcgcgccacgatcggtgacgtcctgcgcgaatacccggccacccaaggactcgcgagcgcagtcggactgatggtcctcgccacccaccacgggcacgcgatcgacggcacagaagacatccactggatctcgggagccggagtatcgcgtcgggcgacaattcgtcgtcgcctgttcgatcctgcttccgacgagttcaccgctcgtccggcgttcgcacccacggggagctcgacatga

SEQ ID NO: 44538 - DNA, 606 bp, Rhodococcus opacus PD630; identical to SEQ ID NO: 42753

SEQ ID NO: 44539 - DNA, 3288 bp, Rhodococcus opacus PD630; identical to SEQ ID NO: 42754

SEQ ID NO: 44540 - DNA, 1194 bp, Rhodococcus opacus PD630; identical to SEQ ID NO: 42755

SEQ ID NO: 44541 - DNA, 1452 bp, Snodgrassella alvi wkB2
atgaacttttcacattcactagcaaaatataggcgactttatgaagaaaacaaggtctggaaattacttagagcaactacagcgcctctcattttagcttttattgagcaagtattttcgtctggacaaaacgaaatatcctatagtcaggctcgcattttattagatgcagagttggaaaaaaaccactggtatgccgatacaccagcagctatttatattaatcaatgggtcaaagatggctggttacgtgagatggacaataaattgaccaaaacagatacatgcgaaattgcattacgtttttgtcaaagctttgatgagcgtaacataaacaccagtgcttcacatctacgtattgtacaagaggctgttagagaactggttatcgcattaaacgaaaatcctgaagaaagaattgccttacttaatcaacgtaaagctgagctggaaaaagagattacaatcatacaaactagaggtatcaatacattatctgaccaacaacgaagggaaagattgagagaaatctaccaacttgcttcagtattaaccaatgattttcgctatgttgaagatgagattcgccgtctggatcaagaaattcgcatcaaaatgatagagaaagataataatcgcggagaagtattgcaagcaactatggatcaagaagctttacttgctcaaagcgatgcaggtagtgcatttgaaagtttttttcagctgctttgtgattcaaaccgctcaaccgaattcaaagaacaactagatattattcttaaccaaatttcagacaactatttacaaccacgacaacgaaaatttctcaaacgtctattacaggagctcactcaagaaagtgaacatatatttcaaattcgtcgtcgaacagaagaaaatttgaaaacttacataaaaagtggcgcagcacaggaaaaaagaactgttgatcgactcataatacaacttgaacagttagcagttaatttcagtaaaaataatattaaccttaaacaagctaccaacttaattttacctactggtaatatcgaaattaactctcccgattcaatatgcttaaaagaaccaatcgctgctatacaaataactgacatcactgagcatacaaattcagtagtcccgagtgaaacagtattaactttattagataccatccaaattaaagaagtagctgattcaatctatcataatctttgtacctttggaccattaactatagctggcctagttgaaaaaaaaccaattaattttggactagaagaattagtagcctatttgagaattgcgcaacatattcaagcaactgacttaaatgaaaaagagtctattattattcaagataagcagggtattcaaatcaaagctaccctacctaaatatttactcagcgcctcactttttcccgacaatttggaagagctttctttatga

SEQ ID NO: 44542 - DNA, 795 bp, Snodgrassella alvi wkB2
atgaacgaagaaaaaaataataaatcaacatcaggtggtgaattttttgatcaattttgtgaaaaaatggttactagtgatccaattagtccaacaattgatgagtctattcaaaaccaagtagaaattgaaacaacacaatcaccattattacaatctgataataatccacaaccagagtccagcttacttcccaaagaagccaaacatgctttagtagctctgctcaaaaatggtgttattttagcttcacaaaaaaataatcttttttctattatcagtcattaccatgttcaaattgattcttacttagccaatatatatctaaaattaatattagatccaactacaggggtagcttacgtagcacagatgagtgaaacgttagaagaaaatgatgaaatatcaccattaattcataggcgacaactaacagttcacgacacattgatattacttgttttacgtaaatactttcaggaccgagaaacagtcggtgaaagtaaaataattattagttttgagcatattgaagaacttttaaaacctttttcacccataacaaatcattcaaccatcgaaaggaaaagccttaatgcggcattaaaccgcatgaaagaacgccatatccttgctaacgtacgtggcagtgatgaccgttatgaaattacacctatcatccgttatgttgtgaatgctaactttttagaaaacatgcttttagaatataaaaaactaagtgaaaaagtgcagtcagataaagcagatacagtgaaagaagaatcaaatgaataa

SEQ ID NO: 44543 - DNA, 3384 bp, Snodgrassella alvi wkB2
atgaataaatccataattgataatgagccattcaacgttggtcaaattcgcttaaatgaactttctgtatataactggggatcatttcatggtttgcatacggccaaaattgatcctatcgggacattagttactggagataatggttcaggtaaaaccacatttattgatggattaatggcattactgctgcctgctggacgtgctagtttcaacgttgctgcagctcaaggagatagtaaagatagaacattactttcctatatgcgcggtaatttcggttcagcacatgacggcagcaaaacaaaagtaaaaagcaagcgagaccaatcagttattactggtctacgagcctgttacaaggctgacaatggtaattacattacactagcagtattattttgggctgagccaacagcaacatcttctgcagatatttatcgtcactatgttattgctaatcgtaatcttcaacttaaagaattactagaacattttaaagatggtaagcgacatactcttaagcagtatttaagtaatgatgcaaccattatttattcaaataacatttttgatggctatcaagcaatgtatcgtaaactgctacatattgataataaaaatgctccagccctattatcccgagctttgggtttgaaaaaaatcgatgatttaacaacccttattcgtgaattagtactggaatcaagccaaattaaagaagaagctcgtaatgttgtaaaagaattttcggcattagaagctactcataacgagctaattgatgtcaaaaaacaatatatacatttgggtcaattacctgaacacaatcaatcttttattaaatgtatacaaatattggataaacttgaacaagaaaaaaatggattaattccttattttggtgaactaaaaagtaaactgtatacaaataagcttcaagaattacaacaacaaattgattttttacagcaacaaattaacgaacaagaacaaaataagctaaacataaatcaacagattgaatcatatcatgccgcttatctaaaagctggcggcgatagtattgagtctttaaaaagagagcttgtaaaagcaaaagaagactatagccgcataaaccaacaagcatcaatatatcaacgggaaaccaaaacattaggtctaaattcagaactaattcagataaattttgaaaataatcaaaaaaaggcaacagacaaattacaaaatctggatcagaataaagaaaatgcactagttaattttgctcaaatccgtgcccaattaaacaacttaatgagtgaatatcatcagaccgaagaacaaattaaccaaataaagttaagacctgattctaatattgcattcagatttcagcaactacgcgacgaaatgatcacagatttaaatttaacaattgaacaatgtcgctttattggtgaattaattaatgtcaaagaaagcgaaaatatctggcaaggagcaatagaaagagcattaggtggactcagaaccacaatgatagtcccttataatgttttctcacaggtaacacgctggttaaatactcgtcatacaggcctacatgttagagtacaagttgtaccagaatcatttcaaaaattaaagtcacaaatcgaatttaaacctgaaggctatttacacaagttgatttggcgtgatcatccttatcgtgactggttaaagaaacatttggagcgtttcgatttaacttgtgtagattctactgaacagttagataaaacccctttttccataacacaggctggtttagttcatctggaaaaaggtcgttttgaaaaaaaagaccaaaataaaatcaatgataaaaaatcttggcaacttggattttctaataaagcccgattagcaatattagaacaggagttgtcttctttaacagaagatattgcaaaacaaaatacgcttactcagaaaaagcgtaatgatttgcaaactattgaacaggaaatagaactatggaaaaatttacaaaaatatagctgggaaagtatcaatttaccgcggtgtatagctgaagttgatagcatccaaaaaaaactgacagagttacaaaatggtgacgacttagaacaagctgaattacgttggaaagaggccaaaaacgcttatgaaaatttacaagatgaaattaaaaagttatacaaagaacaaggtagtcacaatactcaaaaagacaatttaaacgtattgcttcagcaggcacaaaaagattcagatcaaggaattgaacacgatataagattaatgttaaatcatcgtattggacaatacaaagatgatactttgccattagtaatagagcaacaagatttttattacaaacaaattgacgaatccctgaaaaaaacaaatcaaaaaaaagaaaatataggaaaagagatagttaaaatcatgtcttctttccaacaacaatggcctattattgctaatgattggattccagacatttcttatattgaagattatatcaatcacctattcaaactggagcaagaaggattgcctcagttacaagaacgctttaaagaacgtttaaataaacatgcaactgaatcattagcaagaattcagcaacaattagaggctgaaaaagatgaaattagagaacgtattcagataattaatacagtattaaaacgtacggaattcagaaaaaatacttacctaaaattaaatatcaaaattgaacaatatacaaatgtaatagaattttcaaaattacttaaaaatgctctaagcttatttactagtgatgaccatgaacgacgatttaatatattaaaagaaatagtctcacaactggataaagccagcaatctcgcagcacatacattagaaagcctacgtctacttgaccctcgttatcagatgtctttttttgctgaagagctagataatcaaactggagctgttatagatgtgcttgaatcttctagtggtaaatcaggtggtgaaaaagaatcatttgcaggcactatagttgctgctagtctcgcctacgcacttacaccagatggatatgataaacccgtatattgcacagtatttttagacgaagcattttctaatacagctgagtcagttagtcggagggtgctgcgcgtatttaaagcattgcatatacacgttaatttaattacaccatataaaaaccttaatctagcacgtgaaacagctcgttccctgcttattgctgagcgaaaccaacaaacacatgaaagtagcttaagtgaagtaacatgggaagaaatagacgcccaacgtgagttaattaaaaattctgaaattatgaaacaagccaaatctcttggtattgagatcacttcaacgcaataa

SEQ ID NO: 44544 - DNA, 1203 bp, Snodgrassella alvi wkB2
atgacacaattaaatgaaaattggggcaaactacccgatgaggtttacagccatattaaaaagctagaatgggataaacaaaagaatctcaaagagcgtttaatgcataaacgaaagtttccaattgaaatatctctaggcacaccaactggtgaccagatacttgataatatgatgtattttaaaaattttattaatcaatggaaagattttccacaacagcattggataaagtggcaagataaaaaatacaatactttaggtttacaacgcattcctgtaactttaattcttaataatctgaaagaactatttgaatttctagggcctgatattgaaaaaaaaattgaaaagctaagcaagataattgaaccattaacgacatacgaccaacgcttttatccaattttaattcaacatttatcaatagttgaacaattaactcctcaggaatcaattaacattactagtttattacagcaacttactccaagtatggggaaaggcttatatttgcgttccttacctttgaaaggtattgataccaagtttttggaaaataataaaatcttagtgagtgctttacttgatgttctctacaacaatgcaattgcacaagctggtaatttattgaaatggctaggatgtttagacaatcctaaaggctggttaatagttaaaccattatgcaaaaaaacacaagaatctttagctggcttgcctatcttacaaatggatcagcataccctaacccattatgaattacccgccaacaacattttagtagtagaaaatattcaatctggtttatccctaccagaattacctgatacgattgcagttattggtggcggtaataatgtgaattggcttagtgcacaatggttaaaaaataaaagagtagcgtactggggagatattgatagctggggattaaaaatattaagtctatcaaaaaccttctgtcctcatattcaaacacttatgatggatgaagaaacattaaaattatataaaaacaatatggtaactgaatcagaatcttattctgatattcctgttaacttagatttatcggaaaaagatttatttattgttttacaatccaataaatacaatgctaaccgattagaacaggaaaaattaccaaatgattatatccataaaaaattaaaagagtggaaaaataatcaaaatttttaa

SEQ ID NO: 44545 - DNA, 1470 bp, Stenotrophomonas maltophilia M30
atgaagcaccgcgaacgcatctcccgttaccgccatctgcgcgaacagccccagtggaagctgcttgccgccgaccacgccccggaaatcatcggcctgctgcaggggctgctgatggacggcgagcgcacgctgccgtcgtcggtgctcaacgagcgcctgcagcgtgcgctggaccagctcaacggcgacgaactgtcgcgtgagctgccgcgtaccgcgcaggcctacatcgcgcactggctggcccagggctggctggaacgccgtctgcccgaaggcgccgaccaggagcagtacgagctgtcgactgcggcactgcaggccatccgcttcgccgatggtcttgagcaggcgcgcgtggccgccaccgaaagccgcctggcgctggtcatcgaacagctctcgcagttggccgcgcagaccgagtccgacccggatgcacgcctgtcagcactgcgcgacgagcgcgaccgcatcgacgccgagatcgcccgcgtcggtgccggccgcgtggtcgcgctggatggcaagcgcgcgctggagcgtgcgcgccagatcatcggcctggccgacgagctgaccgaggatttccgtcgcgtgcgcgacgatttcgagcagctcaaccgcgacttccgcgaacgcatcatcgacgacgagggcgagcgcggcgatgtgctgtcgcagctgttcgaaggcgtggatgtgatcggcgagagcgatgccggtcgcagcttccaggccttctggcgcctgctcaacgacgccgaacagagcgcccagctcgatgccgcgctggaagcggtgctggcgcgtggcttcgcccgccgcctggaccgcaatgaacgcaacttcctgcgtggcttcaccagcaccatgctcgagcgcggtggccaggtgcacgacgtgctgcagaatttcgcgcgcagcctgcgtggcttcgtgcagagccgtggctatctggaacagcgccgcctcaaccagctgctgaagcaggcgcagtccgaagcgctggccctgcgcgacgaattccccgcacaacgcggcatcggccgcgacctgcagctgaccaccagccgcctgcgctcgtggtcgcagtggaagctgcacgatccgcgcagcgcccaggtcgatggcaacgtcgagtacaacgacgccgcagccatcagcctggagagcgtcggtgatctggtcgcttcgtctgaaatcgacttccgcaccctgcgccgcgacctgcacgacctgctcgatgcacagccgcggctcagcatcgcccaggcactgtcgcagcgcgaagcaccgcagggtcttggcagcgtcatcggctacctgtcgctgggcacgcgcttcggcaacgtgatcgctggtgagcaggagcttgccgaatggcgtggtggcgacggccaggtccgtcgcgcccgcatcccgctggtttggttcacccaggagagacgccatgagctggcatga

SEQ ID NO: 44546 - DNA, 702 bp, Stenotrophomonas maltophilia M30
atgagctggcatgaagatcccatcgacgcaccgcaggccgacgtggcggaagacgcctacgaagccgaaccggtggcggccgtggcgcagccccgccgtggcaatgacgtgtattacctcggcgacaccgggcgcctgccgctggatgcacgccgcgcgctgtgccagctgctgatcggccccagcatcgaccagctgcgccacgccaagctgtggccggcactgatccgcagcgaggcggccatccgctcctcgctggcggacctgttcctggaactggtgctcgaccgtgacagcggcgtggccttcacccgccaggccgataccgaagacgtggatgcgccggtgctgctgcgcacctcgccgctgaccttcatcgattcggtgctgctgctgtacctgcgccagcagctggccgaggccgatgcgcgcggcaaccgcgcggtggtcgccgacgccgagatggccgaagcgctggccatctacgagaagaacctgtccaccgaccgcgccggcttcaaccgccgtgtcgcctcggcggtgcagaagatgaaggacaaccacatcctgacccgcctcagcggccaggaagaccgccacgaagtctcgccggcgctgaagctgctgttctccgccgaagacgtatcccagctttcggcggtctaccgccagctgcgtgaaaccccggccgccgaggcctga

SEQ ID NO: 44547 - DNA, 3381 bp, Stenotrophomonas maltophilia M30
atggctatctccaagcacactcccgccctgttcaacgaaggcctgccggacccgcgcctgcagcagttccgcatgcgtcgcctgcaggtacacaactggggcacgttcaacggactgaccgaagtaccgatcgccgagcgtggcttcctgttcgtcggccgttccggctcgggcaagtcgaccctgctcgatgccatgtccgcgctgctgacgccgccggccatcgtcgatttcaacgccgccgcgcgtgaagccgagcgcagtggccgcgaccgcaacctggtgtcctacgtgcgtggcgcgtgggccgaccagcaggacagcggcaccggcgaaatcgccacccagtaccttcgcaagggcgcgacctggactgcgctggtgctggagtaccgcgccggcgatggccgcgtggtcagcctggtgcgcctgctgtggatctccggcaacggcacctcggccggcgatgtgcgcaagcactacatgatcgccgagcgtccgttcgacatcgccaaggatcttggcggcttcgacctggacctgcgcaagctcaagcagaagctgtccgacctgcaccacttcgacaccttctccggctacgccgagcgcttccgcgacctgctcggcatcgacaacgagatggcgctgcgcctgctgcacaagacgcagtcggcgaagaacctgggcgacctcaacgtcttcctgcgcgacttcatgctcgacacgccgaagaccttcgacgccgccgagcgcctggtcagcgacttcgccgaactcgatggcgcgcaccaggccgtggtcaccgcccgccgccaggtggagacactgctgccggcacgcgcctactacaacgacctgaaggaaatgcaccgccggcgcggcgacgacgaagccctcaagctcggcgtcgacagcttccgtgaaagccgccgccaggcgctgatcgaagcgcgcctgcgcgagatggacgtgcgtgaccgtggcctgctcggcgaagaagcccagcgccgtgccgcactggacaaccacaccgagcgcctggccgagctggaactgcagcgccgccagcagggcggtgagcgcatcgaggaactggagcgcgagcagggccgtgccgaagccgagcgcgaccgccgccaagccaagcgcgagcaggcaagcctggccgcgcagcagctgggggctgaacttccggacgacgcacacggcttcgccgagctggtcgagcgtgcgcagaacgaactgcaggaccgccagcgtgcctcttcggcgctggacgatgcgatcagcgatcgcctgggtggcaagcgcgatgacgagcgccgtttcggcgaagtccgtgcggaactcgaagcgatgcagcgcacgccctccaacatcccggcgccgatgcagaagctgcgcgcgcgcctggccgaggaaaccggcattgccgaggcggcgctgccgttcgtcggcgagctgatccaggtccgctcggaagagcagggctggcagggtgccatcgagcgtgtgctgggtggcttcgcgctgtcgctgctggtcgatgacaagcactacaacgacgtcgccgagtgggtgaatcgcactcacctgggcatgcgcttcacctactaccgtgtgcgccgcaacgatgatgcgttcgcgcgcgagccgtcggcgaagtcgctgctgcacaagctggagctgcgcgagcacgtattcgaaagctggctgcgccgtgagctcggcaagcgcttcgactacgagtgcgtggatgccaagcagctgcgcaacgtcgaccgcggcatcacccgcgaaggccaggtcaagcatcccggcgaccgcttcgagaaggacgaccgcagtgcggtgggcgaccgccgtcgctggatcctcggcttcaacaaccacgacaaggtgggcgccttcgagcgcgaagcccaggaactggccaagcgcatcgccagctgcgagaccgacatcgcgcgcctgcgtgggcagcgtgaccgcgacaacgaacgtcgcctggcctgccacgagctggtcagcatcagctggaacgagatcgacatcgccgccccgcagcagcgcctgaccgatatcgaggccaccctgcgcgacctgcgcgaaggcaatgccgacctggccaagctggccaagcagatcgacgccgtgcgcgccgacatcgagcaggcccgccgcacctatgaagacgtccgcgtcgagcgcgggcagctggtcaaggaacgcgatcgcctcgaccgcgctcgccagcagagccgtgcgctggtgctgccgagccttgcccaggagcaggaagccgggctcgccgagcgcctgcaggagcagggcccgctcagcctggaaacgctggaggcgcacatgcgccaggtcagcaacgcgctgaacgagcagctgtcgacctcgcagcaggacctcaaccgcatcgagaaccagctgatcggttgcttccgtcgcttcatccagcagtggccggaggaatcgggcgacttcaccgtatcggtggcctcggccgaggatttccttgcccgcctcgagcgcctggagcgcgacggcctgccgcagcacgaagagcgcttcttcgatctgctgcagaaccagagcaagaacaacctgctggccctgcagcgccacagcgccgaggcccgcaagtcgatcggccagcgcctggacgaagtgaacgccagcctggagcaggtgccgttcaaccgtggcacgctgctgaccatcgaactgagcgaccgccgcctgccggaagtcggcgagttccacctgcagctgcgcgaggtgctggcgcagcagcagaccgagcagcgcgagctggccgaatcgcagttcaccgtgctgcgccagctggtcaaccgcctgggttcgcaggaaggtgaggacaagcgctggcgcgagctggtgctggacgtacgcatgcacgtggagttcatcggcgtcgagctggatgcggaaacgcgccagcaggtcgagatctaccgtagtggcgcgggcaagtccggtggccagcgccagaaactggccaccacctgcctggctgcggcactgcgctaccagctcggcggcgccgacagccagctgcccagctacgccgccgtcgtgctcgacgaagccttcgacaaggccgacaacgagttcaccgcgctggcgatgaacatcttcgacaacttcggtttccagatggtggtcgccaccccgctgaagtcggtgatgacgctggagccgttcatcggtggcgcctgcttcgtcgagatcagcggccgccacgactccggcgtgctgctgatcgagtacgacgaagaaggcaagcgcctgaagctgcccgagcgcagccgccagcaggccaacgaaccggaagaagccgaagcctga

SEQ ID NO: 44548 - DNA, 1353 bp, Pseudomonas aeruginosa PA99; identical to SEQ ID NO: 43741

SEQ ID NO: 44549 - DNA, 750 bp, Pseudomonas aeruginosa PA99
atggcaggggtcttcgatcgaattgcaggcgcctctggtgccgacgaaacggagctgacggtggagcccatggcgttggatgacggcatggatgatgaacagcctctcatgagcgccgctgtacaggtcgatgagcgccggacgccgcaacgggtacgggaggccgtacaggaaatgctcaagtacggtctgctggaagagagtcacaagcccaacctgtatcgctcagcgctttccaatatcgaggcggtcgacagaatcctggagccgctcgaccttgccatgggggtcgacgaggttcgggggctgttgttcgttatcgttcgccagggcgaggtgaccgagcaggatgactggtcgcaccccctagtgcgtcggcaaaggctgaatctggagcagtctctgctgatagccatcctgcgccagcagttcatcgcctacgaacaggaaagcggtacgggcgccagtcaggcatcggtagtggtcgatgagctgattccccaattgcaggtttacctgggcgagctgggcagtgaggcaaaggagcgcaatcgcatcatcacgctgctggatcagctcaaggggcatggcctggtgtcggctttggacgcccatgatcgcgtcatcatccgtcccatcattacccacttggctaacccggagaacctgcaggcactcgtggcatggctgcgagagcaggtggagggcgcggcgacgccggctgccgatggcgaggaggatatggcatga

SEQ ID NO: 44550 - DNA, 2745 bp, Pseudomonas aeruginosa PA99
ttggccaggctgagggattacttcgaggtcggtgaaaacgcattcaccttgctcaaccgcgctgccggcctgaagcagctcaatagcattgacgagatctttcgcgagttggtgctggatgaccgttccgccttcgagcgggccgccgaggtcgccggcagcttcgatgatctaaccgacattcaccgagaactggaaacggctagaaagcagcagcgctcattgcagccggtcgccgatggctgggagcgttaccaggtcttgcaagaacagctgcacgataagcaggctctcgaaggtatcctcccggtttggttcgccgagcaggggtatcgactgtggttggctgaaaccaacaggctcgagaaggagtacaaaaaggccgaactggatcaggagcaatgcaaaagtcagcttgaggcccagaaaggtgtggtcgatcaacatcgccagcgctacctgcgagtagggggcgcagggatagatcaattgcgcgagcgcatcgctgattgggtgagggagtgcgataagcgcagcctgaaagccgagcaataccaactcttggccaaaggccttggactagcggatgagttatcggccgctgctctcaaggagaatcagcagcatatcgcggcacgcctggaaatactggaccaacaaattactgacgcgcgccaaaaggcgttcgacgcaggcctcgtccagcaggaactcaatggtcgcctacagaccttacagcaggagggtgctgaggttgagaaacggccaggctcgaacctgcccgggcaatttcatgctttccgaagcgatctggcgcaggcgcttggtgtcaatgagtcggccctgcctttcgttgccgagctggtgcaggtcaagcccgaggagctggactggcgtggcgccatcgagcgggcaatcggtagccaccggctacgcatcctggtgccgcagggctcatcccaggccgcactgcgttgggtgaatcaacggcacaaccgcttgcatgtgcgcttgttggaggtacaggagccgacgtcgcgccccgtgttcttcgacgatggttttacccgcaagctgaccttcaaggagcatccgtaccgagaagccataaaggcactgctggcggacaatgaccgccactgcgtcgaaagcccggagcaattacgtcatacccctcatgccatgacggctcaggggctgatgtcgggcaaagaacgcttcttcgacaagcaggaccagaagcgtctggacgaagactggctgaccggcttcgataaccgtgaccgtctggccttcctggctgagcagattcgcgaggtcaatgagcggctcgagccagccaagctcgccttggatgctgcccagggcgacgttcgtcagttggagactcaagcttcgctgctgaatcgtgtcaaagaactgcagttcgaggatattgatctgccgggtgcccagagtcagctggagtcgctgcgtacgcaactggccaccctgacgcgccccgattctaaccttgccatgatcaaggtcgagctggatgcggccgaggccctgcaggagtctcttgatcaacagctccgccaactgatcgaacagtacgttcagttaaaaactcagtttgaccaggccgcatccgctacccgtaaggcctataacagcgcggagaaagggctgaacgatacgcagcgtgaactggcgcaagcgcatttcccgactctgaccgcggatgacctcggcgatattgtcgagctggagcgcaagcatacgcgtgagcttcaagggcagctcaaagcgcttggcgagaaactgggcgatcagaaatcagagcttgccaaacgtatgtctgatgccctcaaggtagacaccggggcgcttgcagaggtcgggcgagagctggtggatgtccccaggtatctggagcgtctgcgtgtgctgaccgaggaagccttgccagagaaactcaagcgcttcctggaatacctcaatcgctcctcggatgacggcgtcacccaactgctcagctatatcgaccatgaagtctcgatgatcgaggaacgcctggatgacctgaatagtacgatgcagcgtgtcgactttcagcccggacgctatctgcgcctggttgcaggcaaggtcatccatgaaagcctgcgcaccctgcagcgcgcccagcgccaactgaactcggcgcgtttcatcgatgatgaaggcgagagccattacaaggcattgcaggatcttgtggggttgctcaaggacgcctgcgaacacagcaggaatcagggagccaaggcgcttctggatccgcgcttccgcctggagttcgcagtatcggtgatcgatcgagaaagcaggaatgtcatcgaaacccgaacaggttctcagggcggtagcggtggcgagaaggagatcattgcctcctacgtgctgaccgcttccctgagctatgcgctttgtcccgacggcagcagccggccgttgttcggcaccatcgttctcgacgaggcgttctcgcgcagctcccatgcggttgcaggtcggatcatcgctgcgttgagggaattcggcctgcacgctgtcttcatcacgcccaacaaggaaatgcgcctgttacgccaccacacgcgttcggcagtcgtcgttcatcggcgcggcctggagtccagtctggtttccctgagctgggaagctttggatgagcatcatcaacagcgcatcaaggccatgcatgaagtcgcccactga

SEQ ID NO: 44551 - DNA, 1461 bp, Photorhabdus luminescens BA1
ttgaatttccaagggttacaggcaaagtatcgccgtctatttcaggaaagtgccgcctggaaactgttaagagccgataattcccctttaattttggcgtttctgggggagttgttttctgaggagagtgaagtcccttttagtcgtgcccgtgtgtcacttgatgcagaactggtacgctgtcgtgaacttggtctttgggaaactgaaacgggagcgggtacgtatcttaataaatggattcgggaaggctggttgcgtgagatggacgacatgttaaccaaaacggatgccagtgaagttgcacttcgttttagtcaggggcttgatgaacgcagtacaggaaccaccgcgtctcatcttcgaattgttcaagaagcggtcagagaatttgcggtggctattagcccaaatattgatgagcgtgtcacgcttttggaacatagaaaagctgaaatccaaagagagattgatgccctgagagctggcgtggtgcttgaactgaccgagcttgagcagcgggagagaattcgtgagatctaccaattggcctctgttttaacgggtgattttcgtcgtgttgaagatgaaattcgtcaactggatcaggaaattcgcattcaaattattgaaggagattccaccagaggggatgttcttctctctgttttagaaaaagaagcgctattggcgaaaacggatgcgggtagtgcgtttgaaagtttctttgatttgttatgtgatcaaaatagaacaatggaactgcgggatcaacttcgaagcattttaaatcgtcccgcagcagaacatttgactacccagcaacgacagtttttaaatcagctcatgagggaactgagccgcgagagtgacagagtttttcaaatcaggcgaagaacggaagagagtttgcgtgcttatatagagagtggcactgctcaagaaaatcgtgctgttgatagattgcttggtcaattggaacgactcgccgttgaattgaggaactcaggttatgacttgcaaacggcgacaactctgtcactgcctgttggcgcggcaagtattagctctcctgaaagcatgctgcttaaatcacctgatgaaaaactagatacttcaggtgctgaagaacagatcaactctcgagaaccgagtatgcagatgctggattgtcttgatgttgttcaaattcgattaatcgctgagagaacattagcaacgttaaaagagtttggcccaatgacgattgcatctgttgcaaattatcacccacttaattcagggttggaggagttagttgcctatttgcgggtggcgaaatctgtcggggctgcatcattggaaggaaaagaatcaattgaaatcagcgataaacggggagttcgcttgcgggcgtctatacctacttttctgttgagtgccgacctgtttcctgacagtttggatgaattggttctttaa

SEQ ID NO: 44552 - DNA, 897 bp, Photorhabdus luminescens BA1
atgcacaaaggtaagaagttgaataaagataatggcatcctcgctacccttgggaagtctaattctgatcctcaagaagaacagaaaacagggttcttcgatcagttgataaaacaccatacgcaatcagagtataacccgcttacagatacagccggcgttgaatctgatgttgctttttcggttgtcaatcaaagcccatcctgtgacgttgataatgtattagtcagtgagcaggctgagaactcaaacagtgatatgccgcctgatgcgcgtcgggtactggttagcttattgcgtcagggcgttattttgtcttcgcagaaagctaaactgtttgaattactttgtcgataccaatctgctgtacgcaaacatctatcagaagtctatttgaagttagttttggatgaaaaagcaggtgttgcctttatagctggctttcaaaatgaggaagatactgaatcattgggtatagatgatgacgaggttgtctctctgattagccgaaggacgctctctttatacgatacattgttgctgttagtgctgcgtaaacactatcaagaccgggaaacatcgggagaacaaaggattatcattgatattgaacgtatagaatcccatctgacgccgtttttaccgctgacaaacagtactaaatctgaccggagaaaactcaagggcgctcttgataaaatggtgacgaaaaaaatattgagttcggtccggggaagcgaagatcgcttcgagattacgccggtgatccgctatgtagtcagcgctgaatttcttgaaagcatgcttaatgaatacctgaaaatggcgagagagaagggtattgagctaaataaaaatggcggcgacgctgttgattatcaagatgaagaggaatag

SEQ ID NO: 44553 - DNA, 3399 bp, Photorhabdus luminescens BA1
atgactgatcaaactctttcggctaattcattatttcacgttggtcaaatcagattagctgaactctcagtttataactgggggtcatttaatggcttgcataccgcgttgatcgatcctatgggaacgctggtcactggagataatggcgccgggaaatcgacgtttattgatggccttatggctctgctgcttcctgccggaaaggcaacttttaatgtggccgcggctcagggtgatcgttctgaccggactttactttcctatatgcggggaagttttggatctgcccatgacggagcggggacgagggtcagaagtaagcgtgagtttggcgtagtgaccgggcttagagctttatatcagggtgatgatggttcaaaaatcacgcttgcggcacttttctggattactaaatcgacgaatgtgctggcggatgtgacgcgagtttatgttgttgccaaaagagacctgacgcttaaggaaatgctcaatgcttttggcgatggtaatgcccgggcattcaagcaatggctgcgtgatgacccggcgattacgtgctgtgatgataatttttctgattatcaggagttgtaccgaaagcttttgtatatggacaataagaatgcgcctgcattgttgtcgcgggcgttaggtctaaaaaaaattgatgatttaactgggttgattcgtgagttggtacttgagccgagcacagttaaagatgatgctaaaaaggtcgtggaagagtttgctgatttggtggcaattcatagtcaattagtggatgcaagagcgcaaaaaatgcacttgtctaagttacctgaacttagctcaattatcgaaaaaacgatgagagaatttgaagaattaacggccgaaaaaaatagtcttccggtttactttggggaagtcttcgcgcaactgtggagcgaaaaaattgccgatattgagtctgaactcgaagcactactctttgaaattaagcaagcggaagagcagaaaacagatgcggataagttggttgagagaaggcatgaggaataccttcagtttggtggggataaaatagagtcgcttcgaaaggaaattggtcatacccaaactcagttgaatcgggtggttaggaattcatcgcaatatcaaactcatgttaatgagctgtctctgccttcggtattagaggaggctgtatttcttaaaaatcaatccgcggcatcagccagacttgccagtattcaacgagacgaggaagagtatcaggacaagtttgccgccatcagtgctaaattcagtgagctacaagccaatatccatgatatctctcaggaaatccgggaaatcgaggcaaggccggattccaatatcgatgtgaaatatcagcaactgcgggatgaactggttaattccttagaattaagtaaagaccaatgcgtatttattggtgagcttatcgacgtcgaagatagtgaaaaaatctggcaaggcgcgatagagagggcgttaggcgggttacgaacaacgcttgctgtgccacatcattgttattcgatggtgactcgctggttaaacgtccggcatacaggtttacatgtccgtgttcaagttgtgaatgattctgcgattaaccggggtcattcggcggagtttaagcctaatggctatttaaagaaactggtatggcgtactcacccttatcaagagtggctcaagcattatttgcagcgatttgacctgcaatgtgtctcgaatacggaagaattggataagaccccgttttcgatgacacaacaggggttaatgcacatggataaggggcgctttgagaaaaaagatcaacaccgaatagatgacagaagacgctggtgcttgggtttttcaaacaaatcacgtttagccattcttaataacgataaaaaagagttaactctgcaattggcggaaaccgagaaaaaggtgagtcaggcccgccaagatttgaatactgtttctgatcgtaaaatactctgggagaagatccaaagttactgttgggatgatatcaacgctccttattggcatgaaaagctttcggatttgcaggctgaccttaaggtattggagcagtcaggtggtgatcttgataaggccagagagcgttgggaatcggctaaagagcagttagttcaaatccaatcggtattaaatcagctcaattctgattctggcggcgttaaaaatacgctgaaaaatgcaaaagaggaatggagcaaagcgcaggcaaaagcatcaaaaggattacctgattcagccagacaattacttgctcttcgggttggagtgcttagtacaaacgatttaagccagatgtctgaattggtgtccaaggttgaagaagatttggagcgtttgttagatattagccgaaacagtaaagacagggcggaaaggtcagccatcagcattatggtctcattcaggtctaacgataaatggcaagtcttcacggttgattggcaaagtaatattggcagcctgcctgattatcttaatcatttacgacaactggaagaagaagggcttcccaaccttgtggaacagtttattgaacgtttgaataagcatgcaacgcagtcgctagcgcggattaaaactaagcttgaatctgaacgggaagatatccttgagcggattgatatcattaaccgggtcctcaagcgtaccgagtttcgatcagggacacacttaaagctaggttcaaagagagagaaattcccgcatgttaatgagtttgaacagcatttgcgtaaggtgcttagtcaggtaaccagtgatgaccatgaagcgcggttccgtcaattggctaaagtagttgaaatacttgggaaagcaagtgcgccaggttcctcaaatacattggaaagcttaaggttgcttgatcctcgttatcagatgtcattttatgccgaagagttggatagtaataccggtgagattcgtgatgtattggaatcatccagtggaaagtcaggtggagagaaagagtcatttgcggcgactattgtcgcggcaagtttggcctatgttttgacgccagatggttatgatcgaccggtttactgtactgttttcttggacgaagcattctcaaatacggctgaaacagtaagtcggcgggtgctccgagtatttcgagagctccacattcacgttaatttgatcacgccttataagaacttgaatctggcaagagaatcggctcgctcactactcattgcggaaagagaccaggaaaaccatgacagccatttatgtgaagtgacttgggaagagattgaccggagaatgggcgaagagaaggagaaaaagttgtctgatgaggctgctgatctggggatcgagtttgagaagttgacatga

SEQ ID NO: 44554 - DNA, 1197 bp, Photorhabdus luminescens BA1
atgaaaaaagggcagtatgaggtgcgttgggggttattgccagcgcaagttaagagcatcattaggcagcgtgagtgggataaccgttcctcactaaaagaccggctactgggcaacagggcatttcctattcgcgttggattaaaaccacccaaagggaattctgccatattagatatcgctcattttcaacggtttattgatgagtggagatcatttccctatcaagatgttgtggagtggtcttctaagaatttcagggaattatctgaacaacgcattccaacttttgttgtcattgaatcgatgcaacatttgattcaatttttagggaatgatgccctttcccgaagtaaggtatgggaaagaaatatgaagccatttttgcggattgataaagatctctatcctgcattggtgaaatgtatagatattgtggaaaaactctcgttgagagatgcggaattattagcaaaattgctaccacaattaaagcagggcttaggcgaaggacaatatttaagagcactgccactcattgggattgatactaagtttcttgagaaccaccaaatcctgatcgaagagctggccgatatcattcacaagggagctgtttcggtatcaggtggtcttatcgcttggttgggatgttcaataaatcctaaaggctggttaactatcaggccgctttgccgtgctgcaactgttgcgcttgggggaatgccgatactacaaatacctagcgaattacttagaaggcatgaacttccggcatcgaatatattaatagttgaaaacttacagtctggtttagcattacccgaaatgtctgacacgatagcggtgatcggcggggggaaaaacattgcttggatggatgcagcttggttgaaaggtaagcgtgtagggtattggggagatattgatacttggggtttatctattctcagtgatgccagaaacaagtttatggatattgagcctctgatgatggatgttaaaactgttaaagctcatgaagatagaatggttcctgaaccaaatccagttgaatctaatcctacattgctaaatgaggatgaagcaaagttgtttaatgatctcatttctggccggttccaatcttcacgtttagagcaggagcgcctttcatctgattacattagaaacaagcttacgaattggctgtcctaa

SEQ ID NO: 44555 - DNA, 1575 bp, Bifidobacterium animalis subsp. lactis CECT 8145; identical to SEQ ID NO: 41902

SEQ ID NO: 44556 - DNA, 810 bp, Bifidobacterium animalis subsp. lactis CECT 8145; identical to SEQ ID NO: 41925

SEQ ID NO: 44557 - DNA, 3498 bp, Bifidobacterium animalis subsp. lactis CECT 8145; identical to SEQ ID NO: 41904

SEQ ID NO: 44558 - DNA, 1221 bp, Bifidobacterium animalis subsp. lactis CECT 8145; identical to SEQ ID NO: 41905

SEQ ID NO: 44559 - DNA, 1446 bp, Mycobacterium mageritense DSM 44476
gtggacgacaacgcggtgatgtcggccgccgagttactcgaactcaaccgcgatgttcagggctcgcgtgcggtccggctgctggccaccctcaacctgggcgtgtacgcgacgctgatggagcgtcacctggccggcgggatgatcgccgagaccgagctcgtggtgcgcctggagcgggatctggaggcactgggcgaatcgggcgagcaatccggcctggcgctgatcaagacatgggcgagccagggttggctgcaccgtgtggtggatcaccgcgccgagcacgagcgcaacatctgctacctgacgcaggacgcgcgccgggcgctggacttcgtgcgcggcctgcgccgtaacgacacgatcgcgaccggcggctcgatcaacgggatcgcgtcccgcctcaagcaggtcgccgtgcgcgtcggcaacgatccggaccgcatccgcgcaggcatcgaagccgagatcgcagccctgcacgccgagctcgacgaactcgatgccgggctgcggcccgagcccgacgtgacggccatgtacgacgaggcccgcgccatcgccatgcagatggaacgcctgatcaccgacatcgggctgtacggcaccatgatcgagcaggccacccacgcgctggacgacccgatcgacagcaacatcgagtaccgcgaccgccagcgccagatgtacgccgactaccaggccgcgtgggactcggcgggccgcgactcgcaccgcgcgttcctgcggatgatcaacgaccctcagcagcgcgccgagttcgaggccgacatcgccacggtcgccgcgacgctgccggagctggatcccgagctgcgcaaggtcatggccgggttcttcgagctggtcggccaccagatcgacgaggtcgaacgcattcagcagcgctgcgcgcagcgcatcaagcggttcacggcgttcggcacgctcgaacagactcgcggcgtggcccgccagctcaacgacgccatcggtgcagcgagggccctgctcaaggtctcgctgaccgattcgcggctgcccatcgacgtcccgctcgcgcgccacgccatcagctcggtcggcgcgctgagcttcaagatcaacgacctctcggcacccaaaccggcgcagatcgccgaaggcgaggtcgatctgtcgacgttcgcggcgctgaccacgcaggtcgacgcgcccgcgatgtcggagatgatcaacaccgcgctgcgcgacgcgccgctgtcgctgccggacgcggtcgccaagctcgactcggcgtatctcggtcacgtgatcgtgctgtggtcgtgggcgctcaaacaaccgggcgcccagcatgccgagccggccacggtgcggttccggtcgctcgacggccgtgaccgcgagatcgaggtgcccaacctgatgttcaccgagcccgtgctgggaggagcgtcgtga

SEQ ID NO: 44560 - DNA, 687 bp, Mycobacterium mageritense DSM 44476
gtgacgacggagaacaccgcagaaccacaggacgcggcaatcgatttcgcgtcgttgcccgaggtcgaccgcaacggccgggcgccacaacagcgccggccccggttcgacggcgacgtgagtgccatgccggaccgggcctgctgggcgctgcagcacctgctgacgcgccgctacatcagcagcgagtccgaccgtgacgtgtacagctggatcctggagtaccgctcggacctcgcggtccggctgtccgagttggatctgcagctgcggatcgccgaaaatgtcgacatcgcctacgtcgagcaggcccgctacgaatccgccaggggcatcaagcttttgcggcgcgaaccgctcggcacctacgattcgatcctggccttgcacctggcccagatgatgcgcgccgcgggggaccagagcttcatgatcacgcgcgacgagatccacgggctgttcgcgggcgtgctcaacgacaccgaccgcgacgccgtgacgttcaccgcacgcatcgacggcgccatcgcccggctcgccggactggacatcctccgcaagacccgcgacgacgaggacagctacaccgtgagccccgtgatcagcgccatcatgacggcgtcggtgatcaccgagctgcagcagcagttcgaggcactgatgaagggcggctccgatgacgagtga

SEQ ID NO: 44561 - DNA, 3354 bp, Mycobacterium mageritense DSM 44476
atgacgagtgaacagttccacctgtcgcgcctgcagatcatcaactggggcgtgttcgacggctaccactcgattccgttcagcgcgggcgggtcgctgatcgccggcgcctccggcagcgggaaatcctcactgctggacgccatctcactgggcttcctgccgttcaaccggcgcaacttcaacgcctcgggcgacaacaccgccgccggttccagcgcggggcgccgcacggtcgacaagtacgtgcgcggtgcgtggggccaacgcagcgatgcgggcagcagccaggtgatgtacctgcgcggcgacgggaccacgtggtcggccgtggccgtcacgtaccggagcaacagcgggcgcaccatcacgggcctggtgttgaagtggctgaccggggaatcacgctcggactcgtcgagccgcttcgtgatcggcgacggtgacctcgacatcgaggacgtgtgcaaccgttgggccgcagggcgattcgacggcaacgtgttcaagggtgacggctggcggttctccaccaaggtggaatcgcagtacctggcgcagttgtacgccagcatcggcatccgggcgtccgacgcggcccagcagctgctgggtaaggccaagtccctgaaaagcgttggcggactggaacagttcgtgcgtgacttcatgctcgacgaacccgacagcctggcccggctgcccgaggcgctcaagcagatcgatccgctggtcgaggcccgcgaactgctggccgtcgcgcagcgcaagcgcaagatcctgggtgatatcgaggccatccagcagcggtatgcgtcggagtccaccgatctgggcatcatcgacctgatcgacatgccgatcgtgcgggcctacaccgaccatgtgcggctgcagcagtgcccggcccagatcgagtcgctggacacggaagtcaaccagctggacaacgaatacgccgacctgacccgtcagctgaatctcgccaaggtcgaaggcgattcgatcaacgcccagatcaacggggccagcgccaacgtcgcgccactgcaggcccaggtgaccgctgccgaggcgcaggccgaggaagtgtcacggcgccgcgcggcctacgaggagctcgtgacggcgcagggcgtggcggcgccggacaacgccgacgaattctggaacctgcgggaagagttcacccggcaggccgccgagatgctgaccaatctggacctcggccgcgaagcatcgacggacgccgagtacgcccagaagtcggcccgcatcgcccgcgaccacgccatgaaagaactcaagcgcgtcgaacacgtcgggtcggcgctgcccgagtccgcggtcgcgatgcgggaacacatctgtgcggcaatcggtgtggattccgacgagctgccgtacgtggccgaactgctggatctgcagccggaccagacccgctggcgcgtcgcggtcgagaaagtgttgcggtccgtgggcctgcggctcctggtgccggatcggcactacgccaaggttttgcggttcgtcaacgagaccaacatgcgcggccggctggcgctgcatcacgtgcgcagcaccgcgagcggtcgtgaacccgagccgaacacattggcgggcaagctcttcgtggtccgtcccgaacacccgtgcgcggccgaggctttggacgtgatcgccgcggcgggtgatcacctgtgcgtcgacacccctgacgtgttctcgcggttccgccgcgcggtcaccgacacgggcctgtacaaggactcggaccggctggccatcaaggacgaccggcgcccgctcaaaccgtccgagtacatctatcagggcgacatcaccgccaagctggacgctttgaacgtcgaactggccgaagccgaggaggcgttcgagcaggcccgccgcgcggccgacgagatcgcggcgcagcggcagcagtggcgggaccgcgcgtcggcgtgcaaggcgatctacgagcagttcccgcagtggagccacatcgacaccgagaccgccgatgggcacgccgagcggctgcgcgaacagtacgagttgctgctggccgacaatcccgacatcgaggcgctcagtgcccgggccgagcagtgctggaccgacatccagacgctcatgacgcggcgcggcgcgatccagacccgccgcgacgacctcgacgggcggcgcacccggctgctggagcttcaggaacggctgagcccgcccgcggtctccgaaccggtgaccgagctgttgcgccgctatgccgccgagattccggtcgacctggaactgctcaacccggagccgcaccgtgacgcgctgttcaccgcgatccggcgcgaacgcgatcagctgaccgaaagccgcaggcgctcatacgacgagctcgcgcggatcatctcgacgttcgacacgtcgttccccgacgcgatccccaacgactcggacgatttcgacgaacgcgtgcacgattacgtcgcggtgtgccggcacatcgacgagcgtgaactgcccgacgcgtacgaccgcatgatgcggctcatcaccgagcaggcccccgacgcgatcctgacgctgcaccgcgtggccgagcaggagacccgccgcatcagcgagcagatcgaccgcgtcaacacgggtttgggggccgtcgagttcaacaccggcacgcgcctgacgctgcgcgcgaccccccggcatctggccgcggtcgccgagctcaccgacatcgtcaaggccatctcgcggcgcatagccgaggtgggcctgggcgacaagaaggccatcctcgagcagtacgccgacatcctgcggttgcgaaaccggttggccagcaccgcacctgaagaccgcgcctggacccgtgacgcgctagacgtgcgtaaccggttcacattcgactgtgcggaatgggatgtgcgcagcgacgagctcatccggacgcacagcaacgccggtgacaattcgggtggtgagcaggagaagctcatggccttctgcctggcgggcgcgctgagcttcaacctcgccaaccccgaaagccgggacaacaccccggttttcgcgcagctcatgctcgacgaggcgttctccaagtccgacccgcagttcgcctcgcaagcgctgcaggcgttccgcaagttcggcttccagctgatcatcgtggcgacggtgcagaacgcgaccaccatccagccctacatcgacagcgtcgtgatggtgtccaagaccgaggccaccggtcgcaacgcgcgccccgtcgcatcggtggcttccaagaccatcagcgacttcaccgcgctgcgaaagggtttggccgaggtcaaggtgcctgagccggtgtga

SEQ ID NO: 44562 - DNA, 1452 bp, Mycobacterium vulneris
atgagcggtctgtcgctggaccagctctaccagctcaatcgcgaggtcgccgactcgcggtcggcgcgcctgctggcgaccaacaacctggccacctacctcacgctgatggaacgccatctggatcgcggggccaagctcaccgagatcgagctcgtggtccggctggagcgcgacctggccgacctcggctccgaaacggaccagtcgggcctgtcgctgatcaagtactgggccagccagggttggctgcaccggatcaccgagcagtccggcgacaccgaacgcaacgtctgctacctcacctacgaggcgcgggccgtgctggatttcgcccgccggatgcgccgcgaggacaccatcgccacgggtggctcgatcacgggcatcgcggccggattgcgacgggtcgccgggcaggtcagcaacgaccccgagcgcatccgcgcagacatcgaagccgagatcgccaagctgcgtgacgaattggacgccctggagcaggggcagcggcccgaaccggatctggtcgacgtcgaggacgaggcccgtgccatcgcgctgcagatggagcagatcgtctccgatatcggccagtacggcagcatgctcaaccgcatcaccacccgcctcctggatgcctcggccgacaccgatctcgggtaccgcgagcgccagcgccagttgttcgacgactacgagtcactgttcgcgtcccgcgagagcgcttcctacacggccttcacgcgcatgatccaagaccctgagcagcgcgccgcgctggtggccgacatcgaggcggtcacccgtgagctcccgcacctcgatccgggcctgcgcgaggtgatgaccgggttcttcagcctggtgtccgcccagacggccgaggtcggtcggacccggcagcgctgcgcccgccggatcaagcgcttcgtcgcctccgggaccctggagcacagccgcggcgtcacccgtcagctcaacgatgcactgaccagcgcgcacgaactgctcagcgtgtcgctcgccgacagtcgcatcggagtcgaggtgccgttggtccggacggacttcaattcgattggcgccgtggcgttcaagatccgtgacgccatcccaccgtctcaggccgagccgtcggagggtgaggtgaatctgtcggcgttctcggcgctggcctcgcaggtggacgccgccgaactggctgagttgatcaacggcgcggtggcggccggtccgttgtcgctgcccgacgcgatcggcatgctggactcggcctacctcgggcacgtgatcgtgctgtggtcctgggcgctcaagcaacagactgctggagaagccgagtcggtgcgcgtgcgcttccggtcgctggagggggccgaccgcgaaatcgaaatcccccgactggttttcaccgagccgatccctactgtcagcgagagcatgttatga

SEQ ID NO: 44563 - DNA, 768 bp, Mycobacterium vulneris
atgaccgacaccccaaatacggagaccggctcagactcagtgcccgtctcagactcggccatcgatttcgacgccctgccgaccatcgacgccgtcgaacgatcgaccgaccagcgtcgtgcgccccgcttcgacggggatgtcagcgaactgcccgaccgcgcgtgctgggccttacagcacctgctgtcgcgtcgctacgtcagcaaggacaaccactccgagctgtggtcgtgggtcacgcgctaccgcaccgaactcaccgtacggttgtcggaactcgatatgcgactgtgcatctcggacgatcacgacatcgcctacgtcgagcaggccgactacgaatcgcagtggcggcgacgcctgctgcgccgcgagaccctcaacacctacgactcgatcctggcattgcacctggccaaactcatgcgcgccgcggcgcgtgacgagaacgtgctgatcagccgggacgagattcacgagctgttcgccggggtcaacaacgacaccgaccgggacaccgcctcgttcgacaagcggatcgacaacgcgatcgagcggctcaccgacatcgacatgctcgcccggaaccgggaggacgaggacagtttcaccatcagcccggtggtcaacgcgatcatgacggcctccatgatcaccgaactgcagcagcagttcgaacagctcaagcgggccgccaacggcacggtcgatgattccgacgatgtagccgcacggctcgaggacgaggtggacgcccatggctga

SEQ ID NO: 44564 - DNA, 3363 bp, Mycobacterium vulneris
atggctgaaccgaccaaccagttctccctgtcgcgcctgcaggtcatcaactggggcgtgttcgacgggtaccactcgatcccgttcagccggcacggaaccctgatcaccggctcctcgggtagcggtaaatcctcactgctggacgcgatctcgctggctttcctgccgtcgcaccgccgcaacttcaacgcctcgggcgacaccaccgccgcggggtcgggcaccggcaagcgcacggtcgacaagtatgtccgcggggcctggggtgagcggcgcgagggcaccagccgccagatcatgtacctgcgcggcaccggcccggcctggtcggcggtcgcggtcacctacagtgaccgcaccgggcgttcggtcaccggcctcgtactcaaatggcttgccgccgagaagacctcggacccgggcagccgctactacctgatcgacgacgaccgtgacatcttcggtctgtgcaaccggtgggcggccaatggctacgacgctgccgtgttccgcgacgatggctggaccggcggccgcagtgagagccagtacctggcccagctgtactccagcatcgggatccgcgcctccgaggccgcccagcagctgctcggcaaggccaaatcactcaaaagcgttggtggccttgagcagttcgtgcgcgagttcatgctcgacgagcccgccagcctcagcggtgtggaggaggccctggaacagatcaacccgctggtcgaggcccgcggcctgctcgacgtggcccggcgcaagcgcaacacgctgggcaacatcgccgcggtgcaagcgcgttacgccgacgaggcggccaagttcggggtgatcgacaccatcgacaacgccatgatccgcgactacgtcgaccatgtgcggttggcccaggccggcccggagatcgccaacctcgacgatcagatcacccagctcggcgcccagcgcgatgagttcggtacccagcagcgccagctcaagaacgagcacaactcgctgatggcccagatcaacaccgtcaccgtggacctggtgcccctgcagcaacggctgaccgaggccgagcggatcagcgaggaagtgtcgcgccggcgcagcggctacgaggacaaggtgacctcgctggggctgaccccaccggacaacggtgaggaattctggtcgctgcgtgagactttgatggaggaagccgaccggctgcatcgcgaactgttcaccggcaaccagccctacgtcgaggcgtcggcgaaggaggtccgggcccgcgaggcacgcgagagcatcgaagccgagctggaacgggtgcagcggctgggctccccgctgccgaggaccgagtacgagatgcgggcccgcatcgcccgggcgctcgacatctccgaacgcgatctggtgtacgtggccgagctcatggaactcaagcccgacgagtcgcggtggcggctcgcggtcgagaaggtgctgcgcggggcgggattacgcctgctggtccccgacgcccacatggagcgggccctgcgtttcgtcaacgagaacgacatgcgtgggcgaattcagctgcagcacgtccagcacggtgcgcagttgcggaccccacccgcgggcacgctggccaccaaactccagctggccgacccgacacatgacagtgccgtcgaggcgctcaacgtgatcgcggcggtcggtgattacgtgtgtgtcgacgatccgggggagttcaccgagcagtcccgcgcggtcaccgaccagggcctacgcaaggacagcggccggctctccatcaaggatgaccggtcccggctgcggccgtctgactacatcttcctcggcgggactgcagccaaagtcgaagcgctgcaggatgatctgaccgccgcgcaggaggtgtaccaggtggcgcgcacagcccgtgagcgcctcgacgagcaccgcggccagctgcaatcgcgggagcgggcctgccgcgcactgtgcgaccagtacatgcagtggagcgacatcgacaccgattcggtggacgagatgctcgagcggctgcagggcgaacacgacctgctggtctccgacaaccccgacgccgaacggctgcaacagcgggccgacgactgctgggagcgcgtcgagaaggtcatccagcagatcggttcgctcaacgagcgggagaccacgctggaccgcaggcggacagcgctgctggagctgagcgaggccttgaccgagcggctcgggtccagcgagttcccgtcgcatgcccgcgacacgatcgacggctacgccgccgatatcgcgctgagcctggaattgctcgagcccgagccctaccggaacgaactgatccgcgtcatcagccgggagcgggaccggctgcgggcggaccgcaaccgctcgcacgacgaattggccgggatcatggccgcttacgacagctcgtttcccgacgcgatccccaacgacagcgacgtgttcgacgagcgggtgcacgattacgtggcgttgtgccgccggatcgacgagcgtgagctgcccgatgcctacgagcgtatgcagcgcctgatcaccgagcaggctccgggcgcgatcctgaacctgcacatgatcgccgacaacgaggcccgccggatcaccgagcagatcgcccgggtcaacaccggtctgggcgcggtggagttcaaccgcggcacccggctgaccctgcacgccgggacccggcacctggctgccgtcgacgaactcaacgagaaggcccagcgcatctcggcgcgcgtctcactggtcagcttcggtgacgagactgcgatgttcgagcagtacaccgacattctgcaactgcggaagttgttggccggcaacacacccgaggaccgccagtggacccgcgacgcgctcgacgtccgcaaccggttcgtgctgtactgcgaggagcgcgacgccgagaccggtgaggtgatccggacctacagcaactccggtgacaactccggtggtgagcaggagaagttgatggcgttctgtctggccggggcgctgagcttcaacctggccagccccgacagcaacgacacccggccgctgttcgcccagttgatgctggacgaggcgttctccaagtcggatccgcagttcgcccagcaggcgctgtcggcgttccgcaagttcggtttccagttggtgatcgtgtcgaccgtgcagaacagcacgacgatccagccctacatcgacaacgtggtgatggtgtccaagtcggacgcgtcggcgcccaatgcccggccggtcgcctcggtgacctcggcgtcgatctccgaattcgccgatctgcgaaagacttcgggggacgcggttccgagcgcctga

SEQ ID NO: 44565 - DNA, 1434 bp, Mycobacterium cosmeticum
atgcatgagttactccaactcaaccgcgacgtgcagtccacccgcgcggtccggctgctggccacccagaacctggccatctacgccacgctgatggagcggcacctgctcgagggcgtggtgcccgagaccgatctggtggtgcggctggaccgcgacctggaagacctcgacgagatcgagcagtccgggctgaccctgatcaagacgtgggccagccagggctggctgcaccgcgtcgtgaagggtgaccgcaacgtctgctacctgacccaggacgcccggcgggcgctggatttcgtccggggcatgcgccgcaacgacaccatcgccaccggcggttccatcaacggcatcgcctcccggctcaaacaggtcgccgtccgcgtcgacaacgatccggcacgcatccgggccggcatcgaggccgagatcgcggccctgcaccgcgagctggaggaactcgacgccgggttgcgtcccgagcccgatgtcacctcgatgtacgacgaggcccgcgccatcgccctgcagatggaacggctgatcaccgatatcggcttgtacggcaccatgatcgagcaggccaccgccgccctcgacgacccgatcgagaccaataccgaataccgcgaccggcagcggcagatgtacgccgactatcaggaggcctgggagtccgccggccgtgattcgcaccgggcgttcctgcggatgatcaacgaccccgagcagcgcatggcgttcgagggcgatatcgccgcggtggccggcgccctgcccgacctggacccggcgctgcgcaaggtgatggccgggttcttcgaactggtcgggcaccagatcgacgaggtggaacgcatccagcagcgctgcgcgcagcgggtcaagcggttcaccgcgttcggcacgctggagcagagccgcggcatcgcgcggcagctcaacgaggccatcggcgcggcccgcgcactgctcaaggtgtcgctgacggactcccgcctggacatcgacgtgccactggcccggcacaccatcagttcggtgggcgccctgagcttccggatcaacgacctgtccgcaccgaaaccggcggccatcgccgagggcgacgtggatctgtccaccttcgcggcactgaccacccaggtggacgcgcccgcgatgtcggcgatggtcaacgccgcgctgcgcgatgccccgttatccctgcccgacgcggtctccatgctggacaccccgtacctggggcacgtgatcgtgctgtggtcgtgggccctcaagcaacccgccgccggaggcggcaatccagatacgggcaagaccgataccgaaccggcgcgcgtccggttccattcgctcgacggccgcgaccgcgagatggaggttccgcacctgatgttcaccgaacccattgcgggagttgcatcgtga

SEQ ID NO: 44566 - DNA, 669 bp, Mycobacterium cosmeticum
gtgaccgatacgccagttgatttcgcctccctgcccgaggtcgaccgcaccggccgcaccgcgccgcagcagccgcgccggccccggttcgagggcgacgtcagcgcgctgcccgaccgtgcctgctgggcgctgcagcacctgctcacccgccgctacatcagcaacgaatccgacagcgatatctacagctggatcaaggaataccgggccgacctggcggtccggctgtccgaactggacctgcagttgcagatcgccgagggcgtggagatcgcgttcatcgagcaggcccggtacgagtcggcccggggcgtcaagctgctgcgccgggaaccgctgggcacctacgactccatcctggcgctgcacctggcgcagatgatgcgcgccggcggtgacgcgagtttcgtcatcagccgcgacgagatccacggcctgttcgccggggtgctcaacgacaccgaccgcgacgccgtcaccttcaccgcgcgcatcgacgccgccgtcgcacgcctggccgggctggagatcctgcgcaagacccgcgacgacgaggacagctacacggtcagcccggtgatcagcgccatcatgacggcctcggtgatcaccgaactgcagcagcagttcgaggcactcctgaagggcggggcaggcgatgagtga

SEQ ID NO: 44567 - DNA, 3429 bp, Mycobacterium cosmeticum
atgagtgagcagttccacctgtcgcggctgcaggtcatcaactggggcgtgttcgacggttaccacgacatcggcttcgggccggggggcgcgctgatcgcgggcgcctcgggcagcggtaaatcctcactgctggacgcgatctcgctgggcttcctgccgttcaaccggcgcaacttcaacgcctccggcgacaacaccgccgccgggtccagcgccgggcggcgcaccgtggacaagtatgtgcgcggggcctggggccagcgcagcgacgggggcaccagccaggtcatgtacctgcgcggtgagggcaccacctggtcggcggtggcggtcacctaccgcagcaacaccgggcgcgccatcaccggcctggtactgaaatggctgaccggcgaatcccgttcggattcgtccagccgctacgtgctcggcgacggcgatctgagcatcgaggatgtgtgcaaccggtgggcggcggggcggttcgatgcgagcgtgttcaaggacaccgggggcgagcgaagcgacgggaaatacacccggggcgagcgaagcgacggggaatatggaggttggcggttctccaccaaggtggagtcccagtatctggcccagttgtactcgtccatcggcatccggtcctccgacgccgcccagcagctgctcggcaaggccaaatcgctgaaaagcgtcggcgggctagaacagttcgtccgcgacttcatgctcgacgagccggacagcctggcccggctgcccgaggcgctcaagcagatcgacccgctggtggaggcccgcgagctgctggccgtcgcgcaacgcaaacgcaagatcctcggcgatatcgaggcgatccaggtgcgctacgcctcggagtccagcgatctgggcatcatcgacctggtcgacccgccgatggtgcgggcctacaccgatcacgtccggctgcgcgagtgcccggcccagatcgaggcgttggacgccaccatcacccagttggacaacgagtacgccgacctgacccgccagctgaatctggccaaggccgagggtgattcgctcaacgcccagatcagcggcgccagcgcgaatgtgggcccgctgcaggcccaggtcaccgccgccgaagcacaggccgaggaggtgtcgcgccggcgcgccgcgttcgaggaactggtcaccgcccagggcatcgacgtgccggacagtgccgacgagttctgggagctgcgtgaggcgctcaccaagcaggccaccgagatgctcggcaagctggagtggggccgcgaggcctcgaccgacgccgagtacgcccagaagtcggcccgcatcctgcgcgacaacgccgccaaggagctcaagcgggtggagcaggtgggctcggcgctgcccgagttcgcggtggcgatgcgcgaccacatctgcaccgcgatcggcgtggaccccggcgagttaccgtatgtcgcagagcttttcgacctgcgaccggaccagcagcgctggcgggtggcggtcgagaaggtactgcgtggtgtcgggctgcggttgctggtgcccgaccggcaccacgccaaggtgctgcggttcgtcaacgagaccaatatgcgcggccggctggcgctgcaccatgtccgcaacagcgccggcggcaccgaacccgagccgaacactgtgtctgcgcgatccgtctccgactcctcgcgaacgctggccggcaagctgttcctggtcaacccggaccacgcctgcgcggccgaggcgctcgacgtgatcaccgccgccggtgaccacatctgcgtcgacacccccgacgtgttcgcccggttccgccgcgcggtcaccgattcggggctgtacaaggaatccgaccgggttgccgtgaaggacgaccgcaggccgctgaaaccgtcggagtacatctaccagggtgacatcagcgccaagctggaagcgctgcacaccgagctggccgaggccgaggagtccttcgcgcgggcccgcaaggccgccgatgacattgctgcgcaacgccagcagtggcgggaccgggccgcggcctgcagggccatctacgagcagttcccgcagtggagccagatcgacatcgagaccgccgacgggcacgccgatcggctgcgcgaacagtacgaactgctgctggccgaccacccggacatcgaagccctgagcgcccgggccgaggaatgctggaccgacatccagacgctgatgacccgccgcggtgcgatccagacccggcgtgatgatctggacagccgccgcacccagctgctggagctggccgaccggctctccccgccggcggtctccgagccggccaccgagctgttgcgccggttcgccgccgagctgccggtcaccctcgagctgctcaaccccgagccgcaccgcgacgcgttgttcgccgcggtccgccgggaacgcgatcagctgaccgaaagccgcaggcgctctcatgaagagctgtcccgcatcatcgccaccttcgacacctcgttcccggacgccatcccgaacgactccgacgatctggacgagcgggtgcatgactacgtggcggtgtgccggcacatcgacgaacgggagttgccggacgcctatgaccggatgatgcggttgatcaccgaacaggcccccgacgccatcctgacgctgcaccgggtggccgagcaggagacccggcggatcagcgagcagatcgaccgcgtcaacggcgggttgagcgcggtggaattcaaccgcggcacccggctgacgctgcgcgccaccccacgcagcctggccgccgtctccgagctcaccgagatcgtcaaggcgatctcgcgccgggtggccgaggtcagcatgggcgacaagaaggcgatcctggagcagtacgccgatatcctgcggttgcggaaccggttggccagcaccgcccccgaggaccgcaactggacccgcgacgcgctggacgtgcgcaaccggttcaccttcgactgcgccgagtgggatgtgcgcaccgacgaactgatccgcacgcacagcaatgccggggacaactccggcggtgagcaggagaagctgatggcgttctgtctggccggtgcgctgagcttcaacctggccaatcccgacagcggggacaacaccccggttttcgcacagctgatgctggacgaggcgttctccaaatccgatccgcagttcgcctctcaggcgctggaggcgttccgcaagttcggcttccagttggtcatcgtggccaccgtgcagaacgccaccaccatccagccctatatcgacggggtggtgatggtgtccaagaccgaggccaccggccgcaacgcccgcccggtcgcgtcagtggccaccaagaccatcaccgatttcaccgccctgcgtaaggatctggcgtgcgtgtag

SEQ ID NO: 44568 - DNA, 1389 bp, Draconibacterium orientale
atgattattgagtttttgctaaatacattctcaaacgaacaaagctcaatttctactgaaaatattcataatcaattagctgatttcctggaatacaagcagattgaaaatgatgatgaaagcgaaatcaatgcttttgacacctacgaagagaaagcaaaaaagtacattttaaattggacaaacaaaggcttcttggccaattatcctgatgaacaaggcgaagtattctatgaattatctgctaattcaagtaaagccatagattggttggcaagtttgaaaaaagaagagtttattggcactgaatcaaagtttaacaatatttttaatcaattgaaagagttggttgaatttaccaatgaagatgctgaaaaacgaattgagttattagaagaaaagaaattggagattgaacaacaaattcaacgaataaaaattggagaagatgtaaaagtgttcgaagaatttgaaattgttccgcgcttcaaccaacttaatcaatcggccaaagaactgttgtcagactttaaggaagtcgaagataatttcaaagaaataaccaaaggtatttatcaaaaacacgcagacggcagtttaacaaaaagcgacatattggaatttactttcgatgcacttgaagctttaaaagaaagtcaacaaggaaaaagtttttatgctttttggtctttcattttaaatccagaattacaaaacagatgggaaagtctgactagagaattatacaaaacattagaggaaaaatcaattcctgttaacgacccattcctaaaagggatgaaaaaacatcttcacggctctggacaaaaagtatataaagcgaatgataaaatggcagaaaaattgagccgtataattcgtgaaagtgagagttcaaaatcagaagcaactaaaaaaattatccaagaaataaaaaaacaacttgtagaaatcagcaagacaaagaaaaagctaaaaccagacatttcatttgagttggaaaccgaaactgaaatcaatattttattcgaaagaaaactaaccttagaacaaaaagaagaaattagttatacggacaaaccgcaagttgcaaacgaagacatcacttcttccaatcatttaaacaaattattttctcaatcaaatattgacaaagaattgctgagaaaaaggataaaaagtatacttaaagaaaaatctcaaacaacgcttttagatgtgattgagaattatggtggacttgaaaaaggtttgcctgaactgtttggatacattggcattgtaaaagaatttaaacattcaatcaatctcgaaaaaacccagaatgttgcatttgatgttgaaaacaaaaaacagattaaaattccagaaattatattaaccaaatga

SEQ ID NO: 44569 - DNA, 579 bp, Draconibacterium orientale
atgaatagtttagaacaaaatataaagccatacagcaaagcaatagtaaaattgctcaaaggtgttattgaccgcaattcaaatgaatgggaagatttaattctttatcaaaatgaaattcaggaatacattagccaaattggattggaacttattttaaaaaaagatgatggatttgcttttgtcaaacaatttgaagacaacgaaggtaaaactctcggtttggtaacacgacgacaaatcggatttgaaacctcaatcgtacttgttgttttacgacaaagtttagaggaatttgatagtaatccaacacaattggcaacggaaaaattcataacagatacagaaatcaaggatgaattggaactgtttctacaggaaggctataataagttgaaatttcagaaagatttggaaagttacattaaaaaggctgtagaattaggctatttgaaggaaataggcaagaaagacaacgaaacgaaataccaaattcatcgaattatcaaagaaaagataacactggatatattacaggattttaaaataaaactacaggaatatgttgagtctgtttag

SEQ ID NO: 44570 - DNA, 1149 bp, Draconibacterium orientale
atgattaccccaccagaaataaagaaaaaagctgaaagaaaatatgtttcatttcttcaatcattagttctcaacacgccttttgagaaactcgtaattcgaggtgacaaaacatatacaaaatcgtcattacctgaatttgaaaaagaaatacaactaattatcacccaatccaaagagaaaaaaggatttggttacaccttagaatttcaacaagtaaagacaaaatatttaggtacacaagatttgccgacttctatttattttgatactgaaattgattttttgaagttcttaaaaagggaaaaagaagtcgaattattccgtgaaagcattatcaaaatcataaaaacatttccagaacttaaggaatggataattaaaaatccaataaggattattcaaaaccaaacggaatgggaaagcattttgaaagtgtgtcaatatttcacacaaaatccaaatccaaatttgttcataagggagctaccaataaatattcatacaaaatttattgaacgaaatcaaagtgtcatcaaagatttgcttgacattttaatttctgaacatattaataaggaagaaaagcaatttgaaaaaagatttaatctgaaatatgcagagccgcaagtacggttcaagatacttgacagagaaattagtcgaaaattctttttgggaattgatgatgttgctataccaaaaagtcaatttgaagcacttgatttaccagttgaaaaggtaattgtttctgaaaataaaacaactttttatactacactgactcttcccaaattagaaaaagcgatagccatatttggaagtggttttagtgtttcaaatcttaagaatgtttcttggcttgaggataaagaattgctatactggggagatatagatgttcaaggttttgagattttatcgcagtttaggggctactttccacagactaaaagtattttaatggatagacatacatttgacaaattctttgaaaatgataatggtactccctctggcatatctgcacaattaaacctaacagacaaagagaagcaattatatgacattttgaaattaaacaactggcgactggaacaagaaaaaattccatttgactatgttaacaaatattttgagaatgaataa

SEQ ID NO: 44571 - DNA, 1521 bp, Corynebacterium glyciniphilum AJ 3170
atggtaatcatgcgtgcagaggcggcctatcaacggacagcggcggccttcaagaacccgaccctcgacctgctgcacggcaggtacgcgccgttcgtcgtcgcggcgttgtcactgatcttcaccccggaccgtcccaccgtggcgatttccgacgcacacgtcgaggtcggcgacgtcgtcgaggagctccgcgctgcaggatacgacgaggacgaccggggctcccggggtctgccctccgggaacggtcgggagatctgccgctactgggtccgcgtcggctggttggttccccagatcgaggacgacgtcgaggtctaccggctctccgcccaggccgtcggtgccctggagatcgtcggtcgcagtggtctcggccgtgcccgggtgtcccgctcccgcgtccggaccctgttggacgcggtcgagcacctcgcccacgaggccgagacagacccgcaggaacgtatcgccacgctgcgcgcggaacgtgcggcgattgacgaggagatcgataaactcgaacgcggggaggtcgacccggtcgatgacgatcagctgctcgaggaagcggagaacgtcgtccacctgtcccgcgaacttcccgccgactttgcgcgggtcgcagagtcgatcaacgcgatgcaacgcgatgtcgtcgccgacctgcggcgggacgtccggccgaccggtgaggtactgcgggagtatctgcaccgcggccagcacgtcatggaggccacgcccgaggggcgtgcgttctccggcgcgctcaacctcatcggcgacccggagaacatcgaccacctcaccgatcagctcagcatgctgatggccctgccgttctcccggcacatgagtgccgatcaacgccgcgaactcctcgccatcgcccggcgggtcgagcagggtgtgcaggaggtgctgacggcgcagcgtcgtgcgtcgcacgtgatcacggcgcaggtgaggacacatgatcctgtccgtgaccgcgaggtcgatgatctgttgcgtaacgtgatgtccgggctgcagacctggatgcaggagacggcggccgacgcccgcgcacacgacgccgtcgccccgctccgtagcttcccgaccgcacacctcggccatctgcggcagacgctcaatgatctccatccacccggagctccggaaccgctgcgtcgcgaggacgaggagggctgggacaacccggacattgagttcctccatgctgacacccgcgcctggggcgggccgcactacccggaactggagcagttcgtcgcggacctcgacgggccgttcgacctggccacggccttcggcaccgtgccggacgacacccgacgccccgtcgacctgctgggactgctggagatcgcccaccgtaacggcatggaagagggtgatgacgtttcggtcgtcgagacactgcgtccggacgggaccgtgcgccgattcgccttcggtgccgtcaccgcccgagcggctgcgaacactgtgaaaggatcgaccgaatga

SEQ ID NO: 44572 - DNA, 657 bp, Corynebacterium glyciniphilum AJ 3170
atgacagagcccaccgatccgcccaccgatcccttcatcgataccgtgtccatggagcaggacccggacgaatgcttcgccggtgacaggggagtgctcgacccggaggtacgccgggtgctggtgcgtctgctgcagcgccggttcctgcaggctgaccgtaaccgtgacgactggaaagtcctgatggacaaccagcaggtcatcgagtcgcgcctgcatgatctgttcgtgcggctcgtggtcgattccgaccggggagtcgcctacaaacagcaggtgcgctccgacgaactcgacgtgccgatcctgcttcgcgacgaggcatacacccgtgccgagacgctggtgctggtctacctgcgcaccatctaccaacgtgaatccactgccggcgaactcgcagcccgggtcgatgtcgaagaggtcgagcagaccgtgatgacctacttcaccgaagccaacggtgacatcgcacggcggcagaaactgatccgcaatgctctggggcgcctgcggcaggaaggcatcatcgacgaggagaccgagggccgctaccggatcagccccctggtcgagatcgtgctcagcgccgaccggttgcgggaactcgacgactggctgcaagaacagatacagggaggttctgagcagtga

SEQ ID NO: 44573 - DNA, 3342 bp, Corynebacterium glyciniphilum AJ 3170
gtgacaatgcttgacacgttgttcggactggtgccggcggaatcccgcgggcagcagtggttggccgacgagcttcacctggtcaactggggcggatacgagggagcccaccgcgtgaagttttcccccgaagcgacgctgctctgcggcggttccggttcggggaagtccacgctgatggacgcctacattgctctgatgatgccgcacaccacaccgttcaacggtgcatccaacggtggtgtcaccgggcgtccccgcggggaagaccagcgcaacatcctgtcctacagccgcggcaagatcgatgagtcccgcaccgatgacggtacccaggtcaccgtgctgcgtggtgacggatgcgatacctggaccgcggtctcgatgacctggaccgatcacgacggctcccggttcaccgccgtgcgcgcctggtacgtcccggcctccgcccgggtgctggaggacaccgtcaaggtccgcggagtggtggagggagatttcgacccggcctctctcgagacggcagcgtcccagcgtctggcggattccgcggtcaaggccgctggcctggagacgatggccaccgaccgcgagttcctggcacgggtgcattcggttctcggcatcggggccgcgggtgcgggcgccaaggccatgagtctgctggcccggattcaggcgggtcagcagatcaccaccgtggacgaactgtacaaacgcatggtcctcgaggaacccgagacgatggtcaccgcggatgccgtcgtcgcacacttcgatgagctggagagcacccggaccaggatggtcaccgcacagaagcaggtgcgggtgctgcagccgatccgggggatccggtcgaagatcgaggagtccgccgagcggttacgcctgctcgacgagatcgggcgcttctcggacccggcgtcgttgacagccctgtggcggaccggacgccgactggagctgctccacgaggcggagaccgaggtcaggaagcagaagcaggcggcggacgctgacgtccgggcccagatggcgctggctgaggcagcagagacagaacgcgacggcctgctggacgtcctgcgtcactccggtggtgaccgcctggacaccgccgagcgggagcttgcacaggtggaacgtcggctgtccacggtccagcaggcccgcgcacggttcgacgagaacatcgcctgcctgaaccaggacgtcgacacagaggcggatttcactgccctggccgagcgcgcccgtgcagctctcgctgatccgggggcgaagacctccgcccgtgacgactacgcagaatcgcgcgtggagctcaagaagctgcgacgccagctcgccgagctggagaccgaacagcggtggaccgagcaacgcagggacaacatcccggagcggctgcacgtcgctcggcggctcctcgccgacgccgcagggctgtcgaccgaggacctgccgttcgttggtgaactcattgacgtgtcgaccgaatacgaaccctggcgagaggcattcaacctcgccctcggcggtttcgccaccacgatgctcattgacgccgacgacctggcccgcttccgggcggctgtcgatgcggtacgcacggacgttcggctgcgctacgaaggtgtgcacaccggctttgcccagcgtgaccgtctcgacccgcagcgcctgcccggccggctcgactaccgggagaccgcgttcaccgggtggttgcaggaccggctggaacgccagttcggcttcttctgtgtcgattccaccgacggactttcagcgcggcaacccgcactgacgatcaccggccaggtgtcccagggggaccgcggcgcccacggcgggcacggcggacgtaatgtgctgggattctccagccgacgccgcctggcagaactggagggagacgtggccgacctccgagagaagatccgggtcgccgaggacgcggaacgccgggcaggcgccgaactggacgacctggacgcccgccacgctgcctatgcacgggtgacggacgtgagctggaaccagatcgacgtcgccactgtcgagcaggagcgcgaacgctgggcgggcatcatcgccgacatcaccgacggcaatcctgagatcgccgaccttcagcagcagattgccacgttgaagacgaaagtcacccgactgcaggagagcaccggccgggcgaaaggcgaccaggagcgactggcccggcagtgggccgacaccgtcgacgaggttgacgcggcgcaggccgccctcgatgaggcggagggcgcggagcggtcgctcagcgacgcccagacgtcctacctgaacgagcgcttcgacccggcgggcggtggggcctccggctcccggctggcccggttcgacgccgcgctggacaccgcctcccgtcgcctggaggacgatcgggcagccgcccagtccaccgtgtcggagcagcgcgagacactgcgtcgcaccctggagacgttcctggacacctggccgaaccccacgctgcgcgccgatcccgacacttccctgaaggacttcgagaggatcctcgaggacctggagaccagcggactacatgagctggaggctgagtggaggaacagtctgctcaccctgtcgggcaatgacctgaccaatctggactcgacgctgggccgctccctgcgggagatccgtgagcggatcgagccgatcaaccggatcatggaaaacctcccgttctacgacgacgaccaccggctccagatcgtcccccgggagaatcagtcggaggtgcggcggcggttccgcaaggacctgcgtgacgtccgccgtttgatcgaggacgccgccagcgacgccgaacgcgagcaggcttatgagcgcatggcacggctgatcaaccggatccgccggacggccccggacttcgccgacctcgtcgacgtgcgcaaccatgtgcgggtcagcgcggagaagattcacgccgagtccaaggagcatgctgcgctctacgaccacatcggtgagaagtctggtggggagtctcaggagttgatcgccttcatcgtcggtgccgcgctgcgctaccagctcggcgacgccgacgccgaacgaccacgctatgccccggtgttcctggacgaggcgctgatcaaggctgacgcacacttcaccaagcgtgccatcggagcatggcgtgggctgggattccagctggtcatcggtgctccgaatgacaagtacagcgcgatcgaaccgcatgtggatgttgagtacgacatcctcaaggacactcagggccgttcctgggcgaagccaaaggtggcgttgctggactag

SEQ ID NO: 44574 - DNA, 1500 bp, Pseudomonas aeruginosa BWH033
atggaagagagtactcagcaccttaccgaacgttatgtttcctctcgtagccagcatccggcttggctgcttctggcctcccgaagagcgcctctggtccttagctgtctccgcactctattcgaaagggccaacgatggaatcgttgtagaggatgcgctgcaaggcttgtcagagctgttgtccagctatgcaagccaagagctattcgagatcgatgctgacaacgtccagctccaggcggggcgcgagttgcgggaatggatcaagcggcgattgatcgtcgagcgtgaaggcagagtttatgcaaccgatgctctagaggtcgcaattcagtttgtagagtcgctagacagccgaatgatgacgtctacggcgtcgcgtttgtctgtcgtacagcgcgaaatcgagaatctcgagaccaacctgaaccccagccctgctggccgcatcgccagcctacgtcgtcgaattcacgatctcgagcttgagctgaagcaagttgaagcaggccacattgtcgttcttgatgaggcccaggctatcgagggaattcgagaggtatacagcctggcgaccagcctgcgcgctgatttcaggagggtcgaggactcttggcgcgacgcagatagagcgcttcgccaatccatcattagcgagcagtaccaccgtggcgacatagtcgatctgctgctcgatggacaagactcgctattgagcacacctgaagggcgggtgttcgatagcttccagcagcagctccgacagtccattgaactggacgatatgcgtgcgcgggtccgaacgattcttcggcatcctgctgcttccaaagcgctccagcgtagccagcagaaagaaatgcggtggctagtcctgcgactggtccaagagtctcagtcagtgctccaggcaagagcgcgcagcgagagggacgtcaaaggtttcatgaagaccgggcttgcccttgagcaccatcgcgttggccaactgctccacgacattttcaatgctgcgctggggttggattggcagcgccaaagccagcgtcgaaaagctgtgccactgcctcctatcgggattccgatctcgggcatcccgtctgttgagcgcctgcggtttaaagacgtcagtacgggcgcggatgcagagctgaatctagatgttgtttcagctgggttagacgaaatcgatgcggacttttgggatgcatttgatgggttggatcgaaatgcgctcatccgcgaaaccctgtcggtcttggctcaacagggaaggccgttaagccttggagaactagcagctttgctgccgcctacacatgacctggagacattttctctttggttagggatggcccgtgaggcgggtctccatgtgtacgaggatgaggctgagagcgtggagttggttgactcagaccagcagcgttggcggttccatcttcctctcgtcggtatggatagcgttgcactcaaggatattgattgggagttgtga

SEQ ID NO: 44575 - DNA, 738 bp, Pseudomonas aeruginosa BWH033
atggcgggaattttcgatcagttggcaaattcggcaggggatgatcagcggccggcagagctgcctgctgatgagtcagaacaagcggcgccccctcagcctcacgagccatccgacgatagtggtcgtactcatggtcgcattagagagaccgtgcaggagcttcttaagtacgggttgctggaggacagtcataaacccaacctctatcgcttagccgtcactcatgtcgctgaaattgcgagcgtccttgagcccctcgatctgggcgtcagtatcgacgagataagagggcttgcctttgtgacagtccgacaggacgtacgcgctgagccagatgagtggtcacacccactcgtgcgaaggcagcgcctgaacctcgagcaatccctcctcatcgcgatactgcgtcagcacttcattgtgtcagagcaggaaagtggtatcgggacgactgttgcccaggtcgctgtggacgatttgatcccgcagctacaggtctaccttggcgatttgggtagcgatgcaaaagagcgcaaccgcgttctcacgctactcgatcagttgaaaggacatggtttggtgtccactccggatgcgcatgacaacatcatcattcgcccgatcattgcccacttggcgaaccctgagaacctgcaggctctgctagcttggattcaggaccaacagcgactggaaagtgaccccattgacgcggccatggaggtcgaagagtga

SEQ ID NO: 44576 - DNA, 3306 bp, Pseudomonas aeruginosa BWH033
gtgaagcaggaagctttgtggcgggatagcgaaaccttcgttctcacctcagttgagatgtttaactggggcggctttcaagggctgcatcgggcgccgattgacggtgctgggacagctgtcattggcccgacagggagcggcaagactaccctcgtcgatgcgcttatgaccctcatctgcgcgagtccgcggtacaacctggcatccaccggtggtcacgacagcgacagggatcttgcctcgtatgttcgtggtgtcaccggtccaggagacgggagtgctgggcagtcccacatcgctcgttctggcaagacggttacaggaatctccgcgacgctcaaccgtgagtctgggatggttcggcttggtgcgttgctctggttcgagggcactagttcatctgccgcagacatgaagaagctctggatattcagcacctctcctgaccatacgcttgaacactggttgagcgttcagcacgagggcgggatggctgctctgaataagatggggagctcggaagcggggatctggacgtaccaaagcaagaagcagtacctcgcccggctacgtgatttctttgaggttggagagaacgcattcaacctcctgaatcgagcctcaggactgaagcagctcaatagcattgacgagatttttcgtgagctggtgctggatgatcgtgcggcctttgatcgtgctgcagaggtggctgacagctttgatgatctcactgaaatccatcgtgaattggatgttgcgcgccgacagcagcgtacgttggagcccatagctgaactgtggtcgcgctaccaatcgttggaaagccaggcaagcgagaaggcagccttagagcgacttgtacctgtttggtatgcggagcaggggcaccgtttgtggctggcggaaacggaacggttgcggattgagagtcggcaggccgaggcggaggtggcatctgcccacgagctgctcgaggcgcaaaggcagcgcactgatgagttgcgacagctctatctgctgaaaggcggcaccaacattgatcagctgagagcccgcgtgaatgattggagcaaaattgcttcgaagcgtgcgatcgactcaaagcagtatcagtcgctggctcggaatcttggtctttcagatgatctcgattcgttggtattgcaagagaaccaggctacggcagagtcgcgccttgtcgctctgaggtcagacctagagcaagccaaactgacgtccttccaactgggcgtcgcagagagtgagcagtcgagtttactcgcgaggcttaaaactgagcggcaagaggttgagcgccgaccgggctcaaatttgcgtccggatttccaaagccttcgctctgatttagccgcggagctcggccttgacgacagcgcactgccgtttgtagcagagctcgtccaggtcaaaagcgaagagcatcgttggagaggggccgtcgagcgggcaattggtggccaccgcctacggattttggtaccgccgcagtccatcgagcatgcccttcgttggatcaataaccggcataaccgactgcatgtccgcttgctggaggtgaagcaccctgagtcaccagcagtcttcatgccggatggctttactcgaaaactcacatacaaggatcatccctaccgcgaggcacttaaggcacttcttgctgagaatgaccggcactgcgtcgacagcccagaggtgctgagatctactcctcatgcgatgactgctgaaggcctcatgtcgggtaaggcccgcttctacgacaagcaggatcaattgcgattagaggatgactggctcacgggcttcgacaaccgcgaccgtttggcccagttggctagtcaaattcaggaagtcactgagcgacaagcgcaagctgctcaagagctcaaaaatgctttagctgcggttagcttgcttgaaggccagattcgggctttcgagcaaatcagccatgtcgattttgcggacattgacctaccgggagcgcagaagcagctcgacgagctgaatcaggggatccaggaattgctccaacccgatactgatcttgcggcagcaaagcaggccgcagaccaggcggcggagctggtcggcacactagacaagcagcatcaacaggcgatcgcaaagaaagctctggtagatacccgcttcgagcacgcggcaacgagtacgcgcaaagcgtttagccggtcggaagtgggtatgagcgaccaggagcgtgagctagcgattaggtactttccagaggtcgctccgaagtatttggcagagattggcgaacttgagctgcagttcactcggagtctgcagggtgagatcagcggcctcaaggacaggctcagtaagcttcaaaccgagctcgcaaagaaaatgtcggatgcgctgaaagaggacactggggctctggtagacgcagggcgagagctcgatgacgtgcacaaatacctggatcggttgagggtgctcactgaagaggccttgccagagaagctgaagcgattccgggactacctgaaccgctcctccgacgatggtgtcactcaattgttgagctacatcgagcagcaggtagcgctaattgaggagcgactggacgatctgaacagtacgatgtgccgggtcgacttccaggcggggcggtatctgaggctgatcgcaaacaaggtgtcgcacgacagcattcgtgcgttgcagcgtgcgcaacgtgccctcaactcggcgaggttcattgatgacgaaggggagagtcactacaaggcccttcgggagctcgtggatattctgcgcgaggcttgtgagcgaaatcggactcaggccgctcgcacactactggatcctcgcttccggttggagttcgcggtctcggtgatcgatcggaatacaggcaacacaattgaaacccggacgggctcacaaggtgggagtggtggcgagaaagaaatcatcgcctctcatgtcctaacggcatcgctgagctatgccctgtgcccagatggcagtagcaggccactctttggctccatcatcctggatgaagctttctcccgaagctctcatgccgtcgcggctcgaatcatcggggctctccgggagttcggtttgcatgccatcttcatcactccaaacaaggaaatgcggctgctgcgccaccacactcgatcggcgatcgtggtgcaccgaagaggtatggattccagtttggtttcgctcagctgggaagccttggatgagcactatcagcagcgaatgaaggtgcagagtgaagccaccacttga

SEQ ID NO: 44577 - DNA, 1059 bp, Pseudomonas aeruginosa BWH033
atgcgaataggggttccaagcgccagagagttttcgcagaaccctggcgctgtgcaacgccatgctgagtcgtggaagaaagtggcaatcgggttggtggattgggagccagtcagctatcgcgctggcgctgaaccaatccttcttccttctcagtggtgtctacgcactccatcggaatggatcgctgcaacaatggatgccgcggtttgtagggaatatgcagaccttgagcatatcgttgagagcgtagatgtggctttcagagcgctgcttgttactcagcgcagcctctggctaaagaaaaagccagaggaggtcattgctgctgcagatttggccctgcgtctccagccaggatgcgccatggggcggcccctgcgcttgttggccgagcatggggtggacacgaagttcttcgagcggaacgctggactgcttacgcgactgctggatgagcgttttcaaggtgagccttcggagatggggctaaacacgttccttggggctcttgaagaaaatgagcattgggtccttgtggcgcctttgtgcgatgggctacttccattcaagaagctccggctcacaacagctcagctaaaagagtctcggcttcctggttctcggctcattgtcgttgagaacgaaaagtgccttcatcaactacctgctcttgatgacgccgtcgcggttcttggatgtggcctcgatctgcagtggatggcggcgtcctggttacgggagaagcagctagcttattggggggacatagatagctggggctttctaatgctcagtagtgtccgagtgctttgtcccgatatttctgctcttctcatgtcaagagatgtgtatgagttatacgccccagggtccgcagtcgaagagcccgtaacggctcaggtataccctccgtccggactttgcagtgaggaaaaggaactttactcgcacctattagggcaaaaaaaggggcgattggaacaggagtacttgccttcagccgctgtcgaggcagcaatagacctgtggatagataggacttctaatgacgtttag

SEQ ID NO: 44578 - DNA, 1353 bp, Pseudomonas aeruginosa BWH058; identical to SEQ ID NO: 43763

SEQ ID NO: 44579 - DNA, 750 bp, Pseudomonas aeruginosa BWH058; identical to SEQ ID NO: 41752

SEQ ID NO: 44580 - DNA, 3306 bp, Pseudomonas aeruginosa BWH058; identical to SEQ ID NO: 43765

SEQ ID NO: 44581 - DNA, 1146 bp, Pseudomonas aeruginosa BWH058; identical to SEQ ID NO: 41754

SEQ ID NO: 44582 - DNA, 1455 bp, Pseudomonas aeruginosa BWH058; identical to SEQ ID NO: 44175

SEQ ID NO: 44583 - DNA, 756 bp, Pseudomonas aeruginosa BWH058; identical to SEQ ID NO: 44216

SEQ ID NO: 44584 - DNA, 3387 bp, Pseudomonas aeruginosa BWH058
atgcttgaggctagcgaggtaagtctgagtgagttgttcagcaccggtcagatccgtctagccgagctgtcggtatacaactggggctccttccatggcctgcattccgcgaagatagaccccgagggcaccctcattaccggtgacaacggtgccggtaagtcgacactcattgatgggttgatggcgctgttgctgccctccagcaaggcgtcgttcaacatcgcggctgctcaaggggaccgtacggatcgtaccttgatgtcctatgtgcgaggaaactatggcaaggcccatgatggcagcgagacggctacgctgctgaaacgctcaggggcgaccgcaacggggcttcgggcactgtaccaagcggacgatggttcgaagatcaccttggcggccctattctggattacccaggccagcaactcgctcaacgacctcaaacgcctttttgtggtgggtaagcgcgatgtgggcttggatgagctgttgcatctcttcggtgagggcaatgcccgtgtgctgaaacagcacctcaaagaggacccgctggtcgaggcattcgattcgtttaccgagtatcaagagacctatgtgcgactcctgtgcatggagaaccgtaacgcaccagccctgctctcccgggcgctgggtttgaagaagattgatgacctcaccagcttgattcgagatctggtcctggagcccagtcaggtcaaggagcatgcccggcttgcggtcagtgaattcgatgacttggtcagcgtccatagcgaactcgatgatgctcggcgacagcgggatgccctgattgagttgccagagaccagccaagcgctaaatcaggccagggaggagatgcggcggatctcagctgagctagccggcctgccggtctactttggcgaacagtgctctcgactgtggcaaatgcgcctgaagaaatatgaggcggaactgcttcagttggcagaggaaatgacccgccttggcgctttggaggagcaagcaacggaacgggtacaggcattgttccatgcctaccagtcgcaaggtggtgagcgactggaggggctgcggaaggacttgaaagcggcaacgcaggtgcatcacgacagcgtgcgcgatgcgcgcctgtatcagatggatgtacgagaccttagtctgcccgacacgctgtcgctcgacgtattcaagcaaaatcaggtgagagcgcaaacggaactggcggatatgccggcgttgcgtcaagcgcgccaggatcagttcgcttcgtcggcagcgaacctctcccgtgagcaaacacagctcaaggagctggtaggtgaaatcgaagacatggagtcgcgaccggactccaacattgaaccttcctatcagaagctccgcgaccaactggtagagagcttgtcgctagatcctgcggaggttgttttcgttggcgagctgatcgatgtcctggaggcgcatcgaccttggcaaggcgccattgaacgggcgctgggagggcatcgcaccacactgctggtgcctgatgagcgatatcgcctggtgaccaagtggctgaacactcgccacacgggtctccatgtcagggtgcaggttgttccgctgaaccagcatccgcaggttgctgagttcctaccggatggctttctaaaaatgctggattggaagccgcacccctatcgtgattggctgaaaaagcacctctcacgcttcgacctgcactgtgtggcatcaactgaaatactggaccagaccgacttctcgatgaccatccagggcttggtgcacctggataaagggcgatttgagaagaaggaccagcagcgcattgataacccacgtttctggtgtttgggattcagcaacaaggggcgtctagcgacgttaaggaaggatcgtgtcgagttggaggcagatgtcaagaagttggcccagcttacagcagatgcgcgcatggccatggatgacctcgagaagcacactcgggtgtgggagcgcatcgcccagctcacctgggcggcaattgatgtccagtcagcgcaagatcggatgcagtcgctgagggcggatctagaggcgcttgaacggcctgatagtgaattgggagtggcgaaggctcggtgggagcaggcaggtgctgagctgaaggaagtacaaggcaagaaagaactggtcagcaaaaaagtcggggggctggagagcgacaagctcaaggcgaaccaacaactggagctggcgttagatgccgcccggaccggtttggtggatgaggtcagggagttgctttctaagcgtgtgggacagctagaccttgacgatttggagatggtttcagaactcgaaaatcgccatcgatcagcgctggaagaggcccgtaagggggcccacaaccgagagtttcgagcatcgaacaaggctagcgggattgtctccgagttcaaaacaaaatggccgctcatcgccaatgattggctcgccggcgtggatgccctagaagagtacgtcgatcacctggcccatttggagcaggaaggattgccagacctggtcgagcgtttccgagagcgcttgaaccgcaacgcaacacagtcgcttgctcgaatcagccaaaccatccaggccgaacgtgaggacatccaggaccgaatcgaaacgatcaacgatgttctggaacgcacggagtttcggcagggaacctaccttcgtctgggaagtcggccagaaatcttcgaacacgtgaaagcattcaatgcacagttgatgcgcgtgctggcgcgagctggaagtgacgatcatgaggctcgctttgtcgagctgaaggagctgatcgagaaactggagaaagccaccaatcctgcaacctcgggcaatctagagagtctgcgactgttggactcgcgctaccagctgtccttcttcgccgaggaagtagagaaaggcagcaaaaaggtacgcgatgtgctggagtcttccagcggtaagtcaggcggggaaaaggagtcgtttgccggcacgatagtagccgccagcttggcttacgtgctgacgcccgacggcagcgaccgtccgctctactgcaccgtgttcctggatgaggcgttctccaataccgccgaggcggtgagtcgccgggtgctcaaagtcttccgggaattgaagatccacgtgaatctgatcactccatacaagaacctcaaccttgcacgtgaatcggcgcgctcgctgttgatcgcagagcgtgaccaggacaagcatgagagtcggctctgtgaggtcacctgggaggaaattgacgagcagttggcgcgtcatgaacagcaggggctgcaaaaggcagccagttcactggggatcgaagtggagccagatctgtga

SEQ ID NO: 44585 - DNA, 1194 bp, Pseudomonas aeruginosa BWH058; identical to SEQ ID NO: 44178

SEQ ID NO: 44586 - DNA, 1353 bp, Pseudomonas aeruginosa BWH055; identical to SEQ ID NO: 44235

SEQ ID NO: 44587 - DNA, 750 bp, Pseudomonas aeruginosa BWH055; identical to SEQ ID NO: 44236

SEQ ID NO: 44588 - DNA, 3306 bp, Pseudomonas aeruginosa BWH055
atgaagcaggcactcctttggcgtgacagcgagaccttcattctcaccagcatcgagctctataactggggcggctttcagggctatcaccgtgccgagatcgacccctccggtaccgccgtgatcggcccgacggggagcggtaaaacgacgctggtggacgctctgatgaccttgctgtgcgccaatccgcgctacaacctggcatccacgggcgggcatgaaagcgaccgcgacctggtgtcctatgtccggggagttaccggccccggggacggaggtatagagcagtctcatatcgctcgccagggtaagacagtaaccgcaattgcggccacgctcgagcgtgatggtgcgcaggtacgactgggggccgtgctctggttcgaaggcacaagctcctcggcatcggatctgaaaaaactgtggctgttaagcgagtcccccgagcagactctggagcattggctcagccagcatcacgcaggcggtatgcgggctttgcgtcagatggagaaggatgggacgggtatctggccttatcccagcaagaaagctttcttggccaggctgagggattacttcgaggtcggtgaaaacgcattcaccttgctcaaccgcgctgccggcctgaagcagctcaatagcattgacgagatctttcgcgagttggtgctggatgaccgttccgccttcgagcgggccgccgaggtcgccggcagcttcgatgatctaaccgacattcaccgagaactggaaacggctagaaagcagcagcgctcattgcaaccggtcgccgatggctgggagcgttaccaggtcttgcaagaacagctgcacgataagcaggctctcgaaggtatcctcccggtttggttcgccgagcaggggtatcgactgtggttggctgaaaccaacaggctcgagaaggagtacaaaaaggccgaactggatcaggagcaatgcaaaagtcagcttgaggcccagaaaggtgtggtcgatcaacatcgccagcgctacctgcgagtagggggcgcagggatagatcaattgcgcgagcgcatcgctgattgggtgagggagtgcgataagcgcagcctgaaagccgagcaataccaactcttggccaaaggccttggactagcggatgagttatcggccgctgctctcaaggagaatcagcagcatatcgcggcacgcctggaaatactggaccaacaaattactgacgcgcgccaaaaggcgttcgacgcaggcctcgtccagcaggaactcaatggtcgcctacagaccttacagcaggagggtgctgaggttgagaaacggccaggctcgaacctgcccgggcaatttcatgctttccgaagcgatctggcgcaggcgcttggtgtcaatgagtcggccctgcctttcgttgccgagctggtgcaggtcaagcccgaggagctggactggcgtggcgccatcgagcgggcaatcggtagccaccggctacgcatcctggtgccgcaggactcatcccaggccgcactgcgttgggtgaatcaacggcacaaccgcttgcatgtgcgcttgttggaggtacaggagccgacgtcgcgccccgtgttcttcgacgatggttttacccgcaagctgaccttcaaggagcatccgtaccgagaagccataaaggcactgctggcggacaatgaccgccactgcgtcgaaagcccggagcaattacgtcatacccctcatgccatgacggcccaggggctgatgtcgggcaaagaacgcttcttcgacaagcaggaccagaagcgtctggacgaagactggctgaccggcttcgataaccgtgaccgtctggccttcctggctgagcagattcgcgaggtcaatgagcagctcgagccagccaagctcgccttggatgctgcccagggcgacgttcgtcagttggagactcaagcttcgctgctgaatcgtgtcaaagaactgcagttcgaggatattgatctgccgggtgcccagagtcagctggagtcgctgcgtacgcaactggccaccctgacgcgccccgattctaaccttgccatgatcaaggtcgagctggatgcggccgaggccctgcaggagtctctggatcaacagctccgccaactgatcgaacagtacgttcagttaaaaactcagtttgaccaggccgcatccgctacccgtaaggcctataacagcgcggagaaagggctgaacgatacgcagcgtgaactggcgcaagcgcatttcccgactctgaccgcggatgacctcggcgatattgtcgagctggagcgcaagcatacgcgtgagcttcaagggcagctcaaagcgcttggcgagaaactgggcgatcagaaatcagagcttgccaaacgtatgtctgatgccctcaaggtagacaccggggcgcttgcagaggtcgggcgagagctggtggatgtccccaggtatctggagcgtctgcgtgtgctgaccgaggaagccttgccagagaaactcaagcgcttcctggaatacctcaatcgctcctcggatgacggcgtcacccaactgctcagctatatcgaccatgaagtctcgatgatcgaggaacgcctggatgacctgaatagtacgatgcagcgtgtcgactttcagcccggacgctatctgcgcctggttgcaggcaaggtcatccatgaaagcctgcgcaccctgcagcgcgcccagcgccaactgaactcggcgcgtttcatcgatgatgaaggcgagagccattacaaggcattgcaggatcttgtggggttgctcaaggacgcctgcgaacacagcaggaatcagggagccaaggcgcttctggatccgcgcttccgcctggagttcgcagtatcggtgatcgatcgagaaagcaggaatgtcatcgaaacccgaacaggttctcagggcggtagcggtggcgagaaggagatcattgcctcctacgtgctgaccgcttccctgagctatgcgctttgtcccgacggcagcagccggccgttgttcggcaccatcgttctcgacgaggcgttctcgcgcagctcccatgcggttgcaggtcggatcatcgctgcgttgagggaattcggcctgcacgctgtcttcatcacgcccaacaaggaaatgcgcctgttacgccaccacacgcgttcggcagtcgtcgttcatcggcgcggcctggagtccagtctggtttccctgagctgggaagctttggatgagcatcatcaacagcgcatcaaggccatgcatgaagtcgcccactga

SEQ ID NO: 44589 - DNA, 1182 bp, Pseudomonas aeruginosa BWH055
atgaagtcgcccactgacatcggtcgcagcttggccaggcaatggcagcgttctagtgttcggttggatcgcttactcaattctgctagctggccgcaaagcttcaacatcggcaagccttcggcacgactattctctgacaacatccggacggtgcttcggcatgtggaaaattggcggagcgtgaaagtgggtaaggtcgactgggaacccgtcagctaccgagcagggttggctccaatttccttgccaatgcgctggcacttgcgcagtccctccgaatggattgccgcaaccgacgatccttcggtcagccaggaatacgctcaactcgagtatctggtcgagcaggtagatagttcctttcatgctctgctggtggcgcaacggagcctgtggttgacgaagccctctgaagaagtcatcgctacagcgcagctcgccactcaactatctccgggctgcgctcaaggccgcccattgcgcctgcttgcagagcacggagtggacaccaagtttttcgagcgaaacgctatcttgctgacgaaactcctcgatgagcgcttcgaaggcgcggcgtccgagcaaggtctgacgacttttctggatgcctttgaagaaaccagtcattgggttctagtcgttcctcttcagcctgagctgctgcccttcaagcggatcaggctcacgacttcggaactggccgaaacctcacttcccggttcgcgattgctcgtggtggaaaatgagcaatgtgttcacttgctacccgaaacgctgccggacaccctcgctgttctgggcgcagggctcgatttgcagtggttggcgtctgcgcatctggccgggaaacagatcgcttactggggcgacatggatacctggggcttactgatgctggcgcgagcgagacaccatcaacctgcagtcgaagcactgctaatggaccgggagctgtttgaccagcactccttgggaagcgcggtcgtcgagccagctaaagctcaggaattggctcccgaaggattgatgaccgacgaagctgatttctatcggtatctccttgcacaggagcgggggcgccttgagcaggagtatctgccacgcaggcaagtcgaacaggctattagtaaatggtttggagagtcggtagcgccggctcatcctgagcgaacggcttga

SEQ ID NO: 44590 - DNA, 1455 bp, Pseudomonas aeruginosa BWH054
atgagcttgcacgagcagcaggcgcgttttaggcgattgctctccgagcatgcagcttggcgtctgctacgcgctgagaatgcgtccatcgttcttgccttcatcaatgatctattcgctcaagacagcgaagtgccgtttgggaaagcacgtgtcgcgctggaggccgagctgctgatctggcaggaggtctatggcctgcacgataacgcgggcacctatctgcgccaatggatccaggcgggctggttgcgtgagcttgatgacaagctcacgcgaaccgatgccttcgagttggcactgcgctttgcccagagcctggatcagcgagacagtaacgccacggcctcgcacctgcgcattgtgcaagacgccgtacgagacttggctgtcgccctgagcccaaaccctgaagagcgaatcactctgctgactgcccgccggcaggaacttgatctggagattgagcgcttgcagatgggcgaggtgccagagctgagcgcgccagagcagcgagagcgcatccggggactgtatcagttgacgtcagtgctcacgggcgactttcgccggctggaggacgaaattcgccaactcgatcagcgcatgcggatccgcatgatcgagtcggagtctgggcgcggtgaagtggtgaaggcgctgatagagcatgaaggtgaactgctccagaccgatgccggacaggccttcgacggcttctatcagttgctctgtgatcagaatcgaatcactgagttccgtgagcaaatccgctcgatcttggcacgtccggcatcccagtatctgaagtcagacgaactgcgttacctatcccatctggtccgcgagttgggcaaggaaagtgagcgggtattccaggttcggcgacggaccgaggagagcctgcgggcttttgtagaaagcggcgttcagcaagagcgtcgtgcggtcgaacgactgcttcgccaactggagcggctggcggtgaatttcaaggaccaggagttgagcctgcgcgagccggtggttgtggacgtccccacgggcagtctgcgcgtgcgttctccgtccagtattcacctacgactacctgaagaacgcctggatacccggcaggtggccgcaaataccaatagtcacgtcgccagtctcggcatgctggatcacctcaacacggtcaaggtgctggaagtagcccaggatgtgaagcagttgctcactgagcacggcccgatgacggtggcgagcatcgttagtcaccgccccatcaccggaggattggaagaactggtggcgcacgtgcggatcgccaaagcagtcagcgctgtggtgttggaacacccagaaagtctggtggtagtggatcggaccggcaattggattcgggccaatattccctctttgctgatgtccgccgagcagtttccaacggatttggaggaactcgccttatga

SEQ ID NO: 44591 - DNA, 756 bp, Pseudomonas aeruginosa BWH054; identical to SEQ ID NO: 44216

SEQ ID NO: 44592 - DNA, 3387 bp, Pseudomonas aeruginosa BWH054; identical to SEQ ID NO: 44217

SEQ ID NO: 44593 - DNA, 1194 bp, Pseudomonas aeruginosa BWH054; identical to SEQ ID NO: 44218

SEQ ID NO: 44594 - DNA, 1470 bp, Stenotrophomonas sp. RIT309
atgaagcaccgcgaacgtatcacccgttatcgccacctgcgcgaacagccgcaatggaagctgctcgccgccgaccacgcaccggaaatcatcggcctgctgcagggcctgctgatggacggcgatcgcacgttgccggcatcggtcctcaacgagcgcctgcagcgtgcgctggaccagctcaacggcgacgagttgtcgcgcgagctgccgcggaccgcgcaggcctacgtcgcccattggctcgcgcagggctggctggaacgccggctgcctgaaggcgccgaccaggagcagtacgagctctcgacccaggcgctgcaggcgatccgcttcgccgacagcatggagcaggcccgcgtggccgccaccgagagccgtctggcactggtgatcgagcagctgtcgcagctggccgcgcagaccgaggccgacccggacgcacgcctgtccgcactacgcgacgagcgcgatcgcatcgatgccgagatcgcccgtgtcagcgctggccgtgtgacggccctggacggcaaacgcgcgctggaacgtacgcggcagatcatcggtctggccgacgagttgaccgaagacttccgacgcgtgcgcgacgacttcgaacagctcaaccgtgatttccgcgaacgcatcatcgatgacgaaggcgagcgcggcgacgtgctgtccaagctgttcgaaggcgtggacgtgatcggcgagagcgacgcggggcgtagtttccaggcgttctggcgcctgctcaacgacgccgaacagagcgcccagctcgatgccgcgctggagacgctgctggcccgtggcttcgcccggcggctggatcgcaacgagcgcaacttcctgcgcggcttcaccagcaccatgctcgagcgtggtggccaggtgcatgacgtgctgcagaacttcgcgcgcagcctgcgtggattcgtgcagagccgtggctacctggaacagcgccgcctcaaccagctgttgaagcaggcgcagtccgaagcactggcactgcgcgatgacttcccggcgcagcgcgccattggccgcgacctgcagctgaccaccagccgcctgcgttcgtggtcgcagtggaagctgcacgacccgcgcagcgcgcaggtcgatggcaacgtcgaatacaacgatgcggccagcatcagcctggaaagcgtgggcgatctggtggcgtcgtcggaaatcgatttccgcaccctgcgccgcgacctgcacgacctgctcgacaggcagccgaaactcagcattgcccaggccctgtcgcagcgcgaagcgccgcaggggctgggcagtgtcatcggttacctctcgctgggcacgcgctttggcagcgtgatcgccggcgaacaggagcttgccgaatggcgaggtggcgacggacagatccgtcgtgcccgcatcccgctggtttggtttacccaggagagacgccatgagctggcatga

SEQ ID NO: 44595 - DNA, 702 bp, Stenotrophomonas sp. RIT309
atgagctggcatgaagaccccatcgatgcaccgcatgccgacctggccgaagacgcgtaccaggccgaaccggtggcgaccgtggcccagccccggcgcggcaacgacgtctactacatgggcgataccggccgcctgccgctggatgcgcgccgcgcgctgtgccagctgctgatcggtcccagcatcgaccagctgcgtcacgccaagctgtggccggcactgatccgcagcgaagccggtatccgctcggcgctgtcggacctgttcctggaactggtgctcgaccgtgacagtggcgtggcgttcacccgccaggccgacaccgaagatgtcgatgcaccggtactgctgcgcacctcgccgctgaccttcatcgattcggtgctgctgctgtacctgcgccagcaactgggcgaagccgatgcgcgtggcaaccgcgccgtggtcgccgatgccgaaatggccgaagcactggccatctacgaaaagaacctgtccaccgaccgcgccggcttcaaccgccgtgtcgcctcggcggtgcagaagatgaaggacaaccacatcctgacccgcctcggcggccaggaagatcgccacgaagtctcgccggcgttgaagctgctgttctccgccgaagacgtatcccagctgtcggcggtttaccgccagctgcgcgaaaccccggccgctgaagcctga

SEQ ID NO: 44596 - DNA, 3381 bp, Stenotrophomonas sp. RIT309
atggccatttccaagcacactcccgccctgttcaacgaaggcctgccggacccgcgcctgcagcagttccgcatgcgccgcctgcaggtgcacaactggggcaccttcaacggcctgaccgaagtgccgatcgccgagcgcggcttcctgttcgtcggccgctccggttcgggcaagtcgaccctgctcgatgccatgtccgccctgctgacgccaccggccatcgtcgacttcaacgccgcagcgcgtgaagccgaacgcagcggccgcgaccgcaacctggtgtcctacgtgcgcggcgcgtgggccgaccagcaggacagtggcaccggtgaaatcgccacccagtacctgcgcaagggcgcgacctggaccgcgctggtgctggagtaccgcgccggcgatggccgcgtggtcagcctggtacgcctgctctggatcgccggcagcagcacctccgccggtgacgtgcgcaagcactacatgattgccgagcgtccgttcgacatcgccaaggatctgggcggcttcgatctggacctgcgcaagctcaagcagaagttggccgacgtccatcacttcgacacgttctccggctatgccgaacgattccgccacctgctcggcatcgacaacgagatggcgctgcggctgctgcacaagacgcagtcggcgaagaacctgggtgacctgaacgtcttcctgcgcgacttcatgctcgacacgccgaagaccttcgacgctgccgaacgactggtcagcgatttcgccgaactcgatggcgcgcaccaggccgtggtcaccgcgcggcgtcaggtcgaaaccctgcagccggcgcgcgagcactatggcgatctgcaggcgatgagtcgccgtcgcggcgacgacgaagcgctcaagctcggcatcgacagcttccgcgaaagccgccgccagttgctgatcgaagcacgcctgcgcgagatggacacgcgcgatcgtggcctgctgggcgaagaagcgcagcgtcgtgcggcgctggacaaccacaccgaacgactggccgagctggaactgcagcgccgccagcagggtggtgagcgcatcgaggaactggaacgcgagcagggccgcgccgaagccgaacgtgatcgccgcctggccaagcaggcgcaggcgcgtgacgccgcacagaagctgcaggccgcgctgcccgaggatgcacatggcttcgccgagctggtcgagcaggcgcaatccgaactggaagaccgtcagcgtgcgtcgagcgccctggacgacgccatcagcgaacggttgggcggcaagcgcgacgacgagcggcgcttctccgaagtgcgtggcgaactggaggcgatgcagcgcacaccctccagcattcctgcgccgatgcagaagctgcgcgcacgcctggccgaagaaaccggcatctccgaagcggccctgccgttcgtcggcgaactgatccaggtccgctcggaagagcagagctggcagggcgcgatcgagcgcgtgctcggtggtttcgcgcaatcgctgctggtcgatgacaagcattacaacgacgtcgccgaatgggtgaaccgcacccatctgggcatgcgtttcacctactaccgcgtgcgtcgcaatgatgatgcgttcgcccgcgaaccgtccgccaagtcgctgctgcacaagctggaactgcgtgatcacgtgttcgaaagctggctgcggcgcgagctgggcaagcgcttcgactacgagtgcgtggacgccaagcagctgcgcaacgtcgaccgcggcatcacccgcgaaggccaggtcaagcatccgggcgatcgcttcgagaaggacgaccgcagtgcggtcaatgatcgccgccgctggctgctgggcttcagcaaccgcgacaagctggccgtcttcgagaaggaagcccaggagctggccgcccgtatcgccagctgcgataccgacatcgcgcgcctgcgcagccagcgtgaccgcgacaacgaacgtcgcctggcctgccaccagctggtcggcatcagctggaacgaaatcgacgtcgccgcgccgcagcagcgcctggccgacatcgaggccagcctgcacgccctgcgcgaaggcaatgccgacctggccaggatcgcccagcagatcgacgccacccgcgccgatatcgagcaggcccgccgcacttacgaagacacccgcgtcgagcgcggccagctggtgcgcgaacgcgaccgcctggaccgtgcccgccagcagagccgtgcactggtcctgccagcgctggccgaagaccaggaagccggcttggccgagcgcctgcaggagcagggcccgctcagcctggaaacgctggaagcgcacatgcgccaggtcagcaacgcgctgaacgaacagctctcgtcttcgcagcaggacgtcaaccgcatcgagaacctgctgcttggctgcttccgtcgcttcatccagcagtggccggaagaatcgggcgacttcaccgtgtcggtggcctcggccgaggatttcctcgctcgcctcgaacgccttgaacgcgatggcctgccgcagcacgaagaacgcttcttcgacctgctgcagaaccagagcaagaacaacctgctcgcgctgcagcgtcacagcgccgaggcccgcaagtcgatcggccagcgcctggacgaagtcaacgccagcctggagcaggtgcccttcaaccgtggcaccctgctgaccatcgaactgaacgaccggcgcctgccggaagtgcaggagttccaccagcagctgcgcgaggtgttgtcgcagcagcagaccgagcagcgcgacctggccgaaacgcagttcaccgtcctgcgccagctggtcaaccgcctcggttcgcaggaaggcgaagacaagcgctggcgcgaagtggtgctggacgtacgcctgcacgtggagttcatcggcgtggagctggatgtggaaacgcgccagcaggtcgagatctaccgcagcggcgccggcaaatccggtggccagcggcagaagctggccaccacctgcctggcggcggcgctgcgctaccagctcggcggcgccgacagccagctgcccagctacgccgcagtcgtgctcgacgaagccttcgacaaggccgacaacgagttcaccgcgctggcgatgaacatcttcgacaacttcggtttccagatggtggtggccaccccgctgaaatcggtgatgacgctggaaccgttcatcggtggcgcctgcttcgtcgagatcagtggccgccacgattcgggcgtgctgctcatcgagtacgacgaagaaggcaagcgcctgaagctgccggagcgcagccgccagcaggccgacgaaccggaagaagccgaagcctga

SEQ ID NO: 44597 - DNA, 1464 bp, Micrococcus luteus
atgtcctctctcgcccaggcgctccgggtccaccgcctcgtgcaggacgacgtcgccctgcgcatgctgcgcatggactccctgcccctcgtggccggcgtcctcgccacccatctgggcgccccgaacgcgagcctgcccacgcacgagctgcatgacgccctcgacgccgagctcgacaccctgcgggaccacctggacctctcggggcggacagccaaggcgtactgcgaggactggcggcaggcgggactgctcgagcggcgcatcgcggacgaggcccgcgaggaggtctacgagctgacgccggccgcgcggcaggggctccgcgtcgtcgagcagctcctcgcaccgcgcgcgagcgtcaccgagtcccgcctcgtctccctcctcaccgcgctccatcagctggccctcgagaccgacccggacacctcccgccggctggccgccctgcgggctgagcagcaggccctggcggagcgcatcgagcgcatcgcctccggtgaggacaccgtgctggatgagcgacgcgcggtggagcggctcgacgacgtgctcacccaggcggccgacctccccgtggacttcgcccgggtccgggcacggttcggggagctcaatcaggagctgcggcgtcgcatcctcacggacgaggggcttcccggcgacgtcctggagaacgtgttccgcggcgtggacctcatcgagtcctcggacgagggccagaccttcgccgcgttctcccgcatggtgcgggaccccgcgatgtccgcggcgttccaggccgacatccgggccgtcctcaagcgcgacttcgccgcggatctgccgcccgccacgcggcgtgcggtgcgtggcctcgcacgcaccctgcaggacggctcgtccgccgtgcaggacacgctcacggagttcgcccgcggcctgcgccgctacgtcctctcccaggagtaccaccgggaccgccgtctgcacgtggccctccgggaggcgctcagcgccgccgccgacgccgccccggccacgcgtccctaccggcagacggggcgggacctggacctcaccggcatgtccctgcgctccgtcggggagatctccctgcacgatccccgcgagttcgacgtcggtcctgccctcgaggacgccgccgtggccacggtggacatggccgccctgcgtgcgctcgcccgtgagacggagatcgacttcacggaactgcgcgagaacgtgaaccgcaccctcgaggggaaggacggcgcgccggcctcggccacggtcgccgacgtcctcgagctgcaccccgccacgcagggggtggcgagcgtcgtcggactcctctccctcgccgcgcagcacggccaagtggaccccgacgccgtcgacctcctccgctggcccgccgccgccgggatgcactccgcgcacgtgatccgccaccgcttcaccgaaaggctcccctga

SEQ ID NO: 44598 - DNA, 681 bp, Micrococcus luteus; identical to SEQ ID NO: 41941

SEQ ID NO: 44599 - DNA, 3357 bp, Micrococcus luteus
atgaccgcacctcatcccgcgcaggagcaggacacgttcgacctcggcatcgagttccccggccgcgacacagcggacatccgccagtggcgcctcgaggaggtccagatcgccaactggggcaccatggacggtcgcatccaccgcttccccgtctcgcgccgcgggcacctgatcacggggccctcgggctcgggcaagtcctcgatcctggacgcgatcgccgccgtcctcaccccggacaagtggctgcgcttcaaccaggccgcccagggcggggcggagcggacggccacgcgcggcctggtctcctacgtgcgcggcgcgtggacccgccggcaggacgaggacgaggaccgcgtggtctccgcgtacctgcgccccggggccacgtgggccggcgtcgtcctcacgtatcgcgacggcgcgggcggcgtcgtctcgctgtgccgacagttcttcctgcgcggcaccgcgatgtcccgggccgacatgaaggacctgtgcctgctcgagcgctctgccgtggacctggccgaactgcagacgctgatcgacgacggcatcaggacccgccgtgtgcaggcacgctggccgcaggccgtcgtcaccacgaacggcggtcacggcccgttctacgcgcgcctgcgctcggtgttcggcatccgcgacgacgccgcgctgcacctgctgcaccggacccagtccgccaaggggctggactcgctggaccagctgttccgcaaccacatgctggagcggccgccgacgttcgccatggcggaccgcgcggtcgaggagttcggcgcgctgcgcaccgcgtacgagcgcgtcgtggacctgcgccggcagcgggaccacctgctcgaggtgcgcacggccgcacaggagtacgaggccgccgtcgccgaggagtccaggctgcgccgcctcgaggccgccatccacccctaccaccaggccaggttcctggcggagatccggcgggcgctcgaggaggtgcaggcctcgctcgcgggccttcacgcggcgcgcaccgaggccgacgccgagcaggagcgcgcggagcagcggcgccagcacgccctgatcgcgctcgccagcgtgggcggggaccgcgtcgcggagctcggacggcagatcgacgcggcacgggagcagcaccgggagcgtctggctcggcgcgccgtcctggcgaaccgcctccgcgcggcggacgtggacgcggagccgagtaccgccgtcgagttcggcgagctccaggcggccatcgccgcggacctggaggcgccgcccgagcacccggggccgagccacgcccagctgaccgagctcagccgcctgcgggaggcggtgcgcgagctcgaggcggacatcacggccctgcgccgccgcggcagcaccgtgccccggcacctggcgtcggtccgggaggacctggcggagcacctgggcgtgcggacggacgcggtgcccttcgtggccgagctgctcgacgtcgacgcgcgccatcaggagtggaccggcgcgatcgagcgcgtgctcgccccgctctcgctgaccctgctgatccccacgcggctgctctcggcggcccggacctggatcgaccggcgccacctgggcgtgcgactgcggttcgaggaggtcaggccgacgcgggccgccatccggcccgcgagcagtcaggactccctcgtgcacaaggtgacggtgaagcagggcgtgttccacgactggctccaggcccgcctctccgagcggttcgacctggcgtgtgtcagtacggccgccgagctcgcgcggcacgagcgggccgtgacggcggccggccaggtgaagctctccgccacgcggtacgagaaggacgaccggttccgcgtggatgaccgctcccgttgggtcctcggcgatccggcggcgaagctggaggtgctggtcgaggagcgcgccgcgcgccaggcggcgttcgccgtcgtcgagggcgaggtccagcgggcccaggagcgggccgatgcggagcgccggcgccgcgccactctgcgcagcgtgctcgagaccccgtggacggacgtggaccacgcggcactggagcgccggatcgcggacctccgggcgcaggcggatgagctcagcgccgccagcggcgatctgcaggccgcccgtcgcagggacgaggccgcccagcaggacctccggaccgcccgccaggccgctgacgaggcccgactggccgccgcccaggccgagcgccgccgagccgagctcacccaggaggcgcgagagctcgaggcggagagcaccggccgcgagccgctcccagcggagctcaccgccgagctcgacgcccgcttccgggccgtgcgccgctccgccacgcgttccgccctgacggagagcgccgacctcgtgcgccgggacgtgagcgcgctggccgaacgcgcgcgttccgcgggtgcgcaggcgggggagcgctgcaccgtgctcaccacgcagttctcccgccagtgggcggtggcggccgcggacgcctcgcccggcgtcgaggaccgcggcacgtacctggcgatcctcgagcgcatcgtggggcaggggctgcccgagcacgaggaccggttccaccagatcctgcacgagcgctcctccgtgctcttcggcgagctccaccgggccatcagcaccgcgcccggggagatcgaggaccgcgtggaccccatcaactcggcgctgcggcgctcccccttcgacgaggggcggttcctgcacctgcgtgtgcgcgtgcgtcgtcccgaggcggcgcagcagttcctccgcgacctctccgccgtggcggagaacgcgtgggccgacgactccctcgacgatgccgagcggcgctacaccgcgctggccgggatcatggaccgcctcgcctcctcggaccacgtggaccgggtgtggcggcagcagtgcctggacacgcgcgagcacgtcaccttcctcgcgcaggaggtcgacgacgccggcgccgtccacgccacgtacgactcgggcgccgcgatgtccggcgggcagcagcagaagctcgtggtcttctgcctcgccgcggctctgcgctaccagctggccgcccccgaggacccgcgcccgcggtacgggacggtgatcttggatgaggcgttcgacaaggccgacgcccgctacacgcgcatggccatggacgtgttcgtggagttcggcttccagatggtgctcgccacccctcagaagctcctgcagaccatcgccccctacgtcggcggcatcaccacggtggagaacccgacgcggcggctcacccagatcgccgaggtgatgtgggaggacgaggagaagtga

SEQ ID NO: 44600 - DNA, 1464 bp, Micrococcus luteus; identical to SEQ ID NO: 44597

SEQ ID NO: 44601 - DNA, 681 bp, Micrococcus luteus; identical to SEQ ID NO: 41941

SEQ ID NO: 44602 - DNA, 3357 bp, Micrococcus luteus; identical to SEQ ID NO: 44599

SEQ ID NO: 44603 - DNA, 1440 bp, Pseudomonas bauzanensis
atgttcttcgccgaccagcgcctgcagttcttcaaaccactgaccagcaagtaccgcgaacagatcgtcgaatgcctgcgcctgctgcatgaccgcctgtacagcgccagcgccgactacggcgagtcgctcaagcgcgaacaggtgctagacatcttcagcgaagcactggaacgcgcgcccctgctcgagggcgacgatgacgaccaggggcgcttccgcaacaaccgcgaacaggccggctgggtcctcaacagcctggtcgaccatggctggctcgaacgccaggtagaccaggccaacttccagtccacctaccccttcagtcgccttggccgcctgttcacccaatcgctggtcgaagccgtcggccatagcgtgcgcacccggcaccgcaacacccgcaacacgctcaacgccctgtccgccttcgccgagcgcggcgaagtctacgacctgctcgacgcctacgaatactccgaacgcatcatcgccgacttcaccgacatcatcgccgagctcgaagagcgcaagcgccaactggtgcgcgaagtcgaagcccagcaactggtgcaacaggccagcgaccagttcttcgacttcatggagcgccgcttccagcccgacgtatccattcgcctgtccgccgacagcgtggaaaaacaccgcgaccgcattcacgacgtgctccggcgcatccgccacaagccccgggaatggaaagccaacgccgaacgggagctgcgccgcctggccccggatctgattgtcgacgacagcgcctcggtactctggcaactgctcgacaccatcgacaaccgcctgcgcaacgcctcggagatcatgctgccggccctgcgccgcaccctgcagagcttcaccaaacgggccgacatcctcatccgccaactgagctacctgcagacccagcagcacaacgacatcgtcggcctgtgccgcgaactcagcgccctcgacccggccagctacgaacaacgcatgaacgccgccggcgacgccatggcgcgcctgcgcgtggaactgatcgacccagcccaggtgcgcctgcgcgagcgccagaaccgccagccggtgcaaagccagatggacgaccccggcctgccggacgaccagaccctgcgctcactggccgtcagccaactgctggagcgggccttccatatcaatgccagcggcatgcgcgattacctgcgcagcgccctgggcgatggtcgccgcatcaacagcggcgacctgcccatccgcgatgccagcgacctgctggcggtcagccacgtcatcgccctgggcagcgccgaccaggccgcggcaggctttcgcgtaaagatcgagccgactggccagccggttaccggcgacacctacttcaaccgccgtgacggtttcatcatcgaactggaacaagatacccatgcgtga

SEQ ID NO: 44604 - DNA, 681 bp, Pseudomonas bauzanensis
atgcgtgacgccctggaagaacaactgcagcaacacggcatcagcgccgatgatttttccgacctgatgatccggctcctcgaccgcggcgtgctgtgccgtgacgaaagcaagcgcgaagccgaactctatgaccgcttcctgcaggtgcagccgctggtcgaggactacctgtgggtcctgcgtatccgcctgctccatgaatcacgtttcagcatggtccgcatcttcccaccgggtgcggaagtgcccggcctggccgacagcgaagacagcttcaacaacggcctgcgcgaacgcctcaaccagcaggaagtgtcgctggtgctggtactgcgtgccgaatacgacaaggccctgcgtgacggccaggtagatgagctggggcaggtaatgctctcgctcgaagccctcagcctgagccaccgcaacctgctcggccggcccttgccggaacaggccagcgagcgtcaggcgctgctgcggcgcatgcgccagctgcgcttgctgcgcagccctggcgacggttccatggaagatggcgaaagctggctgatcatccgccccggcatcatcagcctggtgaccgacaccgccctgagccaactggctggcggcgtggtactggatgacgaagacccaattgacgaacccgctgaccttgccgaaggagccaactga

SEQ ID NO: 44605 - DNA, 3630 bp, Pseudomonas bauzanensis
atgtatctgaaacgctcgattaccgccaactggggcaacctgccggtcgaggaaatggaatacggcccgatcaatctgttctccggcggcaacggctccggcaagaccaccgccgccgatgccctgcagacactgatgaccgccgcccacgacaacctgttcaactacaaccccgggcaggacgaaaccacccagcgcgggcgcggcggcaagcaggtacgtaccctcgcctcctatgtcctgggttgtgacgatggcgcctttgcccggccctggaccaccgacggttacatcgccggcgtgttccatccgacccagggcgaaaccgccgagccgttcaccgcggtgatcggcgtgcgcgcccatctggatactgccggtagcagccgccaggcgcgtcaggatgaactgctgctgatgatcgtacccggtgaaatgctggcgctcagtgacttcgtacgggacagcgacgacggccgccatgtcattccgctcaccgaattgcccaatctgctgcgcaagcagttcggcaagcaaggggtggaaacctatgaccgcaagagtgcctacctggcccgcctgtatggcgcgctgcgcggcaagggcgatgcggtatccatccgcgaggcaaagaatgctgcccgcaccttcgccaacttcatggcctacaagccagtgcgctcgatcgaccagttcgtcgccggcgaagtgctcgaagcccgcgaatttggcgacaccatcaagcgcatccgcgatctgctgcgtaccgtgcacggaatggaacaggaagccgcgcgcgtgcgcggcgctgtcggcctgctggaacagtcgcggcaactgaccgaggactatcagaacagctggctggagcgtatcggcctggattatgccgccgccgcgcagaactggggccacaatcgcaagcagtacgtggctgccaaggacaagcagcaggaaatcagcgcccgcatcgatgacctcaccgacgagcagcagctcaatgatgagcgcacccagcaggcccaccgcgacctggtgcaactggaggcccgccgtcagggcattcccgcactgcagggcaaggatgatctggagaaccgccagcagctactcaccacgcggctgcagcagggcgtggcaccgctgctggagcaggcccaccagcgtgatctcaacctcgaggcggtacgtaccgtacagcatctggtgagcaccggtgtgggggtggaaattcccgaactgaccacccgcaactggaagaacctggccgatgaaatactggctgccgagcagcaaccggtggccgagctgcaccagttgctgtccaacgactggatcgacctgagtccgctgcaccacggcctggacaatgtgcgccagcagcaacagacccataaccggctggcgacactgcttgcccagcccggcaccgacggcatcagcctgctgcaacgggtggaccggctgagtcaggagcgggccggcaccctcgccaacctggaacgccagatcaccatcagcgagcggcagatcaagacgctgcagcaaagccgggtgatctaccccatctatgttgaagacgccctggccgctatccgccagcaatgcccggaagccgatccgcgggtgctctgcgaccacgtggaagtcaccgatcccgactggcagatgtccatcgaaggctatctcggtggttcgcgcttcggcattctggtcgagccggcccatgaagccgaggccatccgcatcgtgcgccagctcagcgcccgggatcgcaaccgcgcccgggtgatccagggcgacaaggcccgtcaggacgccgagcgcctcagcctgcccaaggactcggtggtccacgtactgcgtttcagccaccgcgtggccgagcattatgtgcgcgcctcctacgcctcgctggtgcgggtcaacgatgccgcgggcctgcgccaggctcggcggggcattacccgcgagggcatgggttcgggcaactactccatgttccgctgtgatatcgatgacagccagttggtgttcggcgtcgccgcccgcgagcgcaacctgcgcgcccagcaaaaacagctggaagaactgcaactgcaacgccacgcactgcgtcagttcgtggaacagctgaaacatctggccgcggcgctgcaacgtatcaagccgctggactacctgagccaggccagccagttgctggaacagcgccagcagctgcaggacatcgagcagcaactggccagcctggacctgagcgccttccacgatgtggagcaggagctggaccgggtcaatgaacgccacgccgagctggtagcccgtcagagcgagctgcagaaggaactggggggcttgaacgtgcagctgacccagatcaaccagcgtatccgtacgctgtccgaccagggcgatgcactgcaggagcaacgtgaagaggccgagcagtatctgctcgaagccgccgcccgcgtcaccggccttgatccccagcagcggttgacccagatcgacgagatgctgacccgcaccggcgatgatttcgattttgccgccgacagcaagagcctcaccgacagcctctatcagctggcggtcgcgcttgatcgcggcctcaaggagtacaaccagcaggcgcagccggcggacaacctgatccatgacaccgccgccgaggtgcacagcctggcgttcttcgagcatgtctgtggcctgcgccagcaactggacaatctgcataatcggctgcgcaacaacgtgctgctggaaaagcaggagcagttgatcaagctgcgtgacagcttcaacagcaccttcatcaccgacctgtgtcacgagatccaccaggcgatcaacgatggtggtcgtaccctggaagggctcaacaccgagctgcagcatcaccgcttcggcgccgaccgcgagagcttccagttcgagtggagctgggtgccggaatacaaggaatactgggagttcttccgcgaagtcacgcagatgccgaacctcggtgacggtgccagcctgttcgatgcccacctgtccggcaagggcgcggcggtgcgtgatcagctgctcggattgctgctcgacggtgatgaacagcaggccctgcgcgagctcgaacggatcagcgattaccgtcgctaccgccgttacgacatcctcaagcaccccgaaggcaaggcgccgatccggctcagcgaatacggcaccggctccggcggtcagctggagaccccggcctacatcatccgcgccgcggcggtgaccagcgccttccgcttcaatgaaggcgacagccacctgcgcatggtgattgtggacgaggccttcatgcacatggatgaaacccgctcacgggaagtgatcaattacctgaccgaaaccctcggcctgcagctgatcttcatcatgccgaccagcaaggccggccccttcctggagctgatcagcaaccagttcgtgttcagcaaggtgcccagcccccgcgcggtgggtgagctcaacacccgcgtgctgctcgatcgccagcagctcaaccgcgagcgcatcaccgagctgtgggccaaccaccgccgggtgattcgtcagcagggggcgctggatttcatggagatggtgtag

SEQ ID NO: 44606 - DNA, 1353 bp, Pseudomonas aeruginosa IGB83; identical to SEQ ID NO: 43741

SEQ ID NO: 44607 - DNA, 750 bp, Pseudomonas aeruginosa IGB83; identical to SEQ ID NO: 43742

SEQ ID NO: 44608 - DNA, 3306 bp, Pseudomonas aeruginosa IGB83; identical to SEQ ID NO: 43232

SEQ ID NO: 44609 - DNA, 930 bp, Pseudomonas aeruginosa IGB83; identical to SEQ ID NO: 44484

SEQ ID NO: 44610 - DNA, 1524 bp, Bradyrhizobium diazoefficiens SEMIA 5080
ttgttccgccatttgcatgacgacgcctttttagctttttcgcgcgatcacaagcacctgtacgcagcgtgtctgctggatctgcacgaacgcttcttttcaggcgcgccgtcgttcccgacgccgcagcaggtggtccacgccatctacgacgtcatgcgcgccaaccccgtcctctggaacgagggcgatgatttcggcagcctgccggaaatgatctccgcgagacgccgccggatccggaaggccgacgtcgcgctcgcttccgagaagggcgacaaggcgctcggtcttgcccgacaactatacgcccggctgctcgtctggggatggcttgaagaggaggaatacgggcttcgcgtcactgtggacatggctatgggaccgctgctcgtgctgcaacggctcgcgagcctcaacaaggatctctcgcagcgattcggcggcttgatcgtgcaaatccgcctcaacctggaggccgtcgaaaaactgaggcctgagatcaccgaccgcaagcagcgcgaagccgcgctcgccgtccgcgaggcgcgcaatcaggccgaccagttcactaagagtctgcgggccattctggccgacctgaagcgcgtccgacggaccgtcatggagtcgaaaacagtcgctacccggctcgaagcctttttcgaggagttcatcgaacagctcctgctgaaggatttcgagtccatcctcaccgtcaaccatccataccgcttccgcgacgccatcgtcgatctcgcgcggaggatctcctacagcccggaaaccatgcaggtcctcgccgaggagtacatagcttccagcatggcagccgacatcgaggacggtcgaatggccgcggccgacgacctgctggctatcgaaagcatcttcgatcagatcggggagatgttcgacaggatcgaggccttccgcaggcagctcgaagcccgggtccgcaacaccattaagtacgccgagcggggcgggcagggactcgtcggccgggccggcggcctggtgcggcgcctggatgccttactgcgcgacggcaggcaccacaaggcgacaatcgaatggagcatcgagccgctgcggtcgccctggtcggagcaccatcaggcgccggccaggcagccgcgccgtcccgtcgaagcaagggagctcgccgagccgccgtcggatccgttgtatgaactgcgcaagaagctccgcctcgagtacatcgctcgcatcgcgccccgccccgaggatgtcagacgattcctcgagggccaggtgccgccattcgcgaccagggaagcccgcttcatggaaatcgataccgtggacgactttctcgccttcgattgcgcccgccgatatgcgctgacaggcgaggttccggcgcaggtcgcggccgggttcgaactcgaaccgtgccccgacacgcccccacacgacagcgaatggctccgttgcgccaacttcctggtcaagcgatcgggcgcactccggaaggcgagggcggctcatgctcagtga

SEQ ID NO: 44611 - DNA, 639 bp, Bradyrhizobium diazoefficiens SEMIA 5080; identical to SEQ ID NO: 41688

SEQ ID NO: 44612 - DNA, 3432 bp, Bradyrhizobium diazoefficiens SEMIA 5080
atggagctacgccacctgacgatggtgaactggcacctattcgacgtcgccgacatcgacgtgaggggacacgtcggggtcctgggcgagaaccggtccggcaaatccacaatcctcgacatggcacaggtcgttctcaccggcgggagccggcggttcttgcgcctgaacgcggtcgccggcgatagcggaaaatcgcgcagcggctcgaagcgcagcgtcgtcgattactgccttgggacgctcggcgaagatcagcgccggcgcgacgaggcgcgcacctacatcgcgctcggtttcgaagacacggaaggcgcccggtcaccggtcacgatcggcatggcgctcgaggcgcgcaagtccgacagcagggagaccgtgctggcactcttcgtagccgtcgggaccgttctgagctccaaggacttcatcgagcagcgaggaaagtcgcaattcccggcgcagtgggaggacgtgcgcgcccggatcgtcgcagcggtcggcgaaggcaacttcgtcaatcatcgcgaccgggcgagcgactatgtccgcgagtacatgcgccatcttctgccgcattcgtcctttggcgaacagaacgccagcgccctgcagaaatcaatcgtcaacgcgatgacgctcgatcacaaccagacggcgacgcagttcgtgcggaactacatcctcgaggacagtccgatcggcatcaaggagctgcgcgagtcgatccagacataccgcaacatcagcgagaccatccggaaaatgcgcctcaggctcgaagccctaagggcgcttcggggcgtcctcgccgcgcttgaagaggcgctcgagaccaagttcagggaggaatgggtcgcaaaacgcgcgacttggctcgcggcgcgcgcgacaaacctggacttcaagaccaagcggcgtaccgagatggcgcgccgggacgccgcagcaaaagaactcgaattcatcgacgacgacgtcaaggccatcgataaggagatcgaacgcctcacggccgcgatcgccgagcacgatgccaagaccggcagaaagtccctgcagcagaccgccgatgtggccgggcaggcggcgcaccgcgcctcggcggacttcaaggctcgcatggagaacatccgtcgcctggagccgctacgcgcgatgtgcgcggacggtttcgaggacttcgttcctgcgcttgagcgtcttctgaccgccaccgccggggccgacatcgggggcgtctccgacgaggtcaccgcggccgagaagtccttcgcggcaagcggcgccaaatggctgccgaagatcgacgaagcgcgtcaaaggatcatcgcggagctttccggcctccgcggcaggcgcgacgaggtgctcgaacggatccgacagcacgccgccggaggggcgcgcgcctatctcggcgacgacactgaactcctctgccgcaggctgcggcagggtggaatggtcccgcgcgtactctgcgacatcatcgaagtcgccgaacccgagtgggtaggagccgccgaggcgctcctcggtcgcgaccgggaagccgtgttcgtggacagagcggatatcagcgccgccacgtcaatcttcaaggaaggtcgccgcgagtttcgccatgcatcgctcgtgagcctaaacaagctcgagcagttcagggccaagccggagcgcggcactttcccctcgatcttccggagccaggatccggacgcgatggccttcatcatgcgccgctacggcaacgtccgtctcgccgacacgctcgaccagttcaacaggcccggccgggcgataatgaaggacggcctctacgacgacggactcgtccggagccatcgctggatcgaatcctcgcagtataagatcggaaaggcagcccaggcgaacgccctgcgatccctgcaggatcaggccgaggagctgggtcggatcctgatcgacaaggggaaggaggcccatgccgcggagcaggcttttgccgctctgaagaacatctgcgagggacgtaatgatctgggggcttgcgcggccgccttcgcggccgcgcagactgaggtcgctgaagctcaggccaggctcgatgccctcgacggcgcgggggacggcgggcttcgcgacaaaaagagggcgcagcaaaagctgaaggagaagaggctggaggagagaaagacacagcagaaggcgttcggcgagcatgacggcgaggtcaggtcggcggagaggaggctcggagagggcgagaacgtgcccggctccgaactcaacctcagggtcgcccggtcgatataccgcaagttcttcccactctactccaccgcgaaaggcagggccgtctaccgcgaccgcctcgatgccgcagcccaaaagggcttcgctgagaaacaccgggccatcgccgagaaggccttgaaggatgcgaatgtgtccgacaacgagcgcgcccggatcgagcgacgggtccgcgagcttctttacgattacttcgaccagttcgggatgagttcgcaggtcggtgcggaaagcgagccgctgcgggaggtgaagccatggatggagcagctgatctcggatatcgaatccaatgagctgcgccagtacgaaaggcaggcgcgggatgcggcggaaaaggcctctaccctgctgcgcggcgagttcatcaacgcgctcacggcccggatcggaaagatggagcgggagctgcaatcgttgaaccgtagcctctacgcacatccgttccataacgagcgatattcattccatcgcacccagatggtggaattccagcccatcctgaagatcatcgagatcgccaaaacctctccggaggcgctcgatatgctgttccggggcgacgtgcccgatgacttcccgcacaaggatacgatcgtcgcactcgaggcgctgctcgaggaccccgacaaggatttcacccagttcgaggactaccgcaacttctacaccttcgagatccacatggaggatgttgccaccggccgctcgacccgctgggagcagcggcgcggcaccgggtctggcgccgaacaacaggtgcctatctacgttgccatcggcgcttcgctggccgccgtctacggcagcgcggagcgtcgtgccggcaagcccgccggtttcgcgctcgccatgttcgatgaggccttctccaagatggacggcaagaaccagcggcagatgatgagcttttacaaaaacctcggcctgcagttcgtgatcgcggcgccgttcgagaagcgcgtcgccgtgctcgagcacatggacaccatcgtggaggtggaccgcatcggcgagcagtccagggccactgtggtggaactgaaagagaaggccaagcgcgagctgatggccatcgatccggacctgatgtccgaagatgagctcgccacccgtctggccgccgagtag

SEQ ID NO: 44613 - DNA, 1170 bp, Bradyrhizobium diazoefficiens SEMIA 5080; identical to SEQ ID NO: 41690

SEQ ID NO: 44614 - DNA, 573 bp, Bradyrhizobium diazoefficiens SEMIA 5080
atggacaagatcgaagatttccgcgaccgtctcgaacgccgcatccgcaccaccgtccactacatggacgtcatgggagagggatccgctgagcggatcgtccggctgatcgagcaactctcgaagatcgggcgcgatgaagtggagatccgtcttgggtcgccggatgtgggcctgccgatcacatcgcttgcgctgtacacgccaccgcctccgaaggcaccaccggagcggacgcgcttcaaggtgccgaagcaggatccatatctgcgcgcctatgtcgaggccacgaccgaattcgaccggatggtgcgcgtgtccgaccagaggctgctcgagttcgcccggcggcagatgcagggccgcgatgccgtgtcgtccgcggagatcgagatcgagagcattccggacctcttcgcctaccgggcgctcccgaacctggctgcggtcggccgctctgtgcgacttggcgaattcacgatcaggctcgacgaggggcgctccgccaacgactggatcgacgtgaccgccttccggatcgaaagaacgaggaccacggccgatgctgcgtga

SEQ ID NO: 44615 - DNA, 642 bp, Bradyrhizobium diazoefficiens SEMIA 5080; identical to SEQ ID NO: 41684

SEQ ID NO: 44616 - DNA, 3501 bp, Bradyrhizobium diazoefficiens SEMIA 5080
gtgatcgaacttcgtcgcatcatcctgatcgattggtacttgttccgggcgcagcaggtcgatttgcgcggcatgaccgccatcatcggtccgaacggtgcgggtaaatcggcgatcatcgacgccgtccagacagtgctctcgggcgcaagtatggccagcatccgcttcaatccgagcgcccagagcaatgtcaggagcaagcggactctccgcgactactgcctcggcgttgtctcgctcgacgagaagggcgagcgttcggagccgacgcgacagcatgcctacacctacatcatcctggtcttcgaggatctggccgatggctcggcggtgagcctgggcgtggctttttcggcttcggcttcgagaagcgacgagtcctgcgaggcgcgcttcatcgccaagggcgccatggcaaaggacgacatactcgcggcggtcggcgacgacgaggtcgagacactgcagtggcacgccgtacgcaccgcgttgcgagcgcgacatatcgaggtcgacgatgcgttctcaagcgctaccgacttcgtggcggaatcgctcagagctctatcgccggcagggtttccgctcgatccacggcgcttccagaaggcattccggaacgcgctgctgctgaagccggtggacaatcctacggatttcgtccggaactacgtcctcgacgttcagcctctccaggtcgacagacttcggctcggaatcgaacactggcggtcattgacccgtcgcatcgaggagttgagggcccagagcgccagcctagccggaatccttcgcatcgtcggccgtgccgtggaaaacgagaaggttatcgcaaccaatagctggcagatcgcgcgcctggaatgggagaagttctgccgggaagccaggcggcaggaagaggtcatcgcgcagtttcggagcgtggcaggtaaggcagaggtcgaggcggccgcggccgcggcccgacatgccgcgctcgaggccgagcataagaccgtcgagctgtcgatcaggaccagcgacgccgaacagcttgcccagatgtacgagtcggacaaggccgcagcgctgagccagcgtgccaacgccatggcgccgctcaaggacatcgaaggccttatcgcgtcgatcaagaaggccgtcgaactcaatctgctggttcgtcgtgacgatctcctgcatgcgctgctgagcgcggtcgtagtcgctcggggaagggcgccactttccgaatgggacaagacactgccgggcgactggaaagatagcgcttcgcatctcgacgcggcgctgggcgccgtggaccaggagagacttgcggcggtccggaagtcgttctcggacgctcatttcacggcccgcgtcgcgaccaaggaccttcaggatcgcatcgaccagatcgacagcaatctgaaacggatggaccaagggctcagccctatcgagcgtggcacccggaatctgatagatcagcttcgttcgcatggcatcgaggccgagccgctgtgcgatctggtggaaatccgcgacgacaaatggcggatggcggccgaggccgtcctggggcgctcccgtgaggcgctgatcgtcgagcccagtcgggccgtccgagccctggagatctaccggcaaggcggcgaatattcgttccaacacgccgaagtcatcaacacgacgaagaccgacggtacgcgccccgccgagaaggggtcgttggcgcagatcatcagcacggaaaaccggcatgcccgggctttcctcaattataggctgggccggctgatgatggtagagaccatggacaggatggtcgccgccgagaacgccatcacgcctgaccggatgatgcaaggtggccgtacggttcgaaggcttcccaaacctgaacacctcaagctcgggcgtgccacacaggggcaaatgcgtcagcagctcgagaccgagcgaaaagacctcacgatgcagctcgctgagcgggcgcgcgaggttggcctactggaagaagaagcacggctgttcgaggacatgtttgcccgcttccagaagacgatcgaagctggcctgacctgctccgaatgcggagccgacttggctgctttcgaccgcaagctcgccgagatcggcaaaaacatcgaggatgccaagcggaatcgcgaccccaagctcgttgccgatctggagcgtctcgcgggtgaagtggtgacggcgggccgtaggaaattggagacgcagaaggcctttgacgccgcgaagagcgcgcgagataaggccgagggcgcgtacgatgactacatgcaaaagaatagcaccaccgcgcgtggagctcgacgggaccgtgcacgtcagatgcgtcaagatttcccgcaatcgacggcgatgcgtgactaccgtccggaagtcgccagaatggcgacggaagcgataccgaacctcatcgacgggctgaccgcggacagagagactcgctctacgacaaggcgatccagcctgatgcgcgaaatgaccaacgcgatgaacaagcacggtcaggatttccatgtcgtgccgtcgttcaccgctgaagaggcaacgccgacggcagtagagcagtgggcggcgaccgaaaaggagcggctcgatgggcacgagctagtccagtatgaggagcagtgccggaacgccgcgaccgagatgacctcggccttccgagacgatctccttcatcggctggatgacgccttcatgggcattcgaaacaccctgaaggagctcaatcgccatctggaagatcgccagttccacgggcgggactactactcgttcaaagcgctcgatgcgccaactcatgtcgacatgatcgagctcgtcgaagaatcccgaaagcctgaattcaacctgccgctcttcggcgaccggagcggggacgcgaattccccgatgatgcgcgcggtccgccagatcgaggagatactgtcgaatccagaggcgcggacggaggatatcgaggacccgcgcaagtatttcaatttcgagctctacatcaaggatgcccagggtacgatccggtcgtctctgacgagccgcgcgggcactggatccggaggcgaaggccagttgccgttctacatcgccatcggtgcctcgttggccgccacataccagaaccggcgaaccggggagagcggactgtctctcgcgatcttcgacgaagcatttaatcggctggatacgaaggcgatcggccagtgctcggacttcatgcgggccctgggactccaagtcgtgttggccacacccgacgaaaagcgtcacgtgttcatggaagtggtcgacaccgtcgtaaacgtgaatcggctgggcaaccaggtgatgatcgacaccgaattcttgaccgagaaggctcgcgacgcgatcgttgctatcgacccctaccgcaagggcttcgacgtgttcaagtccgagcggatcgcggccgagaaggccgaggctatcccgcgggaccaggccgctgaatga

SEQ ID NO: 44617 - DNA, 1206 bp, Bradyrhizobium diazoefficiens SEMIA 5080
atgaccgacgttcggatgacagatgccggcgtcgaactgctcgaacggctgctggagcggagcgagcgcaacccttatcgctcgtggtcagcttctgcagctccagactatgaccggctttcgaccgcgcagcaaatgagccgcttccatgatcagatcaccgcggccgaaaggttcggttctgtcgaggtgaaatggggcaagagggaccagggccatctgatcgagcgcgtcgtcgtccgcgacgctgagctgctcgccaggcatctcggccgcccgactgctccggcgaccgcgcagcgcgtcagggacgaattgcttccggtcgcggcgaccggagaatcgtgggtcatcaccttgttggacgacatgacggctaggtgggcccgcagcgaggcggcttatcgcctgacggccggccaagtcgatgcagccaaggagttcttcagcttgctggcgtccatctcgcgagaggaggccagagggctggacgcgcgcaccttctctaaaaaggcgacgaacgacaccaaggccttcgataggcacgcttcgcggcttgccgcggttctcggtgtccggatcgggcagccgggcgcggctgccgatgttgtctggacgcacatcggactcgagcggttcagccatcccattcatttgagggggcctgtcgccgttggggaggctgacggtcgcctggtcgatggccgggcaaggccgttcgcgtccattcatccggagatgctgcagcaactctcggtcttggagcgtccgacgacgatcctaacgatcgagaactatgcgagcttcaatcggcaagtccgggagatcgaggacggcagcctgatcgtgtataccggcggcttcccggcggctggagtcgtcgaatttctggcaaaggttcttacggcagtggcggccgaggtgccgttccttcattggggcgacgtagacgccggcggcgtgcgaattttcaggtaccttgaggaaaacctgccgcgtgggccgcgaccgcacctgatgactaaggatctggccgtgaaatcgggccagccggcggatgcggatccgagcttggcctcgatcgcaaggtccgacagcgcgctgcgcgagttggcggattggcttgcgttcggatcggatgtgcgccacttggagcaggaggcgctggatccggagcgcccatgggccgacgtcaccgcctcatga

SEQ ID NO: 44618 - DNA, 1473 bp, Bordetella hinzii 5132
atggcactcgaccacctcacactcaccacataccgcgatcggcatcctgcatggcgattgctggcctcgccacatgcgccattggtagcaagcttcctataccgggtgttcgttgcaccgaacgtgcggctgacgagcgaagcggatctggccgaaatgctggaagatgagctgtttgccctgcgcgaacagctcggtgcagaggtgtatccgaaagccgcaactgaatacctgaatgactggtgcgcgccggacaagggctggctgcgcaagttctacaagcccggcaccgacgaagcccagttcgatctcacccccgccaccgaaaaagccatcgcctggctggtatcgctgaccgaacggcctttcgtcggcactgaatctcgcctgctgaccttgttcgcgctgctggagcagatcagcaccggaagcgaggccgatccagccaggcgcctggaggaactgcgccgcaagcgcgacgagatcgacgccgagatcggccgcgtcctgtccggcgacgtgccgctcatggatgacacggccatcaaggatcgcttcctgcaattccagcagttggcgcgcgaactgctgagcgacttccgccaggtggaacacaacttccgccaactcgaccgcagcgtccgcgagaagatcgcgttgtgggacggcagcaagggggcactgctcgacgaggtcatgggcgagcgcgacgccatcggggattccgaccagggccgcagcttccgtgcattctgggatttcctgatgtccagccgtcgccaggaagaactgtccgcacggctcgaccagatcctcggcttgcccgccgtggctgcgctcaagccggagccgcgcacccgccgggtgcaccacgattggctggaagcgggcgaacatacccagcgcacggtagcgcagttgtcgcaacaactgcgccgcttcctggatgaccgggccttccaggaaaaccgccgcatcctcgaactcttgcacggcatcgagacccaggcgctggccttgcgcgacatgccgccggccggcgacgtgatgcgcctcgacgagatgggcgcggacatcgccttgccgcaggaacgccccctgtttgcgctccatgccaaaccacgcctggcggaactggtccttgaggacggtgacgacgacatcgacaccgcacgcctgttcgaccagcacgtcgtggacaagacccgcctgcgtgaggccctgcggcaggcattgcggcagcagtcgcagatcagcttgcgcgcgttgctggagacccagccgctgcaacagggattggccgaactggtcacctggctggaactggcccacgcgggcagccgctggctggatggcctcagggccacggtggatgacgatgtgcaggagatcatcgaatgggccatgcaggacagcgatggctccacggtacgacggcgggcgcgaatgccacgcgtgatttttgcgcgttga

SEQ ID NO: 44619 - DNA, 597 bp, Bordetella hinzii 5132
atggtgcatttgctcaaaggcgtgttgtaccgccaggacgacgagcgcctatgggccagtctgctgagcctgcaggcgcgtgtacgggagcaggcggcggtgttgttgctggatctggtgctggacgaagccgagggctacgccttcctcaaaagccagccggagccggaggatgtggacgccacaccccgtccgccgcgcctgatcgcgcgacggccgctgtcctacccggtcagcctgatgttggccttgctgcgcaagcgcctggccgaatccgacgccagcggcggcgatacccggctggtgctgtcgcgcgaggatatcgccgaattgatgcgcgtgttcctgccggacggcaccaacgaggcgcgcctcgtcgaccaagtggattcgaccatcaccaaggtggtggaactggggtatctgcgcaagctcaagcccgttgccggcgcagctcagcaggcacctcgctacgaggtgcggcgcatcctcaaggcgttcgtcgatgcacagtggctggccgacttcgatgcgcgcctggagggctatcgcaccgcattgtcaggtgccgatcgcgacaaggaagctggccgatga

SEQ ID NO: 44620 - DNA, 3378 bp, Bordetella hinzii 5132
atgaacgatttttcgctacaggagctcgatttcgtggccgacgacagccgcgtcggctttcgcctgcagcggctggaagttctgaactggggcacattcgaccggcgcgtctggcgctatgaactcgatgggcgtaacggcctgctcactggcgacatcggttcgggcaaatccaccctggtcgatgccgtcaccacgctgctggtgccagcgcaacgcatcgcctacaacaaggccgcaggcgccgagacgcgtgagcgatcactgcggtcctacgtgctgggccattacaagagcgagcgcaacgaaaccaccggcagcgcccgcccggtggcgttacgcgacaccactagctacagcgtgatcctgggtgtcttccgtaacgaaggctacggccaggcggtcacgttggcgcaagtcttctggtttcgcgaaccacagggccagcccgcgcgcttgttcgtgactgtagagcgggaactgtccatcaccgagcacttttccggattcggcagcgacattaacggcctgcgcaagaagctgcgcgcgatgggctgcgaactgaatgacagcttcccgccctacggcgcctggttccgccgccgcttcggcatcgagcacgagcaggcgctggagctgttccatcagacggtttccatgaaatcggttggcaatctgaccgatttcgtgcgcagccatatgctcgaaccgttcgacgtgggggggcgcatcgaggcactgctcggccatttcgatgacctcgaccgcgcccaccagtcggtactcaaggccaagcggcagatcgagttgttgacgccgctggtggaggatggccttcgccacgggcaaatcgccgccgagatccaggcgctgcgcgaaggacgcgatgcattacgcccgtacttcgccggcttgaaggcagcactgctggagaggcgcctggaattgttgactcaggatgcgacgcgctgggacgcccgcatcaagcaactgggagagcaacgagacaacgcccgaatcgagcaggggaagctcgaaggcgcactgcgcgagaacggcggcgaccggctgcaacaactcgctgccgccattcagcagcaggaggcagagaaacagcaacggcaggagaaagcggacgcctacaccacgctattgacgcgcattggagaagcagcgccgggagacgaagctgctttcatgacacaaagatccaccatcggagaacacgccgaagcgctgcgcacaagcattgcggaccacgatacgcagatcaatgaagacggatatgcgctgcggcggggtcaggaagaacacaaagcgctcagcgacgagatcgacagccttgcgcgtcgaaaaagcaatatcgatgcggcccaggtacgcatccgcgacgcattgtgcgccgccttgtccatcgccgaggaaggcctgccctttgccggtgaactgatccaggtgcgcgaggacgaacgcgactgggagggcgcggccgaacgcctgctgcatggcttcggcctgtccctgctggtgccggatgcgcactacaaggacgtggccgattgggtggaacgccagcacctgggcacgcggctggtgtacttccacgtgcgtgcgcgcaagcctactcaggccattagcctgcacccccaatcgctggtgcgcaagctgctcatcaagcccgacacgccgtactacgactggcttgaacgcgaactgcaccaccgcttcgatctggcctgctgcgacaacaccgagcagttccgccgcgagacccgagccatcacccgcgccggacagatcaaggacccgagcggacgccacgaaaaggacgaccgccgccgcatcgacgaccgcagtcgctacgtgctgggctggagcaacgccgacaagctgcggaccttgcgtgacgaacgtgaaggcctggaacagcgactgggcgacatcggtctgcgcattgccaacacacagcgattgcgcgggcaatgccaggcgcaactggaggccttggccaagctcgaagtcttcacccgctacagcgagatcgactggcaggcaccggcacgcgagattgcccggctgaccgaggaacgcgaccgcctcaaggcggcctccgataccctgcgggaactggaaagccaactggcgcaggtcgttgagcgcctgaaggagatcgaaggcgatcttggcgaggcacaaggcaaacgcggagaaattcgcagcaaacacgaaactgcccaggcacagcatgcgcaggctctcgaaatccagacgcaagccgcactcgacgacatgttgctgcaatctcttgagggctggcgcgccgaagtcctgggcgaccaccagctcacggtggaatcctgcgacaaccgcgaacaggacgtgcgcaatggcttgcaggcgcgcatcgatgccgaagacaagcgtctctcacgcctgaccgaacgcatcatcaacgccatgcgcggttttaaggaggccttcaaggcagagaccgccgagatcgacatcagcctggccgcgctgcccgagttcgagcgcttgatgaaggatttgcagcacgacgacctgccgcgcttcgaagcgcgtttcaaggaactgctcaacgtcaataccatcaacgagatcgccaatttcaacgcccagctcgcgcgcgagcgtgaaacgatcaaggagcgggtcgatgtcatcaaccaatccttgcaggtgatcgactacaaccccggacgctacatccggttgctggcgcaacccagccccgatgcggagatccgcgacttcctgcaggatctgcgtgcctgcaccgaaggagcgctgagcggctcggaagacgaacagtattccgagaccaaatttctgcaggtcaaagccatcatcgaccgcttccgggggcgcgagggactggccgagatcgaccggcgctggatgcagaaggtgaccgacgtgcgcaacggcttcctgttttccgccagcgagcgctggcgcgaggacgatgccgagcacgaacactactccgactccggcggcaaatccggcgggcagaaggagaagctggcctataccgtgctggccgccagcctggcctaccagttcggcctggaatggggggcggtgcgctcgcgctcgttccgttttgtcgtgatcgacgaagccttcgggcgcggctcggatgaatcggcccagtatgggctggaactgttccgccagctcaacctgcaactgctgatcattacgccgctgcaaaagatccacatcatcgagccctacgtgtccagcgtcggcttcgtgcacaacgaaggcggccgcgagtcgcggctgcgcaacctgagcattgaagagtatcgtgcgcagaaggctgctgccacgggagccgccccatga

SEQ ID NO: 44621 - DNA, 1206 bp, Bordetella hinzii 5132
atgacctggagccagcccaccgatctgcgcacgcaggtcgaacggctgtggcagcgcggcgaactgctgcgtaccgtggtcggcggtgacacactgaattggccattgcggctgtcgctgaagtcgccgtccgccgccgatctcagcaaccgtttcgatgccgtgcgcggctgggtgcgggagatcagcgccatgccgcgcgtgcgcatcgaatggcgcgagtggatgcaccgggtgcagggccggcagcgtctgccggacacgctgtggatcgatacgttggacgatgcactggcgatgatcggcaagaccggcgatgcccgccggttccaggcgctctggcagcaaactgccgaagcgcagcccacactgctggcatggctgcaaagatcgccgttgcagactttggcgctggccgaacactggccacgcctgctggccgtggtggcctgggtgcaagcccatccgcgcccaggcgtctatcttcggcaggttgacgcgccgggcgtggacagcaaattcatcgaagcccatcgcggtacgctggctcagtggctggatctggctttgccgacggaagccatcgaccacgctgctaccgggatggccgggtttgcccgtcgctacggttttctggagaagcccgttcgcatccgcctgcgcttgctcgatccgcaactgccccagcttcccggctgcaccggactgaccgacatcaccctggatgaggatagcttcgccacgctcaccttgcctgcgcagcgtgtgttcatcaccgaaaacgaggtgaacttcctagcgttcccaccggtctccagtgccatcgtcgtgttcggtgccggctatggctggggagcgctcgcccgagccaactggctgcatcgcgcctctctgcactactggggagacatcgatacccatggctttgccattctggacagcctgcgcaagtatttcccgctagccgcttcgttcctcatggaccgctccaccctgatggcccacgcacttcaatggggtgacgagcccctcgacaaacgccatacgttgcccttgtcccgactggtcgatgaggaggccgctctctacgacgacttgcgtcatgaccgaatccggccacagctgcggctggaacaggaacgcatcagctatcgctggctatgcgcggcgttggcgacaacagtccaggacgattctcggccgtag

SEQ ID NO: 44622 - DNA, 1479 bp, Mycobacterium tuberculosis TKK-01-0051
gtgctggacgacgacaccacgctgtcgcctgccgacctgctcgaactcaatcgtggcctccagggctcgccgacggtccgcctgctggccacgctgaacctcaacctctatgccacgctgatggaacgccagctcagcggcggcgtggtccccgagaccgacctcgtcgtacgcctcgagcgcgacctcgccgaactcgatcaggccggcgaacagtccggcctggccctgatcaagtcctgggccagccagggttggctgcaccgcgtcgccgaccagcgctccggcgtcgaacgcaacctgtgttacctgacccaggaggcgcgccgggcgctcgacttcctgcgcggcatgcgccggcaggacaccatcgccaccggcggctcgatcaacggcatcgcggcccgtctcaagcaggtcgcgctgcgcgtcggcaatgaccccgaacggatccgcgccggcatagcggccgaaatcgccgcgctacaaaccgaactcgatgccctcgaccacgacgccggtccgggtgagcacagccaggacgtcgacctcaccgacgcctacgacgaagcccacgccatcgccttgcagatggaacgcctgatcaccgacatcggccagtacgggatcatgatcgaacgggccaccgccgcgctcgacgagccgatcgagagcaacgtcgaataccgcgaccggcagcgacgcatgtacgccgattacgaggccgcctgggattcccagggccgcgactcgcaccgcgcgttcctgcgcatgatcaacgatcccgaccagcgcgccgagttcgaagccgacgtcgccgccgtcgccgaagccctccccgccctcgaccccgccctgcgcaaggtgatggccggtttcttcgaactggtcggccatcagatcgacgaggtggaacgcatccagcagcgctgcgcgcagcgcgtcaaacggtttaccgcgttcggcaccctcgaacagagccgcggcgtggcccgtcagctcaacgaggcgatcggcgccgcccgcaacctgctcaaagcgtcgctgaccgactcccggctggacatcgaactccccctggcccgccacgcgttcagttcggttggcgcgctgagcttccggatcggcgacctgtccaacccgaagcccgccgaggtcgccgagggcgaggtcgatctgaccagtttcgccgcgctgaccacccaggtcgacgcccccgcgatgtcggagatgatcaacaccgcaatcagttccggggcgccactctccctcccggatgcagtcgccatgctcgattcggcctacctcggccacgtcatcgtgctgtggtcctgggcgctcaagcaaccggaatccgcacagggttccgagtcggtgacggtccgcttccagtccctggacgggcgggaccgcgaaatggaggtgccgcacttgatgttcaccgaaccggtttccaccctgctgggggctaccgcgtga

SEQ ID NO: 44623 - DNA, 711 bp, Mycobacterium tuberculosis TKK-01-0051
gtgaccgtcgaagagaccgtcgactacagcgggttctccgcgctcccccaggtcgaccagacggcccgcgtcccgcagcagcgccgtccccggttcgacggcgacgtgtccgagctgcccgaccgcgcctgctgggcattgcagcagctgctgacgcgccgctacatcagtgccgaagccgatcgcgacgtctacacctgggtgctggagtaccgcgcgcaactgtcggtcaggctgtccgaattggacctgctgcttcgcatcgtcgagggcgctgacgtcgcgttcgtcgaacaggcccgctacgaatccgcccggggcgtcaagcttttgcgtcgtgaaccgctgggcacctacgactcgatcctggcgttgcacctggcgcagatgatgcgcgcctcgggtgatcaggccgtcgtgatcagccgcgacgaaatgcacgggctgttctccggtgtgctcaacgacgtcgaccgcgacgccgtcacgttcaccgcccgcatcgacggggccatcgcgcgcctgacgtcgctggagatcctgcgcaagacccgcgacgacgaggacagctacaccgtcagcccggtcatcaacgccgtgatgacggcctcggtgatcaccgaactgcggcagcagttcgagatcctgctgcgcggcggcgtccccgacgagcggggccacgacgacgaggaggaccgcgaggatgactga

SEQ ID NO: 44624 - DNA, 3363 bp, Mycobacterium tuberculosis TKK-01-0051
atgactgaacagttccacctgtcgcgcctacaggtcatcaactggggtgtcttcgacggctatcactccatcgcgttcagcgagggtggcgcgctgatcgccggcgcctccggcagcggcaaatcctcactgctggacgccatttcgctgggcttcctgccgttcaaccgccgcaacttcaacgcctccggcgacaacacggccgccggatcgagcgcgggcaggcggaccgtcgacaaatacgtccgcggcgcctggggccagcgcagcgatgccggcaccagcaaggtcatgtacctgcgcggcgatggcaccgcgtggtcggcgatcgccgtcacctaccgcagcaacaccggccgcaccgtcaccggcctggtgctcaagtggctcaccggcgaatctcggtcggactcttcgagccggttcgtgctggccgacggcgaccgcgatatcgagaatgtctgcaaccgctgggccgcgggccgcttcgacgcgtcggtgttcaaggacgactggcggttctcgaccaaggtggaatcgcagtacctcgcccagctgtacgccaccatcggcatccgcgcctcagacgccgcgcagcagctgctcggcaaggccaaatcgctgaaaagcgttggcgggcttgagcagttcgtccgcgagttcatgctcgacgagcccggcagcctgagcaggctgcccgaagcgctcaagcagatcgaccccttggtcgacgcccgtgaactgctggccgtcgcgcaacgcaaacgcaagatcctcggcgacatcgaaaagatccagcagcgctacgcctcggagtcgtccgacctggggatcatcgacctcgtcgaccagccgatggtccgcgcctacaccgatcacgtccggctcgcgcagtgccccgcgcagatcgaatcgctcgacgccaccatcgaccagctcggcaacgaatacgaagacgtcacccgccagctcaatcttgccaaggccgaaggtgattcgctgaacgcgcagatcagcggatccagcaccagcctcgggccgctgcagtcgcaggtggccgccgcagacgcgcatgctgagcaggtctcgcgccggcgcaccgcctacgaatccatgctcaccacgcatggtctcgacatcccggacaccgccgacgaattctggaatctgcgcgaggaactcagcacgcgggccaccgagctgctggccaaactggatcgcggccgggaagcctcgaccgatgccgagtacgcccagaaggtcgcccgcatcgcccgcgatgacgccgccaaggaactcaaacgcgtcgagcgtgtcggctcggcgcttccggaattcgcgctcaccatgcgcgaacacatctgcgccgctgtgggtatcgatcccggtgagctgccctatatcgccgagttgatggatctgcggcccgagcagagccggtggcgcgtcgcggtcgaaaaggtgctgcgcggtgtgggcctgcggttgctcgtccccgacagccactacgcggcggtgctgcggttcgtcaacgagaccaacatgggtgggcgactgcagttgcatcacgtacgcgcccggttcgtcggcgcggaggtcgccgaggccgagccgaacacgttggcgggcaagctgttcgtggtcgacccgacccatgcctgcgccgccgaggccgccgacgtcatcgccgcagcgggtgatcacatctgcgtcgacacccccgatgtgttcccccgcttccggcgcgcggtcaccgacaccggcctgtacaaggactccgagcgtctggccatcaaggacgaccgccggccgctcaagcaggccgactacatctaccagggcgatgtcgccgccaaggtcgacgcgctgaccgtggatctcgccaacgccgaagaggcgtttcgccgggcccgcggcgtcgccgaccagatcgccgccgagcgccagcagtggcgggaccgggccgcggcgttcaaggcgatctgcgaccaattcgagcagtggacccacgtcgacaccgagaccgccgacgggcacgccgaccggctgcgcgagcagttcgaactgctgctggccgacaatcccgatatcgaggccctcgcggcccgcgccgaggagtgctgggagcagatccaggctttgatgacccggcgcggcgccatccagacccgccgcgacgacctcgacggtcgccgcacccagctgctcgagttgcaggaacggctcgctccggcattcgtgtccgagccgttgaccgacctgctgaaccgctacgccgtcgacgtgccggttgccctggacctgctcaacccggaaccgcaccgcgacgcggtcttcaccgcgatccggcgcgaacgcgagcaactgcgcgaaagccgcaggcgctcatacgatgagctcgcgcgcatcctcaacaccttcgacaccgcgttccccgacgcgatccccaacgacagcgacgtgttcgacgagcgcgtgcacgattacgtcgcgttgtgccgccacatcgacgagcgggaactgcccgaggcctacgagcgcatgatgcgactggtcaccgagcaggcgcccgacgccatcctgaccctgcaccgggtcgccgagcaggaggcccggcggatcagcgaacagatcgaacgcgtcaacaccggtctgggggcggtcgagttcaaccgcggcacccgcctcaccctgcgcgccacctcgcgcagcctgaccgccgtcgccgaactcaccgagatcgtgcgggccatctcgcggcgcatcgccgaggtcggcctcggcgacaagcaggccatcctggatcagtacgccgacatcttgcggctccgcaaccgattggcatcgaccgcgccggaagacaaggcctggacgcgcgacgccctcgacgtccgcaaccggttcaccttcgactgcgccgagtgggatgtcagcaccgacgagctgatccgcacccacagcaacgccggcgacaactcgggtggcgagcaggagaagctgatggccttctgcctggccggtgcgctgagcttcaacctggccaatcccgaaagtgcggacaacaaaccggttttcgcccagctgatgctcgatgaggcgttctcgaagtccgacccgcagttcgcccagcaggcgctgcaggccttccgcaagttcggcttccagctggtgatcgtggcgaccgtgcagaacgccaccaccatccagccctacatcgacagcgtggtgatggtgtccaagcgcgaagccaccgggcgcaacgcccgtccggtggcgacggtcagcaccaagacgatcacggacttcaccgcgctgcggcacgagatgcgaacatcggcggcgctggtcccggccggggtgtga

SEQ ID NO: 44625 - DNA, 1524 bp, Bradyrhizobium japonicum SEMIA 5079
ttgttccgccatttgcatgacgacgcctttttagctttttcgcgcgatcacaagcacctgtacgcagcgtgtctgctggatctgcacgaacgcttcttttcaggcgcgccgtcgttcccgacgccgcagcaggtggtccacgccatctacgacgtcatgcgcgccaaccccgtcctctggaacgagggcgatgatttcggcagcctgccggaaatgatctccgcgagacgccgccggatccggaaggccgacgtcgcgctcgcttccgagaagggcgacaaggcgctcggtcttgcccgacaactatacgcccggctgctcgtctggggatggcttgaagaggaggaatacgggcttcgcgtcactgtggacatggctatgggaccgctgctcgtgctgcaacggctcgcgagcctcaacaaggatctctcgcagcgattcggcggcttgatcgtgcaaatccgcctcaacctggaggccgtcgaaaaactgaggcctgagatcaccgaccgcaagcagcgcgaagccgcgctcgccgtccgcgaggcgcgcaatcaggccgaccagttcactaagagtctgcgggccattctggccgacctgaagcgcgtccgacggaccgtcatggagtcgaaaacagtcgctacccggctcgaagcctttttcgaggagttcatcgaacagctcctgctgaaggatttcgagtccatcctcaccgtcaaccatccataccgcttccgcgacgccatcgtcgatctcgcgcggaggatctcctacagcccggaaaccatgcaggtcctcgccgaggagtacatagcttccagcatggcagccgacatcgaggacggtcgaatggccgcggccgacgacctgctggctatcgaaagcatcttcgatcagatcggggagatgttcgacaggatcgaggccttccgcaggcagctcgaagcccgggtccgcaacaccattaagtacgccgagcggggcgggcagggactcgtcggccgggccggcgacctggtgcggcgcctggatgccttactgcgcgacggcaggcaccacaaggcgacaatcgaatggagcatcgagccgctgcggtcgccctggtcggagcaccatcaggcgccggccaggcagccgcgccgtcccgtcgaagcaagggagctcgccgagccgccgtcggatccgttgtatgaactgcgcaagaagctccgcctcgagtacatcgctcgcatcgcgccccgccccgaggatgtcagacgattcctcgagggccaggtgccgccattcgcgaccagggaagcccgcttcatggaaatcgataccgtggacgactttctcgccttcgattgcgcccgccgatatgcgctgacaggcgaggttccggcgcaggtcgcggccgggttcgaactcgaaccgtgccccgacacgcccccacacgacagcgaatggctccgttgcgccaacttcctggtcaagcgatcgggcgcactccggaaggcgagggcggctcatgctcagtga

SEQ ID NO: 44626 - DNA, 639 bp, Bradyrhizobium japonicum SEMIA 5079; identical to SEQ ID NO: 41688

SEQ ID NO: 44627 - DNA, 1803 bp, Bradyrhizobium japonicum SEMIA 5079
atggagctacgccacctgacgatggtgaactggcacctattcgacgtcgccgacatcgacgtgaggggacacgtcggggtcctgggcgagaaccggtccggcaaatccacaatcctcgacatggcacaggtcgttctcaccggcgggagccggcggttcttgcgcctgaacgcggtcgccggcgatagcggaaaatcgcgcagcggctcgaagcgcagcgtcgtcgattactgccttgggacgctcggcgaagatcagcgccggcgcgacgaggcgcgcacctacatcgcgctcggtttcgaagacacggaaggcgcccggtcaccggtcacgatcggcatggcgctcgaggcgcgcaagtccgacagcagggagaccgtgctggcactcttcgtagccgtcgggaccgttctgagctccaaggacttcatcgagcagcgaggaaagtcgcaattcccggcgcagtgggaggacgtgcgcgcccggatcgtcgcagcggtcggcgaaggcaacttcgtcaatcatcgcgaccgggcgagcgactatgtccgcgagtacatgcgccatcttctgccgcattcgtcctttggcgaacagaacgccagcgccctgcagaaatcaatcgtcaacgcgatgacgctcgatcacaaccagacggcgacgcagttcgtgcggaactacatcctcgaggacagtccgatcggcatcaaggagctgcgcgagtcgatccagacataccgcaacatcagcgagaccatccggaaaatgcgcctcaggctcgaagccctaagggcgcttcggggcgtcctcgccgcgcttgaagaggcgctcgagaccaagttcagggaggaatgggtcgcaaaacgcgcgacttggctcgcggcgcgcgcgacaaacctggacttcaagaccaagcggcgtaccgagatggcgcgccgggacgccgcagcaaaagaactcgaattcatcgacgacgacgtcaaggccatcgataaggagatcgaacgcctcacggccgcgatcgccgagcacgatgccaagaccggcagaaagtccctgcagcagaccgccgatgtggccgggcaggcggcgcaccgcgcctcggcggacttcaaggctcgcatggagaacatccgtcgcctggagccgctacgcgcgatgtgcgcggacggtttcgaggacttcgttcctgcgcttgagcgtcttctgaccaccaccgccggggccgacatcgggggcgtctccgacgaggtcaccgcggccgagaagtccttcgcggcaagcggcgccaaatggctgccgaagatcgacgaagcgcgtcaaaggatcatcgcggagctttccggcctccgcggcaggcgcgacgaggtgctcgaacggatccgacagcacgccgccggaggggcgcgcgcctatctcggcgacgacactgaactcctctgccgcaggctgcggcagggtggaatggtcccgcgcgtactctgcgacatcatcgaagtcgccgaaccccagtgggtaggagccgccgaggcgctcctcggtcgcgaccgggaagccgtgttcgtggacagagcggatatcagcgccgcagttcagggccaagccggagcgcggcactttcccctcgatcttccggagccaggatccggacgcgatggccttcatcatgcgccgctacggcaacgtccgtctcgccgacacgctcgaccagttcaacaggcccggccgggcgataatgaaggacggcctctacgacgacggactcgtccggagccatcgctggatcgaatcctcgcagtataa

SEQ ID NO: 44628 - DNA, 1437 bp, Candidatus Methanoperedens nitroreducens
atggatcacgacattataaagtacctgagagatcataatcccactgtaaggcttttaagactggataacgcgcctcttatcattagttttttatttcaggaatttaaaaagaataacagaattgtcatttcaaatacccagcttataacaggcctttcagactatttatataatttaaaacaaagttatggagaagatgcttaccctggtacagcacagaattatcttgacaaatggtcaaatgatgggtttttgagaaaatattatacccctaatagtgatgagccggtatttgaactcacacctgcaacagagaaagctttagactggataaaagatctagataaaaaagaattcgtaggcacagaatcgagattgcttaaaatctttgatatcctcaaagaaattgtttacaaaagctctgatgatcctgatataaggctggaggaactggagaggcaaaaacaggacatcgaaagagagattgaaaaaattcaatctggtaatattgatagactaaatgagacacagattaaagagcgtttctttgatttccatgatactgcgcgcaagttgctatctgatttcaggcaaattgaatacaatttccgtgagcttgacaggtctgtcagggaaaaacaggtaaacagtaacctgaaaaaaggaaaattattagaagatatttttaaagttcaggatttgatctgggatactgatcagggacgaagtttcaaagctttctgggagtttttgatgtcccgccataaacaggatgaactgagtgaactgattgaagcagtggttaatttgcctgagatccaaaaggtaaaacaggatgattttatagaacgaattaaagtaaatttaatagatgcaggagacaaggtaaacaaaaccaaccatcacctgattgagcagcttagaaaatatttagatgatagaacttatcttgaaaataaacgcattgtagagatcattgtgggaattaaatcgcttgcaattcaagtaaaagacaatcctccaaagaatagggatttcttgttacttgatgatcgtcccgggattgaactcataatggaacgccctctgttcaatgttcgtaagaataccgagattaagaatatagaatttgaagaaggctatgctggttctattgatacagatgcactgtataaacaactctatattgatcaggaagaattaaaaattaaaatacgagaaatgcttaaattcaattcccaggtaacattgaagcagataacagaaatttatcccgtagaaaaaggtttatctgaaattattacttatttaaatatcgcttctaaagataaaaaatcctttattgatgatacggttatagaaaaaataactatatcaaataaagaaacaaacaaatattttgaaatacaagtacctcaagttatattttgcaaatga

SEQ ID NO: 44629 - DNA, 582 bp, Candidatus Methanoperedens nitroreducens
atgacagagaataatatgatacctccctatgctcctgtaatcataaaactcctgcagggagtaatatataatgatgataaagaaccctgggataatctggtcagctatcaggtgcagataaaagaatattttgaactgatcgggatcgatgttcatatatatgaatcagaagggtttgcttttttgaaacagaaacaatttgatgagggacaggagattaacttacccaatcttattgagaaacggcaattgagctaccctgtaaccctgctctgtgtcctgctggttgaaaaattagtcgaatttgatgttacaggaggagattctacaagattgatagttgataaagaagagctcaaagaaatgctgaggatatttctgcctgagcggacaaatgaagcaaagctctttgacaacattgatgcgcacattaataaattagtggattacgggtttttgaggaaactcaataatgctgagagcaaatacgaagtgaaacggattttaaaagccaaaattccggcagatacactccaggagataaaaaacagattggaggaatatgcaaaatctattgcttga

SEQ ID NO: 44630 - DNA, 3366 bp, Candidatus Methanoperedens nitroreducens
atgcaaaatctattgcttgatctcgcagccgataatacccggaccggatttcgcctgcagcgcctggaagtgttgaactggggaacttttaaccagaagatatggagaattgagccctgcggttacaactctttgcttacaggcgacatcggctcaggaaaatcaacattagtggacgctattattactctgttagttccctatcaaaaaattgtttacaacaaagctgcaggagcggaaagtaaagaaagaacacttctctcatatgttcggggcgagtataaaaatcaaaaaaatgaattggacaattcctccaaacctgtttttttaagggatgaaagtgattattcagttctactggcctgtttttataatgaaggatacggtcaaaaaattacattagcacaggttttctggaacagaaatgaaaaaatagagaagttttttgtattatcagggcaggatttaaatattatagagcatttcaaaattaaaaatcaagaaaaagatatttttccacttaaaaagcggttaaagaattttcctgatactgaagtttttgaaaatttcagcgattacagttctaaatttcgcaatatttttggtatcaaatctgaaaaggcacttgaattgttttatcaaacggtctcaatgaaatcggtcggtaacctgaccgagttcgtgcaaaaccacatgcttgaaaaatccgatgtaaaagaaaaaatagatgaattaaaaagaaactacgaaaatctcagaaaatcatacgaagcagtccaaaaagccagaaggcagttgcagcaactgcaacctttagtacaggaaatagatgaatttgaaaaaacaagcattgagattcaggaattacagaattgtttgggttcgctgccagtatactttgctattcaaaaagccagacttttacaaaacgagattaaatctctcaatgaagaactgggaataattaacaatcagatcgaagagatcagaattgatcttctgcgattgagaaataaggaatcagaagtaaaagtatctattgataataataaagaaggtcagcggctaaaagaaattgaagacgagatcaaaagatttgaagagatcaagcaggccaaattaaataaggagaatcaatactcgaaactatcagaattattaggatttccaaaagcaacagatgatagagtattctatcaatcatttcataaggcaatcaatatccaggaagaaataaagggtgaagtatcagagctgattgaaaacagagataatttaaaaatccatctgaataagatcaatgaaacttacaactctgatagagtagaattagaatcattaaagcaaagagagacccagatccctgaaacaaatctaaaaattcgtgaattgattctacgagacctggtactggatgaggatgaattaccttttattggtgaactcctgaaagtaaaagataaagaaaaattgtgggaaggtgctattgaaagggttctgcataatttcggattaagtgtgcttgtagctgaggagcattacaggcgagtaagtagttatgtagataaaacaaatctaaaaggacgattagtatatttcaaggttcctgaatctatcaaatatcgtacacaaaaagaaattttagaaaattccctgctcaacaaaatcgagattaaatcagatacgccattttacgactggcttgagaatgaattaacagaaggctttgattataattgctgtgagaccattgaacaatttcaaagggaatcaaaagctattacccggaatggacagatcaagggcgggaaagccagacatgaaaaagatgaccgcaggagtatttttgatcggaaacattacattctgggctggagcaaccatgaaaaaataaaggcaattgaaaaagaggtattaaatcttgaaaaccaaataaaagatgttaagacaaaaataaaatcaattgaaagtcagcaaaaacaactgcagacgaaaggatttaacctgcacgatttcataaaatttaaagattatgctgaaataaactggcaaaaagaagctgttgagattgaaagactaaaaaaggaaaaagaagaattagaaaaaagctcagatcaactgcagtccttaaaaaagcaactggaaacgactcaaaaagaaattaatgataaggataaccagcagggcttaaagcaaagggataaggggaaaattgaaaccactattacgaactatgaggaacagttaaaagattgtaatcagatctcagataaattatcaatcgaggaacaagaaactttcttcccaggaattcaagatttcttgcaggaaaaagattttaaaattaaaacaatagacaaattacagaatgaaacaaggaaaagtattgaagatataaaggaagataaaaacaaaacagagaaaagattgcgtgatggcattatttccaaaatgcaaaaatacaaaaatgagtatatagaagagaccgttgaagtagatgcatccatagaggctatccctgagtttcggcagtttctgagaaaaatagaagaagaagacctgcccaggcacgagaaaaaatttaagaatttactcaatgaaggcaccatcaacgacattgctattttcaagaatcagttagagagttttgcaaaagatattatagataaaataaaacaaattaataaatcactgatagaaatagaatataatcctggaacatatattgaattactggcagataaagttcaggatatagatattagagaatttcagatccagttgcgtaattgcctggaaaatacctttggtgaaacaaacctttataatgaagaaaaattcaaccaggtaaaattaattctggatagattcaatagcggtagtcatgttgatattaactggactaataaagtgacagatgttaggaactggtttacttttactgcaagtgaaaaatggttagaggataaatcagaaaaagaattttatagtgattcatcaggtaaatcaggagggcaaaaagaaaaattagcttatacgattttagcctctgcgctggcttatcagttcggtttagaatggaaccggacaaaatcaaggtcttttcggtttgtggtcattgatgaggcttttggtcggggctctgatgagagcacccgttatggccttgagcttttcaagaaattaaatctgcagttacttatcataactcccttgcaaaaaatcaatataatagagaactacatccgttcagttcattttgttttaaatgagaacggtaataattcacttgttaagaacttgaccattcaagaatatcagagagataaggaaaaatacatgaaccgaactgaatctcaacaatga

SEQ ID NO: 44631 - DNA, 1197 bp, Candidatus Methanoperedens nitroreducens
atgataacgcctgaagaaataaaaaagcaagctgaacgctggtacaaagattttttgattgcttccattaatggggaaagttttttcccgaaagagattcgatttggcaggatcagatcatctgagacgcttgaaagtttttcaaagatcaatcaggagattcaaaatttaaaaaaaaaatcgaaggaacaatcaggctatggctatcttatagagtttatcaaaagaaaagaccagaaaatcggtgagcagttgttccccgacaggatttattttgaagatgaaagtgattaccttaaatttatcaaaaaagaaaaggaataccaggaatttaaacgtgccgtagatcagatcactaacactgttccagagcttcatgaatggattttgctaaaccctttaaaaattattgatcatcttggaaaatggacagatttgataaaagtatgcaaattcttcataaccaacccacggcccaatctctatatcagagaactaccgttagaacttcatactaaatttatagaagaaaataaagccataataaggcatcttttagattttcttattgacgaatatatcaacaaagaagaagttgaatttgagagaagatttaacctaaaatacagtgagcctttaataaggttaaggattttagatgaagagattgcgaaagagtattttagcggattgaccgatttaagcattcttcaatctgattttaatatccttaatattagctgtaagaagatttttattcttgaaaataagaccaatttctcaaatatttttaactttcttacgttgcccctcttaaaagattccatggctatttttggaaaaggattccagctcaatttgttaaaagaagcaagatggctgagtgataaacagataatctactggggcgatatagatacccatggttttcagattctctcacaacttcgatcatattttccaaaaactcagtctttgatgatggattttgaaacgtttaatgagtttaaacaattcgctgtaactggaactgaaacaaatatcaatcaacttataaatttaacagcagaagaaaatcagctttttgaatacctgctagatctaaaggaaaaaaatcgtttagagcaggaaaaaatcaatcattcatttgctttgagaaaaatagagaaactgatagtttcaagatctggtctctaa

SEQ ID NO: 44632 - DNA, 1470 bp, Xanthomonas arboricola pv. pruni; identical to SEQ ID NO: 44450

SEQ ID NO: 44633 - DNA, 702 bp, Xanthomonas arboricola pv. pruni; identical to SEQ ID NO: 44382

SEQ ID NO: 44634 - DNA, 4068 bp, Xanthomonas arboricola pv. pruni; identical to SEQ ID NO: 44383

SEQ ID NO: 44635 - DNA, 1500 bp, Pseudomonas aeruginosa MH38
atggaagaaagcgcacaacagtgctcagaacgctatgtatccacccgcagccaacaccctgcttggcttttgcttgcatcacgccgggctccgcttgtgttgggttgcctgcggacgctgttcgagcgggcgcacgatgggattcccatggaggatgcgctgcaagcgctgtccgaaatgctggctgcttatgccagccaggatctttacgagatcgacccggatgcaacgcacatccaggcaggtcgtgaactccgtgaatggatcaagcggcgccttgttgtagagcgagagggccgcatctatgcaaccgacgcgctggagtccgccatacagttcgtcgactcgttggatagtcgtatcatgacctccacggcctctcgcctttcggtggtccagcgcgagattgaaaacctggaaacgggtctgaaccccagcccaagtggccgtattgccagcctgcgccgccgaatccaggacttggagcacgagctagcgcaggtagaagctggccacgtcgtcgtgctggacgaagctcaggcgatagagggtatacgcgaggtatataacctggccaccagcctgcgcgcagactttcgacgagttgaagactcttggcgcgaagctgatcgcgccttgcggcaatccatcatcagcgagcagtctcaccgtggagaaatcgtcgatcggttgctggacggtcaagatgcgttactcaacacaccggaaggacgtgtcttcgaaagtttccagcagcaactgaggcagtccgccgagctggaagtcatgcgtgagcgcttgcgtaccatccttcgtcatccagcggttccgaaggcactgaatcgtccccagcaacgtgagctgcgttggctggcgttacgcttggttcgggagtcgcaggctgtgcttcaggcgcgtgcccgaagcgagcgcgatgtacgtggcttcatgaagacgggcctggccgccgagcatcatcgcgtcggacagttactcaacgatttcttcaatctagcgctcagcgtcgactggcaacgccaggccgtgcgtcgtagcactgtccgtttgccgccggttggcgtagccattaccggagtcccagcgattgagcgtctacgtttcaagaccctggatgacgatgacacgggcgagctggatctgagtctgaagccagcggggctggaacagattgacgatgacttctgggatgctttcgacgggttggatcgcgaagcgctgattcatgacaccctggcggtgctggtggagcaggggcgacctgtgagtctcggggagcttgcgtctttgcttccacctgctcacgacctggaaacctttgcgctctggttggctatggcgcgcgaggcaggtattgaggtgctgacagaggagcgtcagctcgtggagctagttgacgaggatgagcaacgctggcgcttcaatctgccttatgtcggactcgaccacgaggcactcaaggacatcgattgggagttgtga

SEQ ID NO: 44636 - DNA, 750 bp, Pseudomonas aeruginosa MH38
atggcaggggtcttcgatcgaattgcaggcgcctctggtgccgacgaaacggagctgacggtggagcccatggctttggatgacggcatggatgatgaacagcctctcatgagcgccgctgtacaggtcgatgagcgccggacgccgcaacgggtacgggaggccgtacaggaaatgctcaagtacggtctgctggaagagagtcacaagcccaacctgtatcgctcagcgctttccaatatcgaggcggtcgacagaatcctggagccgctcgaccttgccatggggctcgacgaggttcggggcctgttgttcgttatcgttcgccagggcgaggtggccgagcaggatgactggtcgcaccccctagtgcgtcggcaaaggctgaatctggagcagtctctgctgatagccatcctgcgccagcagttcatcgcctacgaacaggaaagcggtacgggcgccagtcaggcatcggtagtggtcgatgagctgattccccaattgcaggtttacctgggcgagctgggcagtgaggcaaaggagcgcaatcgcatcatcacgctgctggatcagctcaaggggcatggcctggtgtcggctttggacgcccatgatcgcgtcatcatccgtcccatcattacccacttggctaacccggagaacctgcaggcactcgtggcatggctgcgagagcaggtggagggcgcggcgacgccggctgccgatggcgaggaggatatggcatga

SEQ ID NO: 44637 - DNA, 2814 bp, Pseudomonas aeruginosa MH38
atgcgggctttgcgtcagatggagaaggatgggacgggtatctggccttatcccagcaagaaagctttcttggccaggctgagggattacttcgaggtcggtgaaatcgcattcaccttgctcaaccgcgctgccggcctgaagcagctcaatagcattgacgagatctttcgcgagttggtgctggatgaccgttccgccttcgagcgggccgccgaggtcgccggcagcttcgatgatctaaccgacattcaccgagaactggaaacggctagaaagcagcagcgctcattgcagccggtcgccgatggctgggagcgttaccaggtcttgcaagaacagctgcacgataagcaggctctcgaaggtatcctcccggtttggttcgccgagcaggggtatcgactgtggttggctgaaaccaacaggctcgagaaggagtacaaaaaggccgaactggatcaggagcaatgcaaaagtcagcttgaggcccagaaaggtgtggtcgatcaacatcgccagcgctacctgcgagtaggggccgcagggatagatcaattgcgcgagcgcatcgctgattgggtgagggagtgcgataagcgcagcctgaaagccgagcaataccaactcttggccaaaggccttggactagcggatgagttatcggccgctgctctcaaggagaatcagcagcatatcgcggcacgcctggaaatactggaccaacaaattactgacgcgcgccaaaaggcgttcgacgcaggcctcgtccagcaggaactcaatggtcgcctacagaccttacagcaggagggtgctgaggttgagaaacggccaggctcgaacctgcccgggcaatttcatgctttccgaagcgatctggcgcaggcgcttggtgtcaatgagtcggccctgcctttcgttgccgagctggtgcaggtcaagcccgaggagctggactggcgtggcgccatcgagcgggcaatcggtagccaccggctacgcatcctggtgccgcaggactcatcccaggccgcactgcgttgggtgaatcaacggcacaaccgcttgcatgtgcgcttgttggaggtacaggagccgacgtcgcgccccgtgttcttcgacgatggttttacccgcaagctgaccttcaaggagcatccgtaccgagaagccataaaggcactgctggcggacaatgaccgccactgcgtcgaaagcccggagcaattacgtcatacccctcatgccatgacggctcaggggctgatgtcgggcaaagaacgcttcttcgacaagcaggaccagaagcgtctggacgaagactggctgaccggcttcgataaccgtgaccgtctggccttcctggctgagcagattcgcgaggtcaatgagcggctcgagccagccaagctcgccttggatgctgcccagggcgacgttcgtcagttggagactcaagcttcgctgctgaatcgtgtcaaagaactgcagttcgaggatattgatctgccgggtgcccagagtcagctggagtcgctgcgtacgcaactggccaccctgacgcgccccgattctaaccttgccatgatcaaggtcgagctggatgcggccgaggccctgcaggagtctctggatcaacagctccgccaactgatcgaacagtacgttcagttaaaatctcagtttgaccaggccgcatccgctacccgtaaggcctataacagcgcggagaaagggctgaacgatacgcagcgtgaactggcgcaagcgcatttcccgactctgaccgcggatgacctcggcgatattgtcgagctggagcgcaagcatacgcgtgagcttcaagggcagctcaaagcgcttggcgagaaactgggcgatcagaaatcagagcttgccaaacgtatgtctgatgccctcaaggtagacaccggggcgcttgcagaggtcgggcgagagctggtggatgtccccaggtatctggagcgtctgcgtgtgctgaccgaggaagccttgccagagaaactcaagcgcttcctggaatacctcaatcgctcctcggatgacggcgtcacccaactgctcagctatatcgaccatgaagtctcgatgatcgaggaacgcctggatgacctgaatagtacgatgcagcgtgtcgactttcagcccggacgctatctgcgcctggttgcaggcaaggtcatccatgaaagcctgcgcaccctgcagcgcgcccagcgccaactgaactcggcgcgtttcatcgatgatgaaggcgagagccattacaaggcattgcaggatcttgtggggttgctcaaggacgcctgcgaacacagcaggaatcagggagccaaggcgcttctggatccgcgcttccgcctggagttcgcagtatcggtgatcgatcgagaaagcaggaatgtcatcgaaacccgaacaggttctcagggcggtagcggtggcgagaaggagatcattgcctcctacgtgctgaccgcttccctgagctatgcgctttgtcccgacggcagcagccggccgttgttcggcaccatcgttctcgacgaggcgttctcgcgcagctcccatgcggttgcaggtcggatcatcgctgcgttgagggaattcggcctgcacgctgtcttcatcacgcccaacaaggaaatgcgcctgttacgccaccacacgcgttcggcagtcgtcgttcatcggcgcggcctggagtccagtctggtttccctgagctgggaagctttggatgagcatcatcaacagcgcatcaaggccatgcatgaagtcgcccactga

SEQ ID NO: 44638 - DNA, 1395 bp, Nitrincola lacisaponensis
atgctcttcaataaattacccgatgccatattcttgccattatccggccagaatcgccagatatatcaggtggttctgctggaactggccgatctgttctttgatgaagatctcatcgatccatttatcccgcgtgatctggtgcgttccagtattgagaatgcggtggtacgtataggggttcgacgctgggaagccgaaggcgatgacgacgccgagccaccacgttccagtgcagactacactaaccgtatataccggcgcctggtcgaatgtggctggcttgaagaagaacagcgcatctatcgacaatatgtgctgctgtcgccttcagtcagttacatgctgcgtgcgctggtctcgattgcgcggttggaaaagcgcagttatggtggtgcggtactgaacgtactcagctcactggaagccgccattaatgacccggtgggtcgaggtattacgctggctgaggccgctcagacggcagcagagttcagcgcccacctgaccgatatgctgctgggtctgcgtgagatgaagattaccctgtcagagagcaaaaacccgcaggagattgtgcgtggtttctttgacaggtttgtagagcagattctggtatctgactataaaacgctgaagacccgcaataacccgttccgctaccggcgccagattatctccatgctgcgtgacttgcagtttgatctgttgcgtatcgagcagctcagccagcactatcagttgcagtacgagctggactacgacagcgctgaagccatggtgcatcagcatatcaaccgtattatccgtatttttgaatcagttgatcagcgcctggctgcgattgatgatttccgctaccagctggaaaaacgtgtggcggataccgttcgctacatggacaagaccacgccaggtatggcggcgcgtctgtctcgactgattgccgagctggggcagcgaaagcgtggcaaattgccgttacccaaaacactggaagaggtggcctttatttcgccgtccagtgtgcgttcgccaatacgtcgtcgggttgaagccaaaccgcgtgttattacccgaaccagcatcgatccgaaagtgctggaactgcgccgcctgttcaaggaatacaaagagcgccgggaagtaaaaattgatcgaatcgaagcctatctgtcacgtcactttgatggacgacagacactgaaggccaccgagttttcgatcgactcggtagaagactatatctgtttcagttacatccgccatctgccgtcgctgggtaagaaagcccgccaggtggccagccagtaccgcattgagtttgatgatacctatgtgtgtgtcgccgatgtggtggagtgtcgtggttttgaaattcacaggaattcatga

SEQ ID NO: 44639 - DNA, 705 bp, Nitrincola lacisaponensis
atgttaggtgatctgcaaaaagcattgtcgcgtgccgaaaaatatgaggccgaagactttacacgtgctgccaacctgttgctggtcagccagtttctctatgctgaccgacccttgcatcgcgacagttattttttgatttctgcgcatgttgattactttcgcaatctgtttgaggcgattggctggagtctgatctatcagccggatgaggcctacctgggtgtggttcctcagggtgatgagcgggtgctgaagctgcgtctggatgaatccttgctgctgctgtgtttgcgacagatgtacgaacaaaagctggaagagttcgaaatccaggatggtaaagcgtttataaccaccgatgccttgctgcgtttgtatgaaaacctgaccggcaaagagattcccaacgaaacccgcatgaaggaaatactgtcgctgtttacgcgccacggcattgtggagcgcggcaaggcggatgaaaccgatcccaagaatataccgttaaaaatcagcccggtgatacgtcaggtagtggttgaggactatatcggtcagctggaagctctgtgtgatatcgattccagtgatgatctgtcagatgacacggcagatgctgagcccgaggtagaagatacctctgctgcaagtgccagcactgagaccgacacaggtacgaaggagaacagccatgaaacagcttaa

SEQ ID NO: 44640 - DNA, 3432 bp, Nitrincola lacisaponensis
atgaaacagcttaatcgcattgtgctggtgaactggtacgtactgggtgcgatcgaaattccgatcaaaggaaatgttgccattgtcggcccgaacggttcgggtaaatcttcactgctggatgcgattcagaccattctgatgggcggccacaagcgcaacctcagcttcaacgcgtcagccggagagaaatccgagcgttcgctgcggacttactgcctgggtttcctcgatgatctcggcaaaaaggtcaatgcgcgtgaagactcgctgacctatatggcattgagcttcttcgatacggaaacagccaaggaaagctgcgtcggtatcgccatcagtgcatccacagccagtgcagatgaagatattctgggccgttttattctgccggacttctccgtgaccctggatgacttttctgtcaaacagggtgaagggcggatgcccaagccctggccggaagtgcgtgaaaacctgctgaagcagtgtccggatatggtgctggaaaaacgtgccagccgttttgtcaaagaaatggtgacgcacctgagccatgatgcccagatgccgaatgatgatgaaaagttcgtcaaaaacttcaagaatgcactgaaatttgtgccgattgacagcccaacccgcttcattcgtgagtttgtactcgacgaaaatattgttcatgttggtgctttccgtaaatcgctggatgaatatcgggcgatggagcagaagacccgggaagtggcgaaccgtatcgctgagctggaaaaggttcaggagctgtgtcagggcattgcgcgtaacgtcaaaaactcggttgagtatgaatgggtcgttcacgaaggccgttttgagcatgcggacctgaagaaagaggaagcggcagagcggctggaaagtttcaccgaacaggaatcgacgctgcaggcagaactggaagccaacagtgaagcgttgaacaacaccctgcaggatctggcaaatgcccgtgctgaactgaataacactgattcggcacacaaggtgaatgcgctggagtcgcgtattgccgcacgacagcatgaagtatcggttgtgcgtgaaaagatccagcaggtatataacctgatgcgcaccactgtcggcttttccgagcagatggcagtgctgccggacaacttccgtcctgtcgtagagcagtcggtacagctctggcgctcgggtgagaataccctgagcggtatgtggccggagtcccctgtcgaggtggataacgcactgggcaagctgcgggaaatggttgatccggttcgcaaggcgattgcacgacgttatgaagagtccgtgattcgcatcaatgagctgcgtacccagatacagagccagaaaagtgccgttgaacagctgcagcaaggccgcgcgccggttcgtcatgccacacgggaactgatcagcctgctgcaggagtatggtattgaatcgacgcctatttgtgagctggtcgatattaccgaagacaagtggcgtattgccattgaatctttcctgggcgcacgtcgcgaggcattggtggtttcgccagaccgcgtcaaggaagcgatcacactttaccgtcgtaaaggccgccacctgaaaggctgccgaattatcaacaccaccaaaaccgatgagtggctgaatcgggccaaacgtggcacgctggtggaatttattgaaactgacaacgagcatgcccgcgcctacatgaaccgcgcgctgggcggtgtcatggctgtcgaaactgaaaatgaactgctgcgtcatgaacgcgcattgacctacgactgcatgctgcagtctgaaggttcgaccacggcaatcaatgaactcagcccgatcatgggtatccggcgccgtggtgatcagctggcccagcagggcaagcaggtcgatgaaatgattgcggagttcaccacgctgggcaagcagcatgaaaccctggagaagttgcgtgatgcgctgattcagttaggttcagggctgttgcaggttaatgagcgggtgtttgatctggttaaccagcgcgaccagctcaacagcgaaattgaaggctatcatcaggcgattgtggatatgcgcaatcacgatgattccggtattcagacccgtattgcggaactggccgagcagcagaaaaccacggaagcacgtcaaaagtcgctgatggacaagctgcagaaagtccgtactggcatgatcaaggataatgcctcactcgaagtgctggaccgtgagttgtccgagcatgcgcaggcacgcagccgttgtgaggaaaatcccaactttgatgcacagtctgcccaggaaaaacgtgattacctggatgagagttgtgacggtgaactggagcgtgtgatttttgaagcggcaaaaaaagctcaaagcgagctgcagctgcatgagaaaaagaaaaatgcagtccgtgacgcggttgcccagtacaaggcacgttaccatggcggtggcatgacccatcagggactggataacatcagtgccgactccactcatgaggatctggagcgttacgttaacgaaaccgtgacagccttgcaggaatcggaactggcgctttacacccagaaagccgagcgggcgcgtctggaagcggaaacggcattccgttctgactttgttgcgcatctgaatgatcagatcgacaagatcaaagaactgatccgtgagctgaacagccatctgaagaaccgtccattccacaaggaaatgtacagtttcgagatgatgcccaacccggaactgaaagatattctggagctggtagaagcctatacgcgcatggatcaggcgaatgtgggttcactgtttgacattcaccatgagcaggattcgggtcaccgtgatgcgctggccaagattcacgaagtactgaaaaacgaaggcgaaagcacgctgttgcaggactatcgtaacttctacaacttcgagctggtggtgaaagaccttcagggtaatcgcaaaaccaccctgacccagcgtatcaaaaccggctccggtggtgagcatcaggtgcctttctatgttgccatggcagcagcgctgggtgccacctatcgcctgaaagagggcagtgatggcaaaccggtggggggcatgagcctgtcagtgtttgacgaggcctttaacaaactggactctgaaaacaccgtgacctcgctcggctttatgaccgacctgggtctgcagaccatcatcgctgcaccggatgagaagtactcgctgctcagctcctgtatggataccatcatcaacgtatgccgtgatggccgagtggtggatctggatgtggagtttccgaccgaaaaaggcaagcagctgctggcctccgaccatccttacaaaatgatggctgcggcagaggaaatcgaagcagaagcggaagccttgttgtaa

SEQ ID NO: 44641 - DNA, 1476 bp, Fusobacterium necrophorum BL
atgaaaaacgatttaatagaacatatgtcttatcattctttacatagcttaaggcgttttcatcctgcttggaaattgatggctgcagacaatgctccttttttcttgtccttcttttttaaagaatttatttttacaaatgaaagagagattcctgaacatattttgatgaatcaccttgacgattttatggaagaaattccttatattcgagataataaaaagaaagcaaaagaatatctagtggagtggtctgatgacagttctggttggttacgaagattttatcctagaaatagtgatgaaatccattatgatttgacttcttcaactcaagaagcaattgattggattatatctttgaaaagtgagcaatttattgggacagaatccagacttatgatgatttttggactttttcatgaaatattgtcagggacagaaacggatccagagttaaaaatccaagaattggaaagaaaaaagttagaaattgaaagagaaatcgaattggtaaagcaaggaaaaatgaaaaatttagaatctactcaaattaaagaacgatttttacaagcttcttctatgtctagagaaattttgtctgattttcgtgctgtagaacaaaattttcggaatttaaatagaactatgcaagaaaaaattgcaagttgggagggaagtaaaggggaattaattgaagaatatttttctgaacaggatgatatttataaatctgaccaaggaaaaagttttgaagctttttttaaattcatcatgtcaaatgatgcaaaaattaattttgaagaaagtattgaaaaattaaaaaatttggaagaaattagagaacttgtcataaaaagtggaatagagagaattgttgatgattggctgaatgctagtatttatgtttggaataatgtagaagttatgtcagagcagttaaaaagatatgtagataataactatcgagaggaggaaaggcgaatcaatcaaattataaagaatattgaattgaacgctcttaaaattaggggaaaattgtcaaaagagcttttttttgaaattgaggaagtgagccctgctctaaaattaccttttgatcggaaattgttcacaccacctaaacaaatagaattaagagatgaagatattgagtatggagaatcattggattctgatgaagtgctatattcccacatttatattaataaagatatattaatagagaacataaaagaagaagttgatgaaaaaggagagagaactttatctcaaatcatagagcaacatcctttacaatatggattagaagagctcagtgtctacttaggaatagaatcttataaattagaaaatgttgagatttgtgtcgagaaacaagtagaatatattgaatttaaaaacaaagaggggaaaaaactgagagcaaaacttccaaaaataatatacattccaaaggagaaaatacatggataa

SEQ ID NO: 44642 - DNA, 582 bp, Fusobacterium necrophorum BL
atggataaaaatatttatgagttttctgtagccgttgtaactttattaaaaggagttgtaaatgaatctacacagaccaaaatatggaacactattatagaaaatcaaatacaaatagaagattatatttcaaagatgggtctcactttgatggtacaaactcaggatggctatgcctatgtaaaacaacgagaatataaggatgatgaaatggaaattcctcgattgatttccagaaggcaattaaaatacaataccagccttttattggttcttttacggaaagaatatgcagaatcaaacaaagaagaatcaataggaagaagcattttttctaaaaaacaaatattagaaaaaatgaggacctttctaaaagataccaatgatgaagcgaaacaaaaaaaagaaatagaacaagaaataaagagagttgaagaacttggctttatacgtgctttaaaaaactcagaagagcaatttgaaattctgcccttgattcgaggttttgtagatgcacaatggttagaaaactttgatgaaaaattagaagaatatgcgaactatggattaggaataaaataa

SEQ ID NO: 44643 - DNA, 3354 bp, Fusobacterium necrophorum BL
atgaatcattttttaggaattcgattacataatttagaagtttacaattggggaacctttcataaaaaagcatggaatttttccctagaaggttatacatctcttttaacggggacttccggatcaggaaaatctactttagttgatgcacttattactttattagttcctcccagaaaagtagcctataataaagcagcggatgcctcttccaaagaaaggagtgtgaaatcttatgtattaggatattacggaagaaaatactccttagaaggaaggggaaagccggaagctcttcgagacactagtaattattctgttattttagctacttttcgagatcttgatagaaaacaaacaacaagtcttgcaatttttttttggttcaaagacaatgaaacagagcctaatagaatgtatgtaatttctaatcaggaattatttatcaacgaagatttcgtaaattttcattcagatatacgatttcttagaaatcaattaaagaaaaagggagctaaaatttatgatagttttccgcaatatggtgaatactatcgaaaacaattaggaaatattagtgaacaggcaattgaactttttcaacaaatgatttctgtaaaacaagtagattctttaaatacttttgtaagaacgagtatgttagaaaaagaagacaccgaagaacaaattggcaaattattaaaacattatgcaaatttgaatgctgcctatgaagctgtactaaaagcaaaaaaacaaatcgatatgttaaatcctattcaagaaaagggaagagaatacgagatcaaaatacaagaaaaaaatcagatagaactcgctgataaaagtttagaaatttggtttgccttgcaaagacaaattgaaattttagaaggaatgaaaaaattaaaagaacaaattagtaaaatagaacaaaaaatagaatttgaaaagaaaagagaagagcaaatagcggaggagttaaaacaaattgcaagggcaattctggaaaacggaggacaggaattaaatcgattagaagatgaagtaagtcgaaaaaaagaagagttggatagaaaaaatgttgctcttgaaaaatacaatactcttgctaaaaaattaggtttatctgcaattcgatctttagagggttttcaaaaaaattatataaaaattcccaaaattcaaaaagatatatatgaaaaggatgatgaaattcaaaatgaattaatcacgataactattcaaatcaaacaatatgaagaggaaaaaaagaaattggaagaggaaatacaatctctgaaagaaagaacttctaatttgccatatcatcttgtctcccttcgaaatcatatttgtaaagaattaaatattaaaatagaagaacttcctttttcaggagaacttatagaggtaaaagattccgaaatgaaatgggagggagctatagaacgccttgttcatagttttgctatttctattctagtacccgaaaaacattattcttctgtctcagactgggtagataatgaacacttaggaagaaaattagtctattttaaagttgatagtaagaagaatagaagttcctctactttagaagaaaattctgttgctaaaaaacttcttataaaaaaagatacccttttcacggaatggatgaaaggagaagtcagtaagagattccctcatatttgttgtgaaaaaatggaacttttccgaaaggaaataaaagctattacaaaaaatggacaaatcaaaacagaaaaaagacatgaaaaagatgataatttcaatatttatgacagaaaaaaatatgtacttggtttttcaaatgctaaaaagagaaaaatcttatctgaagaaaaaatagaaattgaaaatcaattaacaacattcttaattcgtgaaagggaatggagtaaaaaaaagaaggaaataggacagttattgtcggctgtagcctctctttcagaatatactgattatcatgagttagatattgttacgacagaggaagcgattcaaaattgccaaaatagaattttagaaattaaagagaataaaagtattttagagacactagaaaaacaacagaaagaaaaagaagaagaaaaaaataaatgtagagagcaacaaaatcaactcatgaatgagagaggaaagcgagaagggaaatataaaacttatgaagaacagcaaaagaacaatgaagaaaaaataaatcaagaaacagaaaaagatcgagaaatgtatccttttatcaaaaatgacttctctatttttctggaaaaaaatggtatgaaacaaaattattctgtagattatgaaagaaaatattcaagtgatttacattctcgattgtctaaacttcaagaatctataaatcggttaagttcacatattcaaaatcaaatgacggcatttaaatattcctatccaaacgaaacccttgaactaagcaatcatatagaatctctcaatgaatataaaattatattatctgaacttttatatcataatttaccaaaatttcaggaaaattttaaaaatgaacttcaaggaaaagtaattcaacatatttctcttttccataatgaattatatcaacatcgaaaaaatattcttgcaagaatccaagaaattaatgattctttgaaagaaattgattacaatttaggtagatacatttgcttaaattatgaagaaactccagaagcagacattaaaatatttaaaaatcaacttagagcttgtacagaaggaatgacaaatttagaagaagaagttttggaaagtaaatttttacaaattaaagagatcattgaaaaatttaaagggagaaaagatttttcggatgccgataaaaagtggacacaaaaagttacagacatacgaaattggtttgtattttcagcaacagaaagatttcgagaaaatgatgaggaatatgaacattattccgattctgatggaaagtcaggagggcaaaaagaaaaattagcttacaccatactggctgctggacttagttataattacaaattgaatcaaaaagaaaggcaaggttcttctttccgattagtagttattgatgaagctttcttaaaaagttctgatgattctgcaaaatttggattacagctttttgaacaattgcgatttcaattaatgttagtcactcctttattaaaaatttcaacgatagaaccttttatttcaagacttggatttgtaactcattctgagattactcatgaatcaagcatcaaaaatgtttctattgaagaatatcatgaaaaacgtcaaaaatgggaggcaaatggatttgaaaaaatggaccaagataaatga

SEQ ID NO: 44644 - DNA, 1200 bp, Fusobacterium necrophorum BL
atggatttgaaaaaatggaccaagataaatgatattaaagcaaaaatagaaagtaaatggaataaaggggagattctgagaaacagtttagaagaaaataatttatttcctttaaaaattgctctaaaagtgccaacttctcaagaattttctctttattttatggaaagtttagaatggattcaaagcttgaaaagggaagcaaaaaaaaagaatagctatgaattattagaaaaggaaatcaattttcgaattgtaggaaagaataaaattcccacacatgtcatcattccaaccaaagaagtagctcttcatttgatccagaaagaagctgaagagaaactttttttgatgattgcagatgaatttattaatatttggcctcaaaatgaagatttacggaattggatttataaatatccttttaaaataataaatcatgtgggaaaaaatttttcaaaattgattgcaattattagatggtttgaaaaaaatccaagacctaatttatacatacgccaattagatattcctgaaatcgatacaaaatttatggagagtcataaacccatattagaagaactctttaaaattttattacctgaagaatctatggatctaagtaaaaaagaatttgaagacaaattttacttaaaaagaagagaaactactgttcgatttcgaattttagatgaaacttatcaagagcaaaaatttaaagaacttagtattccttttacagaattcaagcaatggaaccctaagatagaaaatatattttttacggaaaatgaagttaattttcttgcttttccaaactataaaaactctattgtgatttttggaagaggatatggaattactctacttcgagaggtagagtggttatcgagaaaaaaactctattattggggagatttagatactcatggatttaatattcttagtacagcaagagctttttttccacatttaaaatcttttgctatgacagaagaaatcttgctaggatataaagaattatgggtagaagaagaaaggcagtggtcatttgatataaaatacttaacaaaagaagaatctgatttagctataaaattacaaaacaatttctttggaaaaaaaattcgattagaacaagaaagaatcccttttcatgttataaaaaaacacattgaaaaatgcttacatgaaatttaa

SEQ ID NO: 44645 - DNA, 1476 bp, Fusobacterium necrophorum BFTR-1
atgaaaaacgatttaatagaacatatgtcttatcattctttacatagcttaaggcgttttcatcctgcttggaaattgatggctgcagacaatgctccttttttcttgtccttcttttttaaagaatttatttttacaaatgaaagagagattcctgaacatattttgatgaatcaccttgacgattttatggaagaaattccttatattcgagataataaaaagaaagcaaaagaatatctagtggagtggtctgatgacagttctggttggttacgaagattttatcctagaaatagtgatgaaatccattatgatttgacttcttcaactcaagaagcaattgattggattatatctttgaaaagtgagcaatttattgggacagaatccagacttatgatgatttttggactttttcatgaaatattgtcagggacagaaacggatccagagttaaaaatccaagaattggaaagaaaaaagttagaaattgaaagagaaatcgaattggtaaagcaaggaaaaatgaaaaatttagaatctactcaaattaaagaacgatttttacaagcttcttctatgtctagagaaattttgtctgattttcgtgctgtagaacagaattttcggaatttaaatagaactatgcaagaaaaaattgcaagttgggagggaagtaaaggggaattaattgaagaatatttttctgaacaggatgatatttataaatctgaccaaggaaaaagttttgaagctttttttaaattcatcatgtcaaatgatgcaaaaattaattttgaagaaagtattgaaaaattaaaaaatttggaagaaattagagaacttgtcataaaaagtggaatagagagaattgttgatgattggctgaatgctagtatttatgtttggaataatgtagaagttatgtcagagcagttaaaaagatatgtagataataactatcgagaggaggaaaggcgaatcaatcaaattataaagaatattgaattgaacgctcttaaaattaggggaaaattgtcaaaagagcttttttttgaaattgaggaagtgagccctgctctaaaattaccttttgatcggaaattgttcacaccacctaaacaaatagaattaagagatgaagatattgagtatggagaatcattggattctgatgaagtgctatattcccacatttatattaataaagatatattaatagagaacataaaagaagaagttgatgaaaaaggagagagaactttatctcaaatcatagagcaacatcctttacaatatggattagaagagctcagtgtctacttaggaatagaatcttataaattagaaaatgttgagatttgtgtcgagaaacaagtagaatatattgaatttaaaaacaaagaggggaaaaaactgagagcaaaacttccaaaaataatatacattccaaaggagaaaatacatggataa

SEQ ID NO: 44646 - DNA, 582 bp, Fusobacterium necrophorum BFTR-1
atggataaaaatatttatgagttttctgtagccgttgtaactttattaaaaggagttgtaaatgaatctacacagaccaaaatatggaacactattatagaaaatcaaatacaaatagaagattatatttcaaagatgggtctcactttgatggtacaaactcaggatggctatgcctatgtaaaacaacgagaatataaggatgatgaaatggaaattcctcgattgatttccagaaggcaattaaaatacaataccagccttttattggttcttttacggaaagaatatgcagaatcaaacaaagaagaatcaataggaagaagcattttttctaaaaaacaaatattagaaaaaatgaggacctttctaaaagataccaatgatgaagcgaaacaaaaaaaagaaatagaacaagaaataaagagagttgaagaacttggctttatacgtgctttaaaaaactcagaagagcaatttgaaattctgcccttgattcgaggttttgtagatgtacaatggttagaaaactttgatgaaaaattagaagaatatgcgaactatggattaggaataaaataa

SEQ ID NO: 44647 - DNA, 2688 bp, Fusobacterium necrophorum BFTR-1
atgaatcattttttaggaattcgattacataatttagaagtttacaattggggaacctttcataaaaaagcatggaatttttccctagaaggttatacatctcttttaacggggacttccggatcaggaaaatctactttagttgatgcacttattactttattagttcctcccagaaaagtagcctataataaagcagcggatgcctcttccaaagaaaggagtgtgaaatcttatgtattaggatattacggaagaaaatactccttagaaggaaggggaaagccggaagctcttcgagacactagtaattattctgttattttagctacttttcgagatcttgatagaaaacaaacaacaagtcttgcaatttttttttggttcaaagacaatgaaacagagcctaatagaatgtatgtaatttctaatcaggaattatttatcaacgaagatttcgtaaattttcattcagatatacgatttcttagaaatcaattaaagaaaaagggagctaaaatttatgatagttttccgcaatatggtgaatactatcgaaaacaattaggaaatattagtgaacaggcaattgaactttttcaacaaatgatttctgtaaaacaagtagattctttaaatacttttgtaagaacgagtatgttagaaaaagaagacaccgaagaacaaattggcaaattattaaaacattatgcaaatttgaatgctgcctatgaagctgtactaaaagcaaaaaaacaaatcgatatgttaaatcctattcaagaaaagggaagagaatacgagatcaaaatacaagaaaaaaatcagatagaactcgctgataaaagtttagaaatttggtttgccttgcaaagacaaattgaaattttagaaggaatgaaaaaattaaaagaacaaattagtaaaatagaacaaaaaatagaatttgaaaagaaaagagaagagcaaatagcggaggagttaaaacaaattgcaagggcaattctggaaaacggaggacaggaattaaatcgattagaagatgaagtaagtcgaaaaaaagaagagttggatagaaaaaatgttgctcttgaaaaatacaatactcttgctaaaaaattaggtttatctgcaattcgatctttagagggttttcaaaaaaattatataaaaattcccaaaattcaaaaagatatatatgaaaaggatgatgaaattcaaaatgaattaatcacgataactattcaaatcaaacaatatgaagaggaaaaaaagaaattggaagaggaaatacaatctctgaaagaaagaacttctaatttgccatatcatcttgtctcccttcgaaatcatatttgtaaagaattaaatattaaaatagaagaacttcctttttcaggagaacttatagaggtaaaagattccgaaatgaaatgggagggagctatagaacgccttgttcatagttttgctatttctattctagtacccgaaaaacattattcttctgtctcagactgggtagataatgaacacttaggaagaaaattagtctattttaaagttgatagtaagaagaatagaagttcctctactttagaagaaaattctgttgctaaaaaacttcttataaaaaaagatacccttttcacggaatggatgaaaggagaagtcagtaagagattccctcatatttgttgtgaaaaaatggaacttttccgaaaggaaataaaagctattacaaaaaatggacaaatcaaaacagaaaaaagacatgaaaaagatgataatttcaatatttatgacagaaaaaaatatgtacttggtttttcaaatgctaaaaagagaaaaatcttatctgaagaaaaaatagaaattgaaaatcaattaacaacattcttaattcgtgaaagggaatggagtaaaaaaaagaaggaaataggacagttattgtcggctgtagcctctctttcagaatatactgattatcatgagttagatattgttacgacagaggaagcgattcaaaattgccaaaatagaattttagaaattaaagagaataaaagtattttagagacactagaaaaacaacagaaagaaaaagaagaagaaaaaaataaatgtagagagcaacaaaatcaactcatgaatgagagaggaaagcgagaagggaaatataaaacttatgaagaacagcaaaagaacaatgaagaaaaaataaatcaagaaacagaaaaagatcgagaaatgtatccttttatcaaaaatgacttctctatttttctggaaaaaaatggtatgaaacaaaattattctgtagattatgaaagaaaatattcaagtgatttacattctcgattgtctaaacttcaagaatctataaatcggttaagttcacatattcaaaatcaaatgacggcatttaaatattcctatccaaacgaaacccttgaactaagcaatcatatagaatctctcaatgaatataaaattatattatctgaacttttatatcataatttaccaaaatttcaggaaaattttaaaaatgaacttcaaggaaaagtaattcaacatatttctcttttccataatgaattatatcaacatcgaaaaaatattcttgcaagaatccaagaaattaatgattctttgaaagaaattgattacaatttaggtagatac

SEQ ID NO: 44648 - DNA, 854 bp, Fusobacterium necrophorum DAB
agaattttcggaatttaaatagaactatgcaagaaaaaattgcaagttgggagggaagtaaaggggaattaattgaagaatatttttctgaacaggatgatatttataaatctgaccaaggaaaaagttttgaagctttttttaaattcatcatgtcaaatgatgcaaaaattaattttgaagaaagtattgaaaaattaaaaaatttggaagaaattagagaacttgtcataaaaagtggaatagagagaattgttgatgattggctgaatgctagtatttatgtttggaataatgtagaagttatgtcagagcagttaaaaagatatgtagataataactatcgagaggaggaaaggcgaatcaatcaaattataaagaatattgaattgaacgctcttaaaattaggggaaaattgtcaaaagagcttttttttgaaattgaggaagtgagccctgctctaaaattaccttttgatcggaaattgttcacaccacctaaacaaatagaattaagagatgaagatattgagtatggagaatcattggattctgatgaagtgctatattcccacatttatattaataaagatatattaatagagaacataaaagaagaagttgatgaaaaaggagagagaactttatctcaaatcatagagcaacatcctttacaatatggattagaagagctcagtgtctacttaggaatagaatcttataaattagaaaatgttgagatttgtgtcgagaaacaagtagaatatattgaatttaaaaacaaagaggggaaaaaactgagagcaaaacttccaaaaataatatacattccaaaggagaaaatacatggataa

SEQ ID NO: 44649 - DNA, 582 bp, Fusobacterium necrophorum DAB
atggataaaaatatttatgagttttctgtagccgttgtaactttattaaaaggagttgtaaatgaatctacacagaccaaaatatggaacactattatagaaaatcaaatacaaatagaagattatatttcaaagatgggtctcactttgatggtacaaactcaggatggctatgcctatgtaaaacaacgagaatataaggatgatgaaatggaaattcctcgattgatttccagaaggcaattaaaatacaataccagccttttattggttcttttacggaaagaatatgcagaatcaaacaaagaagaatcaataggaagaagcattttttctaaaaaacaaatattagaaaaaatgaggacctttctaaaagataccaatgatgaagcgaaacaaaaaaaagaaatagaacaagaaataaagagaattgaagaacttggctttatacgtgctttaaaaaactcagaagagcaatttgaaattctgcccttgattcgaggttttgtagatgcacaatggttagaaaactttgatgaaaaattagaagaatatgcgaactatggattaggaataaaataa

SEQ ID NO: 44650 - DNA, 3354 bp, Fusobacterium necrophorum DAB
atgaatcattttttaggaattcgattacataatttagaagtttacaattggggaacctttcataaaaaagcatggaatttttccctagaaggttatacatctcttttaacggggacttccggctcaggaaaatctactttagttgatgcacttattactttattagttcctcccagaaaagtagcctataataaagcagcggatgcctcttccaaagaaaggagtgtgaaatcttatgtattaggatattacggaagaaaatactccttagaaggaaggggaaagccggaagctcttcgagacactagtaattattctgttattttagctacttttcgagatcttgatagaaaacaaacaacaagtcttgcaatttttttttggttcaaagacaatgaaacagagcctaatagaatgtatgtaatttctaatcaggaattatttatcaacgaagatttcgtaaattttcattcagatatacgatttcttagaaatcaattaaagaaaaagggagctaaaatttatgatagttttccgcaatatggtgaatactatcgaaaacaattaggaaatattagtgaacaggcaattgaactttttcaacaaatgatttctgtaaaacaagtagattctttaaatacttttgtaagaacgagtatgttagaaaaagaagacaccgaagaacaaattggcaaattattaaaacattatgcaaatttgaatgctgcctatgaagctgtactaaaagcaaaaaaacaaatcgatatgttaaatcctattcaagaaaagggaagagaatacgagatcaaaatacaagaaaaaaatcagatagaactcgctgataaaagtttagaaatttggtttgccttgcaaagacaaattgaaattttagaaggaatgaaaaaattaaaagaacaaattagtaaaatagaacaaaaaatagaatttgaaaagaaaagagaagagcaaatagcggaggagttaaaacaaattgcaagggcaattctggaaaacggaggacaggaattaaatcgattagaagatgaagtaagtcgaaaaaaagaagagttggatagaaaaaatgttgctcttgaaaaatacaatactcttgctaaaaaattaggtttatctgcaattcgatctttagagggttttcaaaaaaattatataaaaattcccaaaattcaaaaagatatatatgaaaaggatgatgaaattcaaaatgaattaatcacgataactattcaaatcaaacaatatgaagaggaaaaaaagaaattggaagaggaaatacaatctctgaaagaaagaacttctaatttgccatatcatcttgtctcccttcgaaatcatatttgtaaagaattaaatattaaaatagaagaacttcctttttcaggagaacttatagaggtaaaagattccgaaatgaaatgggagggagctatagaacgccttgttcatagttttgctatttctattctagtacccgaaaaacattattcttctgtctcagactgggtagataatgaacacttaggaagaaaattagtctattttaaagttgatagtaagaagaatagaagttcctctactttagaagaaaattctgttgctaaaaaacttcttataaaaaaagatacccttttcacggaatggatgaaaggagaagtcagtaagagattccctcatatttgttgtgaaaaaatggaacttttccgaaaggaaataaaagctattacaaaaaatggacaaatcaaaacagaaaaaagacatgaaaaagatgataatttcaatatttatgacagaaaaaaatatgtacttggtttttcaaatgctaaaaagagaaaaatcttatctgaagaaaaaatagaaattgaaaatcaattaacaacattcttaattcgtgaaagggaatggagtaaaaaaaagaaggaaataggacagttattgtcggctgtagcctctctttcagaatatactgattatcatgagttagatattgttacgacagaggaagcgattcaaaattgccaaaatagaattttagaaattaaagagaataaaagtattttagagacactagaaaaacaacagaaagaaaaagaagaagaaaaaaataaatgtagagagcaacaaaatcaactcatgaatgagagaggaaagcgagaagggaaatataaaacttatgaagaacagcaaaagaacaatgaagaaaaaataagtcaagaaacagaaaaagatcgagaaatgtatccttttatcaaaaatgacttctctatttttctggaaaaaaatggtatgaaacaaaattattctgtagattatgaaagaaaatattcaagtgatttacattctcgattgtctaaacttcaagaatctataaatcggttaagttcacatattcaaaatcaaatgacggcatttaaatattcctatccaaacgaaacccttgaactaagcaatcatatagaatctctcaatgaatataaaattatattatctgaacttttatatcataatttaccaaaatttcaggaaaattttaaaaatgaacttcaaggaaaagtaattcaacatatttctcttttccataatgaattatatcaacatcgaaaaaatattcttgcaagaatccaagaaattaatgattctttgaaagaaattgattacaatttaggtagatacatttgcttaaattatgaagaaactccagaagcagacattaaaatatttaaaaatcaacttagagcttgtacagaaggaatgacaaatttagaagaagaagttttggaaagtaaatttttacaaattaaagagatcattgaaaaatttaaagggagaaaagatttttcggatgccgataaaaagtggacacaaaaagttacagacatacgaaattggtttgtattttcagcaacagaaagatttcgagaaaatgatgaggaatatgaacattattccgattctgatggaaagtcaggagggcaaaaagaaaaattagcttacaccatactggctgctggacttagttataattacaaattgaatcaaaaagaaaggcaaggttcttctttccgattagtagttattgatgaagctttcttaaaaagttctgatgattctgcaaaatttggattacagctttttgaacaattgcgatttcaattaatgttagtcactcctttattaaaaatttcaacgatagaaccttttatttcaagacttggatttgtaactcattctgagattactcatgaatcaagcatcaaaaatgtttctattgaagaatatcatgaaaaacgtcaaaaatgggaggcaaatggatttgaaaaaatggaccaagataaatga

SEQ ID NO: 44651 - DNA, 1200 bp, Fusobacterium necrophorum DAB
atggatttgaaaaaatggaccaagataaatgatattaaagcaaaaatagaaagtaaatggaataaaggggagattctgagaaacagtttagaagaaaataatttatttcctttaaaaattgctctaaaagtgccaacttctcaagaattttctctttattttatggaaagtttagaatggattcaaagcttgaaaagggaagcaaaaaaaaagaatagctatgaattattagaaaaggaaatcaattttcgaattgtaggaaagaataaaattcccacacatgtcatcattccaaccaaagaagtagctcttcatttgatccagaaagaagctgaagagaaactttttttgatgattgcagatgaatttattaatatttggcctcaaaatgaagatttacggaattggatttataaatatccttttaaaataataaatcatgtgggaaaaaatttttcaaaattgattgcaattattagatggtttgaaaaaaatccaagacctaatttatacatacgccaattagatattcctgaaatcgatacaaaatttatggagagtcataaacccatattagaagaactctttaaaattttattacctgaagaatctatggatctaagtaaaaaagaatttgaagacaaattttacttaaaaagaagagaaactattgttcgatttcgaattttagatgaaacttatcaagagcaaaaatttaaagaacttagtattccttttacagaattcaagcaatggaaccctaagatagaaaatatattttttacggaaaatgaagttaattttcttgcttttccaaactataaaaactctattgtgatttttggaagaggatatggaattactctacttcgagaggtagagtggttatcgagaaaaaaactctattattggggagatttagatactcatggatttaatattcttagtacagcaagagctttttttccacatttaaaatcttttgctatgacagaagaaatcttgctaggatataaagaattatgggtagaagaagaaaggcagtggtcatttgatataaaatacttaacaaaagaagaatctgatttagctataaaattacaaaacaatttctttggaaaaaaaattcgattagaacaagaaagaatcccttttcatgttataaaaaaacacattgaaaaatgcttacatgaaatttaa

SEQ ID NO: 44652 - DNA, 528 bp, Fusobacterium necrophorum BFTR-2
tatgtagataataactatcgagaggaggaaaggcgaatcaatcaaattataaagaatattgaattgaacgctcttaaaattaggggaaaattgtcaaaagagcttttttttgaaattgaggaagtgagccctgctctaaaattaccttttgatcggaaattgttcacaccacctaaacaaatagaattaagagatgaagatattgagtatggagaatcattggattctgatgaagtgctatattcccacatttatattaataaagatatattaatagagaacataaaagaagaagttgatgaaaaaggagagagaactttatctcaaatcatagagcaacatcctttacaatatggattagaagagctcagtgtctacttaggaatagaatcttataaattagaaaatgttgagatttgtgtcgagaaacaagtagaatatattgaatttaaaaacaaagaggggaaaaaactgagagcaaaacttccaaaaataatatacattccaaaggagaaaatacatggataa

SEQ ID NO: 44653 - DNA, 582 bp, Fusobacterium necrophorum BFTR-2; identical to SEQ ID NO: 44649

SEQ ID NO: 44654 - DNA, 1474 bp, Fusobacterium necrophorum BFTR-2
atgaatcattttttaggaattcgattacataatttagaagtttacaattggggaacctttcataaaaaagcatggaatttttccctagaaggttatacatctcttttaacggggacttccggctcaggaaaatctactttagttgatgcacttattactttattagttcctcccagaaaagtagcctataataaagcagcggatgcctcttccaaagaaaggagtgtgaaatcttatgtattaggatattacggaagaaaatactccttagaaggaaggggaaagccggaagctcttcgagacactagtaattattctgttattttagctacttttcgagatcttgatagaaaacaaacaacaagtcttgcaatttttttttggttcaaagacaatgaaacagagcctaatagaatgtatgtaatttctaatcaggaattatttatcaacgaagatttcgtaaattttcattcagatatacgatttcttagaaatcaattaaagaaaaagggagctaaaatttatgatagttttccgcaatatggtgaatactatcgaaaacaattaggaaatattagtgaacaggcaattgaactttttcaacaaatgatttctgtaaaacaagtagattctttaaatacttttgtaagaacgagtatgttagaaaaagaagacaccgaagaacaaattggcaaattattaaaacattatgcaaatttgaatgctgcctatgaagctgtactaaaagcaaaaaaacaaatcgatatgttaaatcctattcaagaaaagggaagagaatacgagatcaaaatacaagaaaaaaatcagatagaactcgctgataaaagtttagaaatttggtttgccttgcaaagacaaattgaaattttagaaggaatgaaaaaattaaaagaacaaattagtaaaatagaacaaaaaatagaatttgaaaagaaaagagaagagcaaatagcggaggagttaaaacaaattgcaagggcaattctggaaaacggaggacaggaattaaatcgattagaagatgaagtaagtcgaaaaaaagaagagttggatagaaaaaatgttgctcttgaaaaatacaatactcttgctaaaaaattaggtttatctgtaattcgatctttagagggttttcaaaaaaattatataaaaattcccaaaattcaaaaagatatatatgaaaaggatgatgaaattcaaaatgaattaatcacgataactattcaaatcaaacaatatgaagaggaaaaaaagaaattggaagaggaaatacaatctctgaaagaaagaacttctaatttgccatatcatcttgtctcccttcgaaatcatatttgtaaagaattaaatattaaaatagaagaacttcctttttcaggagaacttatagaggtaaaagattccgaaatgaaatgggagggagctatagaacgccttgttcatagttttgcta

SEQ ID NO: 44655 - DNA, 1476 bp, Fusobacterium necrophorum DJ-2; identical to SEQ ID NO: 44645

SEQ ID NO: 44656 - DNA, 582 bp, Fusobacterium necrophorum DJ-2; identical to SEQ ID NO: 44642

SEQ ID NO: 44657 - DNA, 3354 bp, Fusobacterium necrophorum DJ-2; identical to SEQ ID NO: 44643

SEQ ID NO: 44658 - DNA, 1200 bp, Fusobacterium necrophorum DJ-2; identical to SEQ ID NO: 44644

SEQ ID NO: 44659 - DNA, 1464 bp, Enterobacter cloacae BWH 43
atggattttgacactctggataccatgcgcacaaaccaccctgcatggaaattactacgcgcagattccgccgcacttattgccagctttctctggcacgcatttgcattaccgaacgcccgcagcattacacaggaagcattgacagaaaaactcgaagacacgctctatgtcttacgccaacaatacggagatgagctttatcctcgtgctgcacgggattatctgaacgactgggcagcgccagagcgcggctggttacgaaaattttatcttccgggagatgaccgcccctggttcgatcttacacctgcgacggaaaaggcattaagctggctggataaactgggtgattcttcttttatcggtactgaatccaggctggtcactttgtttgagctgctcaaacaagtgatctccggcagtgaacataatcctgaactgcgcattcaggagcttgagcaacagcgtaacgagattgatgcagagataatggcaatccgcaacggcaaactgtcactattagacagcaccgcgcaaaaagagcgcttccagcaaattgtgcaattatcgcgtgaattactctcagacttccgacaggttgagcataatttccgccaactcgatcgaaatgttcgcgagcgaattgccttatggaacggggctaaaggcgacctgttaatgcaagtactgggtgagcgcgatgccatcacggaatcagatcaagggcgaagctttcgcgctttttgggactttttgatgtcacaatcgagacaggaagagttctctcgattgcttgaaaagttattatcccttgacgctattgccgaaacacagcccgattctcgcatcaaacgtattcactatgactggcttgaagccggggaatatacgcaacgcaccgttgcgcaactctcacaacaattacgacgtttccttgacgatcaggcgtggcttgaaaataaacgtattatggaaattttacataatattgaacatcatgccatcgccttaaaaaaagcgccgccagaaggcgacataatggatatcagtgatgctcagccacagataatgttgccttgcgaacgtccgctttacacccctcctgttaaagcccaaataattcagcagatacttgagcagggtgatgaatcaatagatattgatattcttttttcgcaaatcaccgtcgacaaatctcgcttagtgcgcaatattcgcaaagaactacaaacccggtcccaaatcacgttacatgagttggtatccctgtatcccctgcagcagggcttggctgaactggtcacctatatacaactcgccagcgagtccgctaccgcaacgtttgatgaatgtagtagtgaaagcatctattggtttaccgcaacgggtgaagaaaaaatggcgcgcatcaacaccgtcatttttacccgagcacaggagataattaatggaacagaatga

SEQ ID NO: 44660 - DNA, 606 bp, Enterobacter cloacae BWH 43
atggaacagaatgatgcctcattttcaccggatagcgcgctttcaacgctcattatctcattactaaaaggggttatttatcaggaaaacgatcctcatctgtggggagcattactgcgtttacaaattcagattcgggattactgtcgggtaatgaatctggaacttcatcttgacgaagcggaaggttacgcttttttgcgttcagatcctgataatgccgatgatgaatccgctgctcgccttatttcccgaagaccgctttcgtttcccgtgagcctcttactggcgttgttacgcaaaaaaatggcggaattcgacgccagcggtagcgaaacacgtttgattcttactcaagaacagatagttgatttactgcgggtcttcatggctgaaagcaccaacgaagctcgtctggtcgatcagattggccgtcatatcaacaaaatcgttgaaatgggtttcttacgcccgctacgtaaccaaaatcaaacttgggaagtccgacgtattttgaaagcgtttgtcgatgcgcagtggttatctgatttcgatacgcgcttgcaggcctatagccaacatctcaggaaagaaaataatgactaa

SEQ ID NO: 44661 - DNA, 3381 bp, Enterobacter cloacae BWH 43
atgactaatgcactggagctcgattttagcagcgacgagtcatctgccggttttcgcctcgaacgcctggaaatttttaactggggtacatttaacaatcaggtctggacctttaacctggagggaaaaaatgctcttctcacaggcgatattggttccggaaaatcaacccttgttgatgcgataaccacattattggtgccatctcatcgtattgcctacaacaaagccgctggagcggaaaataaagaacgctctctccgatcgtacgtgctggggtactacaaatcagagcgcctggaaaacagcatggggggaaaacccgtcgcactccgtgatcatcgaaattattccgttattcttggtgtttttcgtaatgaaggttttggtcaaaccgttactctggcgcaggtattctcgttaaaagaaccggcaggaaaaccggtcgctttttacgtcgttacggataatgatctctctatcgcacaagatttttctggtttcggttccgatattaataacttgcgtcaaaaactcagaaaaaacagcgcagagatatttgattcattcccaccttacggtacctggttccgtcgccgctttggcataaacaatgaacaagcactggagctgtttcatcagaccgtttcgatgaaatcagtcggtaatctcactgagttcgtccgtagccatatgctggagccgtttgatgtggcccagcggattacgcatctgattgaacattttgacgatctcaatcgcgcgcatgagtcgatactgaaagctcgtcgacaggttgaccaattaaggccacttgttgatgagtgcgacaggcatgcgcttttgattcaggaaacagagaccatgcgcgcctgccgtgatgccctcgcaggttggtttgccagtttgaagcaaacactgctcgaaaaacggctgcttaacctcaaagatgagctacagcgctatcaaaatacgcttgcggtaacggctgaacaactgtacgaaaaacgaagccaggaaaggcagttacgtgctgatattgccgctaatggcggcgatcgactggaacaactgcgcctgaacatcagccatcgcgagcaagagaaaaatcgtcgtctgaaggcggcagataactataacgagctattaggtaaagttaatctctcagcggttaaagatcatgatgaatggctggcgacacgccagcttttgcaaattcattctgatgagcttaccgaccgcgaagccgagttgcagcaacaaaaacacgagttacatttcaaatttactcgcaaacgtgaaatacaccagcaactgagcgctgaaataaacaatcttcgttcacgacgcagcaatatcgatgcccgacaaattacgctacgcgccgctatctgtgaggcgctcgggctcaatgaagaacatcttccctttgtcggtgagttgatcgccatacgtgaagaggaaaaagcctgggaaggggctgcggaacggcttttacacggctttggtctctccattctggtctccgacgaacattacccccaagtctcgcagtgggttgaaaatcaccatctcaatggtcggttaagttacttcagggtaaatgctggtatgcatcatgctgctttatccccgcttcctggcgcgattagcgaaaagctacagataaagcccgatactctctggtatgactggctggaaaggcgactactacaatttaaccatatctgttgtgacacgctggagcagtttcgtcgtgagactaaggcaattacccgtagcggtcagatcaaatccccaggagatcgccacgaaaaagatgaccgtcataatattaatgaccgcagtcgctatattctgggatggagcaacctggagaaaatcgccgtactggaaaaacaggcaggggatctggagcaagagctagcagagctcggaaaagagataacatcaattgatgtaaaccttaaaaacctgcaacaacaacgcgatatttataatcgcctcagtgaacataacgattatcaggctatggactggcagccgctggcgcaggaaatcgcccgactggaaattgaaaaacgcgaacttgaagcgacgtccgatcacctggcggtgttaagccaacaactgaataagatcctgacggaaatccagacgctggagacaacccatgcggataaaattgatttacgtggacgcacgcaggaaaagatcgatcgcgcagaggagagcctaaaggaagcacaagctgtgcaaataacagcaaatgaacagaacatgcctcgctattatcctcagctggagcactggcgtggagaggctctcccaagcaggcaaatcaacgtcgagtcttgtgataattgtcagcaggagatgcgcaactggttgcaggataaaatcgacaacgaagataaaaaaattggccggtcccgtgacaaaattatcaacagtatgacgggttataatcatcagtatccgcttgagacgcaggagatcgacgcaaatattgaatccgcccatgaatatcgtcaaatgctaaacgcattgcaggctgacgatctcccccgtttcgaggctcgctttaagcagttgctaaatgaaaatactattaatgatatcgccagttttcaaagccatctcaaccgggaaagagagaccatcaaagagcgtatcgaaaaaattaatgattctctggtccctattgattacaaccccgggcgctatatttcactggtggctcaactcagcgctgatgcagatattcgtgattttcagaatgaactacgcgtctgcacagagggtgcattgacgggctcagaagatgaacagtattcagaagacaaatttttgcaggtgaaacgtattattgaacgcttcaggggccgggaagggttaagcgatcatgacaagcgctggaccacgaaggtgacggatgtgcgtaactggttcatcttctcagcttccgaacgctggcgagaagatgataccgagcatgaacattattcagactctggcggtaaatccggcggtcagaaagagaaacttgcctataccattcttgccgccagcctggcttatcagttcggccttgagtggggtgaaaaacgctcacgctcattccgcttcgtcgtcattgatgaggcattcggccggggttcagatgaatctgcggagtatggtctggagctctttaagcgcttaaatctgcaattactgatcgtcacaccattgcaaaaaatccatattatcgaaccgtatgtcgccaacgtggggtttgtgcacaacgaggccggaaagatttctcggctgcgtaacatcagtattgacgtctatcagcaggaaaaagcagagaaaaaacatgagctggacaacgcctga

SEQ ID NO: 44662 - DNA, 1152 bp, Enterobacter cloacae BWH 43
atgagctggacaacgcctgaggcgctaaaaaagcagttacagaaactgtgggaaaaaggagtgcttttacgtgagttggtggaggatagcggctatttcccgcggcagttgacctgtaaaaaaccgacctcagacgacctctcttcacgttttaatgaagttcgccagtggatcagcttgttgtctgagagtgcagagaaaggctatcaccttgaatggcgggaagtcaggcatcgcgtaattggcatgaatcgactcccggctaaaatttgggtggattcggcctttgacgctgtgaaaattcttggcttgcgaaaaacttccgagcgctatctgcatctattccagtacattgttgtcgctcagcccgtcctgcgcagttggttaatcaagtatcctttacgcgtattggaacaagactggacaaagctgctgtcgattatcggctggttacagttaaatcctcgtccgggcatttacttgcgccaactcgatctacctgacatcaacagtaagtttattgagcaacacagaggtatcttaacggaattactggatctgaccctaccgccagaaaccattgacccgtcggcgcgtggtattcttcagtttaatcgccgctttggctttcgcgacaaaccccagcgcgtcagatatcgctttgcccgtcaggacagggaaattgatagtcatgaattctcctcgctgtctttacccgtcaccagcgtttttgtgattgaaaatgaaatcaattttttgaccttttctgggccagtaggaagtatggcggttttcggacgaggatatggctttgacatgttgtcatctgcccgctggctttgtcgtcaaaagctcttttattggggagatattgacacccatggctttgcgatactgagccagttccgtcaactttaccctcatacccaaagttttttgatggatgaaaacaccctgctaacgcaccgggcttcgtgggtaaaagaagacaaaccctgctcacggttactgtctcacctgacagagcatgagcagcagctttatcaggcgctagtgcatgatcgctttggtgagaagatacgtctggaacaggaatatatttcgatggctgtgatacagcaggctctggagaaattatatccatcatcctaa

SEQ ID NO: 44663 - DNA, 1497 bp, Klebsiella pneumoniae MGH 68
atggaagaaaacactaggcagcgtacggaaaattatatttcagccaaaaaccagcatcccgcatggatacttctggcttcccgccgtgccccgttggtgctgagttgcttgaaaacgttgtttgaaaaagctcatgatggtatccctcttgaggacgcgattcagtctctttccggcatgctcatcgagcatgtgagtcaggaacagtatgacattaatcaggacaatccctctcttcaggccagtcgtgaactgcgggaatggattaaacgccgcttaattgtcgaacgggatggccgtatcttcgccaccgatgcgcttgaggttgcgattacgtttgttgagtcgctggataatcgtttcatgacctctacggcttcccgtttgtctaccgtacagcgagaaattgaaaacctggaaaccaggcttaatcctaatccggctaaccgggttgcaaccttacgtcgtcgtattgctgaactggagcgtgaattacaggaggcggaagccgggcatattgaagtgctggaaacgcatcaggcggttgaacatattcgagaggtcttcaatttagcttccagcctgcgggctgactttcgtcgcgttgaagactcctggcgtgaggccgaccgtgcgcttcgccaatccattattggtgagcagtatcatcgcggcgatatcgtagaacgcttgcttaacgatcaggacgcactgcttaatacccctgaaggaagagtcttcgacagttttcagcaacagctacgccaatcagttgagttaacggcaatgagcgagcgactgcgcgtaatccttagccatccttccgcttccaatgcgcttaaccgtctacagcgtcatgatttacgctggctggttaaacgcctggtcgatgaatcgcaaaccgtactccaggctcgtgcccgaagcgagcgagatgtccgcggttttatgaaaaccgggcttgctgctgaacatcaccgcgttggtcatctgcttaacgagtttctgaatctggcgttaaaactcgactggcagcgccagatgattcgtaaacaagaggttccgcttcctgccgttggtgtggcggtgacgggagtccccgcaattgagcgtttacgttttaaagaagtggatgatgaagcggaacaaacgttggatctcagtaatcatgcgacggatttgacgcagattggcgatgatttctgggatgctttcaatggccttgatcgtgaggctttgattcagcagacgttgcagcttctgacaaaagaaaatcgccccgttggtctggctgaactggcggcgctgttgcccccggctcacgatctcgaaaccttcgccgtctggattggcatggcgagagaagcaggcattgaggttattgattcacagcgcgaatttgctgaacttagtgatggggaaggtcgccgctggcgatttaatctgcccacgaccggtctggaaagtcaggcattaatggatatcgattgggagtaa

SEQ ID NO: 44664 - DNA, 750 bp, Klebsiella pneumoniae MGH 68; identical to SEQ ID NO: 44260

SEQ ID NO: 44665 - DNA, 3291 bp, Klebsiella pneumoniae MGH 68
atgaatcaaatagcgcgtctggctgaaaaggaatcctttattctcacccgtatcgagttgttcaactggggcggttttcatggattgcatcaggcagcaatccatcaggaaggtaccgccgttattggtccaaccggaagcggaaaaacgacgctggtcgatgccttaatgacgctactctgtgccaatccccgttacaacctggcctcaaccggggggcatgaaagcgacagagatcttatctcctacgtgcgcggtgtatccggacccggcgatggtggggaggggcaatcgcatattgccagaccggggaaaaccgtgaccggcattgccgcgacgctggagcgtgaagggcagcaggtacgtctgggggcgctattgtggtttgattccaccagttccagcgcggcagatttgaaaaagctttggatgtttagtgataaccctacacagacgctggatcactggctgaatatctggcatgacggtggcgcacggtcgttgaagcaaatggaaaaagagacgaccggaatctggatttggctgaacaataaaaaacagtatctggcgcgcctgcgggacttcttcgaagtgggggaaaacgcctttacgctgttaaatcgggcggcaggattaaaacaactcaacagtatcgatgagattttccgcgagctggtactggacgatcactctgcttttgatcgcgcgacggaagtagccaatagttttgatggtttgacagaaatccatcaggaactggaaacggcgcgtaaacagcagcagtcattgcaacctgtagccctgagttgggataagtatcagaagcaagagcaacaacttgctgacaggaaggcgctggagtcgctgttaccaatctggtttgcacaacaggcaagccagctctggcgagaaaaggtcagccatattgaagtcgagcttggtgagtcacagactcgcgaagaacagatccagtcgcagctcgagttgcagaaaaaagtggtgacggactgcttacagcgctatctccaagtcggcggcgccaatattgatgaactgaacgagcgtatcaaggactggcaaaaaacgctcggcagtcgggagattctggcgcaccagtatcaacagctgacccgcaatcttggattgccgcctgacctgagccaaccacagctggaggcgaatcagcatgaagccgaggcccgatgtgagcagtttgctgatgatataaagttgaaacaggaagatgtgtatcaaaaaggcgtgctcagccatcgcatgaccgaagaacttcgggaacgggaaactgaacgcgccgagatcgcgcgtcgtccggattctaaccttcccgcccattatcaggcatttcgcagcgagctggcagaagcgctgaacgtcgatgagtctgaactgcctttcgttgctgaactgatacaggttaaaccggaagaggcgcaatggcgcggtgcgattgagcgcgctgtcgggagtaacaggctacgtattctggttgctcctgaatctgcacaggaagcgcttcgctgggtaaaccagcgcaataatcgtctgcacgtgcgcctactggaggtcaaattaccgcactctcccgccaggttttttgatgatggttttacccgtaagctgttgtggaaagatcatccgtggcgagaggccgtcaaagcattattggccgaaaacgacaggcattgtgttgacagccctgaacaactgcgtgacacacctcatgctatgacagtgcaggggttaatgtctggtaaacagcgtttctatgacaaacacgatcagaaacgtcttgatgaagactggctaacgggattcgataaccgcgatcgcctgaacttccttgccaaagaaatcgccgcccttcaggagcaggttaaaaccgcaaacgcagcgtttgagtttgcgaaaggcgaggtgggggttttgcaaaatcaggccatttcattccagaaaatacaacaaattgattacgatagcatcgatgttcccggcgcaaagagccaactggacgcgctcagggagcggctggagaatctgatccgcccggattctgacgccagtgtagcgaaagcaaaacttgatgaggctcaaacggttgaatctgaactcgataagcagctcagagccgccaataaagtcactaatgggctggatacagaactcacctcagcccgggcagcagaacgtaaggcccagcaaactgcgcaaaaaggtatgcaggatgaagagcgagagttgtgcgcgtcacattttcctgtggtggctctggttcaactgcctgacattcgcgatctggaacgtcaacatgagcggggaattcaacaagaaattgagggtattaaaggtgaattgcatcgactgaacattgagttgaccaaacgtatgtctgaagccaaacgtgtggatactggggcgctcgttgaggcaggggctgatttggacgatattcctgtctatttacagcgtttgcaggaactgaccgaagaagccctgccggaaaagctcaaccgctttcttgactatttgaaccgttcatctgacgatggcgtaacgcaactgctcagccatatcgatcatgaggtgctggtgattgaagcgcgactcagcgaactcaatgaaaccatgtttagggtcgattttcagccggatcgctacctgcgtctggataccaaaaaagttgtccatgaaagcctgcgcacgcttgaaaaagcgcagcgtcagctaaatgcagctcggtttgttgatgataacggcgagagccattataaggcgttgcaggtgctggtggcgcaattgcgggatgcctgtgaacgaaaccgtaccctgggggcgaaagcgctgctggatccccgttttcgtctggagttcgccgtgtcggtgatggatcgccagagtggtaatgtgattgagtcgcgtactggctcgcagggcggtagcggtggagaaaaagagattatcgcgtcttacgtattgaccgcatcacttagctatgcgctttgtcctgcggggagtcgttatccgcttttcggcactattgtccttgatgaagcattctcccgcagctctcatgccgtggcgggcagaatcatcgccgcgctcagagaatttggcttacatgcagtatttatcacccccaataaggaaatgcgcctgttgcgtgaccatacccggtcggcgattgtcgtccaccggcgcggtcaggattcaaatatggcttcgctgagctgggaagaacttgaacaacactcccgacgacgggagaacgcgtaa

SEQ ID NO: 44666 - DNA, 1149 bp, Klebsiella pneumoniae MGH 68
atgtattctcctgatgaactgcgtgaaaagcttgcccggcagtgggataacgcaaagctccgggccgagcgtttacttccacccggtaactggccgctctgtctgaccattggcaaaccttccgcgaaaatattcgcagagcagcctcagcgtgttttacaacacgtgcagttatggcggcaagtcgcggttgggcgggtggaatgggaagaggtcagttatcgggcgagcgacggaccggtatcaatgccattgcgctggatcatgaatggcccttctgactggatcaacgcagcggcagatgcgacggtaagccgggaatttcgcttgctggagggaattattgagcaggttgatcccattttccatccgctgttgattagtcatcgttcgctctggcgaaacaaaggctcgcaggacatcatcagcgctgccaggctggccagccgattagagccgggctgcgcaaaagggctgccgctaagactgctttccgggcaaggggtggataccaaatttattgagaataatatttcgttattaacccgactgttggatatgcgtttttccggcgaagccagcgagcaggggttaaccacctttcttgatgcttttgatgagtccagccactgggttttggttgtgccgctatcacccggcttgcttccttttaaaaaatgccgggtgacaacagcggaactggcggaaacgacattgcccgcgtcgcgtgtgctgatgattgaaaatgaacagtgtctgcatcaacttccagagttatctgacactatcgcggttttagggtgtggccttgacgtgcaatggttatccagcgttgttctggataaaaaacgcgttgcctattggggggacatggatagctgggggctactgatgctggcgagagccaggcgctgtcgtccgacgcttgatgttctgctcatgaatcgtgagttgtttgagcaatatgccagccaaagcgccgttcctgaaccggtaaaagcacaggaagccatacccgatggtttgcttaatgaagaaggcgatttttatcgctacttaacctgcttaccgcgtggtcgtctggagcaagagtttttgccttcgggggtagttggagaggaactggttaggtggagaaaagagagttaa

SEQ ID NO: 44667 - DNA, 1575 bp, Bifidobacterium animalis; identical to SEQ ID NO: 41902

SEQ ID NO: 44668 - DNA, 810 bp, Bifidobacterium animalis; identical to SEQ ID NO: 41925

SEQ ID NO: 44669 - DNA, 3498 bp, Bifidobacterium animalis; identical to SEQ ID NO: 41904

SEQ ID NO: 44670 - DNA, 1221 bp, Bifidobacterium animalis; identical to SEQ ID NO: 41905

SEQ ID NO: 44671 - DNA, 1470 bp, Kitasatospora cheerisanensis KCTC 2395
gtggaattcgacgatgtcacaggtcttttcgatcacccggcgtggcggctgctgcgtgcggacaatgcggctctggtgctggcgttctgcggcacggtgttcgtcgacgagaacgcgcgaggcgtccccgagggcgtcctgatctcccgcttggacgatcagctgtatgacctcaacgagcggcagatgggctcgttcccacgggcagcttcggcctatctgacggagtggaccaacaacgggtggctgcgcaagtactacccgccgggcgaggacgagccacacttcgatgcaaccagcgccgtggagaaggcggttgcttgggtccgggctctgcccgcgcgctcgttcatcggtacagagtcccggctgagcaccattatcgacctgctgcaccagatggccttcggcaccgagacggatcctcaggcgcggatcgacgaactctcccgcgaaagagacctgatcgacgctcagattgagcaactccgtacgggtgaggtcgaggtgctgtcgcagtttgcacttctggaccggtaccagcaggtggagagcacggcgaccgagctactccgggacttccgggaggtcgaggcgaaccttcgggagctggaccggcgccttcggcaggatgtggcaaccgccgagggcagcaagggtgagctgctggcatcgtttctcatggatcgcgagatgatcgccgaatccgaccagggccggagcttccaggcgttcttcgactatctcctctcgcctcgtcgccaggaggagctacgggagctcctggagcaggtgaaccagttgccgcagctggacggcaagatcaacaagggccttctgaaggtcccacgcgcatggctcgaagccgccgagagcacccagaacacggtccggcagctcaccgagcagctgcgccggttcctggcggaccgtgggagggaggaggaccgccgggttctggctctcgtgcggtcggttcagcgccatgtcgcagtgctggacgaccggcgcgaccttcccggcatggctctggaagtgccccaggttgagctggtcctacccatggagcgacgcctgtacaagcccgtcgagagggtggagctggacagcacggccagcgaagcattcgacgaggcggatgtggacgtctccgagctgttcgccggcgtccatgtggacgaggaggcgctggcagcgcaggttctggcggtactcggggaaagtccgagcggtcaggcgagccttgcagcggtcgttgactgccatcccctggctctgggcctggccgaactgctgacgtacttccagctggaccggccgggcctggacgtcgtgatcaacccggagcacggccacgacctggtgtacgagcgagtggatacgccagggcgcaccgtggccacggtcccgcaggtgacgttcgttctcaacgagggcggcacggccgccggagaggtggggcaagcgtga

SEQ ID NO: 44672 - DNA, 3426 bp, Kitasatospora cheerisanensis KCTC 2395
atgagcatcaccgcacctggaacctctctcgtcccgcgacagtcaggtccgggtgacagcaccctcggcgtcggcccgggcttcaggctggcccgcctggaggtgctgaactggggtacgttccaccgcagcatctgggccttcgacgtcgacggccgcaacgcgctgctgaccggcggtgtggggtcgggtaagtccacgctggtcgacgcgatgaccaccctgcttctccccgccaacaagatcgcttacaacaaggccgccggtgctgagtcgaaggagcggaacctgcgctcctacgtactcggccactacaagagcgagcgcgtcgaggcgacgaacagcacccgtccggtcgctctccgcagtgcctcctcgcacagcgtgatcctgggcgtgttcaccaactacaccctcggtgtccacgtcacactcgcccaggtgttctgggtgcccgacgtcaacaccggccagccggaccgcttctacgtcaccgccgacaccccgatgtccatcggcgcggacttcatcgacttcggcaccgacatcaacgacctgcgccagcggctgcgacgcggcggcgccacgatccacaacacctacccgccgtacggaaagaccctgcggcgcggcctcggcattcccagcgatcaggcgctggatctgttccaccagacggtgtcgatgaaggccgtggggagtctcgacgagttcgtccgcgagcggatgctcgagccgttcgacgcgcaggccgaggtcgacaagatcgtcgcgcacttcaacgcgctgacggccagccatgacgaggtcgtccgggcgaagtcgatgatcgaggctctcgggccgatcgtggaagcgtgcgacacctgcgacggaatccagcgcgagatcgagacgctgcagcggcgccgtgaagccctaccagtcttcttcgcccagcaccgccaccacgtcctaagccggcgcggcagggagctgggggcacggttccgggagctcaccgaactccaggagggccgcgagacgcggctggagcagctccgcgagaccgctgacatcctgcggcgccgtatcgacggtgccggcggggagaaactggtgcgtttggacgccaggatcgaggatctccgccgcgagcgtgaccggcgccgcgagcgggcggccgggtacacgggctggctcggcaaggccggcctggatcccgtcagcgacgcggtgtccttctatgagcgttccggtcagatctccgaggtccgcgcgcaggtcacgcagcaggaacaacgtgctcgcgacgaactcgacgccctcgccgtggaccgccataacaacaccaaggaatccgacgaacttcgccgggagatcaccagcctgcagagccagcgctccagcattccctcccgtcttctggagctgcggcagaacctcgcgaccgctgtggatgtttccgtcgacgaactgccgttcgcaggagagctcatccaggttcgcgacgatgaagccgtgtgggcaggcgccgccgaacgcgtcctgcgcagctttgcgttgtccctcctcgtacccgaagcccagtacgagcaggcgtcggcgtgggtgaacggccggcatcttggattgcgcctggtgtacttcaaggtgcccgcccgcgccgaggccgccgagctgccgccggaccgggatctacttctgggcaagctcgaactcaaggacgacagttgggcacgcgactggctcgcagcgcagcttcggacccgcgccgactacgtgtgcgctaccgaccttgacgccttcactcgctccacccgcccggcggtgacccggcaaggcctggtcaagagcgggggcggccgacatgaaaagaacgacacgtcccgtgtcgacgaccggagctcctgggtgctcggctggtccaaccaggccaagctggatgcgcttctcgtaaaggcggcgcagctgacgaaggagagcgcgtccatcacgacgcgcacccgggcgctcaagcagcagcagacggaccgggccggaattggcgaggctctgacacttctcgcaagcgtcggctcgtacagcgagctcgactggcaggaatcctccggcgagattgagaagaccgatctgcagaagaaggctcttgcggccgaggctggcctggacaagctcaccgctgatctggacgcgaccgacgccgagatcaagcgcagccgcgcagccgctgacaacggccgggaggagctcggcggtgtccggcacgacagcgagaaggtggagttccagctcgcggagacttcggcgttcctggagcagtccgagcttgccgcggtggcggagcacgagcaggcgctgacggccttcctgccggcttccgccctgggcgtgcaccacctagacctgctgcagtcggccgagacccaggcgttcgcgaagctcagccgcggggtcgagagccagggcagggccctccagagtgccactggccaggccaccgtgaagatggccgcgttccgcaccgacttcccgcagtacgcaaaggacctggaccacacccttggctccgggaagggttaccgcgcgctccacggtcagctggtcagcgatgacctgccccggttcgaggagcagttccggcagtacctgcgcaccaacgtcatccgcgacatcgcctccttccaggcccgcctgcgcgcccaggagcaggagatcggcgagcgcatcggtgtcatcaacggctcgctggcggccatcgactacaacccaggccggtacgttcgcctcaacgccatccccaccgccaacgtcgagatccgtgacttccggcgcgaactgctcgaatgcaccagcgacgctctggccaccgaaaccgacggtgcctacaccgaggagaagttcctgcaggtgaagcgtctcctcgaccggttcaagggccgctccgggcagagcgacaaggacgccgagtggaccgcccgtgtcaccgacgtccgccgctggttcaccttctccgccagcgagtacagccgcgccgacgacaccgagtacgaggtctactcagactccgggggcaagtccggcggtcagaaggagaagctcgcctacaccatcctggccgcctcactcgcttaccagttccggatcgaccccgaggccaagaaagccaagacgttccgcttcgtcgtcatcgacgaagcctttgggcgcggcgacgacgaggccgcccacttcggcctggacctcttccaccgcctcgggctccagctcctcgtggtcactccgctgcagaaactgcacgtcatcgaaccccacgtcagtagcgtcgggtacgtctacaagcccgacaaggtccactcccacatggccactctcaccatccaagagttccgcgagcgccaggcagcagctcgtcagccgctccctcacaccgagggccggtcgtga

SEQ ID NO: 44673 - DNA, 762 bp, Kitasatospora cheerisanensis KCTC 2395
atgaaggcgctccaggcccacgcccaatggcagcagctcgtcgacaccgtgagctggatcgggaaccatgccactggcccgatctacctccggcaggtcgacgtccccggcgtcgacaccaagttcatcgagaccaacaagggcatcctcggtgaactcctcgaccacaccctgccagccgaccgcatccacaccggcgtcgcgagaggcgacttcgccgcacgctacggcttcctcaccaagccgccatacgtacggctgcgctacctcggcaaccagccaggcccgttcagcgaaatcaccgtccgcgccagcgagctcaccgcaccgccctcaggcgttcacaccgtcttcgtcctcgaaaacgaagtcacctacctgtcactgcccgatgtccccggcgcgatcgccatcctcggctccggctacgccgccgtcctcctgcggtacctgccgtggctcgccaacgtcgacctccggtactggggagacatcgacacccacggcttcgccatcctgagccaggtccggcgccacttccctcacacccgttcgttcctcatggaccgcagtaccctgctggaccacaaggcgcactggggcgaagagaaaactcagacgcccgagcaaccggctcacctcaccctcgacgaggctgaggtggagcgggatctacgcctgggcacctacaaaccgcacctacgcctggagcaggaacgcatccccattcggacagtgttgcgggctctcgctgggtcgtga

SEQ ID NO: 44674 - DNA, 1542 bp, Xylella fastidiosa subsp. sandyi Ann-1
gtgaccgagatggaccatgccaccctgaccaccttgcgtgagcggcaccccgcctggcggttactgacctcaccgcatgcccccctggtcgcaagctttctgcaccgcgtgttcgtcgcaacgaacgcgcgcctgctgagcgagaccaagatcacccaggcactggaagacacgctgtatgcgctgcgtgaacacgaaggaccagaggcctacccgaagggcgccctggactacctcaatgactggtccgcacccgacaaaggctggctacgcaagttctacacaccagacacggatgaagcgcagtttgacctcacccctgccactgaaaaagccatcctctggctgctgtcactcacggaacgctcatttgtcggcaccgaatcgcgcttgctaacactgtttgcgctgctggagcaaatgagcaccggcaccgagaccgaccccaaaaagcgcgtggaagaactgcaaaagaagcgcgacgcactggacatcgaaatcgcccacgtcctggaagggcatacaccgctgctggacgacaccgcgatcaaagaccgcttccagcaattccagcaactggcgcgtgagctgctgtccgacttccgccaagtgcaagacaacttccgccagctggaccgcaaggtacgcgagaaaatcgcactgtgggaaggcaccaagggcacgctgctggacgaaatcatgggcgagcgcgatgccatcagcgattctgaccagggccgcagcttccgcgccttctggaacttcctgctctccagccgacgtcgcgaggaactttccgagcggctgggccaggtgctagcgctgcccgcggtggcagcgctgcatccggagccgcgtacccgtcgcatccacgacgactggatagaagccggcgaacaaaccctgcgcaccattagccaactatcgcagcaattacgccactttgtggaaagccgagcttttctggagaaccgccgcattatggacctactacacggcattgagcgcaacgcactcggcctgcgcgacatgacaccctccggcacagtgatgcacctggatgcgatcggggcggacattcaactgccgctagagcgccccttattcaccccacgcgcaaagccgcgtctggctgatctggtccttgcggccggtacagacgacatcgacaccacccccttgtttaaccaaattgtgatggacaaagcacgcctgcgcttagccatccaacgcgcactgcgcacccaatcccagatctccctgcgcaccctgttgcaaaccgagccactgcaacagggtttggccgaactggtcgcctacctggagctggcccacaccagcaacagcagtgatccggacggcttgcgtggcatcgtcgacgaaacggtagaagagccgatccgctggcaggccaacaataccgtgggtgaaacagtcacccgcgaagcacgcttaccccgcatcatcttcacgcggcgtgccctctcagatcatcaggaatcatcacaaggagacagagcccatgaaggacacgctgtatga

SEQ ID NO: 44675 - DNA, 714 bp, Xylella fastidiosa subsp. sandyi Ann-1
atgaaggacacgctgtatgagagtgatgtcgtagcgaccccacgcaacgcactgccgacagtgcccgaactgtcgcacctgatggtgtacttgctcaaaggggtgctgtaccgcaaccaagaagaacgcctatggtccagcttgctgcgcctacagacacaggtcagagaacacaccgcggtgctgtggctggatctagtactggacgaggccgaaggctacgccttcctaaagagccgccccgacccggacgccgccgaaggcagtgcccgcccgcctcggctgatcgtacgtcgcgcgctgccctacaaggtgagcctgatgctggcactgctgcgcaaacgcatggcggagtccgatgcgcgcggcggcgccccccggctggtgctgacacgcgaggagattgccgaactgatgcgggtgttcctgcccgacgccaccaacgaggcacggctcattgatcagctcgacacgaccatcaagagggtggtcgagctggggtttttgcgccccttgccctccccctccagcagcacaccaaaccataacaactacgaagtaagccgcatcttgaaagcctttgtagatgcccaatggctggccgaattcgatgcacgcttggaggcctatcatgccgtgccatcggacgatcaagacgatcaagacgaacctgacaccacgcctgaagcacaaggggagtcaggcgatgcgtga

SEQ ID NO: 44676 - DNA, 3432 bp, Xylella fastidiosa subsp. sandyi Ann-1
atgcgtgagacctccacactcggcctaaatttcgttgccgatgacaagcgtgtcggcttccggctacagcacctagaagtagtgaactggggcaccttcaacacccgtgtgtggtgctacaccctgggcgggcgcagcggcctgctcaccggcgacatcggttcgggcaagtccacactgattgacgcaatcaccaccctgttggtgccagcgcagcgcgtggcctacaacaaggccgctggggccgatgcccgcgaacgctcgttgcgctcctacgtgttgggctactacaagagcgaacgcaacgatgccaccggcaccgctaagcccgtagcactgcgcggcacgtcggactactccgtcatcctcggcgtcttccacaacgtcggctatgacaaggtcatcaccctggcccaggtcttctggctgaaggactcccaaagccagcctgcccggctgttcgtggtggcagaacgcgcccttggcatcgccgcggacttcaacaacttgggcggcgacatcaagaccctacgtaagaagcttcgcggtgcagggtgcgagctgttcgacagcttcccaccctacggggcgtgttttcgccgacgcttcggcatccaacacgagcaagcgttggaactgttccaccaaaccgtctcaatgaagtccgtgggcaatctcaccgacttcgtgtgcagccacatgctagaaccctgtgatatgggcagccgcattgaggcgttgatctgccacttcgacgacctggaccaggcgcatcaagccgtgctcacagccaagcagcaggtgaagttgctcgcccccctggtcgaggacggcaagaagcaccagacgcagctaggcaacattcaaaccttggaggctggacgtgacacactgcggccctacttcgcacagctcaagggggaactgctgaagcaccgcctggacgcactggcagccgaagcggcccagctaactgtggagatccagcacctggaagaacagcgcaaggccgcagacagtaaagtcacccaactgcaacaggatatgcgagacaacggcggcgaccgcctggaagcgctggcggcagagattgagcaactggagcaaaccaaggcacaacgccaaaagaagtccgaccgctaccaaacgctactgaccaagattgacgagacagcgccagccgatgcaataggcttcttcacccagcaacagcgctttgcgcaacataccgaggaattaaacgcagccattgcgacgttgcataacgacaagagtgagaaggactttgcgctccgcaatgctcggaaagatcacaccaccctattggcagaaatcaacagcctgcaacagcgccagagcaacatcagcgccgcccagatcggcatccgtcatgatctgtgtatggcattgtccattgatgcggaggcattgcctttcgcgggcgaactcatccaggtgcgtgaggacgcacgcgattgggaaggcgccgccgagcggttgctacacagctttggcctcaccctgctggttccggacgcgtactacaaggctgtggccgaatgggtgaaccgcgagcagttgcagcgccgtctgatgtatttccatatgcgtccacgcaatacgacgcaggaggcagcgttacatgcgcagtcgctggtacacaaactcatcatcaaaccggagtcaccacactacacgtggctgcaacaggaacttcagcggcgctgcaacgtcgtctgctgtgacaccatggagcagttccatcgtgaggtccgcgccatcacgcaggccggccagatcaaagaccccagtggccgccatgagaaggacgaccgccatcgcattgacgaccgcagccgctacgtcctcggctggagcaatgccgacaagctgcacactttgaacgcgcaacggcaacacctggaagacagcatacgcatgttggaacaagacctcgaaaccattcagcgggaatgccagaaacaacaggaacggctggatgcactcaacaagctgggggagtacacggactttgcggacatcgactggatgagcctggtccgccagattgccggactcaaagaggaacacgcggagctccaaaccacatctaacattttgcaaaccctgcaacagcaactcacagaggcgaagacgcaagtcaacgtactgcagggcaagtggaggaacgcgttgggcgaacagggcgaggtcaagagcaaacaaaaaacggcgcagcagatgtggaatcaggcccgtagcgcttgggatgatgcgccgctgagccaagcgcagatcgcgctattggctggctggcgccagcaagcgctgggggagcacgtgctatcggtcgaatcttgcgacaaccacgagcagcaagttcgccaatggctacaaaaacgtattgatgcggagaacgctcacctgagacaactgaatgaccgtattacaggcgccatgcaccgcttcaaagatcagttcaaggctgagaccgtggagatggacgcagacttggcggcgctgccagagtatgaacggatgctcaacggcttgcagaaggacgacctaccccgattcgaggcgcgcttcaaagcactgctgaacgtcaacaccatcaacgagatcgccagctttaacgcccaactcaaccgtgagcgggagacgatcaccgagcgcatcaaggacatcaatcaatcgctgcacggcattgactacaaccaggatcactacatcaaccaatcactgcacggcattgactacaaaagggggcgctacatcacgctgctggcacaacccagcccggacgctgagatccgcgacttccagcaggatctacgggcatgtaccgaaggtacgttgaccggttcggacgatgaacagtattcggacgccaaattcctccaggtcaagcacatcattgaccgcttccggggccgtgaagggctgtcggatgccgaccggcgctggacggccaaggtcaccgacgtgcgcaactggtttgtgttttcggccagcgagcgctggcgcgccgatgagagcgagtacgagcactacgccgactcgggcggtaaatctggcggccagaaagaaaagctggcctacaccgtgttggcggcaagcctggcctaccagtttgggctgaagtgggatgaggtgcgttcagaatcgttccgcttcgtgattattgatgaggcgttcgggcgcggctcggacgagtcagccgagtacgggctgcgcctattccaaaagctcaacctgcaattgttgatcgtgacgccgctgcagaagattcacatcattgagccgttcgtctccagcgtgggattcgtgcacaacaagggcgggtgcgactcgcagctacgctgcctgtcgattgaggagtaccaggcggagaaaaccaatggaagcggaccgagaggcgacgcccgatga

SEQ ID NO: 44677 - DNA, 1218 bp, Xylella fastidiosa subsp. sandyi Ann-1
atgagttgggccacaccagccagcctgtgcgcccaggtggaacgcctgtggaagcggggcgacttgctgcgggcgctggtcacggacacacacgccatgacgtggccgcaccgcctgaagctgcgggcacccaacgctgcggatctgtccaaccgctttcaggcggtgcgtgattgggtgcaggccatcgttggcaccccgcagattcggatccaatcgcgggaatggaagcaccgcgtccaagggacacagcaggttcctgcagccgtctatctggacaccctgcaagacgcgttggctttcatcggtaagacgcatgaagcgctgcagtttgaagcggtgtggcagcagaccgcagccgcgcagccagtgctcctggcgtggctgttacgacgcccgacccaggcgctggaggtggccgaccgctgggaacgtcttttagccgtcgtcgcctggcttcaggcgcatcctcgtccaggcgtttacctgcgccaagtggatgtgcccggggtggacagcaaattcattgaggcgcacaaaagcgtgttgaccgcgctgctggacttggcgttgccgccagagagtatcgagacggccgccagcggcgtgcttcagttcacgcgccgcttcggcttcctggacaagcctgtgccgatccggtttcgtctgcttgacgccacgctgcccagcctgccgggctgcacagggctgccggacatcagcctagacgcggctcacttcgcggcactgacgctccctatcacgcgcgtcttcatcaccgagaacgaaatcaacttcctcaccttccccaaggtggccggtgcgatcgtcatcttcggcgctggctacggctgggagccgctggcacgcgccgcgtggctgcatgcctgccaactgtactactggggtgacatggatacccacggcttcaccatcctcaaccggctgcgtggctactttgggcacgtgacctctgtgctcatggaccaggacacattgttggcgcatcgcttgtactgggacgaggaatccgagccgacgcgtcaggccttggagcacctcaccgcagaagaggctgccgtctacgatgacctgcgatacgatcgccaccagcccaggctgcgcctggagcaggagcggattggctttcgctgggtgtgcgatcggctggcctgcttgctctcaacagcccacgtagcaccaccccaggatgcgtaa

SEQ ID NO: 44678 - DNA, 750 bp, Escherichia coli O128:H2 str. 2011C-3317
atgacgggcttttttgacaggctgattaaccggagcgttaccgcaaatgcaggctgtgaaccagaaccatcggatgaggaggttaccgatgagtcggttgaagaaagtttggccagtagtgaaacgcggacgctaaaaaaaatacgtgaagcgactcaggaattgctcaaatacggcctgctggaagaggccagtaagcccaatctgtaccgcatcgtactgagccatcctgaagaggttactcgtattctggagcctctcgatctggatatcggcattgatgagatccgtggcctgctgtatgtcaaagtcaggcttgatgaaacgcctgcgcaggatgaatgggcccaccctctggtgaggcggcaacgactaaacctggaacaatctttattagttgccatactgcgccaacattttgtggcctgggagcaggaaagcggaaccggtgccagtcagacacagatcgccatcgatgatcttctccctcaactccagatttatcttggcgacccgggcagtgaatcaaaagaacgcacccgattgcttaccctgctggatcaattaaaggggcatgggctggtgacgtcgccggatgcacatgagcggatcgtcatccgtccgatcattgctcatcttgccgatccgatcaatcttcaggcattactggcatggctgcgagagcaaattgcccagcaaacctctccaaatgacgcgcgagaaaaggatagcagcgaggaggacgtatga

SEQ ID NO: 44679 - DNA, 3288 bp, Escherichia coli O128:H2 str. 2011C-3317; identical to SEQ ID NO: 42572

SEQ ID NO: 44680 - DNA, 1149 bp, Escherichia coli O128:H2 str. 2011C-3317
atgtattccccagatgaattgcgtgaaaagcttgcccggcagtgggatagcgcaaaacttcgggctgaacgcttactgtcccccggtaactggccgctctgcctgcctattggtaaaccttccacgaaaatatttgcagagcagactcagcgcgttttgcagcacgtacagcgatggaggcaagttgcggttgggcacgtggaatgggaagcggtgagttatcgggcaagtgatacaccagtattaatgccgttgcgctggattctgaatagcccttctgagtggatcaacgccgctgcggatccggttgtgagccgggaatttcgcttgctggaaggaattattgaacaagttaatcccatttttcacccgctgttggtaaagcatcgctctctctggcggcacaaagatccgcagggcgtcatcagcgccgccacgctggcctgccgattagagccgggctgcgcaaaagggctgccgttaagattgctttccgggcaaggagtggataccaaatttatcgagaataatatttcgttattaacccgactgttagacgtgcggttttcaggagaagccagcgagcagggattaacaacttttcttgatgcttttgatgagtccagtcactgggttttagttgtaccattatcacccggcttacttccttttaaaaaatgccgggtaacaacggcggaactggcagaaacaacattacctgcgtcgcaagtactggtggttgaaaatgagcagtgtctgcatcatcttccagcattatctgacactatcgcgattttaggctgtggcctggacgtgcaatggctatccagttctgttctggatgaaaaacgcgttgcttattggggggacatggatagctggggattactgatgctggcgagagccaggcgctgtcgtccgacgcttgatgccctgctcatgaaccgtgagttgtttgagcagtatgccagtcatagcgccgttccagaaccggtcatagcgaaggaagctgtacctgatggcttgcttaacgaagaggccgatttttatcgctacttaacccgtttaccgtgtggtcgtctggagcaggagtttttgccagtggggattgcggaagaggtgcttctcaggtggggaaaagagagttaa

SEQ ID NO: 44681 - DNA, 1353 bp, Pseudomonas aeruginosa C1913C; identical to SEQ ID NO: 44235

SEQ ID NO: 44682 - DNA, 750 bp, Pseudomonas aeruginosa C1913C; identical to SEQ ID NO: 44236

SEQ ID NO: 44683 - DNA, 3306 bp, Pseudomonas aeruginosa C1913C
atgaagcaggcactcctttggcgtgacagcgagaccttcattctcaccagcatcgagctctataactggggcggctttcagggctatcaccgtgccgagatcgacccctccggtaccgccgtgatcggcccgacggggagcggtaaaacgacgctggtggacgctctgatgaccttgctgtgcgccaatccgcgctacaacctggcatccacgggcgggcatgaaagcgaccgcgacctggtgtcctatgtccggggagttaccggccccggggacggaggtatagagcagtctcatatcgctcgccagggtaagacagtaaccgcaattgcggccacgctcgagcgtgatggtgcgcaggtacgactgggggccgtgatctggttcgaaggcacaagctcctcggcatcggatctgaaaaaactgtggctgttaagcgagtcccccgagcagactctggagcattggctcagccagcatcacgcaggcggtatgcgggctttgcgtcagatggagaaggatgggacgggtatctggccttatcccagcaagaaagctttcttggccaggctgagggattacttcgaggtcggtgaaaacgcattcaccttgctcaaccgcgctgccggcctgaagcagctcaatagcattgacgagatctttcgcgagttggtgctggatgaccgttccgccttcgagcgggccgccgaggtcgccggcagcttcgatgatctaaccgacattcaccgagaactggaaacggctagaaagcagcagcgctcattgcaaccggtcgccgatggctgggagcgttaccaggtcttgcaagaacagctgcacgataagcaggctctcgaaggtatcctcccggtttggttcgccgagcaggggtatcgactgtggttggctgaaaccaacaggctcgagaaggagtacaaaaaggccgaactggatcaggagcaatgcaaaagtcagcttgaggcccagaaaggtgtggtcgatcaacatcgccagcgctacctgcgagtagggggcgcagggatagatcaattgcgcgagcgcatcgctgattgggtgagggagtgcgataagcgcagcctgaaagccgagcaataccaactcttggccaaaggccttggactagcggatgagttatcggccgctgctctcaaggagaatcagcagcatatcgcggcacgcctggaaatactggaccaacaaattactgacgcgcgccaaaaggcgttcgacgcaggcctcgtccagcaggaactcaatggtcgcctacagaccttacagcaggagggtgctgaggttgagaaacggccaggctcgaacctgcccgggcaatttcatgctttccgaagcgatctggcgcaggcgcttggtgtcaatgagtcggccctgcctttcgttgccgagctggtgcaggtcaagcccgaggagctggactggcgtggcgccatcgagcgggcaatcggtagccaccggctacgcatcctggtgccgcaggactcatcccaggccgcactgcgttgggtgaatcaacggcacaaccgcttgcatgtgcgcttgttggaggtacaggagccgacgtcgcgccccgtgttcttcgacgatggttttacccgcaagctgaccttcaaggagcatccgtaccgagaagccataaaggcactgctggcggacaatgaccgccactgcgtcgaaagcccggagcaattacgtcatacccctcatgccatgacggcccaggggctgatgtcgggcaaagaacgcttcttcgacaagcaggaccagaagcgtctggacgaagactggctgaccggcttcgataaccgtgaccgtctggccttcctggctgagcagattcgcgaggtcaatgagcagctcgagccagccaagctcgccttggatgctgcccagggcgacgttcgtcagttggagactcaagcttcgctgctgaatcgtgtcaaagaactgcagttcgaggatattgatctgccgggtgcccagagtcagctggagtcgctgcgtacgcaactggccaccctgacgcgccccgattctaaccttgccatgatcaaggtcgagctggatgcggccgaggccctgcaggagtctctggatcaacagctccgccaactgatcgaacagtacgttcagttaaaaactcagtttgaccaggccgcatccgctacccgtaaggcctataacagcgcggagaaagggctgaacgatacgcagcgtgaactggcgcaagcgcatttcccgactctgaccgcggatgacctcggcgatattgtcgagctggagcgcaagcatacgcgtgagcttcaagggcagctcaaagcgcttggcgagaaactgggcgatcagaaatcagagcttgccaaacgtatgtctgatgccctcaaggtagacaccggggcgcttgcagaggtcgggcgagagctggtggatgtccccaggtatctggagcgtctgcgtgtgctgaccgaggaagccttgccagagaaactcaagcgcttcctggaatacctcaatcgctcctcggatgacggcgtcacccaactgctcagctatatcgaccatgaagtctcgatgatcgaggaacgcctggatgacctgaatagtacgatgcagcgtgtcgactttcagcccggacgctatctgcgcctggttgcaggcaaggtcatccatgaaagcctgcgtaccctgcagcgcgcccagcgccaactgaactcggcgcgtttcatcgatgatgaaggcgagagccattacaaggcattgcaggatctcgtggggttgctcaaggacgcctgcgaacacagcaggaatcagggagccaaggcgcttctggatccgcgcttccgcctggagttcgcagtatcggtgatcgatcgagaaagcaggaatgtcatcgaaacccgaacaggttctcagggcggtagcggtggcgagaaggagatcattgcctcctacgtgctgaccgcttccctgagctatgcgctttgtcccgacggcagcagccggccgttgttcggcaccatcgttctcgacgaggcgttctcgcgcagctcccatgcggttgcaggtcggatcatcgctgcgttgagggaattcggcctgcacgctgtcttcatcacgcccaacaaggaaatgcgcctgttacgccaccacacgcgttcggcagtcgtcgttcatcggcgcggcctggagtccagtctggtttccctgagctgggaagctttggatgagcatcatcaacagcgcatcaaggccatgcatgaagtcgcccactga

SEQ ID NO: 44684 - DNA, 1182 bp, Pseudomonas aeruginosa C1913C; identical to SEQ ID NO: 44163

SEQ ID NO: 44685 - DNA, 1482 bp, Burkholderia cenocepacia
atgaaaacagctctggcgcttcatgcgctcaaggcgatgcgcgaaggaccgatgtggcggttactggcctcttatcaggcgcccgtgacggtgtcactgttgcaatcgctctttcccgagacgtccacgcaactgacttcggcgagtctgatggagcgactatcggtggaagtagatgggcttcgcgcccgtggcgaggaaatcaacaagacccctcaaatgatcatcgctgactgggtccatcagaagtggctcgcgcggagcttcccggagggggccagcgaagagcagtacgaactcgctgccgatgtcgtaccggcaatgcgcctggttatggggctgcttgagccgagacaaacggcgacggagagcggactggcagtggttatcgactccgttctgcggcttgctgccgatactgatcctgacccggagtcccgcctgcgggcgctgcacgaagagtctcgacgtattactgaggagattcgacgtgtcatgcaacatggcgtttcaccattagatccgacacgtgcaagtgagcggggacgtcatgttgttgccacgactgaggcgattgccgcagatttccgacgggtacgcgaggcgttcgagattctcaatcgtgatctacgtcggcaactggttgctcatgatgggccgcgcggtgaagtgctcgacaaggtgtttcttgacagtgacgtcatcgcggaaagcgacgaagggaaatcctttctcgcgttctggcgcctgttaacagacccctctcaacttgagggattgcaagctgcattagaggcgttggagtcccgaccgttcatccgcctgctcagtttggaggaacgcaagaggttgttcagggtgacggagatgctgctggttgaggggacgatggttcaggacgtgatgacgacgctcggtcgaagtctccggacttttgtccagagtcgagaattccaggaacagcgacgaatcaagaacctgatccgcaaagcgatcacggaatccttggaactcaaggacaccctgacgaatggtagaacgatcgacttcagcttgaccttgtccacgagcagtttgcgttcggtcgcacaactcacgttgacggatccgcgagagcgtccgggtgaaacttccgttgacgacgccgaagcgcccgagatcgatttggaggccatgcgggaaatgatcgataacgccgatatcgacatgccgctcctgaaggccaatatccgcgctgcattggcggagcggccgcaggtgagcgttcgtgatctgaccattatgttcgaggtagcccaagggcttgcatcaatcgtgggctacatgtctctcggacagcgagtcggcattgtgctccacaaccgagatagagagttccatcccaccgaactcgtatcctgggtcggccaagacggcatcgtgcgtcaggcgcgaatcgcccagttacttttcactagggaatgcctggatgagctcgattaa

SEQ ID NO: 44686 - DNA, 813 bp, Burkholderia cenocepacia
atgggaagccaggcggatgctcgccctgatgatccgaatcctgcagacgagataccggaagtcgatgacgagggcccaggcgagttgctggacgatgacagcgagtcaacggcccggatggatggtggcgtggaaatgccactgtttgagggcgatacgtcaacgctgccccatgaagttcgccgcgcgtatgcgttactacttcgtgggccgtcgctcgacgaacgccacagcaagctttggcctgttctgatcgatcatgaattgcggttgaggcagcttctgcatgcggcctttctcgatttggtcatcgatcgcgagcagaaaatcgcatttgcacgtccggcacatatacctgacgaggatgtgccccaactgttgcgtgaggtccggctgacctttgtcgactctgcgctcgtgctgcacttgcgaatgatgctggttcaggcggaagccgaagggcggcgagcgacggtgtcgagattcgaaatgatcgaccacctgaaagcctatgaggccagcgataacgttgatcagactcgctttaaccggcaggtcgacggcgcgattgagaaagcaaaaaaatacaactttcttcgattgattcgcaacagcggcgagcgctttgagatatcgcccgtgctcaagctggtgttttcccacgatcagattgaggaactacgcagaacctatcaggacatcagaaaccagttaggcggacgtccattggagggcgatggggatttgacgaatcgatccgactcccagtcgtccggcgacccggacgatgatcacgatattgacgaggtgtga

SEQ ID NO: 44687 - DNA, 3360 bp, Burkholderia cenocepacia
gtggaagaggccggacaagaccagtttcgacttcagcaaattcaagtcatgaactgggggacattcaacaagcttcatgtatttgacatctcgccacgcggacacctgctggttggaccgtctggatcgggtaagtcgacgattctagatgcgcattcggccctgatggcaccgccgaactcggaattcaacgcggccgccagaggtaacgacaaggttgcgcgagatcgcaccatggtcacttatattcggggggcgtgggcgacgcgtgaaacggatctgggggtgatcgcagcacagtatttgcgcccggataccacgctcagtgcagtggccgaggtttatgctaattcgcgcggtcaaaccctgacgctggtcggtatgtggtggatcaagggcaaatcgacacttgccaaagacgtgcgtcatagcttcttcgtgatagagcgagcgtttaagctcaaagaactgtcgtttttcatgcaaaccgactacaaccttcgctcatttccgaagcatcttccggaggtcaagctattcgagacgcacgcctcgtttcgcgagcgcttcaaggcgcgactgggcatcgaccatgaccttgcactgcgcttgctgcatcggacgcagtcctcgaagaatctcggcgatatcaatacgttcatgcgcgataacatgctggacgagccgcagacgtttagcttggccaaggcgttgtgtgaagagttcaacacgttagccgcggcacatcgtgatgtcgtggacgctcgcaaacagcgagacttattgcgcgacgcgaaatcccatgaggagcagtatcaagagcatcacgcaaaagtcgatcggatcgagacgctgttgaagcaagtcgatcatcacagcaagtatctgcaatatacgttgcgccgagggcgcgcgaacgagctgacgatcgagcttgagcggctgcgtcagcaggttgaggcactcggaaggcgggccaatagtgagcaggccgagctcgagagattgattaccctgcgtggcgggatgaacgacggcaatgtggcgggtctgactgcgcagttggagaccaccgctacgcgactgaaccaagtgggacgggagcgcacccgagtcacggggtggttaaaaacgctcgggtggccggaacctgaggatgccgcgcatttcggcgagtatctcggcaaagccaatatcttgcgagaacatggccacccgcacgaagaggaagccaaggagtacgcgctacgtaatgatctcagtgtcgcacagacgcagctctcggaactgctgcaagagatccggtcgatggaactgcgtaaatcgaacctgccgtggcaactcgttgacgttcgtgaccagatcgcaactgccttaaagttagaccctggcatcctcccgtttgggggcgaattgcttgacgtaccgaagaagttcgaacgatggcagggtgcgctggagcgtcttctcgggccgctcacgcgttcgttcctggtaccggaggcgcattaccgagacgtcgttgattggctcgagtcgaaccacacgggccagcacgttctctatctgcgaatgcggacacatcaacgccgtacggacgatggccccaaatctccgatacgcatgctggacacggcagacgacaagtacggtgactggttgcgcgatgagatctctcagcactatggagatttcgtctgtgccgaaacgatggatgagtttcgcgaggcggcccgtgccattagtctccaaggtcaaatcaagcgtggcggaacccggcatgaaaaaaacgaccggacccgcctggataaccgcaaagattggttgataggcttctcgaacgagcagaagaaacttgagctgctcgacgaacttcacgctcagcagacgaagataagcgaatcgaagcaggtgctggacgatctcgtcgcatcacgcaagcgggaagagaaaaagcttgccgcagcgcaggaactatcgcaagtcatgtgggctgacattgacacggtatcggttgcgcttcaactgcagcggttgcaggttcagttggaggacgctcagcgagctcatccggaagttcgggaactcgatacgcaaattgaagcgcagcgacagacggtcagcgaagcgcagggagcgcgcggatcggagtctgacaaatacgaccgttccgtggagcagatggccacgctgagccgtgagcttgaagcgacgcctgcggagcttcaggtgccaccgcccgatgctggcgagctccaggaactgttcggaaaggcggatcgcctcacactggacaatctcgagtcgagacgagagcgtgcacgcggtgatttgaaggagcaacgagggcaagccgacaaggatcggtcgaacgcaagaaaggacctcgaggaggctttgcggacgtttcgacgcaatcatccattggcggcggcggatatgggtgagacgttggacgactggccagactatgcgcgcgtgcttgtgcgcatcgagcaggatgatctgcctcgcttcgaagagcggttctttcggttactcaacgagcagagcgatcgccacatcgccaagctgaggcaacgactcgtcacggaaaaggaagagatccgtggtcgcatgaacatcgtcaatgatgccctgtcgcaatcccagttcaatccgggaacctatcttcggttggaaaaccggccgagaacgctgcctgaggtgacgacctttctcgctgatctcacggcctgtcttgagcgcaatatcaagccggacgccacacgggatgagcgggaagagcagttcaaggcactcagtaagcttgttgagcgcttgcacagcgacaagtccgaggatgagcgatggaaggcgcaagtgctggacgtgcgccaacatgtcgagtttgttgcaaaggagttcgatgccgaaggcagtgttcgagacattttccagtcgggtgccggcaaatcgggcggccagcgtcagaagctcgctgcgacttgtctggcagcggcgctgcggtatcaattggctggaacggatcgacccttgccgcaattctgcacggtgctcatggatgaggctttcgacaaagcggacagcgagtttaccgccatgaccctgaacatcttccatacctttggttttcagatgctgatggcgacacccatgaaggcagtcagaacactggaacccttcattggcggtgcacatgtgttcagtaacaagtctcgggacagctccggtgcggtatcgatcgaatacgacatgacacatcatcggctgatcggcctgggggcgccgcgacccgacgatccgagccgcgccgctaatgatgattccgacgaaggaggcgcgcgtgccgttgattga

SEQ ID NO: 44688 - DNA, 939 bp, Burkholderia cenocepacia
ttgttgggccaagtaacgttacccgaaaaagtgtgcttcgaagatgcggacgcggttgctgattgcgccggactgcgcacgcaatgggccaccctaaaggcacggtggcagacgctatgtatgcagcatcccacaatgattggcatgccagagtgcgcgaaggtactggtgagtgcggcagactggtcagacgacgacttcatgcgactactggaatttctttcatggggcaagcgtcatcccgcgagcggcttgtatctccgtcaactgccactgaaggggattgacacaaaatgggtggagcggcgcttgggcgtcgtggtgcccctgctcaaaaccatactgggacgcgacggtgatttgcatcaattgttggggcttcgacgtgcgccgcctacgatccggatgagactgctcgatccccgtgtccgtgaacaactccgcggggcagactatctcgagatgcccgtggaccagtggaataccgtgctgcgccggccaccggtccgcctactggtggtcgagaatctggattcggggttggccgcccccgacatccaagatgctgccgtggtgatggggcacggtaacggtatcacggtcctgcagcaggtcgcgtggagccacgctgcggagatcctctactggggagacatcgacacctggggtttgcatatcctgtcacgtatgcgcggcatttatccccagctcgaatccatcctgatgacggaggaggtgctcgagtcgcatcggcatttctgggtcgacgaagaaacgcaggacatgcgacctgctgaacaccatacgatcaaggaagccaaacttctgcgtgatttgcaacagcggcgctgggggaggccgattcgcctggagcaggaacgcgtgcactggccgatggcggttgaggcattgacgcgtcgttggggaggcgtggcataa

SEQ ID NO: 44689 - DNA, 1401 bp, Marinobacterium sp. AK27
gtgctcttcaataagcttccggatgacatattcctgccattgtccggccagaaccgccgtatctacgaggtggtgctgctggagttggcggatctgttttttgatgaggatctgatcgatccgtttatccccaaggatctggtgcgctcgaccatcgagaatgcggtcgtgcgctacggtattcgacgctgggccgtcgagtcggatgacgaaaacgacggcgacctgccgctctccagtgccgactacaccaaccggatctaccggcgtctggtgcagaccggatggctcgaagaggagcagcggatctaccgtacctatgtgttgatgtcgccggcgaacagttatttgctgcgatcgttggcgtcgatctccaagctggagaagcgcagttatggtggtgcggtgctcaacgtactcagctctctggagtcggcagtgtccgatcctgtcgggcgcggtattgcactggaggaggccgcgcagacagcagccgatttcagtgcccacctgaccgatatgctgctgggcctccgtgagctgaagatcagcctggccgatagcttgaccccgcaggaggtcgtgcgcagcttcttcgaccgctttgtcgaacacatcctcgtgtccgactataagacgctgaagaccaagaacaacccgttccgttttcgccgccagattttgtcgatgatgcgcgacctgcagtttgatccgctcaagctcgatcagctcgccgagcattatcagatgcagtacgagctggatgtggaggaggcggaagcgctggtacagcagcacatcaaccgcgtcatccgcatcttcgaatcggtggatcagcgtctggcggccattgacgatttccgctatcagctcgagaagcgcgtggccgacaccgtgcgctacatggacaagaccacgccaggtatggccgcgcgtctgtcgcgcttgattgccgagctggccaagaaggacgagagcgatattccgctggttgatagccttgagcaggtcggctttatctcgccctcaagcgtacgctcgccgatccgccgtcgtattgagaccaagccgcgcatcatcacccaggctgaaatcgacccgaaggtacttgcactcagacagttgttcaaagagtggaaagagcgtcgtgaggtcaaggtggacaagatcgaagcctaccttgaggagcagtttgctgggcgcgatcagctcaacgcgacggagttccgaatcgacagcatcgaagactacatctgctttagctacgtgcgccacctgaactcgctcggcaagaaggcgcgcaagaccgctacgcgctaccagattcagtttgaagaccgctacgtcaacgtcgccgatatggtggagtgtcgtggcttcgtgattcacaggacccaataa

SEQ ID NO: 44690 - DNA, 762 bp, Marinobacterium sp. AK27
atgctaggtgatctgcaaaaagtcgtttcccgcaacgaacagcatcagccggacgattttatccgtgccgccaatctgctgctgaccagtcagttcctctacgcggaccgccctgtgcaccgcgagcactactttctgattgccggcaatgtggattatttccgcaatctgtttgccgccatcggctggagcctgatctaccagccggacgaggcctatctgggcatcctgccacagggcgaggagcgcgtgctgcgcctgcgacttgatgagtcgctgttgctgctctgcctgcgccagatctatgaggcgaaacttgagtctttcgaggtggaggatggcaaggcgttcagctcctctgacgacctgctgcgcctgtatgacacgctgaccggcaaggagattcccaatgagacccgtctcaaggagatcctgtcgctgtttacccgtcacggtgtgatcgagcgtggcaagtccgacgagaccgatcctaaaaacgtgccgatccgcatcaacccgaccatccgccaggtggtggtcgaggattatatcggccagcttgaagcgctctgcgatatcgataatcgggaacagacggacgaaccggtcgaggatgaggccgagcataaccgccgtgccgaggacaaggcaggcgaaggcgagagcgtcgaaacgccaccggaacctgcggccgatcagtcagccgccgaagacgtaagcgaagaggaaacagccggggagcgcagcaatgaaacagcttaa

SEQ ID NO: 44691 - DNA, 3438 bp, Marinobacterium sp. AK27
atgaaacagcttaatcgcatggtgctggtcaactggtatgtgctgggggccatggagattccgatcaagggtaacgtggcaatcgtcggccctaacggctccggtaaatcctcgctactcgatgccatgcagaccgttctcatgggtggccacaagcgccacctgagcttcaacgcctcggcgggtgagaagagcgagcgctcgctgcgtacctactgtcttggcttcctcgacgatatgggcaagaaaggcaacgcccgtgaggactcgatctcctatctggcgatgagcttcttcgataccgaaactgcgcaggagagctgtgtcggcatcgctatcagcgcatccaccgccagtgccgatgaagagattctcggccggtttattctgcccaacttctcggtgacgctcgatgacttcaccgtcaaacagggcagcggtcgcatgccgagagcctggaatgaggtgcgtgacggtctgctcaagcagtgcccggagatgattctggagaagcgtgcggcacgcttcgtcaaagagatggtgacacacctgagtcacgatccgcagatgcccaacgacgacgacaagttcgtcaagaacttcaagaacgcgctgaagtttgtgccgatcgacagcccgacccgattcgtgcgcgagttcgtgctcgatgagaacattgtccacgtcggcgccttccgcaagtcactcgacgaataccgcgcgatggagcagaagacccaggaggttgccaaccgtattaccgagttggaaaaagtgcaggagatgtgtcgcggcatcagccgtaacctgcgcaactcggtggagtatgagtgggttgtgcacgagagtcgcttcgagcaggccgacctcaagaaggaggaggctgccgagcgtcttgaaacgtcgcaggaacaggaagaaacgctgcaggttgagctggccgaaaccagcgaagcgctgaacaaggcgattcaggatctggccaatgcccgcgcggagctcaatacctccgattcagcccatcagatcaatgcgcttgagtcctctattcgtgcccaccagcacgagctgaatgtggtcaaagaccgtatccaaagcgtctatagcctgctgcgtaccacagtcagcttctctgatcataccgatatgttgcccgaggcgttccgcccggtggtggcgcagtcggtggagctgtggcgctccggcgagaatgtgctggccgaggcctggccgatctccccggtggaggtggacaacaccctggagcagctgcgcggtaatatcgactcggtgcgtaaggcggtatcgcgccgttacgaggagtcggtgatccgtatcaacgagctgcgcagcaccatccagaaccagaagagcgccgtcgagcagctgcagcaggggcgggcgccgatccgccacaacacccgcgagctgatggagctgctggaggggtatggcatcaagtcgacaccgatctgtgagctggtcgatatcaacgacgacaagtggcgtatcgccatcgagtccttcctcggcgcccgacgcgaagcgttggtggtggccccggaccgggttaaggaagcgatcacgctgtaccgtcgcaagggtcgccacctgaagggctgccgtatcatcaataccaccaagagtggcgactggctcaaccggaccaagaacggctcactggcgcagtttatcgacaccgacaacgacgatgcccgcgcctacatgaaccgcgccttgggcggcgtgatggcggtggagaccgaaaatgagctgttgcggcatgagcgtgcgctgacctatgactgcatgttgcagtccgagggctccaccactgcgatcaacgagctgagcccgatcatgggcatccgccgtcgcggcgaccaactgcaggtgcagggccgtcaggtagatgagctgatcaaggagttcaccacccttggcaagaagcatgaaaccctggagaagctgcgcgactcgctgatcagtctggccaatggcctgatgggcgtgaacgagcgggtatatgatctgtgtacccagcgcgaacagctcagcggcgaggtgcgtggcttcgagcaggcgatcaccgatctacgcaaccatgacgattccggcattcaggcgcgcatcgccgagctggcagagcatcagaaggctgtcgagagcaagcagaagtccctgatggacaagctgcagaaggtgcgtaccaacatcatcaaggataacgcactggtcgaagcgcttgatggcgagctggttgagcacgttcagcgccgtaccgtctgcgaagagaagggcgagttcgatgcccagtctgcgcaggagaagcgtgactatcttgacgaagcctgtgatggcgagctggaacgtatcatcttcgaagcggcgaagaaggctcagtccgagcttcagctgcatgagaagaagaaaaacggtgtgcgcgatgccgtggcccagtacaaggcccgctatcacggcggaggcatgagtcatcaggaactcgacaagatcggccccgactctacccatgaggacctggagaagtttgtcgacagcaccgtcgaggcgttgcgtgaatcggagctggcgcagtatgcgcagaaagccgaacgcgcccgcctggaagcggaaaccgccttccgctccgactttgtggcgcacctgaacgaccagatcaacaagattcgcgatctgatccgcgagctgaactcccacctgaagaaccgtccgtttcacaaggagatgtacagcttcgagatgagccccaacccggagctcaaggatatcctcgagctggtcgaggcctatacccgtatggatcaggccaatgtcggctcactgttcgatctgcagcactccggtgacagcactcaccgcaacgcgctggccaagatccatgacgtactcaaggatgagggcgaaagtagcctgttgcaggattaccgtaacttctacaatttcgagttggtggtgaaggacctgcagggtaaccgcaagaccacgctgacccagcgtatcaagaccggttccggtggtgagcaccaggtaccgttctacgttgccatggcggcggcactgggcgcgacctaccggttgaaagagggcagtgacggcaagccggtgggtggctttagcctgtcggtattcgatgaggcgttcaacaagctcgactcggagaacaccgtcacctcactgggctttatgtccgacctcggtttgcagacgatcattgccgcgccggatgagaagtactcattgctgtcatcctgcatggatacgatcatcaacgtctgccgtgatggccgcgtggtcgatattgacgtggagttccccacggaacggggcaaggagctattggcgtcagaccacccctataaactgatgccgcgtgaagagcttgaaagtgaggatgaagatcaggctgaactggtctga

SEQ ID NO: 44692 - DNA, 1518 bp, Bifidobacterium pseudocatenulatum IPLA36007
ttggctgagatcagacgggagatggaacggcttcgacccgtatacgaaaccggtgtcctacggttgctgctgcgtaacaattccatgctgtacgtcgcgttgttgcgttccacgttcgacccgctgacgggggagctgccgcgcgaaatcgtcgaagaacggttcgcgcgcagtctcaaccggctcatcgaaaccggcgattacacgctgaaagacgggcagactgcgcgcgaggccgcgcattcggtcctgcttgacctcgcccgcgaaggggaaggcgactacgcctggctcgccaattccatggacgtggcctcgcaccgctacctgtaccgtctcacagcgcgagcgcaccgtgccatcgaagcgctcgaccggcttgaggacaccacgaaagcgctgtccggcgcgcaggccaacagcatcatcatggaaatcgagcatgctcgcatgcagttgaccgccgatccgcgcgaacgcatccgcctgctgaagagggacattgaggaacggcagaaggaaatcgacgagctggaacatagcgaggccttggaaaagctcacgtccgaacaggtcggcgacatcatcggcgtgattcacaacactctgcgaggagtgcccatcgacctgcgcgagctcgccctttccgaacgggacaacggcgacgcgctccgacggcgcatgcaggccggcgccatgagcgtggaaagcatcctcaccgcataccatgacgaataccgacgtgcgttccgcgaatccgacagcggacgtcgtttcgaagacgcgttccaagtcatcgtcaccgacgaaggccggcgcgagatcgacgacgcggtgcgggacatcgccagaaacccctatttggatggcgagccgagcgtgctgctcaaccaggtgcgttccgaactcaaacgcatctatgaaggcatcgaggacgtgcgccggcagatccgcacgtccgacgaggcggtcagccgtctcgtacgccagcagaccgacacgagctaccggaccatgctcgccaaactcaaccagctgttcgcaaagaccagcgccgaagccaaagcccatcccaatgaccaaagccggccctaccatacggacgccgggcaggcgaaattcccgacattgccatctcgtccggccagatcaatggcgcgcgccgcatcatccagcctgaacgacgccccagcggcgaccatcgaagcgccggacctcaagaacatggtcgaaatatgcgggccgcggctgacgcgcatgatcaggcttatccgcagcaatccggtgacgacatcggacggcatgttcgtggacctcgcggcaagcttcaaccagctgccgaaagccgaacggagggaaagcgaactggtcggcttccttagcgccctgcgcacgcaggacgactcgtcatacgtgacatggcgctgcatatcgatcgacggcagcgaacgcgtatggcgcaccaaacccattctcatcaccgaaacgacgctcgacgacatcatcgaggagagataa

SEQ ID NO: 44693 - DNA, 783 bp, Bifidobacterium pseudocatenulatum IPLA36007; identical to SEQ ID NO: 42320

SEQ ID NO: 44694 - DNA, 3459 bp, Bifidobacterium pseudocatenulatum IPLA36007
atggcagacggcatgaagatcgtttccgacaagtggatgctacaaagccgacaaatcgtcaactggggctcatacggcggctggcacgaattccgcccatccatggacgaaaccatgccggtgaccctgctcgccggcgccagcgaatcaggcaaatccacactcgtcgacgcgcaaatctcactcctctacccatccggaaccccctacaacaaggcgtcgaactccggacgttcggaacgcaacgactacacctacctgcgtggcatgatcggcgtaagcgatagcgaaaacggcgaaacgccgatcttcctgcgcggcaaagacgccgacggcaccccacagaacatctggggcgcaatcgtcgacacctacgtgaacaaaaccgacggaggactgctctcctgcggcaaattcctctacctgaacgccggagacggacaagacggactacgccgccgctacatcacctggaaccgaaccatcgacccacgactcatggaccagtaccgcaacacaccattcacccggtccatgttcgaaaaaacctatccggaatgcaccacgcacaccaacgccgcggcattccacgcctccatctggcaggacatgggcctaagcgccgacgcctgccgcctcctgcacaaaatacaatcggcggacgccccctcaaaactcgacgacatcttcaagcaaggcgtgctcgacatacccgaatccatccgcctcgcccacgaaaccgtcgacgactacaaccggttcaacgaaaacttccacagcatggaagacaaaatggcccgcgtcgccatcctacaaaacatccagacacgctacggcgaatacgcaaagcaaaccaccgaacgacgcgaatacgaacccatcaaccccgacagcgaacatggcaacgcaacactgtccgcatgggcgcgctcgcgcatggccagcgaagtgcgcgctggtctgccggccgcgcagcgcaaggtcaaggagtcgcaggaggccatcgatcgggcgatgcagcgcgtcggcgagctcaacacgcgaatcgacgccgtcaaggaacgtatccaaggcatcgacggcggcagtctgcagcagctcggcaaggatcttcaacgcgtgcgccaggacatcgacgaggcgagcaggcaacgtcatgccatagccgaacgattcgaacaggtcgaaggcaggcttcccgacagcgagcagacatgggacgccaaacgcgccatgctcgccgaaacgctcgacacatacgaggaacggttgaaggacgcgaacgccagattccagcagctggtaggggagcgtcacgaccgccagcgcgaccgtgacagcctacgacgggactatcagcgcaaactcacgcacaggacgcgcatcagcgatgacatggacgacgcgcgcacgcttatcatgcgggcgaccggattggacgcgtccgaactgccgtatgtggccgaactgatggacgtgaacgaacaggacgaacagtggcgtctggcaatgaacgtcacctacgcgcccatcgcgcagaccatcctcgtcgacaaacgccacgagcaaggattcgcggcgaaaatcagcgccatcgacccgaaactcatgacacgacgcacgtggcggttcatcgacaccggcatgcaatacgaatcctctgccagcgaaggctggatgtcgtcgaaactgcaataccgggaggactctccgttcgccggatggctgaaaaaccagacgacgtcgccacggttcgacgcgcgttgcgtgcacgccatcgacgacatgaaccatgacgaacgacaagtgcaggccgacggacaaatcaaatccggcgaccgtggattccacggcagcaaaggactacaccaggtcatcggcttcatgaacgaacaatacctggccgaactgaaaaaccaactcgacaaggcggagcaggcgttgcagaacgccgaccgtcgaagcgaacaaatgtccaacgccatcagcctgctgcaagacgagcacgagctcgcacgaatcgtagccgacatgccatggagcaaaatcgacgtgaacggactacgggaacaggaaacgcgaatccgcaggcagatcgaacgcatcgaaaacgacccggaactcggccaactgcaaaccgaactgaaacagctcaaccaacaggccaccgccgaaaacagaaaccagtaccaagccgaagacgacctcgacaaggcccaacacgccgtccaagccgaacaagcatggctcgacgcctacggcaacgacgacttcgacgacgccacactatccagcatggtatcgaacctactcgccgacgcatacgagaactgcttcggcgcatccgtacgcgcgcaagaccggccaaaactcatcgcaggcctcttcgaccatgaaagcgaaacaccattccacacgcgcgcgctacgcaacatcgcacgcatcgcacgcacacgaatccaagaaatcgacgccagatccaaccaactgcgcgccgacacggaacgcatcatggacgactacctcaaaaaccactccacagacgacaacaccgtcatggcaagcgtggaagactaccgatacttcctcgacgaactcgacgaactcaacatgctcgtcacccgcgccgcaaccgacgaagaatacgccaacagcgtcaaaaaactctacatgagcttccaacagctcaaccgcgcgctacgcaccgacgaagaaaacatcaaagaacaactcaaccgcatcaacagcatgctcaaaggacaacaattcggcccacaaggcggcagactatcactcgacgtgaccttcagcccaatcgaccgacaattcgaaacaaccctcagccgcatcctgtcaaaactggaagactggacgcgcaacgcaagcgacaatcccacggaaacacgcaaagcattcaacaactgcgaaacattcgtgaacagactgcacaacgaactcgacaaaatacacgacaccaacggcatcaaagcatacggcgcacgcaacctcgacccacgcgtacgcagctcattctacgcaatcgtgcaccacgacaacgcccccgacgaacgcatcagctccaccggcggaaaatccggcggagccctccaagaactcacctcattcgtctacggcgcggccctcatctacctcctcggcggcgacctcaccgcacgccccacctacaccacgctcttcctcgacgaagcactcatcaaagccgacggccgctacaccaaacgcgcgctcgccgtactaccccgactcggcttccaaatcatcgtctccgccccggaaagcaaaaccgcggaaatcctcaacgtcgccaacagagcatacgtcgcatacaaagacccatccaccggcaactcatacctacaggaactcgacagcgaaaccatcacacaggacgaaacacagcccaccaccgcacccgcgaaaccaacaacggaggcataa

SEQ ID NO: 44695 - DNA, 1203 bp, Bifidobacterium pseudocatenulatum IPLA36007
atggcaacggccagaagcaccaccaacagcgacatccacagccaactcaacggatacgtcaccgactatctcaccaagcacatgtatgacgccaacacctcctggccattgcgcaaaaccatacgactacccaaacaagccgaactcgaagcccattacacgcacatccgcgcccaagacgaagccatccgcaactgggcacaacaacaccactgcgaaaccagcgaaaaaaccaaaatcatctccaacggaatcgtccgacaaaccagccaactcatcgactcggtaaccatacccgacctcaacacggccctcaacatcaccacaccacaaacacgcaaactctaccaacgcgaacaccaacgcgcacacaccatcaccaaccaattcaacctcgactccaacacctccataaacatcgccaaaatcctcaaaaaccacgacgacaccgacttcaacctcgtcatacaagccgcacactacttcgccaaccacaacaccgaaaacatgaccccacgcatggtccccatccccggattcagcgcaaaatggctaggcaaaacaacatcaaaccgctgcaaagcaatctgcaaactcctcaaacgagaacaactagccctcaacgaccgccacggagaaatccgactccgactcctcgacacacaacaccacaaccaaccagacctcatcgtgacacaaccatggacagacggcgcgccacacgacatcacccacatcatcatcgtggaaaacaaagacacctaccaagccatacccacaacagaacacgccatctgcatattcggcagcggacacgcggcgacccgaatcaaaacactactaccttggatcacaaccacaccccacatcatctactggggagacatagacgcagacggcctcgaaatactctccgaactacgacaaaccggcatcacctgcgactccatactcatggacagcacagcatacaaaacatacgaaccatacggcaccaaactcgacaccaaaaaacaacccctcaaaacacgcgaccccaaaccaacaccaggactcacacaacacgaaagaaacttatacgaacaactctgcaccgggaaaaacacaacctacctacgaatcgaacaagaacgcatccccatcaacgacgcaatgacaatactccacaaccaacaccaatggaacacaacacaccacaaatag

SEQ ID NO: 44696 - DNA, 1497 bp, Endozoicomonas elysicola
atgctctcttcagatatagaactcagcaggaaccttgtccttgcccgcacccagaaccccgcgtggcgattactggcatcaccacgagcacctctgatgatcagctgtttgaaaacactgttttatcaggatcatgaaacggtttcagaagatgcagccctgcatgttcttgccgaaattcttggccaattcgctaaccatgacgaattttccatcgatactgaagacttgctgtcactggctaaaaaagagatgagagagtggcgtcaacgtaacctgatcgttgaacgtgagggacaactgtttgcgacggatgccttgcaacaggccatgcaatttattgatggcatggataatcgcatgatgacgtctaccgcatcccgtctggctactgtgcagagggagattgatagcctggaagcaaaactcaacccggatcaaaccagtcgtgctaacaacctgacgcgcaaaatcgagagtcttaaacacgagcttgaacaggttaaccgtggagaattcaaagtacttgaaggtccttctgccgttgagaatattcgcgaagtgtacaacctgtccatgacgctgaaatccgatttccgtcgggttgaggactcttacagggaagcagacaaacaacttcgccaaaccattatcagtgaacagcatcaccggggtgaaattgtcgaccgtcttctggatagccatgatcacctgctcacgacaccggaaggacaagttttccatggtttttacgagcaactgagccactccattgaactggacaatatgaaacatcgattacggaacattctgtccagtccatcctgccgggaagcattgacccaacagcagtccatggaattacgctggttgacatccagcctggtcagagagtccgaatatgttattcgtgcccgggctcgcagcgagcgggatgttaaaggctttttaaaatcaggtctggcagtagagcaccaccgggtaggccagatgcttaatgagattctggaatgcgcgttaaatcttgactggcacagtcagaaattgcgaaggagtcctgccccactgaaaccattggcattccctgtttccggtttacccctgatcgaacggcttacctttaagcccgttgagcagttagaatcccagaagctggttctgtcacaggagagtgtagacctggatgaactggatgacgacttttggaatgcttttgatgggctggatagagaaacactgattcgggaaaccattgcactgctaaaaacccagggcacgccaatgacgattgcccaacttgcagaatatctgccaccaactcatgatctcgaaacactggcgctgtggttgagcatggctcgggaagcagggctcattgttgcagacgatacggaacagctggacattcaggacagagatgggcagtggcttcgtttttacctacccaaaacctacctgcacacagaagcactgacaacgattgattgggagttgtaa

SEQ ID NO: 44697 - DNA, 759 bp, Endozoicomonas elysicola
atgagcgacgtttttgaccaactggtgacctccggtgctgctccgtcgtcatcacctcagacgacactgaaagacttctcagaaatcgaagaagttcagacagacaatacacagactcaggactctcccacactaacggcaagaaaagtaaaacaggctgtgcaggaactgatgaaatcaggttatctggaagccagtcgcaaacctaacctgtatcagcagtcagtgctgtctcaagagcaaatcaatcgcattctggaaccactggatctcaggctcaccattgatgatatccgtggccttgcttttctggtggtcagtgacacatggcaggaagagggttctgccgagagtgatgaatggagtcatccactggtcagaagacagcgaattaccatggagcaatccctgttgatcgccatattgcgacagcagtacatcgcccacgaacaggaggcaggtattggtgccactgatgcgagggttgatattgatgacttactgtcgcagctgcaggtttatctcggagatatcggtagcgatagccgtgagcgtaaacgtctggataatctgcttgataagctcgcaaaccatgggcttgttcaggtagacgacaaacagcacactctaaccattcgaccgatcattactcatctggcgaaccccgaaagtctgcaaaccctgctgaaccattttaaacatttgagccagcagccagatgttgattcacctgttgaccagcaagaggctgagcaataa

SEQ ID NO: 44698 - DNA, 3426 bp, Endozoicomonas elysicola
atgagtaatcatacaggtcatcaaaatactctaacgaatataacgtcaaaaagtgataacgaacgtcagctcaccggaagcattgacctttttcagccttcagagcttgcaaataccgcttttgttctgaaagaactaagtctgtacaactggggaccttttcagggcaacaatcaggcgacatttgacctggaaggcactgccattatcggcccaacgggcagcggcaaaacaacactggtcgatgccctgatgaccctgatcgttcctctgccaaaatacaatctggcctctaccggtggccatgaaagtgaccgagatctgatctcctacgtgcggggtgtcaccggtgcaggcaataactccggcgataatcaccatattgcacgtccggggaaaaccattactggtctggcagcccgatttgaaagtcatgaccaggttgtgcaaattggcggcctgttctggatagatgtgccgggcaatgcatcagccgatttaaagaaactctggctgtttacccagcgggaagaccagactctcgaacattggctaaccctgttgcatgagggtggtaaacgcgccattaaacaatttgaacgacacacgacggatctaaaggtttttgacagtaaaaagtcatacctggataaaattcaacgattttttgaagtagggacaaatgccttccctctactcaaccgggctgctggcctgaagcagttgaacagtgttgatgagatattccgggagctggttctggatgatcggtccatgtttgcccgcgccggagaagtcgccacagagtttgatgacctggccataatccacgaagagcttaacaccgcccgacgtcaacagaactccctgcaaccgctgatttccttgaacaaaaaccaccaaaaattaggtgagcaacttgccgagcagcaggcgctctccgaaattattcccatctggtttgccattgccggccaccaattgtgggggacaaaggttaaagatgttaagactgcaatagacgacctgcaggaaatcattgttgccagccaggaaaaaaaagatcagctgaaagatcaggcagaccggttaaacgaagtatatctacgtgcaggcggaagcagcattgagtcccttcgcagggaaatcggtcaacaggaaaaactgactgcggattgtcgccagcgtgcccgggattatcagacgctggctcgtaaccttgatcttgacgacacattatcctcaaaaatgttggctgctaaccagctgcaagtcgggaagcagacctcggagttagaggcgaaagccagagaacaaacgactaatgtcgatcaactatcttttgaacgcataaccagatcacaggctctggagcaagtcactcaagagtacgaagcggtcaaagccagaccaggctccaacatcaaaggggctctgcaaaacttccgtagtgatttagccgaggctttgagtctggaggaagacagcctgccttttatagccgaactggtggaggtaaaaacagcagaaaagccctggcgcggagccatagagcgagccattggcagtcatcgtgaacggattctggtgccatcgcaacatatgaaagcggcactgaactggatcaataaccgtcataaccgagtacatgtgcgcctgcaggacgctatggctccagccgcgcaaccgcagttttataacgatggatttacccgcaaacttaattttaaagaacatccgcaccgtgaagcactgaaagcattactggccagcattgaccgacactgtgttgaatcaccggagcagttaaaagtcacaccccacggaatgacccagcaaggtttgatgtctggtgttaacggccgctatgaaaagcaggatcagcgctcattaaacgacaactggatgacaggatttgacaacagggatcgactggccactctcgaagatgaaatcaggaccttgcggcaggaagaaaagacattccagcagcaatacgacgatgcaaaaaaacgtgaacaaattacccgtcaaaagctaaatttattagcccgcttatcggaaatcacctttgaggacattaaccttcctgactatgaaaaaaaattgcgcgaccttgaacaacaactttccgcccttctggcaccggattcagatgccaccaaagccaaagaagcactggatgtcgttaaacaggaaattaagcgcatagagcacgatatttatgagaatattcagaaaaaaggagagtcggctaaccaactgaaatccgctgagcagaaaagagaaaaggcgtttgcggtgattggcgatggtctgaaggatgaacaggcacaactggctgaccgactactgccatcactgtctgacaccaatcctgatgaccttcccgataaggaaaagctttaccagaataaaaccatcagcagtatcaaaacacttcagtcttccataaagaccgctgaaggacagttgatccgacaaatgaatgaagcccagaaacaagacactggctccctgagtgaagccggtaccgagttacgggatattccacaataccttgaacgactgaacacactgactaaagaagcgttgccggagaagcagaaacgcttcaaaaactacctgaatcaatcctctgaccagggtgtcacacaattactgaatgcgattgataatgaagtcagtcaggtggaagagcgtattgaggatcttaatcgaactctgcttcgtgtcgacttcaagcctggtcaatatctgcagttaagaccccagcgtgtgatccatgaaagtttacgtaatctggagtcggctcgtcgtcatttgcgagcagcatctttaaaagaagacgacggtgaaagtcactatcgcgcactggtgaatatggtcgaacttttacgacaagcaaacgacaatcgccgaacagttggcgcccgggcactgcttgaccctcgataccggcttcaattcaccgtagaagtttgtgaacgcaacagtcactctgttatcgaacgacttaaaggctcccaaagcggcagtggtggcgagaaagagattctggccagctatattctgaccgcttccctgagctatgcactctgccctgcgggagcatcacacccattgtttggaactattgttctcgatgaagcattctcaaagagctcgcaggccgttgctggtagaatcatctcagcccttaatgaatttggtctgcatccactctttgtcactccaaacaaggaaatcagactacttcggtcacatacccgctccgcgattctggtacaccgtaaaggaatgaaagcaaccctgacacctatgcgctgggaaacgcttgaaaaacatgccagcagaaaaagccagataattgttccagcgtccagtacctttacagagtctgaaaaccatgaaatcaccccatga

SEQ ID NO: 44699 - DNA, 1146 bp, Endozoicomonas elysicola
atgaaatcaccccatgacattgccgatgagctggccaggcagtggaagagtgctgatacccgggaaaaacggttactgatgaaagacagttggcctttaaaagtcagcattggtaaaccagcttccggagacattaatcatcacccggaaaaaatcagacagcattttcagcagtggcgacaggtgaataccggtgaagtgatctggaattctgccagctatcgaggaatggcagaaagcatcgagatacccggtcactggcttttatcaaaacccagcgaatggattgaggcaagtcgctgcaaaacagttaaagatgaatatcaacgcctgggcacgatcattcaacagacgtcgccgatttttcatccttacctgatacgccaacgacgctggtttgataagcccgttaacgaagtcatcaagacaactgaactggctatgctacttgagcccggttttgcccagggagtgccactccgttccctgggactagccaacaccgataccaagttttttgaacgaaatgcatcgctactgaggcagcttctggatatccggtttgacggtcttccctccaaactggggcttgaggcctttctcaatgcgcccgaaagccatcactggctgttaatcgcagaccttgatggttcttttctgcctttccaacaactccgtgtcagggactacgagctgtccacaacaccattgccagctgccaatatactgattgtcgaaaatgagcagtgcttacacttgattcccagtctaaaaaataccatcgccattcttggagccggactgaacctatcctggatgaaagcaagctggctgcattcaaaatccattgcctattggggagacatggatagctggggactcaccatgctggcacgagctcggaatcaccaaccttcgctatcggctcttttaatgaatcaatctgtgttcgatatgtttcaggaagatagggctgttgaggaaccagttccttccatccatgaagattgcacagcactgaaagaagaagagcagcagtttttgaatactttacgtgctctgaagagaggaaggcttgaacaggaatttttaacagcagaggttgttcattcggaactcaaacactggtgtgactcgattcaataa

SEQ ID NO: 44700 - DNA, 1443 bp, Mycobacterium kansasii; identical to SEQ ID NO: 42193

SEQ ID NO: 44701 - DNA, 579 bp, Mycobacterium kansasii; identical to SEQ ID NO: 42194

SEQ ID NO: 44702 - DNA, 3399 bp, Mycobacterium kansasii; identical to SEQ ID NO: 42195

SEQ ID NO: 44703 - DNA, 1161 bp, Mycobacterium kansasii; identical to SEQ ID NO: 42196

SEQ ID NO: 44704 - DNA, 1452 bp, Snodgrassella alvi SCGC AB-598-J21
atgaacttttcacattcactagcaaaatataggcgactttatgaagaaaacaaggtctggaaattacttagagcaactacagcgcctctcattttagcctttattgagcaagtattttcgtctggacaaaacgaaatatcctatagtcaggctcgcatcttattagatgcagagttggaaaaaaatcactggtatgccgatacaccagcagctatttatattaatcaatgggtcaaagatggctggttacgtgagatggacaataaattgaccaaaacagatacatgcgaaattgcattacgtttttgtcaaagctttgatgagcgtaacataaacaccagtgcttcacatctacgtattgtacaagaggctgttagagaactggttatcgcattaaacgaaaatcctgaagaaagaattgcattacttaatcaacgtaaagctgagctggaaaaagagattacaaacatacaaactaaaggtatcaatacattatctgaccaacaacgaagagaaagattgagagaaatctaccaacttgcttcagtattaaccaatgattttcgctatgttgaagatgagattcgccgtctggatcaagaaattcgcatcaaaatgatagagaaagataataatcgcggagaagtattgcaagcaactatggatcaagaagctttacttgctcaaagcgatgcaggtagtgcatttgaaagtttttttcagctgctttgtgattcaaaccgctcaactgaattcaaagaacaactagatattattcttaaccaaatttcagacaactatttacaaccacgacaacgaaaatttctcaaacgtctattacaggagctcactcaagaaagtgaacatatatttcaaattcgtcgtcgaacagaagaaaatttgaaaacttacataaaaagtggcgcagcacaggaaaaaagaactgttgatcgactcataatacaacttgaacagttagcagttaatttcagtaaaaataatattaaccttaaacaagctatccacttaattttacctactggtaatatcgaaattaactctcccgattcaatatgcttaaaagaaccaatcgctgctatacaaataactgacatcactgagcatacaaattcagtagtcccgagtgaaacagtattaactttattagataccatccaaattaaagaagtagctgattcaatctatcataatctttgtacctttggaccattaactatagctggcctagttgaaaaaaaaccaattaattttggactagaagaattagtagcctatttaagaattgcgcaacatattcaagcaactgacttaaatgaaaaagagtctattattattcaagataagcagggtattcaaatcaaagctaccctacctaaatatttactcagtgcctcactttttcccgacaatttggaagagctttctttatga

SEQ ID NO: 44705 - DNA, 795 bp, Snodgrassella alvi SCGC AB-598-J21
atgaacgaagaaaaaaataataaatcaacatcaggtggtgaattttttgatcaattttgtgcaaaaatggttactagtgatccaattagtccaacaattgatgagtctattcataaccaagtagaaattgaaacaacacaatcatcattattacaatctgataataatcctcaaccagagtccaacttacttcccaaagaagccaaacatgctttagtagctctgctcaaaaatggtgttattttagcttcacaaaaaaataatcttttttctattatcagtcattaccatgttcaaattgattcttacttagccaatatatatctaaaattaatattagatccaactacaggagtagcttacgtagcacagatgagtgagacattagaagaaaatgatgaaatatcaccattaattcataggcgacaactgacagttcacgacacattgatattacttgttttacgtaaatactttcaggaccgagaaacagtcggtgaaagtaaaataattattagttttgagcatattgaagaacttttaaaaccttttgcacccataacaaatcattcaaccatcgaaaggaaaagccttaatgcggcattaaaccgcatgaaagaacgccatatccttgctaacgtacgtggcagtaatgaccgttatgaaattacacctatcatccgttatgttgtgaatgctaactttttggaaaacatgcttttagaatataaaaaactaagtgaaaaagtgcaatcagataaagcagatacagtgaaagaagaatcaaatgaataa

SEQ ID NO: 44706 - DNA, 3384 bp, Snodgrassella alvi SCGC AB-598-J21
atgaataaatctataattgataatgagccatttaacgatggtcaaattcgcttaaatgaactttctgtatataactggggatcatttcatggtttgcatacggccaaaattgatcctatcggtacattggttactggagataatggttcaggtaaaaccacatttattgatgggttaatggcattactgctgcctgctggacgtgctagtttcaacgttgctgcagctcaaggagatagtaaagatagaacattactttcctatatgcgcggtaatttcggttcagcacatgacggcagcaaaacaaaagtaaaaagcaagcgagaccaatcagttattactggtctacgagcctgttacaaggctgacaatggtaattacattacactagcagtattattttgggctactccaacagcaacatcttctgcagatatttatcgccactatgttattgctaatcgtaatcttcaacttaaagaattactagaaaattttaaagatggtgagcgacgtactcttaagcagtatttaagtaatgatgcaaccattgtttattcaaataacatttttgatgactatcaagcaatgtatcgtaaactgctacatattgataataaaaatgctccagccctattatcccgagctttgggtttgaaaaaaatcgatgatttaacagcccttattcgtgaattagtacttgaatcaagccaaattaaagaagaagctcgtaatgttgtaaaagaattttcggccttagaagctactcataacgagctaattgatgtcaaaaaacaatatatacatttgggtcaattacctgaacacaatcaagattttattagatgtatacaaacattggataaacttgaacaagaaaaaaatggattaattccttattttggtgaactaaaaagtcaactttatacaaatcagcttcaagaattacaacaaaaaattgattttttacaacaacaacttaacgaacaagaacaaaataagctaaacataaatcaacagattgaatcatatcatgccgcttatctaaaagctggcggcgatagtattgagtctttaaaaagagagcttgtaaaagccaaagaagactatagccgcataaaccaacaagcatcaatatatcaacaagaaactgaaacattaggtctaaattcagaactgattcagataaattttgaaaataatcaaaaaaaggcaacagacaaactacaaaatttgaatcagaataaagaaaatgcactagttaattttgctcaaatccgtgcccaattaaacaacttaaagagtgaatatcttcaaaccgaaaaacaaattaagcaaataaagttaagatctgattctaatattgcattcagatttcagcaactacgcgacgaaatgatcacagacttaaatttaacaattgaacaatgtcgctttattggtgaattaattaatgtcaaagaaagcgaaaatatctggcaaggagcaatagaaagagcattaggtggacttagaaccacaatgatagtccctcataatgttttctcacaggtaacacgctggttaaatacccgtcatacaggcctacatgttagggtacaagttgtaccagaatcatttcaaaaattaaagtcacaaatcaaatttaaacctgaaggctatttacacaagttgatttggcgtgatcatccttatcgcgactggttaaagaaacatttggagcgtttcgatttaacttgtgtagattctactgaacagttagataaaacccctttttccataacgcaggctggtttagttcatctggaaaagggtcgttttgaaaaaaaagaccaaaataaaatcaatgataaaaaatcttggcaacttggattttctaataaagcccgattgacaatattagaagaggagctttctacaatatcagaaaatattgcaaaacaggaaacactagatcaaaaaaattgtaatgacaggcaaactattgatcagcaaatagaactatggaaaaatttacaaaaatatagctgggaaaatatcaatttaccaaggtgtaaagatgaaattgatagcattgaaaaaaaattgacagagttacaaaatggtgacgacttagaacaagctgaatcacggtggaaagaggccaaaaacgcttatgaaaatttacaagatgaaattaaaaagttatacaaagaacaaggtagtcacaatactcaaaaagacaatttaaacatattgcttcagcaggcacaaaaagattcagagcaaggaattgaacacgatataagattaatgttaaatcatcgtattggacaatacaaagatgatactttgccattagtaatagagcaacaagatttttattacaaacaaattgacgaatcccagaagaaaacaaatcaaaaaaaagaaaatataggaaaagagatagttaaaattatgtcttctttccaacaacaatggcctattattgctaatgattggattccagatatttcttatattgaagactatatcaatcacctattcaaactggagcaagaaggattgcctcagttacaagaacgctttaaagaacgtttaaataaacatgcaactgaatcattagcaagaattcagcaacaattagaggctgaaaaagatgaaattagagaacgtattcagataattaatacagtattaaaacgtacggaattcagaaaaaatacttacctaaaattaaatatcaaaattgaacaatatacaaatgtaatagaattttcaaaattacttaaaaatgctctaagcttatttactagtgatgaccatgaacgacgatttaatatattaaaagaaatagtctcacaactggataaagccagcaatctcgcagcacatacattagaaagcctacgtctacttgaccctcgttatcagatgtctttttttgctgaagagctagataatcaaactggagctgttatagatgtgcttgaatcttctagtggtaaatcaggtggtgaaaaagaatcatttgcaggcactatagttgctgctagtctcgcctacgcacttacaccagatggatatgataaacccgtatattgcacagtatttttagacgaagcattttctaatacagctgagtcagttagtcggagggtgctgcgcgtatttaaagcattgcatatacacgttaatttaattacaccatataaaaaccttaatctagcacgtgaaacagctcgttccctgcttattgctgagcgaaaccaacaaacacatgaaagtagcttaagtgaagtaacatgggaagaaatagacgcccaacgtgagttaattaaaaattctgaaattatgaaacaagccaaatctcttggtattgagatcacttcaacgcaataa

SEQ ID NO: 44707 - DNA, 1203 bp, Snodgrassella alvi SCGC AB-598-J21
atgacaaaattaaatgaaaattggggcagactacccgatgaggtttacagccatattaaaaagcttgaatgggataaacaaaagaatctcaaagagcgtttaatgcataaacgaaagtttccaattgaaatatctctaggcacaccaactgctgaccagatacttgataatatgatgtattttaaaaattttattaatcaatggaaagattttccacaacagcattggataaagtggcaagataaaaaatacaatactttaggtttacaacgcattcctgtaactttaattcttaataatctgaaagaactatttgaatttctagggcctgatattgaaaaaagaattgaaaagctaagcaagataattgaaccattaacgacatacgaccaacgcttttatccaattttaattcaacatttatcaatagttgaacaattaactcctcaggaatcaattaacattactagtttattacagcaacttactccaaatatggggaaaggcttatatttgcgttccttacctttgaaaggtattgataccaagtttttggaaaataataaaatcttagtgagtgctttacttgatgttctctataacaatgcaattgcacaagctggtaatttattgaaatggctaggatgtttagactatcccaaaggctggttaatagttaaaccattatgcaaaaaaacacaagaatctttagctggcttgcctatcttacaaatggatcagcataccctaacccattatgaattacccgccaacaacattttagtagtagaaaatattcaatctggtttatccctaccagaattacctgatacgattgcagttattggtggcggtaataatgtgaattggcttagtgcacaatggttaaaaaataaaagagtagcgtactggggagatattgatagctggggattaaaaatattaagtctatcaaaaaccttttgtcctcatattcaaacacttatgatggatgaagaaacattaaaattatataaaaacaatatggtaactgaatcagaatcttattctgatattcctgtaaacttagactcatcggaaaaagatttatttattgttttacaatccaataaatacaatgctaaccgattagaacaggaaaaattaccaaatgattatatccaaaaaaaattaaaagagtggaaaaataatcaaaatttttaa

SEQ ID NO: 44708 - DNA, 1440 bp, Endozoicomonas montiporae
atggattttaatcgtctcgttggtcttcgaacacatccttcatggcgcttgttgcaagcagatagcgctccattaattatcagtttcctctataagtcctttattcttacgaataagcgttctattgctgctgaaattctggcgactcaattggacgactacttgcatcatttgcgtgagtctaccggagaaaaccgctttcccagaaaaggtcgtgagtatttaagcgattgggcttctggtgagcaaggctaccttagaaaatattatccggctgccgcagtcggtgatgaacctctctatgacctaacgccctctacggaaaaggctatagaatgggtcagcagctttgagcataaacagtttgtgggtaccgagtcccgattgctgacagtctttcgcttactcagtgaagtggcgagagacacagaaactgatccacaacaaagaatagatcgtctggagcaggaaaaagccaggcttgaacgagaaattgccagtcttaaaagcgggcatgtggcacctcatgatccgactcgtgtgaaagagaaattccttcaggcagaagatactgccagacagctgttgtctgatttcaggcaggtggaagaaaacttccgaaaccttgaccgtggtgtcagagagcgtatcactaccgccagcagtggcaaaggtcaaatgctggatgacatattctccgagcaggatgccatcagtgaatcggatcaggggcgaagctttaaagcgttttggacatggctgatgtcaccggccagtcaggatgagttgcaacaaacactggagaaagtgttggcgctacctgaaattcaaagcttgcagcatgatgaattgctgggaaagattcgcttcaggttgttggaagccggtgagaaagtgaatagcacttgtgctcagctggttgaacaattaagacgttatctcgatgatcaggcatggctggaaaaccgccgtattatggaaattgttcgagagatagaacaaagtgcgattgctgttcgacaaagcccgccacccgataagctgtttaccactttatcattaaataaaccggcggttgagttacctatgtccagaggcttgttccgtcctgcggttcgacctgttattagcgaaactccggaagagggcgaggcagactttgataccagcgctctgtatacgcagcattatgtggatgaaagggcattgcaggcacgtattcgttttgccctccagaaccggaaacaaatcagtttggcagagttggtgaaattacatcctgttgaaaaaggtttgagtgaagtggtggcttatttgcacattgcttcagagtctgatcatgccgttgttaattcggatgagactgaaattattgtttggcacgatacgggtgggcaccaaaaagaagccgccatgccattggtgatttttacccattaa

SEQ ID NO: 44709 - DNA, 603 bp, Endozoicomonas montiporae
gtgagcacgaatgttgagagtaatgattcatcgggtaatgatcctgtattgggcactgtagtggtcaacttgatgaaaggggtggtctaccgggatcaaaaccccgatgtctggcaacaactggaagaactgtatgccagagtcattgactatctagccgtaatggggctggatctgattgtcgatgaagcggaaggctatgcttttctcaaacaactgaacgacgaagaacgtgacgttccaaaacttgtggcccgaagacctctgagtttcccaatcagcttgttgtgtgtgttgctgcgcaaaaaaatggtagaacaagacgcaggaggcggtgaagcccgtttgattttaacgcgtgaacaaattgtcgaaatgatgcgggtgtttcttccagatagagccaatgaagcacggctgtttgatcagatagacacctatataaacaaagtcactgaatttggttttttgaaaaagctgaacaccaatccccctgcatgggaagttcgacgaatcatcaaggcgctggtggatgctgactggctggcagattttaatgaaaagttaaaggtatatcaggatcatgcagaatcaatcgcttga

SEQ ID NO: 44710 - DNA, 1167 bp, Endozoicomonas montiporae
atgatcactcaaaaggaactgctgaagaaagcgatgcgcccctggtcaaccgggggctttttaagagaatggctggcaaatgaaacggtgtttcctttggagataccgttcaagactccgtcaggccgaacgctaaccagcgattttggcaaaatacgtgattggattgcaacgctgagcagccattcaaaaagtgaaaagggaaccggttaccagctggaatacaaaaccattaaccataatcagctgggtcaacagcgtttaccccataaaattgtttttgaagatcggaacgactggctggattttattggaagaaaaacagccttccgacagtttgatgaaatagcgggtatgacgcggcgacagttgccggatgcaatgcagttcttatcccgaaaaccactcaaagctctggaatacgctgaaagttggcatcaactcattaaggtctgtcgatactttcagattcgaccaagacctgatcgctatatacgacagcttgatatacagggagtcgataccaagtttattgaaaatcacaagggcatactgacagaactcttgaccctggtgctcgaagaggaagactttgatgattcagtgacaggcctgtctgaaaacggctttgaacgccgttatggtttgcgctttgatgagtcattaattcgtttcaggctgctcgacagtgatcaacccgttacggatatgagcgttcctttatcacagtttgttgagcaaccggtgagtactgtatatatcactgaaaataaggtgaatggtttgacctttccagctgtgacagatgccatggtgatatttggtttgggctacggtattcgctctcttggttctgttgaatggttgaaagacaaacagatcacttactggggcgatgttgacactcacggtttttccattctctcggtggttcggagtatgttccctcaaacccaatcgttgttaatggatcagacaacactggatgagcataagcacctttgtgttcaggaggctgaatccaaacgatttaacggctcgcccgataacttgacacagcctgaatcccagctgcttgatgaccttcaaaataaccgacaaggtgaaaatttaaggttagagcaggagcggattggttattcttatgttatgcagtcattgcgttga

SEQ ID NO: 44711 - DNA, 1440 bp, Endozoicomonas numazuensis
atggattttcacagacttgtcggacttcgcagtcatcccgcctggcgtctattacaggctgacagcgcaccgctgattatcagcttcctgcatcgttcttttatcgcgaccaatcagcgttcaatcgctgctgaagagctggtgacccggttggacgattatctacaccatttgcgcgagagcagcggtgaaaacaaatacccccgcaaaggtcgggactacctgaacgactgggcatccggggagcaaggatatttgcgcaaatattatccggctgccagtgtgggcgatgaacccttgtttgatttgacaccggccacggagaaagtgatcgaatggttgtccgggtttgaacagaaacagtttgtgggcaccgagtcccggttgttgacggtctttcgtcttctcaatgagattgcccatgagaccgaggtcgacccgcagttaagaattgatcgtctggagcaggaaaaagccgagcttgagctcgaaattgcccgtttgaaaagtggccagatggcccctcatgacccgacaagagttaaagagaaattcctgcaggctgaagataccgcacgacagttattatcagatttccgccaggtagaagagaactttcgcagccttgatcggggcgttcgggaacgaatcacgatcagcaacagcggtaaggggcagatgctggacgatattttttcggaacaggatgccatcaccgaatcggaccagggtcgcagcttcaaggccttctggagttggctgatgtcgccgtccagtcaggatgagttacagacaattctggaaaaagtgctggcactgcctgaagtgcaaagtctgcaacacgatgagctgctgggtcgaattcgcttccgattgctggaagccggagaaaaagtgaacagcacttgcgcgcaactggtggaacagcttcgtcactacctggcggatcaggcctggctggaaaaccgacgcatcatggaaattgtccgggagatcgagcagagcgctatcgctgtacgccagagcccgccaccggataaactctttactacattacaaccttgtaaacccgagatagaacttcctatgtcccgtggtttgtttcgcccggcagtgcgcccggtgattgatgaagtgccggaagaggggcaggctgaatttgacagcaccgctttgtatagccagcactatgtggatgagcgggagctgcgggcacgtattcgccatgcgctccagaatcgtcagcagatcagtttatcggaactggtgaaacaatatccggtgcgaaagggcttgagcgaagtggtggcctatctgcatatagcttctgaatcggatcatgcgctggtcaatgctgaacaggatgaagtgattgtttggctagatgacaaagggcatcagaaagaagcctcaatgccggaagtcgtttttacccgatga

SEQ ID NO: 44712 - DNA, 597 bp, Endozoicomonas numazuensis
atgtttgtgaatgatgacgttgaaacagcgcaggatgcctcgctcggtgtagtggttattcatttgatgaaaggtgttttatatcgggacactaaccctgcggtctggcagcagttacaggatttacacgccagagtgattgattatgtcaaagtgattgggcttgacctggtgctggatgaagcggaaggttacgcgtttctgaagcaggttaatgatgaagatctggcgttgccgaaactggtcgcccgtcgtccgttaagttttccggtcagcttactctgtgtgctgctgcgcaagaaaatggtggagcaggatgccggtggtggcgaatccaggctgattctgtcgcgggagcaaattgtcgagatgatgcgggtctttttgccagaccgtgctaatgaagcgcggctgtttgatcagattgatactcacctcaacaaagtagccgagttcggatttctgaaaaaactgaacagcaatccgcccgcctgggaagtgcgccggatcatcaaggcattggtggacgccgactggctggcggattttaatgacaagttaaaggtataccgggaatatgcagaatcaaatgtttga

SEQ ID NO: 44713 - DNA, 1179 bp, Endozoicomonas numazuensis
atgatttcccagaaagaactgcaaaagaaagccctgcgcccttgggcgtccggggcttttctgaaaagctggctgaatgatgaggtgtttttcccctttgagatacctttcaaaacaccgtcagggcgtaccctgagcagtgaatttattcaggttcgggactggattgcagaaatgcaccgtcattccagagctgttaccggtagcggttatcagctggaatatcgaaccatcagtcaccaacagttaggacagcaacggctacctcgtaaaattctgtttgaaagcagggacgactggctggcttttattggacaacagtcgacttttaaacagtttcaggccttggctgatcagacccggcgacagcttccgcaggtcatgccgttggtgaacagcaaaccggtgaaagtgctggattatgctgatgtctggccgcagttgattaaagtgtgccgctattttcagctcaactctcagccagaccggtatatccggcaactggatattcagggtgttgataccaaatttattgaatctcacaagggcgtactatcagaactactcatgctggcacttgagccggaagaattcgacgacagcgtatcgggcatagccgagaatgggtttgagcgtcgctttgggttgcgttatgacgagccattgatccgctttcgcctgctggactcaacggctccggtcacagatatgagtgtgccgctatcacagtttgttgatccgggtgtaagccgggtttttatcactgagaataaaatcaatggcctgactttcccgtcagtaaaagattccatagtcattttcgggctgggatatggcattcgttctctgttctcactgaactggctggagggcaaacagatcaactattggggggatattgatacccacggcttctccatgttgtcgcaactgcgcgggcgtttccgaaaaaccaggtcgctgttaatggatcaggcgacactggaattgcatttgcctctttgcgtagaagagcctgaaaacaagcgttttttagcggatcttgccaatctaaccagcagtgagcagtcactgtttgacgccttgcgtcaaaacaaactgagcaaaaaccttcggctcgaacaggagcgcattgctttttcttgcttgagggaggctttagcggctggggcttgctga

SEQ ID NO: 44714 - DNA, 1461 bp, Photorhabdus temperata subsp. temperata Meg1
ttgaacttccaagggttacaggcaaagtatcgccgtctatttcaggaaagtgcagcctggaaactgttaagagcggataattcccctttaattttggcatttttgggtgagttattttcggaagatagtgaagtcccttttagtcgtgcccgtgtgtcactcgatgcagagttggtacgctgtcgtgaacttggtctttgggaaactgaaacgggtgccagcacgtacctcaataaatggattcgggagggctggttgcgtgagatggatgacgcattaactaaaacggatgccagtgaaattgcgctccgttttagtcagggacttgatgagcgcagttcaggaactactgcgtctcatcttcgaattgttcaggaagcggtcagggactttgcggtggcgattagcccaaatgtcgatgagcgtgtcacgcttttggaagatagaaaatccgaaattcagagagagattgatgccctgagggccggtgttgtaaccgagctgaccgaggttgagcagcgggaaagaattcgtgaaatttaccagttggcttctgttttaacgggtgattttcgccgggttgaagatgaaattcgtcggttggatcaggaaattcgtattcaaattattgagggagactccaccagaggagatatccttcttgctgttttagagaaagaagcgtttctggctaaaacagatgccggtagtgcgtttgaaagcttttttgatttgttatgtgatcaaaatagaactatggagctgcgggatcagcttcgaagcattttaaatcgtcccgctgcaaaacacttggttactcagcaacgtcagttcttaagtcagctcatgagagagttgagtcgagagagtgaccgagtttttcaaatcaggcgaagaacggaagagagcttgcgtgcttacatagagagtggtactgctcaagaaaatcgtgctgttgatagattgcttggtcaattggagcgactcgctgttgaattgaagaatgctgattgcgacttgcaaacaacaacagctctttcattgcccgttggggcggcaagtattagctctcccgaaagcatgctccttaaatcacctgatgaaaagctggatacctcaggtgttgaagaacagcttaactctcgagaaccgagtatacagatgctggattgccttgatgctgttcaaatccgattgatcgctgagaaggcgttagaaacgttaaaagcgtttggtccaatgacgattgcatctattgcacattatcacccgcttaattcagggttggaagagttagttgcctatttgcgggttgcgaaatctgtcggggctgcatcattggaagagaaggaatcaattgaaatcagtgacaaacagggaattcgcttgcgggcgtctatccccacttttcttctgagtgccgacctgtttccagacagtttggatgaattggtgttgtaa

SEQ ID NO: 44715 - DNA, 909 bp, Photorhabdus temperata subsp. temperata Meg1
atgcataaagacaaaaagttgaataaagatcgtggtacccccgcaacccttgggaagtctgattcagatcctcaaaaagagcagcaaacagggtttttcgatcagttgataaaacatcgtactcaatcagagtacaacccgcttacagacacaaccggtgttgaatctgctgtcgctgccaataagagttcatccgttgaagttgatgatgtgttagtcagtgatcaccctgaaagctcaaacagtggtatgccacctgatgcgcgccgagtgctggttagcttgctgcgtcagggcgttatattgtcttcgcagaaagccaagttgtttgaatcactttgtcgataccaatgtgctgtacgcaaacatctgtcagaagtctatttgaagctggtcttagatgagaaagcgggtgtcgcctttatagccggttttcaaaatgaggaagataccgaatcattgggcatagatggtgaagaggttgtctctctgattagccgaaggacgctctctttatacgatacgttgttgctgttagtgctgcgcaaacactaccaggatcgggaaacatcgggcgagcaaaggattatcattgatatcgagcgtatagaatcccatctgacaccgtttttaccgctgacaaacagtactaaatctgaccggaggaaactcaagggtgctcttgagaaaatggtgacgaaaaaaatattgagttcggtgcggggaagtgaggatcgcttcgagattacaccggtgatccgctacgtagtcagtgctgaatttctcgaaagtatgttgaatgaatacctgaaaatggcggatgagaagggtattgagctaaataaaaacggcagcaacgctgttgattatcaagatggagaggaggaaacaggagatgaaaatgactga

SEQ ID NO: 44716 - DNA, 3405 bp, Photorhabdus temperata subsp. temperata Meg1
atgaaaatgactgatcaaactctttcggctgattcattatttcatgttggtcaaatcagattagccgaactctcagtttataactgggggtcatttaacggcttgcataccgcgttgatcgatccgatgggaactttggtcactggggataacggcgcgggaaaatcgacgtttattgatggtcttatggctttactccttcctgccggaaaggcaacctttaatgtggctgcggcgcagggtgatcgttctgaccggactttactttcttatatgcggggaagttttggatctgcccatgatggagcgggtacgagagtcagaagtaagcgtgaatctggcgtggtgactgggctgagagcgttatatcagggtgatgatggttcaaaaatcacacttgcggcacttttctggatcactaaatcgacgaatgtgcttgcggacgtgacacgagtttatattgtcgctaaaagagacctgactcttaaggaaatgcttgatgcttttggggatggtaatgcccgatcattcaagcaatggctccgtgatgacccggcactgacatgctgtgatgataatttttccgattatcaggagttgtaccgaaagcttctgtatatggacaataagaatgcgcctgcactgttgtcgcgggcgttgggcctgaaaaaaattgatgatttaaccgggttgattcgtgaattggtacttgaaccgagtgcagtcaaagatgatgccaaaaaggtagtggaagagtttgctgatctggtggcgattcatagtcaattagtggatgcaagagcacaacaggtgcacttatccaggttacctgaactcagctcaattatcgaaaaagcgacgaaagaatttgagaagctgacggtcgaaagaaatagtcttccggtctactttggggaaatcttcgcacaattgtggagtgagaaaattgccgatattgaggctgaacttgaagcactatccctcaaaattaagcaagctgaagggcagaaagtcgatgcggataagctggttgaacgaaggcatgaggaatatcttcagtttggcggggataaaatagagtcgcttcgaaaagagatgggtcatacccaagatcaattgaatcgtgtggttcgaaattcatcgcaatatcaaactcatgctaatgaactggctcttccttctgtattagaggaggctgtatttctcaaaaatcaatccgaagtatcagccaggcttgccagtattcagcgagacgaagaagagtatcaggacaggtttgccaccatcagtgccaaattcagtgagttgcaagcaaatatccatgatatctctcaggaaattcgggaaatcgaggcaaggccggattctaatattgatgtgaaatatcagcaattgcgggatgaactggttaattccttagaattaagtaaagaccaatgtgtatttatcggtgagcttatcgacgtcgaagatcatgaaaagatatggcaaggcgcgatagagagggcgttgggcgggttacgaacaacactggctgtgccacatcattgttattcgatggtaactcgctggttaaatgcccggcatacgggtttacatgtacgtgttcaagttgtgaatgatgctgcgactaaccagggtcaatcggcggagtttaagcctgatggttatttaaggaagctagtatggcgcactcacccttatcgggagtggctcaagcgtcacttgcaaagatttgacctgcaatgtgtttcgaatacggaagagttggatcaaaccccgttttcgatgacacaacaggggttaatgcacatggataaggggcgctttgagaaaaaagatcagcaccggatagatgatagaagacgctggtgtctgggcttttcaaacaaatcacgtttagccattcttaataacgataaaaaagatttaggtttgaaactggaggaaaccggaaaaaaggtgagccaggcccgtcaggatttgaattctgtttctgatcgtaaaatactttgggagaagctccaaagttaccgttgggatgatattaatgctccttactggcacgaaaagctttctgatttgcaggctgaccttaaggtgttagagcagtcaggcggtgatcttgataaggccagagaacgttgggaatcggctaaagagcaattggctcagattcaatcggcattaaatcaactcaactctgattctggtggcattaaaaatacgctgagaaatgcacaagaagagtggaacaaagcgcgggcaaaagcggagaagggattacctgatgcagccaggcagttacttgcgattcgggtaggcgtgcttaataccaacgatttaagccggatggctgaattggtgtcgaaagttgaagaaggtttggatcgtctattagattctagccggaacaataaagacagagcggaaagatcagccatcagcattatggtttcgttcaggtctaacgataaatggcaagtcttcacggttgactggcaaagtgatattggcagcttacctgattatcttaatcatttacgacaactggaagaggaagggcttcccaaccttgtggagcagtttattgaacgtttgaataagcatgcaacgcagtcgctggcgcggattaaaactaagcttgaatctgaacgggaagatatcctcgagcggattgacatcattaaccgggtcctcaagcgtacagagtttcgatcagagacacatttaaagctgggttcaaagagggagaaattcccgcatgttaatgaatttgaacagcatctgcgtaaggtacttagtcaggtaaccagtgatgaccatgaagcacggttccgtcagttggctaaggtagttgagatccttgggaaagccagtgcgccaagctcctcaaatacattggaaagtttgaggctgcttgatccccgttatcagatgtcattttatgccgaagaattggatattaatacgggtgagatccgtgatgtattggagtcatccagtggaaagtctggaggagaaaaggagtcattcgcagcgactattgttgcggcaagtttggcctacgttttgacgccggttggctatgatcggcctgtttactgtactgttttcctggacgaagcgttctcgaatacagccgaaacagtaagccggcgtgtgcttagggtgtttagggaactgcatattcacgttaatttgattacaccttataagaacctgaatttggcgagagaatcggcccgttcgttgctcattgcggaaagagaccaggaaaaccacgacagccatttatgtgaagtcacctgggaagaaattgaccggagaatgggagaagagaaggagaaaaagttagctgccgaggcttctggtttaggtatcgaacttgagaaactgatatga

SEQ ID NO: 44717 - DNA, 1197 bp, Photorhabdus temperata subsp. temperata Meg1
atgaaaagagagctgaatggggtgcgctgggggttactaccggcgcaggttaagaagctcattaagcaacgtgagtgggataatctttcctcactaaaggctcgattactgggcagcaaagtattccctgtccgcgttggtttaaaaccccccagaggcagttctgccatatcagatatggttcattttcagcgatttgttgaagagtggaaattatttccctatcaaaaccatgtggagtggtcttccaaaaattttcgggagttgtctgagcagcgaattccaacttttgttgttattgaatcgatgcaacatttgattcaatttttagggaatgatgccctttcccgaagtaagttgtgggaaagaaatatgaagccattcttgcggattgataaagatctctatcctgcattggttaaatgtatagatattgtggaaaaactctctctgagagatgcggaattattggcaaagctgctcccacaattaaagcaaggcttgggggaaggacaatatttaagagcattacccctcattggtattgatactaagtttcttgagaaccaccaaatcctgatcgaagagctgaccgatgtgattcacaaaggtgccgtttcagcatttggtggtcttactgcttggttgggttgtttaacaaatcccaagggctggttaaccatcagaccgctttgccatactgcgacggtcgcgtttggtggaattccgatacttcaaataccgggtgaattacttaaacagcacgaacttccggcatcgaatatattagtcgtcgaaaacttacagtctggtttggcgttacccgacatgcctgacacagtagcggtgataggaggagggaaaaacattgcctggatggatgcggcatggttgaaagacaagcgtgtagggtattggggagatattgatagctggggcttgtcgattctcagtgacgccagagacaagtttgtggatattaaatccctgatgatggatgttgaaaccgttaaagttcatgaagatagaatggttcctgaacccaatccagttgaatccaatccttcatcgctaaatgaagatgaagcaaagttgtttaatgatctcatctctggccggttccactcttcacgcttagaacaggagcgtctttcatctgattacattagaaacaaacttatagattggctgtcctaa

SEQ ID NO: 44718 - DNA, 1476 bp, Mycobacterium farcinogenes
atgcctgaaccgggtatgagcggcccctcgctggaccagctctatcagctcaatcgcgaggtcgccgactcgcgttcggcccggctgctggtgacgaacaacctggccacctacctcacgctgatggaacgccacctggaccgcggcgccaagctcaccgagatggaactcgtggtccgactggaacgtgacctggccgacctgggcaccgaaaccgagcagtccggcctggcgctgatcaagtactgggccagccagggctggctgcatcggatcaccgagcagtccggcgataccgaacgcaacgtctgctacctcacctacgaggcgcgggccgtcctggatttcgcccgccgtatgcgtcgcgaggacaccctcgccaccggcggctcgatcacgggcatcgcggccgggttgcgccgggtggcgggtcaggtcagcaacgatccggaacgcatccgggctgacatcgaagccgaaatcgccaagctccgcgacgaattggatgccctggaccaggggcagcgtcccgagccggacctggtggacgtcgaggacgaggcgcgcgccatcgcgttgcagatggaacagatcatctccgacatcggccagtacggcagcatgctcaaccgcatcaccacccggctgctggatgcctccgccgacaccgatctcgggtaccgggagcggcagcgccagttgttcgacgactacgagtcactgttcgcctcccgtgagagcgcgtcgtacaccgccttcacccggatgattcaggaccccgagcagcgggcggcgttggtggccgacatcgacgcggtcacccgtgagctcccacatctggacccgggcctgcgtgaggtgatgacgggattcttcagcctggtgtcagcgcagaccgcagaggtcggccggacgcggcagcgttgcgcccgtcgtatcaaacgcttcgtcgcctccggaaccctggaacacagccgcggcgtcacccgccagctcaacgatgccttggccagtgcgcacgacctgctcagcgtctccctggccgacagccgcatcggtatcgaggtgccgttggtgcgcaccgacttcaattcgatcggtgctgtggcgttcaagatccgtgacgcgatcccgccgtcgcaggccgagccgtcggaaggtgaggtgaatctgtcggcgttctcggccctggcctcgcaggtggatgccgccgaactggctcagctggtcaacggtgccctcgctcgggggccgttgccgctgcccgatgcgatcggcatgctggactcggcctacctcgggcatgtgatcgtgctgtggtcctgggcgctcaagcaacaacctgctgtcggaaccgaatccgggaattcggtgcgggtgcggttccggtcattggagggcgccgaccgcgagatcgaaattccccgactggttttcaccgaaccgatccctactgtcagcgagagcctgctatga

SEQ ID NO: 44719 - DNA, 756 bp, Mycobacterium farcinogenes
atgaccgacaacccggacccgtcgcccgtcaaagacggggtgatcgatttcgacgccctgccgagcatcgacgccgtcgagcggtccaccgaccagcggcgtgcaccccgcttcgacggggatgtcagcgaactgcccgaccgcgcctgctgggccttgcagcacctgttgtcgcgccgctacatcagcaaggacaaccactccgagctgtggtcctgggtcacccgctaccgcgccgagctcaccgttcggttgtcggaactcgatatgcgactgtgcatctcggacgatcacgacatcgcctacgtcgagcaggccgactacgaatcgcagtggcggcgccgtctgctgcggcgtgagaccctcaatacctacgactcgatcctggcgctgcacctggccaagctcatgcgcgccgcggcgcgcgacgagaacgtcttgatcagccgtgacgagatccacgagctgttcgccggggtgaacaacgacaccgatcgcgacaccgcctcgttcgacaagcggatcgacaacgcgatcgagcggctcaccgacatcgagatgctcgcgcgcaaccgggaggacgaggacagtttcaccatcagcccggtggtcaacgcgatcatgacggcatcgatgatcaccgaattgcagcagcagttcgagcagctcaagcgggccgcgaacggcactgtcgatgatcccgacgaccccgatgtatccgaccggctctccgacgatgtggacgctcatggctga

SEQ ID NO: 44720 - DNA, 3417 bp, Mycobacterium farcinogenes
atgatcccgacgaccccgatgtatccgaccggctctccgacgatgtggacgctcatggctgaaccgaccaaccagttctctctgtcgcgcctgcaggtgatcaactggggcgtgttcgacgggtatcactcgatcccgttcagtccgcacggcaccctgatcaccggctcctcgggtagcggtaagtcctcactgctggatgcgatctcactggctttcctgccgtcgcaccgccgcaacttcaacgcttcgggcgataccaccgcggcgggctcgggcaccggcaagcgcacggtggacaagtacgtccgcggcgcgtggggcgagcgtcgcgagggcaccagccgccagatcatgtacctgcgcgggacgggtccggcctggtcggcggtcgcggtcacctacagcgatcgcaccgggcgctcggtcaccggtttggtgctcaaatggcttgccgccgagaaaaattcggatccgggcagccgctactacctgatcgacgccgaccgtgacatcttcgggttgtgcaacaggtgggcggccaacgggtatgacgccgcggtgttccgcgatgacggttggaccggtgggcgcagtgagagccagtacctggcccagctgtactccagcatcggcatccgtgcctccgacgctgcccagcagctgctcggcaaggcgaaatccctcaaaagtgtcggcggcctggagcaattcgtccgggagttcatgctcgacgagccggccagcctcagcggcgtagaggaagcactagaacagatcaacccgctggtcgaggcccgcggcttgctcgacgtggctcggcgtaagcgcaacaccctgggcaacatcgctgcggtgcaagcacgttacgccgacgaggcggccaagttcggggtgatcgacaccatcgacaacgcgatgatccgcgattacgtcgaccatgtgcggctggctcaggccggtccggagatcgccaatctcgacgatcagatcacccaactcggcgcccagcgtgatgagttcggcacccagcagcgtcagctgaagaatgagcacaattccctcatggcccagatcaacacggtcaccgtggatctggtgccgctgcagcaacggctgaccgaggccgagcggatcagcgaggaggtgtcgcgccgacgcagcgcctacgaggacaaggtcacgtcgctgggcctgaccccgccggacaacggtgaggagttctggtcgctgcgtgagactttgatggaggaagccgaccggctgcaccgcgaactgttcaccggcaaccagccctacgtcgaggcctcggccaaggaagtccgggcccgcgaggcgcgggagagtgtggaggccgagctggaacgcgtgcagcggctcggctcgccgctgcccaagaccgagtacgagatgcgggcccgcatcgcccgcgccctcgacatctccgaacgcgatctggtgtacgtcgccgagttgatggagctcaagcccgacgagacgcggtggcggctggccgtcgaaaaggtgttgcgcggcgcgggattgcgcttgctggtgcccgatgcctacatggaacgagcgttgcgcttcgtcaacgagaacgacatgcgcggccggatccagttgcagcacgtccagcacggcgcgcaactgcgtacccccgccccgggcacgctggccaccaaactccagctggccgacccgacacacgacagcgcggtggaggcactcaacgtggtcgccgctgtcggcgattacgtgtgtgtcgacgggcccggagaattcaccgagcaatcccgtgcggtcaccgaccagggtctgcgcaaagacagcggtcggctctcgatcaaggatgaccgctcgaggctgcgaccgtcggactacatcttcctcggcggcaccgccgccaaagtcgaagcgctgcaggatgatctggcggccgcgcacgatgtataccaggtggcccgtaccgcgcgtgagcggctcgacgaacaccgcggtcagctgcaatcgcgggaacgggcctgccgggcgctgtgcgatcagtacatgcagtggagcgacatcgacaccgattcggtcgatgagatgctcgagcggctgcaggacgaacacgatctgctggtctctgacaacccggacgccgaacggttgcaacagcgggccgacgaatgctgggagcgggtggagaaggtcatccagcagatcggctcgctcaacgaacgtgagaccgcgctggatcgccggcgcaccgcgttgctggagctgagcgaggccttgaccgagcggctcgggtccagtgagttcccgtcgcatgcccgcgacacgatcgacggatatgccgccgacatcgcgctgaccctggaattgctcgaacctgagccgtaccgaaacgagctgatccgggtcatcagccgggagcgggatcggctgcgggcggatcgcaaccgctcgcacgacgagctggccggcatcatggccgcctacgacagctcgttcccggatgcgatccccaacgacagcgatgtcttcgacgagcgagtgcacgactatgtggcgctgtgccgtcggatcgacgagcgggaactgcccgacgcctatgagcggatgcagcggctgatcaccgagcaggcgccgggcgcgatcctgaacctgcacatgatcgccgacaacgaggcccggcggatcaccgagcagatcgcccgggtgaacacgggcctgggcgcggtggagttcaaccgcggcacccggctgaccctgcacgccgggacccggcacctggcggcggtcgacgaactgaacgagaaggctcagcgcatctcggcgcgggtctcgctggtcagcttcggtgacgagaccgcgatgttcgagcagtacaccgacattctgcaattgcgaaagttgttggccggcaacacacccgaggaccgacagtggacccgcgatgcactcgatgtgcgcaaccggttcgtgttgtactgcgaggagcgcgacgccgaaaccggcgaggtgatccgcacctacagcaactccggtgacaactccggtggtgagcaggagaagctgatggcgttctgcctggccggggcgctgagcttcaacctggccagcccggacagcaacgacacccggccgctgtttgcgcagctgatgctggacgaggcgttctccaagtcggatccgcagttcgcccagcaggcgctctcggcgttccgaaagttcggcttccagttggtgatcgtctcgaccgtgcagaacagcacgacgatccagccctacatcgacaacgtggtgatggtgtccaagtccgacgcgtcggcgcccaacgcgcggccggtcgcctcggtcacctcggcatcgatctccgaattcgccgatctacgacggacttcgggggacgcggtaccgagcgcctga

SEQ ID NO: 44721 - DNA, 1446 bp, Mycobacterium marinum E11
atgcacgacgacaacgcgggactgtcggcgaccgagctgctcgatctcaatcgcgacttgcagggttctcgcgccattcgcctgctcgccaccaccaacctcagcctttacgcgatgctcatggagcgccacctcagcgacggggcgctgtctgagactgagctcgtcgtacagctcgagcgcgacctcgaagacgtcaacgatccgcagcccgggctcgccctgatcaagtcctgggccgcgcagggctggctgcaccgcatcgtcgacgagcgccacgaccagaatgtctgctatctgacccaggacgctcgccgggcgctggactttctccgcggcttgcgccgccaggacaccatcgccaccggcggctcgattacgggcatcgccgcgcgcctcaagcaagtggccgtcaaagtggataacgaccccgcccgcatccgcaaacacatcgaagccgaaatcgccgcgctccacgaggagcttgaccagctcgatgccggccagcgtccccaaaccgatgtcaccgactgctacgacgaggcccgcgcgatcgccctgcagatggaacgcctgatcaccgatatcggccagtacggcacgatgatcgagcgggccacctccgccctcgatgaacccatcgattccaacgccgagtaccgcgaccgccaacgccagatgtacagcgactaccaggccgcatgggactcccagggccgcgactcccaccgcgccttcctgcgcatgatcaacgaccccgaccaacgcgccgagttcgaggccgacgtcgccgccgtcgccgacgccctgcccaccctcgacccggccctgcgcaaggtcatggccggcttcttcgagctcgtcggccatcagatcgacgaagtcgagcgcatccagcaacgctgcgcccagcgcgtcaaacgcttcaccgcgttcggcaccatggaacagagccgcggtgtcgcccgccaactcaacgaagccatcgccgcagcccgcgccctgctcaagtcgtcgttcaccgactcacgcctggacatcgaggtcccgctggcgcggcacgccatcagttccgtcggtgccctcggcttccggatcggtgacctgtccaaccccaagcccgccaaacccggcgacaccgaggtcgacctcaccagcttcgccgccttcaccacccaggtcgacgcgcccgcgatgtccgacatgctcaaccacgcgatcaccgcggggcctgtcgcgctacccgacgccgtcgccatgctcgacaccgcctacctgggccacgtcatcgtgctgtggtcctgggccctcaaacagcccaaccccgacaccgctgagtcgaccgccgtccgcttccgctccctggacggccgtgatctcgaaatcgcggtacctcgtttgacattcaccgaacccatcaacaccatcgccggagccagcacgtga

SEQ ID NO: 44722 - DNA, 696 bp, Mycobacterium marinum E11
gtgaccctccaagatgatgaagtcgacatcgacttctcctcactccctcaggtcgaccagaacgcccgcccacccgttcagcgccggccgcgcttcgacggcgacgtctccgaactgccggaccgggcctgctgggccctgcagcacctgcttacccgccgctacatcagcgccgaagccgacgccgacgtctacagttgggtgctcgaataccgcaaggacctggccgtccggctctccgaactcgacttgctgctgcgcatcgtcgacgccgccgatgtcgccttcgtcgaacaggcccgctacgagtctgcgaggggaatcaagcttttacgccgcgagccgctcggcacctacgactcgatccttgccctgcacctggcccagatgatgcgtgcctcgggtgggcagaccgtcctgatcagccgtgaggagatgcacggcctattctccggggtgctcaacgacaccgaccgcgacgcggtctcgttcgccggccgcatcgacggcgccatcgcccgactgaccggcctggagatcctgcgcaagacccgcgacgacgaggacagctacacgatcagccccgtcatcaccgccgtgatgactgcctcggtgatcaccgagctgcagcagcagttcgagcagctgctcaacggcggtgcgccagcagaggaagaagaacccgaaggtgactga

SEQ ID NO: 44723 - DNA, 3363 bp, Mycobacterium marinum E11; identical to SEQ ID NO: 43821

SEQ ID NO: 44724 - DNA, 1470 bp, Xanthomonas campestris pv. viticola
atgaagcaccaggcccgtatcgccggctatcggcaactgcgcgagcagccggtatggaaactgcttgccgccgaccacgcacccgaactgatcggcctgctgcagacggtgctgatggatggcgaacgccgcctgccttcggcggtgttgcacgagcgtttgcagcgccagctcgacgccttgcgcgctgacgagctttcgcgtgaactgccgcgcaccgcacaggcgtatctggcgcattggttggcacagggctggttggaacgccgcctgccggaaggcgcagccgaagaagaatacgaactctcgcgtgccgcgacccaggccatccgcttcatcgtcggcctgcgcgaaagcagcagcagcgccaccgaaagccgcctgtcgctggtgatccagcaactggtgcagttggccggacagaccgaagccgatccagagctccggctggccgcgctgcgcgacgaacgtgcgcgcatcgatgccgagatcgaacgcgtggcctccggccgtgtggcggcgctggacggcaagcgcgcgctggaacgtgcacgcgacctgatccatctctccgacgagctggccgaagatttccatcgcgtgcgcgacgacttcgagcagctcaaccgccaattccgcgagcgcatcatcgacgacgaaggcgcgcgcggcgacgtgctcgaacaactgttcgacggcgtggacgtgattgcagacagcgaagccgggcgcaccttcgaggcgttctggagcctgctcaacgacacccagcaaagcagccagctcgaccaggcgctggatgcgctgcttgcccgtgggtttgcccgcaagctcgatcgccgcgaacgcgcttttttgcgcgggctgaccggcacgctgctggaacgcggcggcgaggtgcacacggtgatgcagcatttcgcgcgcagcctgcgcgggttcgtgcaaagccgtggatatctggaacagcgccggctcaatcaattgctcaagcaggcgcagggcgaagccttgcaattgcgcgacagcctgcacgccaccaccgccaccggctatacgcagccgctcagcagcagccgcctgcgctcgttgtcgcaatggcggctgcacgatccacggctcacccaggtggacggacgcgtgcaggccgccgacgcggccgagatctcgctggacagcgtgggcgatctggtggcgcaatcggagatcgatgtgcgcagcctgcgcaacgacctgcatgagctgctcggccaacgcccgcggctgaccatcggcgacgccttgcaacaacgcccggccgtgcagggcctgggcagcgtgatcggatacctgtcgctgggcacgcgccacggcatggtgatcgaaggacagatggaaacggtgcaatgggaaggcagcgacggcgccgtgcggcgcgcacgcattcccttggtgtggtttacccgggagaaacgcaatgaactggtctga

SEQ ID NO: 44725 - DNA, 702 bp, Xanthomonas campestris pv. viticola
atgaactggtctgaggacactggcctatacgccgacgaggaaaccggggcgccggcaatcgacgaccgcatgccgatggcgcaaacatccagtgccgagccgcgcggcgagctgtttttgggcgacaccggcacgctgtcgttcgatgcgcggcgtgcgctgtgccagttgctggcagggcccagcatcgatgcgcaacgtcacggcgcgctgtggccggcgttgttgcgcaacgaggtggcgatccgccaggtgctgtgcgagctgtttctggagttggtgctcgaccgcgagggcggggtggcctttacccgtcaggccgacaccgcagagctggaatcgcccacgctgctgcgcagtgcgccgctgacgtttatcgagtcggtgttgctgctgttcctgcgccagcaactggccgaggccgacacgcgcggcgagcgtgcagtggtggacgaggcgcagttggtggaagccttgtcggtgtacgaaaagaacgtgtccaccgatcgggcgggcttcgcgcggcgggtgatgacggcgatcggcaagatgcgcgacaaccagttgctgtcgcgcttgcgcggcagcgaggagcgctatgaagtgtcgccggtgttgaagctgttgttttcggcagaagatgtgcaggccttggtggtggcgtatcgggagctccgtgagggcgaggttgcgctggattga

SEQ ID NO: 44726 - DNA, 4023 bp, Xanthomonas campestris pv. viticola
atgaattcccagtccaatctgtcgccggcgcagccgggtgcctccttgtttgccgagacgctcgccgagcaacgtgcgcagcagttccgcatgcggcgcttgcaggtgcacaactggggcaccttcaatgggctgaccgaagtgccaatcgcgcagaagggcttcctgttcgttgggcgttcgggctcgggcaagtccaccttgctggatgcgatgtcggcattgttgacgccgccgagcatcgtcgacttcaacgctgccgcgcgcgaagccgaacgcagtgggcgcgatcggagtctggtgtcgtatgtacgcggtgcgtgggccgatcagcaggacagcgcgtccggcgaaatcgccacgcaatacctgcgcaagggcgccacctggaccgcattggtgttggagtacgcgaacgcgcatggccagacggtgagcctgatccggttgttctggatcgccggcagcggtaacgcggcggccgatgtgcggcgtcactacatggtcgcgccacgccgtttcgacgtggcgaccgagctggatggcttcgatctcgacctgcgcaagctcaaggcgcgattgggcgatgaagttgcgcatttcgacggcttcgccggctatgccgaacgcttccggcatgcgctgggcatcggcaacgagatggcgctgcggctgttgcacaagacccagtcggccaagaacctgggcgatctcaatgcattcctgcgcggtttcatgctggacgagccgcggaccttcgaagcggccgaccggctggtggaagattttgccgagctcgatggcgcgcaccatgcggtggtcaccgcccggcgccaggtggaaaccctgacccctgcgcgcgagcaccacgcggcgctgatggcgctgcgccacagcgtcggcgagttgcgcgagttgcagctgggcgtggacagctaccgcgagcagcagcggctggccttgctggaggagcggctgcaggagctggacaaccaggaccgtggactggccggcgaagaaggccagcgccgcgaatcgctggataaccacgaacaaaaactggtcggcctggagcgcgagcagcgcgccgccggtggcgagcaggtcgaagaactggaacgcgaacgcgcacgcgtcgagcgcgagcgcgacgaacgcctgcgccgccgtgcacagatcgaacaggcctgccgccagctcggtaccgccctggcggccggcgccagcggctttgccgcgcagattgcgcatgcgcagaccgtgctggataacggcaagcacgacgccagcgcgctggatgacgccatcgccgagcgcatgggtgcgcggcgcgacgacgagcgccgctttgccgaaatccgcgccgaactggaggccctgaaacgcgcgccatcgagcatgccggcaccgatgcaggccttgcgcgcgcggctgtgcgaagacaccggcattgccgaggccgcgctgccgttcgttggcgagctggtgcaggtacgcgaggaccagacggcctggcgcggcgcgatcgagcgtgtgttgcacggctttgcgcaatcgctgctggtggacgagcggcattacgcgcaggtcagcgaatgggtcaaccgcacccatatcggtacgcgcctggtgtacttccgtgtgcgccgcaacgacgagctgcattcgcggcgggtcgatcccggcgcgctgcccggcaagctgcaattgcgcgagcacgcctttaccgaatggctgcgcaacgagctgacccgccgtttcgactacgcctgcgtggacaacgccgcagcgctgcgcaacgccgaccgcgcaatcacccgcgagggccaggtcaagcatcctggcgatcgctatgagaaggacgaccgccacgcggtcaacgaccgcaagcgttggctgctcggtcacgacaaccgcgacaagctcaaggtgttcgaacgcgaagcgcagacgctggctcagcgcatcgccagctgcgatgccgatgtggcagcgctgcgcaagcagcgtgagcaggaccaggaacgccaactggccgcgcacaccctggtggagcgcgactgggacgagatcgacgtcggccccaagctgcagcgcctgagcgatatcgacgaacagttggtgcagctgcgcgaaggcaacagcggcctgcgtgcgctcggccaggccatcgacaccgcacgcaccctgcgcgaacaggccaagcgcacctacgaagatgtgcggctggagcgcgcgcaactggcgcgcgagcgcgtgcggctcgaacagcagcaggcggcctgcgcgggccgcgccggttccgccacgctcacgcccacccagttgcagggcttgcgggaacggcttgccgcattgacgccgctgtcgctggacaatctggaagcgcatttccgcgtggtcgaacgtggcctggccgagcagctgaccgacagccagggccgcgacagccggctcagcgcgcagttgctggagtgcttccgcaagtattgccagcaatggcccgaagacagcggcgatttcaccgtgagccttgccagcgccgacgatttcctcgcgcgtctggaccggctggaaagcgatggcctgccgcgtcacgagcatcgtttcttcgacctgttgcagacccagagcaagaacaacctgctggccttgcagcgccacaccgccgaagcccacaagggcatcaagcagcgcatggacgaggtcaacgccagtctggagcaggtgccgttcaatcgcgacaccgtgctgaccatcgaggtcggcgaccgccgcctggccgaggtgcaggagttccagcagcagttgcgcgcggtgctgtcgcatcaacagaccgaagaccgtgccctggccgaagcgcagttttccaccttgcgtgcgctggtggcacgcctgggcgcgcaggaaccggaggcacgccgctggcgcgaacaggtgctggatgtgcgcctgcatgtggagttcatcggtgtggaactggacgcacagacgcgcgcgcaggtggagatctaccgcagcggtgccggcaagtccggcggtcagcgccagaaactggcaaccacgtgcctggcggccgcgctgcgttaccagctcggcggcgaagacggcgaactgccgcgctactgcgcggtagtgctggacgaagccttcgacaaggccgacaacgaattcaccgcactggcgatgaatatcttcgagaacttcggcttccagatggtggtggccacgccgttgaagtcggtgatgaccttggagcccttcatcggtggtgcgtgctttgtcgaaatcagcggccgtcataactctggcgtgttgctgatcgaatacgacgagcaggcacagcgattgaagctgccggagcgctcgcgcggcgatgagccggcagttgccgatgccactgacgctgcgccgtcgatcgaggctgcggccgagtcagcacgagtgcagggcgctgcaagcgcagatggcatggcaaccaacggcgtcccaatgcacacggcatcgcctgtgacggaggagaccccgcccgcagcgcaggaaacgcagactggtcagcgcaagccggcagtcgcgacgacgagcaagcagaacaagaccgccaagaccgcatcttccacgcgtgctgcggcacagcctcaagcaaaacgcccgaagaaatcgccttcgcgcactcctgctctggctggcaagccggcatcggacaaacgcccagcgggcgtgccggcggtgtcgtcaggagtcgcatccaggtccaacgtgggcaagaccactcggtcttcaaaaacgccgggcaagccgattgcggccacaagcgcatccaacgccacatccaggaaggtcgccgccgcatctgcggcattgaaaactgccgcagccaagccacgtgcaacagccgcatcgactggtcagccagcgcgcggcgccggcaagacaacctcgacgcgtgcggtggctaaaccgtcaccggccacaacgcgcggcgcaaaggcaggcgccccgcaggcgcgccgcaaacgctga

SEQ ID NO: 44727 - DNA, 1413 bp, Mycobacterium neoaurum
atgcgtgagttactcgatgccaatcgcgaggtgcaggcgtcccgcgcgctgcgcctgctggccacgtcgaatctcgcggtctacgccacgctgatggaacgccatctcttcgacggactggtcggcgaaaccgagcttgtcgtccgcctcgagcgcgatctggagaccttgcacgaggtgggcgaacagtccggcctcgccctgatcaagtcgtgggccagccagggctggctgcaccgggtcgccagccaacacgcgggtgtcgagcgcaacgtctgttatctgacccaggatgcccgccgggcgctggacttcgtgcgcggcgtgcgccgcaacgacaccatcgccaccggtgggtccatccacgggatcgccgcccggctcaagcaggtcgccacccgcgccggcgatgatcccgatcggatccgggccggtatcgaggccgagatcgccgccctgcacgccgagctcgacgaactcgacgcgggaacccgcccggagcccgataccgtcgccatgtacgacgaggcccgcgcgattgccatgcagatggaacggctgatcaccgatatcggcctgtacggcaacatgatcgagcaggccaccgccgcgctcgacgacccgatcgacaccaacctcgaataccgcgaccggcagcgtcagatgtacgccgactatcaagccgcctgggattccgcgggccgcgactcgcaccgcgcgttcctgcacatgatcaacgatccgcagcagcgcgccgagttcgaggccgatatcgccaccgtggcatcgcaactgcccgagctcgacccggccctgcgcaaggtgatggccaacttcttcgaactcgtcggccaccagatcgacgaggtggaacgcatccagcagcgctgcgctcagcgggtcaagcggttcaccgccttcggcacccttgagcagagccgtggcgtggcccgccagctcaacgaggccatcggtgccgcgcgcacgctgctcaaggagtcgctgaccgactcccgcctggacatcgaggtgccgctggcccggcatgcgatcagttcgatcggcgcgctgagcttccgtatcaacgacctgtcctcgccgaagccggccgagatcgcccagggcgaagtcgacctgaccacgttctcctcgctcaccacccaggtggacgcacccgcactgaccaaaatgctcaattccgctctgccggtgtcccttccggacgcgtgcgcgatgctcgacgcgccctacctcggtcatgtcatcgtgctgtggtcctgggcgctcaaacaaccggcccccgcggtcaccgagtcggtgaccgtgcgcttccactcgctggacgggcatgaccgcgagatggaggtcccgcacctgatgttcaccgaacccgtcaccgaggttgcttcatga

SEQ ID NO: 44728 - DNA, 672 bp, Mycobacterium neoaurum
atgaccgacgccacgacctccactccagaagtcgatttcgcctccctgcccgaggtcgaccgctccggccgcagtaccggcacacgcaagccacggttcgacggtgatgtcagcgcgttgcccgatcgcgcctgctgggcgctgcagcatctgctgacccggcgctacgtcagcggcgaggccgatccggacatctacagctggatcctggagtaccgcaacgatctggccgtccggctctccgaactggatctgcaactgcagatctctgcgcaggtcgacatcgcctacatcgaacaggctcgctatgaaccgacaaggggcgcaaagcttctgcgccgcgagccgctgggcacctacgactccatcctggcgctgcacctggcgcagatgatgcgcgccggcggcgatgtcagctttctgatcacccgtgacgaggtgcacggcctgttcgccggggtactcaatgacaccgaccgcgacaccgtcacgttcaccgcgcgcatcgatgccgcgatcgcccggctggccggactggacatcctgcgccgcacccgcgatgacgaggattcctacaccgtcagccccgtcatcaccgcgatcatgacggcctcggtgatcaccgagctgcagcagcagttcgagcaattgttgaaaggcggtgccgaatga
